United States Patent Application Publication US 2022/0175960 A1 - sequence listing, part 2

SEQ ID NO: 33314 - DNA, 26 bp, Homo sapiens
tttattaaacatccaagcccgggttc

SEQ ID NO: 33315 - DNA, 26 bp, Homo sapiens
ttattaaacatccaagcccgggttcg

SEQ ID NO: 33316 - DNA, 26 bp, Homo sapiens
tattaaacatccaagcccgggttcgg

SEQ ID NO: 33317 - DNA, 26 bp, Homo sapiens
attaaacatccaagcccgggttcgga

SEQ ID NO: 33318 - DNA, 26 bp, Homo sapiens
ttaaacatccaagcccgggttcggat

SEQ ID NO: 33319 - DNA, 26 bp, Homo sapiens
taaacatccaagcccgggttcggatg

SEQ ID NO: 33320 - DNA, 26 bp, Homo sapiens
aaacatccaagcccgggttcggatgg

SEQ ID NO: 33321 - DNA, 26 bp, Homo sapiens
aacatccaagcccgggttcggatgga

SEQ ID NO: 33322 - DNA, 26 bp, Homo sapiens
acatccaagcccgggttcggatggaa

SEQ ID NO: 33323 - DNA, 26 bp, Homo sapiens
catccaagcccgggttcggatggaag

SEQ ID NO: 33324 - DNA, 26 bp, Homo sapiens
atccaagcccgggttcggatggaagg

SEQ ID NO: 33325 - DNA, 26 bp, Homo sapiens
tccaagcccgggttcggatggaaggg

SEQ ID NO: 33326 - DNA, 26 bp, Homo sapiens
ccaagcccgggttcggatggaaggga

SEQ ID NO: 33327 - DNA, 26 bp, Homo sapiens
caagcccgggttcggatggaagggac

SEQ ID NO: 33328 - DNA, 26 bp, Homo sapiens
aagcccgggttcggatggaagggacg

SEQ ID NO: 33329 - DNA, 26 bp, Homo sapiens
agcccgggttcggatggaagggacga

SEQ ID NO: 33330 - DNA, 26 bp, Homo sapiens
gcccgggttcggatggaagggacgag

SEQ ID NO: 33331 - DNA, 26 bp, Homo sapiens
cccgggttcggatggaagggacgagg

SEQ ID NO: 33332 - DNA, 26 bp, Homo sapiens
ccgggttcggatggaagggacgaggg

SEQ ID NO: 33333 - DNA, 26 bp, Homo sapiens
cgggttcggatggaagggacgagggg

SEQ ID NO: 33334 - DNA, 26 bp, Homo sapiens
gggttcggatggaagggacgaggggc

SEQ ID NO: 33335 - DNA, 26 bp, Homo sapiens
ggttcggatggaagggacgaggggcg

SEQ ID NO: 33336 - DNA, 26 bp, Homo sapiens
gttcggatggaagggacgaggggcgc

SEQ ID NO: 33337 - DNA, 26 bp, Homo sapiens
ttcggatggaagggacgaggggcgca

SEQ ID NO: 33338 - DNA, 26 bp, Homo sapiens
tcggatggaagggacgaggggcgcac

SEQ ID NO: 33339 - DNA, 26 bp, Homo sapiens
cggatggaagggacgaggggcgcaca

SEQ ID NO: 33340 - DNA, 26 bp, Homo sapiens
ggatggaagggacgaggggcgcacac

SEQ ID NO: 33341 - DNA, 26 bp, Homo sapiens
gatggaagggacgaggggcgcacacg

SEQ ID NO: 33342 - DNA, 26 bp, Homo sapiens
atggaagggacgaggggcgcacacgc

SEQ ID NO: 33343 - DNA, 26 bp, Homo sapiens
tggaagggacgaggggcgcacacgcg

SEQ ID NO: 33344 - DNA, 26 bp, Homo sapiens
ggaagggacgaggggcgcacacgcgc

SEQ ID NO: 33345 - DNA, 26 bp, Homo sapiens
gaagggacgaggggcgcacacgcgcc

SEQ ID NO: 33346 - DNA, 26 bp, Homo sapiens
aagggacgaggggcgcacacgcgcca

SEQ ID NO: 33347 - DNA, 26 bp, Homo sapiens
agggacgaggggcgcacacgcgccac

SEQ ID NO: 33348 - DNA, 26 bp, Homo sapiens
gggacgaggggcgcacacgcgccaca

SEQ ID NO: 33349 - DNA, 26 bp, Homo sapiens
ggacgaggggcgcacacgcgccacag

SEQ ID NO: 33350 - DNA, 26 bp, Homo sapiens
gacgaggggcgcacacgcgccacagg

SEQ ID NO: 33351 - DNA, 26 bp, Homo sapiens
acgaggggcgcacacgcgccacaggc

SEQ ID NO: 33352 - DNA, 26 bp, Homo sapiens
cgaggggcgcacacgcgccacaggca

SEQ ID NO: 33353 - DNA, 26 bp, Homo sapiens
gaggggcgcacacgcgccacaggcac

SEQ ID NO: 33354 - DNA, 26 bp, Homo sapiens
aggggcgcacacgcgccacaggcaca

SEQ ID NO: 33355 - DNA, 26 bp, Homo sapiens
ggggcgcacacgcgccacaggcacac

SEQ ID NO: 33356 - DNA, 26 bp, Homo sapiens
gggcgcacacgcgccacaggcacact

SEQ ID NO: 33357 - DNA, 26 bp, Homo sapiens
ggcgcacacgcgccacaggcacactc

SEQ ID NO: 33358 - DNA, 26 bp, Homo sapiens
gcgcacacgcgccacaggcacactcg

SEQ ID NO: 33359 - DNA, 26 bp, Homo sapiens
cgcacacgcgccacaggcacactcgc

SEQ ID NO: 33360 - DNA, 26 bp, Homo sapiens
gcacacgcgccacaggcacactcgcg

SEQ ID NO: 33361 - DNA, 26 bp, Homo sapiens
cacacgcgccacaggcacactcgcgc

SEQ ID NO: 33362 - DNA, 26 bp, Homo sapiens
acacgcgccacaggcacactcgcgcg

SEQ ID NO: 33363 - DNA, 26 bp, Homo sapiens
cacgcgccacaggcacactcgcgcgt

SEQ ID NO: 33364 - DNA, 26 bp, Homo sapiens
acgcgccacaggcacactcgcgcgta

SEQ ID NO: 33365 - DNA, 26 bp, Homo sapiens
cgcgccacaggcacactcgcgcgtaa

SEQ ID NO: 33366 - DNA, 26 bp, Homo sapiens
gcgccacaggcacactcgcgcgtaaa

SEQ ID NO: 33367 - DNA, 26 bp, Homo sapiens
cgccacaggcacactcgcgcgtaaag

SEQ ID NO: 33368 - DNA, 26 bp, Homo sapiens
gccacaggcacactcgcgcgtaaaga

SEQ ID NO: 33369 - DNA, 26 bp, Homo sapiens
ccacaggcacactcgcgcgtaaagat

SEQ ID NO: 33370 - DNA, 26 bp, Homo sapiens
cacaggcacactcgcgcgtaaagata

SEQ ID NO: 33371 - DNA, 26 bp, Homo sapiens
acaggcacactcgcgcgtaaagataa

SEQ ID NO: 33372 - DNA, 26 bp, Homo sapiens
caggcacactcgcgcgtaaagataag

SEQ ID NO: 33373 - DNA, 26 bp, Homo sapiens
aggcacactcgcgcgtaaagataagg

SEQ ID NO: 33374 - DNA, 26 bp, Homo sapiens
ggcacactcgcgcgtaaagataagga

SEQ ID NO: 33375 - DNA, 26 bp, Homo sapiens
gcacactcgcgcgtaaagataaggaa

SEQ ID NO: 33376 - DNA, 26 bp, Homo sapiens
cacactcgcgcgtaaagataaggaaa

SEQ ID NO: 33377 - DNA, 26 bp, Homo sapiens
acactcgcgcgtaaagataaggaaaa

SEQ ID NO: 33378 - DNA, 26 bp, Homo sapiens
cactcgcgcgtaaagataaggaaaaa

SEQ ID NO: 33379 - DNA, 26 bp, Homo sapiens
actcgcgcgtaaagataaggaaaaaa

SEQ ID NO: 33380 - DNA, 26 bp, Homo sapiens
ctcgcgcgtaaagataaggaaaaaaa

SEQ ID NO: 33381 - DNA, 26 bp, Homo sapiens
tcgcgcgtaaagataaggaaaaaaaa

SEQ ID NO: 33382 - DNA, 26 bp, Homo sapiens
cgcgcgtaaagataaggaaaaaaaaa

SEQ ID NO: 33383 - DNA, 26 bp, Homo sapiens
gcgcgtaaagataaggaaaaaaaaaa

SEQ ID NO: 33384 - DNA, 26 bp, Homo sapiens
cgcgtaaagataaggaaaaaaaaaag

SEQ ID NO: 33385 - DNA, 26 bp, Homo sapiens
gcgtaaagataaggaaaaaaaaaagg

SEQ ID NO: 33386 - DNA, 26 bp, Homo sapiens
cgtaaagataaggaaaaaaaaaaggc

SEQ ID NO: 33387 - DNA, 26 bp, Homo sapiens
gtaaagataaggaaaaaaaaaaggca

SEQ ID NO: 33388 - DNA, 26 bp, Homo sapiens
taaagataaggaaaaaaaaaaggcaa

SEQ ID NO: 33389 - DNA, 26 bp, Homo sapiens
aaagataaggaaaaaaaaaaggcaat

SEQ ID NO: 33390 - DNA, 26 bp, Homo sapiens
aagataaggaaaaaaaaaaggcaatc

SEQ ID NO: 33391 - DNA, 26 bp, Homo sapiens
agataaggaaaaaaaaaaggcaatcc

SEQ ID NO: 33392 - DNA, 26 bp, Homo sapiens
gataaggaaaaaaaaaaggcaatcct

SEQ ID NO: 33393 - DNA, 26 bp, Homo sapiens
ataaggaaaaaaaaaaggcaatcctg

SEQ ID NO: 33394 - DNA, 26 bp, Homo sapiens
taaggaaaaaaaaaaggcaatcctgg

SEQ ID NO: 33395 - DNA, 26 bp, Homo sapiens
aaggaaaaaaaaaaggcaatcctggg

SEQ ID NO: 33396 - DNA, 26 bp, Homo sapiens
aggaaaaaaaaaaggcaatcctggga

SEQ ID NO: 33397 - DNA, 26 bp, Homo sapiens
ggaaaaaaaaaaggcaatcctgggaa

SEQ ID NO: 33398 - DNA, 26 bp, Homo sapiens
gaaaaaaaaaaggcaatcctgggaag

SEQ ID NO: 33399 - DNA, 26 bp, Homo sapiens
aaaaaaaaaaggcaatcctgggaagg

SEQ ID NO: 33400 - DNA, 26 bp, Homo sapiens
aaaaaaaaaggcaatcctgggaaggt

SEQ ID NO: 33401 - DNA, 26 bp, Homo sapiens
aaaaaaaaggcaatcctgggaaggta

SEQ ID NO: 33402 - DNA, 26 bp, Homo sapiens
aaaaaaaggcaatcctgggaaggtag

SEQ ID NO: 33403 - DNA, 26 bp, Homo sapiens
aaaaaaggcaatcctgggaaggtagt

SEQ ID NO: 33404 - DNA, 26 bp, Homo sapiens
aaaaaggcaatcctgggaaggtagtg

SEQ ID NO: 33405 - DNA, 26 bp, Homo sapiens
aaaaggcaatcctgggaaggtagtgg

SEQ ID NO: 33406 - DNA, 26 bp, Homo sapiens
aaaggcaatcctgggaaggtagtggg

SEQ ID NO: 33407 - DNA, 26 bp, Homo sapiens
aaggcaatcctgggaaggtagtgggt

SEQ ID NO: 33408 - DNA, 26 bp, Homo sapiens
aggcaatcctgggaaggtagtgggtt

SEQ ID NO: 33409 - DNA, 26 bp, Homo sapiens
ggcaatcctgggaaggtagtgggttt

SEQ ID NO: 33410 - DNA, 26 bp, Homo sapiens
gcaatcctgggaaggtagtgggtttc

SEQ ID NO: 33411 - DNA, 26 bp, Homo sapiens
caatcctgggaaggtagtgggtttct

SEQ ID NO: 33412 - DNA, 26 bp, Homo sapiens
aatcctgggaaggtagtgggtttctt

SEQ ID NO: 33413 - DNA, 26 bp, Homo sapiens
atcctgggaaggtagtgggtttcttc

SEQ ID NO: 33414 - DNA, 26 bp, Homo sapiens
tcctgggaaggtagtgggtttcttct

SEQ ID NO: 33415 - DNA, 26 bp, Homo sapiens
cctgggaaggtagtgggtttcttctt

SEQ ID NO: 33416 - DNA, 26 bp, Homo sapiens
ctgggaaggtagtgggtttcttcttt

SEQ ID NO: 33417 - DNA, 26 bp, Homo sapiens
tgggaaggtagtgggtttcttctttt

SEQ ID NO: 33418 - DNA, 26 bp, Homo sapiens
gggaaggtagtgggtttcttcttttt

SEQ ID NO: 33419 - DNA, 26 bp, Homo sapiens
ggaaggtagtgggtttcttctttttc

SEQ ID NO: 33420 - DNA, 26 bp, Homo sapiens
gaaggtagtgggtttcttctttttct

SEQ ID NO: 33421 - DNA, 26 bp, Homo sapiens
aaggtagtgggtttcttctttttctt

SEQ ID NO: 33422 - DNA, 26 bp, Homo sapiens
aggtagtgggtttcttctttttcttc

SEQ ID NO: 33423 - DNA, 26 bp, Homo sapiens
ggtagtgggtttcttctttttcttct

SEQ ID NO: 33424 - DNA, 26 bp, Homo sapiens
gtagtgggtttcttctttttcttctt

SEQ ID NO: 33425 - DNA, 26 bp, Homo sapiens
tagtgggtttcttctttttcttcttc

SEQ ID NO: 33426 - DNA, 26 bp, Homo sapiens
agtgggtttcttctttttcttcttct

SEQ ID NO: 33427 - DNA, 26 bp, Homo sapiens
gtgggtttcttctttttcttcttctt

SEQ ID NO: 33428 - DNA, 26 bp, Homo sapiens
tgggtttcttctttttcttcttcttc

SEQ ID NO: 33429 - DNA, 26 bp, Homo sapiens
gggtttcttctttttcttcttcttcc

SEQ ID NO: 33430 - DNA, 26 bp, Homo sapiens
ggtttcttctttttcttcttcttcct

SEQ ID NO: 33431 - DNA, 26 bp, Homo sapiens
gtttcttctttttcttcttcttcctt

SEQ ID NO: 33432 - DNA, 26 bp, Homo sapiens
tttcttctttttcttcttcttccttc

SEQ ID NO: 33433 - DNA, 26 bp, Homo sapiens
ttcttctttttcttcttcttccttct

SEQ ID NO: 33434 - DNA, 26 bp, Homo sapiens
tcttctttttcttcttcttccttctc

SEQ ID NO: 33435 - DNA, 26 bp, Homo sapiens
cttctttttcttcttcttccttctcc

SEQ ID NO: 33436 - DNA, 26 bp, Homo sapiens
ttctttttcttcttcttccttctcct

SEQ ID NO: 33437 - DNA, 26 bp, Homo sapiens
tctttttcttcttcttccttctcctc

SEQ ID NO: 33438 - DNA, 26 bp, Homo sapiens
ctttttcttcttcttccttctcctct

SEQ ID NO: 33439 - DNA, 26 bp, Homo sapiens
tttttcttcttcttccttctcctctt

SEQ ID NO: 33440 - DNA, 26 bp, Homo sapiens
ttttcttcttcttccttctcctcttt

SEQ ID NO: 33441 - DNA, 26 bp, Homo sapiens
tttcttcttcttccttctcctctttc

SEQ ID NO: 33442 - DNA, 26 bp, Homo sapiens
ttcttcttcttccttctcctctttcc

SEQ ID NO: 33443 - DNA, 26 bp, Homo sapiens
tcttcttcttccttctcctctttccc

SEQ ID NO: 33444 - DNA, 26 bp, Homo sapiens
cttcttcttccttctcctctttccct

SEQ ID NO: 33445 - DNA, 26 bp, Homo sapiens
ttcttcttccttctcctctttccctc

SEQ ID NO: 33446 - DNA, 26 bp, Homo sapiens
tcttcttccttctcctctttccctcc

SEQ ID NO: 33447 - DNA, 26 bp, Homo sapiens
cttcttccttctcctctttccctcct

SEQ ID NO: 33448 - DNA, 26 bp, Homo sapiens
ttcttccttctcctctttccctcctc

SEQ ID NO: 33449 - DNA, 26 bp, Homo sapiens
tcttccttctcctctttccctcctcc

SEQ ID NO: 33450 - DNA, 26 bp, Homo sapiens
cttccttctcctctttccctcctcct

SEQ ID NO: 33451 - DNA, 26 bp, Homo sapiens
ttccttctcctctttccctcctcctc

SEQ ID NO: 33452 - DNA, 26 bp, Homo sapiens
tccttctcctctttccctcctcctcc

SEQ ID NO: 33453 - DNA, 26 bp, Homo sapiens
ccttctcctctttccctcctcctcct

SEQ ID NO: 33454 - DNA, 26 bp, Homo sapiens
cttctcctctttccctcctcctcctc

SEQ ID NO: 33455 - DNA, 26 bp, Homo sapiens
ttctcctctttccctcctcctcctcc

SEQ ID NO: 33456 - DNA, 26 bp, Homo sapiens
tctcctctttccctcctcctcctcct

SEQ ID NO: 33457 - DNA, 26 bp, Homo sapiens
ctcctctttccctcctcctcctcctc

SEQ ID NO: 33458 - DNA, 26 bp, Homo sapiens
tcctctttccctcctcctcctcctcc

SEQ ID NO: 33459 - DNA, 26 bp, Homo sapiens
cctctttccctcctcctcctcctcct

SEQ ID NO: 33460 - DNA, 26 bp, Homo sapiens
ctctttccctcctcctcctcctcctc

SEQ ID NO: 33461 - DNA, 26 bp, Homo sapiens
tctttccctcctcctcctcctcctcc

SEQ ID NO: 33462 - DNA, 26 bp, Homo sapiens
ctttccctcctcctcctcctcctcca

SEQ ID NO: 33463 - DNA, 26 bp, Homo sapiens
tttccctcctcctcctcctcctccac

SEQ ID NO: 33464 - DNA, 26 bp, Homo sapiens
ttccctcctcctcctcctcctccacc

SEQ ID NO: 33465 - DNA, 26 bp, Homo sapiens
tccctcctcctcctcctcctccacct

SEQ ID NO: 33466 - DNA, 26 bp, Homo sapiens
ccctcctcctcctcctcctccacctc

SEQ ID NO: 33467 - DNA, 26 bp, Homo sapiens
cctcctcctcctcctcctccacctcc

SEQ ID NO: 33468 - DNA, 26 bp, Homo sapiens
ctcctcctcctcctcctccacctcct

SEQ ID NO: 33469 - DNA, 26 bp, Homo sapiens
tcctcctcctcctcctccacctcctc

SEQ ID NO: 33470 - DNA, 26 bp, Homo sapiens
cctcctcctcctcctccacctcctcc

SEQ ID NO: 33471 - DNA, 26 bp, Homo sapiens
ctcctcctcctcctccacctcctcct

SEQ ID NO: 33472 - DNA, 26 bp, Homo sapiens
tcctcctcctcctccacctcctcctc

SEQ ID NO: 33473 - DNA, 26 bp, Homo sapiens
cctcctcctcctccacctcctcctcc

SEQ ID NO: 33474 - DNA, 26 bp, Homo sapiens
ctcctcctcctccacctcctcctcca

SEQ ID NO: 33475 - DNA, 26 bp, Homo sapiens
tcctcctcctccacctcctcctccac

SEQ ID NO: 33476 - DNA, 26 bp, Homo sapiens
cctcctcctccacctcctcctccacc

SEQ ID NO: 33477 - DNA, 26 bp, Homo sapiens
ctcctcctccacctcctcctccacct

SEQ ID NO: 33478 - DNA, 26 bp, Homo sapiens
tcctcctccacctcctcctccacctc

SEQ ID NO: 33479 - DNA, 26 bp, Homo sapiens
cctcctccacctcctcctccacctcc

SEQ ID NO: 33480 - DNA, 26 bp, Homo sapiens
ctcctccacctcctcctccacctcct

SEQ ID NO: 33481 - DNA, 26 bp, Homo sapiens
tcctccacctcctcctccacctcctc

SEQ ID NO: 33482 - DNA, 26 bp, Homo sapiens
cctccacctcctcctccacctcctcc

SEQ ID NO: 33483 - DNA, 26 bp, Homo sapiens
ctccacctcctcctccacctcctcct

SEQ ID NO: 33484 - DNA, 26 bp, Homo sapiens
tccacctcctcctccacctcctcctt

SEQ ID NO: 33485 - DNA, 26 bp, Homo sapiens
ccacctcctcctccacctcctccttc

SEQ ID NO: 33486 - DNA, 26 bp, Homo sapiens
cacctcctcctccacctcctccttct

SEQ ID NO: 33487 - DNA, 26 bp, Homo sapiens
acctcctcctccacctcctccttctt

SEQ ID NO: 33488 - DNA, 26 bp, Homo sapiens
cctcctcctccacctcctccttcttt

SEQ ID NO: 33489 - DNA, 26 bp, Homo sapiens
ctcctcctccacctcctccttctttt

SEQ ID NO: 33490 - DNA, 26 bp, Homo sapiens
tcctcctccacctcctccttcttttc

SEQ ID NO: 33491 - DNA, 26 bp, Homo sapiens
cctcctccacctcctccttcttttct

SEQ ID NO: 33492 - DNA, 26 bp, Homo sapiens
ctcctccacctcctccttcttttctt

SEQ ID NO: 33493 - DNA, 26 bp, Homo sapiens
tcctccacctcctccttcttttcttc

SEQ ID NO: 33494 - DNA, 26 bp, Homo sapiens
cctccacctcctccttcttttcttcc

SEQ ID NO: 33495 - DNA, 26 bp, Homo sapiens
ctccacctcctccttcttttcttcct

SEQ ID NO: 33496 - DNA, 26 bp, Homo sapiens
tccacctcctccttcttttcttcctc

SEQ ID NO: 33497 - DNA, 26 bp, Homo sapiens
ccacctcctccttcttttcttcctcc

SEQ ID NO: 33498 - DNA, 26 bp, Homo sapiens
cacctcctccttcttttcttcctcct

SEQ ID NO: 33499 - DNA, 26 bp, Homo sapiens
acctcctccttcttttcttcctcctc

SEQ ID NO: 33500 - DNA, 26 bp, Homo sapiens
cctcctccttcttttcttcctcctcc

SEQ ID NO: 33501 - DNA, 26 bp, Homo sapiens
ctcctccttcttttcttcctcctcct

SEQ ID NO: 33502 - DNA, 26 bp, Homo sapiens
tcctccttcttttcttcctcctcctc

SEQ ID NO: 33503 - DNA, 26 bp, Homo sapiens
cctccttcttttcttcctcctcctcc

SEQ ID NO: 33504 - DNA, 26 bp, Homo sapiens
ctccttcttttcttcctcctcctcct

SEQ ID NO: 33505 - DNA, 26 bp, Homo sapiens
tccttcttttcttcctcctcctcctc

SEQ ID NO: 33506 - DNA, 26 bp, Homo sapiens
ccttcttttcttcctcctcctcctcc

SEQ ID NO: 33507 - DNA, 26 bp, Homo sapiens
cttcttttcttcctcctcctcctcct

SEQ ID NO: 33508 - DNA, 26 bp, Homo sapiens
ttcttttcttcctcctcctcctcctc

SEQ ID NO: 33509 - DNA, 26 bp, Homo sapiens
tcttttcttcctcctcctcctcctcc

SEQ ID NO: 33510 - DNA, 26 bp, Homo sapiens
cttttcttcctcctcctcctcctcct

SEQ ID NO: 33511 - DNA, 26 bp, Homo sapiens
ttttcttcctcctcctcctcctcctc

SEQ ID NO: 33512 - DNA, 26 bp, Homo sapiens
tttcttcctcctcctcctcctcctcc

SEQ ID NO: 33513 - DNA, 26 bp, Homo sapiens
ttcttcctcctcctcctcctcctcct

SEQ ID NO: 33514 - DNA, 26 bp, Homo sapiens
tcttcctcctcctcctcctcctcctc

SEQ ID NO: 33515 - DNA, 26 bp, Homo sapiens
cttcctcctcctcctcctcctcctcg

SEQ ID NO: 33516 - DNA, 26 bp, Homo sapiens
ttcctcctcctcctcctcctcctcgc

SEQ ID NO: 33517 - DNA, 26 bp, Homo sapiens
tcctcctcctcctcctcctcctcgcc

SEQ ID NO: 33518 - DNA, 26 bp, Homo sapiens
cctcctcctcctcctcctcctcgccg

SEQ ID NO: 33519 - DNA, 26 bp, Homo sapiens
ctcctcctcctcctcctcctcgccga

SEQ ID NO: 33520 - DNA, 26 bp, Homo sapiens
tcctcctcctcctcctcctcgccgat

SEQ ID NO: 33521 - DNA, 26 bp, Homo sapiens
cctcctcctcctcctcctcgccgatc

SEQ ID NO: 33522 - DNA, 26 bp, Homo sapiens
ctcctcctcctcctcctcgccgatct

SEQ ID NO: 33523 - DNA, 26 bp, Homo sapiens
tcctcctcctcctcctcgccgatctc

SEQ ID NO: 33524 - DNA, 26 bp, Homo sapiens
cctcctcctcctcctcgccgatctct

SEQ ID NO: 33525 - DNA, 26 bp, Homo sapiens
ctcctcctcctcctcgccgatctcta

SEQ ID NO: 33526 - DNA, 26 bp, Homo sapiens
tcctcctcctcctcgccgatctctat

SEQ ID NO: 33527 - DNA, 26 bp, Homo sapiens
cctcctcctcctcgccgatctctatg

SEQ ID NO: 33528 - DNA, 26 bp, Homo sapiens
ctcctcctcctcgccgatctctatgg

SEQ ID NO: 33529 - DNA, 26 bp, Homo sapiens
tcctcctcctcgccgatctctatggc

SEQ ID NO: 33530 - DNA, 26 bp, Homo sapiens
cctcctcctcgccgatctctatggcg

SEQ ID NO: 33531 - DNA, 26 bp, Homo sapiens
ctcctcctcgccgatctctatggcgg

SEQ ID NO: 33532 - DNA, 26 bp, Homo sapiens
tcctcctcgccgatctctatggcgga

SEQ ID NO: 33533 - DNA, 26 bp, Homo sapiens
cctcctcgccgatctctatggcggat

SEQ ID NO: 33534 - DNA, 26 bp, Homo sapiens
ctcctcgccgatctctatggcggatt

SEQ ID NO: 33535 - DNA, 26 bp, Homo sapiens
tcctcgccgatctctatggcggattc

SEQ ID NO: 33536 - DNA, 26 bp, Homo sapiens
cctcgccgatctctatggcggattcg

SEQ ID NO: 33537 - DNA, 26 bp, Homo sapiens
ctcgccgatctctatggcggattcgt

SEQ ID NO: 33538 - DNA, 26 bp, Homo sapiens
tcgccgatctctatggcggattcgtg

SEQ ID NO: 33539 - DNA, 26 bp, Homo sapiens
cgccgatctctatggcggattcgtgc

SEQ ID NO: 33540 - DNA, 26 bp, Homo sapiens
gccgatctctatggcggattcgtgcc

SEQ ID NO: 33541 - DNA, 26 bp, Homo sapiens
ccgatctctatggcggattcgtgccg

SEQ ID NO: 33542 - DNA, 26 bp, Homo sapiens
cgatctctatggcggattcgtgccgg

SEQ ID NO: 33543 - DNA, 26 bp, Homo sapiens
gatctctatggcggattcgtgccggg

SEQ ID NO: 33544 - DNA, 26 bp, Homo sapiens
atctctatggcggattcgtgccgggg

SEQ ID NO: 33545 - DNA, 26 bp, Homo sapiens
tctctatggcggattcgtgccggggg

SEQ ID NO: 33546 - DNA, 26 bp, Homo sapiens
ctctatggcggattcgtgccgggggg

SEQ ID NO: 33547 - DNA, 26 bp, Homo sapiens
tctatggcggattcgtgccgggggga

SEQ ID NO: 33548 - DNA, 26 bp, Homo sapiens
ctatggcggattcgtgccggggggag

SEQ ID NO: 33549 - DNA, 26 bp, Homo sapiens
tatggcggattcgtgccggggggaga

SEQ ID NO: 33550 - DNA, 26 bp, Homo sapiens
atggcggattcgtgccggggggagag

SEQ ID NO: 33551 - DNA, 26 bp, Homo sapiens
tggcggattcgtgccggggggagagc

SEQ ID NO: 33552 - DNA, 26 bp, Homo sapiens
ggcggattcgtgccggggggagagcg

SEQ ID NO: 33553 - DNA, 26 bp, Homo sapiens
gcggattcgtgccggggggagagcga

SEQ ID NO: 33554 - DNA, 26 bp, Homo sapiens
cggattcgtgccggggggagagcgat

SEQ ID NO: 33555 - DNA, 26 bp, Homo sapiens
ggattcgtgccggggggagagcgatc

SEQ ID NO: 33556 - DNA, 26 bp, Homo sapiens
gattcgtgccggggggagagcgatca

SEQ ID NO: 33557 - DNA, 26 bp, Homo sapiens
attcgtgccggggggagagcgatcac

SEQ ID NO: 33558 - DNA, 26 bp, Homo sapiens
ttcgtgccggggggagagcgatcact

SEQ ID NO: 33559 - DNA, 26 bp, Homo sapiens
tcgtgccggggggagagcgatcactc

SEQ ID NO: 33560 - DNA, 26 bp, Homo sapiens
cgtgccggggggagagcgatcactca

SEQ ID NO: 33561 - DNA, 26 bp, Homo sapiens
gtgccggggggagagcgatcactcac

SEQ ID NO: 33562 - DNA, 26 bp, Homo sapiens
tgccggggggagagcgatcactcact

SEQ ID NO: 33563 - DNA, 26 bp, Homo sapiens
gccggggggagagcgatcactcactg

SEQ ID NO: 33564 - DNA, 26 bp, Homo sapiens
ccggggggagagcgatcactcactgt

SEQ ID NO: 33565 - DNA, 26 bp, Homo sapiens
cggggggagagcgatcactcactgta

SEQ ID NO: 33566 - DNA, 26 bp, Homo sapiens
ggggggagagcgatcactcactgtag

SEQ ID NO: 33567 - DNA, 26 bp, Homo sapiens
gggggagagcgatcactcactgtagg

SEQ ID NO: 33568 - DNA, 26 bp, Homo sapiens
ggggagagcgatcactcactgtaggt

SEQ ID NO: 33569 - DNA, 26 bp, Homo sapiens
gggagagcgatcactcactgtaggtt

SEQ ID NO: 33570 - DNA, 26 bp, Homo sapiens
ggagagcgatcactcactgtaggttt

SEQ ID NO: 33571 - DNA, 26 bp, Homo sapiens
gagagcgatcactcactgtaggtttg

SEQ ID NO: 33572 - DNA, 26 bp, Homo sapiens
agagcgatcactcactgtaggtttgt

SEQ ID NO: 33573 - DNA, 26 bp, Homo sapiens
gagcgatcactcactgtaggtttgtg

SEQ ID NO: 33574 - DNA, 26 bp, Homo sapiens
agcgatcactcactgtaggtttgtgg

SEQ ID NO: 33575 - DNA, 26 bp, Homo sapiens
gcgatcactcactgtaggtttgtggc

SEQ ID NO: 33576 - DNA, 26 bp, Homo sapiens
cgatcactcactgtaggtttgtggct

SEQ ID NO: 33577 - DNA, 26 bp, Homo sapiens
gatcactcactgtaggtttgtggctg

SEQ ID NO: 33578 - DNA, 26 bp, Homo sapiens
atcactcactgtaggtttgtggctgc

SEQ ID NO: 33579 - DNA, 26 bp, Homo sapiens
tcactcactgtaggtttgtggctgct

SEQ ID NO: 33580 - DNA, 26 bp, Homo sapiens
cactcactgtaggtttgtggctgctg

SEQ ID NO: 33581 - DNA, 26 bp, Homo sapiens
actcactgtaggtttgtggctgctgt

SEQ ID NO: 33582 - DNA, 26 bp, Homo sapiens
ctcactgtaggtttgtggctgctgtc

SEQ ID NO: 33583 - DNA, 26 bp, Homo sapiens
tcactgtaggtttgtggctgctgtca

SEQ ID NO: 33584 - DNA, 26 bp, Homo sapiens
cactgtaggtttgtggctgctgtcag

SEQ ID NO: 33585 - DNA, 26 bp, Homo sapiens
actgtaggtttgtggctgctgtcaga

SEQ ID NO: 33586 - DNA, 26 bp, Homo sapiens
ctgtaggtttgtggctgctgtcagat

SEQ ID NO: 33587 - DNA, 26 bp, Homo sapiens
tgtaggtttgtggctgctgtcagatc

SEQ ID NO: 33588 - DNA, 26 bp, Homo sapiens
gtaggtttgtggctgctgtcagatcc

SEQ ID NO: 33589 - DNA, 26 bp, Homo sapiens
taggtttgtggctgctgtcagatccc

SEQ ID NO: 33590 - DNA, 26 bp, Homo sapiens
aggtttgtggctgctgtcagatcccc

SEQ ID NO: 33591 - DNA, 26 bp, Homo sapiens
ggtttgtggctgctgtcagatccccg

SEQ ID NO: 33592 - DNA, 26 bp, Homo sapiens
gtttgtggctgctgtcagatccccgt

SEQ ID NO: 33593 - DNA, 26 bp, Homo sapiens
tttgtggctgctgtcagatccccgtc

SEQ ID NO: 33594 - DNA, 26 bp, Homo sapiens
ttgtggctgctgtcagatccccgtct

SEQ ID NO: 33595 - DNA, 26 bp, Homo sapiens
tgtggctgctgtcagatccccgtctg

SEQ ID NO: 33596 - DNA, 26 bp, Homo sapiens
gtggctgctgtcagatccccgtctgt

SEQ ID NO: 33597 - DNA, 26 bp, Homo sapiens
tggctgctgtcagatccccgtctgtg

SEQ ID NO: 33598 - DNA, 26 bp, Homo sapiens
ggctgctgtcagatccccgtctgtga

SEQ ID NO: 33599 - DNA, 26 bp, Homo sapiens
gctgctgtcagatccccgtctgtgag

SEQ ID NO: 33600 - DNA, 26 bp, Homo sapiens
ctgctgtcagatccccgtctgtgagt

SEQ ID NO: 33601 - DNA, 26 bp, Homo sapiens
tgctgtcagatccccgtctgtgagtg

SEQ ID NO: 33602 - DNA, 26 bp, Homo sapiens
gctgtcagatccccgtctgtgagtga

SEQ ID NO: 33603 - DNA, 26 bp, Homo sapiens
ctgtcagatccccgtctgtgagtgat

SEQ ID NO: 33604 - DNA, 26 bp, Homo sapiens
tgtcagatccccgtctgtgagtgata

SEQ ID NO: 33605 - DNA, 26 bp, Homo sapiens
gtcagatccccgtctgtgagtgatat

SEQ ID NO: 33606 - DNA, 26 bp, Homo sapiens
tcagatccccgtctgtgagtgatatg

SEQ ID NO: 33607 - DNA, 26 bp, Homo sapiens
cagatccccgtctgtgagtgatatgc

SEQ ID NO: 33608 - DNA, 26 bp, Homo sapiens
agatccccgtctgtgagtgatatgcg

SEQ ID NO: 33609 - DNA, 26 bp, Homo sapiens
gatccccgtctgtgagtgatatgcga

SEQ ID NO: 33610 - DNA, 26 bp, Homo sapiens
atccccgtctgtgagtgatatgcgag

SEQ ID NO: 33611 - DNA, 26 bp, Homo sapiens
tccccgtctgtgagtgatatgcgaga

SEQ ID NO: 33612 - DNA, 26 bp, Homo sapiens
ccccgtctgtgagtgatatgcgagag

SEQ ID NO: 33613 - DNA, 26 bp, Homo sapiens
cccgtctgtgagtgatatgcgagagg

SEQ ID NO: 33614 - DNA, 26 bp, Homo sapiens
ccgtctgtgagtgatatgcgagagga

SEQ ID NO: 33615 - DNA, 26 bp, Homo sapiens
cgtctgtgagtgatatgcgagaggac

SEQ ID NO: 33616 - DNA, 26 bp, Homo sapiens
gtctgtgagtgatatgcgagaggaca

SEQ ID NO: 33617 - DNA, 26 bp, Homo sapiens
tctgtgagtgatatgcgagaggacag

SEQ ID NO: 33618 - DNA, 26 bp, Homo sapiens
ctgtgagtgatatgcgagaggacagg

SEQ ID NO: 33619 - DNA, 26 bp, Homo sapiens
tgtgagtgatatgcgagaggacagga

SEQ ID NO: 33620 - DNA, 26 bp, Homo sapiens
gtgagtgatatgcgagaggacaggag

SEQ ID NO: 33621 - DNA, 26 bp, Homo sapiens
tgagtgatatgcgagaggacaggagc

SEQ ID NO: 33622 - DNA, 26 bp, Homo sapiens
gagtgatatgcgagaggacaggagcg

SEQ ID NO: 33623 - DNA, 26 bp, Homo sapiens
agtgatatgcgagaggacaggagcgg

SEQ ID NO: 33624 - DNA, 26 bp, Homo sapiens
gtgatatgcgagaggacaggagcggg

SEQ ID NO: 33625 - DNA, 26 bp, Homo sapiens
tgatatgcgagaggacaggagcgggt

SEQ ID NO: 33626 - DNA, 26 bp, Homo sapiens
gatatgcgagaggacaggagcgggtt

SEQ ID NO: 33627 - DNA, 26 bp, Homo sapiens
atatgcgagaggacaggagcgggttt

SEQ ID NO: 33628 - DNA, 26 bp, Homo sapiens
tatgcgagaggacaggagcgggtttt

SEQ ID NO: 33629 - DNA, 26 bp, Homo sapiens
atgcgagaggacaggagcgggttttg

SEQ ID NO: 33630 - DNA, 26 bp, Homo sapiens
tgcgagaggacaggagcgggttttgg

SEQ ID NO: 33631 - DNA, 26 bp, Homo sapiens
gcgagaggacaggagcgggttttgga

SEQ ID NO: 33632 - DNA, 26 bp, Homo sapiens
cgagaggacaggagcgggttttggaa

SEQ ID NO: 33633 - DNA, 26 bp, Homo sapiens
gagaggacaggagcgggttttggaaa

SEQ ID NO: 33634 - DNA, 26 bp, Homo sapiens
agaggacaggagcgggttttggaaag

SEQ ID NO: 33635 - DNA, 26 bp, Homo sapiens
gaggacaggagcgggttttggaaaga

SEQ ID NO: 33636 - DNA, 26 bp, Homo sapiens
aggacaggagcgggttttggaaagac

SEQ ID NO: 33637 - DNA, 26 bp, Homo sapiens
ggacaggagcgggttttggaaagaca

SEQ ID NO: 33638 - DNA, 26 bp, Homo sapiens
gacaggagcgggttttggaaagacag

SEQ ID NO: 33639 - DNA, 26 bp, Homo sapiens
acaggagcgggttttggaaagacaga

SEQ ID NO: 33640 - DNA, 26 bp, Homo sapiens
caggagcgggttttggaaagacagaa

SEQ ID NO: 33641 - DNA, 26 bp, Homo sapiens
aggagcgggttttggaaagacagaaa

SEQ ID NO: 33642 - DNA, 26 bp, Homo sapiens
ggagcgggttttggaaagacagaaaa

SEQ ID NO: 33643 - DNA, 26 bp, Homo sapiens
gagcgggttttggaaagacagaaaat

SEQ ID NO: 33644 - DNA, 26 bp, Homo sapiens
agcgggttttggaaagacagaaaatc

SEQ ID NO: 33645 - DNA, 26 bp, Homo sapiens
gcgggttttggaaagacagaaaatct

SEQ ID NO: 33646 - DNA, 26 bp, Homo sapiens
cgggttttggaaagacagaaaatctg

SEQ ID NO: 33647 - DNA, 26 bp, Homo sapiens
gggttttggaaagacagaaaatctgg

SEQ ID NO: 33648 - DNA, 26 bp, Homo sapiens
ggttttggaaagacagaaaatctgga

SEQ ID NO: 33649 - DNA, 26 bp, Homo sapiens
gttttggaaagacagaaaatctggaa

SEQ ID NO: 33650 - DNA, 26 bp, Homo sapiens
ttttggaaagacagaaaatctggaat

SEQ ID NO: 33651 - DNA, 26 bp, Homo sapiens
tttggaaagacagaaaatctggaatt

SEQ ID NO: 33652 - DNA, 26 bp, Homo sapiens
ttggaaagacagaaaatctggaattc

SEQ ID NO: 33653 - DNA, 26 bp, Homo sapiens
tggaaagacagaaaatctggaattca

SEQ ID NO: 33654 - DNA, 26 bp, Homo sapiens
ggaaagacagaaaatctggaattcac

SEQ ID NO: 33655 - DNA, 26 bp, Homo sapiens
gaaagacagaaaatctggaattcact

SEQ ID NO: 33656 - DNA, 26 bp, Homo sapiens
aaagacagaaaatctggaattcactc

SEQ ID NO: 33657 - DNA, 26 bp, Homo sapiens
aagacagaaaatctggaattcactca

SEQ ID NO: 33658 - DNA, 26 bp, Homo sapiens
agacagaaaatctggaattcactcac

SEQ ID NO: 33659 - DNA, 26 bp, Homo sapiens
gacagaaaatctggaattcactcact

SEQ ID NO: 33660 - DNA, 26 bp, Homo sapiens
acagaaaatctggaattcactcactc

SEQ ID NO: 33661 - DNA, 26 bp, Homo sapiens
cagaaaatctggaattcactcactca

SEQ ID NO: 33662 - DNA, 26 bp, Homo sapiens
agaaaatctggaattcactcactcac

SEQ ID NO: 33663 - DNA, 26 bp, Homo sapiens
gaaaatctggaattcactcactcaca

SEQ ID NO: 33664 - DNA, 26 bp, Homo sapiens
aaaatctggaattcactcactcacac

SEQ ID NO: 33665 - DNA, 26 bp, Homo sapiens
aaatctggaattcactcactcacaca

SEQ ID NO: 33666 - DNA, 26 bp, Homo sapiens
aatctggaattcactcactcacacac

SEQ ID NO: 33667 - DNA, 26 bp, Homo sapiens
atctggaattcactcactcacacaca

SEQ ID NO: 33668 - DNA, 26 bp, Homo sapiens
tctggaattcactcactcacacacac

SEQ ID NO: 33669 - DNA, 26 bp, Homo sapiens
ctggaattcactcactcacacacaca

SEQ ID NO: 33670 - DNA, 26 bp, Homo sapiens
tggaattcactcactcacacacacac

SEQ ID NO: 33671 - DNA, 26 bp, Homo sapiens
ggaattcactcactcacacacacaca

SEQ ID NO: 33672 - DNA, 26 bp, Homo sapiens
gaattcactcactcacacacacacac

SEQ ID NO: 33673 - DNA, 26 bp, Homo sapiens
aattcactcactcacacacacacaca

SEQ ID NO: 33674 - DNA, 26 bp, Homo sapiens
attcactcactcacacacacacacag

SEQ ID NO: 33675 - DNA, 26 bp, Homo sapiens
ttcactcactcacacacacacacaga

SEQ ID NO: 33676 - DNA, 26 bp, Homo sapiens
tcactcactcacacacacacacagac

SEQ ID NO: 33677 - DNA, 26 bp, Homo sapiens
cactcactcacacacacacacagaca

SEQ ID NO: 33678 - DNA, 26 bp, Homo sapiens
actcactcacacacacacacagacac

SEQ ID NO: 33679 - DNA, 26 bp, Homo sapiens
ctcactcacacacacacacagacaca

SEQ ID NO: 33680 - DNA, 26 bp, Homo sapiens
tcactcacacacacacacagacacac

SEQ ID NO: 33681 - DNA, 26 bp, Homo sapiens
cactcacacacacacacagacacaca

SEQ ID NO: 33682 - DNA, 26 bp, Homo sapiens
actcacacacacacacagacacacac

SEQ ID NO: 33683 - DNA, 26 bp, Homo sapiens
ctcacacacacacacagacacacaca

SEQ ID NO: 33684 - DNA, 26 bp, Homo sapiens
tcacacacacacacagacacacacac

SEQ ID NO: 33685 - DNA, 26 bp, Homo sapiens
cacacacacacacagacacacacaca

SEQ ID NO: 33686 - DNA, 26 bp, Homo sapiens
acacacacacacagacacacacacag

SEQ ID NO: 33687 - DNA, 26 bp, Homo sapiens
cacacacacacagacacacacacaga

SEQ ID NO: 33688 - DNA, 26 bp, Homo sapiens
acacacacacagacacacacacagac

SEQ ID NO: 33689 - DNA, 26 bp, Homo sapiens
cacacacacagacacacacacagaca

SEQ ID NO: 33690 - DNA, 26 bp, Homo sapiens
acacacacagacacacacacagacac

SEQ ID NO: 33691 - DNA, 26 bp, Homo sapiens
cacacacagacacacacacagacact

SEQ ID NO: 33692 - DNA, 26 bp, Homo sapiens
acacacagacacacacacagacactc

SEQ ID NO: 33693 - DNA, 26 bp, Homo sapiens
cacacagacacacacacagacactca

SEQ ID NO: 33694 - DNA, 26 bp, Homo sapiens
acacagacacacacacagacactcac

SEQ ID NO: 33695 - DNA, 26 bp, Homo sapiens
cacagacacacacacagacactcaca

SEQ ID NO: 33696 - DNA, 26 bp, Homo sapiens
acagacacacacacagacactcacac

SEQ ID NO: 33697 - DNA, 26 bp, Homo sapiens
cagacacacacacagacactcacaca

SEQ ID NO: 33698 - DNA, 26 bp, Homo sapiens
agacacacacacagacactcacacac

SEQ ID NO: 33699 - DNA, 26 bp, Homo sapiens
gacacacacacagacactcacacacg

SEQ ID NO: 33700 - DNA, 26 bp, Homo sapiens
acacacacacagacactcacacacgc

SEQ ID NO: 33701 - DNA, 26 bp, Homo sapiens
cacacacacagacactcacacacgca

SEQ ID NO: 33702 - DNA, 26 bp, Homo sapiens
acacacacagacactcacacacgcac

SEQ ID NO: 33703 - DNA, 26 bp, Homo sapiens
cacacacagacactcacacacgcact

SEQ ID NO: 33704 - DNA, 26 bp, Homo sapiens
acacacagacactcacacacgcactc

SEQ ID NO: 33705 - DNA, 26 bp, Homo sapiens
cacacagacactcacacacgcactca

SEQ ID NO: 33706 - DNA, 26 bp, Homo sapiens
acacagacactcacacacgcactcac

SEQ ID NO: 33707 - DNA, 26 bp, Homo sapiens
cacagacactcacacacgcactcaca

SEQ ID NO: 33708 - DNA, 26 bp, Homo sapiens
acagacactcacacacgcactcacac

SEQ ID NO: 33709 - DNA, 26 bp, Homo sapiens
cagacactcacacacgcactcacacg

SEQ ID NO: 33710 - DNA, 26 bp, Homo sapiens
agacactcacacacgcactcacacgc

SEQ ID NO: 33711 - DNA, 26 bp, Homo sapiens
gacactcacacacgcactcacacgcg

SEQ ID NO: 33712 - DNA, 26 bp, Homo sapiens
acactcacacacgcactcacacgcgc

SEQ ID NO: 33713 - DNA, 26 bp, Homo sapiens
cactcacacacgcactcacacgcgca

SEQ ID NO: 33714 - DNA, 26 bp, Homo sapiens
actcacacacgcactcacacgcgcac

SEQ ID NO: 33715 - DNA, 26 bp, Homo sapiens
ctcacacacgcactcacacgcgcacg

SEQ ID NO: 33716 - DNA, 26 bp, Homo sapiens
tcacacacgcactcacacgcgcacgc

SEQ ID NO: 33717 - DNA, 26 bp, Homo sapiens
cacacacgcactcacacgcgcacgca

SEQ ID NO: 33718 - DNA, 26 bp, Homo sapiens
acacacgcactcacacgcgcacgcac

SEQ ID NO: 33719 - DNA, 26 bp, Homo sapiens
cacacgcactcacacgcgcacgcacc

SEQ ID NO: 33720 - DNA, 26 bp, Homo sapiens
acacgcactcacacgcgcacgcaccc

SEQ ID NO: 33721 - DNA, 26 bp, Homo sapiens
cacgcactcacacgcgcacgcacccc

SEQ ID NO: 33722 - DNA, 26 bp, Homo sapiens
acgcactcacacgcgcacgcaccccc

SEQ ID NO: 33723 - DNA, 26 bp, Homo sapiens
cgcactcacacgcgcacgcacccccg

SEQ ID NO: 33724 - DNA, 26 bp, Homo sapiens
gcactcacacgcgcacgcacccccgc

SEQ ID NO: 33725 - DNA, 26 bp, Homo sapiens
cactcacacgcgcacgcacccccgct

SEQ ID NO: 33726 - DNA, 26 bp, Homo sapiens
actcacacgcgcacgcacccccgctt

SEQ ID NO: 33727 - DNA, 26 bp, Homo sapiens
ctcacacgcgcacgcacccccgcttc

SEQ ID NO: 33728 - DNA, 26 bp, Homo sapiens
tcacacgcgcacgcacccccgcttcc

SEQ ID NO: 33729 - DNA, 26 bp, Homo sapiens
cacacgcgcacgcacccccgcttcct

SEQ ID NO: 33730 - DNA, 26 bp, Homo sapiens
acacgcgcacgcacccccgcttcctc

SEQ ID NO: 33731 - DNA, 26 bp, Homo sapiens
cacgcgcacgcacccccgcttcctcg

SEQ ID NO: 33732 - DNA, 26 bp, Homo sapiens
acgcgcacgcacccccgcttcctcgc

SEQ ID NO: 33733 - DNA, 26 bp, Homo sapiens
cgcgcacgcacccccgcttcctcgca

SEQ ID NO: 33734 - DNA, 26 bp, Homo sapiens
gcgcacgcacccccgcttcctcgcac

SEQ ID NO: 33735 - DNA, 26 bp, Homo sapiens
cgcacgcacccccgcttcctcgcaca

SEQ ID NO: 33736 - DNA, 26 bp, Homo sapiens
gcacgcacccccgcttcctcgcacac

SEQ ID NO: 33737 - DNA, 26 bp, Homo sapiens
cacgcacccccgcttcctcgcacaca

SEQ ID NO: 33738 - DNA, 26 bp, Homo sapiens
acgcacccccgcttcctcgcacacac

SEQ ID NO: 33739 - DNA, 26 bp, Homo sapiens
cgcacccccgcttcctcgcacacaca

SEQ ID NO: 33740 - DNA, 26 bp, Homo sapiens
gcacccccgcttcctcgcacacacac

SEQ ID NO: 33741 - DNA, 26 bp, Homo sapiens
cacccccgcttcctcgcacacacaca

SEQ ID NO: 33742 - DNA, 26 bp, Homo sapiens
acccccgcttcctcgcacacacacac

SEQ ID NO: 33743 - DNA, 26 bp, Homo sapiens
cccccgcttcctcgcacacacacact

SEQ ID NO: 33744 - DNA, 26 bp, Homo sapiens
ccccgcttcctcgcacacacacactc

SEQ ID NO: 33745 - DNA, 26 bp, Homo sapiens
cccgcttcctcgcacacacacactca

SEQ ID NO: 33746 - DNA, 26 bp, Homo sapiens
ccgcttcctcgcacacacacactcac

SEQ ID NO: 33747 - DNA, 26 bp, Homo sapiens
cgcttcctcgcacacacacactcaca

SEQ ID NO: 33748 - DNA, 26 bp, Homo sapiens
gcttcctcgcacacacacactcacac

SEQ ID NO: 33749 - DNA, 26 bp, Homo sapiens
cttcctcgcacacacacactcacacc

SEQ ID NO: 33750 - DNA, 26 bp, Homo sapiens
ttcctcgcacacacacactcacaccc

SEQ ID NO: 33751 - DNA, 26 bp, Homo sapiens
tcctcgcacacacacactcacacccc

SEQ ID NO: 33752 - DNA, 26 bp, Homo sapiens
cctcgcacacacacactcacaccccc

SEQ ID NO: 33753 - DNA, 26 bp, Homo sapiens
ctcgcacacacacactcacacccccc

SEQ ID NO: 33754 - DNA, 26 bp, Homo sapiens
tcgcacacacacactcacacccccca

SEQ ID NO: 33755 - DNA, 26 bp, Homo sapiens
cgcacacacacactcacaccccccac

SEQ ID NO: 33756 - DNA, 26 bp, Homo sapiens
gcacacacacactcacaccccccaca

SEQ ID NO: 33757 - DNA, 26 bp, Homo sapiens
cacacacacactcacaccccccacat

SEQ ID NO: 33758 - DNA, 26 bp, Homo sapiens
acacacacactcacaccccccacata

SEQ ID NO: 33759 - DNA, 26 bp, Homo sapiens
cacacacactcacaccccccacatat

SEQ ID NO: 33760 - DNA, 26 bp, Homo sapiens
acacacactcacaccccccacatatg

SEQ ID NO: 33761 - DNA, 26 bp, Homo sapiens
cacacactcacaccccccacatatgc

SEQ ID NO: 33762 - DNA, 26 bp, Homo sapiens
acacactcacaccccccacatatgca

SEQ ID NO: 33763 - DNA, 26 bp, Homo sapiens
cacactcacaccccccacatatgcac

SEQ ID NO: 33764 - DNA, 26 bp, Homo sapiens
acactcacaccccccacatatgcaca

SEQ ID NO: 33765 - DNA, 26 bp, Homo sapiens
cactcacaccccccacatatgcacac

SEQ ID NO: 33766 - DNA, 26 bp, Homo sapiens
actcacaccccccacatatgcacaca

SEQ ID NO: 33767 - DNA, 26 bp, Homo sapiens
ctcacaccccccacatatgcacacac

SEQ ID NO: 33768 - DNA, 26 bp, Homo sapiens
tcacaccccccacatatgcacacaca

SEQ ID NO: 33769 - DNA, 26 bp, Homo sapiens
cacaccccccacatatgcacacacac

SEQ ID NO: 33770 - DNA, 26 bp, Homo sapiens
acaccccccacatatgcacacacaca

SEQ ID NO: 33771 - DNA, 26 bp, Homo sapiens
caccccccacatatgcacacacacac

SEQ ID NO: 33772 - DNA, 26 bp, Homo sapiens
accccccacatatgcacacacacaca

SEQ ID NO: 33773 - DNA, 26 bp, Homo sapiens
ccccccacatatgcacacacacacaa

SEQ ID NO: 33774 - DNA, 26 bp, Homo sapiens
cccccacatatgcacacacacacaaa

SEQ ID NO: 33775 - DNA, 26 bp, Homo sapiens
ccccacatatgcacacacacacaaac

SEQ ID NO: 33776 - DNA, 26 bp, Homo sapiens
cccacatatgcacacacacacaaaca

SEQ ID NO: 33777 - DNA, 26 bp, Homo sapiens
ccacatatgcacacacacacaaacac

SEQ ID NO: 33778 - DNA, 26 bp, Homo sapiens
cacatatgcacacacacacaaacaca

SEQ ID NO: 33779 - DNA, 26 bp, Homo sapiens
acatatgcacacacacacaaacacac

SEQ ID NO: 33780 - DNA, 26 bp, Homo sapiens
catatgcacacacacacaaacacaca

SEQ ID NO: 33781 - DNA, 26 bp, Homo sapiens
atatgcacacacacacaaacacacac

SEQ ID NO: 33782 - DNA, 26 bp, Homo sapiens
tatgcacacacacacaaacacacaca

SEQ ID NO: 33783 - DNA, 26 bp, Homo sapiens
atgcacacacacacaaacacacacac

SEQ ID NO: 33784 - DNA, 26 bp, Homo sapiens
tgcacacacacacaaacacacacaca

SEQ ID NO: 33785 - DNA, 26 bp, Homo sapiens
gcacacacacacaaacacacacacac

SEQ ID NO: 33786 - DNA, 26 bp, Homo sapiens
cacacacacacaaacacacacacaca

SEQ ID NO: 33787 - DNA, 26 bp, Homo sapiens
acacacacacaaacacacacacacac

SEQ ID NO: 33788 - DNA, 26 bp, Homo sapiens
cacacacacaaacacacacacacacc

SEQ ID NO: 33789 - DNA, 26 bp, Homo sapiens
acacacacaaacacacacacacaccc

SEQ ID NO: 33790 - DNA, 26 bp, Homo sapiens
cacacacaaacacacacacacaccct

SEQ ID NO: 33791 - DNA, 26 bp, Homo sapiens
acacacaaacacacacacacaccctc

SEQ ID NO: 33792 - DNA, 26 bp, Homo sapiens
cacacaaacacacacacacaccctcg

SEQ ID NO: 33793 - DNA, 26 bp, Homo sapiens
acacaaacacacacacacaccctcgc

SEQ ID NO: 33794 - DNA, 26 bp, Homo sapiens
cacaaacacacacacacaccctcgca

SEQ ID NO: 33795 - DNA, 26 bp, Homo sapiens
acaaacacacacacacaccctcgcac

SEQ ID NO: 33796 - DNA, 26 bp, Homo sapiens
caaacacacacacacaccctcgcaca

SEQ ID NO: 33797 - DNA, 26 bp, Homo sapiens
aaacacacacacacaccctcgcacac

SEQ ID NO: 33798 - DNA, 26 bp, Homo sapiens
aacacacacacacaccctcgcacaca

SEQ ID NO: 33799 - DNA, 26 bp, Homo sapiens
acacacacacacaccctcgcacacac

SEQ ID NO: 33800 - DNA, 26 bp, Homo sapiens
cacacacacacaccctcgcacacaca

SEQ ID NO: 33801 - DNA, 26 bp, Homo sapiens
acacacacacaccctcgcacacacac

SEQ ID NO: 33802 - DNA, 26 bp, Homo sapiens
cacacacacaccctcgcacacacaca

SEQ ID NO: 33803 - DNA, 26 bp, Homo sapiens
acacacacaccctcgcacacacacac

SEQ ID NO: 33804 - DNA, 26 bp, Homo sapiens
cacacacaccctcgcacacacacaca

SEQ ID NO: 33805 - DNA, 26 bp, Homo sapiens
acacacaccctcgcacacacacacaa

SEQ ID NO: 33806 - DNA, 26 bp, Homo sapiens
cacacaccctcgcacacacacacaag

SEQ ID NO: 33807 - DNA, 26 bp, Homo sapiens
acacaccctcgcacacacacacaaga

SEQ ID NO: 33808 - DNA, 26 bp, Homo sapiens
cacaccctcgcacacacacacaagac

SEQ ID NO: 33809 - DNA, 26 bp, Homo sapiens
acaccctcgcacacacacacaagaca

SEQ ID NO: 33810 - DNA, 26 bp, Homo sapiens
caccctcgcacacacacacaagacag

SEQ ID NO: 33811 - DNA, 26 bp, Homo sapiens
accctcgcacacacacacaagacagg

SEQ ID NO: 33812 - DNA, 26 bp, Homo sapiens
ccctcgcacacacacacaagacaggg

SEQ ID NO: 33813 - DNA, 26 bp, Homo sapiens
cctcgcacacacacacaagacagggc

SEQ ID NO: 33814 - DNA, 26 bp, Homo sapiens
ctcgcacacacacacaagacagggcg

SEQ ID NO: 33815 - DNA, 26 bp, Homo sapiens
tcgcacacacacacaagacagggcga

SEQ ID NO: 33816 - DNA, 26 bp, Homo sapiens
cgcacacacacacaagacagggcgag

SEQ ID NO: 33817 - DNA, 26 bp, Homo sapiens
gcacacacacacaagacagggcgagg

SEQ ID NO: 33818 - DNA, 26 bp, Homo sapiens
cacacacacacaagacagggcgaggc

SEQ ID NO: 33819 - DNA, 26 bp, Homo sapiens
acacacacacaagacagggcgaggcg

SEQ ID NO: 33820 - DNA, 26 bp, Homo sapiens
cacacacacaagacagggcgaggcga

SEQ ID NO: 33821 - DNA, 26 bp, Homo sapiens
acacacacaagacagggcgaggcgat

SEQ ID NO: 33822 - DNA, 26 bp, Homo sapiens
cacacacaagacagggcgaggcgatg

SEQ ID NO: 33823 - DNA, 26 bp, Homo sapiens
acacacaagacagggcgaggcgatgc

SEQ ID NO: 33824 - DNA, 26 bp, Homo sapiens
cacacaagacagggcgaggcgatgcc

SEQ ID NO: 33825 - DNA, 26 bp, Homo sapiens
acacaagacagggcgaggcgatgcca

SEQ ID NO: 33826 - DNA, 26 bp, Homo sapiens
cacaagacagggcgaggcgatgccag

SEQ ID NO: 33827 - DNA, 26 bp, Homo sapiens
acaagacagggcgaggcgatgccagc

SEQ ID NO: 33828 - DNA, 26 bp, Homo sapiens
caagacagggcgaggcgatgccagca

SEQ ID NO: 33829 - DNA, 26 bp, Homo sapiens
aagacagggcgaggcgatgccagcaa

SEQ ID NO: 33830 - DNA, 26 bp, Homo sapiens
agacagggcgaggcgatgccagcaaa

SEQ ID NO: 33831 - DNA, 26 bp, Homo sapiens
gacagggcgaggcgatgccagcaaac

SEQ ID NO: 33832 - DNA, 26 bp, Homo sapiens
acagggcgaggcgatgccagcaaaca

SEQ ID NO: 33833 - DNA, 26 bp, Homo sapiens
cagggcgaggcgatgccagcaaacat

SEQ ID NO: 33834 - DNA, 26 bp, Homo sapiens
agggcgaggcgatgccagcaaacatc

SEQ ID NO: 33835 - DNA, 26 bp, Homo sapiens
gggcgaggcgatgccagcaaacatcg

SEQ ID NO: 33836 - DNA, 26 bp, Homo sapiens
ggcgaggcgatgccagcaaacatcga

SEQ ID NO: 33837 - DNA, 26 bp, Homo sapiens
gcgaggcgatgccagcaaacatcgat

SEQ ID NO: 33838 - DNA, 26 bp, Homo sapiens
cgaggcgatgccagcaaacatcgatc

SEQ ID NO: 33839 - DNA, 26 bp, Homo sapiens
gaggcgatgccagcaaacatcgatcc

SEQ ID NO: 33840 - DNA, 26 bp, Homo sapiens
aggcgatgccagcaaacatcgatccc

SEQ ID NO: 33841 - DNA, 26 bp, Homo sapiens
ggcgatgccagcaaacatcgatcccg

SEQ ID NO: 33842 - DNA, 26 bp, Homo sapiens
gcgatgccagcaaacatcgatcccgc

SEQ ID NO: 33843 - DNA, 26 bp, Homo sapiens
cgatgccagcaaacatcgatcccgct

SEQ ID NO: 33844 - DNA, 26 bp, Homo sapiens
gatgccagcaaacatcgatcccgctg

SEQ ID NO: 33845 - DNA, 26 bp, Homo sapiens
atgccagcaaacatcgatcccgctga

SEQ ID NO: 33846 - DNA, 26 bp, Homo sapiens
tgccagcaaacatcgatcccgctgaa

SEQ ID NO: 33847 - DNA, 26 bp, Homo sapiens
gccagcaaacatcgatcccgctgaac

SEQ ID NO: 33848 - DNA, 26 bp, Homo sapiens
ccagcaaacatcgatcccgctgaaca

SEQ ID NO: 33849 - DNA, 26 bp, Homo sapiens
cagcaaacatcgatcccgctgaacaa

SEQ ID NO: 33850 - DNA, 26 bp, Homo sapiens
agcaaacatcgatcccgctgaacaaa

SEQ ID NO: 33851 - DNA, 26 bp, Homo sapiens
gcaaacatcgatcccgctgaacaaac

SEQ ID NO: 33852 - DNA, 26 bp, Homo sapiens
ttccattagaagctgaagttttatta

SEQ ID NO: 33853 - DNA, 26 bp, Homo sapiens
tccattagaagctgaagttttattat

SEQ ID NO: 33854 - DNA, 26 bp, Homo sapiens
ccattagaagctgaagttttattata

SEQ ID NO: 33855 - DNA, 26 bp, Homo sapiens
cattagaagctgaagttttattatag

SEQ ID NO: 33856 - DNA, 26 bp, Homo sapiens
attagaagctgaagttttattatagg

SEQ ID NO: 33857 - DNA, 26 bp, Homo sapiens
ttagaagctgaagttttattatagga

SEQ ID NO: 33858 - DNA, 26 bp, Homo sapiens
tagaagctgaagttttattataggat

SEQ ID NO: 33859 - DNA, 26 bp, Homo sapiens
agaagctgaagttttattataggata

SEQ ID NO: 33860 - DNA, 26 bp, Homo sapiens
gaagctgaagttttattataggataa

SEQ ID NO: 33861 - DNA, 26 bp, Homo sapiens
aagctgaagttttattataggataac

SEQ ID NO: 33862 - DNA, 26 bp, Homo sapiens
agctgaagttttattataggataaca

SEQ ID NO: 33863 - DNA, 26 bp, Homo sapiens
gctgaagttttattataggataacag

SEQ ID NO: 33864 - DNA, 26 bp, Homo sapiens
ctgaagttttattataggataacagt

SEQ ID NO: 33865 - DNA, 26 bp, Homo sapiens
tgaagttttattataggataacagta

SEQ ID NO: 33866 - DNA, 26 bp, Homo sapiens
gaagttttattataggataacagtac

SEQ ID NO: 33867 - DNA, 26 bp, Homo sapiens
aagttttattataggataacagtaca

SEQ ID NO: 33868 - DNA, 26 bp, Homo sapiens
agttttattataggataacagtacat

SEQ ID NO: 33869 - DNA, 26 bp, Homo sapiens
gttttattataggataacagtacata

SEQ ID NO: 33870 - DNA, 26 bp, Homo sapiens
ttttattataggataacagtacataa

SEQ ID NO: 33871 - DNA, 26 bp, Homo sapiens
tttattataggataacagtacataaa

SEQ ID NO: 33872 - DNA, 26 bp, Homo sapiens
ttattataggataacagtacataaag

SEQ ID NO: 33873 - DNA, 26 bp, Homo sapiens
tattataggataacagtacataaagc

SEQ ID NO: 33874 - DNA, 26 bp, Homo sapiens
attataggataacagtacataaagca

SEQ ID NO: 33875 - DNA, 26 bp, Homo sapiens
ttataggataacagtacataaagcac

SEQ ID NO: 33876 - DNA, 26 bp, Homo sapiens
tataggataacagtacataaagcaca

SEQ ID NO: 33877 - DNA, 26 bp, Homo sapiens
ataggataacagtacataaagcacat

SEQ ID NO: 33878 - DNA, 26 bp, Homo sapiens
taggataacagtacataaagcacatc

SEQ ID NO: 33879 - DNA, 26 bp, Homo sapiens
aggataacagtacataaagcacatct

SEQ ID NO: 33880 - DNA, 26 bp, Homo sapiens
ggataacagtacataaagcacatcta

SEQ ID NO: 33881 - DNA, 26 bp, Homo sapiens
gataacagtacataaagcacatctaa

SEQ ID NO: 33882 - DNA, 26 bp, Homo sapiens
ataacagtacataaagcacatctaaa

SEQ ID NO: 33883 - DNA, 26 bp, Homo sapiens
taacagtacataaagcacatctaaaa

SEQ ID NO: 33884 - DNA, 26 bp, Homo sapiens
aacagtacataaagcacatctaaaat

SEQ ID NO: 33885 - DNA, 26 bp, Homo sapiens
acagtacataaagcacatctaaaatt

SEQ ID NO: 33886 - DNA, 26 bp, Homo sapiens
cagtacataaagcacatctaaaattg

SEQ ID NO: 33887 - DNA, 26 bp, Homo sapiens
agtacataaagcacatctaaaattga

SEQ ID NO: 33888 - DNA, 26 bp, Homo sapiens
gtacataaagcacatctaaaattgat

SEQ ID NO: 33889 - DNA, 26 bp, Homo sapiens
tacataaagcacatctaaaattgatg

SEQ ID NO: 33890 - DNA, 26 bp, Homo sapiens
acataaagcacatctaaaattgatgt

SEQ ID NO: 33891 - DNA, 26 bp, Homo sapiens
cataaagcacatctaaaattgatgtg

SEQ ID NO: 33892 - DNA, 26 bp, Homo sapiens
ataaagcacatctaaaattgatgtgt

SEQ ID NO: 33893 - DNA, 26 bp, Homo sapiens
taaagcacatctaaaattgatgtgtt

SEQ ID NO: 33894 - DNA, 26 bp, Homo sapiens
aaagcacatctaaaattgatgtgttc

SEQ ID NO: 33895 - DNA, 26 bp, Homo sapiens
aagcacatctaaaattgatgtgttca

SEQ ID NO: 33896 - DNA, 26 bp, Homo sapiens
agcacatctaaaattgatgtgttcaa

SEQ ID NO: 33897 - DNA, 26 bp, Homo sapiens
gcacatctaaaattgatgtgttcaat

SEQ ID NO: 33898 - DNA, 26 bp, Homo sapiens
cacatctaaaattgatgtgttcaatg

SEQ ID NO: 33899 - DNA, 26 bp, Homo sapiens
acatctaaaattgatgtgttcaatgc

SEQ ID NO: 33900 - DNA, 26 bp, Homo sapiens
catctaaaattgatgtgttcaatgca

SEQ ID NO: 33901 - DNA, 26 bp, Homo sapiens
atctaaaattgatgtgttcaatgcac

SEQ ID NO: 33902 - DNA, 26 bp, Homo sapiens
tctaaaattgatgtgttcaatgcact

SEQ ID NO: 33903 - DNA, 26 bp, Homo sapiens
ctaaaattgatgtgttcaatgcactt

SEQ ID NO: 33904 - DNA, 26 bp, Homo sapiens
taaaattgatgtgttcaatgcacttt

SEQ ID NO: 33905 - DNA, 26 bp, Homo sapiens
aaaattgatgtgttcaatgcactttt

SEQ ID NO: 33906 - DNA, 26 bp, Homo sapiens
aaattgatgtgttcaatgcactttta

SEQ ID NO: 33907 - DNA, 26 bp, Homo sapiens
aattgatgtgttcaatgcacttttaa

SEQ ID NO: 33908 - DNA, 26 bp, Homo sapiens
attgatgtgttcaatgcacttttaat

SEQ ID NO: 33909 - DNA, 26 bp, Homo sapiens
ttgatgtgttcaatgcacttttaata

SEQ ID NO: 33910 - DNA, 26 bp, Homo sapiens
tgatgtgttcaatgcacttttaataa

SEQ ID NO: 33911 - DNA, 26 bp, Homo sapiens
gatgtgttcaatgcacttttaataaa

SEQ ID NO: 33912 - DNA, 26 bp, Homo sapiens
atgtgttcaatgcacttttaataaag

SEQ ID NO: 33913 - DNA, 26 bp, Homo sapiens
tgtgttcaatgcacttttaataaagg

SEQ ID NO: 33914 - DNA, 26 bp, Homo sapiens
gtgttcaatgcacttttaataaaggt

SEQ ID NO: 33915 - DNA, 26 bp, Homo sapiens
tgttcaatgcacttttaataaaggta

SEQ ID NO: 33916 - DNA, 26 bp, Homo sapiens
gttcaatgcacttttaataaaggtaa

SEQ ID NO: 33917 - DNA, 26 bp, Homo sapiens
ttcaatgcacttttaataaaggtaat

SEQ ID NO: 33918 - DNA, 26 bp, Homo sapiens
tcaatgcacttttaataaaggtaatg

SEQ ID NO: 33919 - DNA, 26 bp, Homo sapiens
caatgcacttttaataaaggtaatgt

SEQ ID NO: 33920 - DNA, 26 bp, Homo sapiens
aatgcacttttaataaaggtaatgta

SEQ ID NO: 33921 - DNA, 26 bp, Homo sapiens
atgcacttttaataaaggtaatgtaa

SEQ ID NO: 33922 - DNA, 26 bp, Homo sapiens
tgcacttttaataaaggtaatgtaat

SEQ ID NO: 33923 - DNA, 26 bp, Homo sapiens
gcacttttaataaaggtaatgtaata

SEQ ID NO: 33924 - DNA, 26 bp, Homo sapiens
cacttttaataaaggtaatgtaatat

SEQ ID NO: 33925 - DNA, 26 bp, Homo sapiens
acttttaataaaggtaatgtaatatt

SEQ ID NO: 33926 - DNA, 26 bp, Homo sapiens
cttttaataaaggtaatgtaatatta

SEQ ID NO: 33927 - DNA, 26 bp, Homo sapiens
ttttaataaaggtaatgtaatattaa

SEQ ID NO: 33928 - DNA, 26 bp, Homo sapiens
tttaataaaggtaatgtaatattaaa

SEQ ID NO: 33929 - DNA, 26 bp, Homo sapiens
ttaataaaggtaatgtaatattaaag

SEQ ID NO: 33930 - DNA, 26 bp, Homo sapiens
taataaaggtaatgtaatattaaagg

SEQ ID NO: 33931 - DNA, 26 bp, Homo sapiens
aataaaggtaatgtaatattaaaggt

SEQ ID NO: 33932 - DNA, 26 bp, Homo sapiens
ataaaggtaatgtaatattaaaggta

SEQ ID NO: 33933 - DNA, 26 bp, Homo sapiens
taaaggtaatgtaatattaaaggtac

SEQ ID NO: 33934 - DNA, 26 bp, Homo sapiens
aaaggtaatgtaatattaaaggtaca

SEQ ID NO: 33935 - DNA, 26 bp, Homo sapiens
aaggtaatgtaatattaaaggtacag

SEQ ID NO: 33936 - DNA, 26 bp, Homo sapiens
aggtaatgtaatattaaaggtacagt

SEQ ID NO: 33937 - DNA, 26 bp, Homo sapiens
ggtaatgtaatattaaaggtacagtt

SEQ ID NO: 33938 - DNA, 26 bp, Homo sapiens
gtaatgtaatattaaaggtacagttt

SEQ ID NO: 33939 - DNA, 26 bp, Homo sapiens
taatgtaatattaaaggtacagtttc

SEQ ID NO: 33940 - DNA, 26 bp, Homo sapiens
aatgtaatattaaaggtacagtttct

SEQ ID NO: 33941 - DNA, 26 bp, Homo sapiens
atgtaatattaaaggtacagtttcta

SEQ ID NO: 33942 - DNA, 26 bp, Homo sapiens
tgtaatattaaaggtacagtttctaa

SEQ ID NO: 33943 - DNA, 26 bp, Homo sapiens
gtaatattaaaggtacagtttctaag

SEQ ID NO: 33944 - DNA, 26 bp, Homo sapiens
taatattaaaggtacagtttctaagt

SEQ ID NO: 33945 - DNA, 26 bp, Homo sapiens
aatattaaaggtacagtttctaagta

SEQ ID NO: 33946 - DNA, 26 bp, Homo sapiens
atattaaaggtacagtttctaagtac

SEQ ID NO: 33947 - DNA, 26 bp, Homo sapiens
tattaaaggtacagtttctaagtaca

SEQ ID NO: 33948 - DNA, 26 bp, Homo sapiens
attaaaggtacagtttctaagtacaa

SEQ ID NO: 33949 - DNA, 26 bp, Homo sapiens
ttaaaggtacagtttctaagtacaat

SEQ ID NO: 33950 - DNA, 26 bp, Homo sapiens
taaaggtacagtttctaagtacaata

SEQ ID NO: 33951 - DNA, 26 bp, Homo sapiens
aaaggtacagtttctaagtacaatat

SEQ ID NO: 33952 - DNA, 26 bp, Homo sapiens
aaggtacagtttctaagtacaatata

SEQ ID NO: 33953 - DNA, 26 bp, Homo sapiens
aggtacagtttctaagtacaatataa

SEQ ID NO: 33954 - DNA, 26 bp, Homo sapiens
ggtacagtttctaagtacaatataac

SEQ ID NO: 33955 - DNA, 26 bp, Homo sapiens
gtacagtttctaagtacaatataaca

SEQ ID NO: 33956 - DNA, 26 bp, Homo sapiens
tacagtttctaagtacaatataacaa

SEQ ID NO: 33957 - DNA, 26 bp, Homo sapiens
acagtttctaagtacaatataacaac

SEQ ID NO: 33958 - DNA, 26 bp, Homo sapiens
cagtttctaagtacaatataacaaca

SEQ ID NO: 33959 - DNA, 26 bp, Homo sapiens
agtttctaagtacaatataacaacat

SEQ ID NO: 33960 - DNA, 26 bp, Homo sapiens
gtttctaagtacaatataacaacatt

SEQ ID NO: 33961 - DNA, 26 bp, Homo sapiens
tttctaagtacaatataacaacattc

SEQ ID NO: 33962 - DNA, 26 bp, Homo sapiens
ttctaagtacaatataacaacattca

SEQ ID NO: 33963 - DNA, 26 bp, Homo sapiens
tctaagtacaatataacaacattcat

SEQ ID NO: 33964 - DNA, 26 bp, Homo sapiens
ctaagtacaatataacaacattcata

SEQ ID NO: 33965 - DNA, 26 bp, Homo sapiens
taagtacaatataacaacattcatat

SEQ ID NO: 33966 - DNA, 26 bp, Homo sapiens
aagtacaatataacaacattcatatt

SEQ ID NO: 33967 - DNA, 26 bp, Homo sapiens
agtacaatataacaacattcatatta

SEQ ID NO: 33968 - DNA, 26 bp, Homo sapiens
gtacaatataacaacattcatattag

SEQ ID NO: 33969 - DNA, 26 bp, Homo sapiens
tacaatataacaacattcatattaga

SEQ ID NO: 33970 - DNA, 26 bp, Homo sapiens
acaatataacaacattcatattagaa

SEQ ID NO: 33971 - DNA, 26 bp, Homo sapiens
caatataacaacattcatattagaat

SEQ ID NO: 33972 - DNA, 26 bp, Homo sapiens
aatataacaacattcatattagaatg

SEQ ID NO: 33973 - DNA, 26 bp, Homo sapiens
atataacaacattcatattagaatga

SEQ ID NO: 33974 - DNA, 26 bp, Homo sapiens
tataacaacattcatattagaatgaa

SEQ ID NO: 33975 - DNA, 26 bp, Homo sapiens
ataacaacattcatattagaatgaaa

SEQ ID NO: 33976 - DNA, 26 bp, Homo sapiens
taacaacattcatattagaatgaaaa

SEQ ID NO: 33977 - DNA, 26 bp, Homo sapiens
aacaacattcatattagaatgaaaat

SEQ ID NO: 33978 - DNA, 26 bp, Homo sapiens
acaacattcatattagaatgaaaatt

SEQ ID NO: 33979 - DNA, 26 bp, Homo sapiens
caacattcatattagaatgaaaattg

SEQ ID NO: 33980 - DNA, 26 bp, Homo sapiens
aacattcatattagaatgaaaattgg

SEQ ID NO: 33981 - DNA, 26 bp, Homo sapiens
acattcatattagaatgaaaattgga

SEQ ID NO: 33982 - DNA, 26 bp, Homo sapiens
cattcatattagaatgaaaattggag

SEQ ID NO: 33983 - DNA, 26 bp, Homo sapiens
attcatattagaatgaaaattggagt

SEQ ID NO: 33984 - DNA, 26 bp, Homo sapiens
ttcatattagaatgaaaattggagta

SEQ ID NO: 33985 - DNA, 26 bp, Homo sapiens
tcatattagaatgaaaattggagtat

SEQ ID NO: 33986 - DNA, 26 bp, Homo sapiens
catattagaatgaaaattggagtatt

SEQ ID NO: 33987 - DNA, 26 bp, Homo sapiens
atattagaatgaaaattggagtattt

SEQ ID NO: 33988 - DNA, 26 bp, Homo sapiens
tattagaatgaaaattggagtattta

SEQ ID NO: 33989 - DNA, 26 bp, Homo sapiens
attagaatgaaaattggagtatttaa

SEQ ID NO: 33990 - DNA, 26 bp, Homo sapiens
ttagaatgaaaattggagtatttaaa

SEQ ID NO: 33991 - DNA, 26 bp, Homo sapiens
tagaatgaaaattggagtatttaaaa

SEQ ID NO: 33992 - DNA, 26 bp, Homo sapiens
agaatgaaaattggagtatttaaaag

SEQ ID NO: 33993 - DNA, 26 bp, Homo sapiens
gaatgaaaattggagtatttaaaaga

SEQ ID NO: 33994 - DNA, 26 bp, Homo sapiens
aatgaaaattggagtatttaaaagac

SEQ ID NO: 33995 - DNA, 26 bp, Homo sapiens
atgaaaattggagtatttaaaagaca

SEQ ID NO: 33996 - DNA, 26 bp, Homo sapiens
tgaaaattggagtatttaaaagacaa

SEQ ID NO: 33997 - DNA, 26 bp, Homo sapiens
gaaaattggagtatttaaaagacaac

SEQ ID NO: 33998 - DNA, 26 bp, Homo sapiens
aaaattggagtatttaaaagacaaca

SEQ ID NO: 33999 - DNA, 26 bp, Homo sapiens
aaattggagtatttaaaagacaacat

SEQ ID NO: 34000 - DNA, 26 bp, Homo sapiens
aattggagtatttaaaagacaacatt

SEQ ID NO: 34001 - DNA, 26 bp, Homo sapiens
attggagtatttaaaagacaacatta

SEQ ID NO: 34002 - DNA, 26 bp, Homo sapiens
ttggagtatttaaaagacaacattaa

SEQ ID NO: 34003 - DNA, 26 bp, Homo sapiens
tggagtatttaaaagacaacattaaa

SEQ ID NO: 34004 - DNA, 26 bp, Homo sapiens
ggagtatttaaaagacaacattaaat

SEQ ID NO: 34005 - DNA, 26 bp, Homo sapiens
gagtatttaaaagacaacattaaatc

SEQ ID NO: 34006 - DNA, 26 bp, Homo sapiens
agtatttaaaagacaacattaaatct

SEQ ID NO: 34007 - DNA, 26 bp, Homo sapiens
gtatttaaaagacaacattaaatctc

SEQ ID NO: 34008 - DNA, 26 bp, Homo sapiens
tatttaaaagacaacattaaatctct

SEQ ID NO: 34009 - DNA, 26 bp, Homo sapiens
atttaaaagacaacattaaatctctc

SEQ ID NO: 34010 - DNA, 26 bp, Homo sapiens
tttaaaagacaacattaaatctctct

SEQ ID NO: 34011 - DNA, 26 bp, Homo sapiens
ttaaaagacaacattaaatctctctt

SEQ ID NO: 34012 - DNA, 26 bp, Homo sapiens
taaaagacaacattaaatctctcttt

SEQ ID NO: 34013 - DNA, 26 bp, Homo sapiens
aaaagacaacattaaatctctctttt

SEQ ID NO: 34014 - DNA, 26 bp, Homo sapiens
aaagacaacattaaatctctcttttt

SEQ ID NO: 34015 - DNA, 26 bp, Homo sapiens
aagacaacattaaatctctctttttt

SEQ ID NO: 34016 - DNA, 26 bp, Homo sapiens
agacaacattaaatctctcttttttg

SEQ ID NO: 34017 - DNA, 26 bp, Homo sapiens
gacaacattaaatctctcttttttgt

SEQ ID NO: 34018 - DNA, 26 bp, Homo sapiens
acaacattaaatctctcttttttgta

SEQ ID NO: 34019 - DNA, 26 bp, Homo sapiens
caacattaaatctctcttttttgtac

SEQ ID NO: 34020 - DNA, 26 bp, Homo sapiens
aacattaaatctctcttttttgtaca

SEQ ID NO: 34021 - DNA, 26 bp, Homo sapiens
acattaaatctctcttttttgtacag

SEQ ID NO: 34022 - DNA, 26 bp, Homo sapiens
cattaaatctctcttttttgtacagc

SEQ ID NO: 34023 - DNA, 26 bp, Homo sapiens
attaaatctctcttttttgtacagct

SEQ ID NO: 34024 - DNA, 26 bp, Homo sapiens
ttaaatctctcttttttgtacagctt

SEQ ID NO: 34025 - DNA, 26 bp, Homo sapiens
taaatctctcttttttgtacagcttg

SEQ ID NO: 34026 - DNA, 26 bp, Homo sapiens
aaatctctcttttttgtacagcttgt

SEQ ID NO: 34027 - DNA, 26 bp, Homo sapiens
aatctctcttttttgtacagcttgta

SEQ ID NO: 34028 - DNA, 26 bp, Homo sapiens
atctctcttttttgtacagcttgtat

SEQ ID NO: 34029 - DNA, 26 bp, Homo sapiens
tctctcttttttgtacagcttgtatt

SEQ ID NO: 34030 - DNA, 26 bp, Homo sapiens
ctctcttttttgtacagcttgtattt

SEQ ID NO: 34031 - DNA, 26 bp, Homo sapiens
tctcttttttgtacagcttgtattta

SEQ ID NO: 34032 - DNA, 26 bp, Homo sapiens
ctcttttttgtacagcttgtatttac

SEQ ID NO: 34033 - DNA, 26 bp, Homo sapiens
tcttttttgtacagcttgtatttaca

SEQ ID NO: 34034 - DNA, 26 bp, Homo sapiens
cttttttgtacagcttgtatttacaa

SEQ ID NO: 34035 - DNA, 26 bp, Homo sapiens
ttttttgtacagcttgtatttacaaa

SEQ ID NO: 34036 - DNA, 26 bp, Homo sapiens
tttttgtacagcttgtatttacaaaa

SEQ ID NO: 34037 - DNA, 26 bp, Homo sapiens
ttttgtacagcttgtatttacaaaat

SEQ ID NO: 34038 - DNA, 26 bp, Homo sapiens
tttgtacagcttgtatttacaaaatg

SEQ ID NO: 34039 - DNA, 26 bp, Homo sapiens
ttgtacagcttgtatttacaaaatga

SEQ ID NO: 34040 - DNA, 26 bp, Homo sapiens
tgtacagcttgtatttacaaaatgaa

SEQ ID NO: 34041 - DNA, 26 bp, Homo sapiens
gtacagcttgtatttacaaaatgaat

SEQ ID NO: 34042 - DNA, 26 bp, Homo sapiens
tacagcttgtatttacaaaatgaatc

SEQ ID NO: 34043 - DNA, 26 bp, Homo sapiens
acagcttgtatttacaaaatgaatca

SEQ ID NO: 34044 - DNA, 26 bp, Homo sapiens
cagcttgtatttacaaaatgaatcaa

SEQ ID NO: 34045 - DNA, 26 bp, Homo sapiens
agcttgtatttacaaaatgaatcaaa

SEQ ID NO: 34046 - DNA, 26 bp, Homo sapiens
gcttgtatttacaaaatgaatcaaaa

SEQ ID NO: 34047 - DNA, 26 bp, Homo sapiens
cttgtatttacaaaatgaatcaaaat

SEQ ID NO: 34048 - DNA, 26 bp, Homo sapiens
ttgtatttacaaaatgaatcaaaata

SEQ ID NO: 34049 - DNA, 26 bp, Homo sapiens
tgtatttacaaaatgaatcaaaatat

SEQ ID NO: 34050 - DNA, 26 bp, Homo sapiens
gtatttacaaaatgaatcaaaatatt

SEQ ID NO: 34051 - DNA, 26 bp, Homo sapiens
tatttacaaaatgaatcaaaatattt

SEQ ID NO: 34052 - DNA, 26 bp, Homo sapiens
atttacaaaatgaatcaaaatatttt

SEQ ID NO: 34053 - DNA, 26 bp, Homo sapiens
tttacaaaatgaatcaaaatattttt

SEQ ID NO: 34054 - DNA, 26 bp, Homo sapiens
ttacaaaatgaatcaaaatatttttt

SEQ ID NO: 34055 - DNA, 26 bp, Homo sapiens
tacaaaatgaatcaaaatattttttt

SEQ ID NO: 34056 - DNA, 26 bp, Homo sapiens
acaaaatgaatcaaaatatttttttt

SEQ ID NO: 34057 - DNA, 26 bp, Homo sapiens
caaaatgaatcaaaatattttttttt

SEQ ID NO: 34058 - DNA, 26 bp, Homo sapiens
aaaatgaatcaaaatatttttttttt

SEQ ID NO: 34059 - DNA, 26 bp, Homo sapiens
aaatgaatcaaaatatttttttttta

SEQ ID NO: 34060 - DNA, 26 bp, Homo sapiens
aatgaatcaaaatattttttttttaa

SEQ ID NO: 34061 - DNA, 26 bp, Homo sapiens
atgaatcaaaatattttttttttaaa

SEQ ID NO: 34062 - DNA, 26 bp, Homo sapiens
tgaatcaaaatattttttttttaaat

SEQ ID NO: 34063 - DNA, 26 bp, Homo sapiens
gaatcaaaatattttttttttaaatt

SEQ ID NO: 34064 - DNA, 26 bp, Homo sapiens
aatcaaaatattttttttttaaattc

SEQ ID NO: 34065 - DNA, 26 bp, Homo sapiens
atcaaaatattttttttttaaattca

SEQ ID NO: 34066 - DNA, 26 bp, Homo sapiens
tcaaaatattttttttttaaattcag

SEQ ID NO: 34067 - DNA, 26 bp, Homo sapiens
caaaatattttttttttaaattcagg

SEQ ID NO: 34068 - DNA, 26 bp, Homo sapiens
aaaatattttttttttaaattcagga

SEQ ID NO: 34069 - DNA, 26 bp, Homo sapiens
aaatattttttttttaaattcaggac

SEQ ID NO: 34070 - DNA, 26 bp, Homo sapiens
aatattttttttttaaattcaggact

SEQ ID NO: 34071 - DNA, 26 bp, Homo sapiens
atattttttttttaaattcaggactc

SEQ ID NO: 34072 - DNA, 26 bp, Homo sapiens
tattttttttttaaattcaggactca

SEQ ID NO: 34073 - DNA, 26 bp, Homo sapiens
attttttttttaaattcaggactcaa

SEQ ID NO: 34074 - DNA, 26 bp, Homo sapiens
ttttttttttaaattcaggactcaat

SEQ ID NO: 34075 - DNA, 26 bp, Homo sapiens
tttttttttaaattcaggactcaata

SEQ ID NO: 34076 - DNA, 26 bp, Homo sapiens
ttttttttaaattcaggactcaataa

SEQ ID NO: 34077 - DNA, 26 bp, Homo sapiens
tttttttaaattcaggactcaataaa

SEQ ID NO: 34078 - DNA, 26 bp, Homo sapiens
ttttttaaattcaggactcaataaaa

SEQ ID NO: 34079 - DNA, 26 bp, Homo sapiens
tttttaaattcaggactcaataaaat

SEQ ID NO: 34080 - DNA, 26 bp, Homo sapiens
ttttaaattcaggactcaataaaata

SEQ ID NO: 34081 - DNA, 26 bp, Homo sapiens
tttaaattcaggactcaataaaataa

SEQ ID NO: 34082 - DNA, 26 bp, Homo sapiens
ttaaattcaggactcaataaaataaa

SEQ ID NO: 34083 - DNA, 26 bp, Homo sapiens
taaattcaggactcaataaaataaac

SEQ ID NO: 34084 - DNA, 26 bp, Homo sapiens
aaattcaggactcaataaaataaaca

SEQ ID NO: 34085 - DNA, 26 bp, Homo sapiens
aattcaggactcaataaaataaacag

SEQ ID NO: 34086 - DNA, 26 bp, Homo sapiens
attcaggactcaataaaataaacagc

SEQ ID NO: 34087 - DNA, 26 bp, Homo sapiens
ttcaggactcaataaaataaacagct

SEQ ID NO: 34088 - DNA, 26 bp, Homo sapiens
tcaggactcaataaaataaacagctg

SEQ ID NO: 34089 - DNA, 26 bp, Homo sapiens
caggactcaataaaataaacagctgg

SEQ ID NO: 34090 - DNA, 26 bp, Homo sapiens
aggactcaataaaataaacagctgga

SEQ ID NO: 34091 - DNA, 26 bp, Homo sapiens
ggactcaataaaataaacagctggaa

SEQ ID NO: 34092 - DNA, 26 bp, Homo sapiens
gactcaataaaataaacagctggaaa

SEQ ID NO: 34093 - DNA, 26 bp, Homo sapiens
actcaataaaataaacagctggaaat

SEQ ID NO: 34094 - DNA, 26 bp, Homo sapiens
ctcaataaaataaacagctggaaata

SEQ ID NO: 34095 - DNA, 26 bp, Homo sapiens
tcaataaaataaacagctggaaataa

SEQ ID NO: 34096 - DNA, 26 bp, Homo sapiens
caataaaataaacagctggaaataag

SEQ ID NO: 34097 - DNA, 26 bp, Homo sapiens
aataaaataaacagctggaaataagc

SEQ ID NO: 34098 - DNA, 26 bp, Homo sapiens
ataaaataaacagctggaaataagca

SEQ ID NO: 34099 - DNA, 26 bp, Homo sapiens
taaaataaacagctggaaataagcag

SEQ ID NO: 34100 - DNA, 26 bp, Homo sapiens
aaaataaacagctggaaataagcaga

SEQ ID NO: 34101 - DNA, 26 bp, Homo sapiens
aaataaacagctggaaataagcagac

SEQ ID NO: 34102 - DNA, 26 bp, Homo sapiens
aataaacagctggaaataagcagact

SEQ ID NO: 34103 - DNA, 26 bp, Homo sapiens
ataaacagctggaaataagcagacta

SEQ ID NO: 34104 - DNA, 26 bp, Homo sapiens
taaacagctggaaataagcagactag

SEQ ID NO: 34105 - DNA, 26 bp, Homo sapiens
aaacagctggaaataagcagactagt

SEQ ID NO: 34106 - DNA, 26 bp, Homo sapiens
aacagctggaaataagcagactagtg

SEQ ID NO: 34107 - DNA, 26 bp, Homo sapiens
acagctggaaataagcagactagtgt

SEQ ID NO: 34108 - DNA, 26 bp, Homo sapiens
cagctggaaataagcagactagtgta

SEQ ID NO: 34109 - DNA, 26 bp, Homo sapiens
agctggaaataagcagactagtgtaa

SEQ ID NO: 34110 - DNA, 26 bp, Homo sapiens
gctggaaataagcagactagtgtaag

SEQ ID NO: 34111 - DNA, 26 bp, Homo sapiens
ctggaaataagcagactagtgtaaga

SEQ ID NO: 34112 - DNA, 26 bp, Homo sapiens
tggaaataagcagactagtgtaagag

SEQ ID NO: 34113 - DNA, 26 bp, Homo sapiens
ggaaataagcagactagtgtaagagt

SEQ ID NO: 34114 - DNA, 26 bp, Homo sapiens
gaaataagcagactagtgtaagagtg

SEQ ID NO: 34115 - DNA, 26 bp, Homo sapiens
aaataagcagactagtgtaagagtga

SEQ ID NO: 34116 - DNA, 26 bp, Homo sapiens
aataagcagactagtgtaagagtgaa

SEQ ID NO: 34117 - DNA, 26 bp, Homo sapiens
ataagcagactagtgtaagagtgaat

SEQ ID NO: 34118 - DNA, 26 bp, Homo sapiens
taagcagactagtgtaagagtgaatt

SEQ ID NO: 34119 - DNA, 26 bp, Homo sapiens
aagcagactagtgtaagagtgaattg

SEQ ID NO: 34120 - DNA, 26 bp, Homo sapiens
agcagactagtgtaagagtgaattga

SEQ ID NO: 34121 - DNA, 26 bp, Homo sapiens
gcagactagtgtaagagtgaattgaa

SEQ ID NO: 34122 - DNA, 26 bp, Homo sapiens
cagactagtgtaagagtgaattgaaa

SEQ ID NO: 34123 - DNA, 26 bp, Homo sapiens
agactagtgtaagagtgaattgaaaa

SEQ ID NO: 34124 - DNA, 26 bp, Homo sapiens
gactagtgtaagagtgaattgaaaag

SEQ ID NO: 34125 - DNA, 26 bp, Homo sapiens
actagtgtaagagtgaattgaaaaga

SEQ ID NO: 34126 - DNA, 26 bp, Homo sapiens
ctagtgtaagagtgaattgaaaagaa

SEQ ID NO: 34127 - DNA, 26 bp, Homo sapiens
tagtgtaagagtgaattgaaaagaaa

SEQ ID NO: 34128 - DNA, 26 bp, Homo sapiens
agtgtaagagtgaattgaaaagaaaa

SEQ ID NO: 34129 - DNA, 26 bp, Homo sapiens
gtgtaagagtgaattgaaaagaaaac

SEQ ID NO: 34130 - DNA, 26 bp, Homo sapiens
tgtaagagtgaattgaaaagaaaacc

SEQ ID NO: 34131 - DNA, 26 bp, Homo sapiens
gtaagagtgaattgaaaagaaaaccc

SEQ ID NO: 34132 - DNA, 26 bp, Homo sapiens
taagagtgaattgaaaagaaaaccca

SEQ ID NO: 34133 - DNA, 26 bp, Homo sapiens
aagagtgaattgaaaagaaaacccaa

SEQ ID NO: 34134 - DNA, 26 bp, Homo sapiens
agagtgaattgaaaagaaaacccaag

SEQ ID NO: 34135 - DNA, 26 bp, Homo sapiens
gagtgaattgaaaagaaaacccaagg

SEQ ID NO: 34136 - DNA, 26 bp, Homo sapiens
agtgaattgaaaagaaaacccaaggt

SEQ ID NO: 34137 - DNA, 26 bp, Homo sapiens
gtgaattgaaaagaaaacccaaggta

SEQ ID NO: 34138 - DNA, 26 bp, Homo sapiens
tgaattgaaaagaaaacccaaggtaa

SEQ ID NO: 34139 - DNA, 26 bp, Homo sapiens
gaattgaaaagaaaacccaaggtaag

SEQ ID NO: 34140 - DNA, 26 bp, Homo sapiens
aattgaaaagaaaacccaaggtaagt

SEQ ID NO: 34141 - DNA, 26 bp, Homo sapiens
attgaaaagaaaacccaaggtaagtg

SEQ ID NO: 34142 - DNA, 26 bp, Homo sapiens
ttgaaaagaaaacccaaggtaagtga

SEQ ID NO: 34143 - DNA, 26 bp, Homo sapiens
tgaaaagaaaacccaaggtaagtgaa

SEQ ID NO: 34144 - DNA, 26 bp, Homo sapiens
gaaaagaaaacccaaggtaagtgaaa

SEQ ID NO: 34145 - DNA, 26 bp, Homo sapiens
aaaagaaaacccaaggtaagtgaaaa

SEQ ID NO: 34146 - DNA, 26 bp, Homo sapiens
aaagaaaacccaaggtaagtgaaaag

SEQ ID NO: 34147 - DNA, 26 bp, Homo sapiens
aagaaaacccaaggtaagtgaaaagt

SEQ ID NO: 34148 - DNA, 26 bp, Homo sapiens
agaaaacccaaggtaagtgaaaagtt

SEQ ID NO: 34149 - DNA, 26 bp, Homo sapiens
gaaaacccaaggtaagtgaaaagttg

SEQ ID NO: 34150 - DNA, 26 bp, Homo sapiens
aaaacccaaggtaagtgaaaagttgg

SEQ ID NO: 34151 - DNA, 26 bp, Homo sapiens
aaacccaaggtaagtgaaaagttgga

SEQ ID NO: 34152 - DNA, 26 bp, Homo sapiens
aacccaaggtaagtgaaaagttggac

SEQ ID NO: 34153 - DNA, 26 bp, Homo sapiens
acccaaggtaagtgaaaagttggacg

SEQ ID NO: 34154 - DNA, 26 bp, Homo sapiens
cccaaggtaagtgaaaagttggacga

SEQ ID NO: 34155 - DNA, 26 bp, Homo sapiens
ccaaggtaagtgaaaagttggacgat

SEQ ID NO: 34156 - DNA, 26 bp, Homo sapiens
caaggtaagtgaaaagttggacgatc

SEQ ID NO: 34157 - DNA, 26 bp, Homo sapiens
aaggtaagtgaaaagttggacgatcc

SEQ ID NO: 34158 - DNA, 26 bp, Homo sapiens
aggtaagtgaaaagttggacgatcct

SEQ ID NO: 34159 - DNA, 26 bp, Homo sapiens
ggtaagtgaaaagttggacgatcctc

SEQ ID NO: 34160 - DNA, 26 bp, Homo sapiens
gtaagtgaaaagttggacgatcctct

SEQ ID NO: 34161 - DNA, 26 bp, Homo sapiens
taagtgaaaagttggacgatcctcta

SEQ ID NO: 34162 - DNA, 26 bp, Homo sapiens
aagtgaaaagttggacgatcctctaa

SEQ ID NO: 34163 - DNA, 26 bp, Homo sapiens
agtgaaaagttggacgatcctctaat

SEQ ID NO: 34164 - DNA, 26 bp, Homo sapiens
gtgaaaagttggacgatcctctaata

SEQ ID NO: 34165 - DNA, 26 bp, Homo sapiens
tgaaaagttggacgatcctctaataa

SEQ ID NO: 34166 - DNA, 26 bp, Homo sapiens
gaaaagttggacgatcctctaataaa

SEQ ID NO: 34167 - DNA, 26 bp, Homo sapiens
aaaagttggacgatcctctaataaag

SEQ ID NO: 34168 - DNA, 26 bp, Homo sapiens
aaagttggacgatcctctaataaaga

SEQ ID NO: 34169 - DNA, 26 bp, Homo sapiens
aagttggacgatcctctaataaagat

SEQ ID NO: 34170 - DNA, 26 bp, Homo sapiens
agttggacgatcctctaataaagatc

SEQ ID NO: 34171 - DNA, 26 bp, Homo sapiens
gttggacgatcctctaataaagatca

SEQ ID NO: 34172 - DNA, 26 bp, Homo sapiens
ttggacgatcctctaataaagatcat

SEQ ID NO: 34173 - DNA, 26 bp, Homo sapiens
tggacgatcctctaataaagatcatt

SEQ ID NO: 34174 - DNA, 26 bp, Homo sapiens
ggacgatcctctaataaagatcatta

SEQ ID NO: 34175 - DNA, 26 bp, Homo sapiens
gacgatcctctaataaagatcattag

SEQ ID NO: 34176 - DNA, 26 bp, Homo sapiens
acgatcctctaataaagatcattagc

SEQ ID NO: 34177 - DNA, 26 bp, Homo sapiens
cgatcctctaataaagatcattagca

SEQ ID NO: 34178 - DNA, 26 bp, Homo sapiens
gatcctctaataaagatcattagcaa

SEQ ID NO: 34179 - DNA, 26 bp, Homo sapiens
atcctctaataaagatcattagcaaa

SEQ ID NO: 34180 - DNA, 26 bp, Homo sapiens
tcctctaataaagatcattagcaaag

SEQ ID NO: 34181 - DNA, 26 bp, Homo sapiens
cctctaataaagatcattagcaaagt

SEQ ID NO: 34182 - DNA, 26 bp, Homo sapiens
ctctaataaagatcattagcaaagtt

SEQ ID NO: 34183 - DNA, 26 bp, Homo sapiens
tctaataaagatcattagcaaagttt

SEQ ID NO: 34184 - DNA, 26 bp, Homo sapiens
ctaataaagatcattagcaaagtttt

SEQ ID NO: 34185 - DNA, 26 bp, Homo sapiens
taataaagatcattagcaaagtttta

SEQ ID NO: 34186 - DNA, 26 bp, Homo sapiens
aataaagatcattagcaaagttttag

SEQ ID NO: 34187 - DNA, 26 bp, Homo sapiens
ataaagatcattagcaaagttttagt

SEQ ID NO: 34188 - DNA, 26 bp, Homo sapiens
taaagatcattagcaaagttttagtt

SEQ ID NO: 34189 - DNA, 26 bp, Homo sapiens
aaagatcattagcaaagttttagttc

SEQ ID NO: 34190 - DNA, 26 bp, Homo sapiens
aagatcattagcaaagttttagttca

SEQ ID NO: 34191 - DNA, 26 bp, Homo sapiens
agatcattagcaaagttttagttcaa

SEQ ID NO: 34192 - DNA, 26 bp, Homo sapiens
gatcattagcaaagttttagttcaat

SEQ ID NO: 34193 - DNA, 26 bp, Homo sapiens
atcattagcaaagttttagttcaata

SEQ ID NO: 34194 - DNA, 26 bp, Homo sapiens
tcattagcaaagttttagttcaatac

SEQ ID NO: 34195 - DNA, 26 bp, Homo sapiens
cattagcaaagttttagttcaatact

SEQ ID NO: 34196 - DNA, 26 bp, Homo sapiens
attagcaaagttttagttcaatacta

SEQ ID NO: 34197 - DNA, 26 bp, Homo sapiens
ttagcaaagttttagttcaatactag

SEQ ID NO: 34198 - DNA, 26 bp, Homo sapiens
tagcaaagttttagttcaatactagt

SEQ ID NO: 34199 - DNA, 26 bp, Homo sapiens
agcaaagttttagttcaatactagtt

SEQ ID NO: 34200 - DNA, 26 bp, Homo sapiens
gcaaagttttagttcaatactagttt

SEQ ID NO: 34201 - DNA, 26 bp, Homo sapiens
caaagttttagttcaatactagtttt

SEQ ID NO: 34202 - DNA, 26 bp, Homo sapiens
aaagttttagttcaatactagtttta

SEQ ID NO: 34203 - DNA, 26 bp, Homo sapiens
aagttttagttcaatactagttttag

SEQ ID NO: 34204 - DNA, 26 bp, Homo sapiens
agttttagttcaatactagttttagg

SEQ ID NO: 34205 - DNA, 26 bp, Homo sapiens
gttttagttcaatactagttttagga

SEQ ID NO: 34206 - DNA, 26 bp, Homo sapiens
ttttagttcaatactagttttaggat

SEQ ID NO: 34207 - DNA, 26 bp, Homo sapiens
tttagttcaatactagttttaggatt

SEQ ID NO: 34208 - DNA, 26 bp, Homo sapiens
ttagttcaatactagttttaggattc

SEQ ID NO: 34209 - DNA, 26 bp, Homo sapiens
tagttcaatactagttttaggattcc

SEQ ID NO: 34210 - DNA, 26 bp, Homo sapiens
agttcaatactagttttaggattccc

SEQ ID NO: 34211 - DNA, 26 bp, Homo sapiens
gttcaatactagttttaggattccca

SEQ ID NO: 34212 - DNA, 26 bp, Homo sapiens
ttcaatactagttttaggattcccat

SEQ ID NO: 34213 - DNA, 26 bp, Homo sapiens
tcaatactagttttaggattcccata

SEQ ID NO: 34214 - DNA, 26 bp, Homo sapiens
caatactagttttaggattcccataa

SEQ ID NO: 34215 - DNA, 26 bp, Homo sapiens
aatactagttttaggattcccataaa

SEQ ID NO: 34216 - DNA, 26 bp, Homo sapiens
atactagttttaggattcccataaat

SEQ ID NO: 34217 - DNA, 26 bp, Homo sapiens
tactagttttaggattcccataaatg

SEQ ID NO: 34218 - DNA, 26 bp, Homo sapiens
actagttttaggattcccataaatgg

SEQ ID NO: 34219 - DNA, 26 bp, Homo sapiens
ctagttttaggattcccataaatggc

SEQ ID NO: 34220 - DNA, 26 bp, Homo sapiens
tagttttaggattcccataaatggct

SEQ ID NO: 34221 - DNA, 26 bp, Homo sapiens
agttttaggattcccataaatggctt

SEQ ID NO: 34222 - DNA, 26 bp, Homo sapiens
gttttaggattcccataaatggcttg

SEQ ID NO: 34223 - DNA, 26 bp, Homo sapiens
ttttaggattcccataaatggcttgc

SEQ ID NO: 34224 - DNA, 26 bp, Homo sapiens
tttaggattcccataaatggcttgca

SEQ ID NO: 34225 - DNA, 26 bp, Homo sapiens
ttaggattcccataaatggcttgcat

SEQ ID NO: 34226 - DNA, 26 bp, Homo sapiens
taggattcccataaatggcttgcatt

SEQ ID NO: 34227 - DNA, 26 bp, Homo sapiens
aggattcccataaatggcttgcattt

SEQ ID NO: 34228 - DNA, 26 bp, Homo sapiens
ggattcccataaatggcttgcatttt

SEQ ID NO: 34229 - DNA, 26 bp, Homo sapiens
gattcccataaatggcttgcattttt

SEQ ID NO: 34230 - DNA, 26 bp, Homo sapiens
attcccataaatggcttgcattttta

SEQ ID NO: 34231 - DNA, 26 bp, Homo sapiens
ttcccataaatggcttgcatttttag

SEQ ID NO: 34232 - DNA, 26 bp, Homo sapiens
tcccataaatggcttgcatttttagt

SEQ ID NO: 34233 - DNA, 26 bp, Homo sapiens
cccataaatggcttgcatttttagtg

SEQ ID NO: 34234 - DNA, 26 bp, Homo sapiens
ccataaatggcttgcatttttagtgt

SEQ ID NO: 34235 - DNA, 26 bp, Homo sapiens
cataaatggcttgcatttttagtgtg

SEQ ID NO: 34236 - DNA, 26 bp, Homo sapiens
ataaatggcttgcatttttagtgtgg

SEQ ID NO: 34237 - DNA, 26 bp, Homo sapiens
taaatggcttgcatttttagtgtggc

SEQ ID NO: 34238 - DNA, 26 bp, Homo sapiens
aaatggcttgcatttttagtgtggca

SEQ ID NO: 34239 - DNA, 26 bp, Homo sapiens
aatggcttgcatttttagtgtggcag

SEQ ID NO: 34240 - DNA, 26 bp, Homo sapiens
atggcttgcatttttagtgtggcaga

SEQ ID NO: 34241 - DNA, 26 bp, Homo sapiens
tggcttgcatttttagtgtggcagaa

SEQ ID NO: 34242 - DNA, 26 bp, Homo sapiens
ggcttgcatttttagtgtggcagaaa

SEQ ID NO: 34243 - DNA, 26 bp, Homo sapiens
gcttgcatttttagtgtggcagaaaa

SEQ ID NO: 34244 - DNA, 26 bp, Homo sapiens
cttgcatttttagtgtggcagaaaag

SEQ ID NO: 34245 - DNA, 26 bp, Homo sapiens
ttgcatttttagtgtggcagaaaagg

SEQ ID NO: 34246 - DNA, 26 bp, Homo sapiens
tgcatttttagtgtggcagaaaagga

SEQ ID NO: 34247 - DNA, 26 bp, Homo sapiens
gcatttttagtgtggcagaaaaggag

SEQ ID NO: 34248 - DNA, 26 bp, Homo sapiens
catttttagtgtggcagaaaaggagt

SEQ ID NO: 34249 - DNA, 26 bp, Homo sapiens
atttttagtgtggcagaaaaggagtt

SEQ ID NO: 34250 - DNA, 26 bp, Homo sapiens
tttttagtgtggcagaaaaggagttt

SEQ ID NO: 34251 - DNA, 26 bp, Homo sapiens
ttttagtgtggcagaaaaggagtttt

SEQ ID NO: 34252 - DNA, 26 bp, Homo sapiens
tttagtgtggcagaaaaggagttttt

SEQ ID NO: 34253 - DNA, 26 bp, Homo sapiens
ttagtgtggcagaaaaggagttttta

SEQ ID NO: 34254 - DNA, 26 bp, Homo sapiens
tagtgtggcagaaaaggagtttttac

SEQ ID NO: 34255 - DNA, 26 bp, Homo sapiens
agtgtggcagaaaaggagtttttaca

SEQ ID NO: 34256 - DNA, 26 bp, Homo sapiens
gtgtggcagaaaaggagtttttacat

SEQ ID NO: 34257 - DNA, 26 bp, Homo sapiens
tgtggcagaaaaggagtttttacata

SEQ ID NO: 34258 - DNA, 26 bp, Homo sapiens
gtggcagaaaaggagtttttacatac

SEQ ID NO: 34259 - DNA, 26 bp, Homo sapiens
tggcagaaaaggagtttttacatact

SEQ ID NO: 34260 - DNA, 26 bp, Homo sapiens
ggcagaaaaggagtttttacatactg

SEQ ID NO: 34261 - DNA, 26 bp, Homo sapiens
gcagaaaaggagtttttacatactgt

SEQ ID NO: 34262 - DNA, 26 bp, Homo sapiens
cagaaaaggagtttttacatactgta

SEQ ID NO: 34263 - DNA, 26 bp, Homo sapiens
agaaaaggagtttttacatactgtac

SEQ ID NO: 34264 - DNA, 26 bp, Homo sapiens
gaaaaggagtttttacatactgtaca

SEQ ID NO: 34265 - DNA, 26 bp, Homo sapiens
aaaaggagtttttacatactgtacac

SEQ ID NO: 34266 - DNA, 26 bp, Homo sapiens
aaaggagtttttacatactgtacaca

SEQ ID NO: 34267 - DNA, 26 bp, Homo sapiens
aaggagtttttacatactgtacacaa

SEQ ID NO: 34268 - DNA, 26 bp, Homo sapiens
aggagtttttacatactgtacacaaa

SEQ ID NO: 34269 - DNA, 26 bp, Homo sapiens
ggagtttttacatactgtacacaaaa

SEQ ID NO: 34270 - DNA, 26 bp, Homo sapiens
gagtttttacatactgtacacaaaac

SEQ ID NO: 34271 - DNA, 26 bp, Homo sapiens
agtttttacatactgtacacaaaaca

SEQ ID NO: 34272 - DNA, 26 bp, Homo sapiens
gtttttacatactgtacacaaaacag

SEQ ID NO: 34273 - DNA, 26 bp, Homo sapiens
tttttacatactgtacacaaaacaga

SEQ ID NO: 34274 - DNA, 26 bp, Homo sapiens
ttttacatactgtacacaaaacagac

SEQ ID NO: 34275 - DNA, 26 bp, Homo sapiens
tttacatactgtacacaaaacagaca

SEQ ID NO: 34276 - DNA, 26 bp, Homo sapiens
ttacatactgtacacaaaacagacag

SEQ ID NO: 34277 - DNA, 26 bp, Homo sapiens
tacatactgtacacaaaacagacagc

SEQ ID NO: 34278 - DNA, 26 bp, Homo sapiens
acatactgtacacaaaacagacagca

SEQ ID NO: 34279 - DNA, 26 bp, Homo sapiens
catactgtacacaaaacagacagcat

SEQ ID NO: 34280 - DNA, 26 bp, Homo sapiens
atactgtacacaaaacagacagcata

SEQ ID NO: 34281 - DNA, 26 bp, Homo sapiens
tactgtacacaaaacagacagcatat

SEQ ID NO: 34282 - DNA, 26 bp, Homo sapiens
actgtacacaaaacagacagcatata

SEQ ID NO: 34283 - DNA, 26 bp, Homo sapiens
ctgtacacaaaacagacagcatatat

SEQ ID NO: 34284 - DNA, 26 bp, Homo sapiens
tgtacacaaaacagacagcatatatt

SEQ ID NO: 34285 - DNA, 26 bp, Homo sapiens
gtacacaaaacagacagcatatattt

SEQ ID NO: 34286 - DNA, 26 bp, Homo sapiens
tacacaaaacagacagcatatattta

SEQ ID NO: 34287 - DNA, 26 bp, Homo sapiens
acacaaaacagacagcatatatttat

SEQ ID NO: 34288 - DNA, 26 bp, Homo sapiens
cacaaaacagacagcatatatttata

SEQ ID NO: 34289 - DNA, 26 bp, Homo sapiens
acaaaacagacagcatatatttatag

SEQ ID NO: 34290 - DNA, 26 bp, Homo sapiens
caaaacagacagcatatatttatagg

SEQ ID NO: 34291 - DNA, 26 bp, Homo sapiens
aaaacagacagcatatatttataggt

SEQ ID NO: 34292 - DNA, 26 bp, Homo sapiens
aaacagacagcatatatttataggta

SEQ ID NO: 34293 - DNA, 26 bp, Homo sapiens
aacagacagcatatatttataggtac

SEQ ID NO: 34294 - DNA, 26 bp, Homo sapiens
acagacagcatatatttataggtaca

SEQ ID NO: 34295 - DNA, 26 bp, Homo sapiens
cagacagcatatatttataggtacag

SEQ ID NO: 34296 - DNA, 26 bp, Homo sapiens
agacagcatatatttataggtacagt

SEQ ID NO: 34297 - DNA, 26 bp, Homo sapiens
gacagcatatatttataggtacagta

SEQ ID NO: 34298 - DNA, 26 bp, Homo sapiens
acagcatatatttataggtacagtat

SEQ ID NO: 34299 - DNA, 26 bp, Homo sapiens
cagcatatatttataggtacagtatt

SEQ ID NO: 34300 - DNA, 26 bp, Homo sapiens
agcatatatttataggtacagtatta

SEQ ID NO: 34301 - DNA, 26 bp, Homo sapiens
gcatatatttataggtacagtattac

SEQ ID NO: 34302 - DNA, 26 bp, Homo sapiens
catatatttataggtacagtattact

SEQ ID NO: 34303 - DNA, 26 bp, Homo sapiens
atatatttataggtacagtattactg

SEQ ID NO: 34304 - DNA, 26 bp, Homo sapiens
tatatttataggtacagtattactgt

SEQ ID NO: 34305 - DNA, 26 bp, Homo sapiens
atatttataggtacagtattactgtt

SEQ ID NO: 34306 - DNA, 26 bp, Homo sapiens
tatttataggtacagtattactgttt

SEQ ID NO: 34307 - DNA, 26 bp, Homo sapiens
atttataggtacagtattactgtttc

SEQ ID NO: 34308 - DNA, 26 bp, Homo sapiens
tttataggtacagtattactgtttcc

SEQ ID NO: 34309 - DNA, 26 bp, Homo sapiens
ttataggtacagtattactgtttcca

SEQ ID NO: 34310 - DNA, 26 bp, Homo sapiens
tataggtacagtattactgtttccaa

SEQ ID NO: 34311 - DNA, 26 bp, Homo sapiens
ataggtacagtattactgtttccaaa

SEQ ID NO: 34312 - DNA, 26 bp, Homo sapiens
taggtacagtattactgtttccaaac

SEQ ID NO: 34313 - DNA, 26 bp, Homo sapiens
aggtacagtattactgtttccaaact

SEQ ID NO: 34314 - DNA, 26 bp, Homo sapiens
ggtacagtattactgtttccaaactt

SEQ ID NO: 34315 - DNA, 26 bp, Homo sapiens
gtacagtattactgtttccaaacttg

SEQ ID NO: 34316 - DNA, 26 bp, Homo sapiens
tacagtattactgtttccaaacttgc

SEQ ID NO: 34317 - DNA, 26 bp, Homo sapiens
acagtattactgtttccaaacttgca

SEQ ID NO: 34318 - DNA, 26 bp, Homo sapiens
cagtattactgtttccaaacttgcat

SEQ ID NO: 34319 - DNA, 26 bp, Homo sapiens
agtattactgtttccaaacttgcatg

SEQ ID NO: 34320 - DNA, 26 bp, Homo sapiens
gtattactgtttccaaacttgcatgt

SEQ ID NO: 34321 - DNA, 26 bp, Homo sapiens
tattactgtttccaaacttgcatgta

SEQ ID NO: 34322 - DNA, 26 bp, Homo sapiens
attactgtttccaaacttgcatgtat

SEQ ID NO: 34323 - DNA, 26 bp, Homo sapiens
ttactgtttccaaacttgcatgtata

SEQ ID NO: 34324 - DNA, 26 bp, Homo sapiens
tactgtttccaaacttgcatgtatat

SEQ ID NO: 34325 - DNA, 26 bp, Homo sapiens
actgtttccaaacttgcatgtatatt

SEQ ID NO: 34326 - DNA, 26 bp, Homo sapiens
ctgtttccaaacttgcatgtatattt

SEQ ID NO: 34327 - DNA, 26 bp, Homo sapiens
tgtttccaaacttgcatgtatattta

SEQ ID NO: 34328 - DNA, 26 bp, Homo sapiens
gtttccaaacttgcatgtatatttac

SEQ ID NO: 34329 - DNA, 26 bp, Homo sapiens
tttccaaacttgcatgtatatttaca

SEQ ID NO: 34330 - DNA, 26 bp, Homo sapiens
ttccaaacttgcatgtatatttacag

SEQ ID NO: 34331 - DNA, 26 bp, Homo sapiens
tccaaacttgcatgtatatttacaga

SEQ ID NO: 34332 - DNA, 26 bp, Homo sapiens
ccaaacttgcatgtatatttacagaa

SEQ ID NO: 34333 - DNA, 26 bp, Homo sapiens
caaacttgcatgtatatttacagaag

SEQ ID NO: 34334 - DNA, 26 bp, Homo sapiens
aaacttgcatgtatatttacagaagg

SEQ ID NO: 34335 - DNA, 26 bp, Homo sapiens
aacttgcatgtatatttacagaaggc

SEQ ID NO: 34336 - DNA, 26 bp, Homo sapiens
acttgcatgtatatttacagaaggct

SEQ ID NO: 34337 - DNA, 26 bp, Homo sapiens
cttgcatgtatatttacagaaggctg

SEQ ID NO: 34338 - DNA, 26 bp, Homo sapiens
ttgcatgtatatttacagaaggctga

SEQ ID NO: 34339 - DNA, 26 bp, Homo sapiens
tgcatgtatatttacagaaggctgag

SEQ ID NO: 34340 - DNA, 26 bp, Homo sapiens
gcatgtatatttacagaaggctgagt

SEQ ID NO: 34341 - DNA, 26 bp, Homo sapiens
catgtatatttacagaaggctgagtt

SEQ ID NO: 34342 - DNA, 26 bp, Homo sapiens
atgtatatttacagaaggctgagttt

SEQ ID NO: 34343 - DNA, 26 bp, Homo sapiens
tgtatatttacagaaggctgagtttg

SEQ ID NO: 34344 - DNA, 26 bp, Homo sapiens
gtatatttacagaaggctgagtttgt

SEQ ID NO: 34345 - DNA, 26 bp, Homo sapiens
tatatttacagaaggctgagtttgtt

SEQ ID NO: 34346 - DNA, 26 bp, Homo sapiens
atatttacagaaggctgagtttgttt

SEQ ID NO: 34347 - DNA, 26 bp, Homo sapiens
tatttacagaaggctgagtttgttta

SEQ ID NO: 34348 - DNA, 26 bp, Homo sapiens
atttacagaaggctgagtttgtttac

SEQ ID NO: 34349 - DNA, 26 bp, Homo sapiens
tttacagaaggctgagtttgtttact

SEQ ID NO: 34350 - DNA, 26 bp, Homo sapiens
ttacagaaggctgagtttgtttactc

SEQ ID NO: 34351 - DNA, 26 bp, Homo sapiens
tacagaaggctgagtttgtttactca

SEQ ID NO: 34352 - DNA, 26 bp, Homo sapiens
acagaaggctgagtttgtttactcaa

SEQ ID NO: 34353 - DNA, 26 bp, Homo sapiens
cagaaggctgagtttgtttactcaaa

SEQ ID NO: 34354 - DNA, 26 bp, Homo sapiens
agaaggctgagtttgtttactcaaac

SEQ ID NO: 34355 - DNA, 26 bp, Homo sapiens
gaaggctgagtttgtttactcaaaca

SEQ ID NO: 34356 - DNA, 26 bp, Homo sapiens
aaggctgagtttgtttactcaaacag

SEQ ID NO: 34357 - DNA, 26 bp, Homo sapiens
aggctgagtttgtttactcaaacaga

SEQ ID NO: 34358 - DNA, 26 bp, Homo sapiens
ggctgagtttgtttactcaaacagaa

SEQ ID NO: 34359 - DNA, 26 bp, Homo sapiens
gctgagtttgtttactcaaacagaag

SEQ ID NO: 34360 - DNA, 26 bp, Homo sapiens
ctgagtttgtttactcaaacagaagt

SEQ ID NO: 34361 - DNA, 26 bp, Homo sapiens
tgagtttgtttactcaaacagaagtt

SEQ ID NO: 34362 - DNA, 26 bp, Homo sapiens
gagtttgtttactcaaacagaagttt

SEQ ID NO: 34363 - DNA, 26 bp, Homo sapiens
agtttgtttactcaaacagaagtttg

SEQ ID NO: 34364 - DNA, 26 bp, Homo sapiens
gtttgtttactcaaacagaagtttgt

SEQ ID NO: 34365 - DNA, 26 bp, Homo sapiens
tttgtttactcaaacagaagtttgtg

SEQ ID NO: 34366 - DNA, 26 bp, Homo sapiens
ttgtttactcaaacagaagtttgtga

SEQ ID NO: 34367 - DNA, 26 bp, Homo sapiens
tgtttactcaaacagaagtttgtgaa

SEQ ID NO: 34368 - DNA, 26 bp, Homo sapiens
gtttactcaaacagaagtttgtgaaa

SEQ ID NO: 34369 - DNA, 26 bp, Homo sapiens
tttactcaaacagaagtttgtgaaat

SEQ ID NO: 34370 - DNA, 26 bp, Homo sapiens
ttactcaaacagaagtttgtgaaatt

SEQ ID NO: 34371 - DNA, 26 bp, Homo sapiens
tactcaaacagaagtttgtgaaattt

SEQ ID NO: 34372 - DNA, 26 bp, Homo sapiens
actcaaacagaagtttgtgaaatttg

SEQ ID NO: 34373 - DNA, 26 bp, Homo sapiens
ctcaaacagaagtttgtgaaatttgt

SEQ ID NO: 34374 - DNA, 26 bp, Homo sapiens
tcaaacagaagtttgtgaaatttgtg

SEQ ID NO: 34375 - DNA, 26 bp, Homo sapiens
caaacagaagtttgtgaaatttgtgt

SEQ ID NO: 34376 - DNA, 26 bp, Homo sapiens
aaacagaagtttgtgaaatttgtgtg

SEQ ID NO: 34377 - DNA, 26 bp, Homo sapiens
aacagaagtttgtgaaatttgtgtgc

SEQ ID NO: 34378 - DNA, 26 bp, Homo sapiens
acagaagtttgtgaaatttgtgtgct

SEQ ID NO: 34379 - DNA, 26 bp, Homo sapiens
cagaagtttgtgaaatttgtgtgctt

SEQ ID NO: 34380 - DNA, 26 bp, Homo sapiens
agaagtttgtgaaatttgtgtgctta

SEQ ID NO: 34381 - DNA, 26 bp, Homo sapiens
gaagtttgtgaaatttgtgtgcttaa

SEQ ID NO: 34382 - DNA, 26 bp, Homo sapiens
aagtttgtgaaatttgtgtgcttaat

SEQ ID NO: 34383 - DNA, 26 bp, Homo sapiens
agtttgtgaaatttgtgtgcttaatc

SEQ ID NO: 34384 - DNA, 26 bp, Homo sapiens
gtttgtgaaatttgtgtgcttaatcc

SEQ ID NO: 34385 - DNA, 26 bp, Homo sapiens
tttgtgaaatttgtgtgcttaatcct

SEQ ID NO: 34386 - DNA, 26 bp, Homo sapiens
ttgtgaaatttgtgtgcttaatcctc

SEQ ID NO: 34387 - DNA, 26 bp, Homo sapiens
tgtgaaatttgtgtgcttaatcctca

SEQ ID NO: 34388 - DNA, 26 bp, Homo sapiens
gtgaaatttgtgtgcttaatcctcaa

SEQ ID NO: 34389 - DNA, 26 bp, Homo sapiens
tgaaatttgtgtgcttaatcctcaag

SEQ ID NO: 34390 - DNA, 26 bp, Homo sapiens
gaaatttgtgtgcttaatcctcaaga

SEQ ID NO: 34391 - DNA, 26 bp, Homo sapiens
aaatttgtgtgcttaatcctcaagac

SEQ ID NO: 34392 - DNA, 26 bp, Homo sapiens
aatttgtgtgcttaatcctcaagacc

SEQ ID NO: 34393 - DNA, 26 bp, Homo sapiens
atttgtgtgcttaatcctcaagacct

SEQ ID NO: 34394 - DNA, 26 bp, Homo sapiens
tttgtgtgcttaatcctcaagaccta

SEQ ID NO: 34395 - DNA, 26 bp, Homo sapiens
ttgtgtgcttaatcctcaagacctac

SEQ ID NO: 34396 - DNA, 26 bp, Homo sapiens
tgtgtgcttaatcctcaagacctaca

SEQ ID NO: 34397 - DNA, 26 bp, Homo sapiens
gtgtgcttaatcctcaagacctacac

SEQ ID NO: 34398 - DNA, 26 bp, Homo sapiens
tgtgcttaatcctcaagacctacaca

SEQ ID NO: 34399 - DNA, 26 bp, Homo sapiens
gtgcttaatcctcaagacctacacac

SEQ ID NO: 34400 - DNA, 26 bp, Homo sapiens
tgcttaatcctcaagacctacacaca

SEQ ID NO: 34401 - DNA, 26 bp, Homo sapiens
gcttaatcctcaagacctacacacaa

SEQ ID NO: 34402 - DNA, 26 bp, Homo sapiens
cttaatcctcaagacctacacacaat

SEQ ID NO: 34403 - DNA, 26 bp, Homo sapiens
ttaatcctcaagacctacacacaatt

SEQ ID NO: 34404 - DNA, 26 bp, Homo sapiens
taatcctcaagacctacacacaatta

SEQ ID NO: 34405 - DNA, 26 bp, Homo sapiens
aatcctcaagacctacacacaattag

SEQ ID NO: 34406 - DNA, 26 bp, Homo sapiens
atcctcaagacctacacacaattaga

SEQ ID NO: 34407 - DNA, 26 bp, Homo sapiens
tcctcaagacctacacacaattagaa

SEQ ID NO: 34408 - DNA, 26 bp, Homo sapiens
cctcaagacctacacacaattagaat

SEQ ID NO: 34409 - DNA, 26 bp, Homo sapiens
ctcaagacctacacacaattagaatc

SEQ ID NO: 34410 - DNA, 26 bp, Homo sapiens
tcaagacctacacacaattagaatca

SEQ ID NO: 34411 - DNA, 26 bp, Homo sapiens
caagacctacacacaattagaatcag

SEQ ID NO: 34412 - DNA, 26 bp, Homo sapiens
aagacctacacacaattagaatcagc

SEQ ID NO: 34413 - DNA, 26 bp, Homo sapiens
agacctacacacaattagaatcagca

SEQ ID NO: 34414 - DNA, 26 bp, Homo sapiens
gacctacacacaattagaatcagcat

SEQ ID NO: 34415 - DNA, 26 bp, Homo sapiens
acctacacacaattagaatcagcatt

SEQ ID NO: 34416 - DNA, 26 bp, Homo sapiens
cctacacacaattagaatcagcattt

SEQ ID NO: 34417 - DNA, 26 bp, Homo sapiens
ctacacacaattagaatcagcatttc

SEQ ID NO: 34418 - DNA, 26 bp, Homo sapiens
tacacacaattagaatcagcatttca

SEQ ID NO: 34419 - DNA, 26 bp, Homo sapiens
acacacaattagaatcagcatttcat

SEQ ID NO: 34420 - DNA, 26 bp, Homo sapiens
cacacaattagaatcagcatttcatg

SEQ ID NO: 34421 - DNA, 26 bp, Homo sapiens
acacaattagaatcagcatttcatgt

SEQ ID NO: 34422 - DNA, 26 bp, Homo sapiens
cacaattagaatcagcatttcatgtg

SEQ ID NO: 34423 - DNA, 26 bp, Homo sapiens
acaattagaatcagcatttcatgtgg

SEQ ID NO: 34424 - DNA, 26 bp, Homo sapiens
caattagaatcagcatttcatgtggt

SEQ ID NO: 34425 - DNA, 26 bp, Homo sapiens
aattagaatcagcatttcatgtggtc

SEQ ID NO: 34426 - DNA, 26 bp, Homo sapiens
attagaatcagcatttcatgtggtct

SEQ ID NO: 34427 - DNA, 26 bp, Homo sapiens
ttagaatcagcatttcatgtggtctt

SEQ ID NO: 34428 - DNA, 26 bp, Homo sapiens
tagaatcagcatttcatgtggtcttt

SEQ ID NO: 34429 - DNA, 26 bp, Homo sapiens
agaatcagcatttcatgtggtctttt

SEQ ID NO: 34430 - DNA, 26 bp, Homo sapiens
gaatcagcatttcatgtggtcttttt

SEQ ID NO: 34431 - DNA, 26 bp, Homo sapiens
aatcagcatttcatgtggtcttttta

SEQ ID NO: 34432 - DNA, 26 bp, Homo sapiens
atcagcatttcatgtggtctttttaa

SEQ ID NO: 34433 - DNA, 26 bp, Homo sapiens
tcagcatttcatgtggtctttttaaa

SEQ ID NO: 34434 - DNA, 26 bp, Homo sapiens
cagcatttcatgtggtctttttaaat

SEQ ID NO: 34435 - DNA, 26 bp, Homo sapiens
agcatttcatgtggtctttttaaatg

SEQ ID NO: 34436 - DNA, 26 bp, Homo sapiens
gcatttcatgtggtctttttaaatgt

SEQ ID NO: 34437 - DNA, 26 bp, Homo sapiens
catttcatgtggtctttttaaatgtg

SEQ ID NO: 34438 - DNA, 26 bp, Homo sapiens
atttcatgtggtctttttaaatgtgg

SEQ ID NO: 34439 - DNA, 26 bp, Homo sapiens
tttcatgtggtctttttaaatgtggc

SEQ ID NO: 34440 - DNA, 26 bp, Homo sapiens
ttcatgtggtctttttaaatgtggct

SEQ ID NO: 34441 - DNA, 26 bp, Homo sapiens
tcatgtggtctttttaaatgtggctt

SEQ ID NO: 34442 - DNA, 26 bp, Homo sapiens
catgtggtctttttaaatgtggcttt

SEQ ID NO: 34443 - DNA, 26 bp, Homo sapiens
atgtggtctttttaaatgtggcttta

SEQ ID NO: 34444 - DNA, 26 bp, Homo sapiens
tgtggtctttttaaatgtggctttaa

SEQ ID NO: 34445 - DNA, 26 bp, Homo sapiens
gtggtctttttaaatgtggctttaat

SEQ ID NO: 34446 - DNA, 26 bp, Homo sapiens
tggtctttttaaatgtggctttaata

SEQ ID NO: 34447 - DNA, 26 bp, Homo sapiens
ggtctttttaaatgtggctttaatac

SEQ ID NO: 34448 - DNA, 26 bp, Homo sapiens
gtctttttaaatgtggctttaatact

SEQ ID NO: 34449 - DNA, 26 bp, Homo sapiens
tctttttaaatgtggctttaatactt

SEQ ID NO: 34450 - DNA, 26 bp, Homo sapiens
ctttttaaatgtggctttaatacttg

SEQ ID NO: 34451 - DNA, 26 bp, Homo sapiens
tttttaaatgtggctttaatacttgg

SEQ ID NO: 34452 - DNA, 26 bp, Homo sapiens
ttttaaatgtggctttaatacttggt

SEQ ID NO: 34453 - DNA, 26 bp, Homo sapiens
tttaaatgtggctttaatacttggtt

SEQ ID NO: 34454 - DNA, 26 bp, Homo sapiens
ttaaatgtggctttaatacttggttg

SEQ ID NO: 34455 - DNA, 26 bp, Homo sapiens
taaatgtggctttaatacttggttgt

SEQ ID NO: 34456 - DNA, 26 bp, Homo sapiens
aaatgtggctttaatacttggttgta

SEQ ID NO: 34457 - DNA, 26 bp, Homo sapiens
aatgtggctttaatacttggttgtag

SEQ ID NO: 34458 - DNA, 26 bp, Homo sapiens
atgtggctttaatacttggttgtaga

SEQ ID NO: 34459 - DNA, 26 bp, Homo sapiens
tgtggctttaatacttggttgtagag

SEQ ID NO: 34460 - DNA, 26 bp, Homo sapiens
gtggctttaatacttggttgtagagg

SEQ ID NO: 34461 - DNA, 26 bp, Homo sapiens
tggctttaatacttggttgtagagga

SEQ ID NO: 34462 - DNA, 26 bp, Homo sapiens
ggctttaatacttggttgtagaggag

SEQ ID NO: 34463 - DNA, 26 bp, Homo sapiens
gctttaatacttggttgtagaggaga

SEQ ID NO: 34464 - DNA, 26 bp, Homo sapiens
ctttaatacttggttgtagaggagaa

SEQ ID NO: 34465 - DNA, 26 bp, Homo sapiens
tttaatacttggttgtagaggagaat

SEQ ID NO: 34466 - DNA, 26 bp, Homo sapiens
ttaatacttggttgtagaggagaatg

SEQ ID NO: 34467 - DNA, 26 bp, Homo sapiens
taatacttggttgtagaggagaatgt

SEQ ID NO: 34468 - DNA, 26 bp, Homo sapiens
aatacttggttgtagaggagaatgtt

SEQ ID NO: 34469 - DNA, 26 bp, Homo sapiens
atacttggttgtagaggagaatgtta

SEQ ID NO: 34470 - DNA, 26 bp, Homo sapiens
tacttggttgtagaggagaatgttaa

SEQ ID NO: 34471 - DNA, 26 bp, Homo sapiens
acttggttgtagaggagaatgttaac

SEQ ID NO: 34472 - DNA, 26 bp, Homo sapiens
cttggttgtagaggagaatgttaacc

SEQ ID NO: 34473 - DNA, 26 bp, Homo sapiens
ttggttgtagaggagaatgttaaccg

SEQ ID NO: 34474 - DNA, 26 bp, Homo sapiens
tggttgtagaggagaatgttaaccgt

SEQ ID NO: 34475 - DNA, 26 bp, Homo sapiens
ggttgtagaggagaatgttaaccgta

SEQ ID NO: 34476 - DNA, 26 bp, Homo sapiens
gttgtagaggagaatgttaaccgtaa

SEQ ID NO: 34477 - DNA, 26 bp, Homo sapiens
ttgtagaggagaatgttaaccgtaag

SEQ ID NO: 34478 - DNA, 26 bp, Homo sapiens
tgtagaggagaatgttaaccgtaagg

SEQ ID NO: 34479 - DNA, 26 bp, Homo sapiens
gtagaggagaatgttaaccgtaaggc

SEQ ID NO: 34480 - DNA, 26 bp, Homo sapiens
tagaggagaatgttaaccgtaaggct

SEQ ID NO: 34481 - DNA, 26 bp, Homo sapiens
agaggagaatgttaaccgtaaggctt

SEQ ID NO: 34482 - DNA, 26 bp, Homo sapiens
gaggagaatgttaaccgtaaggcttg

SEQ ID NO: 34483 - DNA, 26 bp, Homo sapiens
aggagaatgttaaccgtaaggcttgg

SEQ ID NO: 34484 - DNA, 26 bp, Homo sapiens
ggagaatgttaaccgtaaggcttggc

SEQ ID NO: 34485 - DNA, 26 bp, Homo sapiens
gagaatgttaaccgtaaggcttggct

SEQ ID NO: 34486 - DNA, 26 bp, Homo sapiens
agaatgttaaccgtaaggcttggctt

SEQ ID NO: 34487 - DNA, 26 bp, Homo sapiens
gaatgttaaccgtaaggcttggctta

SEQ ID NO: 34488 - DNA, 26 bp, Homo sapiens
aatgttaaccgtaaggcttggcttac

SEQ ID NO: 34489 - DNA, 26 bp, Homo sapiens
atgttaaccgtaaggcttggcttact

SEQ ID NO: 34490 - DNA, 26 bp, Homo sapiens
tgttaaccgtaaggcttggcttactt

SEQ ID NO: 34491 - DNA, 26 bp, Homo sapiens
gttaaccgtaaggcttggcttacttt

SEQ ID NO: 34492 - DNA, 26 bp, Homo sapiens
ttaaccgtaaggcttggcttactttg

SEQ ID NO: 34493 - DNA, 26 bp, Homo sapiens
taaccgtaaggcttggcttactttgt

SEQ ID NO: 34494 - DNA, 26 bp, Homo sapiens
aaccgtaaggcttggcttactttgta

SEQ ID NO: 34495 - DNA, 26 bp, Homo sapiens
accgtaaggcttggcttactttgtaa

SEQ ID NO: 34496 - DNA, 26 bp, Homo sapiens
ccgtaaggcttggcttactttgtaaa

SEQ ID NO: 34497 - DNA, 26 bp, Homo sapiens
cgtaaggcttggcttactttgtaaat

SEQ ID NO: 34498 - DNA, 26 bp, Homo sapiens
gtaaggcttggcttactttgtaaatt

SEQ ID NO: 34499 - DNA, 26 bp, Homo sapiens
taaggcttggcttactttgtaaattt

SEQ ID NO: 34500 - DNA, 26 bp, Homo sapiens
aaggcttggcttactttgtaaattta

SEQ ID NO: 34501 - DNA, 26 bp, Homo sapiens
aggcttggcttactttgtaaatttaa

SEQ ID NO: 34502 - DNA, 26 bp, Homo sapiens
ggcttggcttactttgtaaatttaac

SEQ ID NO: 34503 - DNA, 26 bp, Homo sapiens
gcttggcttactttgtaaatttaaca

SEQ ID NO: 34504 - DNA, 26 bp, Homo sapiens
cttggcttactttgtaaatttaacaa

SEQ ID NO: 34505 - DNA, 26 bp, Homo sapiens
ttggcttactttgtaaatttaacaaa

SEQ ID NO: 34506 - DNA, 26 bp, Homo sapiens
tggcttactttgtaaatttaacaaaa

SEQ ID NO: 34507 - DNA, 26 bp, Homo sapiens
ggcttactttgtaaatttaacaaaac

SEQ ID NO: 34508 - DNA, 26 bp, Homo sapiens
gcttactttgtaaatttaacaaaaca

SEQ ID NO: 34509 - DNA, 26 bp, Homo sapiens
cttactttgtaaatttaacaaaacaa

SEQ ID NO: 34510 - DNA, 26 bp, Homo sapiens
ttactttgtaaatttaacaaaacaac

SEQ ID NO: 34511 - DNA, 26 bp, Homo sapiens
tactttgtaaatttaacaaaacaacc

SEQ ID NO: 34512 - DNA, 26 bp, Homo sapiens
actttgtaaatttaacaaaacaaccc

SEQ ID NO: 34513 - DNA, 26 bp, Homo sapiens
ctttgtaaatttaacaaaacaaccca

SEQ ID NO: 34514 - DNA, 26 bp, Homo sapiens
tttgtaaatttaacaaaacaacccag

SEQ ID NO: 34515 - DNA, 26 bp, Homo sapiens
ttgtaaatttaacaaaacaacccagg

SEQ ID NO: 34516 - DNA, 26 bp, Homo sapiens
tgtaaatttaacaaaacaacccagga

SEQ ID NO: 34517 - DNA, 26 bp, Homo sapiens
gtaaatttaacaaaacaacccaggaa

SEQ ID NO: 34518 - DNA, 26 bp, Homo sapiens
taaatttaacaaaacaacccaggaaa

SEQ ID NO: 34519 - DNA, 26 bp, Homo sapiens
aaatttaacaaaacaacccaggaaaa

SEQ ID NO: 34520 - DNA, 26 bp, Homo sapiens
aatttaacaaaacaacccaggaaaaa

SEQ ID NO: 34521 - DNA, 26 bp, Homo sapiens
atttaacaaaacaacccaggaaaaac

SEQ ID NO: 34522 - DNA, 26 bp, Homo sapiens
tttaacaaaacaacccaggaaaaacg

SEQ ID NO: 34523 - DNA, 26 bp, Homo sapiens
ttaacaaaacaacccaggaaaaacgt

SEQ ID NO: 34524 - DNA, 26 bp, Homo sapiens
taacaaaacaacccaggaaaaacgtt

SEQ ID NO: 34525 - DNA, 26 bp, Homo sapiens
aacaaaacaacccaggaaaaacgttt

SEQ ID NO: 34526 - DNA, 26 bp, Homo sapiens
acaaaacaacccaggaaaaacgtttt

SEQ ID NO: 34527 - DNA, 26 bp, Homo sapiens
caaaacaacccaggaaaaacgtttta

SEQ ID NO: 34528 - DNA, 26 bp, Homo sapiens
aaaacaacccaggaaaaacgttttaa

SEQ ID NO: 34529 - DNA, 26 bp, Homo sapiens
aaacaacccaggaaaaacgttttaat

SEQ ID NO: 34530 - DNA, 26 bp, Homo sapiens
aacaacccaggaaaaacgttttaatt

SEQ ID NO: 34531 - DNA, 26 bp, Homo sapiens
acaacccaggaaaaacgttttaattg

SEQ ID NO: 34532 - DNA, 26 bp, Homo sapiens
caacccaggaaaaacgttttaattgg

SEQ ID NO: 34533 - DNA, 26 bp, Homo sapiens
aacccaggaaaaacgttttaattggg

SEQ ID NO: 34534 - DNA, 26 bp, Homo sapiens
acccaggaaaaacgttttaattgggg

SEQ ID NO: 34535 - DNA, 26 bp, Homo sapiens
cccaggaaaaacgttttaattggggc

SEQ ID NO: 34536 - DNA, 26 bp, Homo sapiens
ccaggaaaaacgttttaattggggca

SEQ ID NO: 34537 - DNA, 26 bp, Homo sapiens
caggaaaaacgttttaattggggcac

SEQ ID NO: 34538 - DNA, 26 bp, Homo sapiens
aggaaaaacgttttaattggggcaca

SEQ ID NO: 34539 - DNA, 26 bp, Homo sapiens
ggaaaaacgttttaattggggcacac

SEQ ID NO: 34540 - DNA, 26 bp, Homo sapiens
gaaaaacgttttaattggggcacact

SEQ ID NO: 34541 - DNA, 26 bp, Homo sapiens
aaaaacgttttaattggggcacactt

SEQ ID NO: 34542 - DNA, 26 bp, Homo sapiens
aaaacgttttaattggggcacacttg

SEQ ID NO: 34543 - DNA, 26 bp, Homo sapiens
aaacgttttaattggggcacacttgt

SEQ ID NO: 34544 - DNA, 26 bp, Homo sapiens
aacgttttaattggggcacacttgtt

SEQ ID NO: 34545 - DNA, 26 bp, Homo sapiens
acgttttaattggggcacacttgtta

SEQ ID NO: 34546 - DNA, 26 bp, Homo sapiens
cgttttaattggggcacacttgttat

SEQ ID NO: 34547 - DNA, 26 bp, Homo sapiens
gttttaattggggcacacttgttatc

SEQ ID NO: 34548 - DNA, 26 bp, Homo sapiens
ttttaattggggcacacttgttatca

SEQ ID NO: 34549 - DNA, 26 bp, Homo sapiens
tttaattggggcacacttgttatcat

SEQ ID NO: 34550 - DNA, 26 bp, Homo sapiens
ttaattggggcacacttgttatcatt

SEQ ID NO: 34551 - DNA, 26 bp, Homo sapiens
taattggggcacacttgttatcattt

SEQ ID NO: 34552 - DNA, 26 bp, Homo sapiens
aattggggcacacttgttatcattta

SEQ ID NO: 34553 - DNA, 26 bp, Homo sapiens
attggggcacacttgttatcatttaa

SEQ ID NO: 34554 - DNA, 26 bp, Homo sapiens
ttggggcacacttgttatcatttaac

SEQ ID NO: 34555 - DNA, 26 bp, Homo sapiens
tggggcacacttgttatcatttaaca

SEQ ID NO: 34556 - DNA, 26 bp, Homo sapiens
ggggcacacttgttatcatttaacaa

SEQ ID NO: 34557 - DNA, 26 bp, Homo sapiens
gggcacacttgttatcatttaacaat

SEQ ID NO: 34558 - DNA, 26 bp, Homo sapiens
ggcacacttgttatcatttaacaatt

SEQ ID NO: 34559 - DNA, 26 bp, Homo sapiens
gcacacttgttatcatttaacaattg

SEQ ID NO: 34560 - DNA, 26 bp, Homo sapiens
cacacttgttatcatttaacaattgt

SEQ ID NO: 34561 - DNA, 26 bp, Homo sapiens
acacttgttatcatttaacaattgtc

SEQ ID NO: 34562 - DNA, 26 bp, Homo sapiens
cacttgttatcatttaacaattgtca

SEQ ID NO: 34563 - DNA, 26 bp, Homo sapiens
acttgttatcatttaacaattgtcaa

SEQ ID NO: 34564 - DNA, 26 bp, Homo sapiens
cttgttatcatttaacaattgtcaaa

SEQ ID NO: 34565 - DNA, 26 bp, Homo sapiens
ttgttatcatttaacaattgtcaaat

SEQ ID NO: 34566 - DNA, 26 bp, Homo sapiens
tgttatcatttaacaattgtcaaatg

SEQ ID NO: 34567 - DNA, 26 bp, Homo sapiens
gttatcatttaacaattgtcaaatgc

SEQ ID NO: 34568 - DNA, 26 bp, Homo sapiens
ttatcatttaacaattgtcaaatgct

SEQ ID NO: 34569 - DNA, 26 bp, Homo sapiens
tatcatttaacaattgtcaaatgctg

SEQ ID NO: 34570 - DNA, 26 bp, Homo sapiens
atcatttaacaattgtcaaatgctga

SEQ ID NO: 34571 - DNA, 26 bp, Homo sapiens
tcatttaacaattgtcaaatgctgac

SEQ ID NO: 34572 - DNA, 26 bp, Homo sapiens
catttaacaattgtcaaatgctgaca

SEQ ID NO: 34573 - DNA, 26 bp, Homo sapiens
atttaacaattgtcaaatgctgacat

SEQ ID NO: 34574 - DNA, 26 bp, Homo sapiens
tttaacaattgtcaaatgctgacatg

SEQ ID NO: 34575 - DNA, 26 bp, Homo sapiens
ttaacaattgtcaaatgctgacatgt

SEQ ID NO: 34576 - DNA, 26 bp, Homo sapiens
taacaattgtcaaatgctgacatgtg

SEQ ID NO: 34577 - DNA, 26 bp, Homo sapiens
aacaattgtcaaatgctgacatgtgc

SEQ ID NO: 34578 - DNA, 26 bp, Homo sapiens
acaattgtcaaatgctgacatgtgct

SEQ ID NO: 34579 - DNA, 26 bp, Homo sapiens
caattgtcaaatgctgacatgtgcta

SEQ ID NO: 34580 - DNA, 26 bp, Homo sapiens
aattgtcaaatgctgacatgtgctag

SEQ ID NO: 34581 - DNA, 26 bp, Homo sapiens
attgtcaaatgctgacatgtgctagc

SEQ ID NO: 34582 - DNA, 26 bp, Homo sapiens
ttgtcaaatgctgacatgtgctagcc

SEQ ID NO: 34583 - DNA, 26 bp, Homo sapiens
tgtcaaatgctgacatgtgctagcca

SEQ ID NO: 34584 - DNA, 26 bp, Homo sapiens
gtcaaatgctgacatgtgctagccat

SEQ ID NO: 34585 - DNA, 26 bp, Homo sapiens
tcaaatgctgacatgtgctagccatt

SEQ ID NO: 34586 - DNA, 26 bp, Homo sapiens
caaatgctgacatgtgctagccattg

SEQ ID NO: 34587 - DNA, 26 bp, Homo sapiens
aaatgctgacatgtgctagccattgt

SEQ ID NO: 34588 - DNA, 26 bp, Homo sapiens
aatgctgacatgtgctagccattgtg

SEQ ID NO: 34589 - DNA, 26 bp, Homo sapiens
atgctgacatgtgctagccattgtgc

SEQ ID NO: 34590 - DNA, 26 bp, Homo sapiens
tgctgacatgtgctagccattgtgca

SEQ ID NO: 34591 - DNA, 26 bp, Homo sapiens
gctgacatgtgctagccattgtgcag

SEQ ID NO: 34592 - DNA, 26 bp, Homo sapiens
ctgacatgtgctagccattgtgcaga

SEQ ID NO: 34593 - DNA, 26 bp, Homo sapiens
tgacatgtgctagccattgtgcagac

SEQ ID NO: 34594 - DNA, 26 bp, Homo sapiens
gacatgtgctagccattgtgcagacg

SEQ ID NO: 34595 - DNA, 26 bp, Homo sapiens
acatgtgctagccattgtgcagacgc

SEQ ID NO: 34596 - DNA, 26 bp, Homo sapiens
catgtgctagccattgtgcagacgca

SEQ ID NO: 34597 - DNA, 26 bp, Homo sapiens
atgtgctagccattgtgcagacgcaa

SEQ ID NO: 34598 - DNA, 26 bp, Homo sapiens
tgtgctagccattgtgcagacgcaaa

SEQ ID NO: 34599 - DNA, 26 bp, Homo sapiens
gtgctagccattgtgcagacgcaaaa

SEQ ID NO: 34600 - DNA, 26 bp, Homo sapiens
tgctagccattgtgcagacgcaaaaa

SEQ ID NO: 34601 - DNA, 26 bp, Homo sapiens
gctagccattgtgcagacgcaaaaag

SEQ ID NO: 34602 - DNA, 26 bp, Homo sapiens
ctagccattgtgcagacgcaaaaaga

SEQ ID NO: 34603 - DNA, 26 bp, Homo sapiens
tagccattgtgcagacgcaaaaagat

SEQ ID NO: 34604 - DNA, 26 bp, Homo sapiens
agccattgtgcagacgcaaaaagata

SEQ ID NO: 34605 - DNA, 26 bp, Homo sapiens
gccattgtgcagacgcaaaaagatac

SEQ ID NO: 34606 - DNA, 26 bp, Homo sapiens
ccattgtgcagacgcaaaaagataca

SEQ ID NO: 34607 - DNA, 26 bp, Homo sapiens
cattgtgcagacgcaaaaagatacaa

SEQ ID NO: 34608 - DNA, 26 bp, Homo sapiens
attgtgcagacgcaaaaagatacaat

SEQ ID NO: 34609 - DNA, 26 bp, Homo sapiens
ttgtgcagacgcaaaaagatacaatc

SEQ ID NO: 34610 - DNA, 26 bp, Homo sapiens
tgtgcagacgcaaaaagatacaatct

SEQ ID NO: 34611 - DNA, 26 bp, Homo sapiens
gtgcagacgcaaaaagatacaatctc

SEQ ID NO: 34612 - DNA, 26 bp, Homo sapiens
tgcagacgcaaaaagatacaatctct

SEQ ID NO: 34613 - DNA, 26 bp, Homo sapiens
gcagacgcaaaaagatacaatctcta

SEQ ID NO: 34614 - DNA, 26 bp, Homo sapiens
cagacgcaaaaagatacaatctctac

SEQ ID NO: 34615 - DNA, 26 bp, Homo sapiens
agacgcaaaaagatacaatctctacc

SEQ ID NO: 34616 - DNA, 26 bp, Homo sapiens
gacgcaaaaagatacaatctctaccc

SEQ ID NO: 34617 - DNA, 26 bp, Homo sapiens
acgcaaaaagatacaatctctaccct

SEQ ID NO: 34618 - DNA, 26 bp, Homo sapiens
cgcaaaaagatacaatctctaccctc

SEQ ID NO: 34619 - DNA, 26 bp, Homo sapiens
gcaaaaagatacaatctctaccctca

SEQ ID NO: 34620 - DNA, 26 bp, Homo sapiens
caaaaagatacaatctctaccctcag

SEQ ID NO: 34621 - DNA, 26 bp, Homo sapiens
aaaaagatacaatctctaccctcagg

SEQ ID NO: 34622 - DNA, 26 bp, Homo sapiens
aaaagatacaatctctaccctcagga

SEQ ID NO: 34623 - DNA, 26 bp, Homo sapiens
aaagatacaatctctaccctcaggaa

SEQ ID NO: 34624 - DNA, 26 bp, Homo sapiens
aagatacaatctctaccctcaggaag

SEQ ID NO: 34625 - DNA, 26 bp, Homo sapiens
agatacaatctctaccctcaggaagc

SEQ ID NO: 34626 - DNA, 26 bp, Homo sapiens
gatacaatctctaccctcaggaagct

SEQ ID NO: 34627 - DNA, 26 bp, Homo sapiens
atacaatctctaccctcaggaagctt

SEQ ID NO: 34628 - DNA, 26 bp, Homo sapiens
tacaatctctaccctcaggaagctta

SEQ ID NO: 34629 - DNA, 26 bp, Homo sapiens
acaatctctaccctcaggaagcttag

SEQ ID NO: 34630 - DNA, 26 bp, Homo sapiens
caatctctaccctcaggaagcttagg

SEQ ID NO: 34631 - DNA, 26 bp, Homo sapiens
aatctctaccctcaggaagcttagga

SEQ ID NO: 34632 - DNA, 26 bp, Homo sapiens
atctctaccctcaggaagcttaggat

SEQ ID NO: 34633 - DNA, 26 bp, Homo sapiens
tctctaccctcaggaagcttaggatg

SEQ ID NO: 34634 - DNA, 26 bp, Homo sapiens
ctctaccctcaggaagcttaggatgc

SEQ ID NO: 34635 - DNA, 26 bp, Homo sapiens
tctaccctcaggaagcttaggatgct

SEQ ID NO: 34636 - DNA, 26 bp, Homo sapiens
ctaccctcaggaagcttaggatgcta

SEQ ID NO: 34637 - DNA, 26 bp, Homo sapiens
taccctcaggaagcttaggatgctaa

SEQ ID NO: 34638 - DNA, 26 bp, Homo sapiens
accctcaggaagcttaggatgctaaa

SEQ ID NO: 34639 - DNA, 26 bp, Homo sapiens
ccctcaggaagcttaggatgctaaat

SEQ ID NO: 34640 - DNA, 26 bp, Homo sapiens
cctcaggaagcttaggatgctaaatc

SEQ ID NO: 34641 - DNA, 26 bp, Homo sapiens
ctcaggaagcttaggatgctaaatcg

SEQ ID NO: 34642 - DNA, 26 bp, Homo sapiens
tcaggaagcttaggatgctaaatcgt

SEQ ID NO: 34643 - DNA, 26 bp, Homo sapiens
caggaagcttaggatgctaaatcgtg

SEQ ID NO: 34644 - DNA, 26 bp, Homo sapiens
aggaagcttaggatgctaaatcgtgc

SEQ ID NO: 34645 - DNA, 26 bp, Homo sapiens
ggaagcttaggatgctaaatcgtgct

SEQ ID NO: 34646 - DNA, 26 bp, Homo sapiens
gaagcttaggatgctaaatcgtgctt

SEQ ID NO: 34647 - DNA, 26 bp, Homo sapiens
aagcttaggatgctaaatcgtgcttt

SEQ ID NO: 34648 - DNA, 26 bp, Homo sapiens
agcttaggatgctaaatcgtgcttta

SEQ ID NO: 34649 - DNA, 26 bp, Homo sapiens
gcttaggatgctaaatcgtgctttaa

SEQ ID NO: 34650 - DNA, 26 bp, Homo sapiens
cttaggatgctaaatcgtgctttaaa

SEQ ID NO: 34651 - DNA, 26 bp, Homo sapiens
ttaggatgctaaatcgtgctttaaaa

SEQ ID NO: 34652 - DNA, 26 bp, Homo sapiens
taggatgctaaatcgtgctttaaaaa

SEQ ID NO: 34653 - DNA, 26 bp, Homo sapiens
aggatgctaaatcgtgctttaaaaaa

SEQ ID NO: 34654 - DNA, 26 bp, Homo sapiens
ggatgctaaatcgtgctttaaaaaaa

SEQ ID NO: 34655 - DNA, 26 bp, Homo sapiens
gatgctaaatcgtgctttaaaaaaaa

SEQ ID NO: 34656 - DNA, 26 bp, Homo sapiens
atgctaaatcgtgctttaaaaaaaag

SEQ ID NO: 34657 - DNA, 26 bp, Homo sapiens
tgctaaatcgtgctttaaaaaaaagg

SEQ ID NO: 34658 - DNA, 26 bp, Homo sapiens
gctaaatcgtgctttaaaaaaaaggt

SEQ ID NO: 34659 - DNA, 26 bp, Homo sapiens
ctaaatcgtgctttaaaaaaaaggtt

SEQ ID NO: 34660 - DNA, 26 bp, Homo sapiens
taaatcgtgctttaaaaaaaaggttt

SEQ ID NO: 34661 - DNA, 26 bp, Homo sapiens
aaatcgtgctttaaaaaaaaggtttc

SEQ ID NO: 34662 - DNA, 26 bp, Homo sapiens
aatcgtgctttaaaaaaaaggtttca

SEQ ID NO: 34663 - DNA, 26 bp, Homo sapiens
atcgtgctttaaaaaaaaggtttcaa

SEQ ID NO: 34664 - DNA, 26 bp, Homo sapiens
tcgtgctttaaaaaaaaggtttcaat

SEQ ID NO: 34665 - DNA, 26 bp, Homo sapiens
cgtgctttaaaaaaaaggtttcaatc

SEQ ID NO: 34666 - DNA, 26 bp, Homo sapiens
gtgctttaaaaaaaaggtttcaatct

SEQ ID NO: 34667 - DNA, 26 bp, Homo sapiens
tgctttaaaaaaaaggtttcaatctc

SEQ ID NO: 34668 - DNA, 26 bp, Homo sapiens
gctttaaaaaaaaggtttcaatctct

SEQ ID NO: 34669 - DNA, 26 bp, Homo sapiens
ctttaaaaaaaaggtttcaatctctt

SEQ ID NO: 34670 - DNA, 26 bp, Homo sapiens
tttaaaaaaaaggtttcaatctcttt

SEQ ID NO: 34671 - DNA, 26 bp, Homo sapiens
ttaaaaaaaaggtttcaatctctttc

SEQ ID NO: 34672 - DNA, 26 bp, Homo sapiens
taaaaaaaaggtttcaatctctttcc

SEQ ID NO: 34673 - DNA, 26 bp, Homo sapiens
aaaaaaaaggtttcaatctctttcca

SEQ ID NO: 34674 - DNA, 26 bp, Homo sapiens
aaaaaaaggtttcaatctctttccaa

SEQ ID NO: 34675 - DNA, 26 bp, Homo sapiens
aaaaaaggtttcaatctctttccaag

SEQ ID NO: 34676 - DNA, 26 bp, Homo sapiens
aaaaaggtttcaatctctttccaaga

SEQ ID NO: 34677 - DNA, 26 bp, Homo sapiens
aaaaggtttcaatctctttccaagag

SEQ ID NO: 34678 - DNA, 26 bp, Homo sapiens
aaaggtttcaatctctttccaagaga

SEQ ID NO: 34679 - DNA, 26 bp, Homo sapiens
aaggtttcaatctctttccaagagag

SEQ ID NO: 34680 - DNA, 26 bp, Homo sapiens
aggtttcaatctctttccaagagagg

SEQ ID NO: 34681 - DNA, 26 bp, Homo sapiens
ggtttcaatctctttccaagagaggc

SEQ ID NO: 34682 - DNA, 26 bp, Homo sapiens
gtttcaatctctttccaagagaggca

SEQ ID NO: 34683 - DNA, 26 bp, Homo sapiens
tttcaatctctttccaagagaggcag

SEQ ID NO: 34684 - DNA, 26 bp, Homo sapiens
ttcaatctctttccaagagaggcagt

SEQ ID NO: 34685 - DNA, 26 bp, Homo sapiens
tcaatctctttccaagagaggcagtt

SEQ ID NO: 34686 - DNA, 26 bp, Homo sapiens
caatctctttccaagagaggcagtta

SEQ ID NO: 34687 - DNA, 26 bp, Homo sapiens
aatctctttccaagagaggcagttaa

SEQ ID NO: 34688 - DNA, 26 bp, Homo sapiens
atctctttccaagagaggcagttaag

SEQ ID NO: 34689 - DNA, 26 bp, Homo sapiens
tctctttccaagagaggcagttaagg

SEQ ID NO: 34690 - DNA, 26 bp, Homo sapiens
ctctttccaagagaggcagttaagga

SEQ ID NO: 34691 - DNA, 26 bp, Homo sapiens
tctttccaagagaggcagttaaggaa

SEQ ID NO: 34692 - DNA, 26 bp, Homo sapiens
ctttccaagagaggcagttaaggaat

SEQ ID NO: 34693 - DNA, 26 bp, Homo sapiens
tttccaagagaggcagttaaggaatg

SEQ ID NO: 34694 - DNA, 26 bp, Homo sapiens
ttccaagagaggcagttaaggaatga

SEQ ID NO: 34695 - DNA, 26 bp, Homo sapiens
tccaagagaggcagttaaggaatgat

SEQ ID NO: 34696 - DNA, 26 bp, Homo sapiens
ccaagagaggcagttaaggaatgatg

SEQ ID NO: 34697 - DNA, 26 bp, Homo sapiens
caagagaggcagttaaggaatgatgt

SEQ ID NO: 34698 - DNA, 26 bp, Homo sapiens
aagagaggcagttaaggaatgatgtg

SEQ ID NO: 34699 - DNA, 26 bp, Homo sapiens
agagaggcagttaaggaatgatgtga

SEQ ID NO: 34700 - DNA, 26 bp, Homo sapiens
gagaggcagttaaggaatgatgtgat

SEQ ID NO: 34701 - DNA, 26 bp, Homo sapiens
agaggcagttaaggaatgatgtgatt

SEQ ID NO: 34702 - DNA, 26 bp, Homo sapiens
gaggcagttaaggaatgatgtgattt

SEQ ID NO: 34703 - DNA, 26 bp, Homo sapiens
aggcagttaaggaatgatgtgattta

SEQ ID NO: 34704 - DNA, 26 bp, Homo sapiens
ggcagttaaggaatgatgtgatttat

SEQ ID NO: 34705 - DNA, 26 bp, Homo sapiens
gcagttaaggaatgatgtgatttata

SEQ ID NO: 34706 - DNA, 26 bp, Homo sapiens
cagttaaggaatgatgtgatttatat

SEQ ID NO: 34707 - DNA, 26 bp, Homo sapiens
agttaaggaatgatgtgatttatatt

SEQ ID NO: 34708 - DNA, 26 bp, Homo sapiens
gttaaggaatgatgtgatttatatta

SEQ ID NO: 34709 - DNA, 26 bp, Homo sapiens
ttaaggaatgatgtgatttatattaa

SEQ ID NO: 34710 - DNA, 26 bp, Homo sapiens
taaggaatgatgtgatttatattaaa

SEQ ID NO: 34711 - DNA, 26 bp, Homo sapiens
aaggaatgatgtgatttatattaaaa

SEQ ID NO: 34712 - DNA, 26 bp, Homo sapiens
aggaatgatgtgatttatattaaaag

SEQ ID NO: 34713 - DNA, 26 bp, Homo sapiens
ggaatgatgtgatttatattaaaaga

SEQ ID NO: 34714 - DNA, 26 bp, Homo sapiens
gaatgatgtgatttatattaaaagag

SEQ ID NO: 34715 - DNA, 26 bp, Homo sapiens
aatgatgtgatttatattaaaagaga

SEQ ID NO: 34716 - DNA, 26 bp, Homo sapiens
atgatgtgatttatattaaaagagat

SEQ ID NO: 34717 - DNA, 26 bp, Homo sapiens
tgatgtgatttatattaaaagagatt

SEQ ID NO: 34718 - DNA, 26 bp, Homo sapiens
gatgtgatttatattaaaagagattt

SEQ ID NO: 34719 - DNA, 26 bp, Homo sapiens
atgtgatttatattaaaagagatttc

SEQ ID NO: 34720 - DNA, 26 bp, Homo sapiens
tgtgatttatattaaaagagatttct

SEQ ID NO: 34721 - DNA, 26 bp, Homo sapiens
gtgatttatattaaaagagatttctc

SEQ ID NO: 34722 - DNA, 26 bp, Homo sapiens
tgatttatattaaaagagatttctcc

SEQ ID NO: 34723 - DNA, 26 bp, Homo sapiens
gatttatattaaaagagatttctccc

SEQ ID NO: 34724 - DNA, 26 bp, Homo sapiens
atttatattaaaagagatttctccct

SEQ ID NO: 34725 - DNA, 26 bp, Homo sapiens
tttatattaaaagagatttctccctc

SEQ ID NO: 34726 - DNA, 26 bp, Homo sapiens
ttatattaaaagagatttctccctca

SEQ ID NO: 34727 - DNA, 26 bp, Homo sapiens
tatattaaaagagatttctccctcaa

SEQ ID NO: 34728 - DNA, 26 bp, Homo sapiens
atattaaaagagatttctccctcaac

SEQ ID NO: 34729 - DNA, 26 bp, Homo sapiens
tattaaaagagatttctccctcaact

SEQ ID NO: 34730 - DNA, 26 bp, Homo sapiens
attaaaagagatttctccctcaactg

SEQ ID NO: 34731 - DNA, 26 bp, Homo sapiens
ttaaaagagatttctccctcaactgt

SEQ ID NO: 34732 - DNA, 26 bp, Homo sapiens
taaaagagatttctccctcaactgta

SEQ ID NO: 34733 - DNA, 26 bp, Homo sapiens
aaaagagatttctccctcaactgtag

SEQ ID NO: 34734 - DNA, 26 bp, Homo sapiens
aaagagatttctccctcaactgtagc

SEQ ID NO: 34735 - DNA, 26 bp, Homo sapiens
aagagatttctccctcaactgtagcc

SEQ ID NO: 34736 - DNA, 26 bp, Homo sapiens
agagatttctccctcaactgtagcca

SEQ ID NO: 34737 - DNA, 26 bp, Homo sapiens
gagatttctccctcaactgtagccaa

SEQ ID NO: 34738 - DNA, 26 bp, Homo sapiens
agatttctccctcaactgtagccaat

SEQ ID NO: 34739 - DNA, 26 bp, Homo sapiens
gatttctccctcaactgtagccaatc

SEQ ID NO: 34740 - DNA, 26 bp, Homo sapiens
atttctccctcaactgtagccaatcc

SEQ ID NO: 34741 - DNA, 26 bp, Homo sapiens
tttctccctcaactgtagccaatcca

SEQ ID NO: 34742 - DNA, 26 bp, Homo sapiens
ttctccctcaactgtagccaatccac

SEQ ID NO: 34743 - DNA, 26 bp, Homo sapiens
tctccctcaactgtagccaatccact

SEQ ID NO: 34744 - DNA, 26 bp, Homo sapiens
ctccctcaactgtagccaatccactt

SEQ ID NO: 34745 - DNA, 26 bp, Homo sapiens
tccctcaactgtagccaatccacttt

SEQ ID NO: 34746 - DNA, 26 bp, Homo sapiens
ccctcaactgtagccaatccacttta

SEQ ID NO: 34747 - DNA, 26 bp, Homo sapiens
cctcaactgtagccaatccactttaa

SEQ ID NO: 34748 - DNA, 26 bp, Homo sapiens
ctcaactgtagccaatccactttaaa

SEQ ID NO: 34749 - DNA, 26 bp, Homo sapiens
tcaactgtagccaatccactttaaaa

SEQ ID NO: 34750 - DNA, 26 bp, Homo sapiens
caactgtagccaatccactttaaaag

SEQ ID NO: 34751 - DNA, 26 bp, Homo sapiens
aactgtagccaatccactttaaaagg

SEQ ID NO: 34752 - DNA, 26 bp, Homo sapiens
actgtagccaatccactttaaaaggt

SEQ ID NO: 34753 - DNA, 26 bp, Homo sapiens
ctgtagccaatccactttaaaaggtt

SEQ ID NO: 34754 - DNA, 26 bp, Homo sapiens
tgtagccaatccactttaaaaggtta

SEQ ID NO: 34755 - DNA, 26 bp, Homo sapiens
gtagccaatccactttaaaaggttaa

SEQ ID NO: 34756 - DNA, 26 bp, Homo sapiens
tagccaatccactttaaaaggttaac

SEQ ID NO: 34757 - DNA, 26 bp, Homo sapiens
agccaatccactttaaaaggttaact

SEQ ID NO: 34758 - DNA, 26 bp, Homo sapiens
gccaatccactttaaaaggttaacta

SEQ ID NO: 34759 - DNA, 26 bp, Homo sapiens
ccaatccactttaaaaggttaactac

SEQ ID NO: 34760 - DNA, 26 bp, Homo sapiens
caatccactttaaaaggttaactact

SEQ ID NO: 34761 - DNA, 26 bp, Homo sapiens
aatccactttaaaaggttaactacta

SEQ ID NO: 34762 - DNA, 26 bp, Homo sapiens
atccactttaaaaggttaactactag

SEQ ID NO: 34763 - DNA, 26 bp, Homo sapiens
tccactttaaaaggttaactactagc

SEQ ID NO: 34764 - DNA, 26 bp, Homo sapiens
ccactttaaaaggttaactactagca

SEQ ID NO: 34765 - DNA, 26 bp, Homo sapiens
cactttaaaaggttaactactagcat

SEQ ID NO: 34766 - DNA, 26 bp, Homo sapiens
actttaaaaggttaactactagcatt

SEQ ID NO: 34767 - DNA, 26 bp, Homo sapiens
ctttaaaaggttaactactagcatta

SEQ ID NO: 34768 - DNA, 26 bp, Homo sapiens
tttaaaaggttaactactagcattag

SEQ ID NO: 34769 - DNA, 26 bp, Homo sapiens
ttaaaaggttaactactagcattagc

SEQ ID NO: 34770 - DNA, 26 bp, Homo sapiens
taaaaggttaactactagcattagct

SEQ ID NO: 34771 - DNA, 26 bp, Homo sapiens
aaaaggttaactactagcattagctc

SEQ ID NO: 34772 - DNA, 26 bp, Homo sapiens
aaaggttaactactagcattagctct

SEQ ID NO: 34773 - DNA, 26 bp, Homo sapiens
aaggttaactactagcattagctctc

SEQ ID NO: 34774 - DNA, 26 bp, Homo sapiens
aggttaactactagcattagctctca

SEQ ID NO: 34775 - DNA, 26 bp, Homo sapiens
ggttaactactagcattagctctcat

SEQ ID NO: 34776 - DNA, 26 bp, Homo sapiens
gttaactactagcattagctctcatt

SEQ ID NO: 34777 - DNA, 26 bp, Homo sapiens
ttaactactagcattagctctcatta

SEQ ID NO: 34778 - DNA, 26 bp, Homo sapiens
taactactagcattagctctcattaa

SEQ ID NO: 34779 - DNA, 26 bp, Homo sapiens
aactactagcattagctctcattaac

SEQ ID NO: 34780 - DNA, 26 bp, Homo sapiens
actactagcattagctctcattaacc

SEQ ID NO: 34781 - DNA, 26 bp, Homo sapiens
ctactagcattagctctcattaacca

SEQ ID NO: 34782 - DNA, 26 bp, Homo sapiens
tactagcattagctctcattaaccac

SEQ ID NO: 34783 - DNA, 26 bp, Homo sapiens
actagcattagctctcattaaccaca

SEQ ID NO: 34784 - DNA, 26 bp, Homo sapiens
ctagcattagctctcattaaccacac

SEQ ID NO: 34785 - DNA, 26 bp, Homo sapiens
tagcattagctctcattaaccacaca

SEQ ID NO: 34786 - DNA, 26 bp, Homo sapiens
agcattagctctcattaaccacacaa

SEQ ID NO: 34787 - DNA, 26 bp, Homo sapiens
gcattagctctcattaaccacacaat

SEQ ID NO: 34788 - DNA, 26 bp, Homo sapiens
cattagctctcattaaccacacaatt

SEQ ID NO: 34789 - DNA, 26 bp, Homo sapiens
attagctctcattaaccacacaattg

SEQ ID NO: 34790 - DNA, 26 bp, Homo sapiens
ttagctctcattaaccacacaattgc

SEQ ID NO: 34791 - DNA, 26 bp, Homo sapiens
tagctctcattaaccacacaattgca

SEQ ID NO: 34792 - DNA, 26 bp, Homo sapiens
agctctcattaaccacacaattgcat

SEQ ID NO: 34793 - DNA, 26 bp, Homo sapiens
gctctcattaaccacacaattgcatt

SEQ ID NO: 34794 - DNA, 26 bp, Homo sapiens
ctctcattaaccacacaattgcattt

SEQ ID NO: 34795 - DNA, 26 bp, Homo sapiens
tctcattaaccacacaattgcattta

SEQ ID NO: 34796 - DNA, 26 bp, Homo sapiens
ctcattaaccacacaattgcatttat

SEQ ID NO: 34797 - DNA, 26 bp, Homo sapiens
tcattaaccacacaattgcatttata

SEQ ID NO: 34798 - DNA, 26 bp, Homo sapiens
cattaaccacacaattgcatttataa

SEQ ID NO: 34799 - DNA, 26 bp, Homo sapiens
attaaccacacaattgcatttataat

SEQ ID NO: 34800 - DNA, 26 bp, Homo sapiens
ttaaccacacaattgcatttataatt

SEQ ID NO: 34801 - DNA, 26 bp, Homo sapiens
taaccacacaattgcatttataatta

SEQ ID NO: 34802 - DNA, 26 bp, Homo sapiens
aaccacacaattgcatttataattaa

SEQ ID NO: 34803 - DNA, 26 bp, Homo sapiens
accacacaattgcatttataattaag

SEQ ID NO: 34804 - DNA, 26 bp, Homo sapiens
ccacacaattgcatttataattaagg

SEQ ID NO: 34805 - DNA, 26 bp, Homo sapiens
cacacaattgcatttataattaaggt

SEQ ID NO: 34806 - DNA, 26 bp, Homo sapiens
acacaattgcatttataattaaggta

SEQ ID NO: 34807 - DNA, 26 bp, Homo sapiens
cacaattgcatttataattaaggtaa

SEQ ID NO: 34808 - DNA, 26 bp, Homo sapiens
acaattgcatttataattaaggtaac

SEQ ID NO: 34809 - DNA, 26 bp, Homo sapiens
caattgcatttataattaaggtaaca

SEQ ID NO: 34810 - DNA, 26 bp, Homo sapiens
aattgcatttataattaaggtaacag

SEQ ID NO: 34811 - DNA, 26 bp, Homo sapiens
attgcatttataattaaggtaacagc

SEQ ID NO: 34812 - DNA, 26 bp, Homo sapiens
ttgcatttataattaaggtaacagca

SEQ ID NO: 34813 - DNA, 26 bp, Homo sapiens
tgcatttataattaaggtaacagcaa

SEQ ID NO: 34814 - DNA, 26 bp, Homo sapiens
gcatttataattaaggtaacagcaac

SEQ ID NO: 34815 - DNA, 26 bp, Homo sapiens
catttataattaaggtaacagcaact

SEQ ID NO: 34816 - DNA, 26 bp, Homo sapiens
atttataattaaggtaacagcaactc

SEQ ID NO: 34817 - DNA, 26 bp, Homo sapiens
tttataattaaggtaacagcaactct

SEQ ID NO: 34818 - DNA, 26 bp, Homo sapiens
ttataattaaggtaacagcaactctt

SEQ ID NO: 34819 - DNA, 26 bp, Homo sapiens
tataattaaggtaacagcaactcttc

SEQ ID NO: 34820 - DNA, 26 bp, Homo sapiens
ataattaaggtaacagcaactcttcc

SEQ ID NO: 34821 - DNA, 26 bp, Homo sapiens
taattaaggtaacagcaactcttcca

SEQ ID NO: 34822 - DNA, 26 bp, Homo sapiens
aattaaggtaacagcaactcttccac

SEQ ID NO: 34823 - DNA, 26 bp, Homo sapiens
attaaggtaacagcaactcttccaca

SEQ ID NO: 34824 - DNA, 26 bp, Homo sapiens
ttaaggtaacagcaactcttccacaa

SEQ ID NO: 34825 - DNA, 26 bp, Homo sapiens
taaggtaacagcaactcttccacaaa

SEQ ID NO: 34826 - DNA, 26 bp, Homo sapiens
aaggtaacagcaactcttccacaaaa

SEQ ID NO: 34827 - DNA, 26 bp, Homo sapiens
aggtaacagcaactcttccacaaaaa

SEQ ID NO: 34828 - DNA, 26 bp, Homo sapiens
ggtaacagcaactcttccacaaaaat

SEQ ID NO: 34829 - DNA, 26 bp, Homo sapiens
gtaacagcaactcttccacaaaaatg

SEQ ID NO: 34830 - DNA, 26 bp, Homo sapiens
taacagcaactcttccacaaaaatgg

SEQ ID NO: 34831 - DNA, 26 bp, Homo sapiens
aacagcaactcttccacaaaaatgga

SEQ ID NO: 34832 - DNA, 26 bp, Homo sapiens
acagcaactcttccacaaaaatggaa

SEQ ID NO: 34833 - DNA, 26 bp, Homo sapiens
cagcaactcttccacaaaaatggaaa

SEQ ID NO: 34834 - DNA, 26 bp, Homo sapiens
agcaactcttccacaaaaatggaaaa

SEQ ID NO: 34835 - DNA, 26 bp, Homo sapiens
gcaactcttccacaaaaatggaaaat

SEQ ID NO: 34836 - DNA, 26 bp, Homo sapiens
caactcttccacaaaaatggaaaatg

SEQ ID NO: 34837 - DNA, 26 bp, Homo sapiens
aactcttccacaaaaatggaaaatgt

SEQ ID NO: 34838 - DNA, 26 bp, Homo sapiens
actcttccacaaaaatggaaaatgtc

SEQ ID NO: 34839 - DNA, 26 bp, Homo sapiens
ctcttccacaaaaatggaaaatgtct

SEQ ID NO: 34840 - DNA, 26 bp, Homo sapiens
tcttccacaaaaatggaaaatgtcta

SEQ ID NO: 34841 - DNA, 26 bp, Homo sapiens
cttccacaaaaatggaaaatgtctag

SEQ ID NO: 34842 - DNA, 26 bp, Homo sapiens
ttccacaaaaatggaaaatgtctaga

SEQ ID NO: 34843 - DNA, 26 bp, Homo sapiens
tccacaaaaatggaaaatgtctagaa

SEQ ID NO: 34844 - DNA, 26 bp, Homo sapiens
ccacaaaaatggaaaatgtctagaat

SEQ ID NO: 34845 - DNA, 26 bp, Homo sapiens
cacaaaaatggaaaatgtctagaatt

SEQ ID NO: 34846 - DNA, 26 bp, Homo sapiens
acaaaaatggaaaatgtctagaattg

SEQ ID NO: 34847 - DNA, 26 bp, Homo sapiens
caaaaatggaaaatgtctagaattgt

SEQ ID NO: 34848 - DNA, 26 bp, Homo sapiens
aaaaatggaaaatgtctagaattgtg

SEQ ID NO: 34849 - DNA, 26 bp, Homo sapiens
aaaatggaaaatgtctagaattgtgg

SEQ ID NO: 34850 - DNA, 26 bp, Homo sapiens
aaatggaaaatgtctagaattgtgga

SEQ ID NO: 34851 - DNA, 26 bp, Homo sapiens
aatggaaaatgtctagaattgtggat

SEQ ID NO: 34852 - DNA, 26 bp, Homo sapiens
atggaaaatgtctagaattgtggata

SEQ ID NO: 34853 - DNA, 26 bp, Homo sapiens
tggaaaatgtctagaattgtggataa

SEQ ID NO: 34854 - DNA, 26 bp, Homo sapiens
ggaaaatgtctagaattgtggataaa

SEQ ID NO: 34855 - DNA, 26 bp, Homo sapiens
gaaaatgtctagaattgtggataaat

SEQ ID NO: 34856 - DNA, 26 bp, Homo sapiens
aaaatgtctagaattgtggataaata

SEQ ID NO: 34857 - DNA, 26 bp, Homo sapiens
aaatgtctagaattgtggataaatat

SEQ ID NO: 34858 - DNA, 26 bp, Homo sapiens
aatgtctagaattgtggataaatatt

SEQ ID NO: 34859 - DNA, 26 bp, Homo sapiens
atgtctagaattgtggataaatattg

SEQ ID NO: 34860 - DNA, 26 bp, Homo sapiens
tgtctagaattgtggataaatattgc

SEQ ID NO: 34861 - DNA, 26 bp, Homo sapiens
gtctagaattgtggataaatattgca

SEQ ID NO: 34862 - DNA, 26 bp, Homo sapiens
tctagaattgtggataaatattgcag

SEQ ID NO: 34863 - DNA, 26 bp, Homo sapiens
ctagaattgtggataaatattgcagt

SEQ ID NO: 34864 - DNA, 26 bp, Homo sapiens
tagaattgtggataaatattgcagtg

SEQ ID NO: 34865 - DNA, 26 bp, Homo sapiens
agaattgtggataaatattgcagtgc

SEQ ID NO: 34866 - DNA, 26 bp, Homo sapiens
gaattgtggataaatattgcagtgca

SEQ ID NO: 34867 - DNA, 26 bp, Homo sapiens
aattgtggataaatattgcagtgcat

SEQ ID NO: 34868 - DNA, 26 bp, Homo sapiens
attgtggataaatattgcagtgcatg

SEQ ID NO: 34869 - DNA, 26 bp, Homo sapiens
ttgtggataaatattgcagtgcatgg

SEQ ID NO: 34870 - DNA, 26 bp, Homo sapiens
tgtggataaatattgcagtgcatgga

SEQ ID NO: 34871 - DNA, 26 bp, Homo sapiens
gtggataaatattgcagtgcatggaa

SEQ ID NO: 34872 - DNA, 26 bp, Homo sapiens
tggataaatattgcagtgcatggaag

SEQ ID NO: 34873 - DNA, 26 bp, Homo sapiens
ggataaatattgcagtgcatggaagc

SEQ ID NO: 34874 - DNA, 26 bp, Homo sapiens
gataaatattgcagtgcatggaagcc

SEQ ID NO: 34875 - DNA, 26 bp, Homo sapiens
ataaatattgcagtgcatggaagcca

SEQ ID NO: 34876 - DNA, 26 bp, Homo sapiens
taaatattgcagtgcatggaagccaa

SEQ ID NO: 34877 - DNA, 26 bp, Homo sapiens
aaatattgcagtgcatggaagccaat

SEQ ID NO: 34878 - DNA, 26 bp, Homo sapiens
aatattgcagtgcatggaagccaata

SEQ ID NO: 34879 - DNA, 26 bp, Homo sapiens
atattgcagtgcatggaagccaataa

SEQ ID NO: 34880 - DNA, 26 bp, Homo sapiens
tattgcagtgcatggaagccaataat

SEQ ID NO: 34881 - DNA, 26 bp, Homo sapiens
attgcagtgcatggaagccaataatc

SEQ ID NO: 34882 - DNA, 26 bp, Homo sapiens
ttgcagtgcatggaagccaataatca

SEQ ID NO: 34883 - DNA, 26 bp, Homo sapiens
tgcagtgcatggaagccaataatcat

SEQ ID NO: 34884 - DNA, 26 bp, Homo sapiens
gcagtgcatggaagccaataatcatg

SEQ ID NO: 34885 - DNA, 26 bp, Homo sapiens
cagtgcatggaagccaataatcatgg

SEQ ID NO: 34886 - DNA, 26 bp, Homo sapiens
agtgcatggaagccaataatcatggc

SEQ ID NO: 34887 - DNA, 26 bp, Homo sapiens
gtgcatggaagccaataatcatggct

SEQ ID NO: 34888 - DNA, 26 bp, Homo sapiens
tgcatggaagccaataatcatggctt

SEQ ID NO: 34889 - DNA, 26 bp, Homo sapiens
gcatggaagccaataatcatggcttg

SEQ ID NO: 34890 - DNA, 26 bp, Homo sapiens
catggaagccaataatcatggcttga

SEQ ID NO: 34891 - DNA, 26 bp, Homo sapiens
atggaagccaataatcatggcttgag

SEQ ID NO: 34892 - DNA, 26 bp, Homo sapiens
tggaagccaataatcatggcttgaga

SEQ ID NO: 34893 - DNA, 26 bp, Homo sapiens
ggaagccaataatcatggcttgagaa

SEQ ID NO: 34894 - DNA, 26 bp, Homo sapiens
gaagccaataatcatggcttgagaat

SEQ ID NO: 34895 - DNA, 26 bp, Homo sapiens
aagccaataatcatggcttgagaatt

SEQ ID NO: 34896 - DNA, 26 bp, Homo sapiens
agccaataatcatggcttgagaattt

SEQ ID NO: 34897 - DNA, 26 bp, Homo sapiens
gccaataatcatggcttgagaattta

SEQ ID NO: 34898 - DNA, 26 bp, Homo sapiens
ccaataatcatggcttgagaatttat

SEQ ID NO: 34899 - DNA, 26 bp, Homo sapiens
caataatcatggcttgagaatttatc

SEQ ID NO: 34900 - DNA, 26 bp, Homo sapiens
aataatcatggcttgagaatttatca

SEQ ID NO: 34901 - DNA, 26 bp, Homo sapiens
ataatcatggcttgagaatttatcac

SEQ ID NO: 34902 - DNA, 26 bp, Homo sapiens
taatcatggcttgagaatttatcacc

SEQ ID NO: 34903 - DNA, 26 bp, Homo sapiens
aatcatggcttgagaatttatcacct

SEQ ID NO: 34904 - DNA, 26 bp, Homo sapiens
atcatggcttgagaatttatcacctt

SEQ ID NO: 34905 - DNA, 26 bp, Homo sapiens
tcatggcttgagaatttatcaccttc

SEQ ID NO: 34906 - DNA, 26 bp, Homo sapiens
catggcttgagaatttatcaccttca

SEQ ID NO: 34907 - DNA, 26 bp, Homo sapiens
atggcttgagaatttatcaccttcag

SEQ ID NO: 34908 - DNA, 26 bp, Homo sapiens
tggcttgagaatttatcaccttcagt

SEQ ID NO: 34909 - DNA, 26 bp, Homo sapiens
ggcttgagaatttatcaccttcagtt

SEQ ID NO: 34910 - DNA, 26 bp, Homo sapiens
gcttgagaatttatcaccttcagtta

SEQ ID NO: 34911 - DNA, 26 bp, Homo sapiens
cttgagaatttatcaccttcagttac

SEQ ID NO: 34912 - DNA, 26 bp, Homo sapiens
ttgagaatttatcaccttcagttaca

SEQ ID NO: 34913 - DNA, 26 bp, Homo sapiens
tgagaatttatcaccttcagttacaa

SEQ ID NO: 34914 - DNA, 26 bp, Homo sapiens
gagaatttatcaccttcagttacaaa

SEQ ID NO: 34915 - DNA, 26 bp, Homo sapiens
agaatttatcaccttcagttacaaaa

SEQ ID NO: 34916 - DNA, 26 bp, Homo sapiens
gaatttatcaccttcagttacaaaaa

SEQ ID NO: 34917 - DNA, 26 bp, Homo sapiens
aatttatcaccttcagttacaaaaag

SEQ ID NO: 34918 - DNA, 26 bp, Homo sapiens
atttatcaccttcagttacaaaaagt

SEQ ID NO: 34919 - DNA, 26 bp, Homo sapiens
tttatcaccttcagttacaaaaagtg

SEQ ID NO: 34920 - DNA, 26 bp, Homo sapiens
ttatcaccttcagttacaaaaagtgc

SEQ ID NO: 34921 - DNA, 26 bp, Homo sapiens
tatcaccttcagttacaaaaagtgca

SEQ ID NO: 34922 - DNA, 26 bp, Homo sapiens
atcaccttcagttacaaaaagtgcag

SEQ ID NO: 34923 - DNA, 26 bp, Homo sapiens
tcaccttcagttacaaaaagtgcagt

SEQ ID NO: 34924 - DNA, 26 bp, Homo sapiens
caccttcagttacaaaaagtgcagta

SEQ ID NO: 34925 - DNA, 26 bp, Homo sapiens
accttcagttacaaaaagtgcagtaa

SEQ ID NO: 34926 - DNA, 26 bp, Homo sapiens
ccttcagttacaaaaagtgcagtaaa

SEQ ID NO: 34927 - DNA, 26 bp, Homo sapiens
cttcagttacaaaaagtgcagtaaac

SEQ ID NO: 34928 - DNA, 26 bp, Homo sapiens
ttcagttacaaaaagtgcagtaaaca

SEQ ID NO: 34929 - DNA, 26 bp, Homo sapiens
tcagttacaaaaagtgcagtaaacag

SEQ ID NO: 34930 - DNA, 26 bp, Homo sapiens
cagttacaaaaagtgcagtaaacaga

SEQ ID NO: 34931 - DNA, 26 bp, Homo sapiens
agttacaaaaagtgcagtaaacagaa

SEQ ID NO: 34932 - DNA, 26 bp, Homo sapiens
gttacaaaaagtgcagtaaacagaaa

SEQ ID NO: 34933 - DNA, 26 bp, Homo sapiens
ttacaaaaagtgcagtaaacagaaac

SEQ ID NO: 34934 - DNA, 26 bp, Homo sapiens
tacaaaaagtgcagtaaacagaaaca

SEQ ID NO: 34935 - DNA, 26 bp, Homo sapiens
acaaaaagtgcagtaaacagaaacat

SEQ ID NO: 34936 - DNA, 26 bp, Homo sapiens
caaaaagtgcagtaaacagaaacatt

SEQ ID NO: 34937 - DNA, 26 bp, Homo sapiens
aaaaagtgcagtaaacagaaacattt

SEQ ID NO: 34938 - DNA, 26 bp, Homo sapiens
aaaagtgcagtaaacagaaacatttg

SEQ ID NO: 34939 - DNA, 26 bp, Homo sapiens
aaagtgcagtaaacagaaacatttgc

SEQ ID NO: 34940 - DNA, 26 bp, Homo sapiens
aagtgcagtaaacagaaacatttgct

SEQ ID NO: 34941 - DNA, 26 bp, Homo sapiens
agtgcagtaaacagaaacatttgctc

SEQ ID NO: 34942 - DNA, 26 bp, Homo sapiens
gtgcagtaaacagaaacatttgctct

SEQ ID NO: 34943 - DNA, 26 bp, Homo sapiens
tgcagtaaacagaaacatttgctcta

SEQ ID NO: 34944 - DNA, 26 bp, Homo sapiens
gcagtaaacagaaacatttgctctac

SEQ ID NO: 34945 - DNA, 26 bp, Homo sapiens
cagtaaacagaaacatttgctctaca

SEQ ID NO: 34946 - DNA, 26 bp, Homo sapiens
agtaaacagaaacatttgctctacat

SEQ ID NO: 34947 - DNA, 26 bp, Homo sapiens
gtaaacagaaacatttgctctacatt

SEQ ID NO: 34948 - DNA, 26 bp, Homo sapiens
taaacagaaacatttgctctacattt

SEQ ID NO: 34949 - DNA, 26 bp, Homo sapiens
aaacagaaacatttgctctacattta

SEQ ID NO: 34950 - DNA, 26 bp, Homo sapiens
aacagaaacatttgctctacatttat

SEQ ID NO: 34951 - DNA, 26 bp, Homo sapiens
acagaaacatttgctctacatttata

SEQ ID NO: 34952 - DNA, 26 bp, Homo sapiens
cagaaacatttgctctacatttataa

SEQ ID NO: 34953 - DNA, 26 bp, Homo sapiens
agaaacatttgctctacatttataaa

SEQ ID NO: 34954 - DNA, 26 bp, Homo sapiens
gaaacatttgctctacatttataaat

SEQ ID NO: 34955 - DNA, 26 bp, Homo sapiens
aaacatttgctctacatttataaatt

SEQ ID NO: 34956 - DNA, 26 bp, Homo sapiens
aacatttgctctacatttataaattg

SEQ ID NO: 34957 - DNA, 26 bp, Homo sapiens
acatttgctctacatttataaattgc

SEQ ID NO: 34958 - DNA, 26 bp, Homo sapiens
catttgctctacatttataaattgct

SEQ ID NO: 34959 - DNA, 26 bp, Homo sapiens
atttgctctacatttataaattgctc

SEQ ID NO: 34960 - DNA, 26 bp, Homo sapiens
tttgctctacatttataaattgctca

SEQ ID NO: 34961 - DNA, 26 bp, Homo sapiens
ttgctctacatttataaattgctcaa

SEQ ID NO: 34962 - DNA, 26 bp, Homo sapiens
tgctctacatttataaattgctcaaa

SEQ ID NO: 34963 - DNA, 26 bp, Homo sapiens
gctctacatttataaattgctcaaaa

SEQ ID NO: 34964 - DNA, 26 bp, Homo sapiens
ctctacatttataaattgctcaaaaa

SEQ ID NO: 34965 - DNA, 26 bp, Homo sapiens
tctacatttataaattgctcaaaaat

SEQ ID NO: 34966 - DNA, 26 bp, Homo sapiens
ctacatttataaattgctcaaaaatc

SEQ ID NO: 34967 - DNA, 26 bp, Homo sapiens
tacatttataaattgctcaaaaatct

SEQ ID NO: 34968 - DNA, 26 bp, Homo sapiens
acatttataaattgctcaaaaatctt

SEQ ID NO: 34969 - DNA, 26 bp, Homo sapiens
catttataaattgctcaaaaatcttt

SEQ ID NO: 34970 - DNA, 26 bp, Homo sapiens
atttataaattgctcaaaaatctttg

SEQ ID NO: 34971 - DNA, 26 bp, Homo sapiens
tttataaattgctcaaaaatctttgc

SEQ ID NO: 34972 - DNA, 26 bp, Homo sapiens
ttataaattgctcaaaaatctttgct

SEQ ID NO: 34973 - DNA, 26 bp, Homo sapiens
tataaattgctcaaaaatctttgcta

SEQ ID NO: 34974 - DNA, 26 bp, Homo sapiens
ataaattgctcaaaaatctttgctaa

SEQ ID NO: 34975 - DNA, 26 bp, Homo sapiens
taaattgctcaaaaatctttgctaaa

SEQ ID NO: 34976 - DNA, 26 bp, Homo sapiens
aaattgctcaaaaatctttgctaaag

SEQ ID NO: 34977 - DNA, 26 bp, Homo sapiens
aattgctcaaaaatctttgctaaaga

SEQ ID NO: 34978 - DNA, 26 bp, Homo sapiens
attgctcaaaaatctttgctaaagat

SEQ ID NO: 34979 - DNA, 26 bp, Homo sapiens
ttgctcaaaaatctttgctaaagatc

SEQ ID NO: 34980 - DNA, 26 bp, Homo sapiens
tgctcaaaaatctttgctaaagatct

SEQ ID NO: 34981 - DNA, 26 bp, Homo sapiens
gctcaaaaatctttgctaaagatctt

SEQ ID NO: 34982 - DNA, 26 bp, Homo sapiens
ctcaaaaatctttgctaaagatctta

SEQ ID NO: 34983 - DNA, 26 bp, Homo sapiens
tcaaaaatctttgctaaagatcttac

SEQ ID NO: 34984 - DNA, 26 bp, Homo sapiens
caaaaatctttgctaaagatcttaca

SEQ ID NO: 34985 - DNA, 26 bp, Homo sapiens
aaaaatctttgctaaagatcttacaa

SEQ ID NO: 34986 - DNA, 26 bp, Homo sapiens
aaaatctttgctaaagatcttacaaa

SEQ ID NO: 34987 - DNA, 26 bp, Homo sapiens
aaatctttgctaaagatcttacaaat

SEQ ID NO: 34988 - DNA, 26 bp, Homo sapiens
aatctttgctaaagatcttacaaatt

SEQ ID NO: 34989 - DNA, 26 bp, Homo sapiens
atctttgctaaagatcttacaaattc

SEQ ID NO: 34990 - DNA, 26 bp, Homo sapiens
tctttgctaaagatcttacaaattca

SEQ ID NO: 34991 - DNA, 26 bp, Homo sapiens
ctttgctaaagatcttacaaattcag

SEQ ID NO: 34992 - DNA, 26 bp, Homo sapiens
tttgctaaagatcttacaaattcagt

SEQ ID NO: 34993 - DNA, 26 bp, Homo sapiens
ttgctaaagatcttacaaattcagta

SEQ ID NO: 34994 - DNA, 26 bp, Homo sapiens
tgctaaagatcttacaaattcagtaa

SEQ ID NO: 34995 - DNA, 26 bp, Homo sapiens
gctaaagatcttacaaattcagtaat

SEQ ID NO: 34996 - DNA, 26 bp, Homo sapiens
ctaaagatcttacaaattcagtaata

SEQ ID NO: 34997 - DNA, 26 bp, Homo sapiens
taaagatcttacaaattcagtaatat

SEQ ID NO: 34998 - DNA, 26 bp, Homo sapiens
aaagatcttacaaattcagtaatatt

SEQ ID NO: 34999 - DNA, 26 bp, Homo sapiens
aagatcttacaaattcagtaatatta

SEQ ID NO: 35000 - DNA, 26 bp, Homo sapiens
agatcttacaaattcagtaatattac

SEQ ID NO: 35001 - DNA, 26 bp, Homo sapiens
gatcttacaaattcagtaatattaca

SEQ ID NO: 35002 - DNA, 26 bp, Homo sapiens
atcttacaaattcagtaatattacag

SEQ ID NO: 35003 - DNA, 26 bp, Homo sapiens
tcttacaaattcagtaatattacaga

SEQ ID NO: 35004 - DNA, 26 bp, Homo sapiens
cttacaaattcagtaatattacagaa

SEQ ID NO: 35005 - DNA, 26 bp, Homo sapiens
ttacaaattcagtaatattacagaac

SEQ ID NO: 35006 - DNA, 26 bp, Homo sapiens
tacaaattcagtaatattacagaaca

SEQ ID NO: 35007 - DNA, 26 bp, Homo sapiens
acaaattcagtaatattacagaacaa

SEQ ID NO: 35008 - DNA, 26 bp, Homo sapiens
caaattcagtaatattacagaacaat

SEQ ID NO: 35009 - DNA, 26 bp, Homo sapiens
aaattcagtaatattacagaacaatt

SEQ ID NO: 35010 - DNA, 26 bp, Homo sapiens
aattcagtaatattacagaacaattc

SEQ ID NO: 35011 - DNA, 26 bp, Homo sapiens
attcagtaatattacagaacaattct

SEQ ID NO: 35012 - DNA, 26 bp, Homo sapiens
ttcagtaatattacagaacaattcta

SEQ ID NO: 35013 - DNA, 26 bp, Homo sapiens
tcagtaatattacagaacaattctaa

SEQ ID NO: 35014 - DNA, 26 bp, Homo sapiens
cagtaatattacagaacaattctaat

SEQ ID NO: 35015 - DNA, 26 bp, Homo sapiens
agtaatattacagaacaattctaatc

SEQ ID NO: 35016 - DNA, 26 bp, Homo sapiens
gtaatattacagaacaattctaatca

SEQ ID NO: 35017 - DNA, 26 bp, Homo sapiens
taatattacagaacaattctaatcaa

SEQ ID NO: 35018 - DNA, 26 bp, Homo sapiens
aatattacagaacaattctaatcaat

SEQ ID NO: 35019 - DNA, 26 bp, Homo sapiens
atattacagaacaattctaatcaata

SEQ ID NO: 35020 - DNA, 26 bp, Homo sapiens
tattacagaacaattctaatcaatat

SEQ ID NO: 35021 - DNA, 26 bp, Homo sapiens
attacagaacaattctaatcaatatt

SEQ ID NO: 35022 - DNA, 26 bp, Homo sapiens
ttacagaacaattctaatcaatattt

SEQ ID NO: 35023 - DNA, 26 bp, Homo sapiens
tacagaacaattctaatcaatattta

SEQ ID NO: 35024 - DNA, 26 bp, Homo sapiens
acagaacaattctaatcaatatttaa

SEQ ID NO: 35025 - DNA, 26 bp, Homo sapiens
cagaacaattctaatcaatatttaat

SEQ ID NO: 35026 - DNA, 26 bp, Homo sapiens
agaacaattctaatcaatatttaata

SEQ ID NO: 35027 - DNA, 26 bp, Homo sapiens
gaacaattctaatcaatatttaataa

SEQ ID NO: 35028 - DNA, 26 bp, Homo sapiens
aacaattctaatcaatatttaataag

SEQ ID NO: 35029 - DNA, 26 bp, Homo sapiens
acaattctaatcaatatttaataagg

SEQ ID NO: 35030 - DNA, 26 bp, Homo sapiens
caattctaatcaatatttaataaggt

SEQ ID NO: 35031 - DNA, 26 bp, Homo sapiens
aattctaatcaatatttaataaggtt

SEQ ID NO: 35032 - DNA, 26 bp, Homo sapiens
attctaatcaatatttaataaggtta

SEQ ID NO: 35033 - DNA, 26 bp, Homo sapiens
ttctaatcaatatttaataaggttaa

SEQ ID NO: 35034 - DNA, 26 bp, Homo sapiens
tctaatcaatatttaataaggttaac

SEQ ID NO: 35035 - DNA, 26 bp, Homo sapiens
ctaatcaatatttaataaggttaact

SEQ ID NO: 35036 - DNA, 26 bp, Homo sapiens
taatcaatatttaataaggttaacta

SEQ ID NO: 35037 - DNA, 26 bp, Homo sapiens
aatcaatatttaataaggttaactac

SEQ ID NO: 35038 - DNA, 26 bp, Homo sapiens
atcaatatttaataaggttaactaca

SEQ ID NO: 35039 - DNA, 26 bp, Homo sapiens
tcaatatttaataaggttaactacat

SEQ ID NO: 35040 - DNA, 26 bp, Homo sapiens
caatatttaataaggttaactacatc

SEQ ID NO: 35041 - DNA, 26 bp, Homo sapiens
aatatttaataaggttaactacatcc

SEQ ID NO: 35042 - DNA, 26 bp, Homo sapiens
atatttaataaggttaactacatcct

SEQ ID NO: 35043 - DNA, 26 bp, Homo sapiens
tatttaataaggttaactacatcctt

SEQ ID NO: 35044 - DNA, 26 bp, Homo sapiens
atttaataaggttaactacatcctta

SEQ ID NO: 35045 - DNA, 26 bp, Homo sapiens
tttaataaggttaactacatccttag

SEQ ID NO: 35046 - DNA, 26 bp, Homo sapiens
ttaataaggttaactacatccttagt

SEQ ID NO: 35047 - DNA, 26 bp, Homo sapiens
taataaggttaactacatccttagtt

SEQ ID NO: 35048 - DNA, 26 bp, Homo sapiens
aataaggttaactacatccttagtta

SEQ ID NO: 35049 - DNA, 26 bp, Homo sapiens
ataaggttaactacatccttagttag

SEQ ID NO: 35050 - DNA, 26 bp, Homo sapiens
taaggttaactacatccttagttaga

SEQ ID NO: 35051 - DNA, 26 bp, Homo sapiens
aaggttaactacatccttagttagat

SEQ ID NO: 35052 - DNA, 26 bp, Homo sapiens
aggttaactacatccttagttagata

SEQ ID NO: 35053 - DNA, 26 bp, Homo sapiens
ggttaactacatccttagttagatat

SEQ ID NO: 35054 - DNA, 26 bp, Homo sapiens
gttaactacatccttagttagatatt

SEQ ID NO: 35055 - DNA, 26 bp, Homo sapiens
ttaactacatccttagttagatattt

SEQ ID NO: 35056 - DNA, 26 bp, Homo sapiens
taactacatccttagttagatatttg

SEQ ID NO: 35057 - DNA, 26 bp, Homo sapiens
aactacatccttagttagatatttga

SEQ ID NO: 35058 - DNA, 26 bp, Homo sapiens
actacatccttagttagatatttgat

SEQ ID NO: 35059 - DNA, 26 bp, Homo sapiens
ctacatccttagttagatatttgata

SEQ ID NO: 35060 - DNA, 26 bp, Homo sapiens
tacatccttagttagatatttgataa

SEQ ID NO: 35061 - DNA, 26 bp, Homo sapiens
acatccttagttagatatttgataaa

SEQ ID NO: 35062 - DNA, 26 bp, Homo sapiens
catccttagttagatatttgataaac

SEQ ID NO: 35063 - DNA, 26 bp, Homo sapiens
atccttagttagatatttgataaact

SEQ ID NO: 35064 - DNA, 26 bp, Homo sapiens
tccttagttagatatttgataaactt

SEQ ID NO: 35065 - DNA, 26 bp, Homo sapiens
ccttagttagatatttgataaacttt

SEQ ID NO: 35066 - DNA, 26 bp, Homo sapiens
cttagttagatatttgataaactttg

SEQ ID NO: 35067 - DNA, 26 bp, Homo sapiens
ttagttagatatttgataaactttgc

SEQ ID NO: 35068 - DNA, 26 bp, Homo sapiens
tagttagatatttgataaactttgct

SEQ ID NO: 35069 - DNA, 26 bp, Homo sapiens
agttagatatttgataaactttgctt

SEQ ID NO: 35070 - DNA, 26 bp, Homo sapiens
gttagatatttgataaactttgcttt

SEQ ID NO: 35071 - DNA, 26 bp, Homo sapiens
ttagatatttgataaactttgctttt

SEQ ID NO: 35072 - DNA, 26 bp, Homo sapiens
tagatatttgataaactttgcttttc

SEQ ID NO: 35073 - DNA, 26 bp, Homo sapiens
agatatttgataaactttgcttttca

SEQ ID NO: 35074 - DNA, 26 bp, Homo sapiens
gatatttgataaactttgcttttcaa

SEQ ID NO: 35075 - DNA, 26 bp, Homo sapiens
atatttgataaactttgcttttcaat

SEQ ID NO: 35076 - DNA, 26 bp, Homo sapiens
tatttgataaactttgcttttcaata

SEQ ID NO: 35077 - DNA, 26 bp, Homo sapiens
atttgataaactttgcttttcaataa

SEQ ID NO: 35078 - DNA, 26 bp, Homo sapiens
tttgataaactttgcttttcaataat

SEQ ID NO: 35079 - DNA, 26 bp, Homo sapiens
ttgataaactttgcttttcaataatg

SEQ ID NO: 35080 - DNA, 26 bp, Homo sapiens
tgataaactttgcttttcaataatgc

SEQ ID NO: 35081 - DNA, 26 bp, Homo sapiens
gataaactttgcttttcaataatgcc

SEQ ID NO: 35082 - DNA, 26 bp, Homo sapiens
ataaactttgcttttcaataatgcca

SEQ ID NO: 35083 - DNA, 26 bp, Homo sapiens
taaactttgcttttcaataatgccag

SEQ ID NO: 35084 - DNA, 26 bp, Homo sapiens
aaactttgcttttcaataatgccagt

SEQ ID NO: 35085 - DNA, 26 bp, Homo sapiens
aactttgcttttcaataatgccagta

SEQ ID NO: 35086 - DNA, 26 bp, Homo sapiens
actttgcttttcaataatgccagtag

SEQ ID NO: 35087 - DNA, 26 bp, Homo sapiens
ctttgcttttcaataatgccagtaga

SEQ ID NO: 35088 - DNA, 26 bp, Homo sapiens
tttgcttttcaataatgccagtagat

SEQ ID NO: 35089 - DNA, 26 bp, Homo sapiens
ttgcttttcaataatgccagtagatc

SEQ ID NO: 35090 - DNA, 26 bp, Homo sapiens
tgcttttcaataatgccagtagatct

SEQ ID NO: 35091 - DNA, 26 bp, Homo sapiens
gcttttcaataatgccagtagatctt

SEQ ID NO: 35092 - DNA, 26 bp, Homo sapiens
cttttcaataatgccagtagatcttg

SEQ ID NO: 35093 - DNA, 26 bp, Homo sapiens
ttttcaataatgccagtagatcttgg

SEQ ID NO: 35094 - DNA, 26 bp, Homo sapiens
tttcaataatgccagtagatcttggg

SEQ ID NO: 35095 - DNA, 26 bp, Homo sapiens
ttcaataatgccagtagatcttggga

SEQ ID NO: 35096 - DNA, 26 bp, Homo sapiens
tcaataatgccagtagatcttgggag

SEQ ID NO: 35097 - DNA, 26 bp, Homo sapiens
caataatgccagtagatcttgggaga

SEQ ID NO: 35098 - DNA, 26 bp, Homo sapiens
aataatgccagtagatcttgggagaa

SEQ ID NO: 35099 - DNA, 26 bp, Homo sapiens
ataatgccagtagatcttgggagaat

SEQ ID NO: 35100 - DNA, 26 bp, Homo sapiens
taatgccagtagatcttgggagaatg

SEQ ID NO: 35101 - DNA, 26 bp, Homo sapiens
aatgccagtagatcttgggagaatgg

SEQ ID NO: 35102 - DNA, 26 bp, Homo sapiens
atgccagtagatcttgggagaatggg

SEQ ID NO: 35103 - DNA, 26 bp, Homo sapiens
tgccagtagatcttgggagaatgggt

SEQ ID NO: 35104 - DNA, 26 bp, Homo sapiens
gccagtagatcttgggagaatgggta

SEQ ID NO: 35105 - DNA, 26 bp, Homo sapiens
ccagtagatcttgggagaatgggtag

SEQ ID NO: 35106 - DNA, 26 bp, Homo sapiens
cagtagatcttgggagaatgggtaga

SEQ ID NO: 35107 - DNA, 26 bp, Homo sapiens
agtagatcttgggagaatgggtagaa

SEQ ID NO: 35108 - DNA, 26 bp, Homo sapiens
gtagatcttgggagaatgggtagaaa

SEQ ID NO: 35109 - DNA, 26 bp, Homo sapiens
tagatcttgggagaatgggtagaaag

SEQ ID NO: 35110 - DNA, 26 bp, Homo sapiens
agatcttgggagaatgggtagaaagg

SEQ ID NO: 35111 - DNA, 26 bp, Homo sapiens
gatcttgggagaatgggtagaaaggc

SEQ ID NO: 35112 - DNA, 26 bp, Homo sapiens
atcttgggagaatgggtagaaaggct

SEQ ID NO: 35113 - DNA, 26 bp, Homo sapiens
tcttgggagaatgggtagaaaggctt

SEQ ID NO: 35114 - DNA, 26 bp, Homo sapiens
cttgggagaatgggtagaaaggctta

SEQ ID NO: 35115 - DNA, 26 bp, Homo sapiens
ttgggagaatgggtagaaaggcttaa

SEQ ID NO: 35116 - DNA, 26 bp, Homo sapiens
tgggagaatgggtagaaaggcttaat

SEQ ID NO: 35117 - DNA, 26 bp, Homo sapiens
gggagaatgggtagaaaggcttaatt

SEQ ID NO: 35118 - DNA, 26 bp, Homo sapiens
ggagaatgggtagaaaggcttaatta

SEQ ID NO: 35119 - DNA, 26 bp, Homo sapiens
gagaatgggtagaaaggcttaattaa

SEQ ID NO: 35120 - DNA, 26 bp, Homo sapiens
agaatgggtagaaaggcttaattaag

SEQ ID NO: 35121 - DNA, 26 bp, Homo sapiens
gaatgggtagaaaggcttaattaagc

SEQ ID NO: 35122 - DNA, 26 bp, Homo sapiens
aatgggtagaaaggcttaattaagct

SEQ ID NO: 35123 - DNA, 26 bp, Homo sapiens
atgggtagaaaggcttaattaagcta

SEQ ID NO: 35124 - DNA, 26 bp, Homo sapiens
tgggtagaaaggcttaattaagctac

SEQ ID NO: 35125 - DNA, 26 bp, Homo sapiens
gggtagaaaggcttaattaagctact

SEQ ID NO: 35126 - DNA, 26 bp, Homo sapiens
ggtagaaaggcttaattaagctactt

SEQ ID NO: 35127 - DNA, 26 bp, Homo sapiens
gtagaaaggcttaattaagctactta

SEQ ID NO: 35128 - DNA, 26 bp, Homo sapiens
tagaaaggcttaattaagctacttat

SEQ ID NO: 35129 - DNA, 26 bp, Homo sapiens
agaaaggcttaattaagctacttatt

SEQ ID NO: 35130 - DNA, 26 bp, Homo sapiens
gaaaggcttaattaagctacttatta

SEQ ID NO: 35131 - DNA, 26 bp, Homo sapiens
aaaggcttaattaagctacttattaa

SEQ ID NO: 35132 - DNA, 26 bp, Homo sapiens
aaggcttaattaagctacttattaaa

SEQ ID NO: 35133 - DNA, 26 bp, Homo sapiens
aggcttaattaagctacttattaaat

SEQ ID NO: 35134 - DNA, 26 bp, Homo sapiens
ggcttaattaagctacttattaaata

SEQ ID NO: 35135 - DNA, 26 bp, Homo sapiens
gcttaattaagctacttattaaataa

SEQ ID NO: 35136 - DNA, 26 bp, Homo sapiens
cttaattaagctacttattaaataac

SEQ ID NO: 35137 - DNA, 26 bp, Homo sapiens
ttaattaagctacttattaaataact

SEQ ID NO: 35138 - DNA, 26 bp, Homo sapiens
taattaagctacttattaaataactt

SEQ ID NO: 35139 - DNA, 26 bp, Homo sapiens
aattaagctacttattaaataacttt

SEQ ID NO: 35140 - DNA, 26 bp, Homo sapiens
attaagctacttattaaataactttg

SEQ ID NO: 35141 - DNA, 26 bp, Homo sapiens
ttaagctacttattaaataactttga

SEQ ID NO: 35142 - DNA, 26 bp, Homo sapiens
taagctacttattaaataactttgaa

SEQ ID NO: 35143 - DNA, 26 bp, Homo sapiens
aagctacttattaaataactttgaaa

SEQ ID NO: 35144 - DNA, 26 bp, Homo sapiens
agctacttattaaataactttgaaaa

SEQ ID NO: 35145 - DNA, 26 bp, Homo sapiens
gctacttattaaataactttgaaaat

SEQ ID NO: 35146 - DNA, 26 bp, Homo sapiens
ctacttattaaataactttgaaaatg

SEQ ID NO: 35147 - DNA, 26 bp, Homo sapiens
tacttattaaataactttgaaaatga

SEQ ID NO: 35148 - DNA, 26 bp, Homo sapiens
acttattaaataactttgaaaatgaa

SEQ ID NO: 35149 - DNA, 26 bp, Homo sapiens
cttattaaataactttgaaaatgaag

SEQ ID NO: 35150 - DNA, 26 bp, Homo sapiens
ttattaaataactttgaaaatgaagg

SEQ ID NO: 35151 - DNA, 26 bp, Homo sapiens
tattaaataactttgaaaatgaaggt

SEQ ID NO: 35152 - DNA, 26 bp, Homo sapiens
attaaataactttgaaaatgaaggtc

SEQ ID NO: 35153 - DNA, 26 bp, Homo sapiens
ttaaataactttgaaaatgaaggtcc

SEQ ID NO: 35154 - DNA, 26 bp, Homo sapiens
taaataactttgaaaatgaaggtcct

SEQ ID NO: 35155 - DNA, 26 bp, Homo sapiens
aaataactttgaaaatgaaggtcctt

SEQ ID NO: 35156 - DNA, 26 bp, Homo sapiens
aataactttgaaaatgaaggtccttc

SEQ ID NO: 35157 - DNA, 26 bp, Homo sapiens
ataactttgaaaatgaaggtccttca

SEQ ID NO: 35158 - DNA, 26 bp, Homo sapiens
taactttgaaaatgaaggtccttcac

SEQ ID NO: 35159 - DNA, 26 bp, Homo sapiens
aactttgaaaatgaaggtccttcact

SEQ ID NO: 35160 - DNA, 26 bp, Homo sapiens
actttgaaaatgaaggtccttcactc

SEQ ID NO: 35161 - DNA, 26 bp, Homo sapiens
ctttgaaaatgaaggtccttcactca

SEQ ID NO: 35162 - DNA, 26 bp, Homo sapiens
tttgaaaatgaaggtccttcactcag

SEQ ID NO: 35163 - DNA, 26 bp, Homo sapiens
ttgaaaatgaaggtccttcactcagt

SEQ ID NO: 35164 - DNA, 26 bp, Homo sapiens
tgaaaatgaaggtccttcactcagtt

SEQ ID NO: 35165 - DNA, 26 bp, Homo sapiens
gaaaatgaaggtccttcactcagttc

SEQ ID NO: 35166 - DNA, 26 bp, Homo sapiens
aaaatgaaggtccttcactcagttca

SEQ ID NO: 35167 - DNA, 26 bp, Homo sapiens
aaatgaaggtccttcactcagttcat

SEQ ID NO: 35168 - DNA, 26 bp, Homo sapiens
aatgaaggtccttcactcagttcatg

SEQ ID NO: 35169 - DNA, 26 bp, Homo sapiens
atgaaggtccttcactcagttcatgg

SEQ ID NO: 35170 - DNA, 26 bp, Homo sapiens
tgaaggtccttcactcagttcatgga

SEQ ID NO: 35171 - DNA, 26 bp, Homo sapiens
gaaggtccttcactcagttcatggaa

SEQ ID NO: 35172 - DNA, 26 bp, Homo sapiens
aaggtccttcactcagttcatggaac

SEQ ID NO: 35173 - DNA, 26 bp, Homo sapiens
aggtccttcactcagttcatggaact

SEQ ID NO: 35174 - DNA, 26 bp, Homo sapiens
ggtccttcactcagttcatggaactg

SEQ ID NO: 35175 - DNA, 26 bp, Homo sapiens
gtccttcactcagttcatggaactgg

SEQ ID NO: 35176 - DNA, 26 bp, Homo sapiens
tccttcactcagttcatggaactggt

SEQ ID NO: 35177 - DNA, 26 bp, Homo sapiens
ccttcactcagttcatggaactggtt

SEQ ID NO: 35178 - DNA, 26 bp, Homo sapiens
cttcactcagttcatggaactggttg

SEQ ID NO: 35179 - DNA, 26 bp, Homo sapiens
ttcactcagttcatggaactggttga

SEQ ID NO: 35180 - DNA, 26 bp, Homo sapiens
tcactcagttcatggaactggttgag

SEQ ID NO: 35181 - DNA, 26 bp, Homo sapiens
cactcagttcatggaactggttgagg

SEQ ID NO: 35182 - DNA, 26 bp, Homo sapiens
actcagttcatggaactggttgaggt

SEQ ID NO: 35183 - DNA, 26 bp, Homo sapiens
ctcagttcatggaactggttgaggtc

SEQ ID NO: 35184 - DNA, 26 bp, Homo sapiens
tcagttcatggaactggttgaggtca

SEQ ID NO: 35185 - DNA, 26 bp, Homo sapiens
cagttcatggaactggttgaggtcat

SEQ ID NO: 35186 - DNA, 26 bp, Homo sapiens
agttcatggaactggttgaggtcata

SEQ ID NO: 35187 - DNA, 26 bp, Homo sapiens
gttcatggaactggttgaggtcatac

SEQ ID NO: 35188 - DNA, 26 bp, Homo sapiens
ttcatggaactggttgaggtcatact

SEQ ID NO: 35189 - DNA, 26 bp, Homo sapiens
tcatggaactggttgaggtcatactg

SEQ ID NO: 35190 - DNA, 26 bp, Homo sapiens
catggaactggttgaggtcatactga

SEQ ID NO: 35191 - DNA, 26 bp, Homo sapiens
atggaactggttgaggtcatactgaa

SEQ ID NO: 35192 - DNA, 26 bp, Homo sapiens
tggaactggttgaggtcatactgaaa

SEQ ID NO: 35193 - DNA, 26 bp, Homo sapiens
ggaactggttgaggtcatactgaaac

SEQ ID NO: 35194 - DNA, 26 bp, Homo sapiens
gaactggttgaggtcatactgaaaca

SEQ ID NO: 35195 - DNA, 26 bp, Homo sapiens
aactggttgaggtcatactgaaacag

SEQ ID NO: 35196 - DNA, 26 bp, Homo sapiens
actggttgaggtcatactgaaacaga

SEQ ID NO: 35197 - DNA, 26 bp, Homo sapiens
ctggttgaggtcatactgaaacagaa

SEQ ID NO: 35198 - DNA, 26 bp, Homo sapiens
tggttgaggtcatactgaaacagaac

SEQ ID NO: 35199 - DNA, 26 bp, Homo sapiens
ggttgaggtcatactgaaacagaaca

SEQ ID NO: 35200 - DNA, 26 bp, Homo sapiens
gttgaggtcatactgaaacagaacat

SEQ ID NO: 35201 - DNA, 26 bp, Homo sapiens
ttgaggtcatactgaaacagaacatc

SEQ ID NO: 35202 - DNA, 26 bp, Homo sapiens
tgaggtcatactgaaacagaacatcc

SEQ ID NO: 35203 - DNA, 26 bp, Homo sapiens
gaggtcatactgaaacagaacatccc

SEQ ID NO: 35204 - DNA, 26 bp, Homo sapiens
aggtcatactgaaacagaacatccca

SEQ ID NO: 35205 - DNA, 26 bp, Homo sapiens
ggtcatactgaaacagaacatcccat

SEQ ID NO: 35206 - DNA, 26 bp, Homo sapiens
gtcatactgaaacagaacatcccatg

SEQ ID NO: 35207 - DNA, 26 bp, Homo sapiens
tcatactgaaacagaacatcccatgt

SEQ ID NO: 35208 - DNA, 26 bp, Homo sapiens
catactgaaacagaacatcccatgtc

SEQ ID NO: 35209 - DNA, 26 bp, Homo sapiens
atactgaaacagaacatcccatgtcg

SEQ ID NO: 35210 - DNA, 26 bp, Homo sapiens
tactgaaacagaacatcccatgtcga

SEQ ID NO: 35211 - DNA, 26 bp, Homo sapiens
actgaaacagaacatcccatgtcgaa

SEQ ID NO: 35212 - DNA, 26 bp, Homo sapiens
ctgaaacagaacatcccatgtcgaat

SEQ ID NO: 35213 - DNA, 26 bp, Homo sapiens
tgaaacagaacatcccatgtcgaatt

SEQ ID NO: 35214 - DNA, 26 bp, Homo sapiens
gaaacagaacatcccatgtcgaattt

SEQ ID NO: 35215 - DNA, 26 bp, Homo sapiens
aaacagaacatcccatgtcgaatttg

SEQ ID NO: 35216 - DNA, 26 bp, Homo sapiens
aacagaacatcccatgtcgaatttgc

SEQ ID NO: 35217 - DNA, 26 bp, Homo sapiens
acagaacatcccatgtcgaatttgct

SEQ ID NO: 35218 - DNA, 26 bp, Homo sapiens
cagaacatcccatgtcgaatttgctt

SEQ ID NO: 35219 - DNA, 26 bp, Homo sapiens
agaacatcccatgtcgaatttgcttt

SEQ ID NO: 35220 - DNA, 26 bp, Homo sapiens
gaacatcccatgtcgaatttgcttta

SEQ ID NO: 35221 - DNA, 26 bp, Homo sapiens
aacatcccatgtcgaatttgctttat

SEQ ID NO: 35222 - DNA, 26 bp, Homo sapiens
acatcccatgtcgaatttgctttatg

SEQ ID NO: 35223 - DNA, 26 bp, Homo sapiens
catcccatgtcgaatttgctttatgg

SEQ ID NO: 35224 - DNA, 26 bp, Homo sapiens
atcccatgtcgaatttgctttatggc

SEQ ID NO: 35225 - DNA, 26 bp, Homo sapiens
tcccatgtcgaatttgctttatggcc

SEQ ID NO: 35226 - DNA, 26 bp, Homo sapiens
cccatgtcgaatttgctttatggccc

SEQ ID NO: 35227 - DNA, 26 bp, Homo sapiens
ccatgtcgaatttgctttatggccca

SEQ ID NO: 35228 - DNA, 26 bp, Homo sapiens
catgtcgaatttgctttatggcccat

SEQ ID NO: 35229 - DNA, 26 bp, Homo sapiens
atgtcgaatttgctttatggcccatg

SEQ ID NO: 35230 - DNA, 26 bp, Homo sapiens
tgtcgaatttgctttatggcccatgt

SEQ ID NO: 35231 - DNA, 26 bp, Homo sapiens
gtcgaatttgctttatggcccatgtt

SEQ ID NO: 35232 - DNA, 26 bp, Homo sapiens
tcgaatttgctttatggcccatgtta

SEQ ID NO: 35233 - DNA, 26 bp, Homo sapiens
cgaatttgctttatggcccatgttat

SEQ ID NO: 35234 - DNA, 26 bp, Homo sapiens
gaatttgctttatggcccatgttatg

SEQ ID NO: 35235 - DNA, 26 bp, Homo sapiens
aatttgctttatggcccatgttatgg

SEQ ID NO: 35236 - DNA, 26 bp, Homo sapiens
atttgctttatggcccatgttatggc

SEQ ID NO: 35237 - DNA, 26 bp, Homo sapiens
tttgctttatggcccatgttatggca

SEQ ID NO: 35238 - DNA, 26 bp, Homo sapiens
ttgctttatggcccatgttatggcag

SEQ ID NO: 35239 - DNA, 26 bp, Homo sapiens
tgctttatggcccatgttatggcaga

SEQ ID NO: 35240 - DNA, 26 bp, Homo sapiens
gctttatggcccatgttatggcagag

SEQ ID NO: 35241 - DNA, 26 bp, Homo sapiens
ctttatggcccatgttatggcagagg

SEQ ID NO: 35242 - DNA, 26 bp, Homo sapiens
tttatggcccatgttatggcagagga

SEQ ID NO: 35243 - DNA, 26 bp, Homo sapiens
ttatggcccatgttatggcagaggac

SEQ ID NO: 35244 - DNA, 26 bp, Homo sapiens
tatggcccatgttatggcagaggacg

SEQ ID NO: 35245 - DNA, 26 bp, Homo sapiens
atggcccatgttatggcagaggacgt

SEQ ID NO: 35246 - DNA, 26 bp, Homo sapiens
tggcccatgttatggcagaggacgtc

SEQ ID NO: 35247 - DNA, 26 bp, Homo sapiens
ggcccatgttatggcagaggacgtct

SEQ ID NO: 35248 - DNA, 26 bp, Homo sapiens
gcccatgttatggcagaggacgtctc

SEQ ID NO: 35249 - DNA, 26 bp, Homo sapiens
cccatgttatggcagaggacgtctcc

SEQ ID NO: 35250 - DNA, 26 bp, Homo sapiens
ccatgttatggcagaggacgtctcca

SEQ ID NO: 35251 - DNA, 26 bp, Homo sapiens
catgttatggcagaggacgtctccat

SEQ ID NO: 35252 - DNA, 26 bp, Homo sapiens
atgttatggcagaggacgtctccatc

SEQ ID NO: 35253 - DNA, 26 bp, Homo sapiens
tgttatggcagaggacgtctccatcc

SEQ ID NO: 35254 - DNA, 26 bp, Homo sapiens
gttatggcagaggacgtctccatcct

SEQ ID NO: 35255 - DNA, 26 bp, Homo sapiens
ttatggcagaggacgtctccatcctt

SEQ ID NO: 35256 - DNA, 26 bp, Homo sapiens
tatggcagaggacgtctccatccttc

SEQ ID NO: 35257 - DNA, 26 bp, Homo sapiens
atggcagaggacgtctccatccttct

SEQ ID NO: 35258 - DNA, 26 bp, Homo sapiens
tggcagaggacgtctccatccttctc

SEQ ID NO: 35259 - DNA, 26 bp, Homo sapiens
ggcagaggacgtctccatccttctca

SEQ ID NO: 35260 - DNA, 26 bp, Homo sapiens
gcagaggacgtctccatccttctcat

SEQ ID NO: 35261 - DNA, 26 bp, Homo sapiens
cagaggacgtctccatccttctcatg

SEQ ID NO: 35262 - DNA, 26 bp, Homo sapiens
agaggacgtctccatccttctcatga

SEQ ID NO: 35263 - DNA, 26 bp, Homo sapiens
gaggacgtctccatccttctcatgac

SEQ ID NO: 35264 - DNA, 26 bp, Homo sapiens
aggacgtctccatccttctcatgact

SEQ ID NO: 35265 - DNA, 26 bp, Homo sapiens
ggacgtctccatccttctcatgactc

SEQ ID NO: 35266 - DNA, 26 bp, Homo sapiens
gacgtctccatccttctcatgactca

SEQ ID NO: 35267 - DNA, 26 bp, Homo sapiens
acgtctccatccttctcatgactcag

SEQ ID NO: 35268 - DNA, 26 bp, Homo sapiens
cgtctccatccttctcatgactcagg

SEQ ID NO: 35269 - DNA, 26 bp, Homo sapiens
gtctccatccttctcatgactcaggt

SEQ ID NO: 35270 - DNA, 26 bp, Homo sapiens
tctccatccttctcatgactcaggta

SEQ ID NO: 35271 - DNA, 26 bp, Homo sapiens
ctccatccttctcatgactcaggtag

SEQ ID NO: 35272 - DNA, 26 bp, Homo sapiens
tccatccttctcatgactcaggtagg

SEQ ID NO: 35273 - DNA, 26 bp, Homo sapiens
ccatccttctcatgactcaggtagga

SEQ ID NO: 35274 - DNA, 26 bp, Homo sapiens
catccttctcatgactcaggtaggag

SEQ ID NO: 35275 - DNA, 26 bp, Homo sapiens
atccttctcatgactcaggtaggagg

SEQ ID NO: 35276 - DNA, 26 bp, Homo sapiens
tccttctcatgactcaggtaggaggg

SEQ ID NO: 35277 - DNA, 26 bp, Homo sapiens
ccttctcatgactcaggtaggagggg

SEQ ID NO: 35278 - DNA, 26 bp, Homo sapiens
cttctcatgactcaggtaggagggga

SEQ ID NO: 35279 - DNA, 26 bp, Homo sapiens
ttctcatgactcaggtaggaggggaa

SEQ ID NO: 35280 - DNA, 26 bp, Homo sapiens
tctcatgactcaggtaggaggggaaa

SEQ ID NO: 35281 - DNA, 26 bp, Homo sapiens
ctcatgactcaggtaggaggggaaag

SEQ ID NO: 35282 - DNA, 26 bp, Homo sapiens
tcatgactcaggtaggaggggaaagg

SEQ ID NO: 35283 - DNA, 26 bp, Homo sapiens
catgactcaggtaggaggggaaaggt

SEQ ID NO: 35284 - DNA, 26 bp, Homo sapiens
atgactcaggtaggaggggaaaggtt

SEQ ID NO: 35285 - DNA, 26 bp, Homo sapiens
tgactcaggtaggaggggaaaggttt

SEQ ID NO: 35286 - DNA, 26 bp, Homo sapiens
gactcaggtaggaggggaaaggttta

SEQ ID NO: 35287 - DNA, 26 bp, Homo sapiens
actcaggtaggaggggaaaggtttat

SEQ ID NO: 35288 - DNA, 26 bp, Homo sapiens
ctcaggtaggaggggaaaggtttatt

SEQ ID NO: 35289 - DNA, 26 bp, Homo sapiens
tcaggtaggaggggaaaggtttattc

SEQ ID NO: 35290 - DNA, 26 bp, Homo sapiens
caggtaggaggggaaaggtttattct

SEQ ID NO: 35291 - DNA, 26 bp, Homo sapiens
aggtaggaggggaaaggtttattctg

SEQ ID NO: 35292 - DNA, 26 bp, Homo sapiens
ggtaggaggggaaaggtttattctgc

SEQ ID NO: 35293 - DNA, 26 bp, Homo sapiens
gtaggaggggaaaggtttattctgcc

SEQ ID NO: 35294 - DNA, 26 bp, Homo sapiens
taggaggggaaaggtttattctgcca

SEQ ID NO: 35295 - DNA, 26 bp, Homo sapiens
aggaggggaaaggtttattctgccat

SEQ ID NO: 35296 - DNA, 26 bp, Homo sapiens
ggaggggaaaggtttattctgccatc

SEQ ID NO: 35297 - DNA, 26 bp, Homo sapiens
gaggggaaaggtttattctgccatca

SEQ ID NO: 35298 - DNA, 26 bp, Homo sapiens
aggggaaaggtttattctgccatcaa

SEQ ID NO: 35299 - DNA, 26 bp, Homo sapiens
ggggaaaggtttattctgccatcaag

SEQ ID NO: 35300 - DNA, 26 bp, Homo sapiens
gggaaaggtttattctgccatcaagc

SEQ ID NO: 35301 - DNA, 26 bp, Homo sapiens
ggaaaggtttattctgccatcaagcc

SEQ ID NO: 35302 - DNA, 26 bp, Homo sapiens
gaaaggtttattctgccatcaagcca

SEQ ID NO: 35303 - DNA, 26 bp, Homo sapiens
aaaggtttattctgccatcaagccat

SEQ ID NO: 35304 - DNA, 26 bp, Homo sapiens
aaggtttattctgccatcaagccatc

SEQ ID NO: 35305 - DNA, 26 bp, Homo sapiens
aggtttattctgccatcaagccatct

SEQ ID NO: 35306 - DNA, 26 bp, Homo sapiens
ggtttattctgccatcaagccatcta

SEQ ID NO: 35307 - DNA, 26 bp, Homo sapiens
gtttattctgccatcaagccatctag

SEQ ID NO: 35308 - DNA, 26 bp, Homo sapiens
tttattctgccatcaagccatctagg

SEQ ID NO: 35309 - DNA, 26 bp, Homo sapiens
ttattctgccatcaagccatctagga

SEQ ID NO: 35310 - DNA, 26 bp, Homo sapiens
tattctgccatcaagccatctaggat

SEQ ID NO: 35311 - DNA, 26 bp, Homo sapiens
attctgccatcaagccatctaggata

SEQ ID NO: 35312 - DNA, 26 bp, Homo sapiens
ttctgccatcaagccatctaggatat

SEQ ID NO: 35313 - DNA, 26 bp, Homo sapiens
tctgccatcaagccatctaggatatt

SEQ ID NO: 35314 - DNA, 26 bp, Homo sapiens
ctgccatcaagccatctaggatattt

SEQ ID NO: 35315 - DNA, 26 bp, Homo sapiens
tgccatcaagccatctaggatatttt

SEQ ID NO: 35316 - DNA, 26 bp, Homo sapiens
gccatcaagccatctaggatatttta

SEQ ID NO: 35317 - DNA, 26 bp, Homo sapiens
ccatcaagccatctaggatattttat

SEQ ID NO: 35318 - DNA, 26 bp, Homo sapiens
catcaagccatctaggatattttatg

SEQ ID NO: 35319 - DNA, 26 bp, Homo sapiens
atcaagccatctaggatattttatgt

SEQ ID NO: 35320 - DNA, 26 bp, Homo sapiens
tcaagccatctaggatattttatgta

SEQ ID NO: 35321 - DNA, 26 bp, Homo sapiens
caagccatctaggatattttatgtaa

SEQ ID NO: 35322 - DNA, 26 bp, Homo sapiens
aagccatctaggatattttatgtaaa

SEQ ID NO: 35323 - DNA, 26 bp, Homo sapiens
agccatctaggatattttatgtaaat

SEQ ID NO: 35324 - DNA, 26 bp, Homo sapiens
gccatctaggatattttatgtaaatg

SEQ ID NO: 35325 - DNA, 26 bp, Homo sapiens
ccatctaggatattttatgtaaatgc

SEQ ID NO: 35326 - DNA, 26 bp, Homo sapiens
catctaggatattttatgtaaatgcc

SEQ ID NO: 35327 - DNA, 26 bp, Homo sapiens
atctaggatattttatgtaaatgccc

SEQ ID NO: 35328 - DNA, 26 bp, Homo sapiens
tctaggatattttatgtaaatgccca

SEQ ID NO: 35329 - DNA, 26 bp, Homo sapiens
ctaggatattttatgtaaatgcccat

SEQ ID NO: 35330 - DNA, 26 bp, Homo sapiens
taggatattttatgtaaatgcccatt

SEQ ID NO: 35331 - DNA, 26 bp, Homo sapiens
aggatattttatgtaaatgcccatta

SEQ ID NO: 35332 - DNA, 26 bp, Homo sapiens
ggatattttatgtaaatgcccattat

SEQ ID NO: 35333 - DNA, 26 bp, Homo sapiens
gatattttatgtaaatgcccattatc

SEQ ID NO: 35334 - DNA, 26 bp, Homo sapiens
atattttatgtaaatgcccattatct

SEQ ID NO: 35335 - DNA, 26 bp, Homo sapiens
tattttatgtaaatgcccattatcta

SEQ ID NO: 35336 - DNA, 26 bp, Homo sapiens
attttatgtaaatgcccattatctat

SEQ ID NO: 35337 - DNA, 26 bp, Homo sapiens
ttttatgtaaatgcccattatctata

SEQ ID NO: 35338 - DNA, 26 bp, Homo sapiens
tttatgtaaatgcccattatctataa

SEQ ID NO: 35339 - DNA, 26 bp, Homo sapiens
ttatgtaaatgcccattatctataat

SEQ ID NO: 35340 - DNA, 26 bp, Homo sapiens
tatgtaaatgcccattatctataata

SEQ ID NO: 35341 - DNA, 26 bp, Homo sapiens
atgtaaatgcccattatctataatag

SEQ ID NO: 35342 - DNA, 26 bp, Homo sapiens
tgtaaatgcccattatctataatagg

SEQ ID NO: 35343 - DNA, 26 bp, Homo sapiens
gtaaatgcccattatctataatagga

SEQ ID NO: 35344 - DNA, 26 bp, Homo sapiens
taaatgcccattatctataataggag

SEQ ID NO: 35345 - DNA, 26 bp, Homo sapiens
aaatgcccattatctataataggagc

SEQ ID NO: 35346 - DNA, 26 bp, Homo sapiens
aatgcccattatctataataggagct

SEQ ID NO: 35347 - DNA, 26 bp, Homo sapiens
atgcccattatctataataggagcta

SEQ ID NO: 35348 - DNA, 26 bp, Homo sapiens
tgcccattatctataataggagctaa

SEQ ID NO: 35349 - DNA, 26 bp, Homo sapiens
gcccattatctataataggagctaag

SEQ ID NO: 35350 - DNA, 26 bp, Homo sapiens
cccattatctataataggagctaaga

SEQ ID NO: 35351 - DNA, 26 bp, Homo sapiens
ccattatctataataggagctaagaa

SEQ ID NO: 35352 - DNA, 26 bp, Homo sapiens
cattatctataataggagctaagaat

SEQ ID NO: 35353 - DNA, 26 bp, Homo sapiens
attatctataataggagctaagaata

SEQ ID NO: 35354 - DNA, 26 bp, Homo sapiens
ttatctataataggagctaagaatac

SEQ ID NO: 35355 - DNA, 26 bp, Homo sapiens
tatctataataggagctaagaataca

SEQ ID NO: 35356 - DNA, 26 bp, Homo sapiens
atctataataggagctaagaatacaa

SEQ ID NO: 35357 - DNA, 26 bp, Homo sapiens
tctataataggagctaagaatacaac

SEQ ID NO: 35358 - DNA, 26 bp, Homo sapiens
ctataataggagctaagaatacaact

SEQ ID NO: 35359 - DNA, 26 bp, Homo sapiens
tataataggagctaagaatacaactg

SEQ ID NO: 35360 - DNA, 26 bp, Homo sapiens
ataataggagctaagaatacaactgt

SEQ ID NO: 35361 - DNA, 26 bp, Homo sapiens
taataggagctaagaatacaactgtg

SEQ ID NO: 35362 - DNA, 26 bp, Homo sapiens
aataggagctaagaatacaactgtgt

SEQ ID NO: 35363 - DNA, 26 bp, Homo sapiens
ataggagctaagaatacaactgtgtt

SEQ ID NO: 35364 - DNA, 26 bp, Homo sapiens
taggagctaagaatacaactgtgtta

SEQ ID NO: 35365 - DNA, 26 bp, Homo sapiens
aggagctaagaatacaactgtgttag

SEQ ID NO: 35366 - DNA, 26 bp, Homo sapiens
ggagctaagaatacaactgtgttagg

SEQ ID NO: 35367 - DNA, 26 bp, Homo sapiens
gagctaagaatacaactgtgttaggt

SEQ ID NO: 35368 - DNA, 26 bp, Homo sapiens
agctaagaatacaactgtgttaggtg

SEQ ID NO: 35369 - DNA, 26 bp, Homo sapiens
gctaagaatacaactgtgttaggtgc

SEQ ID NO: 35370 - DNA, 26 bp, Homo sapiens
ctaagaatacaactgtgttaggtgcc

SEQ ID NO: 35371 - DNA, 26 bp, Homo sapiens
taagaatacaactgtgttaggtgcca

SEQ ID NO: 35372 - DNA, 26 bp, Homo sapiens
aagaatacaactgtgttaggtgccag

SEQ ID NO: 35373 - DNA, 26 bp, Homo sapiens
agaatacaactgtgttaggtgccagt

SEQ ID NO: 35374 - DNA, 26 bp, Homo sapiens
gaatacaactgtgttaggtgccagta

SEQ ID NO: 35375 - DNA, 26 bp, Homo sapiens
aatacaactgtgttaggtgccagtaa

SEQ ID NO: 35376 - DNA, 26 bp, Homo sapiens
atacaactgtgttaggtgccagtaat

SEQ ID NO: 35377 - DNA, 26 bp, Homo sapiens
tacaactgtgttaggtgccagtaata

SEQ ID NO: 35378 - DNA, 26 bp, Homo sapiens
acaactgtgttaggtgccagtaatac

SEQ ID NO: 35379 - DNA, 26 bp, Homo sapiens
caactgtgttaggtgccagtaataca

SEQ ID NO: 35380 - DNA, 26 bp, Homo sapiens
aactgtgttaggtgccagtaatacaa

SEQ ID NO: 35381 - DNA, 26 bp, Homo sapiens
actgtgttaggtgccagtaatacaat

SEQ ID NO: 35382 - DNA, 26 bp, Homo sapiens
ctgtgttaggtgccagtaatacaatt

SEQ ID NO: 35383 - DNA, 26 bp, Homo sapiens
tgtgttaggtgccagtaatacaattc

SEQ ID NO: 35384 - DNA, 26 bp, Homo sapiens
gtgttaggtgccagtaatacaattcc

SEQ ID NO: 35385 - DNA, 26 bp, Homo sapiens
tgttaggtgccagtaatacaattcct

SEQ ID NO: 35386 - DNA, 26 bp, Homo sapiens
gttaggtgccagtaatacaattcctt

SEQ ID NO: 35387 - DNA, 26 bp, Homo sapiens
ttaggtgccagtaatacaattcctta

SEQ ID NO: 35388 - DNA, 26 bp, Homo sapiens
taggtgccagtaatacaattccttaa

SEQ ID NO: 35389 - DNA, 26 bp, Homo sapiens
aggtgccagtaatacaattccttaat

SEQ ID NO: 35390 - DNA, 26 bp, Homo sapiens
ggtgccagtaatacaattccttaata

SEQ ID NO: 35391 - DNA, 26 bp, Homo sapiens
gtgccagtaatacaattccttaataa

SEQ ID NO: 35392 - DNA, 26 bp, Homo sapiens
tgccagtaatacaattccttaataag

SEQ ID NO: 35393 - DNA, 26 bp, Homo sapiens
gccagtaatacaattccttaataaga

SEQ ID NO: 35394 - DNA, 26 bp, Homo sapiens
ccagtaatacaattccttaataagaa

SEQ ID NO: 35395 - DNA, 26 bp, Homo sapiens
cagtaatacaattccttaataagaaa

SEQ ID NO: 35396 - DNA, 26 bp, Homo sapiens
agtaatacaattccttaataagaaaa

SEQ ID NO: 35397 - DNA, 26 bp, Homo sapiens
gtaatacaattccttaataagaaaaa

SEQ ID NO: 35398 - DNA, 26 bp, Homo sapiens
taatacaattccttaataagaaaaaa

SEQ ID NO: 35399 - DNA, 26 bp, Homo sapiens
aatacaattccttaataagaaaaaaa

SEQ ID NO: 35400 - DNA, 26 bp, Homo sapiens
atacaattccttaataagaaaaaaaa

SEQ ID NO: 35401 - DNA, 26 bp, Homo sapiens
tacaattccttaataagaaaaaaaag

SEQ ID NO: 35402 - DNA, 26 bp, Homo sapiens
acaattccttaataagaaaaaaaagt

SEQ ID NO: 35403 - DNA, 26 bp, Homo sapiens
caattccttaataagaaaaaaaagta

SEQ ID NO: 35404 - DNA, 26 bp, Homo sapiens
aattccttaataagaaaaaaaagtat

SEQ ID NO: 35405 - DNA, 26 bp, Homo sapiens
attccttaataagaaaaaaaagtata

SEQ ID NO: 35406 - DNA, 26 bp, Homo sapiens
ttccttaataagaaaaaaaagtatat

SEQ ID NO: 35407 - DNA, 26 bp, Homo sapiens
tccttaataagaaaaaaaagtatatt

SEQ ID NO: 35408 - DNA, 26 bp, Homo sapiens
ccttaataagaaaaaaaagtatatta

SEQ ID NO: 35409 - DNA, 26 bp, Homo sapiens
cttaataagaaaaaaaagtatattac

SEQ ID NO: 35410 - DNA, 26 bp, Homo sapiens
ttaataagaaaaaaaagtatattact

SEQ ID NO: 35411 - DNA, 26 bp, Homo sapiens
taataagaaaaaaaagtatattactc

SEQ ID NO: 35412 - DNA, 26 bp, Homo sapiens
aataagaaaaaaaagtatattactcc

SEQ ID NO: 35413 - DNA, 26 bp, Homo sapiens
ataagaaaaaaaagtatattactcca

SEQ ID NO: 35414 - DNA, 26 bp, Homo sapiens
taagaaaaaaaagtatattactccat

SEQ ID NO: 35415 - DNA, 26 bp, Homo sapiens
aagaaaaaaaagtatattactccatt

SEQ ID NO: 35416 - DNA, 26 bp, Homo sapiens
agaaaaaaaagtatattactccatta

SEQ ID NO: 35417 - DNA, 26 bp, Homo sapiens
gaaaaaaaagtatattactccattaa

SEQ ID NO: 35418 - DNA, 26 bp, Homo sapiens
aaaaaaaagtatattactccattaaa

SEQ ID NO: 35419 - DNA, 26 bp, Homo sapiens
aaaaaaagtatattactccattaaac

SEQ ID NO: 35420 - DNA, 26 bp, Homo sapiens
aaaaaagtatattactccattaaaca

SEQ ID NO: 35421 - DNA, 26 bp, Homo sapiens
aaaaagtatattactccattaaacaa

SEQ ID NO: 35422 - DNA, 26 bp, Homo sapiens
aaaagtatattactccattaaacaag

SEQ ID NO: 35423 - DNA, 26 bp, Homo sapiens
aaagtatattactccattaaacaagt

SEQ ID NO: 35424 - DNA, 26 bp, Homo sapiens
aagtatattactccattaaacaagtt

SEQ ID NO: 35425 - DNA, 26 bp, Homo sapiens
agtatattactccattaaacaagttt

SEQ ID NO: 35426 - DNA, 26 bp, Homo sapiens
gtatattactccattaaacaagtttc

SEQ ID NO: 35427 - DNA, 26 bp, Homo sapiens
tatattactccattaaacaagtttct

SEQ ID NO: 35428 - DNA, 26 bp, Homo sapiens
atattactccattaaacaagtttctt

SEQ ID NO: 35429 - DNA, 26 bp, Homo sapiens
tattactccattaaacaagtttcttt

SEQ ID NO: 35430 - DNA, 26 bp, Homo sapiens
attactccattaaacaagtttcttta

SEQ ID NO: 35431 - DNA, 26 bp, Homo sapiens
ttactccattaaacaagtttctttag

SEQ ID NO: 35432 - DNA, 26 bp, Homo sapiens
tactccattaaacaagtttctttagg

SEQ ID NO: 35433 - DNA, 26 bp, Homo sapiens
actccattaaacaagtttctttagga

SEQ ID NO: 35434 - DNA, 26 bp, Homo sapiens
ctccattaaacaagtttctttaggat

SEQ ID NO: 35435 - DNA, 26 bp, Homo sapiens
tccattaaacaagtttctttaggatc

SEQ ID NO: 35436 - DNA, 26 bp, Homo sapiens
ccattaaacaagtttctttaggatct

SEQ ID NO: 35437 - DNA, 26 bp, Homo sapiens
cattaaacaagtttctttaggatctt

SEQ ID NO: 35438 - DNA, 26 bp, Homo sapiens
attaaacaagtttctttaggatcttg

SEQ ID NO: 35439 - DNA, 26 bp, Homo sapiens
ttaaacaagtttctttaggatcttga

SEQ ID NO: 35440 - DNA, 26 bp, Homo sapiens
taaacaagtttctttaggatcttgaa

SEQ ID NO: 35441 - DNA, 26 bp, Homo sapiens
aaacaagtttctttaggatcttgaag

SEQ ID NO: 35442 - DNA, 26 bp, Homo sapiens
aacaagtttctttaggatcttgaagg

SEQ ID NO: 35443 - DNA, 26 bp, Homo sapiens
acaagtttctttaggatcttgaaggc

SEQ ID NO: 35444 - DNA, 26 bp, Homo sapiens
caagtttctttaggatcttgaaggcc

SEQ ID NO: 35445 - DNA, 26 bp, Homo sapiens
aagtttctttaggatcttgaaggcct

SEQ ID NO: 35446 - DNA, 26 bp, Homo sapiens
agtttctttaggatcttgaaggcctg

SEQ ID NO: 35447 - DNA, 26 bp, Homo sapiens
gtttctttaggatcttgaaggcctgg

SEQ ID NO: 35448 - DNA, 26 bp, Homo sapiens
tttctttaggatcttgaaggcctggc

SEQ ID NO: 35449 - DNA, 26 bp, Homo sapiens
ttctttaggatcttgaaggcctggca

SEQ ID NO: 35450 - DNA, 26 bp, Homo sapiens
tctttaggatcttgaaggcctggcaa

SEQ ID NO: 35451 - DNA, 26 bp, Homo sapiens
ctttaggatcttgaaggcctggcaaa

SEQ ID NO: 35452 - DNA, 26 bp, Homo sapiens
tttaggatcttgaaggcctggcaaat

SEQ ID NO: 35453 - DNA, 26 bp, Homo sapiens
ttaggatcttgaaggcctggcaaatt

SEQ ID NO: 35454 - DNA, 26 bp, Homo sapiens
taggatcttgaaggcctggcaaatta

SEQ ID NO: 35455 - DNA, 26 bp, Homo sapiens
aggatcttgaaggcctggcaaattat

SEQ ID NO: 35456 - DNA, 26 bp, Homo sapiens
ggatcttgaaggcctggcaaattatt

SEQ ID NO: 35457 - DNA, 26 bp, Homo sapiens
gatcttgaaggcctggcaaattattt

SEQ ID NO: 35458 - DNA, 26 bp, Homo sapiens
atcttgaaggcctggcaaattatttt

SEQ ID NO: 35459 - DNA, 26 bp, Homo sapiens
tcttgaaggcctggcaaattattttt

SEQ ID NO: 35460 - DNA, 26 bp, Homo sapiens
cttgaaggcctggcaaattatttttc

SEQ ID NO: 35461 - DNA, 26 bp, Homo sapiens
ttgaaggcctggcaaattatttttca

SEQ ID NO: 35462 - DNA, 26 bp, Homo sapiens
tgaaggcctggcaaattatttttcag

SEQ ID NO: 35463 - DNA, 26 bp, Homo sapiens
gaaggcctggcaaattatttttcagc

SEQ ID NO: 35464 - DNA, 26 bp, Homo sapiens
aaggcctggcaaattatttttcagct

SEQ ID NO: 35465 - DNA, 26 bp, Homo sapiens
aggcctggcaaattatttttcagctt

SEQ ID NO: 35466 - DNA, 26 bp, Homo sapiens
ggcctggcaaattatttttcagctta

SEQ ID NO: 35467 - DNA, 26 bp, Homo sapiens
gcctggcaaattatttttcagcttag

SEQ ID NO: 35468 - DNA, 26 bp, Homo sapiens
cctggcaaattatttttcagcttagg

SEQ ID NO: 35469 - DNA, 26 bp, Homo sapiens
ctggcaaattatttttcagcttagga

SEQ ID NO: 35470 - DNA, 26 bp, Homo sapiens
tggcaaattatttttcagcttaggag

SEQ ID NO: 35471 - DNA, 26 bp, Homo sapiens
ggcaaattatttttcagcttaggaga

SEQ ID NO: 35472 - DNA, 26 bp, Homo sapiens
gcaaattatttttcagcttaggagat

SEQ ID NO: 35473 - DNA, 26 bp, Homo sapiens
caaattatttttcagcttaggagata

SEQ ID NO: 35474 - DNA, 26 bp, Homo sapiens
aaattatttttcagcttaggagatat

SEQ ID NO: 35475 - DNA, 26 bp, Homo sapiens
aattatttttcagcttaggagatatg

SEQ ID NO: 35476 - DNA, 26 bp, Homo sapiens
attatttttcagcttaggagatatgc

SEQ ID NO: 35477 - DNA, 26 bp, Homo sapiens
ttatttttcagcttaggagatatgct

SEQ ID NO: 35478 - DNA, 26 bp, Homo sapiens
tatttttcagcttaggagatatgctg

SEQ ID NO: 35479 - DNA, 26 bp, Homo sapiens
atttttcagcttaggagatatgctgt

SEQ ID NO: 35480 - DNA, 26 bp, Homo sapiens
tttttcagcttaggagatatgctgta

SEQ ID NO: 35481 - DNA, 26 bp, Homo sapiens
ttttcagcttaggagatatgctgtaa

SEQ ID NO: 35482 - DNA, 26 bp, Homo sapiens
tttcagcttaggagatatgctgtaaa

SEQ ID NO: 35483 - DNA, 26 bp, Homo sapiens
ttcagcttaggagatatgctgtaaag

SEQ ID NO: 35484 - DNA, 26 bp, Homo sapiens
tcagcttaggagatatgctgtaaagc

SEQ ID NO: 35485 - DNA, 26 bp, Homo sapiens
cagcttaggagatatgctgtaaagcc

SEQ ID NO: 35486 - DNA, 26 bp, Homo sapiens
agcttaggagatatgctgtaaagcca

SEQ ID NO: 35487 - DNA, 26 bp, Homo sapiens
gcttaggagatatgctgtaaagccaa

SEQ ID NO: 35488 - DNA, 26 bp, Homo sapiens
cttaggagatatgctgtaaagccaag

SEQ ID NO: 35489 - DNA, 26 bp, Homo sapiens
ttaggagatatgctgtaaagccaagt

SEQ ID NO: 35490 - DNA, 26 bp, Homo sapiens
taggagatatgctgtaaagccaagta

SEQ ID NO: 35491 - DNA, 26 bp, Homo sapiens
aggagatatgctgtaaagccaagtag

SEQ ID NO: 35492 - DNA, 26 bp, Homo sapiens
ggagatatgctgtaaagccaagtagc

SEQ ID NO: 35493 - DNA, 26 bp, Homo sapiens
gagatatgctgtaaagccaagtagca

SEQ ID NO: 35494 - DNA, 26 bp, Homo sapiens
agatatgctgtaaagccaagtagcaa

SEQ ID NO: 35495 - DNA, 26 bp, Homo sapiens
gatatgctgtaaagccaagtagcaaa

SEQ ID NO: 35496 - DNA, 26 bp, Homo sapiens
atatgctgtaaagccaagtagcaaac

SEQ ID NO: 35497 - DNA, 26 bp, Homo sapiens
tatgctgtaaagccaagtagcaaaca

SEQ ID NO: 35498 - DNA, 26 bp, Homo sapiens
atgctgtaaagccaagtagcaaacat

SEQ ID NO: 35499 - DNA, 26 bp, Homo sapiens
tgctgtaaagccaagtagcaaacata

SEQ ID NO: 35500 - DNA, 26 bp, Homo sapiens
gctgtaaagccaagtagcaaacataa

SEQ ID NO: 35501 - DNA, 26 bp, Homo sapiens
ctgtaaagccaagtagcaaacataaa

SEQ ID NO: 35502 - DNA, 26 bp, Homo sapiens
tgtaaagccaagtagcaaacataaag

SEQ ID NO: 35503 - DNA, 26 bp, Homo sapiens
gtaaagccaagtagcaaacataaagt

SEQ ID NO: 35504 - DNA, 26 bp, Homo sapiens
taaagccaagtagcaaacataaagta

SEQ ID NO: 35505 - DNA, 26 bp, Homo sapiens
aaagccaagtagcaaacataaagtaa

SEQ ID NO: 35506 - DNA, 26 bp, Homo sapiens
aagccaagtagcaaacataaagtaaa

SEQ ID NO: 35507 - DNA, 26 bp, Homo sapiens
agccaagtagcaaacataaagtaaat

SEQ ID NO: 35508 - DNA, 26 bp, Homo sapiens
gccaagtagcaaacataaagtaaatg

SEQ ID NO: 35509 - DNA, 26 bp, Homo sapiens
ccaagtagcaaacataaagtaaatgc

SEQ ID NO: 35510 - DNA, 26 bp, Homo sapiens
caagtagcaaacataaagtaaatgct

SEQ ID NO: 35511 - DNA, 26 bp, Homo sapiens
aagtagcaaacataaagtaaatgcta

SEQ ID NO: 35512 - DNA, 26 bp, Homo sapiens
agtagcaaacataaagtaaatgctaa

SEQ ID NO: 35513 - DNA, 26 bp, Homo sapiens
gtagcaaacataaagtaaatgctaat

SEQ ID NO: 35514 - DNA, 26 bp, Homo sapiens
tagcaaacataaagtaaatgctaata

SEQ ID NO: 35515 - DNA, 26 bp, Homo sapiens
agcaaacataaagtaaatgctaataa

SEQ ID NO: 35516 - DNA, 26 bp, Homo sapiens
gcaaacataaagtaaatgctaataag

SEQ ID NO: 35517 - DNA, 26 bp, Homo sapiens
caaacataaagtaaatgctaataagt

SEQ ID NO: 35518 - DNA, 26 bp, Homo sapiens
aaacataaagtaaatgctaataagtt

SEQ ID NO: 35519 - DNA, 26 bp, Homo sapiens
aacataaagtaaatgctaataagttt

SEQ ID NO: 35520 - DNA, 26 bp, Homo sapiens
acataaagtaaatgctaataagtttc

SEQ ID NO: 35521 - DNA, 26 bp, Homo sapiens
cataaagtaaatgctaataagtttcc

SEQ ID NO: 35522 - DNA, 26 bp, Homo sapiens
ataaagtaaatgctaataagtttcca

SEQ ID NO: 35523 - DNA, 26 bp, Homo sapiens
taaagtaaatgctaataagtttccat

SEQ ID NO: 35524 - DNA, 26 bp, Homo sapiens
aaagtaaatgctaataagtttccata

SEQ ID NO: 35525 - DNA, 26 bp, Homo sapiens
aagtaaatgctaataagtttccatat

SEQ ID NO: 35526 - DNA, 26 bp, Homo sapiens
agtaaatgctaataagtttccatata

SEQ ID NO: 35527 - DNA, 26 bp, Homo sapiens
gtaaatgctaataagtttccatatag

SEQ ID NO: 35528 - DNA, 26 bp, Homo sapiens
taaatgctaataagtttccatatagc

SEQ ID NO: 35529 - DNA, 26 bp, Homo sapiens
aaatgctaataagtttccatatagcc

SEQ ID NO: 35530 - DNA, 26 bp, Homo sapiens
aatgctaataagtttccatatagcca

SEQ ID NO: 35531 - DNA, 26 bp, Homo sapiens
atgctaataagtttccatatagccat

SEQ ID NO: 35532 - DNA, 26 bp, Homo sapiens
tgctaataagtttccatatagccata

SEQ ID NO: 35533 - DNA, 26 bp, Homo sapiens
gctaataagtttccatatagccatat

SEQ ID NO: 35534 - DNA, 26 bp, Homo sapiens
ctaataagtttccatatagccatatt

SEQ ID NO: 35535 - DNA, 26 bp, Homo sapiens
taataagtttccatatagccatattt

SEQ ID NO: 35536 - DNA, 26 bp, Homo sapiens
aataagtttccatatagccatattta

SEQ ID NO: 35537 - DNA, 26 bp, Homo sapiens
ataagtttccatatagccatatttat

SEQ ID NO: 35538 - DNA, 26 bp, Homo sapiens
taagtttccatatagccatatttata

SEQ ID NO: 35539 - DNA, 26 bp, Homo sapiens
aagtttccatatagccatatttataa

SEQ ID NO: 35540 - DNA, 26 bp, Homo sapiens
agtttccatatagccatatttataaa

SEQ ID NO: 35541 - DNA, 26 bp, Homo sapiens
gtttccatatagccatatttataaac

SEQ ID NO: 35542 - DNA, 26 bp, Homo sapiens
tttccatatagccatatttataaaca

SEQ ID NO: 35543 - DNA, 26 bp, Homo sapiens
ttccatatagccatatttataaacaa

SEQ ID NO: 35544 - DNA, 26 bp, Homo sapiens
tccatatagccatatttataaacaaa

SEQ ID NO: 35545 - DNA, 26 bp, Homo sapiens
ccatatagccatatttataaacaaat

SEQ ID NO: 35546 - DNA, 26 bp, Homo sapiens
catatagccatatttataaacaaatt

SEQ ID NO: 35547 - DNA, 26 bp, Homo sapiens
atatagccatatttataaacaaattc

SEQ ID NO: 35548 - DNA, 26 bp, Homo sapiens
tatagccatatttataaacaaattca

SEQ ID NO: 35549 - DNA, 26 bp, Homo sapiens
atagccatatttataaacaaattcac

SEQ ID NO: 35550 - DNA, 26 bp, Homo sapiens
tagccatatttataaacaaattcacc

SEQ ID NO: 35551 - DNA, 26 bp, Homo sapiens
agccatatttataaacaaattcaccc

SEQ ID NO: 35552 - DNA, 26 bp, Homo sapiens
gccatatttataaacaaattcaccct

SEQ ID NO: 35553 - DNA, 26 bp, Homo sapiens
ccatatttataaacaaattcacccta

SEQ ID NO: 35554 - DNA, 26 bp, Homo sapiens
catatttataaacaaattcaccctat

SEQ ID NO: 35555 - DNA, 26 bp, Homo sapiens
atatttataaacaaattcaccctata

SEQ ID NO: 35556 - DNA, 26 bp, Homo sapiens
tatttataaacaaattcaccctatag

SEQ ID NO: 35557 - DNA, 26 bp, Homo sapiens
atttataaacaaattcaccctataga

SEQ ID NO: 35558 - DNA, 26 bp, Homo sapiens
tttataaacaaattcaccctatagat

SEQ ID NO: 35559 - DNA, 26 bp, Homo sapiens
ttataaacaaattcaccctatagatg

SEQ ID NO: 35560 - DNA, 26 bp, Homo sapiens
tataaacaaattcaccctatagatgt

SEQ ID NO: 35561 - DNA, 26 bp, Homo sapiens
ataaacaaattcaccctatagatgtc

SEQ ID NO: 35562 - DNA, 26 bp, Homo sapiens
taaacaaattcaccctatagatgtca

SEQ ID NO: 35563 - DNA, 26 bp, Homo sapiens
aaacaaattcaccctatagatgtcaa

SEQ ID NO: 35564 - DNA, 26 bp, Homo sapiens
aacaaattcaccctatagatgtcaaa

SEQ ID NO: 35565 - DNA, 26 bp, Homo sapiens
acaaattcaccctatagatgtcaaat

SEQ ID NO: 35566 - DNA, 26 bp, Homo sapiens
caaattcaccctatagatgtcaaata

SEQ ID NO: 35567 - DNA, 26 bp, Homo sapiens
aaattcaccctatagatgtcaaatat

SEQ ID NO: 35568 - DNA, 26 bp, Homo sapiens
aattcaccctatagatgtcaaatatc

SEQ ID NO: 35569 - DNA, 26 bp, Homo sapiens
attcaccctatagatgtcaaatatcc

SEQ ID NO: 35570 - DNA, 26 bp, Homo sapiens
ttcaccctatagatgtcaaatatcca

SEQ ID NO: 35571 - DNA, 26 bp, Homo sapiens
tcaccctatagatgtcaaatatccat

SEQ ID NO: 35572 - DNA, 26 bp, Homo sapiens
caccctatagatgtcaaatatccata

SEQ ID NO: 35573 - DNA, 26 bp, Homo sapiens
accctatagatgtcaaatatccatac

SEQ ID NO: 35574 - DNA, 26 bp, Homo sapiens
ccctatagatgtcaaatatccatact

SEQ ID NO: 35575 - DNA, 26 bp, Homo sapiens
cctatagatgtcaaatatccatacta

SEQ ID NO: 35576 - DNA, 26 bp, Homo sapiens
ctatagatgtcaaatatccatactaa

SEQ ID NO: 35577 - DNA, 26 bp, Homo sapiens
tatagatgtcaaatatccatactaag

SEQ ID NO: 35578 - DNA, 26 bp, Homo sapiens
atagatgtcaaatatccatactaagg

SEQ ID NO: 35579 - DNA, 26 bp, Homo sapiens
tagatgtcaaatatccatactaagga

SEQ ID NO: 35580 - DNA, 26 bp, Homo sapiens
agatgtcaaatatccatactaaggaa

SEQ ID NO: 35581 - DNA, 26 bp, Homo sapiens
gatgtcaaatatccatactaaggaag

SEQ ID NO: 35582 - DNA, 26 bp, Homo sapiens
atgtcaaatatccatactaaggaagt

SEQ ID NO: 35583 - DNA, 26 bp, Homo sapiens
tgtcaaatatccatactaaggaagta

SEQ ID NO: 35584 - DNA, 26 bp, Homo sapiens
gtcaaatatccatactaaggaagtaa

SEQ ID NO: 35585 - DNA, 26 bp, Homo sapiens
tcaaatatccatactaaggaagtaat

SEQ ID NO: 35586 - DNA, 26 bp, Homo sapiens
caaatatccatactaaggaagtaatt

SEQ ID NO: 35587 - DNA, 26 bp, Homo sapiens
aaatatccatactaaggaagtaattt

SEQ ID NO: 35588 - DNA, 26 bp, Homo sapiens
aatatccatactaaggaagtaatttt

SEQ ID NO: 35589 - DNA, 26 bp, Homo sapiens
atatccatactaaggaagtaatttta

SEQ ID NO: 35590 - DNA, 26 bp, Homo sapiens
tatccatactaaggaagtaattttat

SEQ ID NO: 35591 - DNA, 26 bp, Homo sapiens
atccatactaaggaagtaattttatc

SEQ ID NO: 35592 - DNA, 26 bp, Homo sapiens
tccatactaaggaagtaattttatcc

SEQ ID NO: 35593 - DNA, 26 bp, Homo sapiens
ccatactaaggaagtaattttatcct

SEQ ID NO: 35594 - DNA, 26 bp, Homo sapiens
catactaaggaagtaattttatccta

SEQ ID NO: 35595 - DNA, 26 bp, Homo sapiens
atactaaggaagtaattttatcctaa

SEQ ID NO: 35596 - DNA, 26 bp, Homo sapiens
tactaaggaagtaattttatcctaat

SEQ ID NO: 35597 - DNA, 26 bp, Homo sapiens
actaaggaagtaattttatcctaatt

SEQ ID NO: 35598 - DNA, 26 bp, Homo sapiens
ctaaggaagtaattttatcctaatta

SEQ ID NO: 35599 - DNA, 26 bp, Homo sapiens
taaggaagtaattttatcctaattaa

SEQ ID NO: 35600 - DNA, 26 bp, Homo sapiens
aaggaagtaattttatcctaattaaa

SEQ ID NO: 35601 - DNA, 26 bp, Homo sapiens
aggaagtaattttatcctaattaaat

SEQ ID NO: 35602 - DNA, 26 bp, Homo sapiens
ggaagtaattttatcctaattaaata

SEQ ID NO: 35603 - DNA, 26 bp, Homo sapiens
gaagtaattttatcctaattaaatac

SEQ ID NO: 35604 - DNA, 26 bp, Homo sapiens
aagtaattttatcctaattaaataca

SEQ ID NO: 35605 - DNA, 26 bp, Homo sapiens
agtaattttatcctaattaaatacac

SEQ ID NO: 35606 - DNA, 26 bp, Homo sapiens
gtaattttatcctaattaaatacact

SEQ ID NO: 35607 - DNA, 26 bp, Homo sapiens
taattttatcctaattaaatacactc

SEQ ID NO: 35608 - DNA, 26 bp, Homo sapiens
aattttatcctaattaaatacactct

SEQ ID NO: 35609 - DNA, 26 bp, Homo sapiens
attttatcctaattaaatacactcta

SEQ ID NO: 35610 - DNA, 26 bp, Homo sapiens
ttttatcctaattaaatacactctag

SEQ ID NO: 35611 - DNA, 26 bp, Homo sapiens
tttatcctaattaaatacactctaga

SEQ ID NO: 35612 - DNA, 26 bp, Homo sapiens
ttatcctaattaaatacactctagaa

SEQ ID NO: 35613 - DNA, 26 bp, Homo sapiens
tatcctaattaaatacactctagaat

SEQ ID NO: 35614 - DNA, 26 bp, Homo sapiens
atcctaattaaatacactctagaata

SEQ ID NO: 35615 - DNA, 26 bp, Homo sapiens
tcctaattaaatacactctagaataa

SEQ ID NO: 35616 - DNA, 26 bp, Homo sapiens
cctaattaaatacactctagaataat

SEQ ID NO: 35617 - DNA, 26 bp, Homo sapiens
ctaattaaatacactctagaataatt

SEQ ID NO: 35618 - DNA, 26 bp, Homo sapiens
taattaaatacactctagaataattt

SEQ ID NO: 35619 - DNA, 26 bp, Homo sapiens
aattaaatacactctagaataattta

SEQ ID NO: 35620 - DNA, 26 bp, Homo sapiens
attaaatacactctagaataatttat

SEQ ID NO: 35621 - DNA, 26 bp, Homo sapiens
ttaaatacactctagaataatttata

SEQ ID NO: 35622 - DNA, 26 bp, Homo sapiens
taaatacactctagaataatttatat

SEQ ID NO: 35623 - DNA, 26 bp, Homo sapiens
aaatacactctagaataatttatata

SEQ ID NO: 35624 - DNA, 26 bp, Homo sapiens
aatacactctagaataatttatataa

SEQ ID NO: 35625 - DNA, 26 bp, Homo sapiens
atacactctagaataatttatataat

SEQ ID NO: 35626 - DNA, 26 bp, Homo sapiens
tacactctagaataatttatataatg

SEQ ID NO: 35627 - DNA, 26 bp, Homo sapiens
acactctagaataatttatataatga

SEQ ID NO: 35628 - DNA, 26 bp, Homo sapiens
cactctagaataatttatataatgat

SEQ ID NO: 35629 - DNA, 26 bp, Homo sapiens
actctagaataatttatataatgata

SEQ ID NO: 35630 - DNA, 26 bp, Homo sapiens
ctctagaataatttatataatgatat

SEQ ID NO: 35631 - DNA, 26 bp, Homo sapiens
tctagaataatttatataatgatatt

SEQ ID NO: 35632 - DNA, 26 bp, Homo sapiens
ctagaataatttatataatgatatta

SEQ ID NO: 35633 - DNA, 26 bp, Homo sapiens
tagaataatttatataatgatattat

SEQ ID NO: 35634 - DNA, 26 bp, Homo sapiens
agaataatttatataatgatattatg

SEQ ID NO: 35635 - DNA, 26 bp, Homo sapiens
gaataatttatataatgatattatgt

SEQ ID NO: 35636 - DNA, 26 bp, Homo sapiens
aataatttatataatgatattatgta

SEQ ID NO: 35637 - DNA, 26 bp, Homo sapiens
ataatttatataatgatattatgtat

SEQ ID NO: 35638 - DNA, 26 bp, Homo sapiens
taatttatataatgatattatgtatt

SEQ ID NO: 35639 - DNA, 26 bp, Homo sapiens
aatttatataatgatattatgtattt

SEQ ID NO: 35640 - DNA, 26 bp, Homo sapiens
atttatataatgatattatgtattta

SEQ ID NO: 35641 - DNA, 26 bp, Homo sapiens
tttatataatgatattatgtatttaa

SEQ ID NO: 35642 - DNA, 26 bp, Homo sapiens
ttatataatgatattatgtatttaaa

SEQ ID NO: 35643 - DNA, 26 bp, Homo sapiens
tatataatgatattatgtatttaaag

SEQ ID NO: 35644 - DNA, 26 bp, Homo sapiens
atataatgatattatgtatttaaaga

SEQ ID NO: 35645 - DNA, 26 bp, Homo sapiens
tataatgatattatgtatttaaagag

SEQ ID NO: 35646 - DNA, 26 bp, Homo sapiens
ataatgatattatgtatttaaagaga

SEQ ID NO: 35647 - DNA, 26 bp, Homo sapiens
taatgatattatgtatttaaagagaa

SEQ ID NO: 35648 - DNA, 26 bp, Homo sapiens
aatgatattatgtatttaaagagaaa

SEQ ID NO: 35649 - DNA, 26 bp, Homo sapiens
atgatattatgtatttaaagagaaaa

SEQ ID NO: 35650 - DNA, 26 bp, Homo sapiens
tgatattatgtatttaaagagaaaag

SEQ ID NO: 35651 - DNA, 26 bp, Homo sapiens
gatattatgtatttaaagagaaaagc

SEQ ID NO: 35652 - DNA, 26 bp, Homo sapiens
atattatgtatttaaagagaaaagca

SEQ ID NO: 35653 - DNA, 26 bp, Homo sapiens
tattatgtatttaaagagaaaagcat

SEQ ID NO: 35654 - DNA, 26 bp, Homo sapiens
attatgtatttaaagagaaaagcatg

SEQ ID NO: 35655 - DNA, 26 bp, Homo sapiens
ttatgtatttaaagagaaaagcatgt

SEQ ID NO: 35656 - DNA, 26 bp, Homo sapiens
tatgtatttaaagagaaaagcatgtc

SEQ ID NO: 35657 - DNA, 26 bp, Homo sapiens
atgtatttaaagagaaaagcatgtcc

SEQ ID NO: 35658 - DNA, 26 bp, Homo sapiens
tgtatttaaagagaaaagcatgtccc

SEQ ID NO: 35659 - DNA, 26 bp, Homo sapiens
gtatttaaagagaaaagcatgtccca

SEQ ID NO: 35660 - DNA, 26 bp, Homo sapiens
tatttaaagagaaaagcatgtcccaa

SEQ ID NO: 35661 - DNA, 26 bp, Homo sapiens
atttaaagagaaaagcatgtcccaaa

SEQ ID NO: 35662 - DNA, 26 bp, Homo sapiens
tttaaagagaaaagcatgtcccaaat

SEQ ID NO: 35663 - DNA, 26 bp, Homo sapiens
ttaaagagaaaagcatgtcccaaatc

SEQ ID NO: 35664 - DNA, 26 bp, Homo sapiens
taaagagaaaagcatgtcccaaatcc

SEQ ID NO: 35665 - DNA, 26 bp, Homo sapiens
aaagagaaaagcatgtcccaaatcca

SEQ ID NO: 35666 - DNA, 26 bp, Homo sapiens
aagagaaaagcatgtcccaaatccag

SEQ ID NO: 35667 - DNA, 26 bp, Homo sapiens
agagaaaagcatgtcccaaatccagc

SEQ ID NO: 35668 - DNA, 26 bp, Homo sapiens
gagaaaagcatgtcccaaatccagca

SEQ ID NO: 35669 - DNA, 26 bp, Homo sapiens
agaaaagcatgtcccaaatccagcac

SEQ ID NO: 35670 - DNA, 26 bp, Homo sapiens
gaaaagcatgtcccaaatccagcact

SEQ ID NO: 35671 - DNA, 26 bp, Homo sapiens
aaaagcatgtcccaaatccagcactc

SEQ ID NO: 35672 - DNA, 26 bp, Homo sapiens
aaagcatgtcccaaatccagcactct

SEQ ID NO: 35673 - DNA, 26 bp, Homo sapiens
aagcatgtcccaaatccagcactctg

SEQ ID NO: 35674 - DNA, 26 bp, Homo sapiens
agcatgtcccaaatccagcactctga

SEQ ID NO: 35675 - DNA, 26 bp, Homo sapiens
gcatgtcccaaatccagcactctgat

SEQ ID NO: 35676 - DNA, 26 bp, Homo sapiens
catgtcccaaatccagcactctgata

SEQ ID NO: 35677 - DNA, 26 bp, Homo sapiens
atgtcccaaatccagcactctgatac

SEQ ID NO: 35678 - DNA, 26 bp, Homo sapiens
tgtcccaaatccagcactctgataca

SEQ ID NO: 35679 - DNA, 26 bp, Homo sapiens
gtcccaaatccagcactctgatacag

SEQ ID NO: 35680 - DNA, 26 bp, Homo sapiens
tcccaaatccagcactctgatacagc

SEQ ID NO: 35681 - DNA, 26 bp, Homo sapiens
cccaaatccagcactctgatacagct

SEQ ID NO: 35682 - DNA, 26 bp, Homo sapiens
ccaaatccagcactctgatacagctg

SEQ ID NO: 35683 - DNA, 26 bp, Homo sapiens
caaatccagcactctgatacagctgc

SEQ ID NO: 35684 - DNA, 26 bp, Homo sapiens
aaatccagcactctgatacagctgcc

SEQ ID NO: 35685 - DNA, 26 bp, Homo sapiens
aatccagcactctgatacagctgcca

SEQ ID NO: 35686 - DNA, 26 bp, Homo sapiens
atccagcactctgatacagctgccag

SEQ ID NO: 35687 - DNA, 26 bp, Homo sapiens
tccagcactctgatacagctgccagt

SEQ ID NO: 35688 - DNA, 26 bp, Homo sapiens
ccagcactctgatacagctgccagtt

SEQ ID NO: 35689 - DNA, 26 bp, Homo sapiens
cagcactctgatacagctgccagttg

SEQ ID NO: 35690 - DNA, 26 bp, Homo sapiens
agcactctgatacagctgccagttgg

SEQ ID NO: 35691 - DNA, 26 bp, Homo sapiens
gcactctgatacagctgccagttggg

SEQ ID NO: 35692 - DNA, 26 bp, Homo sapiens
cactctgatacagctgccagttgggc

SEQ ID NO: 35693 - DNA, 26 bp, Homo sapiens
actctgatacagctgccagttgggca

SEQ ID NO: 35694 - DNA, 26 bp, Homo sapiens
ctctgatacagctgccagttgggcat

SEQ ID NO: 35695 - DNA, 26 bp, Homo sapiens
tctgatacagctgccagttgggcata

SEQ ID NO: 35696 - DNA, 26 bp, Homo sapiens
ctgatacagctgccagttgggcatag

SEQ ID NO: 35697 - DNA, 26 bp, Homo sapiens
tgatacagctgccagttgggcatagg

SEQ ID NO: 35698 - DNA, 26 bp, Homo sapiens
gatacagctgccagttgggcataggt

SEQ ID NO: 35699 - DNA, 26 bp, Homo sapiens
atacagctgccagttgggcataggta

SEQ ID NO: 35700 - DNA, 26 bp, Homo sapiens
tacagctgccagttgggcataggtag

SEQ ID NO: 35701 - DNA, 26 bp, Homo sapiens
acagctgccagttgggcataggtaga

SEQ ID NO: 35702 - DNA, 26 bp, Homo sapiens
cagctgccagttgggcataggtagat

SEQ ID NO: 35703 - DNA, 26 bp, Homo sapiens
agctgccagttgggcataggtagata

SEQ ID NO: 35704 - DNA, 26 bp, Homo sapiens
gctgccagttgggcataggtagatat

SEQ ID NO: 35705 - DNA, 26 bp, Homo sapiens
ctgccagttgggcataggtagatata

SEQ ID NO: 35706 - DNA, 26 bp, Homo sapiens
tgccagttgggcataggtagatatat

SEQ ID NO: 35707 - DNA, 26 bp, Homo sapiens
gccagttgggcataggtagatatata

SEQ ID NO: 35708 - DNA, 26 bp, Homo sapiens
ccagttgggcataggtagatatatat

SEQ ID NO: 35709 - DNA, 26 bp, Homo sapiens
cagttgggcataggtagatatatata

SEQ ID NO: 35710 - DNA, 26 bp, Homo sapiens
agttgggcataggtagatatatatat

SEQ ID NO: 35711 - DNA, 26 bp, Homo sapiens
gttgggcataggtagatatatatata

SEQ ID NO: 35712 - DNA, 26 bp, Homo sapiens
ttgggcataggtagatatatatatat

SEQ ID NO: 35713 - DNA, 26 bp, Homo sapiens
tgggcataggtagatatatatatata

SEQ ID NO: 35714 - DNA, 26 bp, Homo sapiens
gggcataggtagatatatatatatat

SEQ ID NO: 35715 - DNA, 26 bp, Homo sapiens
ggcataggtagatatatatatatatg

SEQ ID NO: 35716 - DNA, 26 bp, Homo sapiens
gcataggtagatatatatatatatgt

SEQ ID NO: 35717 - DNA, 26 bp, Homo sapiens
cataggtagatatatatatatatgta

SEQ ID NO: 35718 - DNA, 26 bp, Homo sapiens
ataggtagatatatatatatatgtat

SEQ ID NO: 35719 - DNA, 26 bp, Homo sapiens
taggtagatatatatatatatgtata

SEQ ID NO: 35720 - DNA, 26 bp, Homo sapiens
aggtagatatatatatatatgtatat

SEQ ID NO: 35721 - DNA, 26 bp, Homo sapiens
ggtagatatatatatatatgtatata

SEQ ID NO: 35722 - DNA, 26 bp, Homo sapiens
gtagatatatatatatatgtatatat

SEQ ID NO: 35723 - DNA, 26 bp, Homo sapiens
tagatatatatatatatgtatatata

SEQ ID NO: 35724 - DNA, 26 bp, Homo sapiens
agatatatatatatatgtatatatat

SEQ ID NO: 35725 - DNA, 26 bp, Homo sapiens
gatatatatatatatgtatatatata

SEQ ID NO: 35726 - DNA, 26 bp, Homo sapiens
atatatatatatatgtatatatatac

SEQ ID NO: 35727 - DNA, 26 bp, Homo sapiens
tatatatatatatgtatatatataca

SEQ ID NO: 35728 - DNA, 26 bp, Homo sapiens
atatatatatatgtatatatatacaa

SEQ ID NO: 35729 - DNA, 26 bp, Homo sapiens
tatatatatatgtatatatatacaaa

SEQ ID NO: 35730 - DNA, 26 bp, Homo sapiens
atatatatatgtatatatatacaaat

SEQ ID NO: 35731 - DNA, 26 bp, Homo sapiens
tatatatatgtatatatatacaaata

SEQ ID NO: 35732 - DNA, 26 bp, Homo sapiens
atatatatgtatatatatacaaatat

SEQ ID NO: 35733 - DNA, 26 bp, Homo sapiens
tatatatgtatatatatacaaatata

SEQ ID NO: 35734 - DNA, 26 bp, Homo sapiens
atatatgtatatatatacaaatatat

SEQ ID NO: 35735 - DNA, 26 bp, Homo sapiens
tatatgtatatatatacaaatatata

SEQ ID NO: 35736 - DNA, 26 bp, Homo sapiens
atatgtatatatatacaaatatatag

SEQ ID NO: 35737 - DNA, 26 bp, Homo sapiens
tatgtatatatatacaaatatatagt

SEQ ID NO: 35738 - DNA, 26 bp, Homo sapiens
atgtatatatatacaaatatatagtt

SEQ ID NO: 35739 - DNA, 26 bp, Homo sapiens
tgtatatatatacaaatatatagtta

SEQ ID NO: 35740 - DNA, 26 bp, Homo sapiens
gtatatatatacaaatatatagttat

SEQ ID NO: 35741 - DNA, 26 bp, Homo sapiens
tatatatatacaaatatatagttata

SEQ ID NO: 35742 - DNA, 26 bp, Homo sapiens
atatatatacaaatatatagttatac

SEQ ID NO: 35743 - DNA, 26 bp, Homo sapiens
tatatatacaaatatatagttatact

SEQ ID NO: 35744 - DNA, 26 bp, Homo sapiens
atatatacaaatatatagttatactc

SEQ ID NO: 35745 - DNA, 26 bp, Homo sapiens
tatatacaaatatatagttatactca

SEQ ID NO: 35746 - DNA, 26 bp, Homo sapiens
atatacaaatatatagttatactcag

SEQ ID NO: 35747 - DNA, 26 bp, Homo sapiens
tatacaaatatatagttatactcagt

SEQ ID NO: 35748 - DNA, 26 bp, Homo sapiens
atacaaatatatagttatactcagtg

SEQ ID NO: 35749 - DNA, 26 bp, Homo sapiens
tacaaatatatagttatactcagtga

SEQ ID NO: 35750 - DNA, 26 bp, Homo sapiens
acaaatatatagttatactcagtgaa

SEQ ID NO: 35751 - DNA, 26 bp, Homo sapiens
caaatatatagttatactcagtgaaa

SEQ ID NO: 35752 - DNA, 26 bp, Homo sapiens
aaatatatagttatactcagtgaaat

SEQ ID NO: 35753 - DNA, 26 bp, Homo sapiens
aatatatagttatactcagtgaaatt

SEQ ID NO: 35754 - DNA, 26 bp, Homo sapiens
atatatagttatactcagtgaaatta

SEQ ID NO: 35755 - DNA, 26 bp, Homo sapiens
tatatagttatactcagtgaaattaa

SEQ ID NO: 35756 - DNA, 26 bp, Homo sapiens
atatagttatactcagtgaaattaac

SEQ ID NO: 35757 - DNA, 26 bp, Homo sapiens
tatagttatactcagtgaaattaaca

SEQ ID NO: 35758 - DNA, 26 bp, Homo sapiens
atagttatactcagtgaaattaacaa

SEQ ID NO: 35759 - DNA, 26 bp, Homo sapiens
tagttatactcagtgaaattaacaag

SEQ ID NO: 35760 - DNA, 26 bp, Homo sapiens
agttatactcagtgaaattaacaaga

SEQ ID NO: 35761 - DNA, 26 bp, Homo sapiens
gttatactcagtgaaattaacaagac

SEQ ID NO: 35762 - DNA, 26 bp, Homo sapiens
ttatactcagtgaaattaacaagacc

SEQ ID NO: 35763 - DNA, 26 bp, Homo sapiens
tatactcagtgaaattaacaagaccc

SEQ ID NO: 35764 - DNA, 26 bp, Homo sapiens
atactcagtgaaattaacaagaccca

SEQ ID NO: 35765 - DNA, 26 bp, Homo sapiens
tactcagtgaaattaacaagacccaa

SEQ ID NO: 35766 - DNA, 26 bp, Homo sapiens
actcagtgaaattaacaagacccaaa

SEQ ID NO: 35767 - DNA, 26 bp, Homo sapiens
ctcagtgaaattaacaagacccaaag

SEQ ID NO: 35768 - DNA, 26 bp, Homo sapiens
tcagtgaaattaacaagacccaaagg

SEQ ID NO: 35769 - DNA, 26 bp, Homo sapiens
cagtgaaattaacaagacccaaaggt

SEQ ID NO: 35770 - DNA, 26 bp, Homo sapiens
agtgaaattaacaagacccaaaggtg

SEQ ID NO: 35771 - DNA, 26 bp, Homo sapiens
gtgaaattaacaagacccaaaggtgg

SEQ ID NO: 35772 - DNA, 26 bp, Homo sapiens
tgaaattaacaagacccaaaggtggt

SEQ ID NO: 35773 - DNA, 26 bp, Homo sapiens
gaaattaacaagacccaaaggtggta

SEQ ID NO: 35774 - DNA, 26 bp, Homo sapiens
aaattaacaagacccaaaggtggtat

SEQ ID NO: 35775 - DNA, 26 bp, Homo sapiens
aattaacaagacccaaaggtggtatt

SEQ ID NO: 35776 - DNA, 26 bp, Homo sapiens
attaacaagacccaaaggtggtattg

SEQ ID NO: 35777 - DNA, 26 bp, Homo sapiens
ttaacaagacccaaaggtggtattgt

SEQ ID NO: 35778 - DNA, 26 bp, Homo sapiens
taacaagacccaaaggtggtattgtc

SEQ ID NO: 35779 - DNA, 26 bp, Homo sapiens
aacaagacccaaaggtggtattgtct

SEQ ID NO: 35780 - DNA, 26 bp, Homo sapiens
acaagacccaaaggtggtattgtcta

SEQ ID NO: 35781 - DNA, 26 bp, Homo sapiens
caagacccaaaggtggtattgtctag

SEQ ID NO: 35782 - DNA, 26 bp, Homo sapiens
aagacccaaaggtggtattgtctagg

SEQ ID NO: 35783 - DNA, 26 bp, Homo sapiens
agacccaaaggtggtattgtctagga

SEQ ID NO: 35784 - DNA, 26 bp, Homo sapiens
gacccaaaggtggtattgtctaggaa

SEQ ID NO: 35785 - DNA, 26 bp, Homo sapiens
acccaaaggtggtattgtctaggaat

SEQ ID NO: 35786 - DNA, 26 bp, Homo sapiens
cccaaaggtggtattgtctaggaata

SEQ ID NO: 35787 - DNA, 26 bp, Homo sapiens
ccaaaggtggtattgtctaggaataa

SEQ ID NO: 35788 - DNA, 26 bp, Homo sapiens
caaaggtggtattgtctaggaataaa

SEQ ID NO: 35789 - DNA, 26 bp, Homo sapiens
aaaggtggtattgtctaggaataaaa

SEQ ID NO: 35790 - DNA, 26 bp, Homo sapiens
aaggtggtattgtctaggaataaaag

SEQ ID NO: 35791 - DNA, 26 bp, Homo sapiens
aggtggtattgtctaggaataaaagg

SEQ ID NO: 35792 - DNA, 26 bp, Homo sapiens
ggtggtattgtctaggaataaaaggg

SEQ ID NO: 35793 - DNA, 26 bp, Homo sapiens
gtggtattgtctaggaataaaaggga

SEQ ID NO: 35794 - DNA, 26 bp, Homo sapiens
tggtattgtctaggaataaaagggat

SEQ ID NO: 35795 - DNA, 26 bp, Homo sapiens
ggtattgtctaggaataaaagggata

SEQ ID NO: 35796 - DNA, 26 bp, Homo sapiens
gtattgtctaggaataaaagggataa

SEQ ID NO: 35797 - DNA, 26 bp, Homo sapiens
tattgtctaggaataaaagggataat

SEQ ID NO: 35798 - DNA, 26 bp, Homo sapiens
attgtctaggaataaaagggataatt

SEQ ID NO: 35799 - DNA, 26 bp, Homo sapiens
ttgtctaggaataaaagggataattt

SEQ ID NO: 35800 - DNA, 26 bp, Homo sapiens
tgtctaggaataaaagggataatttt

SEQ ID NO: 35801 - DNA, 26 bp, Homo sapiens
gtctaggaataaaagggataattttt

SEQ ID NO: 35802 - DNA, 26 bp, Homo sapiens
tctaggaataaaagggataatttttg

SEQ ID NO: 35803 - DNA, 26 bp, Homo sapiens
ctaggaataaaagggataatttttgt

SEQ ID NO: 35804 - DNA, 26 bp, Homo sapiens
taggaataaaagggataatttttgtt

SEQ ID NO: 35805 - DNA, 26 bp, Homo sapiens
aggaataaaagggataatttttgttg

SEQ ID NO: 35806 - DNA, 26 bp, Homo sapiens
ggaataaaagggataatttttgttgt

SEQ ID NO: 35807 - DNA, 26 bp, Homo sapiens
gaataaaagggataatttttgttgtt

SEQ ID NO: 35808 - DNA, 26 bp, Homo sapiens
aataaaagggataatttttgttgttc

SEQ ID NO: 35809 - DNA, 26 bp, Homo sapiens
ataaaagggataatttttgttgttca

SEQ ID NO: 35810 - DNA, 26 bp, Homo sapiens
taaaagggataatttttgttgttcac

SEQ ID NO: 35811 - DNA, 26 bp, Homo sapiens
aaaagggataatttttgttgttcaca

SEQ ID NO: 35812 - DNA, 26 bp, Homo sapiens
aaagggataatttttgttgttcacaa

SEQ ID NO: 35813 - DNA, 26 bp, Homo sapiens
aagggataatttttgttgttcacaaa

SEQ ID NO: 35814 - DNA, 26 bp, Homo sapiens
agggataatttttgttgttcacaaaa

SEQ ID NO: 35815 - DNA, 26 bp, Homo sapiens
gggataatttttgttgttcacaaaag

SEQ ID NO: 35816 - DNA, 26 bp, Homo sapiens
ggataatttttgttgttcacaaaagt

SEQ ID NO: 35817 - DNA, 26 bp, Homo sapiens
gataatttttgttgttcacaaaagta

SEQ ID NO: 35818 - DNA, 26 bp, Homo sapiens
ataatttttgttgttcacaaaagtaa

SEQ ID NO: 35819 - DNA, 26 bp, Homo sapiens
taatttttgttgttcacaaaagtaac

SEQ ID NO: 35820 - DNA, 26 bp, Homo sapiens
aatttttgttgttcacaaaagtaact

SEQ ID NO: 35821 - DNA, 26 bp, Homo sapiens
atttttgttgttcacaaaagtaactt

SEQ ID NO: 35822 - DNA, 26 bp, Homo sapiens
tttttgttgttcacaaaagtaacttg

SEQ ID NO: 35823 - DNA, 26 bp, Homo sapiens
ttttgttgttcacaaaagtaacttgt

SEQ ID NO: 35824 - DNA, 26 bp, Homo sapiens
tttgttgttcacaaaagtaacttgtc

SEQ ID NO: 35825 - DNA, 26 bp, Homo sapiens
ttgttgttcacaaaagtaacttgtct

SEQ ID NO: 35826 - DNA, 26 bp, Homo sapiens
tgttgttcacaaaagtaacttgtcta

SEQ ID NO: 35827 - DNA, 26 bp, Homo sapiens
gttgttcacaaaagtaacttgtctag

SEQ ID NO: 35828 - DNA, 26 bp, Homo sapiens
ttgttcacaaaagtaacttgtctagc

SEQ ID NO: 35829 - DNA, 26 bp, Homo sapiens
tgttcacaaaagtaacttgtctagca

SEQ ID NO: 35830 - DNA, 26 bp, Homo sapiens
gttcacaaaagtaacttgtctagcac

SEQ ID NO: 35831 - DNA, 26 bp, Homo sapiens
ttcacaaaagtaacttgtctagcacc

SEQ ID NO: 35832 - DNA, 26 bp, Homo sapiens
tcacaaaagtaacttgtctagcacca

SEQ ID NO: 35833 - DNA, 26 bp, Homo sapiens
cacaaaagtaacttgtctagcaccac

SEQ ID NO: 35834 - DNA, 26 bp, Homo sapiens
acaaaagtaacttgtctagcaccaca

SEQ ID NO: 35835 - DNA, 26 bp, Homo sapiens
caaaagtaacttgtctagcaccacac

SEQ ID NO: 35836 - DNA, 26 bp, Homo sapiens
aaaagtaacttgtctagcaccacaca

SEQ ID NO: 35837 - DNA, 26 bp, Homo sapiens
aaagtaacttgtctagcaccacacat

SEQ ID NO: 35838 - DNA, 26 bp, Homo sapiens
aagtaacttgtctagcaccacacatc

SEQ ID NO: 35839 - DNA, 26 bp, Homo sapiens
agtaacttgtctagcaccacacatca

SEQ ID NO: 35840 - DNA, 26 bp, Homo sapiens
gtaacttgtctagcaccacacatcag

SEQ ID NO: 35841 - DNA, 26 bp, Homo sapiens
taacttgtctagcaccacacatcaga

SEQ ID NO: 35842 - DNA, 26 bp, Homo sapiens
aacttgtctagcaccacacatcagaa

SEQ ID NO: 35843 - DNA, 26 bp, Homo sapiens
acttgtctagcaccacacatcagaaa

SEQ ID NO: 35844 - DNA, 26 bp, Homo sapiens
cttgtctagcaccacacatcagaaaa

SEQ ID NO: 35845 - DNA, 26 bp, Homo sapiens
ttgtctagcaccacacatcagaaaaa

SEQ ID NO: 35846 - DNA, 26 bp, Homo sapiens
tgtctagcaccacacatcagaaaaac

SEQ ID NO: 35847 - DNA, 26 bp, Homo sapiens
gtctagcaccacacatcagaaaaaca

SEQ ID NO: 35848 - DNA, 26 bp, Homo sapiens
tctagcaccacacatcagaaaaacac

SEQ ID NO: 35849 - DNA, 26 bp, Homo sapiens
ctagcaccacacatcagaaaaacaca

SEQ ID NO: 35850 - DNA, 26 bp, Homo sapiens
tagcaccacacatcagaaaaacacaa

SEQ ID NO: 35851 - DNA, 26 bp, Homo sapiens
agcaccacacatcagaaaaacacaaa

SEQ ID NO: 35852 - DNA, 26 bp, Homo sapiens
gcaccacacatcagaaaaacacaaaa

SEQ ID NO: 35853 - DNA, 26 bp, Homo sapiens
caccacacatcagaaaaacacaaaaa

SEQ ID NO: 35854 - DNA, 26 bp, Homo sapiens
accacacatcagaaaaacacaaaaat

SEQ ID NO: 35855 - DNA, 26 bp, Homo sapiens
ccacacatcagaaaaacacaaaaata

SEQ ID NO: 35856 - DNA, 26 bp, Homo sapiens
cacacatcagaaaaacacaaaaatag

SEQ ID NO: 35857 - DNA, 26 bp, Homo sapiens
acacatcagaaaaacacaaaaatagc

SEQ ID NO: 35858 - DNA, 26 bp, Homo sapiens
cacatcagaaaaacacaaaaatagca

SEQ ID NO: 35859 - DNA, 26 bp, Homo sapiens
acatcagaaaaacacaaaaatagcac

SEQ ID NO: 35860 - DNA, 26 bp, Homo sapiens
catcagaaaaacacaaaaatagcaca

SEQ ID NO: 35861 - DNA, 26 bp, Homo sapiens
atcagaaaaacacaaaaatagcacac

SEQ ID NO: 35862 - DNA, 26 bp, Homo sapiens
tcagaaaaacacaaaaatagcacact

SEQ ID NO: 35863 - DNA, 26 bp, Homo sapiens
cagaaaaacacaaaaatagcacactc

SEQ ID NO: 35864 - DNA, 26 bp, Homo sapiens
agaaaaacacaaaaatagcacactct

SEQ ID NO: 35865 - DNA, 26 bp, Homo sapiens
gaaaaacacaaaaatagcacactcta

SEQ ID NO: 35866 - DNA, 26 bp, Homo sapiens
aaaaacacaaaaatagcacactctag

SEQ ID NO: 35867 - DNA, 26 bp, Homo sapiens
aaaacacaaaaatagcacactctagt

SEQ ID NO: 35868 - DNA, 26 bp, Homo sapiens
aaacacaaaaatagcacactctagtt

SEQ ID NO: 35869 - DNA, 26 bp, Homo sapiens
aacacaaaaatagcacactctagttc

SEQ ID NO: 35870 - DNA, 26 bp, Homo sapiens
acacaaaaatagcacactctagttct

SEQ ID NO: 35871 - DNA, 26 bp, Homo sapiens
cacaaaaatagcacactctagttcta

SEQ ID NO: 35872 - DNA, 26 bp, Homo sapiens
acaaaaatagcacactctagttctaa

SEQ ID NO: 35873 - DNA, 26 bp, Homo sapiens
caaaaatagcacactctagttctaaa

SEQ ID NO: 35874 - DNA, 26 bp, Homo sapiens
aaaaatagcacactctagttctaaac

SEQ ID NO: 35875 - DNA, 26 bp, Homo sapiens
aaaatagcacactctagttctaaaca

SEQ ID NO: 35876 - DNA, 26 bp, Homo sapiens
aaatagcacactctagttctaaacag

SEQ ID NO: 35877 - DNA, 26 bp, Homo sapiens
aatagcacactctagttctaaacagc

SEQ ID NO: 35878 - DNA, 26 bp, Homo sapiens
atagcacactctagttctaaacagct

SEQ ID NO: 35879 - DNA, 26 bp, Homo sapiens
tagcacactctagttctaaacagcta

SEQ ID NO: 35880 - DNA, 26 bp, Homo sapiens
agcacactctagttctaaacagctat

SEQ ID NO: 35881 - DNA, 26 bp, Homo sapiens
gcacactctagttctaaacagctatg

SEQ ID NO: 35882 - DNA, 26 bp, Homo sapiens
cacactctagttctaaacagctatgt

SEQ ID NO: 35883 - DNA, 26 bp, Homo sapiens
acactctagttctaaacagctatgtc

SEQ ID NO: 35884 - DNA, 26 bp, Homo sapiens
cactctagttctaaacagctatgtct

SEQ ID NO: 35885 - DNA, 26 bp, Homo sapiens
actctagttctaaacagctatgtcta

SEQ ID NO: 35886 - DNA, 26 bp, Homo sapiens
ctctagttctaaacagctatgtctaa

SEQ ID NO: 35887 - DNA, 26 bp, Homo sapiens
tctagttctaaacagctatgtctaaa

SEQ ID NO: 35888 - DNA, 26 bp, Homo sapiens
ctagttctaaacagctatgtctaaaa

SEQ ID NO: 35889 - DNA, 26 bp, Homo sapiens
tagttctaaacagctatgtctaaaat

SEQ ID NO: 35890 - DNA, 26 bp, Homo sapiens
agttctaaacagctatgtctaaaata

SEQ ID NO: 35891 - DNA, 26 bp, Homo sapiens
gttctaaacagctatgtctaaaatag

SEQ ID NO: 35892 - DNA, 26 bp, Homo sapiens
ttctaaacagctatgtctaaaataga

SEQ ID NO: 35893 - DNA, 26 bp, Homo sapiens
tctaaacagctatgtctaaaatagat

SEQ ID NO: 35894 - DNA, 26 bp, Homo sapiens
ctaaacagctatgtctaaaatagatt

SEQ ID NO: 35895 - DNA, 26 bp, Homo sapiens
taaacagctatgtctaaaatagatta

SEQ ID NO: 35896 - DNA, 26 bp, Homo sapiens
aaacagctatgtctaaaatagattat

SEQ ID NO: 35897 - DNA, 26 bp, Homo sapiens
aacagctatgtctaaaatagattata

SEQ ID NO: 35898 - DNA, 26 bp, Homo sapiens
acagctatgtctaaaatagattatat

SEQ ID NO: 35899 - DNA, 26 bp, Homo sapiens
cagctatgtctaaaatagattatata

SEQ ID NO: 35900 - DNA, 26 bp, Homo sapiens
agctatgtctaaaatagattatatag

SEQ ID NO: 35901 - DNA, 26 bp, Homo sapiens
gctatgtctaaaatagattatatagt

SEQ ID NO: 35902 - DNA, 26 bp, Homo sapiens
ctatgtctaaaatagattatatagta

SEQ ID NO: 35903 - DNA, 26 bp, Homo sapiens
tatgtctaaaatagattatatagtaa

SEQ ID NO: 35904 - DNA, 26 bp, Homo sapiens
atgtctaaaatagattatatagtaaa

SEQ ID NO: 35905 - DNA, 26 bp, Homo sapiens
tgtctaaaatagattatatagtaaaa

SEQ ID NO: 35906 - DNA, 26 bp, Homo sapiens
gtctaaaatagattatatagtaaaac

SEQ ID NO: 35907 - DNA, 26 bp, Homo sapiens
tctaaaatagattatatagtaaaacc

SEQ ID NO: 35908 - DNA, 26 bp, Homo sapiens
ctaaaatagattatatagtaaaaccg

SEQ ID NO: 35909 - DNA, 26 bp, Homo sapiens
taaaatagattatatagtaaaaccgg

SEQ ID NO: 35910 - DNA, 26 bp, Homo sapiens
aaaatagattatatagtaaaaccggt

SEQ ID NO: 35911 - DNA, 26 bp, Homo sapiens
aaatagattatatagtaaaaccggta

SEQ ID NO: 35912 - DNA, 26 bp, Homo sapiens
aatagattatatagtaaaaccggtat

SEQ ID NO: 35913 - DNA, 26 bp, Homo sapiens
atagattatatagtaaaaccggtatt

SEQ ID NO: 35914 - DNA, 26 bp, Homo sapiens
tagattatatagtaaaaccggtatta

SEQ ID NO: 35915 - DNA, 26 bp, Homo sapiens
agattatatagtaaaaccggtattat

SEQ ID NO: 35916 - DNA, 26 bp, Homo sapiens
gattatatagtaaaaccggtattata

SEQ ID NO: 35917 - DNA, 26 bp, Homo sapiens
attatatagtaaaaccggtattatac

SEQ ID NO: 35918 - DNA, 26 bp, Homo sapiens
ttatatagtaaaaccggtattataca

SEQ ID NO: 35919 - DNA, 26 bp, Homo sapiens
tatatagtaaaaccggtattatacag

SEQ ID NO: 35920 - DNA, 26 bp, Homo sapiens
atatagtaaaaccggtattatacagc

SEQ ID NO: 35921 - DNA, 26 bp, Homo sapiens
tatagtaaaaccggtattatacagca

SEQ ID NO: 35922 - DNA, 26 bp, Homo sapiens
atagtaaaaccggtattatacagcat

SEQ ID NO: 35923 - DNA, 26 bp, Homo sapiens
tagtaaaaccggtattatacagcata

SEQ ID NO: 35924 - DNA, 26 bp, Homo sapiens
agtaaaaccggtattatacagcatat

SEQ ID NO: 35925 - DNA, 26 bp, Homo sapiens
gtaaaaccggtattatacagcatatt

SEQ ID NO: 35926 - DNA, 26 bp, Homo sapiens
taaaaccggtattatacagcatattg

SEQ ID NO: 35927 - DNA, 26 bp, Homo sapiens
aaaaccggtattatacagcatattgt

SEQ ID NO: 35928 - DNA, 26 bp, Homo sapiens
aaaccggtattatacagcatattgtg

SEQ ID NO: 35929 - DNA, 26 bp, Homo sapiens
aaccggtattatacagcatattgtgg

SEQ ID NO: 35930 - DNA, 26 bp, Homo sapiens
accggtattatacagcatattgtgga

SEQ ID NO: 35931 - DNA, 26 bp, Homo sapiens
ccggtattatacagcatattgtggat

SEQ ID NO: 35932 - DNA, 26 bp, Homo sapiens
cggtattatacagcatattgtggatt

SEQ ID NO: 35933 - DNA, 26 bp, Homo sapiens
ggtattatacagcatattgtggattt

SEQ ID NO: 35934 - DNA, 26 bp, Homo sapiens
gtattatacagcatattgtggatttg

SEQ ID NO: 35935 - DNA, 26 bp, Homo sapiens
tattatacagcatattgtggatttga

SEQ ID NO: 35936 - DNA, 26 bp, Homo sapiens
attatacagcatattgtggatttgat

SEQ ID NO: 35937 - DNA, 26 bp, Homo sapiens
ttatacagcatattgtggatttgata

SEQ ID NO: 35938 - DNA, 26 bp, Homo sapiens
tatacagcatattgtggatttgataa

SEQ ID NO: 35939 - DNA, 26 bp, Homo sapiens
atacagcatattgtggatttgataaa

SEQ ID NO: 35940 - DNA, 26 bp, Homo sapiens
tacagcatattgtggatttgataaac

SEQ ID NO: 35941 - DNA, 26 bp, Homo sapiens
acagcatattgtggatttgataaaca

SEQ ID NO: 35942 - DNA, 26 bp, Homo sapiens
cagcatattgtggatttgataaacag

SEQ ID NO: 35943 - DNA, 26 bp, Homo sapiens
agcatattgtggatttgataaacaga

SEQ ID NO: 35944 - DNA, 26 bp, Homo sapiens
gcatattgtggatttgataaacagat

SEQ ID NO: 35945 - DNA, 26 bp, Homo sapiens
catattgtggatttgataaacagata

SEQ ID NO: 35946 - DNA, 26 bp, Homo sapiens
atattgtggatttgataaacagataa

SEQ ID NO: 35947 - DNA, 26 bp, Homo sapiens
tattgtggatttgataaacagataaa

SEQ ID NO: 35948 - DNA, 26 bp, Homo sapiens
attgtggatttgataaacagataaat

SEQ ID NO: 35949 - DNA, 26 bp, Homo sapiens
ttgtggatttgataaacagataaata

SEQ ID NO: 35950 - DNA, 26 bp, Homo sapiens
tgtggatttgataaacagataaatat

SEQ ID NO: 35951 - DNA, 26 bp, Homo sapiens
gtggatttgataaacagataaatatt

SEQ ID NO: 35952 - DNA, 26 bp, Homo sapiens
tggatttgataaacagataaatattt

SEQ ID NO: 35953 - DNA, 26 bp, Homo sapiens
ggatttgataaacagataaatatttg

SEQ ID NO: 35954 - DNA, 26 bp, Homo sapiens
gatttgataaacagataaatatttgc

SEQ ID NO: 35955 - DNA, 26 bp, Homo sapiens
atttgataaacagataaatatttgca

SEQ ID NO: 35956 - DNA, 26 bp, Homo sapiens
tttgataaacagataaatatttgcac

SEQ ID NO: 35957 - DNA, 26 bp, Homo sapiens
ttgataaacagataaatatttgcact

SEQ ID NO: 35958 - DNA, 26 bp, Homo sapiens
tgataaacagataaatatttgcactg

SEQ ID NO: 35959 - DNA, 26 bp, Homo sapiens
gataaacagataaatatttgcactga

SEQ ID NO: 35960 - DNA, 26 bp, Homo sapiens
ataaacagataaatatttgcactgag

SEQ ID NO: 35961 - DNA, 26 bp, Homo sapiens
taaacagataaatatttgcactgagt

SEQ ID NO: 35962 - DNA, 26 bp, Homo sapiens
aaacagataaatatttgcactgagta

SEQ ID NO: 35963 - DNA, 26 bp, Homo sapiens
aacagataaatatttgcactgagtag

SEQ ID NO: 35964 - DNA, 26 bp, Homo sapiens
acagataaatatttgcactgagtagg

SEQ ID NO: 35965 - DNA, 26 bp, Homo sapiens
cagataaatatttgcactgagtaggc

SEQ ID NO: 35966 - DNA, 26 bp, Homo sapiens
agataaatatttgcactgagtaggct

SEQ ID NO: 35967 - DNA, 26 bp, Homo sapiens
gataaatatttgcactgagtaggctg

SEQ ID NO: 35968 - DNA, 26 bp, Homo sapiens
ataaatatttgcactgagtaggctgt

SEQ ID NO: 35969 - DNA, 26 bp, Homo sapiens
taaatatttgcactgagtaggctgtt

SEQ ID NO: 35970 - DNA, 26 bp, Homo sapiens
aaatatttgcactgagtaggctgttt

SEQ ID NO: 35971 - DNA, 26 bp, Homo sapiens
aatatttgcactgagtaggctgttta

SEQ ID NO: 35972 - DNA, 26 bp, Homo sapiens
atatttgcactgagtaggctgtttat

SEQ ID NO: 35973 - DNA, 26 bp, Homo sapiens
tatttgcactgagtaggctgtttata

SEQ ID NO: 35974 - DNA, 26 bp, Homo sapiens
atttgcactgagtaggctgtttataa

SEQ ID NO: 35975 - DNA, 26 bp, Homo sapiens
tttgcactgagtaggctgtttataat

SEQ ID NO: 35976 - DNA, 26 bp, Homo sapiens
ttgcactgagtaggctgtttataata

SEQ ID NO: 35977 - DNA, 26 bp, Homo sapiens
tgcactgagtaggctgtttataatat

SEQ ID NO: 35978 - DNA, 26 bp, Homo sapiens
gcactgagtaggctgtttataatata

SEQ ID NO: 35979 - DNA, 26 bp, Homo sapiens
cactgagtaggctgtttataatataa

SEQ ID NO: 35980 - DNA, 26 bp, Homo sapiens
actgagtaggctgtttataatataac

SEQ ID NO: 35981 - DNA, 26 bp, Homo sapiens
ctgagtaggctgtttataatataaca

SEQ ID NO: 35982 - DNA, 26 bp, Homo sapiens
tgagtaggctgtttataatataacat

SEQ ID NO: 35983 - DNA, 26 bp, Homo sapiens
gagtaggctgtttataatataacatt

SEQ ID NO: 35984 - DNA, 26 bp, Homo sapiens
agtaggctgtttataatataacattt

SEQ ID NO: 35985 - DNA, 26 bp, Homo sapiens
gtaggctgtttataatataacatttt

SEQ ID NO: 35986 - DNA, 26 bp, Homo sapiens
taggctgtttataatataacattttc

SEQ ID NO: 35987 - DNA, 26 bp, Homo sapiens
aggctgtttataatataacattttct

SEQ ID NO: 35988 - DNA, 26 bp, Homo sapiens
ggctgtttataatataacattttctt

SEQ ID NO: 35989 - DNA, 26 bp, Homo sapiens
gctgtttataatataacattttctta

SEQ ID NO: 35990 - DNA, 26 bp, Homo sapiens
ctgtttataatataacattttcttat

SEQ ID NO: 35991 - DNA, 26 bp, Homo sapiens
tgtttataatataacattttcttatc

SEQ ID NO: 35992 - DNA, 26 bp, Homo sapiens
gtttataatataacattttcttatct

SEQ ID NO: 35993 - DNA, 26 bp, Homo sapiens
tttataatataacattttcttatcta

SEQ ID NO: 35994 - DNA, 26 bp, Homo sapiens
ttataatataacattttcttatctat

SEQ ID NO: 35995 - DNA, 26 bp, Homo sapiens
tataatataacattttcttatctata

SEQ ID NO: 35996 - DNA, 26 bp, Homo sapiens
ataatataacattttcttatctatac

SEQ ID NO: 35997 - DNA, 26 bp, Homo sapiens
taatataacattttcttatctataca

SEQ ID NO: 35998 - DNA, 26 bp, Homo sapiens
aatataacattttcttatctatacag

SEQ ID NO: 35999 - DNA, 26 bp, Homo sapiens
atataacattttcttatctatacaga

SEQ ID NO: 36000 - DNA, 26 bp, Homo sapiens
tataacattttcttatctatacagaa

SEQ ID NO: 36001 - DNA, 26 bp, Homo sapiens
ataacattttcttatctatacagaat

SEQ ID NO: 36002 - DNA, 26 bp, Homo sapiens
taacattttcttatctatacagaatg

SEQ ID NO: 36003 - DNA, 26 bp, Homo sapiens
aacattttcttatctatacagaatga

SEQ ID NO: 36004 - DNA, 26 bp, Homo sapiens
acattttcttatctatacagaatgaa

SEQ ID NO: 36005 - DNA, 26 bp, Homo sapiens
cattttcttatctatacagaatgaaa

SEQ ID NO: 36006 - DNA, 26 bp, Homo sapiens
attttcttatctatacagaatgaaag

SEQ ID NO: 36007 - DNA, 26 bp, Homo sapiens
ttttcttatctatacagaatgaaagc

SEQ ID NO: 36008 - DNA, 26 bp, Homo sapiens
tttcttatctatacagaatgaaagcc

SEQ ID NO: 36009 - DNA, 26 bp, Homo sapiens
ttcttatctatacagaatgaaagcca

SEQ ID NO: 36010 - DNA, 26 bp, Homo sapiens
tcttatctatacagaatgaaagccaa

SEQ ID NO: 36011 - DNA, 26 bp, Homo sapiens
cttatctatacagaatgaaagccaaa

SEQ ID NO: 36012 - DNA, 26 bp, Homo sapiens
ttatctatacagaatgaaagccaaaa

SEQ ID NO: 36013 - DNA, 26 bp, Homo sapiens
tatctatacagaatgaaagccaaaaa

SEQ ID NO: 36014 - DNA, 26 bp, Homo sapiens
atctatacagaatgaaagccaaaaag

SEQ ID NO: 36015 - DNA, 26 bp, Homo sapiens
tctatacagaatgaaagccaaaaagt

SEQ ID NO: 36016 - DNA, 26 bp, Homo sapiens
ctatacagaatgaaagccaaaaagtt

SEQ ID NO: 36017 - DNA, 26 bp, Homo sapiens
tatacagaatgaaagccaaaaagtta

SEQ ID NO: 36018 - DNA, 26 bp, Homo sapiens
atacagaatgaaagccaaaaagttaa

SEQ ID NO: 36019 - DNA, 26 bp, Homo sapiens
tacagaatgaaagccaaaaagttaac

SEQ ID NO: 36020 - DNA, 26 bp, Homo sapiens
acagaatgaaagccaaaaagttaact

SEQ ID NO: 36021 - DNA, 26 bp, Homo sapiens
cagaatgaaagccaaaaagttaactg

SEQ ID NO: 36022 - DNA, 26 bp, Homo sapiens
agaatgaaagccaaaaagttaactgt

SEQ ID NO: 36023 - DNA, 26 bp, Homo sapiens
gaatgaaagccaaaaagttaactgta

SEQ ID NO: 36024 - DNA, 26 bp, Homo sapiens
aatgaaagccaaaaagttaactgtat

SEQ ID NO: 36025 - DNA, 26 bp, Homo sapiens
atgaaagccaaaaagttaactgtata

SEQ ID NO: 36026 - DNA, 26 bp, Homo sapiens
tgaaagccaaaaagttaactgtatag

SEQ ID NO: 36027 - DNA, 26 bp, Homo sapiens
gaaagccaaaaagttaactgtataga

SEQ ID NO: 36028 - DNA, 26 bp, Homo sapiens
aaagccaaaaagttaactgtatagag

SEQ ID NO: 36029 - DNA, 26 bp, Homo sapiens
aagccaaaaagttaactgtatagaga

SEQ ID NO: 36030 - DNA, 26 bp, Homo sapiens
agccaaaaagttaactgtatagagat

SEQ ID NO: 36031 - DNA, 26 bp, Homo sapiens
gccaaaaagttaactgtatagagatg

SEQ ID NO: 36032 - DNA, 26 bp, Homo sapiens
ccaaaaagttaactgtatagagatgt

SEQ ID NO: 36033 - DNA, 26 bp, Homo sapiens
caaaaagttaactgtatagagatgtg

SEQ ID NO: 36034 - DNA, 26 bp, Homo sapiens
aaaaagttaactgtatagagatgtgc

SEQ ID NO: 36035 - DNA, 26 bp, Homo sapiens
aaaagttaactgtatagagatgtgca

SEQ ID NO: 36036 - DNA, 26 bp, Homo sapiens
aaagttaactgtatagagatgtgcag

SEQ ID NO: 36037 - DNA, 26 bp, Homo sapiens
aagttaactgtatagagatgtgcaga

SEQ ID NO: 36038 - DNA, 26 bp, Homo sapiens
agttaactgtatagagatgtgcagaa

SEQ ID NO: 36039 - DNA, 26 bp, Homo sapiens
gttaactgtatagagatgtgcagaac

SEQ ID NO: 36040 - DNA, 26 bp, Homo sapiens
ttaactgtatagagatgtgcagaaca

SEQ ID NO: 36041 - DNA, 26 bp, Homo sapiens
taactgtatagagatgtgcagaacaa

SEQ ID NO: 36042 - DNA, 26 bp, Homo sapiens
aactgtatagagatgtgcagaacaac

SEQ ID NO: 36043 - DNA, 26 bp, Homo sapiens
actgtatagagatgtgcagaacaaca

SEQ ID NO: 36044 - DNA, 26 bp, Homo sapiens
ctgtatagagatgtgcagaacaacat

SEQ ID NO: 36045 - DNA, 26 bp, Homo sapiens
tgtatagagatgtgcagaacaacatt

SEQ ID NO: 36046 - DNA, 26 bp, Homo sapiens
gtatagagatgtgcagaacaacatta

SEQ ID NO: 36047 - DNA, 26 bp, Homo sapiens
tatagagatgtgcagaacaacattaa

SEQ ID NO: 36048 - DNA, 26 bp, Homo sapiens
atagagatgtgcagaacaacattaaa

SEQ ID NO: 36049 - DNA, 26 bp, Homo sapiens
tagagatgtgcagaacaacattaaat

SEQ ID NO: 36050 - DNA, 26 bp, Homo sapiens
agagatgtgcagaacaacattaaata

SEQ ID NO: 36051 - DNA, 26 bp, Homo sapiens
gagatgtgcagaacaacattaaatat

SEQ ID NO: 36052 - DNA, 26 bp, Homo sapiens
agatgtgcagaacaacattaaatatt

SEQ ID NO: 36053 - DNA, 26 bp, Homo sapiens
gatgtgcagaacaacattaaatatta

SEQ ID NO: 36054 - DNA, 26 bp, Homo sapiens
atgtgcagaacaacattaaatattat

SEQ ID NO: 36055 - DNA, 26 bp, Homo sapiens
tgtgcagaacaacattaaatattatg

SEQ ID NO: 36056 - DNA, 26 bp, Homo sapiens
gtgcagaacaacattaaatattatga

SEQ ID NO: 36057 - DNA, 26 bp, Homo sapiens
tgcagaacaacattaaatattatgac

SEQ ID NO: 36058 - DNA, 26 bp, Homo sapiens
gcagaacaacattaaatattatgact

SEQ ID NO: 36059 - DNA, 26 bp, Homo sapiens
cagaacaacattaaatattatgactc

SEQ ID NO: 36060 - DNA, 26 bp, Homo sapiens
agaacaacattaaatattatgactca

SEQ ID NO: 36061 - DNA, 26 bp, Homo sapiens
gaacaacattaaatattatgactcaa

SEQ ID NO: 36062 - DNA, 26 bp, Homo sapiens
aacaacattaaatattatgactcaaa

SEQ ID NO: 36063 - DNA, 26 bp, Homo sapiens
acaacattaaatattatgactcaaaa

SEQ ID NO: 36064 - DNA, 26 bp, Homo sapiens
caacattaaatattatgactcaaaag

SEQ ID NO: 36065 - DNA, 26 bp, Homo sapiens
aacattaaatattatgactcaaaagc

SEQ ID NO: 36066 - DNA, 26 bp, Homo sapiens
acattaaatattatgactcaaaagca

SEQ ID NO: 36067 - DNA, 26 bp, Homo sapiens
cattaaatattatgactcaaaagcag

SEQ ID NO: 36068 - DNA, 26 bp, Homo sapiens
attaaatattatgactcaaaagcagg

SEQ ID NO: 36069 - DNA, 26 bp, Homo sapiens
ttaaatattatgactcaaaagcaggg

SEQ ID NO: 36070 - DNA, 26 bp, Homo sapiens
taaatattatgactcaaaagcaggga

SEQ ID NO: 36071 - DNA, 26 bp, Homo sapiens
aaatattatgactcaaaagcagggac

SEQ ID NO: 36072 - DNA, 26 bp, Homo sapiens
aatattatgactcaaaagcagggaca

SEQ ID NO: 36073 - DNA, 26 bp, Homo sapiens
atattatgactcaaaagcagggacag

SEQ ID NO: 36074 - DNA, 26 bp, Homo sapiens
tattatgactcaaaagcagggacagg

SEQ ID NO: 36075 - DNA, 26 bp, Homo sapiens
attatgactcaaaagcagggacaggt

SEQ ID NO: 36076 - DNA, 26 bp, Homo sapiens
ttatgactcaaaagcagggacaggta

SEQ ID NO: 36077 - DNA, 26 bp, Homo sapiens
tatgactcaaaagcagggacaggtaa

SEQ ID NO: 36078 - DNA, 26 bp, Homo sapiens
atgactcaaaagcagggacaggtaaa

SEQ ID NO: 36079 - DNA, 26 bp, Homo sapiens
tgactcaaaagcagggacaggtaaat

SEQ ID NO: 36080 - DNA, 26 bp, Homo sapiens
gactcaaaagcagggacaggtaaatt

SEQ ID NO: 36081 - DNA, 26 bp, Homo sapiens
actcaaaagcagggacaggtaaattt

SEQ ID NO: 36082 - DNA, 26 bp, Homo sapiens
ctcaaaagcagggacaggtaaatttg

SEQ ID NO: 36083 - DNA, 26 bp, Homo sapiens
tcaaaagcagggacaggtaaatttga

SEQ ID NO: 36084 - DNA, 26 bp, Homo sapiens
caaaagcagggacaggtaaatttgaa

SEQ ID NO: 36085 - DNA, 26 bp, Homo sapiens
aaaagcagggacaggtaaatttgaaa

SEQ ID NO: 36086 - DNA, 26 bp, Homo sapiens
aaagcagggacaggtaaatttgaaag

SEQ ID NO: 36087 - DNA, 26 bp, Homo sapiens
aagcagggacaggtaaatttgaaaga

SEQ ID NO: 36088 - DNA, 26 bp, Homo sapiens
agcagggacaggtaaatttgaaagaa

SEQ ID NO: 36089 - DNA, 26 bp, Homo sapiens
gcagggacaggtaaatttgaaagaag

SEQ ID NO: 36090 - DNA, 26 bp, Homo sapiens
cagggacaggtaaatttgaaagaaga

SEQ ID NO: 36091 - DNA, 26 bp, Homo sapiens
agggacaggtaaatttgaaagaagag

SEQ ID NO: 36092 - DNA, 26 bp, Homo sapiens
gggacaggtaaatttgaaagaagagt

SEQ ID NO: 36093 - DNA, 26 bp, Homo sapiens
ggacaggtaaatttgaaagaagagta

SEQ ID NO: 36094 - DNA, 26 bp, Homo sapiens
gacaggtaaatttgaaagaagagtaa

SEQ ID NO: 36095 - DNA, 26 bp, Homo sapiens
acaggtaaatttgaaagaagagtaag

SEQ ID NO: 36096 - DNA, 26 bp, Homo sapiens
caggtaaatttgaaagaagagtaaga

SEQ ID NO: 36097 - DNA, 26 bp, Homo sapiens
aggtaaatttgaaagaagagtaagag

SEQ ID NO: 36098 - DNA, 26 bp, Homo sapiens
ggtaaatttgaaagaagagtaagaga

SEQ ID NO: 36099 - DNA, 26 bp, Homo sapiens
gtaaatttgaaagaagagtaagagag

SEQ ID NO: 36100 - DNA, 26 bp, Homo sapiens
taaatttgaaagaagagtaagagaga

SEQ ID NO: 36101 - DNA, 26 bp, Homo sapiens
aaatttgaaagaagagtaagagagaa

SEQ ID NO: 36102 - DNA, 26 bp, Homo sapiens
aatttgaaagaagagtaagagagaaa

SEQ ID NO: 36103 - DNA, 26 bp, Homo sapiens
atttgaaagaagagtaagagagaaaa

SEQ ID NO: 36104 - DNA, 26 bp, Homo sapiens
tttgaaagaagagtaagagagaaaat

SEQ ID NO: 36105 - DNA, 26 bp, Homo sapiens
ttgaaagaagagtaagagagaaaatg

SEQ ID NO: 36106 - DNA, 26 bp, Homo sapiens
tgaaagaagagtaagagagaaaatgt

SEQ ID NO: 36107 - DNA, 26 bp, Homo sapiens
gaaagaagagtaagagagaaaatgtt

SEQ ID NO: 36108 - DNA, 26 bp, Homo sapiens
aaagaagagtaagagagaaaatgttt

SEQ ID NO: 36109 - DNA, 26 bp, Homo sapiens
aagaagagtaagagagaaaatgttta

SEQ ID NO: 36110 - DNA, 26 bp, Homo sapiens
agaagagtaagagagaaaatgtttac

SEQ ID NO: 36111 - DNA, 26 bp, Homo sapiens
gaagagtaagagagaaaatgtttaca

SEQ ID NO: 36112 - DNA, 26 bp, Homo sapiens
aagagtaagagagaaaatgtttacag

SEQ ID NO: 36113 - DNA, 26 bp, Homo sapiens
agagtaagagagaaaatgtttacagg

SEQ ID NO: 36114 - DNA, 26 bp, Homo sapiens
gagtaagagagaaaatgtttacaggc

SEQ ID NO: 36115 - DNA, 26 bp, Homo sapiens
agtaagagagaaaatgtttacaggcc

SEQ ID NO: 36116 - DNA, 26 bp, Homo sapiens
gtaagagagaaaatgtttacaggccg

SEQ ID NO: 36117 - DNA, 26 bp, Homo sapiens
taagagagaaaatgtttacaggccgt

SEQ ID NO: 36118 - DNA, 26 bp, Homo sapiens
aagagagaaaatgtttacaggccgtt

SEQ ID NO: 36119 - DNA, 26 bp, Homo sapiens
agagagaaaatgtttacaggccgtta

SEQ ID NO: 36120 - DNA, 26 bp, Homo sapiens
gagagaaaatgtttacaggccgttac

SEQ ID NO: 36121 - DNA, 26 bp, Homo sapiens
agagaaaatgtttacaggccgttaca

SEQ ID NO: 36122 - DNA, 26 bp, Homo sapiens
gagaaaatgtttacaggccgttacaa

SEQ ID NO: 36123 - DNA, 26 bp, Homo sapiens
agaaaatgtttacaggccgttacaag

SEQ ID NO: 36124 - DNA, 26 bp, Homo sapiens
gaaaatgtttacaggccgttacaagt

SEQ ID NO: 36125 - DNA, 26 bp, Homo sapiens
aaaatgtttacaggccgttacaagtt

SEQ ID NO: 36126 - DNA, 26 bp, Homo sapiens
aaatgtttacaggccgttacaagttc

SEQ ID NO: 36127 - DNA, 26 bp, Homo sapiens
aatgtttacaggccgttacaagttct

SEQ ID NO: 36128 - DNA, 26 bp, Homo sapiens
atgtttacaggccgttacaagttctt

SEQ ID NO: 36129 - DNA, 26 bp, Homo sapiens
tgtttacaggccgttacaagttctta

SEQ ID NO: 36130 - DNA, 26 bp, Homo sapiens
gtttacaggccgttacaagttcttaa

SEQ ID NO: 36131 - DNA, 26 bp, Homo sapiens
tttacaggccgttacaagttcttaag

SEQ ID NO: 36132 - DNA, 26 bp, Homo sapiens
ttacaggccgttacaagttcttaagt

SEQ ID NO: 36133 - DNA, 26 bp, Homo sapiens
tacaggccgttacaagttcttaagtt

SEQ ID NO: 36134 - DNA, 26 bp, Homo sapiens
acaggccgttacaagttcttaagtta

SEQ ID NO: 36135 - DNA, 26 bp, Homo sapiens
caggccgttacaagttcttaagttaa

SEQ ID NO: 36136 - DNA, 26 bp, Homo sapiens
aggccgttacaagttcttaagttaat

SEQ ID NO: 36137 - DNA, 26 bp, Homo sapiens
ggccgttacaagttcttaagttaata

SEQ ID NO: 36138 - DNA, 26 bp, Homo sapiens
gccgttacaagttcttaagttaatag

SEQ ID NO: 36139 - DNA, 26 bp, Homo sapiens
ccgttacaagttcttaagttaatagt

SEQ ID NO: 36140 - DNA, 26 bp, Homo sapiens
cgttacaagttcttaagttaatagta

SEQ ID NO: 36141 - DNA, 26 bp, Homo sapiens
gttacaagttcttaagttaatagtaa

SEQ ID NO: 36142 - DNA, 26 bp, Homo sapiens
ttacaagttcttaagttaatagtaaa

SEQ ID NO: 36143 - DNA, 26 bp, Homo sapiens
tacaagttcttaagttaatagtaaat

SEQ ID NO: 36144 - DNA, 26 bp, Homo sapiens
acaagttcttaagttaatagtaaata

SEQ ID NO: 36145 - DNA, 26 bp, Homo sapiens
caagttcttaagttaatagtaaataa

SEQ ID NO: 36146 - DNA, 26 bp, Homo sapiens
aagttcttaagttaatagtaaataag

SEQ ID NO: 36147 - DNA, 26 bp, Homo sapiens
agttcttaagttaatagtaaataagg

SEQ ID NO: 36148 - DNA, 26 bp, Homo sapiens
gttcttaagttaatagtaaataagga

SEQ ID NO: 36149 - DNA, 26 bp, Homo sapiens
ttcttaagttaatagtaaataaggaa

SEQ ID NO: 36150 - DNA, 26 bp, Homo sapiens
tcttaagttaatagtaaataaggaat

SEQ ID NO: 36151 - DNA, 26 bp, Homo sapiens
cttaagttaatagtaaataaggaatc

SEQ ID NO: 36152 - DNA, 26 bp, Homo sapiens
ttaagttaatagtaaataaggaatcg

SEQ ID NO: 36153 - DNA, 26 bp, Homo sapiens
taagttaatagtaaataaggaatcga

SEQ ID NO: 36154 - DNA, 26 bp, Homo sapiens
aagttaatagtaaataaggaatcgat

SEQ ID NO: 36155 - DNA, 26 bp, Homo sapiens
agttaatagtaaataaggaatcgatt

SEQ ID NO: 36156 - DNA, 26 bp, Homo sapiens
gttaatagtaaataaggaatcgattg

SEQ ID NO: 36157 - DNA, 26 bp, Homo sapiens
ttaatagtaaataaggaatcgattgc

SEQ ID NO: 36158 - DNA, 26 bp, Homo sapiens
taatagtaaataaggaatcgattgct

SEQ ID NO: 36159 - DNA, 26 bp, Homo sapiens
aatagtaaataaggaatcgattgctc

SEQ ID NO: 36160 - DNA, 26 bp, Homo sapiens
atagtaaataaggaatcgattgctca

SEQ ID NO: 36161 - DNA, 26 bp, Homo sapiens
tagtaaataaggaatcgattgctcaa

SEQ ID NO: 36162 - DNA, 26 bp, Homo sapiens
agtaaataaggaatcgattgctcaag

SEQ ID NO: 36163 - DNA, 26 bp, Homo sapiens
gtaaataaggaatcgattgctcaagt

SEQ ID NO: 36164 - DNA, 26 bp, Homo sapiens
taaataaggaatcgattgctcaagtt

SEQ ID NO: 36165 - DNA, 26 bp, Homo sapiens
aaataaggaatcgattgctcaagttg

SEQ ID NO: 36166 - DNA, 26 bp, Homo sapiens
aataaggaatcgattgctcaagttga

SEQ ID NO: 36167 - DNA, 26 bp, Homo sapiens
ataaggaatcgattgctcaagttgaa

SEQ ID NO: 36168 - DNA, 26 bp, Homo sapiens
taaggaatcgattgctcaagttgaag

SEQ ID NO: 36169 - DNA, 26 bp, Homo sapiens
aaggaatcgattgctcaagttgaaga

SEQ ID NO: 36170 - DNA, 26 bp, Homo sapiens
aggaatcgattgctcaagttgaagaa

SEQ ID NO: 36171 - DNA, 26 bp, Homo sapiens
ggaatcgattgctcaagttgaagaaa

SEQ ID NO: 36172 - DNA, 26 bp, Homo sapiens
gaatcgattgctcaagttgaagaaag

SEQ ID NO: 36173 - DNA, 26 bp, Homo sapiens
aatcgattgctcaagttgaagaaagc

SEQ ID NO: 36174 - DNA, 26 bp, Homo sapiens
atcgattgctcaagttgaagaaagca

SEQ ID NO: 36175 - DNA, 26 bp, Homo sapiens
tcgattgctcaagttgaagaaagcag

SEQ ID NO: 36176 - DNA, 26 bp, Homo sapiens
cgattgctcaagttgaagaaagcagt

SEQ ID NO: 36177 - DNA, 26 bp, Homo sapiens
gattgctcaagttgaagaaagcagta

SEQ ID NO: 36178 - DNA, 26 bp, Homo sapiens
attgctcaagttgaagaaagcagtaa

SEQ ID NO: 36179 - DNA, 26 bp, Homo sapiens
ttgctcaagttgaagaaagcagtaaa

SEQ ID NO: 36180 - DNA, 26 bp, Homo sapiens
tgctcaagttgaagaaagcagtaaac

SEQ ID NO: 36181 - DNA, 26 bp, Homo sapiens
gctcaagttgaagaaagcagtaaaca

SEQ ID NO: 36182 - DNA, 26 bp, Homo sapiens
ctcaagttgaagaaagcagtaaacaa

SEQ ID NO: 36183 - DNA, 26 bp, Homo sapiens
tcaagttgaagaaagcagtaaacaag

SEQ ID NO: 36184 - DNA, 26 bp, Homo sapiens
caagttgaagaaagcagtaaacaaga

SEQ ID NO: 36185 - DNA, 26 bp, Homo sapiens
aagttgaagaaagcagtaaacaagag

SEQ ID NO: 36186 - DNA, 26 bp, Homo sapiens
agttgaagaaagcagtaaacaagaga

SEQ ID NO: 36187 - DNA, 26 bp, Homo sapiens
gttgaagaaagcagtaaacaagagat

SEQ ID NO: 36188 - DNA, 26 bp, Homo sapiens
ttgaagaaagcagtaaacaagagatt

SEQ ID NO: 36189 - DNA, 26 bp, Homo sapiens
tgaagaaagcagtaaacaagagattg

SEQ ID NO: 36190 - DNA, 26 bp, Homo sapiens
gaagaaagcagtaaacaagagattgc

SEQ ID NO: 36191 - DNA, 26 bp, Homo sapiens
aagaaagcagtaaacaagagattgca

SEQ ID NO: 36192 - DNA, 26 bp, Homo sapiens
agaaagcagtaaacaagagattgcat

SEQ ID NO: 36193 - DNA, 26 bp, Homo sapiens
gaaagcagtaaacaagagattgcatt

SEQ ID NO: 36194 - DNA, 26 bp, Homo sapiens
aaagcagtaaacaagagattgcattt

SEQ ID NO: 36195 - DNA, 26 bp, Homo sapiens
aagcagtaaacaagagattgcattta

SEQ ID NO: 36196 - DNA, 26 bp, Homo sapiens
agcagtaaacaagagattgcatttac

SEQ ID NO: 36197 - DNA, 26 bp, Homo sapiens
gcagtaaacaagagattgcatttaca

SEQ ID NO: 36198 - DNA, 26 bp, Homo sapiens
cagtaaacaagagattgcatttacat

SEQ ID NO: 36199 - DNA, 26 bp, Homo sapiens
agtaaacaagagattgcatttacatg

SEQ ID NO: 36200 - DNA, 26 bp, Homo sapiens
gtaaacaagagattgcatttacatgc

SEQ ID NO: 36201 - DNA, 26 bp, Homo sapiens
taaacaagagattgcatttacatgca

SEQ ID NO: 36202 - DNA, 26 bp, Homo sapiens
aaacaagagattgcatttacatgcag

SEQ ID NO: 36203 - DNA, 26 bp, Homo sapiens
aacaagagattgcatttacatgcaga

SEQ ID NO: 36204 - DNA, 26 bp, Homo sapiens
acaagagattgcatttacatgcagat

SEQ ID NO: 36205 - DNA, 26 bp, Homo sapiens
caagagattgcatttacatgcagatg

SEQ ID NO: 36206 - DNA, 26 bp, Homo sapiens
aagagattgcatttacatgcagatgt

SEQ ID NO: 36207 - DNA, 26 bp, Homo sapiens
agagattgcatttacatgcagatgtc

SEQ ID NO: 36208 - DNA, 26 bp, Homo sapiens
gagattgcatttacatgcagatgtct

SEQ ID NO: 36209 - DNA, 26 bp, Homo sapiens
agattgcatttacatgcagatgtcta

SEQ ID NO: 36210 - DNA, 26 bp, Homo sapiens
gattgcatttacatgcagatgtctaa

SEQ ID NO: 36211 - DNA, 26 bp, Homo sapiens
attgcatttacatgcagatgtctaaa

SEQ ID NO: 36212 - DNA, 26 bp, Homo sapiens
ttgcatttacatgcagatgtctaaaa

SEQ ID NO: 36213 - DNA, 26 bp, Homo sapiens
tgcatttacatgcagatgtctaaaat

SEQ ID NO: 36214 - DNA, 26 bp, Homo sapiens
gcatttacatgcagatgtctaaaatt

SEQ ID NO: 36215 - DNA, 26 bp, Homo sapiens
catttacatgcagatgtctaaaattt

SEQ ID NO: 36216 - DNA, 26 bp, Homo sapiens
atttacatgcagatgtctaaaatttg

SEQ ID NO: 36217 - DNA, 26 bp, Homo sapiens
tttacatgcagatgtctaaaatttgt

SEQ ID NO: 36218 - DNA, 26 bp, Homo sapiens
ttacatgcagatgtctaaaatttgta

SEQ ID NO: 36219 - DNA, 26 bp, Homo sapiens
tacatgcagatgtctaaaatttgtat

SEQ ID NO: 36220 - DNA, 26 bp, Homo sapiens
acatgcagatgtctaaaatttgtatt

SEQ ID NO: 36221 - DNA, 26 bp, Homo sapiens
catgcagatgtctaaaatttgtattt

SEQ ID NO: 36222 - DNA, 26 bp, Homo sapiens
atgcagatgtctaaaatttgtatttt

SEQ ID NO: 36223 - DNA, 26 bp, Homo sapiens
tgcagatgtctaaaatttgtattttt

SEQ ID NO: 36224 - DNA, 26 bp, Homo sapiens
gcagatgtctaaaatttgtatttttt

SEQ ID NO: 36225 - DNA, 26 bp, Homo sapiens
cagatgtctaaaatttgtatttttta

SEQ ID NO: 36226 - DNA, 26 bp, Homo sapiens
agatgtctaaaatttgtattttttaa

SEQ ID NO: 36227 - DNA, 26 bp, Homo sapiens
gatgtctaaaatttgtattttttaag

SEQ ID NO: 36228 - DNA, 26 bp, Homo sapiens
atgtctaaaatttgtattttttaagt

SEQ ID NO: 36229 - DNA, 26 bp, Homo sapiens
tgtctaaaatttgtattttttaagtc

SEQ ID NO: 36230 - DNA, 26 bp, Homo sapiens
gtctaaaatttgtattttttaagtct

SEQ ID NO: 36231 - DNA, 26 bp, Homo sapiens
tctaaaatttgtattttttaagtcta

SEQ ID NO: 36232 - DNA, 26 bp, Homo sapiens
ctaaaatttgtattttttaagtctat

SEQ ID NO: 36233 - DNA, 26 bp, Homo sapiens
taaaatttgtattttttaagtctatg

SEQ ID NO: 36234 - DNA, 26 bp, Homo sapiens
aaaatttgtattttttaagtctatgc

SEQ ID NO: 36235 - DNA, 26 bp, Homo sapiens
aaatttgtattttttaagtctatgca

SEQ ID NO: 36236 - DNA, 26 bp, Homo sapiens
aatttgtattttttaagtctatgcac

SEQ ID NO: 36237 - DNA, 26 bp, Homo sapiens
atttgtattttttaagtctatgcaca

SEQ ID NO: 36238 - DNA, 26 bp, Homo sapiens
tttgtattttttaagtctatgcacaa

SEQ ID NO: 36239 - DNA, 26 bp, Homo sapiens
ttgtattttttaagtctatgcacaaa

SEQ ID NO: 36240 - DNA, 26 bp, Homo sapiens
tgtattttttaagtctatgcacaaaa

SEQ ID NO: 36241 - DNA, 26 bp, Homo sapiens
gtattttttaagtctatgcacaaaag

SEQ ID NO: 36242 - DNA, 26 bp, Homo sapiens
tattttttaagtctatgcacaaaagt

SEQ ID NO: 36243 - DNA, 26 bp, Homo sapiens
attttttaagtctatgcacaaaagtc

SEQ ID NO: 36244 - DNA, 26 bp, Homo sapiens
ttttttaagtctatgcacaaaagtca

SEQ ID NO: 36245 - DNA, 26 bp, Homo sapiens
tttttaagtctatgcacaaaagtcat

SEQ ID NO: 36246 - DNA, 26 bp, Homo sapiens
ttttaagtctatgcacaaaagtcatt

SEQ ID NO: 36247 - DNA, 26 bp, Homo sapiens
tttaagtctatgcacaaaagtcattt

SEQ ID NO: 36248 - DNA, 26 bp, Homo sapiens
ttaagtctatgcacaaaagtcatttg

SEQ ID NO: 36249 - DNA, 26 bp, Homo sapiens
taagtctatgcacaaaagtcatttgt

SEQ ID NO: 36250 - DNA, 26 bp, Homo sapiens
aagtctatgcacaaaagtcatttgtt

SEQ ID NO: 36251 - DNA, 26 bp, Homo sapiens
agtctatgcacaaaagtcatttgttt

SEQ ID NO: 36252 - DNA, 26 bp, Homo sapiens
gtctatgcacaaaagtcatttgtttt

SEQ ID NO: 36253 - DNA, 26 bp, Homo sapiens
tctatgcacaaaagtcatttgtttta

SEQ ID NO: 36254 - DNA, 26 bp, Homo sapiens
ctatgcacaaaagtcatttgttttat

SEQ ID NO: 36255 - DNA, 26 bp, Homo sapiens
tatgcacaaaagtcatttgttttatt

SEQ ID NO: 36256 - DNA, 26 bp, Homo sapiens
atgcacaaaagtcatttgttttattg

SEQ ID NO: 36257 - DNA, 26 bp, Homo sapiens
tgcacaaaagtcatttgttttattgc

SEQ ID NO: 36258 - DNA, 26 bp, Homo sapiens
gcacaaaagtcatttgttttattgct

SEQ ID NO: 36259 - DNA, 26 bp, Homo sapiens
cacaaaagtcatttgttttattgctt

SEQ ID NO: 36260 - DNA, 26 bp, Homo sapiens
acaaaagtcatttgttttattgcttg

SEQ ID NO: 36261 - DNA, 26 bp, Homo sapiens
caaaagtcatttgttttattgcttga

SEQ ID NO: 36262 - DNA, 26 bp, Homo sapiens
aaaagtcatttgttttattgcttgac

SEQ ID NO: 36263 - DNA, 26 bp, Homo sapiens
aaagtcatttgttttattgcttgaca

SEQ ID NO: 36264 - DNA, 26 bp, Homo sapiens
aagtcatttgttttattgcttgacat

SEQ ID NO: 36265 - DNA, 26 bp, Homo sapiens
agtcatttgttttattgcttgacatt

SEQ ID NO: 36266 - DNA, 26 bp, Homo sapiens
gtcatttgttttattgcttgacattc

SEQ ID NO: 36267 - DNA, 26 bp, Homo sapiens
tcatttgttttattgcttgacattca

SEQ ID NO: 36268 - DNA, 26 bp, Homo sapiens
catttgttttattgcttgacattcag

SEQ ID NO: 36269 - DNA, 26 bp, Homo sapiens
atttgttttattgcttgacattcagt

SEQ ID NO: 36270 - DNA, 26 bp, Homo sapiens
tttgttttattgcttgacattcagtt

SEQ ID NO: 36271 - DNA, 26 bp, Homo sapiens
ttgttttattgcttgacattcagtta

SEQ ID NO: 36272 - DNA, 26 bp, Homo sapiens
tgttttattgcttgacattcagttat

SEQ ID NO: 36273 - DNA, 26 bp, Homo sapiens
gttttattgcttgacattcagttatg

SEQ ID NO: 36274 - DNA, 26 bp, Homo sapiens
ttttattgcttgacattcagttatgg

SEQ ID NO: 36275 - DNA, 26 bp, Homo sapiens
tttattgcttgacattcagttatggc

SEQ ID NO: 36276 - DNA, 26 bp, Homo sapiens
ttattgcttgacattcagttatggct

SEQ ID NO: 36277 - DNA, 26 bp, Homo sapiens
tattgcttgacattcagttatggcta

SEQ ID NO: 36278 - DNA, 26 bp, Homo sapiens
attgcttgacattcagttatggctag

SEQ ID NO: 36279 - DNA, 26 bp, Homo sapiens
ttgcttgacattcagttatggctaga

SEQ ID NO: 36280 - DNA, 26 bp, Homo sapiens
tgcttgacattcagttatggctagat

SEQ ID NO: 36281 - DNA, 26 bp, Homo sapiens
gcttgacattcagttatggctagatt

SEQ ID NO: 36282 - DNA, 26 bp, Homo sapiens
cttgacattcagttatggctagatta

SEQ ID NO: 36283 - DNA, 26 bp, Homo sapiens
ttgacattcagttatggctagattat

SEQ ID NO: 36284 - DNA, 26 bp, Homo sapiens
tgacattcagttatggctagattatt

SEQ ID NO: 36285 - DNA, 26 bp, Homo sapiens
gacattcagttatggctagattattt

SEQ ID NO: 36286 - DNA, 26 bp, Homo sapiens
acattcagttatggctagattattta

SEQ ID NO: 36287 - DNA, 26 bp, Homo sapiens
cattcagttatggctagattatttaa

SEQ ID NO: 36288 - DNA, 26 bp, Homo sapiens
attcagttatggctagattatttaac

SEQ ID NO: 36289 - DNA, 26 bp, Homo sapiens
ttcagttatggctagattatttaacc

SEQ ID NO: 36290 - DNA, 26 bp, Homo sapiens
tcagttatggctagattatttaacct

SEQ ID NO: 36291 - DNA, 26 bp, Homo sapiens
cagttatggctagattatttaaccta

SEQ ID NO: 36292 - DNA, 26 bp, Homo sapiens
agttatggctagattatttaacctat

SEQ ID NO: 36293 - DNA, 26 bp, Homo sapiens
gttatggctagattatttaacctatt

SEQ ID NO: 36294 - DNA, 26 bp, Homo sapiens
ttatggctagattatttaacctattt

SEQ ID NO: 36295 - DNA, 26 bp, Homo sapiens
tatggctagattatttaacctatttt

SEQ ID NO: 36296 - DNA, 26 bp, Homo sapiens
atggctagattatttaacctattttt

SEQ ID NO: 36297 - DNA, 26 bp, Homo sapiens
tggctagattatttaacctatttttt

SEQ ID NO: 36298 - DNA, 26 bp, Homo sapiens
ggctagattatttaacctattttttt

SEQ ID NO: 36299 - DNA, 26 bp, Homo sapiens
gctagattatttaacctatttttttt

SEQ ID NO: 36300 - DNA, 26 bp, Homo sapiens
ctagattatttaacctattttttttg

SEQ ID NO: 36301 - DNA, 26 bp, Homo sapiens
tagattatttaacctattttttttgt

SEQ ID NO: 36302 - DNA, 26 bp, Homo sapiens
agattatttaacctattttttttgta

SEQ ID NO: 36303 - DNA, 26 bp, Homo sapiens
gattatttaacctattttttttgtac

SEQ ID NO: 36304 - DNA, 26 bp, Homo sapiens
attatttaacctattttttttgtact

SEQ ID NO: 36305 - DNA, 26 bp, Homo sapiens
ttatttaacctattttttttgtactt

SEQ ID NO: 36306 - DNA, 26 bp, Homo sapiens
tatttaacctattttttttgtacttt

SEQ ID NO: 36307 - DNA, 26 bp, Homo sapiens
atttaacctattttttttgtactttg

SEQ ID NO: 36308 - DNA, 26 bp, Homo sapiens
tttaacctattttttttgtactttgg

SEQ ID NO: 36309 - DNA, 26 bp, Homo sapiens
ttaacctattttttttgtactttgga

SEQ ID NO: 36310 - DNA, 26 bp, Homo sapiens
taacctattttttttgtactttggaa

SEQ ID NO: 36311 - DNA, 26 bp, Homo sapiens
aacctattttttttgtactttggaaa

SEQ ID NO: 36312 - DNA, 26 bp, Homo sapiens
acctattttttttgtactttggaaac

SEQ ID NO: 36313 - DNA, 26 bp, Homo sapiens
cctattttttttgtactttggaaaca

SEQ ID NO: 36314 - DNA, 26 bp, Homo sapiens
ctattttttttgtactttggaaacaa

SEQ ID NO: 36315 - DNA, 26 bp, Homo sapiens
tattttttttgtactttggaaacaag

SEQ ID NO: 36316 - DNA, 26 bp, Homo sapiens
attttttttgtactttggaaacaaga

SEQ ID NO: 36317 - DNA, 26 bp, Homo sapiens
ttttttttgtactttggaaacaagaa

SEQ ID NO: 36318 - DNA, 26 bp, Homo sapiens
tttttttgtactttggaaacaagaat

SEQ ID NO: 36319 - DNA, 26 bp, Homo sapiens
ttttttgtactttggaaacaagaata

SEQ ID NO: 36320 - DNA, 26 bp, Homo sapiens
tttttgtactttggaaacaagaatat

SEQ ID NO: 36321 - DNA, 26 bp, Homo sapiens
ttttgtactttggaaacaagaatatt

SEQ ID NO: 36322 - DNA, 26 bp, Homo sapiens
tttgtactttggaaacaagaatattg

SEQ ID NO: 36323 - DNA, 26 bp, Homo sapiens
ttgtactttggaaacaagaatattgt

SEQ ID NO: 36324 - DNA, 26 bp, Homo sapiens
tgtactttggaaacaagaatattgtt

SEQ ID NO: 36325 - DNA, 26 bp, Homo sapiens
gtactttggaaacaagaatattgtta

SEQ ID NO: 36326 - DNA, 26 bp, Homo sapiens
tactttggaaacaagaatattgttaa

SEQ ID NO: 36327 - DNA, 26 bp, Homo sapiens
actttggaaacaagaatattgttaaa

SEQ ID NO: 36328 - DNA, 26 bp, Homo sapiens
ctttggaaacaagaatattgttaaag

SEQ ID NO: 36329 - DNA, 26 bp, Homo sapiens
tttggaaacaagaatattgttaaagg

SEQ ID NO: 36330 - DNA, 26 bp, Homo sapiens
ttggaaacaagaatattgttaaaggt

SEQ ID NO: 36331 - DNA, 26 bp, Homo sapiens
tggaaacaagaatattgttaaaggtg

SEQ ID NO: 36332 - DNA, 26 bp, Homo sapiens
ggaaacaagaatattgttaaaggtgc

SEQ ID NO: 36333 - DNA, 26 bp, Homo sapiens
gaaacaagaatattgttaaaggtgcc

SEQ ID NO: 36334 - DNA, 26 bp, Homo sapiens
aaacaagaatattgttaaaggtgcca

SEQ ID NO: 36335 - DNA, 26 bp, Homo sapiens
aacaagaatattgttaaaggtgccat

SEQ ID NO: 36336 - DNA, 26 bp, Homo sapiens
acaagaatattgttaaaggtgccata

SEQ ID NO: 36337 - DNA, 26 bp, Homo sapiens
caagaatattgttaaaggtgccataa

SEQ ID NO: 36338 - DNA, 26 bp, Homo sapiens
aagaatattgttaaaggtgccataaa

SEQ ID NO: 36339 - DNA, 26 bp, Homo sapiens
agaatattgttaaaggtgccataaaa

SEQ ID NO: 36340 - DNA, 26 bp, Homo sapiens
gaatattgttaaaggtgccataaaaa

SEQ ID NO: 36341 - DNA, 26 bp, Homo sapiens
aatattgttaaaggtgccataaaaat

SEQ ID NO: 36342 - DNA, 26 bp, Homo sapiens
atattgttaaaggtgccataaaaatg

SEQ ID NO: 36343 - DNA, 26 bp, Homo sapiens
tattgttaaaggtgccataaaaatgg

SEQ ID NO: 36344 - DNA, 26 bp, Homo sapiens
attgttaaaggtgccataaaaatgga

SEQ ID NO: 36345 - DNA, 26 bp, Homo sapiens
ttgttaaaggtgccataaaaatggac

SEQ ID NO: 36346 - DNA, 26 bp, Homo sapiens
tgttaaaggtgccataaaaatggaca

SEQ ID NO: 36347 - DNA, 26 bp, Homo sapiens
gttaaaggtgccataaaaatggacaa

SEQ ID NO: 36348 - DNA, 26 bp, Homo sapiens
ttaaaggtgccataaaaatggacaac

SEQ ID NO: 36349 - DNA, 26 bp, Homo sapiens
taaaggtgccataaaaatggacaaca

SEQ ID NO: 36350 - DNA, 26 bp, Homo sapiens
aaaggtgccataaaaatggacaacac

SEQ ID NO: 36351 - DNA, 26 bp, Homo sapiens
aaggtgccataaaaatggacaacact

SEQ ID NO: 36352 - DNA, 26 bp, Homo sapiens
aggtgccataaaaatggacaacactg

SEQ ID NO: 36353 - DNA, 26 bp, Homo sapiens
ggtgccataaaaatggacaacactga

SEQ ID NO: 36354 - DNA, 26 bp, Homo sapiens
gtgccataaaaatggacaacactgaa

SEQ ID NO: 36355 - DNA, 26 bp, Homo sapiens
tgccataaaaatggacaacactgaaa

SEQ ID NO: 36356 - DNA, 26 bp, Homo sapiens
gccataaaaatggacaacactgaaaa

SEQ ID NO: 36357 - DNA, 26 bp, Homo sapiens
ccataaaaatggacaacactgaaaac

SEQ ID NO: 36358 - DNA, 26 bp, Homo sapiens
cataaaaatggacaacactgaaaaca

SEQ ID NO: 36359 - DNA, 26 bp, Homo sapiens
ataaaaatggacaacactgaaaacag

SEQ ID NO: 36360 - DNA, 26 bp, Homo sapiens
taaaaatggacaacactgaaaacagt

SEQ ID NO: 36361 - DNA, 26 bp, Homo sapiens
aaaaatggacaacactgaaaacagtt

SEQ ID NO: 36362 - DNA, 26 bp, Homo sapiens
aaaatggacaacactgaaaacagttt

SEQ ID NO: 36363 - DNA, 26 bp, Homo sapiens
aaatggacaacactgaaaacagtttg

SEQ ID NO: 36364 - DNA, 26 bp, Homo sapiens
aatggacaacactgaaaacagtttgc

SEQ ID NO: 36365 - DNA, 26 bp, Homo sapiens
atggacaacactgaaaacagtttgca

SEQ ID NO: 36366 - DNA, 26 bp, Homo sapiens
tggacaacactgaaaacagtttgcaa

SEQ ID NO: 36367 - DNA, 26 bp, Homo sapiens
ggacaacactgaaaacagtttgcaaa

SEQ ID NO: 36368 - DNA, 26 bp, Homo sapiens
gacaacactgaaaacagtttgcaaat

SEQ ID NO: 36369 - DNA, 26 bp, Homo sapiens
acaacactgaaaacagtttgcaaata

SEQ ID NO: 36370 - DNA, 26 bp, Homo sapiens
caacactgaaaacagtttgcaaataa

SEQ ID NO: 36371 - DNA, 26 bp, Homo sapiens
aacactgaaaacagtttgcaaataaa

SEQ ID NO: 36372 - DNA, 26 bp, Homo sapiens
acactgaaaacagtttgcaaataaac

SEQ ID NO: 36373 - DNA, 26 bp, Homo sapiens
cactgaaaacagtttgcaaataaacc

SEQ ID NO: 36374 - DNA, 26 bp, Homo sapiens
actgaaaacagtttgcaaataaacca

SEQ ID NO: 36375 - DNA, 26 bp, Homo sapiens
ctgaaaacagtttgcaaataaaccac

SEQ ID NO: 36376 - DNA, 26 bp, Homo sapiens
tgaaaacagtttgcaaataaaccacc

SEQ ID NO: 36377 - DNA, 26 bp, Homo sapiens
gaaaacagtttgcaaataaaccacct

SEQ ID NO: 36378 - DNA, 26 bp, Homo sapiens
aaaacagtttgcaaataaaccaccta

SEQ ID NO: 36379 - DNA, 26 bp, Homo sapiens
aaacagtttgcaaataaaccacctaa

SEQ ID NO: 36380 - DNA, 26 bp, Homo sapiens
aacagtttgcaaataaaccacctaac

SEQ ID NO: 36381 - DNA, 26 bp, Homo sapiens
acagtttgcaaataaaccacctaaca

SEQ ID NO: 36382 - DNA, 26 bp, Homo sapiens
cagtttgcaaataaaccacctaacac

SEQ ID NO: 36383 - DNA, 26 bp, Homo sapiens
agtttgcaaataaaccacctaacact

SEQ ID NO: 36384 - DNA, 26 bp, Homo sapiens
gtttgcaaataaaccacctaacactg

SEQ ID NO: 36385 - DNA, 26 bp, Homo sapiens
tttgcaaataaaccacctaacactgc

SEQ ID NO: 36386 - DNA, 26 bp, Homo sapiens
ttgcaaataaaccacctaacactgca

SEQ ID NO: 36387 - DNA, 26 bp, Homo sapiens
tgcaaataaaccacctaacactgcag

SEQ ID NO: 36388 - DNA, 26 bp, Homo sapiens
gcaaataaaccacctaacactgcagt

SEQ ID NO: 36389 - DNA, 26 bp, Homo sapiens
caaataaaccacctaacactgcagtt

SEQ ID NO: 36390 - DNA, 26 bp, Homo sapiens
aaataaaccacctaacactgcagttc

SEQ ID NO: 36391 - DNA, 26 bp, Homo sapiens
aataaaccacctaacactgcagttct

SEQ ID NO: 36392 - DNA, 26 bp, Homo sapiens
ataaaccacctaacactgcagttctt

SEQ ID NO: 36393 - DNA, 26 bp, Homo sapiens
taaaccacctaacactgcagttcttt

SEQ ID NO: 36394 - DNA, 26 bp, Homo sapiens
aaaccacctaacactgcagttcttta

SEQ ID NO: 36395 - DNA, 26 bp, Homo sapiens
aaccacctaacactgcagttctttat

SEQ ID NO: 36396 - DNA, 26 bp, Homo sapiens
accacctaacactgcagttctttata

SEQ ID NO: 36397 - DNA, 26 bp, Homo sapiens
ccacctaacactgcagttctttatac

SEQ ID NO: 36398 - DNA, 26 bp, Homo sapiens
cacctaacactgcagttctttataca

SEQ ID NO: 36399 - DNA, 26 bp, Homo sapiens
acctaacactgcagttctttatacat

SEQ ID NO: 36400 - DNA, 26 bp, Homo sapiens
cctaacactgcagttctttatacata

SEQ ID NO: 36401 - DNA, 26 bp, Homo sapiens
ctaacactgcagttctttatacatat

SEQ ID NO: 36402 - DNA, 26 bp, Homo sapiens
taacactgcagttctttatacatatt

SEQ ID NO: 36403 - DNA, 26 bp, Homo sapiens
aacactgcagttctttatacatatta

SEQ ID NO: 36404 - DNA, 26 bp, Homo sapiens
acactgcagttctttatacatattaa

SEQ ID NO: 36405 - DNA, 26 bp, Homo sapiens
cactgcagttctttatacatattaaa

SEQ ID NO: 36406 - DNA, 26 bp, Homo sapiens
actgcagttctttatacatattaaaa

SEQ ID NO: 36407 - DNA, 26 bp, Homo sapiens
ctgcagttctttatacatattaaaag

SEQ ID NO: 36408 - DNA, 26 bp, Homo sapiens
tgcagttctttatacatattaaaagc

SEQ ID NO: 36409 - DNA, 26 bp, Homo sapiens
gcagttctttatacatattaaaagcc

SEQ ID NO: 36410 - DNA, 26 bp, Homo sapiens
cagttctttatacatattaaaagcct

SEQ ID NO: 36411 - DNA, 26 bp, Homo sapiens
agttctttatacatattaaaagcctt

SEQ ID NO: 36412 - DNA, 26 bp, Homo sapiens
gttctttatacatattaaaagccttg

SEQ ID NO: 36413 - DNA, 26 bp, Homo sapiens
ttctttatacatattaaaagccttgt

SEQ ID NO: 36414 - DNA, 26 bp, Homo sapiens
tctttatacatattaaaagccttgtc

SEQ ID NO: 36415 - DNA, 26 bp, Homo sapiens
ctttatacatattaaaagccttgtct

SEQ ID NO: 36416 - DNA, 26 bp, Homo sapiens
tttatacatattaaaagccttgtctg

SEQ ID NO: 36417 - DNA, 26 bp, Homo sapiens
ttatacatattaaaagccttgtctgg

SEQ ID NO: 36418 - DNA, 26 bp, Homo sapiens
tatacatattaaaagccttgtctggg

SEQ ID NO: 36419 - DNA, 26 bp, Homo sapiens
atacatattaaaagccttgtctgggg

SEQ ID NO: 36420 - DNA, 26 bp, Homo sapiens
tacatattaaaagccttgtctggggt

SEQ ID NO: 36421 - DNA, 26 bp, Homo sapiens
acatattaaaagccttgtctggggtt

SEQ ID NO: 36422 - DNA, 26 bp, Homo sapiens
catattaaaagccttgtctggggttt

SEQ ID NO: 36423 - DNA, 26 bp, Homo sapiens
atattaaaagccttgtctggggtttg

SEQ ID NO: 36424 - DNA, 26 bp, Homo sapiens
tattaaaagccttgtctggggtttgt

SEQ ID NO: 36425 - DNA, 26 bp, Homo sapiens
attaaaagccttgtctggggtttgtc

SEQ ID NO: 36426 - DNA, 26 bp, Homo sapiens
ttaaaagccttgtctggggtttgtca

SEQ ID NO: 36427 - DNA, 26 bp, Homo sapiens
taaaagccttgtctggggtttgtcat

SEQ ID NO: 36428 - DNA, 26 bp, Homo sapiens
aaaagccttgtctggggtttgtcata

SEQ ID NO: 36429 - DNA, 26 bp, Homo sapiens
aaagccttgtctggggtttgtcatat

SEQ ID NO: 36430 - DNA, 26 bp, Homo sapiens
aagccttgtctggggtttgtcatatg

SEQ ID NO: 36431 - DNA, 26 bp, Homo sapiens
agccttgtctggggtttgtcatatgt

SEQ ID NO: 36432 - DNA, 26 bp, Homo sapiens
gccttgtctggggtttgtcatatgtt

SEQ ID NO: 36433 - DNA, 26 bp, Homo sapiens
ccttgtctggggtttgtcatatgtta

SEQ ID NO: 36434 - DNA, 26 bp, Homo sapiens
cttgtctggggtttgtcatatgttaa

SEQ ID NO: 36435 - DNA, 26 bp, Homo sapiens
ttgtctggggtttgtcatatgttaaa

SEQ ID NO: 36436 - DNA, 26 bp, Homo sapiens
tgtctggggtttgtcatatgttaaat

SEQ ID NO: 36437 - DNA, 26 bp, Homo sapiens
gtctggggtttgtcatatgttaaata

SEQ ID NO: 36438 - DNA, 26 bp, Homo sapiens
tctggggtttgtcatatgttaaatat

SEQ ID NO: 36439 - DNA, 26 bp, Homo sapiens
ctggggtttgtcatatgttaaatatt

SEQ ID NO: 36440 - DNA, 26 bp, Homo sapiens
tggggtttgtcatatgttaaatatta

SEQ ID NO: 36441 - DNA, 26 bp, Homo sapiens
ggggtttgtcatatgttaaatattat

SEQ ID NO: 36442 - DNA, 26 bp, Homo sapiens
gggtttgtcatatgttaaatattatt

SEQ ID NO: 36443 - DNA, 26 bp, Homo sapiens
ggtttgtcatatgttaaatattattt

SEQ ID NO: 36444 - DNA, 26 bp, Homo sapiens
gtttgtcatatgttaaatattattta

SEQ ID NO: 36445 - DNA, 26 bp, Homo sapiens
tttgtcatatgttaaatattatttaa

SEQ ID NO: 36446 - DNA, 26 bp, Homo sapiens
ttgtcatatgttaaatattatttaaa

SEQ ID NO: 36447 - DNA, 26 bp, Homo sapiens
tgtcatatgttaaatattatttaaag

SEQ ID NO: 36448 - DNA, 26 bp, Homo sapiens
gtcatatgttaaatattatttaaagt

SEQ ID NO: 36449 - DNA, 26 bp, Homo sapiens
tcatatgttaaatattatttaaagtg

SEQ ID NO: 36450 - DNA, 26 bp, Homo sapiens
catatgttaaatattatttaaagtgg

SEQ ID NO: 36451 - DNA, 26 bp, Homo sapiens
atatgttaaatattatttaaagtggg

SEQ ID NO: 36452 - DNA, 26 bp, Homo sapiens
tatgttaaatattatttaaagtggga

SEQ ID NO: 36453 - DNA, 26 bp, Homo sapiens
atgttaaatattatttaaagtgggaa

SEQ ID NO: 36454 - DNA, 26 bp, Homo sapiens
tgttaaatattatttaaagtgggaaa

SEQ ID NO: 36455 - DNA, 26 bp, Homo sapiens
gttaaatattatttaaagtgggaaaa

SEQ ID NO: 36456 - DNA, 26 bp, Homo sapiens
ttaaatattatttaaagtgggaaaat

SEQ ID NO: 36457 - DNA, 26 bp, Homo sapiens
taaatattatttaaagtgggaaaata

SEQ ID NO: 36458 - DNA, 26 bp, Homo sapiens
aaatattatttaaagtgggaaaatat

SEQ ID NO: 36459 - DNA, 26 bp, Homo sapiens
aatattatttaaagtgggaaaatatg

SEQ ID NO: 36460 - DNA, 26 bp, Homo sapiens
atattatttaaagtgggaaaatatgt

SEQ ID NO: 36461 - DNA, 26 bp, Homo sapiens
tattatttaaagtgggaaaatatgtt

SEQ ID NO: 36462 - DNA, 26 bp, Homo sapiens
attatttaaagtgggaaaatatgttg

SEQ ID NO: 36463 - DNA, 26 bp, Homo sapiens
ttatttaaagtgggaaaatatgttgt

SEQ ID NO: 36464 - DNA, 26 bp, Homo sapiens
tatttaaagtgggaaaatatgttgta

SEQ ID NO: 36465 - DNA, 26 bp, Homo sapiens
atttaaagtgggaaaatatgttgtag

SEQ ID NO: 36466 - DNA, 26 bp, Homo sapiens
tttaaagtgggaaaatatgttgtagc

SEQ ID NO: 36467 - DNA, 26 bp, Homo sapiens
ttaaagtgggaaaatatgttgtagct

SEQ ID NO: 36468 - DNA, 26 bp, Homo sapiens
taaagtgggaaaatatgttgtagctt

SEQ ID NO: 36469 - DNA, 26 bp, Homo sapiens
aaagtgggaaaatatgttgtagcttg

SEQ ID NO: 36470 - DNA, 26 bp, Homo sapiens
aagtgggaaaatatgttgtagcttga

SEQ ID NO: 36471 - DNA, 26 bp, Homo sapiens
agtgggaaaatatgttgtagcttgaa

SEQ ID NO: 36472 - DNA, 26 bp, Homo sapiens
gtgggaaaatatgttgtagcttgaag

SEQ ID NO: 36473 - DNA, 26 bp, Homo sapiens
tgggaaaatatgttgtagcttgaagc

SEQ ID NO: 36474 - DNA, 26 bp, Homo sapiens
gggaaaatatgttgtagcttgaagcc

SEQ ID NO: 36475 - DNA, 26 bp, Homo sapiens
ggaaaatatgttgtagcttgaagcct

SEQ ID NO: 36476 - DNA, 26 bp, Homo sapiens
gaaaatatgttgtagcttgaagcctc

SEQ ID NO: 36477 - DNA, 26 bp, Homo sapiens
aaaatatgttgtagcttgaagcctcc

SEQ ID NO: 36478 - DNA, 26 bp, Homo sapiens
aaatatgttgtagcttgaagcctccc

SEQ ID NO: 36479 - DNA, 26 bp, Homo sapiens
aatatgttgtagcttgaagcctccca

SEQ ID NO: 36480 - DNA, 26 bp, Homo sapiens
atatgttgtagcttgaagcctcccat

SEQ ID NO: 36481 - DNA, 26 bp, Homo sapiens
tatgttgtagcttgaagcctcccatt

SEQ ID NO: 36482 - DNA, 26 bp, Homo sapiens
atgttgtagcttgaagcctcccattg

SEQ ID NO: 36483 - DNA, 26 bp, Homo sapiens
tgttgtagcttgaagcctcccattgg

SEQ ID NO: 36484 - DNA, 26 bp, Homo sapiens
gttgtagcttgaagcctcccattggc

SEQ ID NO: 36485 - DNA, 26 bp, Homo sapiens
ttgtagcttgaagcctcccattggcc

SEQ ID NO: 36486 - DNA, 26 bp, Homo sapiens
tgtagcttgaagcctcccattggccc

SEQ ID NO: 36487 - DNA, 26 bp, Homo sapiens
gtagcttgaagcctcccattggccca

SEQ ID NO: 36488 - DNA, 26 bp, Homo sapiens
tagcttgaagcctcccattggcccaa

SEQ ID NO: 36489 - DNA, 26 bp, Homo sapiens
agcttgaagcctcccattggcccaaa

SEQ ID NO: 36490 - DNA, 26 bp, Homo sapiens
gcttgaagcctcccattggcccaaac

SEQ ID NO: 36491 - DNA, 26 bp, Homo sapiens
cttgaagcctcccattggcccaaaca

SEQ ID NO: 36492 - DNA, 26 bp, Homo sapiens
ttgaagcctcccattggcccaaacat

SEQ ID NO: 36493 - DNA, 26 bp, Homo sapiens
tgaagcctcccattggcccaaacatc

SEQ ID NO: 36494 - DNA, 26 bp, Homo sapiens
gaagcctcccattggcccaaacatcc

SEQ ID NO: 36495 - DNA, 26 bp, Homo sapiens
aagcctcccattggcccaaacatcca

SEQ ID NO: 36496 - DNA, 26 bp, Homo sapiens
agcctcccattggcccaaacatccaa

SEQ ID NO: 36497 - DNA, 26 bp, Homo sapiens
gcctcccattggcccaaacatccaat

SEQ ID NO: 36498 - DNA, 26 bp, Homo sapiens
cctcccattggcccaaacatccaata

SEQ ID NO: 36499 - DNA, 26 bp, Homo sapiens
ctcccattggcccaaacatccaatac

SEQ ID NO: 36500 - DNA, 26 bp, Homo sapiens
tcccattggcccaaacatccaataca

SEQ ID NO: 36501 - DNA, 26 bp, Homo sapiens
cccattggcccaaacatccaatacaa

SEQ ID NO: 36502 - DNA, 26 bp, Homo sapiens
ccattggcccaaacatccaatacaaa

SEQ ID NO: 36503 - DNA, 26 bp, Homo sapiens
cattggcccaaacatccaatacaaaa

SEQ ID NO: 36504 - DNA, 26 bp, Homo sapiens
attggcccaaacatccaatacaaaaa

SEQ ID NO: 36505 - DNA, 26 bp, Homo sapiens
ttggcccaaacatccaatacaaaaac

SEQ ID NO: 36506 - DNA, 26 bp, Homo sapiens
tggcccaaacatccaatacaaaaaca

SEQ ID NO: 36507 - DNA, 26 bp, Homo sapiens
ggcccaaacatccaatacaaaaacac

SEQ ID NO: 36508 - DNA, 26 bp, Homo sapiens
gcccaaacatccaatacaaaaacaca

SEQ ID NO: 36509 - DNA, 26 bp, Homo sapiens
cccaaacatccaatacaaaaacacat

SEQ ID NO: 36510 - DNA, 26 bp, Homo sapiens
ccaaacatccaatacaaaaacacatc

SEQ ID NO: 36511 - DNA, 26 bp, Homo sapiens
caaacatccaatacaaaaacacatct

SEQ ID NO: 36512 - DNA, 26 bp, Homo sapiens
aaacatccaatacaaaaacacatctc

SEQ ID NO: 36513 - DNA, 26 bp, Homo sapiens
aacatccaatacaaaaacacatctcc

SEQ ID NO: 36514 - DNA, 26 bp, Homo sapiens
acatccaatacaaaaacacatctcca

SEQ ID NO: 36515 - DNA, 26 bp, Homo sapiens
catccaatacaaaaacacatctccac

SEQ ID NO: 36516 - DNA, 26 bp, Homo sapiens
atccaatacaaaaacacatctccaca

SEQ ID NO: 36517 - DNA, 26 bp, Homo sapiens
tccaatacaaaaacacatctccacaa

SEQ ID NO: 36518 - DNA, 26 bp, Homo sapiens
ccaatacaaaaacacatctccacaaa

SEQ ID NO: 36519 - DNA, 26 bp, Homo sapiens
caatacaaaaacacatctccacaaaa

SEQ ID NO: 36520 - DNA, 26 bp, Homo sapiens
aatacaaaaacacatctccacaaaag

SEQ ID NO: 36521 - DNA, 26 bp, Homo sapiens
atacaaaaacacatctccacaaaagg

SEQ ID NO: 36522 - DNA, 26 bp, Homo sapiens
tacaaaaacacatctccacaaaagga

SEQ ID NO: 36523 - DNA, 26 bp, Homo sapiens
acaaaaacacatctccacaaaaggag

SEQ ID NO: 36524 - DNA, 26 bp, Homo sapiens
caaaaacacatctccacaaaaggagc

SEQ ID NO: 36525 - DNA, 26 bp, Homo sapiens
aaaaacacatctccacaaaaggagca

SEQ ID NO: 36526 - DNA, 26 bp, Homo sapiens
aaaacacatctccacaaaaggagcag

SEQ ID NO: 36527 - DNA, 26 bp, Homo sapiens
aaacacatctccacaaaaggagcagg

SEQ ID NO: 36528 - DNA, 26 bp, Homo sapiens
aacacatctccacaaaaggagcaggc

SEQ ID NO: 36529 - DNA, 26 bp, Homo sapiens
acacatctccacaaaaggagcaggca

SEQ ID NO: 36530 - DNA, 26 bp, Homo sapiens
cacatctccacaaaaggagcaggcag

SEQ ID NO: 36531 - DNA, 26 bp, Homo sapiens
acatctccacaaaaggagcaggcaga

SEQ ID NO: 36532 - DNA, 26 bp, Homo sapiens
catctccacaaaaggagcaggcagac

SEQ ID NO: 36533 - DNA, 26 bp, Homo sapiens
atctccacaaaaggagcaggcagaca

SEQ ID NO: 36534 - DNA, 26 bp, Homo sapiens
tctccacaaaaggagcaggcagacaa

SEQ ID NO: 36535 - DNA, 26 bp, Homo sapiens
ctccacaaaaggagcaggcagacaat

SEQ ID NO: 36536 - DNA, 26 bp, Homo sapiens
tccacaaaaggagcaggcagacaata

SEQ ID NO: 36537 - DNA, 26 bp, Homo sapiens
ccacaaaaggagcaggcagacaatac

SEQ ID NO: 36538 - DNA, 26 bp, Homo sapiens
cacaaaaggagcaggcagacaataca

SEQ ID NO: 36539 - DNA, 26 bp, Homo sapiens
acaaaaggagcaggcagacaatacag

SEQ ID NO: 36540 - DNA, 26 bp, Homo sapiens
caaaaggagcaggcagacaatacagg

SEQ ID NO: 36541 - DNA, 26 bp, Homo sapiens
aaaaggagcaggcagacaatacaggt

SEQ ID NO: 36542 - DNA, 26 bp, Homo sapiens
aaaggagcaggcagacaatacaggta

SEQ ID NO: 36543 - DNA, 26 bp, Homo sapiens
aaggagcaggcagacaatacaggtac

SEQ ID NO: 36544 - DNA, 26 bp, Homo sapiens
aggagcaggcagacaatacaggtaca

SEQ ID NO: 36545 - DNA, 26 bp, Homo sapiens
ggagcaggcagacaatacaggtacat

SEQ ID NO: 36546 - DNA, 26 bp, Homo sapiens
gagcaggcagacaatacaggtacatt

SEQ ID NO: 36547 - DNA, 26 bp, Homo sapiens
agcaggcagacaatacaggtacattt

SEQ ID NO: 36548 - DNA, 26 bp, Homo sapiens
gcaggcagacaatacaggtacattta

SEQ ID NO: 36549 - DNA, 26 bp, Homo sapiens
caggcagacaatacaggtacatttat

SEQ ID NO: 36550 - DNA, 26 bp, Homo sapiens
aggcagacaatacaggtacatttata

SEQ ID NO: 36551 - DNA, 26 bp, Homo sapiens
ggcagacaatacaggtacatttatag

SEQ ID NO: 36552 - DNA, 26 bp, Homo sapiens
gcagacaatacaggtacatttataga

SEQ ID NO: 36553 - DNA, 26 bp, Homo sapiens
cagacaatacaggtacatttatagaa

SEQ ID NO: 36554 - DNA, 26 bp, Homo sapiens
agacaatacaggtacatttatagaag

SEQ ID NO: 36555 - DNA, 26 bp, Homo sapiens
gacaatacaggtacatttatagaagc

SEQ ID NO: 36556 - DNA, 26 bp, Homo sapiens
acaatacaggtacatttatagaagca

SEQ ID NO: 36557 - DNA, 26 bp, Homo sapiens
caatacaggtacatttatagaagcag

SEQ ID NO: 36558 - DNA, 26 bp, Homo sapiens
aatacaggtacatttatagaagcagc

SEQ ID NO: 36559 - DNA, 26 bp, Homo sapiens
atacaggtacatttatagaagcagcc

SEQ ID NO: 36560 - DNA, 26 bp, Homo sapiens
tacaggtacatttatagaagcagcca

SEQ ID NO: 36561 - DNA, 26 bp, Homo sapiens
acaggtacatttatagaagcagccag

SEQ ID NO: 36562 - DNA, 26 bp, Homo sapiens
caggtacatttatagaagcagccagc

SEQ ID NO: 36563 - DNA, 26 bp, Homo sapiens
aggtacatttatagaagcagccagct

SEQ ID NO: 36564 - DNA, 26 bp, Homo sapiens
ggtacatttatagaagcagccagcta

SEQ ID NO: 36565 - DNA, 26 bp, Homo sapiens
gtacatttatagaagcagccagctaa

SEQ ID NO: 36566 - DNA, 26 bp, Homo sapiens
tacatttatagaagcagccagctaat

SEQ ID NO: 36567 - DNA, 26 bp, Homo sapiens
acatttatagaagcagccagctaatg

SEQ ID NO: 36568 - DNA, 26 bp, Homo sapiens
catttatagaagcagccagctaatgt

SEQ ID NO: 36569 - DNA, 26 bp, Homo sapiens
atttatagaagcagccagctaatgtc

SEQ ID NO: 36570 - DNA, 26 bp, Homo sapiens
tttatagaagcagccagctaatgtcc

SEQ ID NO: 36571 - DNA, 26 bp, Homo sapiens
ttatagaagcagccagctaatgtcct

SEQ ID NO: 36572 - DNA, 26 bp, Homo sapiens
tatagaagcagccagctaatgtccta

SEQ ID NO: 36573 - DNA, 26 bp, Homo sapiens
atagaagcagccagctaatgtcctaa

SEQ ID NO: 36574 - DNA, 26 bp, Homo sapiens
tagaagcagccagctaatgtcctaat

SEQ ID NO: 36575 - DNA, 26 bp, Homo sapiens
agaagcagccagctaatgtcctaatg

SEQ ID NO: 36576 - DNA, 26 bp, Homo sapiens
gaagcagccagctaatgtcctaatgt

SEQ ID NO: 36577 - DNA, 26 bp, Homo sapiens
aagcagccagctaatgtcctaatgtt

SEQ ID NO: 36578 - DNA, 26 bp, Homo sapiens
agcagccagctaatgtcctaatgttt

SEQ ID NO: 36579 - DNA, 26 bp, Homo sapiens
gcagccagctaatgtcctaatgttta

SEQ ID NO: 36580 - DNA, 26 bp, Homo sapiens
cagccagctaatgtcctaatgtttaa

SEQ ID NO: 36581 - DNA, 26 bp, Homo sapiens
agccagctaatgtcctaatgtttaaa

SEQ ID NO: 36582 - DNA, 26 bp, Homo sapiens
gccagctaatgtcctaatgtttaaaa

SEQ ID NO: 36583 - DNA, 26 bp, Homo sapiens
ccagctaatgtcctaatgtttaaaaa

SEQ ID NO: 36584 - DNA, 26 bp, Homo sapiens
cagctaatgtcctaatgtttaaaaat

SEQ ID NO: 36585 - DNA, 26 bp, Homo sapiens
agctaatgtcctaatgtttaaaaatt

SEQ ID NO: 36586 - DNA, 26 bp, Homo sapiens
gctaatgtcctaatgtttaaaaattt

SEQ ID NO: 36587 - DNA, 26 bp, Homo sapiens
ctaatgtcctaatgtttaaaaattta

SEQ ID NO: 36588 - DNA, 26 bp, Homo sapiens
taatgtcctaatgtttaaaaatttac

SEQ ID NO: 36589 - DNA, 26 bp, Homo sapiens
aatgtcctaatgtttaaaaatttacc

SEQ ID NO: 36590 - DNA, 26 bp, Homo sapiens
atgtcctaatgtttaaaaatttacca

SEQ ID NO: 36591 - DNA, 26 bp, Homo sapiens
tgtcctaatgtttaaaaatttaccac

SEQ ID NO: 36592 - DNA, 26 bp, Homo sapiens
gtcctaatgtttaaaaatttaccact

SEQ ID NO: 36593 - DNA, 26 bp, Homo sapiens
tcctaatgtttaaaaatttaccactg

SEQ ID NO: 36594 - DNA, 26 bp, Homo sapiens
cctaatgtttaaaaatttaccactgt

SEQ ID NO: 36595 - DNA, 26 bp, Homo sapiens
ctaatgtttaaaaatttaccactgtt

SEQ ID NO: 36596 - DNA, 26 bp, Homo sapiens
taatgtttaaaaatttaccactgttt

SEQ ID NO: 36597 - DNA, 26 bp, Homo sapiens
aatgtttaaaaatttaccactgttta

SEQ ID NO: 36598 - DNA, 26 bp, Homo sapiens
atgtttaaaaatttaccactgtttaa

SEQ ID NO: 36599 - DNA, 26 bp, Homo sapiens
tgtttaaaaatttaccactgtttaat

SEQ ID NO: 36600 - DNA, 26 bp, Homo sapiens
gtttaaaaatttaccactgtttaata

SEQ ID NO: 36601 - DNA, 26 bp, Homo sapiens
tttaaaaatttaccactgtttaatat

SEQ ID NO: 36602 - DNA, 26 bp, Homo sapiens
ttaaaaatttaccactgtttaatatg

SEQ ID NO: 36603 - DNA, 26 bp, Homo sapiens
taaaaatttaccactgtttaatatga

SEQ ID NO: 36604 - DNA, 26 bp, Homo sapiens
aaaaatttaccactgtttaatatgag

SEQ ID NO: 36605 - DNA, 26 bp, Homo sapiens
aaaatttaccactgtttaatatgaga

SEQ ID NO: 36606 - DNA, 26 bp, Homo sapiens
aaatttaccactgtttaatatgagat

SEQ ID NO: 36607 - DNA, 26 bp, Homo sapiens
aatttaccactgtttaatatgagatt

SEQ ID NO: 36608 - DNA, 26 bp, Homo sapiens
atttaccactgtttaatatgagattt

SEQ ID NO: 36609 - DNA, 26 bp, Homo sapiens
tttaccactgtttaatatgagatttc

SEQ ID NO: 36610 - DNA, 26 bp, Homo sapiens
ttaccactgtttaatatgagatttca

SEQ ID NO: 36611 - DNA, 26 bp, Homo sapiens
taccactgtttaatatgagatttcaa

SEQ ID NO: 36612 - DNA, 26 bp, Homo sapiens
accactgtttaatatgagatttcaaa

SEQ ID NO: 36613 - DNA, 26 bp, Homo sapiens
ccactgtttaatatgagatttcaaac

SEQ ID NO: 36614 - DNA, 26 bp, Homo sapiens
cactgtttaatatgagatttcaaact

SEQ ID NO: 36615 - DNA, 26 bp, Homo sapiens
actgtttaatatgagatttcaaactg

SEQ ID NO: 36616 - DNA, 26 bp, Homo sapiens
ctgtttaatatgagatttcaaactgt

SEQ ID NO: 36617 - DNA, 26 bp, Homo sapiens
tgtttaatatgagatttcaaactgtg

SEQ ID NO: 36618 - DNA, 26 bp, Homo sapiens
gtttaatatgagatttcaaactgtgt

SEQ ID NO: 36619 - DNA, 26 bp, Homo sapiens
tttaatatgagatttcaaactgtgtg

SEQ ID NO: 36620 - DNA, 26 bp, Homo sapiens
ttaatatgagatttcaaactgtgtgg

SEQ ID NO: 36621 - DNA, 26 bp, Homo sapiens
taatatgagatttcaaactgtgtgga

SEQ ID NO: 36622 - DNA, 26 bp, Homo sapiens
aatatgagatttcaaactgtgtggat

SEQ ID NO: 36623 - DNA, 26 bp, Homo sapiens
atatgagatttcaaactgtgtggata

SEQ ID NO: 36624 - DNA, 26 bp, Homo sapiens
tatgagatttcaaactgtgtggataa

SEQ ID NO: 36625 - DNA, 26 bp, Homo sapiens
atgagatttcaaactgtgtggataac

SEQ ID NO: 36626 - DNA, 26 bp, Homo sapiens
tgagatttcaaactgtgtggataaca

SEQ ID NO: 36627 - DNA, 26 bp, Homo sapiens
gagatttcaaactgtgtggataacag

SEQ ID NO: 36628 - DNA, 26 bp, Homo sapiens
agatttcaaactgtgtggataacagg

SEQ ID NO: 36629 - DNA, 26 bp, Homo sapiens
gatttcaaactgtgtggataacagga

SEQ ID NO: 36630 - DNA, 26 bp, Homo sapiens
atttcaaactgtgtggataacaggag

SEQ ID NO: 36631 - DNA, 26 bp, Homo sapiens
tttcaaactgtgtggataacaggaga

SEQ ID NO: 36632 - DNA, 26 bp, Homo sapiens
ttcaaactgtgtggataacaggagaa

SEQ ID NO: 36633 - DNA, 26 bp, Homo sapiens
tcaaactgtgtggataacaggagaat

SEQ ID NO: 36634 - DNA, 26 bp, Homo sapiens
caaactgtgtggataacaggagaatt

SEQ ID NO: 36635 - DNA, 26 bp, Homo sapiens
aaactgtgtggataacaggagaattt

SEQ ID NO: 36636 - DNA, 26 bp, Homo sapiens
aactgtgtggataacaggagaatttt

SEQ ID NO: 36637 - DNA, 26 bp, Homo sapiens
actgtgtggataacaggagaattttg

SEQ ID NO: 36638 - DNA, 26 bp, Homo sapiens
ctgtgtggataacaggagaattttgg

SEQ ID NO: 36639 - DNA, 26 bp, Homo sapiens
tgtgtggataacaggagaattttgga

SEQ ID NO: 36640 - DNA, 26 bp, Homo sapiens
gtgtggataacaggagaattttggat

SEQ ID NO: 36641 - DNA, 26 bp, Homo sapiens
tgtggataacaggagaattttggatt

SEQ ID NO: 36642 - DNA, 26 bp, Homo sapiens
gtggataacaggagaattttggattc

SEQ ID NO: 36643 - DNA, 26 bp, Homo sapiens
tggataacaggagaattttggattca

SEQ ID NO: 36644 - DNA, 26 bp, Homo sapiens
ggataacaggagaattttggattcag

SEQ ID NO: 36645 - DNA, 26 bp, Homo sapiens
gataacaggagaattttggattcagg

SEQ ID NO: 36646 - DNA, 26 bp, Homo sapiens
ataacaggagaattttggattcagga

SEQ ID NO: 36647 - DNA, 26 bp, Homo sapiens
taacaggagaattttggattcaggaa

SEQ ID NO: 36648 - DNA, 26 bp, Homo sapiens
aacaggagaattttggattcaggaag

SEQ ID NO: 36649 - DNA, 26 bp, Homo sapiens
acaggagaattttggattcaggaaga

SEQ ID NO: 36650 - DNA, 26 bp, Homo sapiens
caggagaattttggattcaggaagat

SEQ ID NO: 36651 - DNA, 26 bp, Homo sapiens
aggagaattttggattcaggaagatg

SEQ ID NO: 36652 - DNA, 26 bp, Homo sapiens
ggagaattttggattcaggaagatgt

SEQ ID NO: 36653 - DNA, 26 bp, Homo sapiens
gagaattttggattcaggaagatgta

SEQ ID NO: 36654 - DNA, 26 bp, Homo sapiens
agaattttggattcaggaagatgtat

SEQ ID NO: 36655 - DNA, 26 bp, Homo sapiens
gaattttggattcaggaagatgtata

SEQ ID NO: 36656 - DNA, 26 bp, Homo sapiens
aattttggattcaggaagatgtatac

SEQ ID NO: 36657 - DNA, 26 bp, Homo sapiens
attttggattcaggaagatgtataca

SEQ ID NO: 36658 - DNA, 26 bp, Homo sapiens
ttttggattcaggaagatgtatacag

SEQ ID NO: 36659 - DNA, 26 bp, Homo sapiens
tttggattcaggaagatgtatacagt

SEQ ID NO: 36660 - DNA, 26 bp, Homo sapiens
ttggattcaggaagatgtatacagta

SEQ ID NO: 36661 - DNA, 26 bp, Homo sapiens
tggattcaggaagatgtatacagtac

SEQ ID NO: 36662 - DNA, 26 bp, Homo sapiens
ggattcaggaagatgtatacagtaca

SEQ ID NO: 36663 - DNA, 26 bp, Homo sapiens
gattcaggaagatgtatacagtacat

SEQ ID NO: 36664 - DNA, 26 bp, Homo sapiens
attcaggaagatgtatacagtacata

SEQ ID NO: 36665 - DNA, 26 bp, Homo sapiens
ttcaggaagatgtatacagtacatat

SEQ ID NO: 36666 - DNA, 26 bp, Homo sapiens
tcaggaagatgtatacagtacatatg

SEQ ID NO: 36667 - DNA, 26 bp, Homo sapiens
caggaagatgtatacagtacatatgg

SEQ ID NO: 36668 - DNA, 26 bp, Homo sapiens
aggaagatgtatacagtacatatgga

SEQ ID NO: 36669 - DNA, 26 bp, Homo sapiens
ggaagatgtatacagtacatatggat

SEQ ID NO: 36670 - DNA, 26 bp, Homo sapiens
gaagatgtatacagtacatatggatt

SEQ ID NO: 36671 - DNA, 26 bp, Homo sapiens
aagatgtatacagtacatatggattt

SEQ ID NO: 36672 - DNA, 26 bp, Homo sapiens
agatgtatacagtacatatggatttt

SEQ ID NO: 36673 - DNA, 26 bp, Homo sapiens
gatgtatacagtacatatggattttt

SEQ ID NO: 36674 - DNA, 26 bp, Homo sapiens
atgtatacagtacatatggatttttt

SEQ ID NO: 36675 - DNA, 26 bp, Homo sapiens
tgtatacagtacatatggattttttt

SEQ ID NO: 36676 - DNA, 26 bp, Homo sapiens
gtatacagtacatatggatttttttt

SEQ ID NO: 36677 - DNA, 26 bp, Homo sapiens
tatacagtacatatggattttttttg

SEQ ID NO: 36678 - DNA, 26 bp, Homo sapiens
atacagtacatatggattttttttgt

SEQ ID NO: 36679 - DNA, 26 bp, Homo sapiens
tacagtacatatggattttttttgtg

SEQ ID NO: 36680 - DNA, 26 bp, Homo sapiens
acagtacatatggattttttttgtga

SEQ ID NO: 36681 - DNA, 26 bp, Homo sapiens
cagtacatatggattttttttgtgaa

SEQ ID NO: 36682 - DNA, 26 bp, Homo sapiens
agtacatatggattttttttgtgaaa

SEQ ID NO: 36683 - DNA, 26 bp, Homo sapiens
gtacatatggattttttttgtgaaat

SEQ ID NO: 36684 - DNA, 26 bp, Homo sapiens
tacatatggattttttttgtgaaatc

SEQ ID NO: 36685 - DNA, 26 bp, Homo sapiens
acatatggattttttttgtgaaatca

SEQ ID NO: 36686 - DNA, 26 bp, Homo sapiens
catatggattttttttgtgaaatcat

SEQ ID NO: 36687 - DNA, 26 bp, Homo sapiens
atatggattttttttgtgaaatcatt

SEQ ID NO: 36688 - DNA, 26 bp, Homo sapiens
tatggattttttttgtgaaatcattt

SEQ ID NO: 36689 - DNA, 26 bp, Homo sapiens
atggattttttttgtgaaatcatttt

SEQ ID NO: 36690 - DNA, 26 bp, Homo sapiens
tggattttttttgtgaaatcattttc

SEQ ID NO: 36691 - DNA, 26 bp, Homo sapiens
ggattttttttgtgaaatcattttca

SEQ ID NO: 36692 - DNA, 26 bp, Homo sapiens
gattttttttgtgaaatcattttcac

SEQ ID NO: 36693 - DNA, 26 bp, Homo sapiens
attttttttgtgaaatcattttcact

SEQ ID NO: 36694 - DNA, 26 bp, Homo sapiens
ttttttttgtgaaatcattttcacta

SEQ ID NO: 36695 - DNA, 26 bp, Homo sapiens
tttttttgtgaaatcattttcactat

SEQ ID NO: 36696 - DNA, 26 bp, Homo sapiens
ttttttgtgaaatcattttcactata

SEQ ID NO: 36697 - DNA, 26 bp, Homo sapiens
tttttgtgaaatcattttcactatat

SEQ ID NO: 36698 - DNA, 26 bp, Homo sapiens
ttttgtgaaatcattttcactatatt

SEQ ID NO: 36699 - DNA, 26 bp, Homo sapiens
tttgtgaaatcattttcactatattg

SEQ ID NO: 36700 - DNA, 26 bp, Homo sapiens
ttgtgaaatcattttcactatattgc

SEQ ID NO: 36701 - DNA, 26 bp, Homo sapiens
tgtgaaatcattttcactatattgct

SEQ ID NO: 36702 - DNA, 26 bp, Homo sapiens
gtgaaatcattttcactatattgctc

SEQ ID NO: 36703 - DNA, 26 bp, Homo sapiens
tgaaatcattttcactatattgctca

SEQ ID NO: 36704 - DNA, 26 bp, Homo sapiens
gaaatcattttcactatattgctcaa

SEQ ID NO: 36705 - DNA, 26 bp, Homo sapiens
aaatcattttcactatattgctcaag

SEQ ID NO: 36706 - DNA, 26 bp, Homo sapiens
aatcattttcactatattgctcaaga

SEQ ID NO: 36707 - DNA, 26 bp, Homo sapiens
atcattttcactatattgctcaagaa

SEQ ID NO: 36708 - DNA, 26 bp, Homo sapiens
tcattttcactatattgctcaagaat

SEQ ID NO: 36709 - DNA, 26 bp, Homo sapiens
cattttcactatattgctcaagaatt

SEQ ID NO: 36710 - DNA, 26 bp, Homo sapiens
attttcactatattgctcaagaatta

SEQ ID NO: 36711 - DNA, 26 bp, Homo sapiens
ttttcactatattgctcaagaattat

SEQ ID NO: 36712 - DNA, 26 bp, Homo sapiens
tttcactatattgctcaagaattatc

SEQ ID NO: 36713 - DNA, 26 bp, Homo sapiens
ttcactatattgctcaagaattatct

SEQ ID NO: 36714 - DNA, 26 bp, Homo sapiens
tcactatattgctcaagaattatctg

SEQ ID NO: 36715 - DNA, 26 bp, Homo sapiens
cactatattgctcaagaattatctgc

SEQ ID NO: 36716 - DNA, 26 bp, Homo sapiens
actatattgctcaagaattatctgca

SEQ ID NO: 36717 - DNA, 26 bp, Homo sapiens
ctatattgctcaagaattatctgcat

SEQ ID NO: 36718 - DNA, 26 bp, Homo sapiens
tatattgctcaagaattatctgcatt

SEQ ID NO: 36719 - DNA, 26 bp, Homo sapiens
atattgctcaagaattatctgcattt

SEQ ID NO: 36720 - DNA, 26 bp, Homo sapiens
tattgctcaagaattatctgcattta

SEQ ID NO: 36721 - DNA, 26 bp, Homo sapiens
attgctcaagaattatctgcatttac

SEQ ID NO: 36722 - DNA, 26 bp, Homo sapiens
ttgctcaagaattatctgcatttaca

SEQ ID NO: 36723 - DNA, 26 bp, Homo sapiens
tgctcaagaattatctgcatttacat

SEQ ID NO: 36724 - DNA, 26 bp, Homo sapiens
gctcaagaattatctgcatttacata

SEQ ID NO: 36725 - DNA, 26 bp, Homo sapiens
ctcaagaattatctgcatttacatat

SEQ ID NO: 36726 - DNA, 26 bp, Homo sapiens
tcaagaattatctgcatttacatatg

SEQ ID NO: 36727 - DNA, 26 bp, Homo sapiens
caagaattatctgcatttacatatgc

SEQ ID NO: 36728 - DNA, 26 bp, Homo sapiens
aagaattatctgcatttacatatgca

SEQ ID NO: 36729 - DNA, 26 bp, Homo sapiens
agaattatctgcatttacatatgcaa

SEQ ID NO: 36730 - DNA, 26 bp, Homo sapiens
gaattatctgcatttacatatgcaat

SEQ ID NO: 36731 - DNA, 26 bp, Homo sapiens
aattatctgcatttacatatgcaatc

SEQ ID NO: 36732 - DNA, 26 bp, Homo sapiens
attatctgcatttacatatgcaatct

SEQ ID NO: 36733 - DNA, 26 bp, Homo sapiens
ttatctgcatttacatatgcaatctg

SEQ ID NO: 36734 - DNA, 26 bp, Homo sapiens
tatctgcatttacatatgcaatctgt

SEQ ID NO: 36735 - DNA, 26 bp, Homo sapiens
atctgcatttacatatgcaatctgtt

SEQ ID NO: 36736 - DNA, 26 bp, Homo sapiens
tctgcatttacatatgcaatctgttc

SEQ ID NO: 36737 - DNA, 26 bp, Homo sapiens
ctgcatttacatatgcaatctgttca

SEQ ID NO: 36738 - DNA, 26 bp, Homo sapiens
tgcatttacatatgcaatctgttcag

SEQ ID NO: 36739 - DNA, 26 bp, Homo sapiens
gcatttacatatgcaatctgttcagt

SEQ ID NO: 36740 - DNA, 26 bp, Homo sapiens
catttacatatgcaatctgttcagtg

SEQ ID NO: 36741 - DNA, 26 bp, Homo sapiens
atttacatatgcaatctgttcagtga

SEQ ID NO: 36742 - DNA, 26 bp, Homo sapiens
tttacatatgcaatctgttcagtgat

SEQ ID NO: 36743 - DNA, 26 bp, Homo sapiens
ttacatatgcaatctgttcagtgata

SEQ ID NO: 36744 - DNA, 26 bp, Homo sapiens
tacatatgcaatctgttcagtgataa

SEQ ID NO: 36745 - DNA, 26 bp, Homo sapiens
acatatgcaatctgttcagtgataat

SEQ ID NO: 36746 - DNA, 26 bp, Homo sapiens
catatgcaatctgttcagtgataatc

SEQ ID NO: 36747 - DNA, 26 bp, Homo sapiens
atatgcaatctgttcagtgataatca

SEQ ID NO: 36748 - DNA, 26 bp, Homo sapiens
tatgcaatctgttcagtgataatcaa

SEQ ID NO: 36749 - DNA, 26 bp, Homo sapiens
atgcaatctgttcagtgataatcaag

SEQ ID NO: 36750 - DNA, 26 bp, Homo sapiens
tgcaatctgttcagtgataatcaagt

SEQ ID NO: 36751 - DNA, 26 bp, Homo sapiens
gcaatctgttcagtgataatcaagtt

SEQ ID NO: 36752 - DNA, 26 bp, Homo sapiens
caatctgttcagtgataatcaagttc

SEQ ID NO: 36753 - DNA, 26 bp, Homo sapiens
aatctgttcagtgataatcaagttcc

SEQ ID NO: 36754 - DNA, 26 bp, Homo sapiens
atctgttcagtgataatcaagttcct

SEQ ID NO: 36755 - DNA, 26 bp, Homo sapiens
tctgttcagtgataatcaagttccta

SEQ ID NO: 36756 - DNA, 26 bp, Homo sapiens
ctgttcagtgataatcaagttcctag

SEQ ID NO: 36757 - DNA, 26 bp, Homo sapiens
tgttcagtgataatcaagttcctaga

SEQ ID NO: 36758 - DNA, 26 bp, Homo sapiens
gttcagtgataatcaagttcctagaa

SEQ ID NO: 36759 - DNA, 26 bp, Homo sapiens
ttcagtgataatcaagttcctagaaa

SEQ ID NO: 36760 - DNA, 26 bp, Homo sapiens
tcagtgataatcaagttcctagaaat

SEQ ID NO: 36761 - DNA, 26 bp, Homo sapiens
cagtgataatcaagttcctagaaata

SEQ ID NO: 36762 - DNA, 26 bp, Homo sapiens
agtgataatcaagttcctagaaatag

SEQ ID NO: 36763 - DNA, 26 bp, Homo sapiens
gtgataatcaagttcctagaaatagt

SEQ ID NO: 36764 - DNA, 26 bp, Homo sapiens
tgataatcaagttcctagaaatagta

SEQ ID NO: 36765 - DNA, 26 bp, Homo sapiens
gataatcaagttcctagaaatagtat

SEQ ID NO: 36766 - DNA, 26 bp, Homo sapiens
ataatcaagttcctagaaatagtatt

SEQ ID NO: 36767 - DNA, 26 bp, Homo sapiens
taatcaagttcctagaaatagtattc

SEQ ID NO: 36768 - DNA, 26 bp, Homo sapiens
aatcaagttcctagaaatagtattca

SEQ ID NO: 36769 - DNA, 26 bp, Homo sapiens
atcaagttcctagaaatagtattcat

SEQ ID NO: 36770 - DNA, 26 bp, Homo sapiens
tcaagttcctagaaatagtattcatc

SEQ ID NO: 36771 - DNA, 26 bp, Homo sapiens
caagttcctagaaatagtattcatcc

SEQ ID NO: 36772 - DNA, 26 bp, Homo sapiens
aagttcctagaaatagtattcatcca

SEQ ID NO: 36773 - DNA, 26 bp, Homo sapiens
agttcctagaaatagtattcatccac

SEQ ID NO: 36774 - DNA, 26 bp, Homo sapiens
gttcctagaaatagtattcatccaca

SEQ ID NO: 36775 - DNA, 26 bp, Homo sapiens
ttcctagaaatagtattcatccacat

SEQ ID NO: 36776 - DNA, 26 bp, Homo sapiens
tcctagaaatagtattcatccacatt

SEQ ID NO: 36777 - DNA, 26 bp, Homo sapiens
cctagaaatagtattcatccacatta

SEQ ID NO: 36778 - DNA, 26 bp, Homo sapiens
ctagaaatagtattcatccacattaa

SEQ ID NO: 36779 - DNA, 26 bp, Homo sapiens
tagaaatagtattcatccacattaaa

SEQ ID NO: 36780 - DNA, 26 bp, Homo sapiens
agaaatagtattcatccacattaaag

SEQ ID NO: 36781 - DNA, 26 bp, Homo sapiens
gaaatagtattcatccacattaaagt

SEQ ID NO: 36782 - DNA, 26 bp, Homo sapiens
aaatagtattcatccacattaaagta

SEQ ID NO: 36783 - DNA, 26 bp, Homo sapiens
aatagtattcatccacattaaagtaa

SEQ ID NO: 36784 - DNA, 26 bp, Homo sapiens
atagtattcatccacattaaagtaat

SEQ ID NO: 36785 - DNA, 26 bp, Homo sapiens
tagtattcatccacattaaagtaata

SEQ ID NO: 36786 - DNA, 26 bp, Homo sapiens
agtattcatccacattaaagtaataa

SEQ ID NO: 36787 - DNA, 26 bp, Homo sapiens
gtattcatccacattaaagtaataat

SEQ ID NO: 36788 - DNA, 26 bp, Homo sapiens
tattcatccacattaaagtaataatg

SEQ ID NO: 36789 - DNA, 26 bp, Homo sapiens
attcatccacattaaagtaataatga

SEQ ID NO: 36790 - DNA, 26 bp, Homo sapiens
ttcatccacattaaagtaataatgat

SEQ ID NO: 36791 - DNA, 26 bp, Homo sapiens
tcatccacattaaagtaataatgatg

SEQ ID NO: 36792 - DNA, 26 bp, Homo sapiens
catccacattaaagtaataatgatga

SEQ ID NO: 36793 - DNA, 26 bp, Homo sapiens
atccacattaaagtaataatgatgaa

SEQ ID NO: 36794 - DNA, 26 bp, Homo sapiens
tccacattaaagtaataatgatgaaa

SEQ ID NO: 36795 - DNA, 26 bp, Homo sapiens
ccacattaaagtaataatgatgaaaa

SEQ ID NO: 36796 - DNA, 26 bp, Homo sapiens
cacattaaagtaataatgatgaaaaa

SEQ ID NO: 36797 - DNA, 26 bp, Homo sapiens
acattaaagtaataatgatgaaaaag

SEQ ID NO: 36798 - DNA, 26 bp, Homo sapiens
cattaaagtaataatgatgaaaaagg

SEQ ID NO: 36799 - DNA, 26 bp, Homo sapiens
attaaagtaataatgatgaaaaagga

SEQ ID NO: 36800 - DNA, 26 bp, Homo sapiens
ttaaagtaataatgatgaaaaaggaa

SEQ ID NO: 36801 - DNA, 26 bp, Homo sapiens
taaagtaataatgatgaaaaaggaat

SEQ ID NO: 36802 - DNA, 26 bp, Homo sapiens
aaagtaataatgatgaaaaaggaatc

SEQ ID NO: 36803 - DNA, 26 bp, Homo sapiens
aagtaataatgatgaaaaaggaatca

SEQ ID NO: 36804 - DNA, 26 bp, Homo sapiens
agtaataatgatgaaaaaggaatcac

SEQ ID NO: 36805 - DNA, 26 bp, Homo sapiens
gtaataatgatgaaaaaggaatcaca

SEQ ID NO: 36806 - DNA, 26 bp, Homo sapiens
taataatgatgaaaaaggaatcacac

SEQ ID NO: 36807 - DNA, 26 bp, Homo sapiens
aataatgatgaaaaaggaatcacaca

SEQ ID NO: 36808 - DNA, 26 bp, Homo sapiens
ataatgatgaaaaaggaatcacacat

SEQ ID NO: 36809 - DNA, 26 bp, Homo sapiens
taatgatgaaaaaggaatcacacatg

SEQ ID NO: 36810 - DNA, 26 bp, Homo sapiens
aatgatgaaaaaggaatcacacatga

SEQ ID NO: 36811 - DNA, 26 bp, Homo sapiens
atgatgaaaaaggaatcacacatgaa

SEQ ID NO: 36812 - DNA, 26 bp, Homo sapiens
tgatgaaaaaggaatcacacatgaac

SEQ ID NO: 36813 - DNA, 26 bp, Homo sapiens
gatgaaaaaggaatcacacatgaaca

SEQ ID NO: 36814 - DNA, 26 bp, Homo sapiens
atgaaaaaggaatcacacatgaacac

SEQ ID NO: 36815 - DNA, 26 bp, Homo sapiens
tgaaaaaggaatcacacatgaacact

SEQ ID NO: 36816 - DNA, 26 bp, Homo sapiens
gaaaaaggaatcacacatgaacactg

SEQ ID NO: 36817 - DNA, 26 bp, Homo sapiens
aaaaaggaatcacacatgaacactgg

SEQ ID NO: 36818 - DNA, 26 bp, Homo sapiens
aaaaggaatcacacatgaacactgga

SEQ ID NO: 36819 - DNA, 26 bp, Homo sapiens
aaaggaatcacacatgaacactggag

SEQ ID NO: 36820 - DNA, 26 bp, Homo sapiens
aaggaatcacacatgaacactggaga

SEQ ID NO: 36821 - DNA, 26 bp, Homo sapiens
aggaatcacacatgaacactggagag

SEQ ID NO: 36822 - DNA, 26 bp, Homo sapiens
ggaatcacacatgaacactggagaga

SEQ ID NO: 36823 - DNA, 26 bp, Homo sapiens
gaatcacacatgaacactggagagaa

SEQ ID NO: 36824 - DNA, 26 bp, Homo sapiens
aatcacacatgaacactggagagaat

SEQ ID NO: 36825 - DNA, 26 bp, Homo sapiens
atcacacatgaacactggagagaatt

SEQ ID NO: 36826 - DNA, 26 bp, Homo sapiens
tcacacatgaacactggagagaattt

SEQ ID NO: 36827 - DNA, 26 bp, Homo sapiens
cacacatgaacactggagagaattta

SEQ ID NO: 36828 - DNA, 26 bp, Homo sapiens
acacatgaacactggagagaatttag

SEQ ID NO: 36829 - DNA, 26 bp, Homo sapiens
cacatgaacactggagagaatttagt

SEQ ID NO: 36830 - DNA, 26 bp, Homo sapiens
acatgaacactggagagaatttagtt

SEQ ID NO: 36831 - DNA, 26 bp, Homo sapiens
catgaacactggagagaatttagttg

SEQ ID NO: 36832 - DNA, 26 bp, Homo sapiens
atgaacactggagagaatttagttgt

SEQ ID NO: 36833 - DNA, 26 bp, Homo sapiens
tgaacactggagagaatttagttgtt

SEQ ID NO: 36834 - DNA, 26 bp, Homo sapiens
gaacactggagagaatttagttgttc

SEQ ID NO: 36835 - DNA, 26 bp, Homo sapiens
aacactggagagaatttagttgttct

SEQ ID NO: 36836 - DNA, 26 bp, Homo sapiens
acactggagagaatttagttgttctt

SEQ ID NO: 36837 - DNA, 26 bp, Homo sapiens
cactggagagaatttagttgttctta

SEQ ID NO: 36838 - DNA, 26 bp, Homo sapiens
actggagagaatttagttgttcttag

SEQ ID NO: 36839 - DNA, 26 bp, Homo sapiens
ctggagagaatttagttgttcttaga

SEQ ID NO: 36840 - DNA, 26 bp, Homo sapiens
tggagagaatttagttgttcttagag

SEQ ID NO: 36841 - DNA, 26 bp, Homo sapiens
ggagagaatttagttgttcttagaga

SEQ ID NO: 36842 - DNA, 26 bp, Homo sapiens
gagagaatttagttgttcttagagaa

SEQ ID NO: 36843 - DNA, 26 bp, Homo sapiens
agagaatttagttgttcttagagaac

SEQ ID NO: 36844 - DNA, 26 bp, Homo sapiens
gagaatttagttgttcttagagaaca

SEQ ID NO: 36845 - DNA, 26 bp, Homo sapiens
agaatttagttgttcttagagaacaa

SEQ ID NO: 36846 - DNA, 26 bp, Homo sapiens
gaatttagttgttcttagagaacaac

SEQ ID NO: 36847 - DNA, 26 bp, Homo sapiens
aatttagttgttcttagagaacaaca

SEQ ID NO: 36848 - DNA, 26 bp, Homo sapiens
atttagttgttcttagagaacaacat

SEQ ID NO: 36849 - DNA, 26 bp, Homo sapiens
tttagttgttcttagagaacaacata

SEQ ID NO: 36850 - DNA, 26 bp, Homo sapiens
ttagttgttcttagagaacaacataa

SEQ ID NO: 36851 - DNA, 26 bp, Homo sapiens
tagttgttcttagagaacaacataat

SEQ ID NO: 36852 - DNA, 26 bp, Homo sapiens
agttgttcttagagaacaacataatg

SEQ ID NO: 36853 - DNA, 26 bp, Homo sapiens
gttgttcttagagaacaacataatgg

SEQ ID NO: 36854 - DNA, 26 bp, Homo sapiens
ttgttcttagagaacaacataatggc

SEQ ID NO: 36855 - DNA, 26 bp, Homo sapiens
tgttcttagagaacaacataatggca

SEQ ID NO: 36856 - DNA, 26 bp, Homo sapiens
gttcttagagaacaacataatggcat

SEQ ID NO: 36857 - DNA, 26 bp, Homo sapiens
ttcttagagaacaacataatggcatg

SEQ ID NO: 36858 - DNA, 26 bp, Homo sapiens
tcttagagaacaacataatggcatgt

SEQ ID NO: 36859 - DNA, 26 bp, Homo sapiens
cttagagaacaacataatggcatgtg

SEQ ID NO: 36860 - DNA, 26 bp, Homo sapiens
ttagagaacaacataatggcatgtgc

SEQ ID NO: 36861 - DNA, 26 bp, Homo sapiens
tagagaacaacataatggcatgtgca

SEQ ID NO: 36862 - DNA, 26 bp, Homo sapiens
agagaacaacataatggcatgtgcaa

SEQ ID NO: 36863 - DNA, 26 bp, Homo sapiens
gagaacaacataatggcatgtgcaac

SEQ ID NO: 36864 - DNA, 26 bp, Homo sapiens
agaacaacataatggcatgtgcaaca

SEQ ID NO: 36865 - DNA, 26 bp, Homo sapiens
gaacaacataatggcatgtgcaacat

SEQ ID NO: 36866 - DNA, 26 bp, Homo sapiens
aacaacataatggcatgtgcaacatg

SEQ ID NO: 36867 - DNA, 26 bp, Homo sapiens
acaacataatggcatgtgcaacatgt

SEQ ID NO: 36868 - DNA, 26 bp, Homo sapiens
caacataatggcatgtgcaacatgtc

SEQ ID NO: 36869 - DNA, 26 bp, Homo sapiens
aacataatggcatgtgcaacatgtca

SEQ ID NO: 36870 - DNA, 26 bp, Homo sapiens
acataatggcatgtgcaacatgtcaa

SEQ ID NO: 36871 - DNA, 26 bp, Homo sapiens
cataatggcatgtgcaacatgtcaaa

SEQ ID NO: 36872 - DNA, 26 bp, Homo sapiens
ataatggcatgtgcaacatgtcaaag

SEQ ID NO: 36873 - DNA, 26 bp, Homo sapiens
taatggcatgtgcaacatgtcaaagc

SEQ ID NO: 36874 - DNA, 26 bp, Homo sapiens
aatggcatgtgcaacatgtcaaagct

SEQ ID NO: 36875 - DNA, 26 bp, Homo sapiens
atggcatgtgcaacatgtcaaagcta

SEQ ID NO: 36876 - DNA, 26 bp, Homo sapiens
tggcatgtgcaacatgtcaaagctaa

SEQ ID NO: 36877 - DNA, 26 bp, Homo sapiens
ggcatgtgcaacatgtcaaagctaat

SEQ ID NO: 36878 - DNA, 26 bp, Homo sapiens
gcatgtgcaacatgtcaaagctaata

SEQ ID NO: 36879 - DNA, 26 bp, Homo sapiens
catgtgcaacatgtcaaagctaatag

SEQ ID NO: 36880 - DNA, 26 bp, Homo sapiens
atgtgcaacatgtcaaagctaatagc

SEQ ID NO: 36881 - DNA, 26 bp, Homo sapiens
tgtgcaacatgtcaaagctaatagca

SEQ ID NO: 36882 - DNA, 26 bp, Homo sapiens
gtgcaacatgtcaaagctaatagcaa

SEQ ID NO: 36883 - DNA, 26 bp, Homo sapiens
tgcaacatgtcaaagctaatagcaag

SEQ ID NO: 36884 - DNA, 26 bp, Homo sapiens
gcaacatgtcaaagctaatagcaagc

SEQ ID NO: 36885 - DNA, 26 bp, Homo sapiens
caacatgtcaaagctaatagcaagct

SEQ ID NO: 36886 - DNA, 26 bp, Homo sapiens
aacatgtcaaagctaatagcaagcta

SEQ ID NO: 36887 - DNA, 26 bp, Homo sapiens
acatgtcaaagctaatagcaagctat

SEQ ID NO: 36888 - DNA, 26 bp, Homo sapiens
catgtcaaagctaatagcaagctatc

SEQ ID NO: 36889 - DNA, 26 bp, Homo sapiens
atgtcaaagctaatagcaagctatct

SEQ ID NO: 36890 - DNA, 26 bp, Homo sapiens
tgtcaaagctaatagcaagctatctt

SEQ ID NO: 36891 - DNA, 26 bp, Homo sapiens
gtcaaagctaatagcaagctatcttt

SEQ ID NO: 36892 - DNA, 26 bp, Homo sapiens
tcaaagctaatagcaagctatctttc

SEQ ID NO: 36893 - DNA, 26 bp, Homo sapiens
caaagctaatagcaagctatctttca

SEQ ID NO: 36894 - DNA, 26 bp, Homo sapiens
aaagctaatagcaagctatctttcat

SEQ ID NO: 36895 - DNA, 26 bp, Homo sapiens
aagctaatagcaagctatctttcatt

SEQ ID NO: 36896 - DNA, 26 bp, Homo sapiens
agctaatagcaagctatctttcatta

SEQ ID NO: 36897 - DNA, 26 bp, Homo sapiens
gctaatagcaagctatctttcattag

SEQ ID NO: 36898 - DNA, 26 bp, Homo sapiens
ctaatagcaagctatctttcattagt

SEQ ID NO: 36899 - DNA, 26 bp, Homo sapiens
taatagcaagctatctttcattagtt

SEQ ID NO: 36900 - DNA, 26 bp, Homo sapiens
aatagcaagctatctttcattagttc

SEQ ID NO: 36901 - DNA, 26 bp, Homo sapiens
atagcaagctatctttcattagttct

SEQ ID NO: 36902 - DNA, 26 bp, Homo sapiens
tagcaagctatctttcattagttctt

SEQ ID NO: 36903 - DNA, 26 bp, Homo sapiens
agcaagctatctttcattagttctta

SEQ ID NO: 36904 - DNA, 26 bp, Homo sapiens
gcaagctatctttcattagttcttag

SEQ ID NO: 36905 - DNA, 26 bp, Homo sapiens
caagctatctttcattagttcttaga

SEQ ID NO: 36906 - DNA, 26 bp, Homo sapiens
aagctatctttcattagttcttagaa

SEQ ID NO: 36907 - DNA, 26 bp, Homo sapiens
agctatctttcattagttcttagaag

SEQ ID NO: 36908 - DNA, 26 bp, Homo sapiens
gctatctttcattagttcttagaagg

SEQ ID NO: 36909 - DNA, 26 bp, Homo sapiens
ctatctttcattagttcttagaagga

SEQ ID NO: 36910 - DNA, 26 bp, Homo sapiens
tatctttcattagttcttagaaggat

SEQ ID NO: 36911 - DNA, 26 bp, Homo sapiens
atctttcattagttcttagaaggatg

SEQ ID NO: 36912 - DNA, 26 bp, Homo sapiens
tctttcattagttcttagaaggatga

SEQ ID NO: 36913 - DNA, 26 bp, Homo sapiens
ctttcattagttcttagaaggatgaa

SEQ ID NO: 36914 - DNA, 26 bp, Homo sapiens
tttcattagttcttagaaggatgaaa

SEQ ID NO: 36915 - DNA, 26 bp, Homo sapiens
ttcattagttcttagaaggatgaaag

SEQ ID NO: 36916 - DNA, 26 bp, Homo sapiens
tcattagttcttagaaggatgaaagt

SEQ ID NO: 36917 - DNA, 26 bp, Homo sapiens
cattagttcttagaaggatgaaagta

SEQ ID NO: 36918 - DNA, 26 bp, Homo sapiens
attagttcttagaaggatgaaagtaa

SEQ ID NO: 36919 - DNA, 26 bp, Homo sapiens
ttagttcttagaaggatgaaagtaaa

SEQ ID NO: 36920 - DNA, 26 bp, Homo sapiens
tagttcttagaaggatgaaagtaaaa

SEQ ID NO: 36921 - DNA, 26 bp, Homo sapiens
agttcttagaaggatgaaagtaaaag

SEQ ID NO: 36922 - DNA, 26 bp, Homo sapiens
gttcttagaaggatgaaagtaaaaga

SEQ ID NO: 36923 - DNA, 26 bp, Homo sapiens
ttcttagaaggatgaaagtaaaagaa

SEQ ID NO: 36924 - DNA, 26 bp, Homo sapiens
tcttagaaggatgaaagtaaaagaag

SEQ ID NO: 36925 - DNA, 26 bp, Homo sapiens
cttagaaggatgaaagtaaaagaagt

SEQ ID NO: 36926 - DNA, 26 bp, Homo sapiens
ttagaaggatgaaagtaaaagaagtg

SEQ ID NO: 36927 - DNA, 26 bp, Homo sapiens
tagaaggatgaaagtaaaagaagtgt

SEQ ID NO: 36928 - DNA, 26 bp, Homo sapiens
agaaggatgaaagtaaaagaagtgtg

SEQ ID NO: 36929 - DNA, 26 bp, Homo sapiens
gaaggatgaaagtaaaagaagtgtgg

SEQ ID NO: 36930 - DNA, 26 bp, Homo sapiens
aaggatgaaagtaaaagaagtgtggt

SEQ ID NO: 36931 - DNA, 26 bp, Homo sapiens
aggatgaaagtaaaagaagtgtggta

SEQ ID NO: 36932 - DNA, 26 bp, Homo sapiens
ggatgaaagtaaaagaagtgtggtac

SEQ ID NO: 36933 - DNA, 26 bp, Homo sapiens
gatgaaagtaaaagaagtgtggtact

SEQ ID NO: 36934 - DNA, 26 bp, Homo sapiens
atgaaagtaaaagaagtgtggtactg

SEQ ID NO: 36935 - DNA, 26 bp, Homo sapiens
tgaaagtaaaagaagtgtggtactgc

SEQ ID NO: 36936 - DNA, 26 bp, Homo sapiens
gaaagtaaaagaagtgtggtactgct

SEQ ID NO: 36937 - DNA, 26 bp, Homo sapiens
aaagtaaaagaagtgtggtactgcta

SEQ ID NO: 36938 - DNA, 26 bp, Homo sapiens
aagtaaaagaagtgtggtactgctaa

SEQ ID NO: 36939 - DNA, 26 bp, Homo sapiens
agtaaaagaagtgtggtactgctaat

SEQ ID NO: 36940 - DNA, 26 bp, Homo sapiens
gtaaaagaagtgtggtactgctaatg

SEQ ID NO: 36941 - DNA, 26 bp, Homo sapiens
taaaagaagtgtggtactgctaatgt

SEQ ID NO: 36942 - DNA, 26 bp, Homo sapiens
aaaagaagtgtggtactgctaatgtg

SEQ ID NO: 36943 - DNA, 26 bp, Homo sapiens
aaagaagtgtggtactgctaatgtgg

SEQ ID NO: 36944 - DNA, 26 bp, Homo sapiens
aagaagtgtggtactgctaatgtggc

SEQ ID NO: 36945 - DNA, 26 bp, Homo sapiens
agaagtgtggtactgctaatgtggca

SEQ ID NO: 36946 - DNA, 26 bp, Homo sapiens
gaagtgtggtactgctaatgtggcaa

SEQ ID NO: 36947 - DNA, 26 bp, Homo sapiens
aagtgtggtactgctaatgtggcaaa

SEQ ID NO: 36948 - DNA, 26 bp, Homo sapiens
agtgtggtactgctaatgtggcaaag

SEQ ID NO: 36949 - DNA, 26 bp, Homo sapiens
gtgtggtactgctaatgtggcaaagt

SEQ ID NO: 36950 - DNA, 26 bp, Homo sapiens
tgtggtactgctaatgtggcaaagta

SEQ ID NO: 36951 - DNA, 26 bp, Homo sapiens
gtggtactgctaatgtggcaaagtac

SEQ ID NO: 36952 - DNA, 26 bp, Homo sapiens
tggtactgctaatgtggcaaagtaca

SEQ ID NO: 36953 - DNA, 26 bp, Homo sapiens
ggtactgctaatgtggcaaagtacat

SEQ ID NO: 36954 - DNA, 26 bp, Homo sapiens
gtactgctaatgtggcaaagtacatt

SEQ ID NO: 36955 - DNA, 26 bp, Homo sapiens
tactgctaatgtggcaaagtacatta

SEQ ID NO: 36956 - DNA, 26 bp, Homo sapiens
actgctaatgtggcaaagtacattaa

SEQ ID NO: 36957 - DNA, 26 bp, Homo sapiens
ctgctaatgtggcaaagtacattaaa

SEQ ID NO: 36958 - DNA, 26 bp, Homo sapiens
tgctaatgtggcaaagtacattaaat

SEQ ID NO: 36959 - DNA, 26 bp, Homo sapiens
gctaatgtggcaaagtacattaaatg

SEQ ID NO: 36960 - DNA, 26 bp, Homo sapiens
ctaatgtggcaaagtacattaaatgt

SEQ ID NO: 36961 - DNA, 26 bp, Homo sapiens
taatgtggcaaagtacattaaatgta

SEQ ID NO: 36962 - DNA, 26 bp, Homo sapiens
aatgtggcaaagtacattaaatgtaa

SEQ ID NO: 36963 - DNA, 26 bp, Homo sapiens
atgtggcaaagtacattaaatgtaaa

SEQ ID NO: 36964 - DNA, 26 bp, Homo sapiens
tgtggcaaagtacattaaatgtaaac

SEQ ID NO: 36965 - DNA, 26 bp, Homo sapiens
gtggcaaagtacattaaatgtaaaca

SEQ ID NO: 36966 - DNA, 26 bp, Homo sapiens
tggcaaagtacattaaatgtaaacag

SEQ ID NO: 36967 - DNA, 26 bp, Homo sapiens
ggcaaagtacattaaatgtaaacagc

SEQ ID NO: 36968 - DNA, 26 bp, Homo sapiens
gcaaagtacattaaatgtaaacagca

SEQ ID NO: 36969 - DNA, 26 bp, Homo sapiens
caaagtacattaaatgtaaacagcaa

SEQ ID NO: 36970 - DNA, 26 bp, Homo sapiens
aaagtacattaaatgtaaacagcaaa

SEQ ID NO: 36971 - DNA, 26 bp, Homo sapiens
aagtacattaaatgtaaacagcaaac

SEQ ID NO: 36972 - DNA, 26 bp, Homo sapiens
agtacattaaatgtaaacagcaaaca

SEQ ID NO: 36973 - DNA, 26 bp, Homo sapiens
gtacattaaatgtaaacagcaaacac

SEQ ID NO: 36974 - DNA, 26 bp, Homo sapiens
tacattaaatgtaaacagcaaacaca

SEQ ID NO: 36975 - DNA, 26 bp, Homo sapiens
acattaaatgtaaacagcaaacacag

SEQ ID NO: 36976 - DNA, 26 bp, Homo sapiens
cattaaatgtaaacagcaaacacaga

SEQ ID NO: 36977 - DNA, 26 bp, Homo sapiens
attaaatgtaaacagcaaacacagat

SEQ ID NO: 36978 - DNA, 26 bp, Homo sapiens
ttaaatgtaaacagcaaacacagatt

SEQ ID NO: 36979 - DNA, 26 bp, Homo sapiens
taaatgtaaacagcaaacacagattt

SEQ ID NO: 36980 - DNA, 26 bp, Homo sapiens
aaatgtaaacagcaaacacagatttc

SEQ ID NO: 36981 - DNA, 26 bp, Homo sapiens
aatgtaaacagcaaacacagatttcc

SEQ ID NO: 36982 - DNA, 26 bp, Homo sapiens
atgtaaacagcaaacacagatttcct

SEQ ID NO: 36983 - DNA, 26 bp, Homo sapiens
tgtaaacagcaaacacagatttccta

SEQ ID NO: 36984 - DNA, 26 bp, Homo sapiens
gtaaacagcaaacacagatttcctag

SEQ ID NO: 36985 - DNA, 26 bp, Homo sapiens
taaacagcaaacacagatttcctagg

SEQ ID NO: 36986 - DNA, 26 bp, Homo sapiens
aaacagcaaacacagatttcctaggc

SEQ ID NO: 36987 - DNA, 26 bp, Homo sapiens
aacagcaaacacagatttcctaggca

SEQ ID NO: 36988 - DNA, 26 bp, Homo sapiens
acagcaaacacagatttcctaggcat

SEQ ID NO: 36989 - DNA, 26 bp, Homo sapiens
cagcaaacacagatttcctaggcatc

SEQ ID NO: 36990 - DNA, 26 bp, Homo sapiens
agcaaacacagatttcctaggcatct

SEQ ID NO: 36991 - DNA, 26 bp, Homo sapiens
gcaaacacagatttcctaggcatcta

SEQ ID NO: 36992 - DNA, 26 bp, Homo sapiens
caaacacagatttcctaggcatctat

SEQ ID NO: 36993 - DNA, 26 bp, Homo sapiens
aaacacagatttcctaggcatctatt

SEQ ID NO: 36994 - DNA, 26 bp, Homo sapiens
aacacagatttcctaggcatctattt

SEQ ID NO: 36995 - DNA, 26 bp, Homo sapiens
acacagatttcctaggcatctattta

SEQ ID NO: 36996 - DNA, 26 bp, Homo sapiens
cacagatttcctaggcatctatttaa

SEQ ID NO: 36997 - DNA, 26 bp, Homo sapiens
acagatttcctaggcatctatttaaa

SEQ ID NO: 36998 - DNA, 26 bp, Homo sapiens
cagatttcctaggcatctatttaaaa

SEQ ID NO: 36999 - DNA, 26 bp, Homo sapiens
agatttcctaggcatctatttaaaat

SEQ ID NO: 37000 - DNA, 26 bp, Homo sapiens
gatttcctaggcatctatttaaaata

SEQ ID NO: 37001 - DNA, 26 bp, Homo sapiens
atttcctaggcatctatttaaaatat

SEQ ID NO: 37002 - DNA, 26 bp, Homo sapiens
tttcctaggcatctatttaaaatatt

SEQ ID NO: 37003 - DNA, 26 bp, Homo sapiens
ttcctaggcatctatttaaaatattc

SEQ ID NO: 37004 - DNA, 26 bp, Homo sapiens
tcctaggcatctatttaaaatattca

SEQ ID NO: 37005 - DNA, 26 bp, Homo sapiens
cctaggcatctatttaaaatattcat

SEQ ID NO: 37006 - DNA, 26 bp, Homo sapiens
ctaggcatctatttaaaatattcata

SEQ ID NO: 37007 - DNA, 26 bp, Homo sapiens
taggcatctatttaaaatattcatat

SEQ ID NO: 37008 - DNA, 26 bp, Homo sapiens
aggcatctatttaaaatattcatatt

SEQ ID NO: 37009 - DNA, 26 bp, Homo sapiens
ggcatctatttaaaatattcatattc

SEQ ID NO: 37010 - DNA, 26 bp, Homo sapiens
gcatctatttaaaatattcatattca

SEQ ID NO: 37011 - DNA, 26 bp, Homo sapiens
catctatttaaaatattcatattcac

SEQ ID NO: 37012 - DNA, 26 bp, Homo sapiens
atctatttaaaatattcatattcact

SEQ ID NO: 37013 - DNA, 26 bp, Homo sapiens
tctatttaaaatattcatattcactt

SEQ ID NO: 37014 - DNA, 26 bp, Homo sapiens
ctatttaaaatattcatattcacttt

SEQ ID NO: 37015 - DNA, 26 bp, Homo sapiens
tatttaaaatattcatattcactttc

SEQ ID NO: 37016 - DNA, 26 bp, Homo sapiens
atttaaaatattcatattcactttct

SEQ ID NO: 37017 - DNA, 26 bp, Homo sapiens
tttaaaatattcatattcactttctc

SEQ ID NO: 37018 - DNA, 26 bp, Homo sapiens
ttaaaatattcatattcactttctca

SEQ ID NO: 37019 - DNA, 26 bp, Homo sapiens
taaaatattcatattcactttctcaa

SEQ ID NO: 37020 - DNA, 26 bp, Homo sapiens
aaaatattcatattcactttctcaat

SEQ ID NO: 37021 - DNA, 26 bp, Homo sapiens
aaatattcatattcactttctcaata

SEQ ID NO: 37022 - DNA, 26 bp, Homo sapiens
aatattcatattcactttctcaatat

SEQ ID NO: 37023 - DNA, 26 bp, Homo sapiens
atattcatattcactttctcaatata

SEQ ID NO: 37024 - DNA, 26 bp, Homo sapiens
tattcatattcactttctcaatataa

SEQ ID NO: 37025 - DNA, 26 bp, Homo sapiens
attcatattcactttctcaatataag

SEQ ID NO: 37026 - DNA, 26 bp, Homo sapiens
ttcatattcactttctcaatataaga

SEQ ID NO: 37027 - DNA, 26 bp, Homo sapiens
tcatattcactttctcaatataagac

SEQ ID NO: 37028 - DNA, 26 bp, Homo sapiens
catattcactttctcaatataagact

SEQ ID NO: 37029 - DNA, 26 bp, Homo sapiens
atattcactttctcaatataagactc

SEQ ID NO: 37030 - DNA, 26 bp, Homo sapiens
tattcactttctcaatataagactcc

SEQ ID NO: 37031 - DNA, 26 bp, Homo sapiens
attcactttctcaatataagactcca

SEQ ID NO: 37032 - DNA, 26 bp, Homo sapiens
ttcactttctcaatataagactccat

SEQ ID NO: 37033 - DNA, 26 bp, Homo sapiens
tcactttctcaatataagactccatg

SEQ ID NO: 37034 - DNA, 26 bp, Homo sapiens
cactttctcaatataagactccatgt

SEQ ID NO: 37035 - DNA, 26 bp, Homo sapiens
actttctcaatataagactccatgtt

SEQ ID NO: 37036 - DNA, 26 bp, Homo sapiens
ctttctcaatataagactccatgtta

SEQ ID NO: 37037 - DNA, 26 bp, Homo sapiens
tttctcaatataagactccatgttat

SEQ ID NO: 37038 - DNA, 26 bp, Homo sapiens
ttctcaatataagactccatgttatg

SEQ ID NO: 37039 - DNA, 26 bp, Homo sapiens
tctcaatataagactccatgttatgt

SEQ ID NO: 37040 - DNA, 26 bp, Homo sapiens
ctcaatataagactccatgttatgtt

SEQ ID NO: 37041 - DNA, 26 bp, Homo sapiens
tcaatataagactccatgttatgttg

SEQ ID NO: 37042 - DNA, 26 bp, Homo sapiens
caatataagactccatgttatgttgc

SEQ ID NO: 37043 - DNA, 26 bp, Homo sapiens
aatataagactccatgttatgttgca

SEQ ID NO: 37044 - DNA, 26 bp, Homo sapiens
atataagactccatgttatgttgcat

SEQ ID NO: 37045 - DNA, 26 bp, Homo sapiens
tataagactccatgttatgttgcatc

SEQ ID NO: 37046 - DNA, 26 bp, Homo sapiens
ataagactccatgttatgttgcatca

SEQ ID NO: 37047 - DNA, 26 bp, Homo sapiens
taagactccatgttatgttgcatcac

SEQ ID NO: 37048 - DNA, 26 bp, Homo sapiens
aagactccatgttatgttgcatcact

SEQ ID NO: 37049 - DNA, 26 bp, Homo sapiens
agactccatgttatgttgcatcactg

SEQ ID NO: 37050 - DNA, 26 bp, Homo sapiens
gactccatgttatgttgcatcactga

SEQ ID NO: 37051 - DNA, 26 bp, Homo sapiens
actccatgttatgttgcatcactgac

SEQ ID NO: 37052 - DNA, 26 bp, Homo sapiens
ctccatgttatgttgcatcactgaca

SEQ ID NO: 37053 - DNA, 26 bp, Homo sapiens
tccatgttatgttgcatcactgacaa

SEQ ID NO: 37054 - DNA, 26 bp, Homo sapiens
ccatgttatgttgcatcactgacaaa

SEQ ID NO: 37055 - DNA, 26 bp, Homo sapiens
catgttatgttgcatcactgacaaaa

SEQ ID NO: 37056 - DNA, 26 bp, Homo sapiens
atgttatgttgcatcactgacaaaag

SEQ ID NO: 37057 - DNA, 26 bp, Homo sapiens
tgttatgttgcatcactgacaaaagg

SEQ ID NO: 37058 - DNA, 26 bp, Homo sapiens
gttatgttgcatcactgacaaaaggt

SEQ ID NO: 37059 - DNA, 26 bp, Homo sapiens
ttatgttgcatcactgacaaaaggtt

SEQ ID NO: 37060 - DNA, 26 bp, Homo sapiens
tatgttgcatcactgacaaaaggttg

SEQ ID NO: 37061 - DNA, 26 bp, Homo sapiens
atgttgcatcactgacaaaaggttgt

SEQ ID NO: 37062 - DNA, 26 bp, Homo sapiens
tgttgcatcactgacaaaaggttgtt

SEQ ID NO: 37063 - DNA, 26 bp, Homo sapiens
gttgcatcactgacaaaaggttgttt

SEQ ID NO: 37064 - DNA, 26 bp, Homo sapiens
ttgcatcactgacaaaaggttgtttc

SEQ ID NO: 37065 - DNA, 26 bp, Homo sapiens
tgcatcactgacaaaaggttgtttct

SEQ ID NO: 37066 - DNA, 26 bp, Homo sapiens
gcatcactgacaaaaggttgtttcta

SEQ ID NO: 37067 - DNA, 26 bp, Homo sapiens
catcactgacaaaaggttgtttctat

SEQ ID NO: 37068 - DNA, 26 bp, Homo sapiens
atcactgacaaaaggttgtttctatt

SEQ ID NO: 37069 - DNA, 26 bp, Homo sapiens
tcactgacaaaaggttgtttctattt

SEQ ID NO: 37070 - DNA, 26 bp, Homo sapiens
cactgacaaaaggttgtttctatttg

SEQ ID NO: 37071 - DNA, 26 bp, Homo sapiens
actgacaaaaggttgtttctatttgg

SEQ ID NO: 37072 - DNA, 26 bp, Homo sapiens
ctgacaaaaggttgtttctatttgga

SEQ ID NO: 37073 - DNA, 26 bp, Homo sapiens
tgacaaaaggttgtttctatttggat

SEQ ID NO: 37074 - DNA, 26 bp, Homo sapiens
gacaaaaggttgtttctatttggatt

SEQ ID NO: 37075 - DNA, 26 bp, Homo sapiens
acaaaaggttgtttctatttggattg

SEQ ID NO: 37076 - DNA, 26 bp, Homo sapiens
caaaaggttgtttctatttggattga

SEQ ID NO: 37077 - DNA, 26 bp, Homo sapiens
aaaaggttgtttctatttggattgaa

SEQ ID NO: 37078 - DNA, 26 bp, Homo sapiens
aaaggttgtttctatttggattgaat

SEQ ID NO: 37079 - DNA, 26 bp, Homo sapiens
aaggttgtttctatttggattgaata

SEQ ID NO: 37080 - DNA, 26 bp, Homo sapiens
aggttgtttctatttggattgaatat

SEQ ID NO: 37081 - DNA, 26 bp, Homo sapiens
ggttgtttctatttggattgaatatt

SEQ ID NO: 37082 - DNA, 26 bp, Homo sapiens
gttgtttctatttggattgaatattc

SEQ ID NO: 37083 - DNA, 26 bp, Homo sapiens
ttgtttctatttggattgaatattct

SEQ ID NO: 37084 - DNA, 26 bp, Homo sapiens
tgtttctatttggattgaatattctg

SEQ ID NO: 37085 - DNA, 26 bp, Homo sapiens
gtttctatttggattgaatattctgt

SEQ ID NO: 37086 - DNA, 26 bp, Homo sapiens
tttctatttggattgaatattctgtc

SEQ ID NO: 37087 - DNA, 26 bp, Homo sapiens
ttctatttggattgaatattctgtca

SEQ ID NO: 37088 - DNA, 26 bp, Homo sapiens
tctatttggattgaatattctgtcat

SEQ ID NO: 37089 - DNA, 26 bp, Homo sapiens
ctatttggattgaatattctgtcatt

SEQ ID NO: 37090 - DNA, 26 bp, Homo sapiens
tatttggattgaatattctgtcattc

SEQ ID NO: 37091 - DNA, 26 bp, Homo sapiens
atttggattgaatattctgtcattca

SEQ ID NO: 37092 - DNA, 26 bp, Homo sapiens
tttggattgaatattctgtcattcat

SEQ ID NO: 37093 - DNA, 26 bp, Homo sapiens
ttggattgaatattctgtcattcatt

SEQ ID NO: 37094 - DNA, 26 bp, Homo sapiens
tggattgaatattctgtcattcattt

SEQ ID NO: 37095 - DNA, 26 bp, Homo sapiens
ggattgaatattctgtcattcattta

SEQ ID NO: 37096 - DNA, 26 bp, Homo sapiens
gattgaatattctgtcattcatttat

SEQ ID NO: 37097 - DNA, 26 bp, Homo sapiens
attgaatattctgtcattcatttata

SEQ ID NO: 37098 - DNA, 26 bp, Homo sapiens
ttgaatattctgtcattcatttataa

SEQ ID NO: 37099 - DNA, 26 bp, Homo sapiens
tgaatattctgtcattcatttataaa

SEQ ID NO: 37100 - DNA, 26 bp, Homo sapiens
gaatattctgtcattcatttataaat

SEQ ID NO: 37101 - DNA, 26 bp, Homo sapiens
aatattctgtcattcatttataaata

SEQ ID NO: 37102 - DNA, 26 bp, Homo sapiens
atattctgtcattcatttataaataa

SEQ ID NO: 37103 - DNA, 26 bp, Homo sapiens
tattctgtcattcatttataaataaa

SEQ ID NO: 37104 - DNA, 26 bp, Homo sapiens
attctgtcattcatttataaataaat

SEQ ID NO: 37105 - DNA, 26 bp, Homo sapiens
ttctgtcattcatttataaataaatg

SEQ ID NO: 37106 - DNA, 26 bp, Homo sapiens
tctgtcattcatttataaataaatga

SEQ ID NO: 37107 - DNA, 26 bp, Homo sapiens
ctgtcattcatttataaataaatgac

SEQ ID NO: 37108 - DNA, 26 bp, Homo sapiens
tgtcattcatttataaataaatgact

SEQ ID NO: 37109 - DNA, 26 bp, Homo sapiens
gtcattcatttataaataaatgactg

SEQ ID NO: 37110 - DNA, 26 bp, Homo sapiens
tcattcatttataaataaatgactga

SEQ ID NO: 37111 - DNA, 26 bp, Homo sapiens
cattcatttataaataaatgactgaa

SEQ ID NO: 37112 - DNA, 26 bp, Homo sapiens
attcatttataaataaatgactgaat

SEQ ID NO: 37113 - DNA, 26 bp, Homo sapiens
ttcatttataaataaatgactgaatg

SEQ ID NO: 37114 - DNA, 26 bp, Homo sapiens
tcatttataaataaatgactgaatgt

SEQ ID NO: 37115 - DNA, 26 bp, Homo sapiens
catttataaataaatgactgaatgta

SEQ ID NO: 37116 - DNA, 26 bp, Homo sapiens
atttataaataaatgactgaatgtat

SEQ ID NO: 37117 - DNA, 26 bp, Homo sapiens
tttataaataaatgactgaatgtatt

SEQ ID NO: 37118 - DNA, 26 bp, Homo sapiens
ttataaataaatgactgaatgtattt

SEQ ID NO: 37119 - DNA, 26 bp, Homo sapiens
tataaataaatgactgaatgtattta

SEQ ID NO: 37120 - DNA, 26 bp, Homo sapiens
ataaataaatgactgaatgtatttat

SEQ ID NO: 37121 - DNA, 26 bp, Homo sapiens
taaataaatgactgaatgtatttatt

SEQ ID NO: 37122 - DNA, 26 bp, Homo sapiens
aaataaatgactgaatgtatttattg

SEQ ID NO: 37123 - DNA, 26 bp, Homo sapiens
aataaatgactgaatgtatttattgc

SEQ ID NO: 37124 - DNA, 26 bp, Homo sapiens
ataaatgactgaatgtatttattgct

SEQ ID NO: 37125 - DNA, 26 bp, Homo sapiens
taaatgactgaatgtatttattgctc

SEQ ID NO: 37126 - DNA, 26 bp, Homo sapiens
aaatgactgaatgtatttattgctct

SEQ ID NO: 37127 - DNA, 26 bp, Homo sapiens
aatgactgaatgtatttattgctcta

SEQ ID NO: 37128 - DNA, 26 bp, Homo sapiens
atgactgaatgtatttattgctctaa

SEQ ID NO: 37129 - DNA, 26 bp, Homo sapiens
tgactgaatgtatttattgctctaag

SEQ ID NO: 37130 - DNA, 26 bp, Homo sapiens
gactgaatgtatttattgctctaagt

SEQ ID NO: 37131 - DNA, 26 bp, Homo sapiens
actgaatgtatttattgctctaagtt

SEQ ID NO: 37132 - DNA, 26 bp, Homo sapiens
ctgaatgtatttattgctctaagttc

SEQ ID NO: 37133 - DNA, 26 bp, Homo sapiens
tgaatgtatttattgctctaagttct

SEQ ID NO: 37134 - DNA, 26 bp, Homo sapiens
gaatgtatttattgctctaagttctg

SEQ ID NO: 37135 - DNA, 26 bp, Homo sapiens
aatgtatttattgctctaagttctga

SEQ ID NO: 37136 - DNA, 26 bp, Homo sapiens
atgtatttattgctctaagttctgag

SEQ ID NO: 37137 - DNA, 26 bp, Homo sapiens
tgtatttattgctctaagttctgagg

SEQ ID NO: 37138 - DNA, 26 bp, Homo sapiens
gtatttattgctctaagttctgaggg

SEQ ID NO: 37139 - DNA, 26 bp, Homo sapiens
tatttattgctctaagttctgagggt

SEQ ID NO: 37140 - DNA, 26 bp, Homo sapiens
atttattgctctaagttctgagggtt

SEQ ID NO: 37141 - DNA, 26 bp, Homo sapiens
tttattgctctaagttctgagggttt

SEQ ID NO: 37142 - DNA, 26 bp, Homo sapiens
ttattgctctaagttctgagggtttg

SEQ ID NO: 37143 - DNA, 26 bp, Homo sapiens
tattgctctaagttctgagggtttgg

SEQ ID NO: 37144 - DNA, 26 bp, Homo sapiens
attgctctaagttctgagggtttggt

SEQ ID NO: 37145 - DNA, 26 bp, Homo sapiens
ttgctctaagttctgagggtttggtt

SEQ ID NO: 37146 - DNA, 26 bp, Homo sapiens
tgctctaagttctgagggtttggttg

SEQ ID NO: 37147 - DNA, 26 bp, Homo sapiens
gctctaagttctgagggtttggttga

SEQ ID NO: 37148 - DNA, 26 bp, Homo sapiens
ctctaagttctgagggtttggttgaa

SEQ ID NO: 37149 - DNA, 26 bp, Homo sapiens
tctaagttctgagggtttggttgaac

SEQ ID NO: 37150 - DNA, 26 bp, Homo sapiens
ctaagttctgagggtttggttgaaca

SEQ ID NO: 37151 - DNA, 26 bp, Homo sapiens
taagttctgagggtttggttgaacat

SEQ ID NO: 37152 - DNA, 26 bp, Homo sapiens
aagttctgagggtttggttgaacatg

SEQ ID NO: 37153 - DNA, 26 bp, Homo sapiens
agttctgagggtttggttgaacatgg

SEQ ID NO: 37154 - DNA, 26 bp, Homo sapiens
gttctgagggtttggttgaacatgga

SEQ ID NO: 37155 - DNA, 26 bp, Homo sapiens
ttctgagggtttggttgaacatggag

SEQ ID NO: 37156 - DNA, 26 bp, Homo sapiens
tctgagggtttggttgaacatggaga

SEQ ID NO: 37157 - DNA, 26 bp, Homo sapiens
ctgagggtttggttgaacatggagat

SEQ ID NO: 37158 - DNA, 26 bp, Homo sapiens
tgagggtttggttgaacatggagatc

SEQ ID NO: 37159 - DNA, 26 bp, Homo sapiens
gagggtttggttgaacatggagatcc

SEQ ID NO: 37160 - DNA, 26 bp, Homo sapiens
agggtttggttgaacatggagatccc

SEQ ID NO: 37161 - DNA, 26 bp, Homo sapiens
gggtttggttgaacatggagatcccc

SEQ ID NO: 37162 - DNA, 26 bp, Homo sapiens
ggtttggttgaacatggagatccccc

SEQ ID NO: 37163 - DNA, 26 bp, Homo sapiens
gtttggttgaacatggagatcccccc

SEQ ID NO: 37164 - DNA, 26 bp, Homo sapiens
tttggttgaacatggagatccccccc

SEQ ID NO: 37165 - DNA, 26 bp, Homo sapiens
ttggttgaacatggagatcccccccg

SEQ ID NO: 37166 - DNA, 26 bp, Homo sapiens
tggttgaacatggagatcccccccgc

SEQ ID NO: 37167 - DNA, 26 bp, Homo sapiens
ggttgaacatggagatcccccccgcc

SEQ ID NO: 37168 - DNA, 26 bp, Homo sapiens
gttgaacatggagatcccccccgccc

SEQ ID NO: 37169 - DNA, 26 bp, Homo sapiens
ttgaacatggagatcccccccgccca

SEQ ID NO: 37170 - DNA, 26 bp, Homo sapiens
tgaacatggagatcccccccgcccat

SEQ ID NO: 37171 - DNA, 26 bp, Homo sapiens
gaacatggagatcccccccgcccatc

SEQ ID NO: 37172 - DNA, 26 bp, Homo sapiens
aacatggagatcccccccgcccatct

SEQ ID NO: 37173 - DNA, 26 bp, Homo sapiens
acatggagatcccccccgcccatcta

SEQ ID NO: 37174 - DNA, 26 bp, Homo sapiens
catggagatcccccccgcccatctag

SEQ ID NO: 37175 - DNA, 26 bp, Homo sapiens
atggagatcccccccgcccatctagg

SEQ ID NO: 37176 - DNA, 26 bp, Homo sapiens
tggagatcccccccgcccatctagga

SEQ ID NO: 37177 - DNA, 26 bp, Homo sapiens
ggagatcccccccgcccatctaggat

SEQ ID NO: 37178 - DNA, 26 bp, Homo sapiens
gagatcccccccgcccatctaggatg

SEQ ID NO: 37179 - DNA, 26 bp, Homo sapiens
agatcccccccgcccatctaggatgg

SEQ ID NO: 37180 - DNA, 26 bp, Homo sapiens
gatcccccccgcccatctaggatggc

SEQ ID NO: 37181 - DNA, 26 bp, Homo sapiens
atcccccccgcccatctaggatggct

SEQ ID NO: 37182 - DNA, 26 bp, Homo sapiens
tcccccccgcccatctaggatggcta

SEQ ID NO: 37183 - DNA, 26 bp, Homo sapiens
cccccccgcccatctaggatggctac

SEQ ID NO: 37184 - DNA, 26 bp, Homo sapiens
ccccccgcccatctaggatggctact

SEQ ID NO: 37185 - DNA, 26 bp, Homo sapiens
cccccgcccatctaggatggctactt

SEQ ID NO: 37186 - DNA, 26 bp, Homo sapiens
ccccgcccatctaggatggctacttg

SEQ ID NO: 37187 - DNA, 26 bp, Homo sapiens
cccgcccatctaggatggctacttgg

SEQ ID NO: 37188 - DNA, 26 bp, Homo sapiens
ccgcccatctaggatggctacttggt

SEQ ID NO: 37189 - DNA, 26 bp, Homo sapiens
cgcccatctaggatggctacttggtg

SEQ ID NO: 37190 - DNA, 26 bp, Homo sapiens
gcccatctaggatggctacttggtgt

SEQ ID NO: 37191 - DNA, 26 bp, Homo sapiens
cccatctaggatggctacttggtgtg

SEQ ID NO: 37192 - DNA, 26 bp, Homo sapiens
ccatctaggatggctacttggtgtga

SEQ ID NO: 37193 - DNA, 26 bp, Homo sapiens
catctaggatggctacttggtgtgaa

SEQ ID NO: 37194 - DNA, 26 bp, Homo sapiens
atctaggatggctacttggtgtgaag

SEQ ID NO: 37195 - DNA, 26 bp, Homo sapiens
tctaggatggctacttggtgtgaagt

SEQ ID NO: 37196 - DNA, 26 bp, Homo sapiens
ctaggatggctacttggtgtgaagtc

SEQ ID NO: 37197 - DNA, 26 bp, Homo sapiens
taggatggctacttggtgtgaagtca

SEQ ID NO: 37198 - DNA, 26 bp, Homo sapiens
aggatggctacttggtgtgaagtcag

SEQ ID NO: 37199 - DNA, 26 bp, Homo sapiens
ggatggctacttggtgtgaagtcagg

SEQ ID NO: 37200 - DNA, 26 bp, Homo sapiens
gatggctacttggtgtgaagtcaggc

SEQ ID NO: 37201 - DNA, 26 bp, Homo sapiens
atggctacttggtgtgaagtcaggct

SEQ ID NO: 37202 - DNA, 26 bp, Homo sapiens
tggctacttggtgtgaagtcaggctt

SEQ ID NO: 37203 - DNA, 26 bp, Homo sapiens
ggctacttggtgtgaagtcaggcttc

SEQ ID NO: 37204 - DNA, 26 bp, Homo sapiens
gctacttggtgtgaagtcaggcttct

SEQ ID NO: 37205 - DNA, 26 bp, Homo sapiens
ctacttggtgtgaagtcaggcttctg

SEQ ID NO: 37206 - DNA, 26 bp, Homo sapiens
tacttggtgtgaagtcaggcttctgg

SEQ ID NO: 37207 - DNA, 26 bp, Homo sapiens
acttggtgtgaagtcaggcttctgga

SEQ ID NO: 37208 - DNA, 26 bp, Homo sapiens
cttggtgtgaagtcaggcttctggat

SEQ ID NO: 37209 - DNA, 26 bp, Homo sapiens
ttggtgtgaagtcaggcttctggatt

SEQ ID NO: 37210 - DNA, 26 bp, Homo sapiens
tggtgtgaagtcaggcttctggattc

SEQ ID NO: 37211 - DNA, 26 bp, Homo sapiens
ggtgtgaagtcaggcttctggattct

SEQ ID NO: 37212 - DNA, 26 bp, Homo sapiens
gtgtgaagtcaggcttctggattctt

SEQ ID NO: 37213 - DNA, 26 bp, Homo sapiens
tgtgaagtcaggcttctggattcttt

SEQ ID NO: 37214 - DNA, 26 bp, Homo sapiens
gtgaagtcaggcttctggattctttt

SEQ ID NO: 37215 - DNA, 26 bp, Homo sapiens
tgaagtcaggcttctggattctttta

SEQ ID NO: 37216 - DNA, 26 bp, Homo sapiens
gaagtcaggcttctggattcttttaa

SEQ ID NO: 37217 - DNA, 26 bp, Homo sapiens
aagtcaggcttctggattcttttaaa

SEQ ID NO: 37218 - DNA, 26 bp, Homo sapiens
agtcaggcttctggattcttttaaaa

SEQ ID NO: 37219 - DNA, 26 bp, Homo sapiens
gtcaggcttctggattcttttaaaaa

SEQ ID NO: 37220 - DNA, 26 bp, Homo sapiens
tcaggcttctggattcttttaaaaat

SEQ ID NO: 37221 - DNA, 26 bp, Homo sapiens
caggcttctggattcttttaaaaatt

SEQ ID NO: 37222 - DNA, 26 bp, Homo sapiens
aggcttctggattcttttaaaaatta

SEQ ID NO: 37223 - DNA, 26 bp, Homo sapiens
ggcttctggattcttttaaaaattat

SEQ ID NO: 37224 - DNA, 26 bp, Homo sapiens
gcttctggattcttttaaaaattatt

SEQ ID NO: 37225 - DNA, 26 bp, Homo sapiens
cttctggattcttttaaaaattattc

SEQ ID NO: 37226 - DNA, 26 bp, Homo sapiens
ttctggattcttttaaaaattattct

SEQ ID NO: 37227 - DNA, 26 bp, Homo sapiens
tctggattcttttaaaaattattctg

SEQ ID NO: 37228 - DNA, 26 bp, Homo sapiens
ctggattcttttaaaaattattctga

SEQ ID NO: 37229 - DNA, 26 bp, Homo sapiens
tggattcttttaaaaattattctgag

SEQ ID NO: 37230 - DNA, 26 bp, Homo sapiens
ggattcttttaaaaattattctgaga

SEQ ID NO: 37231 - DNA, 26 bp, Homo sapiens
gattcttttaaaaattattctgagag

SEQ ID NO: 37232 - DNA, 26 bp, Homo sapiens
attcttttaaaaattattctgagagc

SEQ ID NO: 37233 - DNA, 26 bp, Homo sapiens
ttcttttaaaaattattctgagagcc

SEQ ID NO: 37234 - DNA, 26 bp, Homo sapiens
tcttttaaaaattattctgagagcct

SEQ ID NO: 37235 - DNA, 26 bp, Homo sapiens
cttttaaaaattattctgagagcctg

SEQ ID NO: 37236 - DNA, 26 bp, Homo sapiens
ttttaaaaattattctgagagcctga

SEQ ID NO: 37237 - DNA, 26 bp, Homo sapiens
tttaaaaattattctgagagcctgac

SEQ ID NO: 37238 - DNA, 26 bp, Homo sapiens
ttaaaaattattctgagagcctgaca

SEQ ID NO: 37239 - DNA, 26 bp, Homo sapiens
taaaaattattctgagagcctgacaa

SEQ ID NO: 37240 - DNA, 26 bp, Homo sapiens
aaaaattattctgagagcctgacaac

SEQ ID NO: 37241 - DNA, 26 bp, Homo sapiens
aaaattattctgagagcctgacaaca

SEQ ID NO: 37242 - DNA, 26 bp, Homo sapiens
aaattattctgagagcctgacaacac

SEQ ID NO: 37243 - DNA, 26 bp, Homo sapiens
aattattctgagagcctgacaacact

SEQ ID NO: 37244 - DNA, 26 bp, Homo sapiens
attattctgagagcctgacaacactg

SEQ ID NO: 37245 - DNA, 26 bp, Homo sapiens
ttattctgagagcctgacaacactga

SEQ ID NO: 37246 - DNA, 26 bp, Homo sapiens
tattctgagagcctgacaacactgat

SEQ ID NO: 37247 - DNA, 26 bp, Homo sapiens
attctgagagcctgacaacactgatc

SEQ ID NO: 37248 - DNA, 26 bp, Homo sapiens
ttctgagagcctgacaacactgatct

SEQ ID NO: 37249 - DNA, 26 bp, Homo sapiens
tctgagagcctgacaacactgatctc

SEQ ID NO: 37250 - DNA, 26 bp, Homo sapiens
ctgagagcctgacaacactgatctca

SEQ ID NO: 37251 - DNA, 26 bp, Homo sapiens
tgagagcctgacaacactgatctcac

SEQ ID NO: 37252 - DNA, 26 bp, Homo sapiens
gagagcctgacaacactgatctcacc

SEQ ID NO: 37253 - DNA, 26 bp, Homo sapiens
agagcctgacaacactgatctcacct

SEQ ID NO: 37254 - DNA, 26 bp, Homo sapiens
gagcctgacaacactgatctcaccta

SEQ ID NO: 37255 - DNA, 26 bp, Homo sapiens
agcctgacaacactgatctcacctac

SEQ ID NO: 37256 - DNA, 26 bp, Homo sapiens
gcctgacaacactgatctcacctaca

SEQ ID NO: 37257 - DNA, 26 bp, Homo sapiens
cctgacaacactgatctcacctacac

SEQ ID NO: 37258 - DNA, 26 bp, Homo sapiens
ctgacaacactgatctcacctacaca

SEQ ID NO: 37259 - DNA, 26 bp, Homo sapiens
tgacaacactgatctcacctacacaa

SEQ ID NO: 37260 - DNA, 26 bp, Homo sapiens
gacaacactgatctcacctacacaaa

SEQ ID NO: 37261 - DNA, 26 bp, Homo sapiens
acaacactgatctcacctacacaaac

SEQ ID NO: 37262 - DNA, 26 bp, Homo sapiens
caacactgatctcacctacacaaaca

SEQ ID NO: 37263 - DNA, 26 bp, Homo sapiens
aacactgatctcacctacacaaacag

SEQ ID NO: 37264 - DNA, 26 bp, Homo sapiens
acactgatctcacctacacaaacaga

SEQ ID NO: 37265 - DNA, 26 bp, Homo sapiens
cactgatctcacctacacaaacagac

SEQ ID NO: 37266 - DNA, 26 bp, Homo sapiens
actgatctcacctacacaaacagaca

SEQ ID NO: 37267 - DNA, 26 bp, Homo sapiens
ctgatctcacctacacaaacagacag

SEQ ID NO: 37268 - DNA, 26 bp, Homo sapiens
tgatctcacctacacaaacagacaga

SEQ ID NO: 37269 - DNA, 26 bp, Homo sapiens
gatctcacctacacaaacagacagac

SEQ ID NO: 37270 - DNA, 26 bp, Homo sapiens
atctcacctacacaaacagacagaca

SEQ ID NO: 37271 - DNA, 26 bp, Homo sapiens
tctcacctacacaaacagacagacag

SEQ ID NO: 37272 - DNA, 26 bp, Homo sapiens
ctcacctacacaaacagacagacaga

SEQ ID NO: 37273 - DNA, 26 bp, Homo sapiens
tcacctacacaaacagacagacagac

SEQ ID NO: 37274 - DNA, 26 bp, Homo sapiens
cacctacacaaacagacagacagacc

SEQ ID NO: 37275 - DNA, 26 bp, Homo sapiens
acctacacaaacagacagacagaccc

SEQ ID NO: 37276 - DNA, 26 bp, Homo sapiens
cctacacaaacagacagacagaccca

SEQ ID NO: 37277 - DNA, 26 bp, Homo sapiens
ctacacaaacagacagacagacccag

SEQ ID NO: 37278 - DNA, 26 bp, Homo sapiens
tacacaaacagacagacagacccaga

SEQ ID NO: 37279 - DNA, 26 bp, Homo sapiens
acacaaacagacagacagacccagaa

SEQ ID NO: 37280 - DNA, 26 bp, Homo sapiens
cacaaacagacagacagacccagaag

SEQ ID NO: 37281 - DNA, 26 bp, Homo sapiens
acaaacagacagacagacccagaagt

SEQ ID NO: 37282 - DNA, 26 bp, Homo sapiens
caaacagacagacagacccagaagtg

SEQ ID NO: 37283 - DNA, 26 bp, Homo sapiens
aaacagacagacagacccagaagtga

SEQ ID NO: 37284 - DNA, 26 bp, Homo sapiens
aacagacagacagacccagaagtgaa

SEQ ID NO: 37285 - DNA, 26 bp, Homo sapiens
acagacagacagacccagaagtgaaa

SEQ ID NO: 37286 - DNA, 26 bp, Homo sapiens
cagacagacagacccagaagtgaaac

SEQ ID NO: 37287 - DNA, 26 bp, Homo sapiens
agacagacagacccagaagtgaaacc

SEQ ID NO: 37288 - DNA, 26 bp, Homo sapiens
gacagacagacccagaagtgaaacca

SEQ ID NO: 37289 - DNA, 26 bp, Homo sapiens
acagacagacccagaagtgaaaccaa

SEQ ID NO: 37290 - DNA, 26 bp, Homo sapiens
cagacagacccagaagtgaaaccaat

SEQ ID NO: 37291 - DNA, 26 bp, Homo sapiens
agacagacccagaagtgaaaccaatt

SEQ ID NO: 37292 - DNA, 26 bp, Homo sapiens
gacagacccagaagtgaaaccaattg

SEQ ID NO: 37293 - DNA, 26 bp, Homo sapiens
acagacccagaagtgaaaccaattgc

SEQ ID NO: 37294 - DNA, 26 bp, Homo sapiens
cagacccagaagtgaaaccaattgca

SEQ ID NO: 37295 - DNA, 26 bp, Homo sapiens
agacccagaagtgaaaccaattgcac

SEQ ID NO: 37296 - DNA, 26 bp, Homo sapiens
gacccagaagtgaaaccaattgcact

SEQ ID NO: 37297 - DNA, 26 bp, Homo sapiens
acccagaagtgaaaccaattgcactg

SEQ ID NO: 37298 - DNA, 26 bp, Homo sapiens
cccagaagtgaaaccaattgcactgt

SEQ ID NO: 37299 - DNA, 26 bp, Homo sapiens
ccagaagtgaaaccaattgcactgtg

SEQ ID NO: 37300 - DNA, 26 bp, Homo sapiens
cagaagtgaaaccaattgcactgtgg

SEQ ID NO: 37301 - DNA, 26 bp, Homo sapiens
agaagtgaaaccaattgcactgtgga

SEQ ID NO: 37302 - DNA, 26 bp, Homo sapiens
gaagtgaaaccaattgcactgtggag

SEQ ID NO: 37303 - DNA, 26 bp, Homo sapiens
aagtgaaaccaattgcactgtggaga

SEQ ID NO: 37304 - DNA, 26 bp, Homo sapiens
agtgaaaccaattgcactgtggagac

SEQ ID NO: 37305 - DNA, 26 bp, Homo sapiens
gtgaaaccaattgcactgtggagaca

SEQ ID NO: 37306 - DNA, 26 bp, Homo sapiens
tgaaaccaattgcactgtggagacat

SEQ ID NO: 37307 - DNA, 26 bp, Homo sapiens
gaaaccaattgcactgtggagacatt

SEQ ID NO: 37308 - DNA, 26 bp, Homo sapiens
aaaccaattgcactgtggagacattg

SEQ ID NO: 37309 - DNA, 26 bp, Homo sapiens
aaccaattgcactgtggagacattgc

SEQ ID NO: 37310 - DNA, 26 bp, Homo sapiens
accaattgcactgtggagacattgct

SEQ ID NO: 37311 - DNA, 26 bp, Homo sapiens
ccaattgcactgtggagacattgcta

SEQ ID NO: 37312 - DNA, 26 bp, Homo sapiens
caattgcactgtggagacattgctag

SEQ ID NO: 37313 - DNA, 26 bp, Homo sapiens
aattgcactgtggagacattgctagt

SEQ ID NO: 37314 - DNA, 26 bp, Homo sapiens
attgcactgtggagacattgctagtc

SEQ ID NO: 37315 - DNA, 26 bp, Homo sapiens
ttgcactgtggagacattgctagtca

SEQ ID NO: 37316 - DNA, 26 bp, Homo sapiens
tgcactgtggagacattgctagtcag

SEQ ID NO: 37317 - DNA, 26 bp, Homo sapiens
gcactgtggagacattgctagtcagt

SEQ ID NO: 37318 - DNA, 26 bp, Homo sapiens
cactgtggagacattgctagtcagtc

SEQ ID NO: 37319 - DNA, 26 bp, Homo sapiens
actgtggagacattgctagtcagtct

SEQ ID NO: 37320 - DNA, 26 bp, Homo sapiens
ctgtggagacattgctagtcagtctt

SEQ ID NO: 37321 - DNA, 26 bp, Homo sapiens
tgtggagacattgctagtcagtcttc

SEQ ID NO: 37322 - DNA, 26 bp, Homo sapiens
gtggagacattgctagtcagtcttct

SEQ ID NO: 37323 - DNA, 26 bp, Homo sapiens
tggagacattgctagtcagtcttctc

SEQ ID NO: 37324 - DNA, 26 bp, Homo sapiens
ggagacattgctagtcagtcttctca

SEQ ID NO: 37325 - DNA, 26 bp, Homo sapiens
gagacattgctagtcagtcttctcat

SEQ ID NO: 37326 - DNA, 26 bp, Homo sapiens
agacattgctagtcagtcttctcatc

SEQ ID NO: 37327 - DNA, 26 bp, Homo sapiens
gacattgctagtcagtcttctcatct

SEQ ID NO: 37328 - DNA, 26 bp, Homo sapiens
acattgctagtcagtcttctcatctc

SEQ ID NO: 37329 - DNA, 26 bp, Homo sapiens
cattgctagtcagtcttctcatctct

SEQ ID NO: 37330 - DNA, 26 bp, Homo sapiens
attgctagtcagtcttctcatctctt

SEQ ID NO: 37331 - DNA, 26 bp, Homo sapiens
ttgctagtcagtcttctcatctctta

SEQ ID NO: 37332 - DNA, 26 bp, Homo sapiens
tgctagtcagtcttctcatctcttaa

SEQ ID NO: 37333 - DNA, 26 bp, Homo sapiens
gctagtcagtcttctcatctcttaaa

SEQ ID NO: 37334 - DNA, 26 bp, Homo sapiens
ctagtcagtcttctcatctcttaaaa

SEQ ID NO: 37335 - DNA, 26 bp, Homo sapiens
tagtcagtcttctcatctcttaaaaa

SEQ ID NO: 37336 - DNA, 26 bp, Homo sapiens
agtcagtcttctcatctcttaaaaat

SEQ ID NO: 37337 - DNA, 26 bp, Homo sapiens
gtcagtcttctcatctcttaaaaata

SEQ ID NO: 37338 - DNA, 26 bp, Homo sapiens
tcagtcttctcatctcttaaaaataa

SEQ ID NO: 37339 - DNA, 26 bp, Homo sapiens
cagtcttctcatctcttaaaaataaa

SEQ ID NO: 37340 - DNA, 26 bp, Homo sapiens
agtcttctcatctcttaaaaataaat

SEQ ID NO: 37341 - DNA, 26 bp, Homo sapiens
gtcttctcatctcttaaaaataaata

SEQ ID NO: 37342 - DNA, 26 bp, Homo sapiens
tcttctcatctcttaaaaataaatag

SEQ ID NO: 37343 - DNA, 26 bp, Homo sapiens
cttctcatctcttaaaaataaatagc

SEQ ID NO: 37344 - DNA, 26 bp, Homo sapiens
ttctcatctcttaaaaataaatagca

SEQ ID NO: 37345 - DNA, 26 bp, Homo sapiens
tctcatctcttaaaaataaatagcaa

SEQ ID NO: 37346 - DNA, 26 bp, Homo sapiens
ctcatctcttaaaaataaatagcaat

SEQ ID NO: 37347 - DNA, 26 bp, Homo sapiens
tcatctcttaaaaataaatagcaata

SEQ ID NO: 37348 - DNA, 26 bp, Homo sapiens
catctcttaaaaataaatagcaatag

SEQ ID NO: 37349 - DNA, 26 bp, Homo sapiens
atctcttaaaaataaatagcaatagg

SEQ ID NO: 37350 - DNA, 26 bp, Homo sapiens
tctcttaaaaataaatagcaatagga

SEQ ID NO: 37351 - DNA, 26 bp, Homo sapiens
ctcttaaaaataaatagcaataggaa

SEQ ID NO: 37352 - DNA, 26 bp, Homo sapiens
tcttaaaaataaatagcaataggaag

SEQ ID NO: 37353 - DNA, 26 bp, Homo sapiens
cttaaaaataaatagcaataggaagg

SEQ ID NO: 37354 - DNA, 26 bp, Homo sapiens
ttaaaaataaatagcaataggaaggt

SEQ ID NO: 37355 - DNA, 26 bp, Homo sapiens
taaaaataaatagcaataggaaggtc

SEQ ID NO: 37356 - DNA, 26 bp, Homo sapiens
aaaaataaatagcaataggaaggtct

SEQ ID NO: 37357 - DNA, 26 bp, Homo sapiens
aaaataaatagcaataggaaggtctc

SEQ ID NO: 37358 - DNA, 26 bp, Homo sapiens
aaataaatagcaataggaaggtctct

SEQ ID NO: 37359 - DNA, 26 bp, Homo sapiens
aataaatagcaataggaaggtctcta

SEQ ID NO: 37360 - DNA, 26 bp, Homo sapiens
ataaatagcaataggaaggtctctat

SEQ ID NO: 37361 - DNA, 26 bp, Homo sapiens
taaatagcaataggaaggtctctata

SEQ ID NO: 37362 - DNA, 26 bp, Homo sapiens
aaatagcaataggaaggtctctataa

SEQ ID NO: 37363 - DNA, 26 bp, Homo sapiens
aatagcaataggaaggtctctataat

SEQ ID NO: 37364 - DNA, 26 bp, Homo sapiens
atagcaataggaaggtctctataata

SEQ ID NO: 37365 - DNA, 26 bp, Homo sapiens
tagcaataggaaggtctctataatac

SEQ ID NO: 37366 - DNA, 26 bp, Homo sapiens
agcaataggaaggtctctataataca

SEQ ID NO: 37367 - DNA, 26 bp, Homo sapiens
gcaataggaaggtctctataatacaa

SEQ ID NO: 37368 - DNA, 26 bp, Homo sapiens
caataggaaggtctctataatacaat

SEQ ID NO: 37369 - DNA, 26 bp, Homo sapiens
aataggaaggtctctataatacaatc

SEQ ID NO: 37370 - DNA, 26 bp, Homo sapiens
ataggaaggtctctataatacaatct

SEQ ID NO: 37371 - DNA, 26 bp, Homo sapiens
taggaaggtctctataatacaatctg

SEQ ID NO: 37372 - DNA, 26 bp, Homo sapiens
aggaaggtctctataatacaatctga

SEQ ID NO: 37373 - DNA, 26 bp, Homo sapiens
ggaaggtctctataatacaatctgat

SEQ ID NO: 37374 - DNA, 26 bp, Homo sapiens
gaaggtctctataatacaatctgatg

SEQ ID NO: 37375 - DNA, 26 bp, Homo sapiens
aaggtctctataatacaatctgatgg

SEQ ID NO: 37376 - DNA, 26 bp, Homo sapiens
aggtctctataatacaatctgatgga

SEQ ID NO: 37377 - DNA, 26 bp, Homo sapiens
ggtctctataatacaatctgatggaa

SEQ ID NO: 37378 - DNA, 26 bp, Homo sapiens
gtctctataatacaatctgatggaac

SEQ ID NO: 37379 - DNA, 26 bp, Homo sapiens
tctctataatacaatctgatggaacc

SEQ ID NO: 37380 - DNA, 26 bp, Homo sapiens
ctctataatacaatctgatggaacct

SEQ ID NO: 37381 - DNA, 26 bp, Homo sapiens
tctataatacaatctgatggaacctc

SEQ ID NO: 37382 - DNA, 26 bp, Homo sapiens
ctataatacaatctgatggaacctct

SEQ ID NO: 37383 - DNA, 26 bp, Homo sapiens
tataatacaatctgatggaacctctt

SEQ ID NO: 37384 - DNA, 26 bp, Homo sapiens
ataatacaatctgatggaacctcttt

SEQ ID NO: 37385 - DNA, 26 bp, Homo sapiens
taatacaatctgatggaacctcttta

SEQ ID NO: 37386 - DNA, 26 bp, Homo sapiens
aatacaatctgatggaacctctttac

SEQ ID NO: 37387 - DNA, 26 bp, Homo sapiens
atacaatctgatggaacctctttact

SEQ ID NO: 37388 - DNA, 26 bp, Homo sapiens
tacaatctgatggaacctctttacta

SEQ ID NO: 37389 - DNA, 26 bp, Homo sapiens
acaatctgatggaacctctttactaa

SEQ ID NO: 37390 - DNA, 26 bp, Homo sapiens
caatctgatggaacctctttactaac

SEQ ID NO: 37391 - DNA, 26 bp, Homo sapiens
aatctgatggaacctctttactaaca

SEQ ID NO: 37392 - DNA, 26 bp, Homo sapiens
atctgatggaacctctttactaacat

SEQ ID NO: 37393 - DNA, 26 bp, Homo sapiens
tctgatggaacctctttactaacatt

SEQ ID NO: 37394 - DNA, 26 bp, Homo sapiens
ctgatggaacctctttactaacatta

SEQ ID NO: 37395 - DNA, 26 bp, Homo sapiens
tgatggaacctctttactaacattat

SEQ ID NO: 37396 - DNA, 26 bp, Homo sapiens
gatggaacctctttactaacattatg

SEQ ID NO: 37397 - DNA, 26 bp, Homo sapiens
atggaacctctttactaacattatgt

SEQ ID NO: 37398 - DNA, 26 bp, Homo sapiens
tggaacctctttactaacattatgtt

SEQ ID NO: 37399 - DNA, 26 bp, Homo sapiens
ggaacctctttactaacattatgttt

SEQ ID NO: 37400 - DNA, 26 bp, Homo sapiens
gaacctctttactaacattatgttta

SEQ ID NO: 37401 - DNA, 26 bp, Homo sapiens
aacctctttactaacattatgtttag

SEQ ID NO: 37402 - DNA, 26 bp, Homo sapiens
acctctttactaacattatgtttagg

SEQ ID NO: 37403 - DNA, 26 bp, Homo sapiens
cctctttactaacattatgtttaggg

SEQ ID NO: 37404 - DNA, 26 bp, Homo sapiens
ctctttactaacattatgtttaggga

SEQ ID NO: 37405 - DNA, 26 bp, Homo sapiens
tctttactaacattatgtttagggat

SEQ ID NO: 37406 - DNA, 26 bp, Homo sapiens
ctttactaacattatgtttagggata

SEQ ID NO: 37407 - DNA, 26 bp, Homo sapiens
tttactaacattatgtttagggatag

SEQ ID NO: 37408 - DNA, 26 bp, Homo sapiens
ttactaacattatgtttagggataga

SEQ ID NO: 37409 - DNA, 26 bp, Homo sapiens
tactaacattatgtttagggatagaa

SEQ ID NO: 37410 - DNA, 26 bp, Homo sapiens
actaacattatgtttagggatagaat

SEQ ID NO: 37411 - DNA, 26 bp, Homo sapiens
ctaacattatgtttagggatagaatg

SEQ ID NO: 37412 - DNA, 26 bp, Homo sapiens
taacattatgtttagggatagaatga

SEQ ID NO: 37413 - DNA, 26 bp, Homo sapiens
aacattatgtttagggatagaatgaa

SEQ ID NO: 37414 - DNA, 26 bp, Homo sapiens
acattatgtttagggatagaatgaag

SEQ ID NO: 37415 - DNA, 26 bp, Homo sapiens
cattatgtttagggatagaatgaaga

SEQ ID NO: 37416 - DNA, 26 bp, Homo sapiens
attatgtttagggatagaatgaagac

SEQ ID NO: 37417 - DNA, 26 bp, Homo sapiens
ttatgtttagggatagaatgaagacc

SEQ ID NO: 37418 - DNA, 26 bp, Homo sapiens
tatgtttagggatagaatgaagacct

SEQ ID NO: 37419 - DNA, 26 bp, Homo sapiens
atgtttagggatagaatgaagacctg

SEQ ID NO: 37420 - DNA, 26 bp, Homo sapiens
tgtttagggatagaatgaagacctgt

SEQ ID NO: 37421 - DNA, 26 bp, Homo sapiens
gtttagggatagaatgaagacctgta

SEQ ID NO: 37422 - DNA, 26 bp, Homo sapiens
tttagggatagaatgaagacctgtat

SEQ ID NO: 37423 - DNA, 26 bp, Homo sapiens
ttagggatagaatgaagacctgtatc

SEQ ID NO: 37424 - DNA, 26 bp, Homo sapiens
tagggatagaatgaagacctgtatca

SEQ ID NO: 37425 - DNA, 26 bp, Homo sapiens
agggatagaatgaagacctgtatcat

SEQ ID NO: 37426 - DNA, 26 bp, Homo sapiens
gggatagaatgaagacctgtatcata

SEQ ID NO: 37427 - DNA, 26 bp, Homo sapiens
ggatagaatgaagacctgtatcatag

SEQ ID NO: 37428 - DNA, 26 bp, Homo sapiens
gatagaatgaagacctgtatcataga

SEQ ID NO: 37429 - DNA, 26 bp, Homo sapiens
atagaatgaagacctgtatcatagac

SEQ ID NO: 37430 - DNA, 26 bp, Homo sapiens
tagaatgaagacctgtatcatagact

SEQ ID NO: 37431 - DNA, 26 bp, Homo sapiens
agaatgaagacctgtatcatagactc

SEQ ID NO: 37432 - DNA, 26 bp, Homo sapiens
gaatgaagacctgtatcatagactct

SEQ ID NO: 37433 - DNA, 26 bp, Homo sapiens
aatgaagacctgtatcatagactctt

SEQ ID NO: 37434 - DNA, 26 bp, Homo sapiens
atgaagacctgtatcatagactctta

SEQ ID NO: 37435 - DNA, 26 bp, Homo sapiens
tgaagacctgtatcatagactcttac

SEQ ID NO: 37436 - DNA, 26 bp, Homo sapiens
gaagacctgtatcatagactcttacc

SEQ ID NO: 37437 - DNA, 26 bp, Homo sapiens
aagacctgtatcatagactcttacca

SEQ ID NO: 37438 - DNA, 26 bp, Homo sapiens
agacctgtatcatagactcttaccaa

SEQ ID NO: 37439 - DNA, 26 bp, Homo sapiens
gacctgtatcatagactcttaccaat

SEQ ID NO: 37440 - DNA, 26 bp, Homo sapiens
acctgtatcatagactcttaccaata

SEQ ID NO: 37441 - DNA, 26 bp, Homo sapiens
cctgtatcatagactcttaccaatag

SEQ ID NO: 37442 - DNA, 26 bp, Homo sapiens
ctgtatcatagactcttaccaataga

SEQ ID NO: 37443 - DNA, 26 bp, Homo sapiens
tgtatcatagactcttaccaatagat

SEQ ID NO: 37444 - DNA, 26 bp, Homo sapiens
gtatcatagactcttaccaatagatc

SEQ ID NO: 37445 - DNA, 26 bp, Homo sapiens
tatcatagactcttaccaatagatca

SEQ ID NO: 37446 - DNA, 26 bp, Homo sapiens
atcatagactcttaccaatagatcaa

SEQ ID NO: 37447 - DNA, 26 bp, Homo sapiens
tcatagactcttaccaatagatcaag

SEQ ID NO: 37448 - DNA, 26 bp, Homo sapiens
catagactcttaccaatagatcaaga

SEQ ID NO: 37449 - DNA, 26 bp, Homo sapiens
atagactcttaccaatagatcaagat

SEQ ID NO: 37450 - DNA, 26 bp, Homo sapiens
tagactcttaccaatagatcaagatt

SEQ ID NO: 37451 - DNA, 26 bp, Homo sapiens
agactcttaccaatagatcaagattt

SEQ ID NO: 37452 - DNA, 26 bp, Homo sapiens
gactcttaccaatagatcaagattta

SEQ ID NO: 37453 - DNA, 26 bp, Homo sapiens
actcttaccaatagatcaagatttac

SEQ ID NO: 37454 - DNA, 26 bp, Homo sapiens
ctcttaccaatagatcaagatttact

SEQ ID NO: 37455 - DNA, 26 bp, Homo sapiens
tcttaccaatagatcaagatttactg

SEQ ID NO: 37456 - DNA, 26 bp, Homo sapiens
cttaccaatagatcaagatttactgt

SEQ ID NO: 37457 - DNA, 26 bp, Homo sapiens
ttaccaatagatcaagatttactgtt

SEQ ID NO: 37458 - DNA, 26 bp, Homo sapiens
taccaatagatcaagatttactgttg

SEQ ID NO: 37459 - DNA, 26 bp, Homo sapiens
accaatagatcaagatttactgttgc

SEQ ID NO: 37460 - DNA, 26 bp, Homo sapiens
ccaatagatcaagatttactgttgca

SEQ ID NO: 37461 - DNA, 26 bp, Homo sapiens
caatagatcaagatttactgttgcaa

SEQ ID NO: 37462 - DNA, 26 bp, Homo sapiens
aatagatcaagatttactgttgcaat

SEQ ID NO: 37463 - DNA, 26 bp, Homo sapiens
atagatcaagatttactgttgcaatt

SEQ ID NO: 37464 - DNA, 26 bp, Homo sapiens
tagatcaagatttactgttgcaattg

SEQ ID NO: 37465 - DNA, 26 bp, Homo sapiens
agatcaagatttactgttgcaattgc

SEQ ID NO: 37466 - DNA, 26 bp, Homo sapiens
gatcaagatttactgttgcaattgcg

SEQ ID NO: 37467 - DNA, 26 bp, Homo sapiens
atcaagatttactgttgcaattgcgt

SEQ ID NO: 37468 - DNA, 26 bp, Homo sapiens
tcaagatttactgttgcaattgcgtt

SEQ ID NO: 37469 - DNA, 26 bp, Homo sapiens
caagatttactgttgcaattgcgttt

SEQ ID NO: 37470 - DNA, 26 bp, Homo sapiens
aagatttactgttgcaattgcgtttc

SEQ ID NO: 37471 - DNA, 26 bp, Homo sapiens
agatttactgttgcaattgcgtttct

SEQ ID NO: 37472 - DNA, 26 bp, Homo sapiens
gatttactgttgcaattgcgtttctg

SEQ ID NO: 37473 - DNA, 26 bp, Homo sapiens
atttactgttgcaattgcgtttctgg

SEQ ID NO: 37474 - DNA, 26 bp, Homo sapiens
tttactgttgcaattgcgtttctggg

SEQ ID NO: 37475 - DNA, 26 bp, Homo sapiens
ttactgttgcaattgcgtttctgggc

SEQ ID NO: 37476 - DNA, 26 bp, Homo sapiens
tactgttgcaattgcgtttctgggca

SEQ ID NO: 37477 - DNA, 26 bp, Homo sapiens
actgttgcaattgcgtttctgggcac

SEQ ID NO: 37478 - DNA, 26 bp, Homo sapiens
ctgttgcaattgcgtttctgggcaca

SEQ ID NO: 37479 - DNA, 26 bp, Homo sapiens
tgttgcaattgcgtttctgggcacat

SEQ ID NO: 37480 - DNA, 26 bp, Homo sapiens
gttgcaattgcgtttctgggcacatt

SEQ ID NO: 37481 - DNA, 26 bp, Homo sapiens
ttgcaattgcgtttctgggcacatta

SEQ ID NO: 37482 - DNA, 26 bp, Homo sapiens
tgcaattgcgtttctgggcacattat

SEQ ID NO: 37483 - DNA, 26 bp, Homo sapiens
gcaattgcgtttctgggcacattatt

SEQ ID NO: 37484 - DNA, 26 bp, Homo sapiens
caattgcgtttctgggcacattattt

SEQ ID NO: 37485 - DNA, 26 bp, Homo sapiens
aattgcgtttctgggcacattatttg

SEQ ID NO: 37486 - DNA, 26 bp, Homo sapiens
attgcgtttctgggcacattatttga

SEQ ID NO: 37487 - DNA, 26 bp, Homo sapiens
ttgcgtttctgggcacattatttgat

SEQ ID NO: 37488 - DNA, 26 bp, Homo sapiens
tgcgtttctgggcacattatttgatc

SEQ ID NO: 37489 - DNA, 26 bp, Homo sapiens
gcgtttctgggcacattatttgatct

SEQ ID NO: 37490 - DNA, 26 bp, Homo sapiens
cgtttctgggcacattatttgatcta

SEQ ID NO: 37491 - DNA, 26 bp, Homo sapiens
gtttctgggcacattatttgatctat

SEQ ID NO: 37492 - DNA, 26 bp, Homo sapiens
tttctgggcacattatttgatctata

SEQ ID NO: 37493 - DNA, 26 bp, Homo sapiens
ttctgggcacattatttgatctataa

SEQ ID NO: 37494 - DNA, 26 bp, Homo sapiens
tctgggcacattatttgatctataat

SEQ ID NO: 37495 - DNA, 26 bp, Homo sapiens
ctgggcacattatttgatctataata

SEQ ID NO: 37496 - DNA, 26 bp, Homo sapiens
tgggcacattatttgatctataatat

SEQ ID NO: 37497 - DNA, 26 bp, Homo sapiens
gggcacattatttgatctataatata

SEQ ID NO: 37498 - DNA, 26 bp, Homo sapiens
ggcacattatttgatctataatataa

SEQ ID NO: 37499 - DNA, 26 bp, Homo sapiens
gcacattatttgatctataatataaa

SEQ ID NO: 37500 - DNA, 26 bp, Homo sapiens
cacattatttgatctataatataaag

SEQ ID NO: 37501 - DNA, 26 bp, Homo sapiens
acattatttgatctataatataaagt

SEQ ID NO: 37502 - DNA, 26 bp, Homo sapiens
cattatttgatctataatataaagtt

SEQ ID NO: 37503 - DNA, 26 bp, Homo sapiens
attatttgatctataatataaagttg

SEQ ID NO: 37504 - DNA, 26 bp, Homo sapiens
ttatttgatctataatataaagttgt

SEQ ID NO: 37505 - DNA, 26 bp, Homo sapiens
tatttgatctataatataaagttgtt

SEQ ID NO: 37506 - DNA, 26 bp, Homo sapiens
atttgatctataatataaagttgttt

SEQ ID NO: 37507 - DNA, 26 bp, Homo sapiens
tttgatctataatataaagttgtttt

SEQ ID NO: 37508 - DNA, 26 bp, Homo sapiens
ttgatctataatataaagttgttttc

SEQ ID NO: 37509 - DNA, 26 bp, Homo sapiens
tgatctataatataaagttgttttca

SEQ ID NO: 37510 - DNA, 26 bp, Homo sapiens
gatctataatataaagttgttttcat

SEQ ID NO: 37511 - DNA, 26 bp, Homo sapiens
atctataatataaagttgttttcatg

SEQ ID NO: 37512 - DNA, 26 bp, Homo sapiens
tctataatataaagttgttttcatgg

SEQ ID NO: 37513 - DNA, 26 bp, Homo sapiens
ctataatataaagttgttttcatggg

SEQ ID NO: 37514 - DNA, 26 bp, Homo sapiens
tataatataaagttgttttcatgggg

SEQ ID NO: 37515 - DNA, 26 bp, Homo sapiens
ataatataaagttgttttcatggggt

SEQ ID NO: 37516 - DNA, 26 bp, Homo sapiens
taatataaagttgttttcatggggtt

SEQ ID NO: 37517 - DNA, 26 bp, Homo sapiens
aatataaagttgttttcatggggttc

SEQ ID NO: 37518 - DNA, 26 bp, Homo sapiens
atataaagttgttttcatggggttct

SEQ ID NO: 37519 - DNA, 26 bp, Homo sapiens
tataaagttgttttcatggggttcta

SEQ ID NO: 37520 - DNA, 26 bp, Homo sapiens
ataaagttgttttcatggggttctat

SEQ ID NO: 37521 - DNA, 26 bp, Homo sapiens
taaagttgttttcatggggttctata

SEQ ID NO: 37522 - DNA, 26 bp, Homo sapiens
aaagttgttttcatggggttctatat

SEQ ID NO: 37523 - DNA, 26 bp, Homo sapiens
aagttgttttcatggggttctatatc

SEQ ID NO: 37524 - DNA, 26 bp, Homo sapiens
agttgttttcatggggttctatatca

SEQ ID NO: 37525 - DNA, 26 bp, Homo sapiens
gttgttttcatggggttctatatcat

SEQ ID NO: 37526 - DNA, 26 bp, Homo sapiens
ttgttttcatggggttctatatcata

SEQ ID NO: 37527 - DNA, 26 bp, Homo sapiens
tgttttcatggggttctatatcataa

SEQ ID NO: 37528 - DNA, 26 bp, Homo sapiens
gttttcatggggttctatatcataac

SEQ ID NO: 37529 - DNA, 26 bp, Homo sapiens
ttttcatggggttctatatcataact

SEQ ID NO: 37530 - DNA, 26 bp, Homo sapiens
tttcatggggttctatatcataactt

SEQ ID NO: 37531 - DNA, 26 bp, Homo sapiens
ttcatggggttctatatcataacttt

SEQ ID NO: 37532 - DNA, 26 bp, Homo sapiens
tcatggggttctatatcataacttta

SEQ ID NO: 37533 - DNA, 26 bp, Homo sapiens
catggggttctatatcataactttat

SEQ ID NO: 37534 - DNA, 26 bp, Homo sapiens
atggggttctatatcataactttata

SEQ ID NO: 37535 - DNA, 26 bp, Homo sapiens
tggggttctatatcataactttataa

SEQ ID NO: 37536 - DNA, 26 bp, Homo sapiens
ggggttctatatcataactttataag

SEQ ID NO: 37537 - DNA, 26 bp, Homo sapiens
gggttctatatcataactttataaga

SEQ ID NO: 37538 - DNA, 26 bp, Homo sapiens
ggttctatatcataactttataagaa

SEQ ID NO: 37539 - DNA, 26 bp, Homo sapiens
gttctatatcataactttataagaag

SEQ ID NO: 37540 - DNA, 26 bp, Homo sapiens
ttctatatcataactttataagaagt

SEQ ID NO: 37541 - DNA, 26 bp, Homo sapiens
tctatatcataactttataagaagtg

SEQ ID NO: 37542 - DNA, 26 bp, Homo sapiens
ctatatcataactttataagaagtgg

SEQ ID NO: 37543 - DNA, 26 bp, Homo sapiens
tatatcataactttataagaagtggc

SEQ ID NO: 37544 - DNA, 26 bp, Homo sapiens
atatcataactttataagaagtggca

SEQ ID NO: 37545 - DNA, 26 bp, Homo sapiens
tatcataactttataagaagtggcaa

SEQ ID NO: 37546 - DNA, 26 bp, Homo sapiens
atcataactttataagaagtggcaat

SEQ ID NO: 37547 - DNA, 26 bp, Homo sapiens
tcataactttataagaagtggcaatc

SEQ ID NO: 37548 - DNA, 26 bp, Homo sapiens
cataactttataagaagtggcaatca

SEQ ID NO: 37549 - DNA, 26 bp, Homo sapiens
ataactttataagaagtggcaatcac

SEQ ID NO: 37550 - DNA, 26 bp, Homo sapiens
taactttataagaagtggcaatcaca

SEQ ID NO: 37551 - DNA, 26 bp, Homo sapiens
aactttataagaagtggcaatcacat

SEQ ID NO: 37552 - DNA, 26 bp, Homo sapiens
actttataagaagtggcaatcacatg

SEQ ID NO: 37553 - DNA, 26 bp, Homo sapiens
ctttataagaagtggcaatcacatgt

SEQ ID NO: 37554 - DNA, 26 bp, Homo sapiens
tttataagaagtggcaatcacatgtt

SEQ ID NO: 37555 - DNA, 26 bp, Homo sapiens
ttataagaagtggcaatcacatgtta

SEQ ID NO: 37556 - DNA, 26 bp, Homo sapiens
tataagaagtggcaatcacatgttat

SEQ ID NO: 37557 - DNA, 26 bp, Homo sapiens
ataagaagtggcaatcacatgttatg

SEQ ID NO: 37558 - DNA, 26 bp, Homo sapiens
taagaagtggcaatcacatgttatgt

SEQ ID NO: 37559 - DNA, 26 bp, Homo sapiens
aagaagtggcaatcacatgttatgta

SEQ ID NO: 37560 - DNA, 26 bp, Homo sapiens
agaagtggcaatcacatgttatgtaa

SEQ ID NO: 37561 - DNA, 26 bp, Homo sapiens
gaagtggcaatcacatgttatgtaaa

SEQ ID NO: 37562 - DNA, 26 bp, Homo sapiens
aagtggcaatcacatgttatgtaaaa

SEQ ID NO: 37563 - DNA, 26 bp, Homo sapiens
agtggcaatcacatgttatgtaaaaa

SEQ ID NO: 37564 - DNA, 26 bp, Homo sapiens
gtggcaatcacatgttatgtaaaaat

SEQ ID NO: 37565 - DNA, 26 bp, Homo sapiens
tggcaatcacatgttatgtaaaaatg

SEQ ID NO: 37566 - DNA, 26 bp, Homo sapiens
ggcaatcacatgttatgtaaaaatgt

SEQ ID NO: 37567 - DNA, 26 bp, Homo sapiens
gcaatcacatgttatgtaaaaatgtc

SEQ ID NO: 37568 - DNA, 26 bp, Homo sapiens
caatcacatgttatgtaaaaatgtca

SEQ ID NO: 37569 - DNA, 26 bp, Homo sapiens
aatcacatgttatgtaaaaatgtcaa

SEQ ID NO: 37570 - DNA, 26 bp, Homo sapiens
atcacatgttatgtaaaaatgtcaac

SEQ ID NO: 37571 - DNA, 26 bp, Homo sapiens
tcacatgttatgtaaaaatgtcaacg

SEQ ID NO: 37572 - DNA, 26 bp, Homo sapiens
cacatgttatgtaaaaatgtcaacgt

SEQ ID NO: 37573 - DNA, 26 bp, Homo sapiens
acatgttatgtaaaaatgtcaacgtg

SEQ ID NO: 37574 - DNA, 26 bp, Homo sapiens
catgttatgtaaaaatgtcaacgtgt

SEQ ID NO: 37575 - DNA, 26 bp, Homo sapiens
atgttatgtaaaaatgtcaacgtgtg

SEQ ID NO: 37576 - DNA, 26 bp, Homo sapiens
tgttatgtaaaaatgtcaacgtgtgt

SEQ ID NO: 37577 - DNA, 26 bp, Homo sapiens
gttatgtaaaaatgtcaacgtgtgtg

SEQ ID NO: 37578 - DNA, 26 bp, Homo sapiens
ttatgtaaaaatgtcaacgtgtgtgt

SEQ ID NO: 37579 - DNA, 26 bp, Homo sapiens
tatgtaaaaatgtcaacgtgtgtgtg

SEQ ID NO: 37580 - DNA, 26 bp, Homo sapiens
atgtaaaaatgtcaacgtgtgtgtgt

SEQ ID NO: 37581 - DNA, 26 bp, Homo sapiens
tgtaaaaatgtcaacgtgtgtgtgta

SEQ ID NO: 37582 - DNA, 26 bp, Homo sapiens
gtaaaaatgtcaacgtgtgtgtgtat

SEQ ID NO: 37583 - DNA, 26 bp, Homo sapiens
taaaaatgtcaacgtgtgtgtgtata

SEQ ID NO: 37584 - DNA, 26 bp, Homo sapiens
aaaaatgtcaacgtgtgtgtgtatac

SEQ ID NO: 37585 - DNA, 26 bp, Homo sapiens
aaaatgtcaacgtgtgtgtgtataca

SEQ ID NO: 37586 - DNA, 26 bp, Homo sapiens
aaatgtcaacgtgtgtgtgtatacac

SEQ ID NO: 37587 - DNA, 26 bp, Homo sapiens
aatgtcaacgtgtgtgtgtatacaca

SEQ ID NO: 37588 - DNA, 26 bp, Homo sapiens
atgtcaacgtgtgtgtgtatacacac

SEQ ID NO: 37589 - DNA, 26 bp, Homo sapiens
tgtcaacgtgtgtgtgtatacacaca

SEQ ID NO: 37590 - DNA, 26 bp, Homo sapiens
gtcaacgtgtgtgtgtatacacacat

SEQ ID NO: 37591 - DNA, 26 bp, Homo sapiens
tcaacgtgtgtgtgtatacacacata

SEQ ID NO: 37592 - DNA, 26 bp, Homo sapiens
caacgtgtgtgtgtatacacacatat

SEQ ID NO: 37593 - DNA, 26 bp, Homo sapiens
aacgtgtgtgtgtatacacacatata

SEQ ID NO: 37594 - DNA, 26 bp, Homo sapiens
acgtgtgtgtgtatacacacatatac

SEQ ID NO: 37595 - DNA, 26 bp, Homo sapiens
cgtgtgtgtgtatacacacatataca

SEQ ID NO: 37596 - DNA, 26 bp, Homo sapiens
gtgtgtgtgtatacacacatatacaa

SEQ ID NO: 37597 - DNA, 26 bp, Homo sapiens
tgtgtgtgtatacacacatatacaaa

SEQ ID NO: 37598 - DNA, 26 bp, Homo sapiens
gtgtgtgtatacacacatatacaaat

SEQ ID NO: 37599 - DNA, 26 bp, Homo sapiens
tgtgtgtatacacacatatacaaata

SEQ ID NO: 37600 - DNA, 26 bp, Homo sapiens
gtgtgtatacacacatatacaaatac

SEQ ID NO: 37601 - DNA, 26 bp, Homo sapiens
tgtgtatacacacatatacaaataca

SEQ ID NO: 37602 - DNA, 26 bp, Homo sapiens
gtgtatacacacatatacaaatacac

SEQ ID NO: 37603 - DNA, 26 bp, Homo sapiens
tgtatacacacatatacaaatacaca

SEQ ID NO: 37604 - DNA, 26 bp, Homo sapiens
gtatacacacatatacaaatacacat

SEQ ID NO: 37605 - DNA, 26 bp, Homo sapiens
tatacacacatatacaaatacacata

SEQ ID NO: 37606 - DNA, 26 bp, Homo sapiens
atacacacatatacaaatacacatag

SEQ ID NO: 37607 - DNA, 26 bp, Homo sapiens
tacacacatatacaaatacacataga

SEQ ID NO: 37608 - DNA, 26 bp, Homo sapiens
acacacatatacaaatacacatagag

SEQ ID NO: 37609 - DNA, 26 bp, Homo sapiens
cacacatatacaaatacacatagaga

SEQ ID NO: 37610 - DNA, 26 bp, Homo sapiens
acacatatacaaatacacatagagag

SEQ ID NO: 37611 - DNA, 26 bp, Homo sapiens
cacatatacaaatacacatagagagg

SEQ ID NO: 37612 - DNA, 26 bp, Homo sapiens
acatatacaaatacacatagagagga

SEQ ID NO: 37613 - DNA, 26 bp, Homo sapiens
catatacaaatacacatagagaggag

SEQ ID NO: 37614 - DNA, 26 bp, Homo sapiens
atatacaaatacacatagagaggaga

SEQ ID NO: 37615 - DNA, 26 bp, Homo sapiens
tatacaaatacacatagagaggagag

SEQ ID NO: 37616 - DNA, 26 bp, Homo sapiens
atacaaatacacatagagaggagaga

SEQ ID NO: 37617 - DNA, 26 bp, Homo sapiens
tacaaatacacatagagaggagagat

SEQ ID NO: 37618 - DNA, 26 bp, Homo sapiens
acaaatacacatagagaggagagatt

SEQ ID NO: 37619 - DNA, 26 bp, Homo sapiens
caaatacacatagagaggagagattt

SEQ ID NO: 37620 - DNA, 26 bp, Homo sapiens
aaatacacatagagaggagagatttc

SEQ ID NO: 37621 - DNA, 26 bp, Homo sapiens
aatacacatagagaggagagatttct

SEQ ID NO: 37622 - DNA, 26 bp, Homo sapiens
atacacatagagaggagagatttcta

SEQ ID NO: 37623 - DNA, 26 bp, Homo sapiens
tacacatagagaggagagatttctac

SEQ ID NO: 37624 - DNA, 26 bp, Homo sapiens
acacatagagaggagagatttctacc

SEQ ID NO: 37625 - DNA, 26 bp, Homo sapiens
cacatagagaggagagatttctacca

SEQ ID NO: 37626 - DNA, 26 bp, Homo sapiens
acatagagaggagagatttctaccat

SEQ ID NO: 37627 - DNA, 26 bp, Homo sapiens
catagagaggagagatttctaccatt

SEQ ID NO: 37628 - DNA, 26 bp, Homo sapiens
atagagaggagagatttctaccattt

SEQ ID NO: 37629 - DNA, 26 bp, Homo sapiens
tagagaggagagatttctaccatttt

SEQ ID NO: 37630 - DNA, 26 bp, Homo sapiens
agagaggagagatttctaccattttc

SEQ ID NO: 37631 - DNA, 26 bp, Homo sapiens
gagaggagagatttctaccattttcc

SEQ ID NO: 37632 - DNA, 26 bp, Homo sapiens
agaggagagatttctaccattttcca

SEQ ID NO: 37633 - DNA, 26 bp, Homo sapiens
gaggagagatttctaccattttccat

SEQ ID NO: 37634 - DNA, 26 bp, Homo sapiens
aggagagatttctaccattttccata

SEQ ID NO: 37635 - DNA, 26 bp, Homo sapiens
ggagagatttctaccattttccatat

SEQ ID NO: 37636 - DNA, 26 bp, Homo sapiens
gagagatttctaccattttccatatt

SEQ ID NO: 37637 - DNA, 26 bp, Homo sapiens
agagatttctaccattttccatattc

SEQ ID NO: 37638 - DNA, 26 bp, Homo sapiens
gagatttctaccattttccatattct

SEQ ID NO: 37639 - DNA, 26 bp, Homo sapiens
agatttctaccattttccatattctt

SEQ ID NO: 37640 - DNA, 26 bp, Homo sapiens
gatttctaccattttccatattcttt

SEQ ID NO: 37641 - DNA, 26 bp, Homo sapiens
atttctaccattttccatattcttta

SEQ ID NO: 37642 - DNA, 26 bp, Homo sapiens
tttctaccattttccatattctttat

SEQ ID NO: 37643 - DNA, 26 bp, Homo sapiens
ttctaccattttccatattctttatt

SEQ ID NO: 37644 - DNA, 26 bp, Homo sapiens
tctaccattttccatattctttatta

SEQ ID NO: 37645 - DNA, 26 bp, Homo sapiens
ctaccattttccatattctttattat

SEQ ID NO: 37646 - DNA, 26 bp, Homo sapiens
taccattttccatattctttattatc

SEQ ID NO: 37647 - DNA, 26 bp, Homo sapiens
accattttccatattctttattatca

SEQ ID NO: 37648 - DNA, 26 bp, Homo sapiens
ccattttccatattctttattatcaa

SEQ ID NO: 37649 - DNA, 26 bp, Homo sapiens
cattttccatattctttattatcaaa

SEQ ID NO: 37650 - DNA, 26 bp, Homo sapiens
attttccatattctttattatcaaaa

SEQ ID NO: 37651 - DNA, 26 bp, Homo sapiens
ttttccatattctttattatcaaaaa

SEQ ID NO: 37652 - DNA, 26 bp, Homo sapiens
tttccatattctttattatcaaaaac

SEQ ID NO: 37653 - DNA, 26 bp, Homo sapiens
ttccatattctttattatcaaaaaca

SEQ ID NO: 37654 - DNA, 26 bp, Homo sapiens
tccatattctttattatcaaaaacaa

SEQ ID NO: 37655 - DNA, 26 bp, Homo sapiens
ccatattctttattatcaaaaacaac

SEQ ID NO: 37656 - DNA, 26 bp, Homo sapiens
catattctttattatcaaaaacaaca

SEQ ID NO: 37657 - DNA, 26 bp, Homo sapiens
atattctttattatcaaaaacaacat

SEQ ID NO: 37658 - DNA, 26 bp, Homo sapiens
tattctttattatcaaaaacaacatg

SEQ ID NO: 37659 - DNA, 26 bp, Homo sapiens
attctttattatcaaaaacaacatgg

SEQ ID NO: 37660 - DNA, 26 bp, Homo sapiens
ttctttattatcaaaaacaacatggt

SEQ ID NO: 37661 - DNA, 26 bp, Homo sapiens
tctttattatcaaaaacaacatggta

SEQ ID NO: 37662 - DNA, 26 bp, Homo sapiens
ctttattatcaaaaacaacatggtaa

SEQ ID NO: 37663 - DNA, 26 bp, Homo sapiens
tttattatcaaaaacaacatggtaaa

SEQ ID NO: 37664 - DNA, 26 bp, Homo sapiens
ttattatcaaaaacaacatggtaaag

SEQ ID NO: 37665 - DNA, 26 bp, Homo sapiens
tattatcaaaaacaacatggtaaagg

SEQ ID NO: 37666 - DNA, 26 bp, Homo sapiens
attatcaaaaacaacatggtaaaggt

SEQ ID NO: 37667 - DNA, 26 bp, Homo sapiens
ttatcaaaaacaacatggtaaaggta

SEQ ID NO: 37668 - DNA, 26 bp, Homo sapiens
tatcaaaaacaacatggtaaaggtat

SEQ ID NO: 37669 - DNA, 26 bp, Homo sapiens
atcaaaaacaacatggtaaaggtatc

SEQ ID NO: 37670 - DNA, 26 bp, Homo sapiens
tcaaaaacaacatggtaaaggtatcc

SEQ ID NO: 37671 - DNA, 26 bp, Homo sapiens
caaaaacaacatggtaaaggtatcct

SEQ ID NO: 37672 - DNA, 26 bp, Homo sapiens
aaaaacaacatggtaaaggtatcctt

SEQ ID NO: 37673 - DNA, 26 bp, Homo sapiens
aaaacaacatggtaaaggtatccttt

SEQ ID NO: 37674 - DNA, 26 bp, Homo sapiens
aaacaacatggtaaaggtatcctttt

SEQ ID NO: 37675 - DNA, 26 bp, Homo sapiens
aacaacatggtaaaggtatccttttc

SEQ ID NO: 37676 - DNA, 26 bp, Homo sapiens
acaacatggtaaaggtatccttttca

SEQ ID NO: 37677 - DNA, 26 bp, Homo sapiens
caacatggtaaaggtatccttttcat

SEQ ID NO: 37678 - DNA, 26 bp, Homo sapiens
aacatggtaaaggtatccttttcatc

SEQ ID NO: 37679 - DNA, 26 bp, Homo sapiens
acatggtaaaggtatccttttcatct

SEQ ID NO: 37680 - DNA, 26 bp, Homo sapiens
catggtaaaggtatccttttcatctt

SEQ ID NO: 37681 - DNA, 26 bp, Homo sapiens
atggtaaaggtatccttttcatctta

SEQ ID NO: 37682 - DNA, 26 bp, Homo sapiens
tggtaaaggtatccttttcatcttac

SEQ ID NO: 37683 - DNA, 26 bp, Homo sapiens
ggtaaaggtatccttttcatcttaca

SEQ ID NO: 37684 - DNA, 26 bp, Homo sapiens
gtaaaggtatccttttcatcttacag

SEQ ID NO: 37685 - DNA, 26 bp, Homo sapiens
taaaggtatccttttcatcttacaga

SEQ ID NO: 37686 - DNA, 26 bp, Homo sapiens
aaaggtatccttttcatcttacagac

SEQ ID NO: 37687 - DNA, 26 bp, Homo sapiens
aaggtatccttttcatcttacagaca

SEQ ID NO: 37688 - DNA, 26 bp, Homo sapiens
aggtatccttttcatcttacagacat

SEQ ID NO: 37689 - DNA, 26 bp, Homo sapiens
ggtatccttttcatcttacagacatg

SEQ ID NO: 37690 - DNA, 26 bp, Homo sapiens
gtatccttttcatcttacagacatgg

SEQ ID NO: 37691 - DNA, 26 bp, Homo sapiens
tatccttttcatcttacagacatggg

SEQ ID NO: 37692 - DNA, 26 bp, Homo sapiens
atccttttcatcttacagacatggga

SEQ ID NO: 37693 - DNA, 26 bp, Homo sapiens
tccttttcatcttacagacatgggaa

SEQ ID NO: 37694 - DNA, 26 bp, Homo sapiens
ccttttcatcttacagacatgggaag

SEQ ID NO: 37695 - DNA, 26 bp, Homo sapiens
cttttcatcttacagacatgggaagt

SEQ ID NO: 37696 - DNA, 26 bp, Homo sapiens
ttttcatcttacagacatgggaagtt

SEQ ID NO: 37697 - DNA, 26 bp, Homo sapiens
tttcatcttacagacatgggaagttt

SEQ ID NO: 37698 - DNA, 26 bp, Homo sapiens
ttcatcttacagacatgggaagtttt

SEQ ID NO: 37699 - DNA, 26 bp, Homo sapiens
tcatcttacagacatgggaagttttc

SEQ ID NO: 37700 - DNA, 26 bp, Homo sapiens
catcttacagacatgggaagttttcc

SEQ ID NO: 37701 - DNA, 26 bp, Homo sapiens
atcttacagacatgggaagttttccc

SEQ ID NO: 37702 - DNA, 26 bp, Homo sapiens
tcttacagacatgggaagttttccca

SEQ ID NO: 37703 - DNA, 26 bp, Homo sapiens
cttacagacatgggaagttttcccag

SEQ ID NO: 37704 - DNA, 26 bp, Homo sapiens
ttacagacatgggaagttttcccaga

SEQ ID NO: 37705 - DNA, 26 bp, Homo sapiens
tacagacatgggaagttttcccagat

SEQ ID NO: 37706 - DNA, 26 bp, Homo sapiens
acagacatgggaagttttcccagatt

SEQ ID NO: 37707 - DNA, 26 bp, Homo sapiens
cagacatgggaagttttcccagatta

SEQ ID NO: 37708 - DNA, 26 bp, Homo sapiens
agacatgggaagttttcccagattat

SEQ ID NO: 37709 - DNA, 26 bp, Homo sapiens
gacatgggaagttttcccagattatg

SEQ ID NO: 37710 - DNA, 26 bp, Homo sapiens
acatgggaagttttcccagattatgt

SEQ ID NO: 37711 - DNA, 26 bp, Homo sapiens
catgggaagttttcccagattatgtt

SEQ ID NO: 37712 - DNA, 26 bp, Homo sapiens
atgggaagttttcccagattatgttc

SEQ ID NO: 37713 - DNA, 26 bp, Homo sapiens
tgggaagttttcccagattatgttcc

SEQ ID NO: 37714 - DNA, 26 bp, Homo sapiens
gggaagttttcccagattatgttcct

SEQ ID NO: 37715 - DNA, 26 bp, Homo sapiens
ggaagttttcccagattatgttcctc

SEQ ID NO: 37716 - DNA, 26 bp, Homo sapiens
gaagttttcccagattatgttcctct

SEQ ID NO: 37717 - DNA, 26 bp, Homo sapiens
aagttttcccagattatgttcctcta

SEQ ID NO: 37718 - DNA, 26 bp, Homo sapiens
agttttcccagattatgttcctctat

SEQ ID NO: 37719 - DNA, 26 bp, Homo sapiens
gttttcccagattatgttcctctatc

SEQ ID NO: 37720 - DNA, 26 bp, Homo sapiens
ttttcccagattatgttcctctatca

SEQ ID NO: 37721 - DNA, 26 bp, Homo sapiens
tttcccagattatgttcctctatcat

SEQ ID NO: 37722 - DNA, 26 bp, Homo sapiens
ttcccagattatgttcctctatcata

SEQ ID NO: 37723 - DNA, 26 bp, Homo sapiens
tcccagattatgttcctctatcatag

SEQ ID NO: 37724 - DNA, 26 bp, Homo sapiens
cccagattatgttcctctatcatagt

SEQ ID NO: 37725 - DNA, 26 bp, Homo sapiens
ccagattatgttcctctatcatagta

SEQ ID NO: 37726 - DNA, 26 bp, Homo sapiens
cagattatgttcctctatcatagtaa

SEQ ID NO: 37727 - DNA, 26 bp, Homo sapiens
agattatgttcctctatcatagtaag

SEQ ID NO: 37728 - DNA, 26 bp, Homo sapiens
gattatgttcctctatcatagtaaga

SEQ ID NO: 37729 - DNA, 26 bp, Homo sapiens
attatgttcctctatcatagtaagaa

SEQ ID NO: 37730 - DNA, 26 bp, Homo sapiens
ttatgttcctctatcatagtaagaaa

SEQ ID NO: 37731 - DNA, 26 bp, Homo sapiens
tatgttcctctatcatagtaagaaaa

SEQ ID NO: 37732 - DNA, 26 bp, Homo sapiens
atgttcctctatcatagtaagaaaat

SEQ ID NO: 37733 - DNA, 26 bp, Homo sapiens
tgttcctctatcatagtaagaaaata

SEQ ID NO: 37734 - DNA, 26 bp, Homo sapiens
gttcctctatcatagtaagaaaatat

SEQ ID NO: 37735 - DNA, 26 bp, Homo sapiens
ttcctctatcatagtaagaaaatata

SEQ ID NO: 37736 - DNA, 26 bp, Homo sapiens
tcctctatcatagtaagaaaatatat

SEQ ID NO: 37737 - DNA, 26 bp, Homo sapiens
cctctatcatagtaagaaaatatata

SEQ ID NO: 37738 - DNA, 26 bp, Homo sapiens
ctctatcatagtaagaaaatatataa

SEQ ID NO: 37739 - DNA, 26 bp, Homo sapiens
tctatcatagtaagaaaatatataaa

SEQ ID NO: 37740 - DNA, 26 bp, Homo sapiens
ctatcatagtaagaaaatatataaat

SEQ ID NO: 37741 - DNA, 26 bp, Homo sapiens
tatcatagtaagaaaatatataaatc

SEQ ID NO: 37742 - DNA, 26 bp, Homo sapiens
atcatagtaagaaaatatataaatct

SEQ ID NO: 37743 - DNA, 26 bp, Homo sapiens
tcatagtaagaaaatatataaatctt

SEQ ID NO: 37744 - DNA, 26 bp, Homo sapiens
catagtaagaaaatatataaatcttc

SEQ ID NO: 37745 - DNA, 26 bp, Homo sapiens
atagtaagaaaatatataaatcttct

SEQ ID NO: 37746 - DNA, 26 bp, Homo sapiens
tagtaagaaaatatataaatcttctt

SEQ ID NO: 37747 - DNA, 26 bp, Homo sapiens
agtaagaaaatatataaatcttcttg

SEQ ID NO: 37748 - DNA, 26 bp, Homo sapiens
gtaagaaaatatataaatcttcttgt

SEQ ID NO: 37749 - DNA, 26 bp, Homo sapiens
taagaaaatatataaatcttcttgtg

SEQ ID NO: 37750 - DNA, 26 bp, Homo sapiens
aagaaaatatataaatcttcttgtga

SEQ ID NO: 37751 - DNA, 26 bp, Homo sapiens
agaaaatatataaatcttcttgtgaa

SEQ ID NO: 37752 - DNA, 26 bp, Homo sapiens
gaaaatatataaatcttcttgtgaat

SEQ ID NO: 37753 - DNA, 26 bp, Homo sapiens
aaaatatataaatcttcttgtgaatg

SEQ ID NO: 37754 - DNA, 26 bp, Homo sapiens
aaatatataaatcttcttgtgaatgt

SEQ ID NO: 37755 - DNA, 26 bp, Homo sapiens
aatatataaatcttcttgtgaatgtg

SEQ ID NO: 37756 - DNA, 26 bp, Homo sapiens
atatataaatcttcttgtgaatgtgt

SEQ ID NO: 37757 - DNA, 26 bp, Homo sapiens
tatataaatcttcttgtgaatgtgta

SEQ ID NO: 37758 - DNA, 26 bp, Homo sapiens
atataaatcttcttgtgaatgtgtat

SEQ ID NO: 37759 - DNA, 26 bp, Homo sapiens
tataaatcttcttgtgaatgtgtatc

SEQ ID NO: 37760 - DNA, 26 bp, Homo sapiens
ataaatcttcttgtgaatgtgtatcc

SEQ ID NO: 37761 - DNA, 26 bp, Homo sapiens
taaatcttcttgtgaatgtgtatccc

SEQ ID NO: 37762 - DNA, 26 bp, Homo sapiens
aaatcttcttgtgaatgtgtatccca

SEQ ID NO: 37763 - DNA, 26 bp, Homo sapiens
aatcttcttgtgaatgtgtatcccaa

SEQ ID NO: 37764 - DNA, 26 bp, Homo sapiens
atcttcttgtgaatgtgtatcccaag

SEQ ID NO: 37765 - DNA, 26 bp, Homo sapiens
tcttcttgtgaatgtgtatcccaagg

SEQ ID NO: 37766 - DNA, 26 bp, Homo sapiens
cttcttgtgaatgtgtatcccaaggt

SEQ ID NO: 37767 - DNA, 26 bp, Homo sapiens
ttcttgtgaatgtgtatcccaaggtg

SEQ ID NO: 37768 - DNA, 26 bp, Homo sapiens
tcttgtgaatgtgtatcccaaggtgg

SEQ ID NO: 37769 - DNA, 26 bp, Homo sapiens
cttgtgaatgtgtatcccaaggtgga

SEQ ID NO: 37770 - DNA, 26 bp, Homo sapiens
ttgtgaatgtgtatcccaaggtggaa

SEQ ID NO: 37771 - DNA, 26 bp, Homo sapiens
tgtgaatgtgtatcccaaggtggaag

SEQ ID NO: 37772 - DNA, 26 bp, Homo sapiens
gtgaatgtgtatcccaaggtggaaga

SEQ ID NO: 37773 - DNA, 26 bp, Homo sapiens
tgaatgtgtatcccaaggtggaagaa

SEQ ID NO: 37774 - DNA, 26 bp, Homo sapiens
gaatgtgtatcccaaggtggaagaat

SEQ ID NO: 37775 - DNA, 26 bp, Homo sapiens
aatgtgtatcccaaggtggaagaatc

SEQ ID NO: 37776 - DNA, 26 bp, Homo sapiens
atgtgtatcccaaggtggaagaatca

SEQ ID NO: 37777 - DNA, 26 bp, Homo sapiens
tgtgtatcccaaggtggaagaatcag

SEQ ID NO: 37778 - DNA, 26 bp, Homo sapiens
gtgtatcccaaggtggaagaatcaga

SEQ ID NO: 37779 - DNA, 26 bp, Homo sapiens
tgtatcccaaggtggaagaatcagag

SEQ ID NO: 37780 - DNA, 26 bp, Homo sapiens
gtatcccaaggtggaagaatcagagc

SEQ ID NO: 37781 - DNA, 26 bp, Homo sapiens
tatcccaaggtggaagaatcagagcc

SEQ ID NO: 37782 - DNA, 26 bp, Homo sapiens
atcccaaggtggaagaatcagagcca

SEQ ID NO: 37783 - DNA, 26 bp, Homo sapiens
tcccaaggtggaagaatcagagccaa

SEQ ID NO: 37784 - DNA, 26 bp, Homo sapiens
cccaaggtggaagaatcagagccaac

SEQ ID NO: 37785 - DNA, 26 bp, Homo sapiens
ccaaggtggaagaatcagagccaaca

SEQ ID NO: 37786 - DNA, 26 bp, Homo sapiens
caaggtggaagaatcagagccaacaa

SEQ ID NO: 37787 - DNA, 26 bp, Homo sapiens
aaggtggaagaatcagagccaacaat

SEQ ID NO: 37788 - DNA, 26 bp, Homo sapiens
aggtggaagaatcagagccaacaatt

SEQ ID NO: 37789 - DNA, 26 bp, Homo sapiens
ggtggaagaatcagagccaacaatta

SEQ ID NO: 37790 - DNA, 26 bp, Homo sapiens
gtggaagaatcagagccaacaattac

SEQ ID NO: 37791 - DNA, 26 bp, Homo sapiens
tggaagaatcagagccaacaattaca

SEQ ID NO: 37792 - DNA, 26 bp, Homo sapiens
ggaagaatcagagccaacaattacat

SEQ ID NO: 37793 - DNA, 26 bp, Homo sapiens
gaagaatcagagccaacaattacatt

SEQ ID NO: 37794 - DNA, 26 bp, Homo sapiens
aagaatcagagccaacaattacattg

SEQ ID NO: 37795 - DNA, 26 bp, Homo sapiens
agaatcagagccaacaattacattga

SEQ ID NO: 37796 - DNA, 26 bp, Homo sapiens
gaatcagagccaacaattacattgaa

SEQ ID NO: 37797 - DNA, 26 bp, Homo sapiens
aatcagagccaacaattacattgaac

SEQ ID NO: 37798 - DNA, 26 bp, Homo sapiens
atcagagccaacaattacattgaact

SEQ ID NO: 37799 - DNA, 26 bp, Homo sapiens
tcagagccaacaattacattgaactt

SEQ ID NO: 37800 - DNA, 26 bp, Homo sapiens
cagagccaacaattacattgaacttc

SEQ ID NO: 37801 - DNA, 26 bp, Homo sapiens
agagccaacaattacattgaacttct

SEQ ID NO: 37802 - DNA, 26 bp, Homo sapiens
gagccaacaattacattgaacttctc

SEQ ID NO: 37803 - DNA, 26 bp, Homo sapiens
agccaacaattacattgaacttctct

SEQ ID NO: 37804 - DNA, 26 bp, Homo sapiens
gccaacaattacattgaacttctctg

SEQ ID NO: 37805 - DNA, 26 bp, Homo sapiens
ccaacaattacattgaacttctctga

SEQ ID NO: 37806 - DNA, 26 bp, Homo sapiens
caacaattacattgaacttctctgac

SEQ ID NO: 37807 - DNA, 26 bp, Homo sapiens
aacaattacattgaacttctctgact

SEQ ID NO: 37808 - DNA, 26 bp, Homo sapiens
acaattacattgaacttctctgactt

SEQ ID NO: 37809 - DNA, 26 bp, Homo sapiens
caattacattgaacttctctgacttt

SEQ ID NO: 37810 - DNA, 26 bp, Homo sapiens
aattacattgaacttctctgacttta

SEQ ID NO: 37811 - DNA, 26 bp, Homo sapiens
attacattgaacttctctgactttat

SEQ ID NO: 37812 - DNA, 26 bp, Homo sapiens
ttacattgaacttctctgactttatg

SEQ ID NO: 37813 - DNA, 26 bp, Homo sapiens
tacattgaacttctctgactttatgg

SEQ ID NO: 37814 - DNA, 26 bp, Homo sapiens
acattgaacttctctgactttatgga

SEQ ID NO: 37815 - DNA, 26 bp, Homo sapiens
cattgaacttctctgactttatggaa

SEQ ID NO: 37816 - DNA, 26 bp, Homo sapiens
attgaacttctctgactttatggaaa

SEQ ID NO: 37817 - DNA, 26 bp, Homo sapiens
ttgaacttctctgactttatggaaag

SEQ ID NO: 37818 - DNA, 26 bp, Homo sapiens
tgaacttctctgactttatggaaagt

SEQ ID NO: 37819 - DNA, 26 bp, Homo sapiens
gaacttctctgactttatggaaagta

SEQ ID NO: 37820 - DNA, 26 bp, Homo sapiens
aacttctctgactttatggaaagtaa

SEQ ID NO: 37821 - DNA, 26 bp, Homo sapiens
acttctctgactttatggaaagtaat

SEQ ID NO: 37822 - DNA, 26 bp, Homo sapiens
cttctctgactttatggaaagtaata

SEQ ID NO: 37823 - DNA, 26 bp, Homo sapiens
ttctctgactttatggaaagtaatat

SEQ ID NO: 37824 - DNA, 26 bp, Homo sapiens
tctctgactttatggaaagtaatatg

SEQ ID NO: 37825 - DNA, 26 bp, Homo sapiens
ctctgactttatggaaagtaatatgt

SEQ ID NO: 37826 - DNA, 26 bp, Homo sapiens
tctgactttatggaaagtaatatgtg

SEQ ID NO: 37827 - DNA, 26 bp, Homo sapiens
ctgactttatggaaagtaatatgtgg

SEQ ID NO: 37828 - DNA, 26 bp, Homo sapiens
tgactttatggaaagtaatatgtgga

SEQ ID NO: 37829 - DNA, 26 bp, Homo sapiens
gactttatggaaagtaatatgtggaa

SEQ ID NO: 37830 - DNA, 26 bp, Homo sapiens
actttatggaaagtaatatgtggaat

SEQ ID NO: 37831 - DNA, 26 bp, Homo sapiens
ctttatggaaagtaatatgtggaata

SEQ ID NO: 37832 - DNA, 26 bp, Homo sapiens
tttatggaaagtaatatgtggaatat

SEQ ID NO: 37833 - DNA, 26 bp, Homo sapiens
ttatggaaagtaatatgtggaatatg

SEQ ID NO: 37834 - DNA, 26 bp, Homo sapiens
tatggaaagtaatatgtggaatatga

SEQ ID NO: 37835 - DNA, 26 bp, Homo sapiens
atggaaagtaatatgtggaatatgat

SEQ ID NO: 37836 - DNA, 26 bp, Homo sapiens
tggaaagtaatatgtggaatatgata

SEQ ID NO: 37837 - DNA, 26 bp, Homo sapiens
ggaaagtaatatgtggaatatgataa

SEQ ID NO: 37838 - DNA, 26 bp, Homo sapiens
gaaagtaatatgtggaatatgataac

SEQ ID NO: 37839 - DNA, 26 bp, Homo sapiens
aaagtaatatgtggaatatgataaca

SEQ ID NO: 37840 - DNA, 26 bp, Homo sapiens
aagtaatatgtggaatatgataacaa

SEQ ID NO: 37841 - DNA, 26 bp, Homo sapiens
agtaatatgtggaatatgataacaaa

SEQ ID NO: 37842 - DNA, 26 bp, Homo sapiens
gtaatatgtggaatatgataacaaaa

SEQ ID NO: 37843 - DNA, 26 bp, Homo sapiens
taatatgtggaatatgataacaaaac

SEQ ID NO: 37844 - DNA, 26 bp, Homo sapiens
aatatgtggaatatgataacaaaacg

SEQ ID NO: 37845 - DNA, 26 bp, Homo sapiens
atatgtggaatatgataacaaaacgg

SEQ ID NO: 37846 - DNA, 26 bp, Homo sapiens
tatgtggaatatgataacaaaacggt

SEQ ID NO: 37847 - DNA, 26 bp, Homo sapiens
atgtggaatatgataacaaaacggta

SEQ ID NO: 37848 - DNA, 26 bp, Homo sapiens
tgtggaatatgataacaaaacggtat

SEQ ID NO: 37849 - DNA, 26 bp, Homo sapiens
gtggaatatgataacaaaacggtatt

SEQ ID NO: 37850 - DNA, 26 bp, Homo sapiens
tggaatatgataacaaaacggtattt

SEQ ID NO: 37851 - DNA, 26 bp, Homo sapiens
ggaatatgataacaaaacggtatttc

SEQ ID NO: 37852 - DNA, 26 bp, Homo sapiens
gaatatgataacaaaacggtatttca

SEQ ID NO: 37853 - DNA, 26 bp, Homo sapiens
aatatgataacaaaacggtatttcaa

SEQ ID NO: 37854 - DNA, 26 bp, Homo sapiens
atatgataacaaaacggtatttcaaa

SEQ ID NO: 37855 - DNA, 26 bp, Homo sapiens
tatgataacaaaacggtatttcaaaa

SEQ ID NO: 37856 - DNA, 26 bp, Homo sapiens
atgataacaaaacggtatttcaaaaa

SEQ ID NO: 37857 - DNA, 26 bp, Homo sapiens
tgataacaaaacggtatttcaaaaat

SEQ ID NO: 37858 - DNA, 26 bp, Homo sapiens
gataacaaaacggtatttcaaaaata

SEQ ID NO: 37859 - DNA, 26 bp, Homo sapiens
ataacaaaacggtatttcaaaaatat

SEQ ID NO: 37860 - DNA, 26 bp, Homo sapiens
taacaaaacggtatttcaaaaatata

SEQ ID NO: 37861 - DNA, 26 bp, Homo sapiens
aacaaaacggtatttcaaaaatataa

SEQ ID NO: 37862 - DNA, 26 bp, Homo sapiens
acaaaacggtatttcaaaaatataac

SEQ ID NO: 37863 - DNA, 26 bp, Homo sapiens
caaaacggtatttcaaaaatataaca

SEQ ID NO: 37864 - DNA, 26 bp, Homo sapiens
aaaacggtatttcaaaaatataacat

SEQ ID NO: 37865 - DNA, 26 bp, Homo sapiens
aaacggtatttcaaaaatataacatg

SEQ ID NO: 37866 - DNA, 26 bp, Homo sapiens
aacggtatttcaaaaatataacatgt

SEQ ID NO: 37867 - DNA, 26 bp, Homo sapiens
acggtatttcaaaaatataacatgta

SEQ ID NO: 37868 - DNA, 26 bp, Homo sapiens
cggtatttcaaaaatataacatgtaa

SEQ ID NO: 37869 - DNA, 26 bp, Homo sapiens
ggtatttcaaaaatataacatgtaac

SEQ ID NO: 37870 - DNA, 26 bp, Homo sapiens
gtatttcaaaaatataacatgtaaca

SEQ ID NO: 37871 - DNA, 26 bp, Homo sapiens
tatttcaaaaatataacatgtaacac

SEQ ID NO: 37872 - DNA, 26 bp, Homo sapiens
atttcaaaaatataacatgtaacact

SEQ ID NO: 37873 - DNA, 26 bp, Homo sapiens
tttcaaaaatataacatgtaacacta

SEQ ID NO: 37874 - DNA, 26 bp, Homo sapiens
ttcaaaaatataacatgtaacactaa

SEQ ID NO: 37875 - DNA, 26 bp, Homo sapiens
tcaaaaatataacatgtaacactaaa

SEQ ID NO: 37876 - DNA, 26 bp, Homo sapiens
caaaaatataacatgtaacactaaat

SEQ ID NO: 37877 - DNA, 26 bp, Homo sapiens
aaaaatataacatgtaacactaaatg

SEQ ID NO: 37878 - DNA, 26 bp, Homo sapiens
aaaatataacatgtaacactaaatgt

SEQ ID NO: 37879 - DNA, 26 bp, Homo sapiens
aaatataacatgtaacactaaatgtt

SEQ ID NO: 37880 - DNA, 26 bp, Homo sapiens
aatataacatgtaacactaaatgttg

SEQ ID NO: 37881 - DNA, 26 bp, Homo sapiens
atataacatgtaacactaaatgttgg

SEQ ID NO: 37882 - DNA, 26 bp, Homo sapiens
tataacatgtaacactaaatgttggc

SEQ ID NO: 37883 - DNA, 26 bp, Homo sapiens
ataacatgtaacactaaatgttggct

SEQ ID NO: 37884 - DNA, 26 bp, Homo sapiens
taacatgtaacactaaatgttggctc

SEQ ID NO: 37885 - DNA, 26 bp, Homo sapiens
aacatgtaacactaaatgttggctcg

SEQ ID NO: 37886 - DNA, 26 bp, Homo sapiens
acatgtaacactaaatgttggctcga

SEQ ID NO: 37887 - DNA, 26 bp, Homo sapiens
catgtaacactaaatgttggctcgag

SEQ ID NO: 37888 - DNA, 26 bp, Homo sapiens
atgtaacactaaatgttggctcgagt

SEQ ID NO: 37889 - DNA, 26 bp, Homo sapiens
tgtaacactaaatgttggctcgagtt

SEQ ID NO: 37890 - DNA, 26 bp, Homo sapiens
gtaacactaaatgttggctcgagttg

SEQ ID NO: 37891 - DNA, 26 bp, Homo sapiens
taacactaaatgttggctcgagttgc

SEQ ID NO: 37892 - DNA, 26 bp, Homo sapiens
aacactaaatgttggctcgagttgct

SEQ ID NO: 37893 - DNA, 26 bp, Homo sapiens
acactaaatgttggctcgagttgctg

SEQ ID NO: 37894 - DNA, 26 bp, Homo sapiens
cactaaatgttggctcgagttgctgc

SEQ ID NO: 37895 - DNA, 26 bp, Homo sapiens
actaaatgttggctcgagttgctgct

SEQ ID NO: 37896 - DNA, 26 bp, Homo sapiens
ctaaatgttggctcgagttgctgctg

SEQ ID NO: 37897 - DNA, 26 bp, Homo sapiens
taaatgttggctcgagttgctgctgt

SEQ ID NO: 37898 - DNA, 26 bp, Homo sapiens
aaatgttggctcgagttgctgctgtc

SEQ ID NO: 37899 - DNA, 26 bp, Homo sapiens
aatgttggctcgagttgctgctgtca

SEQ ID NO: 37900 - DNA, 26 bp, Homo sapiens
atgttggctcgagttgctgctgtcat

SEQ ID NO: 37901 - DNA, 26 bp, Homo sapiens
tgttggctcgagttgctgctgtcata

SEQ ID NO: 37902 - DNA, 26 bp, Homo sapiens
gttggctcgagttgctgctgtcatac

SEQ ID NO: 37903 - DNA, 26 bp, Homo sapiens
ttggctcgagttgctgctgtcataca

SEQ ID NO: 37904 - DNA, 26 bp, Homo sapiens
tggctcgagttgctgctgtcatacag

SEQ ID NO: 37905 - DNA, 26 bp, Homo sapiens
ggctcgagttgctgctgtcatacagg

SEQ ID NO: 37906 - DNA, 26 bp, Homo sapiens
gctcgagttgctgctgtcatacaggc

SEQ ID NO: 37907 - DNA, 26 bp, Homo sapiens
ctcgagttgctgctgtcatacaggca

SEQ ID NO: 37908 - DNA, 26 bp, Homo sapiens
tcgagttgctgctgtcatacaggcag

SEQ ID NO: 37909 - DNA, 26 bp, Homo sapiens
cgagttgctgctgtcatacaggcagg

SEQ ID NO: 37910 - DNA, 26 bp, Homo sapiens
gagttgctgctgtcatacaggcaggt

SEQ ID NO: 37911 - DNA, 26 bp, Homo sapiens
agttgctgctgtcatacaggcaggtt

SEQ ID NO: 37912 - DNA, 26 bp, Homo sapiens
gttgctgctgtcatacaggcaggttt

SEQ ID NO: 37913 - DNA, 26 bp, Homo sapiens
ttgctgctgtcatacaggcaggtttt

SEQ ID NO: 37914 - DNA, 26 bp, Homo sapiens
tgctgctgtcatacaggcaggttttg

SEQ ID NO: 37915 - DNA, 26 bp, Homo sapiens
gctgctgtcatacaggcaggttttgt

SEQ ID NO: 37916 - DNA, 26 bp, Homo sapiens
ctgctgtcatacaggcaggttttgtt

SEQ ID NO: 37917 - DNA, 26 bp, Homo sapiens
tgctgtcatacaggcaggttttgttt

SEQ ID NO: 37918 - DNA, 26 bp, Homo sapiens
gctgtcatacaggcaggttttgtttt

SEQ ID NO: 37919 - DNA, 26 bp, Homo sapiens
ctgtcatacaggcaggttttgttttg

SEQ ID NO: 37920 - DNA, 26 bp, Homo sapiens
tgtcatacaggcaggttttgttttgt

SEQ ID NO: 37921 - DNA, 26 bp, Homo sapiens
gtcatacaggcaggttttgttttgtc

SEQ ID NO: 37922 - DNA, 26 bp, Homo sapiens
tcatacaggcaggttttgttttgtct

SEQ ID NO: 37923 - DNA, 26 bp, Homo sapiens
catacaggcaggttttgttttgtctt

SEQ ID NO: 37924 - DNA, 26 bp, Homo sapiens
atacaggcaggttttgttttgtcttt

SEQ ID NO: 37925 - DNA, 26 bp, Homo sapiens
tacaggcaggttttgttttgtcttta

SEQ ID NO: 37926 - DNA, 26 bp, Homo sapiens
acaggcaggttttgttttgtctttaa

SEQ ID NO: 37927 - DNA, 26 bp, Homo sapiens
caggcaggttttgttttgtctttaaa

SEQ ID NO: 37928 - DNA, 26 bp, Homo sapiens
aggcaggttttgttttgtctttaaac

SEQ ID NO: 37929 - DNA, 26 bp, Homo sapiens
ggcaggttttgttttgtctttaaaca

SEQ ID NO: 37930 - DNA, 26 bp, Homo sapiens
gcaggttttgttttgtctttaaacat

SEQ ID NO: 37931 - DNA, 26 bp, Homo sapiens
caggttttgttttgtctttaaacatt

SEQ ID NO: 37932 - DNA, 26 bp, Homo sapiens
aggttttgttttgtctttaaacatta

SEQ ID NO: 37933 - DNA, 26 bp, Homo sapiens
ggttttgttttgtctttaaacattag

SEQ ID NO: 37934 - DNA, 26 bp, Homo sapiens
gttttgttttgtctttaaacattagc

SEQ ID NO: 37935 - DNA, 26 bp, Homo sapiens
ttttgttttgtctttaaacattagct

SEQ ID NO: 37936 - DNA, 26 bp, Homo sapiens
tttgttttgtctttaaacattagctc

SEQ ID NO: 37937 - DNA, 26 bp, Homo sapiens
ttgttttgtctttaaacattagctct

SEQ ID NO: 37938 - DNA, 26 bp, Homo sapiens
tgttttgtctttaaacattagctctt

SEQ ID NO: 37939 - DNA, 26 bp, Homo sapiens
gttttgtctttaaacattagctcttg

SEQ ID NO: 37940 - DNA, 26 bp, Homo sapiens
ttttgtctttaaacattagctcttgt

SEQ ID NO: 37941 - DNA, 26 bp, Homo sapiens
tttgtctttaaacattagctcttgta

SEQ ID NO: 37942 - DNA, 26 bp, Homo sapiens
ttgtctttaaacattagctcttgtaa

SEQ ID NO: 37943 - DNA, 26 bp, Homo sapiens
tgtctttaaacattagctcttgtaat

SEQ ID NO: 37944 - DNA, 26 bp, Homo sapiens
gtctttaaacattagctcttgtaatg

SEQ ID NO: 37945 - DNA, 26 bp, Homo sapiens
tctttaaacattagctcttgtaatgc

SEQ ID NO: 37946 - DNA, 26 bp, Homo sapiens
ctttaaacattagctcttgtaatgca

SEQ ID NO: 37947 - DNA, 26 bp, Homo sapiens
tttaaacattagctcttgtaatgcat

SEQ ID NO: 37948 - DNA, 26 bp, Homo sapiens
ttaaacattagctcttgtaatgcatc

SEQ ID NO: 37949 - DNA, 26 bp, Homo sapiens
taaacattagctcttgtaatgcatca

SEQ ID NO: 37950 - DNA, 26 bp, Homo sapiens
aaacattagctcttgtaatgcatcag

SEQ ID NO: 37951 - DNA, 26 bp, Homo sapiens
aacattagctcttgtaatgcatcaga

SEQ ID NO: 37952 - DNA, 26 bp, Homo sapiens
acattagctcttgtaatgcatcagat

SEQ ID NO: 37953 - DNA, 26 bp, Homo sapiens
cattagctcttgtaatgcatcagata

SEQ ID NO: 37954 - DNA, 26 bp, Homo sapiens
attagctcttgtaatgcatcagatat

SEQ ID NO: 37955 - DNA, 26 bp, Homo sapiens
ttagctcttgtaatgcatcagatata

SEQ ID NO: 37956 - DNA, 26 bp, Homo sapiens
tagctcttgtaatgcatcagatataa

SEQ ID NO: 37957 - DNA, 26 bp, Homo sapiens
agctcttgtaatgcatcagatataaa

SEQ ID NO: 37958 - DNA, 26 bp, Homo sapiens
gctcttgtaatgcatcagatataaac

SEQ ID NO: 37959 - DNA, 26 bp, Homo sapiens
ctcttgtaatgcatcagatataaact

SEQ ID NO: 37960 - DNA, 26 bp, Homo sapiens
tcttgtaatgcatcagatataaacta

SEQ ID NO: 37961 - DNA, 26 bp, Homo sapiens
cttgtaatgcatcagatataaactac

SEQ ID NO: 37962 - DNA, 26 bp, Homo sapiens
ttgtaatgcatcagatataaactaca

SEQ ID NO: 37963 - DNA, 26 bp, Homo sapiens
tgtaatgcatcagatataaactacac

SEQ ID NO: 37964 - DNA, 26 bp, Homo sapiens
gtaatgcatcagatataaactacaca

SEQ ID NO: 37965 - DNA, 26 bp, Homo sapiens
taatgcatcagatataaactacacat

SEQ ID NO: 37966 - DNA, 26 bp, Homo sapiens
aatgcatcagatataaactacacatg

SEQ ID NO: 37967 - DNA, 26 bp, Homo sapiens
atgcatcagatataaactacacatgt

SEQ ID NO: 37968 - DNA, 26 bp, Homo sapiens
tgcatcagatataaactacacatgta

SEQ ID NO: 37969 - DNA, 26 bp, Homo sapiens
gcatcagatataaactacacatgtag

SEQ ID NO: 37970 - DNA, 26 bp, Homo sapiens
catcagatataaactacacatgtaga

SEQ ID NO: 37971 - DNA, 26 bp, Homo sapiens
atcagatataaactacacatgtagaa

SEQ ID NO: 37972 - DNA, 26 bp, Homo sapiens
tcagatataaactacacatgtagaag

SEQ ID NO: 37973 - DNA, 26 bp, Homo sapiens
cagatataaactacacatgtagaagt

SEQ ID NO: 37974 - DNA, 26 bp, Homo sapiens
agatataaactacacatgtagaagta

SEQ ID NO: 37975 - DNA, 26 bp, Homo sapiens
gatataaactacacatgtagaagtaa

SEQ ID NO: 37976 - DNA, 26 bp, Homo sapiens
atataaactacacatgtagaagtaag

SEQ ID NO: 37977 - DNA, 26 bp, Homo sapiens
tataaactacacatgtagaagtaaga

SEQ ID NO: 37978 - DNA, 26 bp, Homo sapiens
ataaactacacatgtagaagtaagaa

SEQ ID NO: 37979 - DNA, 26 bp, Homo sapiens
taaactacacatgtagaagtaagaat

SEQ ID NO: 37980 - DNA, 26 bp, Homo sapiens
aaactacacatgtagaagtaagaatt

SEQ ID NO: 37981 - DNA, 26 bp, Homo sapiens
aactacacatgtagaagtaagaattg

SEQ ID NO: 37982 - DNA, 26 bp, Homo sapiens
actacacatgtagaagtaagaattgt

SEQ ID NO: 37983 - DNA, 26 bp, Homo sapiens
ctacacatgtagaagtaagaattgtt

SEQ ID NO: 37984 - DNA, 26 bp, Homo sapiens
tacacatgtagaagtaagaattgttt

SEQ ID NO: 37985 - DNA, 26 bp, Homo sapiens
acacatgtagaagtaagaattgtttt

SEQ ID NO: 37986 - DNA, 26 bp, Homo sapiens
cacatgtagaagtaagaattgttttc

SEQ ID NO: 37987 - DNA, 26 bp, Homo sapiens
acatgtagaagtaagaattgttttcc

SEQ ID NO: 37988 - DNA, 26 bp, Homo sapiens
catgtagaagtaagaattgttttcca

SEQ ID NO: 37989 - DNA, 26 bp, Homo sapiens
atgtagaagtaagaattgttttccat

SEQ ID NO: 37990 - DNA, 26 bp, Homo sapiens
tgtagaagtaagaattgttttccatg

SEQ ID NO: 37991 - DNA, 26 bp, Homo sapiens
gtagaagtaagaattgttttccatga

SEQ ID NO: 37992 - DNA, 26 bp, Homo sapiens
tagaagtaagaattgttttccatgaa

SEQ ID NO: 37993 - DNA, 26 bp, Homo sapiens
agaagtaagaattgttttccatgaag

SEQ ID NO: 37994 - DNA, 26 bp, Homo sapiens
gaagtaagaattgttttccatgaagg

SEQ ID NO: 37995 - DNA, 26 bp, Homo sapiens
aagtaagaattgttttccatgaagga

SEQ ID NO: 37996 - DNA, 26 bp, Homo sapiens
agtaagaattgttttccatgaaggaa

SEQ ID NO: 37997 - DNA, 26 bp, Homo sapiens
gtaagaattgttttccatgaaggaat

SEQ ID NO: 37998 - DNA, 26 bp, Homo sapiens
taagaattgttttccatgaaggaatt

SEQ ID NO: 37999 - DNA, 26 bp, Homo sapiens
aagaattgttttccatgaaggaattt

SEQ ID NO: 38000 - DNA, 26 bp, Homo sapiens
agaattgttttccatgaaggaatttt

SEQ ID NO: 38001 - DNA, 26 bp, Homo sapiens
gaattgttttccatgaaggaattttt

SEQ ID NO: 38002 - DNA, 26 bp, Homo sapiens
aattgttttccatgaaggaatttttg

SEQ ID NO: 38003 - DNA, 26 bp, Homo sapiens
attgttttccatgaaggaatttttgg

SEQ ID NO: 38004 - DNA, 26 bp, Homo sapiens
ttgttttccatgaaggaatttttggt

SEQ ID NO: 38005 - DNA, 26 bp, Homo sapiens
tgttttccatgaaggaatttttggtt

SEQ ID NO: 38006 - DNA, 26 bp, Homo sapiens
gttttccatgaaggaatttttggttt

SEQ ID NO: 38007 - DNA, 26 bp, Homo sapiens
ttttccatgaaggaatttttggtttg

SEQ ID NO: 38008 - DNA, 26 bp, Homo sapiens
tttccatgaaggaatttttggtttgc

SEQ ID NO: 38009 - DNA, 26 bp, Homo sapiens
ttccatgaaggaatttttggtttgct

SEQ ID NO: 38010 - DNA, 26 bp, Homo sapiens
tccatgaaggaatttttggtttgctt

SEQ ID NO: 38011 - DNA, 26 bp, Homo sapiens
ccatgaaggaatttttggtttgcttc

SEQ ID NO: 38012 - DNA, 26 bp, Homo sapiens
catgaaggaatttttggtttgcttct

SEQ ID NO: 38013 - DNA, 26 bp, Homo sapiens
atgaaggaatttttggtttgcttcta

SEQ ID NO: 38014 - DNA, 26 bp, Homo sapiens
tgaaggaatttttggtttgcttctag

SEQ ID NO: 38015 - DNA, 26 bp, Homo sapiens
gaaggaatttttggtttgcttctaga

SEQ ID NO: 38016 - DNA, 26 bp, Homo sapiens
aaggaatttttggtttgcttctagag

SEQ ID NO: 38017 - DNA, 26 bp, Homo sapiens
aggaatttttggtttgcttctagagg

SEQ ID NO: 38018 - DNA, 26 bp, Homo sapiens
ggaatttttggtttgcttctagagga

SEQ ID NO: 38019 - DNA, 26 bp, Homo sapiens
gaatttttggtttgcttctagaggag

SEQ ID NO: 38020 - DNA, 26 bp, Homo sapiens
aatttttggtttgcttctagaggaga

SEQ ID NO: 38021 - DNA, 26 bp, Homo sapiens
atttttggtttgcttctagaggagaa

SEQ ID NO: 38022 - DNA, 26 bp, Homo sapiens
tttttggtttgcttctagaggagaac

SEQ ID NO: 38023 - DNA, 26 bp, Homo sapiens
ttttggtttgcttctagaggagaacc

SEQ ID NO: 38024 - DNA, 26 bp, Homo sapiens
tttggtttgcttctagaggagaaccc

SEQ ID NO: 38025 - DNA, 26 bp, Homo sapiens
ttggtttgcttctagaggagaaccca

SEQ ID NO: 38026 - DNA, 26 bp, Homo sapiens
tggtttgcttctagaggagaacccat

SEQ ID NO: 38027 - DNA, 26 bp, Homo sapiens
ggtttgcttctagaggagaacccatg

SEQ ID NO: 38028 - DNA, 26 bp, Homo sapiens
gtttgcttctagaggagaacccatga

SEQ ID NO: 38029 - DNA, 26 bp, Homo sapiens
tttgcttctagaggagaacccatgaa

SEQ ID NO: 38030 - DNA, 26 bp, Homo sapiens
ttgcttctagaggagaacccatgaaa

SEQ ID NO: 38031 - DNA, 26 bp, Homo sapiens
tgcttctagaggagaacccatgaaaa

SEQ ID NO: 38032 - DNA, 26 bp, Homo sapiens
gcttctagaggagaacccatgaaaac

SEQ ID NO: 38033 - DNA, 26 bp, Homo sapiens
cttctagaggagaacccatgaaaaca

SEQ ID NO: 38034 - DNA, 26 bp, Homo sapiens
ttctagaggagaacccatgaaaacaa

SEQ ID NO: 38035 - DNA, 26 bp, Homo sapiens
tctagaggagaacccatgaaaacaat

SEQ ID NO: 38036 - DNA, 26 bp, Homo sapiens
ctagaggagaacccatgaaaacaata

SEQ ID NO: 38037 - DNA, 26 bp, Homo sapiens
tagaggagaacccatgaaaacaatag

SEQ ID NO: 38038 - DNA, 26 bp, Homo sapiens
agaggagaacccatgaaaacaatagt

SEQ ID NO: 38039 - DNA, 26 bp, Homo sapiens
gaggagaacccatgaaaacaatagtt

SEQ ID NO: 38040 - DNA, 26 bp, Homo sapiens
aggagaacccatgaaaacaatagtta

SEQ ID NO: 38041 - DNA, 26 bp, Homo sapiens
ggagaacccatgaaaacaatagttaa

SEQ ID NO: 38042 - DNA, 26 bp, Homo sapiens
gagaacccatgaaaacaatagttaat

SEQ ID NO: 38043 - DNA, 26 bp, Homo sapiens
agaacccatgaaaacaatagttaatt

SEQ ID NO: 38044 - DNA, 26 bp, Homo sapiens
gaacccatgaaaacaatagttaattg

SEQ ID NO: 38045 - DNA, 26 bp, Homo sapiens
aacccatgaaaacaatagttaattgc

SEQ ID NO: 38046 - DNA, 26 bp, Homo sapiens
acccatgaaaacaatagttaattgct

SEQ ID NO: 38047 - DNA, 26 bp, Homo sapiens
cccatgaaaacaatagttaattgctg

SEQ ID NO: 38048 - DNA, 26 bp, Homo sapiens
ccatgaaaacaatagttaattgctgg

SEQ ID NO: 38049 - DNA, 26 bp, Homo sapiens
catgaaaacaatagttaattgctggt

SEQ ID NO: 38050 - DNA, 26 bp, Homo sapiens
atgaaaacaatagttaattgctggta

SEQ ID NO: 38051 - DNA, 26 bp, Homo sapiens
tgaaaacaatagttaattgctggtat

SEQ ID NO: 38052 - DNA, 26 bp, Homo sapiens
gaaaacaatagttaattgctggtatt

SEQ ID NO: 38053 - DNA, 26 bp, Homo sapiens
aaaacaatagttaattgctggtattt

SEQ ID NO: 38054 - DNA, 26 bp, Homo sapiens
aaacaatagttaattgctggtatttt

SEQ ID NO: 38055 - DNA, 26 bp, Homo sapiens
aacaatagttaattgctggtatttta

SEQ ID NO: 38056 - DNA, 26 bp, Homo sapiens
acaatagttaattgctggtattttaa

SEQ ID NO: 38057 - DNA, 26 bp, Homo sapiens
caatagttaattgctggtattttaaa

SEQ ID NO: 38058 - DNA, 26 bp, Homo sapiens
aatagttaattgctggtattttaaaa

SEQ ID NO: 38059 - DNA, 26 bp, Homo sapiens
atagttaattgctggtattttaaaaa

SEQ ID NO: 38060 - DNA, 26 bp, Homo sapiens
tagttaattgctggtattttaaaaac

SEQ ID NO: 38061 - DNA, 26 bp, Homo sapiens
agttaattgctggtattttaaaaaca

SEQ ID NO: 38062 - DNA, 26 bp, Homo sapiens
gttaattgctggtattttaaaaacat

SEQ ID NO: 38063 - DNA, 26 bp, Homo sapiens
ttaattgctggtattttaaaaacata

SEQ ID NO: 38064 - DNA, 26 bp, Homo sapiens
taattgctggtattttaaaaacatat

SEQ ID NO: 38065 - DNA, 26 bp, Homo sapiens
aattgctggtattttaaaaacatatt

SEQ ID NO: 38066 - DNA, 26 bp, Homo sapiens
attgctggtattttaaaaacatattt

SEQ ID NO: 38067 - DNA, 26 bp, Homo sapiens
ttgctggtattttaaaaacatatttc

SEQ ID NO: 38068 - DNA, 26 bp, Homo sapiens
tgctggtattttaaaaacatatttca

SEQ ID NO: 38069 - DNA, 26 bp, Homo sapiens
gctggtattttaaaaacatatttcat

SEQ ID NO: 38070 - DNA, 26 bp, Homo sapiens
ctggtattttaaaaacatatttcatc

SEQ ID NO: 38071 - DNA, 26 bp, Homo sapiens
tggtattttaaaaacatatttcatct

SEQ ID NO: 38072 - DNA, 26 bp, Homo sapiens
ggtattttaaaaacatatttcatctt

SEQ ID NO: 38073 - DNA, 26 bp, Homo sapiens
gtattttaaaaacatatttcatcttt

SEQ ID NO: 38074 - DNA, 26 bp, Homo sapiens
tattttaaaaacatatttcatctttt

SEQ ID NO: 38075 - DNA, 26 bp, Homo sapiens
attttaaaaacatatttcatctttta

SEQ ID NO: 38076 - DNA, 26 bp, Homo sapiens
ttttaaaaacatatttcatcttttac

SEQ ID NO: 38077 - DNA, 26 bp, Homo sapiens
tttaaaaacatatttcatcttttacc

SEQ ID NO: 38078 - DNA, 26 bp, Homo sapiens
ttaaaaacatatttcatcttttacct

SEQ ID NO: 38079 - DNA, 26 bp, Homo sapiens
taaaaacatatttcatcttttaccta

SEQ ID NO: 38080 - DNA, 26 bp, Homo sapiens
aaaaacatatttcatcttttacctat

SEQ ID NO: 38081 - DNA, 26 bp, Homo sapiens
aaaacatatttcatcttttacctata

SEQ ID NO: 38082 - DNA, 26 bp, Homo sapiens
aaacatatttcatcttttacctatat

SEQ ID NO: 38083 - DNA, 26 bp, Homo sapiens
aacatatttcatcttttacctatatc

SEQ ID NO: 38084 - DNA, 26 bp, Homo sapiens
acatatttcatcttttacctatatca

SEQ ID NO: 38085 - DNA, 26 bp, Homo sapiens
catatttcatcttttacctatatcac

SEQ ID NO: 38086 - DNA, 26 bp, Homo sapiens
atatttcatcttttacctatatcact

SEQ ID NO: 38087 - DNA, 26 bp, Homo sapiens
tatttcatcttttacctatatcactg

SEQ ID NO: 38088 - DNA, 26 bp, Homo sapiens
atttcatcttttacctatatcactgt

SEQ ID NO: 38089 - DNA, 26 bp, Homo sapiens
tttcatcttttacctatatcactgta

SEQ ID NO: 38090 - DNA, 26 bp, Homo sapiens
ttcatcttttacctatatcactgtac

SEQ ID NO: 38091 - DNA, 26 bp, Homo sapiens
tcatcttttacctatatcactgtact

SEQ ID NO: 38092 - DNA, 26 bp, Homo sapiens
catcttttacctatatcactgtactg

SEQ ID NO: 38093 - DNA, 26 bp, Homo sapiens
atcttttacctatatcactgtactga

SEQ ID NO: 38094 - DNA, 26 bp, Homo sapiens
tcttttacctatatcactgtactgat

SEQ ID NO: 38095 - DNA, 26 bp, Homo sapiens
cttttacctatatcactgtactgata

SEQ ID NO: 38096 - DNA, 26 bp, Homo sapiens
ttttacctatatcactgtactgatag

SEQ ID NO: 38097 - DNA, 26 bp, Homo sapiens
tttacctatatcactgtactgatagg

SEQ ID NO: 38098 - DNA, 26 bp, Homo sapiens
ttacctatatcactgtactgataggc

SEQ ID NO: 38099 - DNA, 26 bp, Homo sapiens
tacctatatcactgtactgataggca

SEQ ID NO: 38100 - DNA, 26 bp, Homo sapiens
acctatatcactgtactgataggcag

SEQ ID NO: 38101 - DNA, 26 bp, Homo sapiens
cctatatcactgtactgataggcagg

SEQ ID NO: 38102 - DNA, 26 bp, Homo sapiens
ctatatcactgtactgataggcaggt

SEQ ID NO: 38103 - DNA, 26 bp, Homo sapiens
tatatcactgtactgataggcaggtc

SEQ ID NO: 38104 - DNA, 26 bp, Homo sapiens
atatcactgtactgataggcaggtct

SEQ ID NO: 38105 - DNA, 26 bp, Homo sapiens
tatcactgtactgataggcaggtctc

SEQ ID NO: 38106 - DNA, 26 bp, Homo sapiens
atcactgtactgataggcaggtctct

SEQ ID NO: 38107 - DNA, 26 bp, Homo sapiens
tcactgtactgataggcaggtctctc

SEQ ID NO: 38108 - DNA, 26 bp, Homo sapiens
cactgtactgataggcaggtctctcc

SEQ ID NO: 38109 - DNA, 26 bp, Homo sapiens
actgtactgataggcaggtctctcct

SEQ ID NO: 38110 - DNA, 26 bp, Homo sapiens
ctgtactgataggcaggtctctcctc

SEQ ID NO: 38111 - DNA, 26 bp, Homo sapiens
tgtactgataggcaggtctctcctct

SEQ ID NO: 38112 - DNA, 26 bp, Homo sapiens
gtactgataggcaggtctctcctctt

SEQ ID NO: 38113 - DNA, 26 bp, Homo sapiens
tactgataggcaggtctctcctctta

SEQ ID NO: 38114 - DNA, 26 bp, Homo sapiens
actgataggcaggtctctcctcttat

SEQ ID NO: 38115 - DNA, 26 bp, Homo sapiens
ctgataggcaggtctctcctcttatt

SEQ ID NO: 38116 - DNA, 26 bp, Homo sapiens
tgataggcaggtctctcctcttatta

SEQ ID NO: 38117 - DNA, 26 bp, Homo sapiens
gataggcaggtctctcctcttattac

SEQ ID NO: 38118 - DNA, 26 bp, Homo sapiens
ataggcaggtctctcctcttattact

SEQ ID NO: 38119 - DNA, 26 bp, Homo sapiens
taggcaggtctctcctcttattactg

SEQ ID NO: 38120 - DNA, 26 bp, Homo sapiens
aggcaggtctctcctcttattactgg

SEQ ID NO: 38121 - DNA, 26 bp, Homo sapiens
ggcaggtctctcctcttattactgga

SEQ ID NO: 38122 - DNA, 26 bp, Homo sapiens
gcaggtctctcctcttattactggat

SEQ ID NO: 38123 - DNA, 26 bp, Homo sapiens
caggtctctcctcttattactggatt

SEQ ID NO: 38124 - DNA, 26 bp, Homo sapiens
aggtctctcctcttattactggattt

SEQ ID NO: 38125 - DNA, 26 bp, Homo sapiens
ggtctctcctcttattactggatttt

SEQ ID NO: 38126 - DNA, 26 bp, Homo sapiens
gtctctcctcttattactggatttta

SEQ ID NO: 38127 - DNA, 26 bp, Homo sapiens
tctctcctcttattactggattttaa

SEQ ID NO: 38128 - DNA, 26 bp, Homo sapiens
ctctcctcttattactggattttaaa

SEQ ID NO: 38129 - DNA, 26 bp, Homo sapiens
tctcctcttattactggattttaaaa

SEQ ID NO: 38130 - DNA, 26 bp, Homo sapiens
ctcctcttattactggattttaaaat

SEQ ID NO: 38131 - DNA, 26 bp, Homo sapiens
tcctcttattactggattttaaaatt

SEQ ID NO: 38132 - DNA, 26 bp, Homo sapiens
cctcttattactggattttaaaattt

SEQ ID NO: 38133 - DNA, 26 bp, Homo sapiens
ctcttattactggattttaaaatttt

SEQ ID NO: 38134 - DNA, 26 bp, Homo sapiens
tcttattactggattttaaaattttc

SEQ ID NO: 38135 - DNA, 26 bp, Homo sapiens
cttattactggattttaaaattttca

SEQ ID NO: 38136 - DNA, 26 bp, Homo sapiens
ttattactggattttaaaattttcat

SEQ ID NO: 38137 - DNA, 26 bp, Homo sapiens
tattactggattttaaaattttcatc

SEQ ID NO: 38138 - DNA, 26 bp, Homo sapiens
attactggattttaaaattttcatcc

SEQ ID NO: 38139 - DNA, 26 bp, Homo sapiens
ttactggattttaaaattttcatcct

SEQ ID NO: 38140 - DNA, 26 bp, Homo sapiens
tactggattttaaaattttcatcctt

SEQ ID NO: 38141 - DNA, 26 bp, Homo sapiens
actggattttaaaattttcatcctta

SEQ ID NO: 38142 - DNA, 26 bp, Homo sapiens
ctggattttaaaattttcatccttaa

SEQ ID NO: 38143 - DNA, 26 bp, Homo sapiens
tggattttaaaattttcatccttaat

SEQ ID NO: 38144 - DNA, 26 bp, Homo sapiens
ggattttaaaattttcatccttaata

SEQ ID NO: 38145 - DNA, 26 bp, Homo sapiens
gattttaaaattttcatccttaatat

SEQ ID NO: 38146 - DNA, 26 bp, Homo sapiens
attttaaaattttcatccttaatatg

SEQ ID NO: 38147 - DNA, 26 bp, Homo sapiens
ttttaaaattttcatccttaatatgt

SEQ ID NO: 38148 - DNA, 26 bp, Homo sapiens
tttaaaattttcatccttaatatgta

SEQ ID NO: 38149 - DNA, 26 bp, Homo sapiens
ttaaaattttcatccttaatatgtag

SEQ ID NO: 38150 - DNA, 26 bp, Homo sapiens
taaaattttcatccttaatatgtaga

SEQ ID NO: 38151 - DNA, 26 bp, Homo sapiens
aaaattttcatccttaatatgtagaa

SEQ ID NO: 38152 - DNA, 26 bp, Homo sapiens
aaattttcatccttaatatgtagaat

SEQ ID NO: 38153 - DNA, 26 bp, Homo sapiens
aattttcatccttaatatgtagaatt

SEQ ID NO: 38154 - DNA, 26 bp, Homo sapiens
attttcatccttaatatgtagaattt

SEQ ID NO: 38155 - DNA, 26 bp, Homo sapiens
ttttcatccttaatatgtagaatttg

SEQ ID NO: 38156 - DNA, 26 bp, Homo sapiens
tttcatccttaatatgtagaatttga

SEQ ID NO: 38157 - DNA, 26 bp, Homo sapiens
ttcatccttaatatgtagaatttgaa

SEQ ID NO: 38158 - DNA, 26 bp, Homo sapiens
tcatccttaatatgtagaatttgaaa

SEQ ID NO: 38159 - DNA, 26 bp, Homo sapiens
catccttaatatgtagaatttgaaat

SEQ ID NO: 38160 - DNA, 26 bp, Homo sapiens
atccttaatatgtagaatttgaaata

SEQ ID NO: 38161 - DNA, 26 bp, Homo sapiens
tccttaatatgtagaatttgaaatag

SEQ ID NO: 38162 - DNA, 26 bp, Homo sapiens
ccttaatatgtagaatttgaaatagt

SEQ ID NO: 38163 - DNA, 26 bp, Homo sapiens
cttaatatgtagaatttgaaatagtt

SEQ ID NO: 38164 - DNA, 26 bp, Homo sapiens
ttaatatgtagaatttgaaatagttt

SEQ ID NO: 38165 - DNA, 26 bp, Homo sapiens
taatatgtagaatttgaaatagtttt

SEQ ID NO: 38166 - DNA, 26 bp, Homo sapiens
aatatgtagaatttgaaatagttttt

SEQ ID NO: 38167 - DNA, 26 bp, Homo sapiens
atatgtagaatttgaaatagttttta

SEQ ID NO: 38168 - DNA, 26 bp, Homo sapiens
tatgtagaatttgaaatagtttttaa

SEQ ID NO: 38169 - DNA, 26 bp, Homo sapiens
atgtagaatttgaaatagtttttaac

SEQ ID NO: 38170 - DNA, 26 bp, Homo sapiens
tgtagaatttgaaatagtttttaaca

SEQ ID NO: 38171 - DNA, 26 bp, Homo sapiens
gtagaatttgaaatagtttttaacat

SEQ ID NO: 38172 - DNA, 26 bp, Homo sapiens
tagaatttgaaatagtttttaacata

SEQ ID NO: 38173 - DNA, 26 bp, Homo sapiens
agaatttgaaatagtttttaacatat

SEQ ID NO: 38174 - DNA, 26 bp, Homo sapiens
gaatttgaaatagtttttaacatatg

SEQ ID NO: 38175 - DNA, 26 bp, Homo sapiens
aatttgaaatagtttttaacatatga

SEQ ID NO: 38176 - DNA, 26 bp, Homo sapiens
atttgaaatagtttttaacatatgat

SEQ ID NO: 38177 - DNA, 26 bp, Homo sapiens
tttgaaatagtttttaacatatgatg

SEQ ID NO: 38178 - DNA, 26 bp, Homo sapiens
ttgaaatagtttttaacatatgatgc

SEQ ID NO: 38179 - DNA, 26 bp, Homo sapiens
tgaaatagtttttaacatatgatgct

SEQ ID NO: 38180 - DNA, 26 bp, Homo sapiens
gaaatagtttttaacatatgatgcta

SEQ ID NO: 38181 - DNA, 26 bp, Homo sapiens
aaatagtttttaacatatgatgctat

SEQ ID NO: 38182 - DNA, 26 bp, Homo sapiens
aatagtttttaacatatgatgctata

SEQ ID NO: 38183 - DNA, 26 bp, Homo sapiens
atagtttttaacatatgatgctatat

SEQ ID NO: 38184 - DNA, 26 bp, Homo sapiens
tagtttttaacatatgatgctatata

SEQ ID NO: 38185 - DNA, 26 bp, Homo sapiens
agtttttaacatatgatgctatatat

SEQ ID NO: 38186 - DNA, 26 bp, Homo sapiens
gtttttaacatatgatgctatatata

SEQ ID NO: 38187 - DNA, 26 bp, Homo sapiens
tttttaacatatgatgctatatatat

SEQ ID NO: 38188 - DNA, 26 bp, Homo sapiens
ttttaacatatgatgctatatatata

SEQ ID NO: 38189 - DNA, 26 bp, Homo sapiens
tttaacatatgatgctatatatatat

SEQ ID NO: 38190 - DNA, 26 bp, Homo sapiens
ttaacatatgatgctatatatatatt

SEQ ID NO: 38191 - DNA, 26 bp, Homo sapiens
taacatatgatgctatatatatattt

SEQ ID NO: 38192 - DNA, 26 bp, Homo sapiens
aacatatgatgctatatatatattta

SEQ ID NO: 38193 - DNA, 26 bp, Homo sapiens
acatatgatgctatatatatatttat

SEQ ID NO: 38194 - DNA, 26 bp, Homo sapiens
catatgatgctatatatatatttatc

SEQ ID NO: 38195 - DNA, 26 bp, Homo sapiens
atatgatgctatatatatatttatca

SEQ ID NO: 38196 - DNA, 26 bp, Homo sapiens
tatgatgctatatatatatttatcat

SEQ ID NO: 38197 - DNA, 26 bp, Homo sapiens
atgatgctatatatatatttatcatg

SEQ ID NO: 38198 - DNA, 26 bp, Homo sapiens
tgatgctatatatatatttatcatga

SEQ ID NO: 38199 - DNA, 26 bp, Homo sapiens
gatgctatatatatatttatcatgaa

SEQ ID NO: 38200 - DNA, 26 bp, Homo sapiens
atgctatatatatatttatcatgaat

SEQ ID NO: 38201 - DNA, 26 bp, Homo sapiens
tgctatatatatatttatcatgaata

SEQ ID NO: 38202 - DNA, 26 bp, Homo sapiens
gctatatatatatttatcatgaatat

SEQ ID NO: 38203 - DNA, 26 bp, Homo sapiens
ctatatatatatttatcatgaatatt

SEQ ID NO: 38204 - DNA, 26 bp, Homo sapiens
tatatatatatttatcatgaatattt

SEQ ID NO: 38205 - DNA, 26 bp, Homo sapiens
atatatatatttatcatgaatatttt

SEQ ID NO: 38206 - DNA, 26 bp, Homo sapiens
tatatatatttatcatgaatatttta

SEQ ID NO: 38207 - DNA, 26 bp, Homo sapiens
atatatatttatcatgaatattttaa

SEQ ID NO: 38208 - DNA, 26 bp, Homo sapiens
tatatatttatcatgaatattttaat

SEQ ID NO: 38209 - DNA, 26 bp, Homo sapiens
atatatttatcatgaatattttaatt

SEQ ID NO: 38210 - DNA, 26 bp, Homo sapiens
tatatttatcatgaatattttaatta

SEQ ID NO: 38211 - DNA, 26 bp, Homo sapiens
atatttatcatgaatattttaattat

SEQ ID NO: 38212 - DNA, 26 bp, Homo sapiens
tatttatcatgaatattttaattatt

SEQ ID NO: 38213 - DNA, 26 bp, Homo sapiens
atttatcatgaatattttaattatta

SEQ ID NO: 38214 - DNA, 26 bp, Homo sapiens
tttatcatgaatattttaattattag

SEQ ID NO: 38215 - DNA, 26 bp, Homo sapiens
ttatcatgaatattttaattattaga

SEQ ID NO: 38216 - DNA, 26 bp, Homo sapiens
tatcatgaatattttaattattagag

SEQ ID NO: 38217 - DNA, 26 bp, Homo sapiens
atcatgaatattttaattattagaga

SEQ ID NO: 38218 - DNA, 26 bp, Homo sapiens
tcatgaatattttaattattagagaa

SEQ ID NO: 38219 - DNA, 26 bp, Homo sapiens
catgaatattttaattattagagaaa

SEQ ID NO: 38220 - DNA, 26 bp, Homo sapiens
atgaatattttaattattagagaaat

SEQ ID NO: 38221 - DNA, 26 bp, Homo sapiens
tgaatattttaattattagagaaatg

SEQ ID NO: 38222 - DNA, 26 bp, Homo sapiens
gaatattttaattattagagaaatgg

SEQ ID NO: 38223 - DNA, 26 bp, Homo sapiens
aatattttaattattagagaaatggt

SEQ ID NO: 38224 - DNA, 26 bp, Homo sapiens
atattttaattattagagaaatggta

SEQ ID NO: 38225 - DNA, 26 bp, Homo sapiens
tattttaattattagagaaatggtaa

SEQ ID NO: 38226 - DNA, 26 bp, Homo sapiens
attttaattattagagaaatggtaac

SEQ ID NO: 38227 - DNA, 26 bp, Homo sapiens
ttttaattattagagaaatggtaact

SEQ ID NO: 38228 - DNA, 26 bp, Homo sapiens
tttaattattagagaaatggtaactg

SEQ ID NO: 38229 - DNA, 26 bp, Homo sapiens
ttaattattagagaaatggtaactgg

SEQ ID NO: 38230 - DNA, 26 bp, Homo sapiens
taattattagagaaatggtaactgga

SEQ ID NO: 38231 - DNA, 26 bp, Homo sapiens
aattattagagaaatggtaactggaa

SEQ ID NO: 38232 - DNA, 26 bp, Homo sapiens
attattagagaaatggtaactggaat

SEQ ID NO: 38233 - DNA, 26 bp, Homo sapiens
ttattagagaaatggtaactggaata

SEQ ID NO: 38234 - DNA, 26 bp, Homo sapiens
tattagagaaatggtaactggaatat

SEQ ID NO: 38235 - DNA, 26 bp, Homo sapiens
attagagaaatggtaactggaatatg

SEQ ID NO: 38236 - DNA, 26 bp, Homo sapiens
ttagagaaatggtaactggaatatgc

SEQ ID NO: 38237 - DNA, 26 bp, Homo sapiens
tagagaaatggtaactggaatatgca

SEQ ID NO: 38238 - DNA, 26 bp, Homo sapiens
agagaaatggtaactggaatatgcaa

SEQ ID NO: 38239 - DNA, 26 bp, Homo sapiens
gagaaatggtaactggaatatgcaag

SEQ ID NO: 38240 - DNA, 26 bp, Homo sapiens
agaaatggtaactggaatatgcaagg

SEQ ID NO: 38241 - DNA, 26 bp, Homo sapiens
gaaatggtaactggaatatgcaagga

SEQ ID NO: 38242 - DNA, 26 bp, Homo sapiens
aaatggtaactggaatatgcaaggac

SEQ ID NO: 38243 - DNA, 26 bp, Homo sapiens
aatggtaactggaatatgcaaggact

SEQ ID NO: 38244 - DNA, 26 bp, Homo sapiens
atggtaactggaatatgcaaggacta

SEQ ID NO: 38245 - DNA, 26 bp, Homo sapiens
tggtaactggaatatgcaaggactat

SEQ ID NO: 38246 - DNA, 26 bp, Homo sapiens
ggtaactggaatatgcaaggactata

SEQ ID NO: 38247 - DNA, 26 bp, Homo sapiens
gtaactggaatatgcaaggactatac

SEQ ID NO: 38248 - DNA, 26 bp, Homo sapiens
taactggaatatgcaaggactatact

SEQ ID NO: 38249 - DNA, 26 bp, Homo sapiens
aactggaatatgcaaggactatactt

SEQ ID NO: 38250 - DNA, 26 bp, Homo sapiens
actggaatatgcaaggactatacttt

SEQ ID NO: 38251 - DNA, 26 bp, Homo sapiens
ctggaatatgcaaggactatactttg

SEQ ID NO: 38252 - DNA, 26 bp, Homo sapiens
tggaatatgcaaggactatactttga

SEQ ID NO: 38253 - DNA, 26 bp, Homo sapiens
ggaatatgcaaggactatactttgaa

SEQ ID NO: 38254 - DNA, 26 bp, Homo sapiens
gaatatgcaaggactatactttgaat

SEQ ID NO: 38255 - DNA, 26 bp, Homo sapiens
aatatgcaaggactatactttgaatg

SEQ ID NO: 38256 - DNA, 26 bp, Homo sapiens
atatgcaaggactatactttgaatga

SEQ ID NO: 38257 - DNA, 26 bp, Homo sapiens
tatgcaaggactatactttgaatgat

SEQ ID NO: 38258 - DNA, 26 bp, Homo sapiens
atgcaaggactatactttgaatgatg

SEQ ID NO: 38259 - DNA, 26 bp, Homo sapiens
tgcaaggactatactttgaatgatgc

SEQ ID NO: 38260 - DNA, 26 bp, Homo sapiens
gcaaggactatactttgaatgatgct

SEQ ID NO: 38261 - DNA, 26 bp, Homo sapiens
caaggactatactttgaatgatgctc

SEQ ID NO: 38262 - DNA, 26 bp, Homo sapiens
aaggactatactttgaatgatgctct

SEQ ID NO: 38263 - DNA, 26 bp, Homo sapiens
aggactatactttgaatgatgctctt

SEQ ID NO: 38264 - DNA, 26 bp, Homo sapiens
ggactatactttgaatgatgctcttt

SEQ ID NO: 38265 - DNA, 26 bp, Homo sapiens
gactatactttgaatgatgctctttg

SEQ ID NO: 38266 - DNA, 26 bp, Homo sapiens
actatactttgaatgatgctctttgc

SEQ ID NO: 38267 - DNA, 26 bp, Homo sapiens
ctatactttgaatgatgctctttgct

SEQ ID NO: 38268 - DNA, 26 bp, Homo sapiens
tatactttgaatgatgctctttgctg

SEQ ID NO: 38269 - DNA, 26 bp, Homo sapiens
atactttgaatgatgctctttgctgg

SEQ ID NO: 38270 - DNA, 26 bp, Homo sapiens
tactttgaatgatgctctttgctggt

SEQ ID NO: 38271 - DNA, 26 bp, Homo sapiens
actttgaatgatgctctttgctggta

SEQ ID NO: 38272 - DNA, 26 bp, Homo sapiens
ctttgaatgatgctctttgctggtac

SEQ ID NO: 38273 - DNA, 26 bp, Homo sapiens
tttgaatgatgctctttgctggtaca

SEQ ID NO: 38274 - DNA, 26 bp, Homo sapiens
ttgaatgatgctctttgctggtacat

SEQ ID NO: 38275 - DNA, 26 bp, Homo sapiens
tgaatgatgctctttgctggtacatt

SEQ ID NO: 38276 - DNA, 26 bp, Homo sapiens
gaatgatgctctttgctggtacatta

SEQ ID NO: 38277 - DNA, 26 bp, Homo sapiens
aatgatgctctttgctggtacattat

SEQ ID NO: 38278 - DNA, 26 bp, Homo sapiens
atgatgctctttgctggtacattatt

SEQ ID NO: 38279 - DNA, 26 bp, Homo sapiens
tgatgctctttgctggtacattatta

SEQ ID NO: 38280 - DNA, 26 bp, Homo sapiens
gatgctctttgctggtacattattaa

SEQ ID NO: 38281 - DNA, 26 bp, Homo sapiens
atgctctttgctggtacattattaat

SEQ ID NO: 38282 - DNA, 26 bp, Homo sapiens
tgctctttgctggtacattattaatt

SEQ ID NO: 38283 - DNA, 26 bp, Homo sapiens
gctctttgctggtacattattaattt

SEQ ID NO: 38284 - DNA, 26 bp, Homo sapiens
ctctttgctggtacattattaattta

SEQ ID NO: 38285 - DNA, 26 bp, Homo sapiens
tctttgctggtacattattaatttat

SEQ ID NO: 38286 - DNA, 26 bp, Homo sapiens
ctttgctggtacattattaatttatc

SEQ ID NO: 38287 - DNA, 26 bp, Homo sapiens
tttgctggtacattattaatttatct

SEQ ID NO: 38288 - DNA, 26 bp, Homo sapiens
ttgctggtacattattaatttatctt

SEQ ID NO: 38289 - DNA, 26 bp, Homo sapiens
tgctggtacattattaatttatcttt

SEQ ID NO: 38290 - DNA, 26 bp, Homo sapiens
gctggtacattattaatttatctttt

SEQ ID NO: 38291 - DNA, 26 bp, Homo sapiens
ctggtacattattaatttatcttttg

SEQ ID NO: 38292 - DNA, 26 bp, Homo sapiens
tggtacattattaatttatcttttga

SEQ ID NO: 38293 - DNA, 26 bp, Homo sapiens
ggtacattattaatttatcttttgaa

SEQ ID NO: 38294 - DNA, 26 bp, Homo sapiens
gtacattattaatttatcttttgaac

SEQ ID NO: 38295 - DNA, 26 bp, Homo sapiens
tacattattaatttatcttttgaaca

SEQ ID NO: 38296 - DNA, 26 bp, Homo sapiens
acattattaatttatcttttgaacac

SEQ ID NO: 38297 - DNA, 26 bp, Homo sapiens
cattattaatttatcttttgaacaca

SEQ ID NO: 38298 - DNA, 26 bp, Homo sapiens
attattaatttatcttttgaacacac

SEQ ID NO: 38299 - DNA, 26 bp, Homo sapiens
ttattaatttatcttttgaacacact

SEQ ID NO: 38300 - DNA, 26 bp, Homo sapiens
tattaatttatcttttgaacacactg

SEQ ID NO: 38301 - DNA, 26 bp, Homo sapiens
attaatttatcttttgaacacactgg

SEQ ID NO: 38302 - DNA, 26 bp, Homo sapiens
ttaatttatcttttgaacacactggc

SEQ ID NO: 38303 - DNA, 26 bp, Homo sapiens
taatttatcttttgaacacactggca

SEQ ID NO: 38304 - DNA, 26 bp, Homo sapiens
aatttatcttttgaacacactggcat

SEQ ID NO: 38305 - DNA, 26 bp, Homo sapiens
atttatcttttgaacacactggcata

SEQ ID NO: 38306 - DNA, 26 bp, Homo sapiens
tttatcttttgaacacactggcataa

SEQ ID NO: 38307 - DNA, 26 bp, Homo sapiens
ttatcttttgaacacactggcataac

SEQ ID NO: 38308 - DNA, 26 bp, Homo sapiens
tatcttttgaacacactggcataact

SEQ ID NO: 38309 - DNA, 26 bp, Homo sapiens
atcttttgaacacactggcataactt

SEQ ID NO: 38310 - DNA, 26 bp, Homo sapiens
tcttttgaacacactggcataacttt

SEQ ID NO: 38311 - DNA, 26 bp, Homo sapiens
cttttgaacacactggcataactttg

SEQ ID NO: 38312 - DNA, 26 bp, Homo sapiens
ttttgaacacactggcataactttgc

SEQ ID NO: 38313 - DNA, 26 bp, Homo sapiens
tttgaacacactggcataactttgct

SEQ ID NO: 38314 - DNA, 26 bp, Homo sapiens
ttgaacacactggcataactttgctt

SEQ ID NO: 38315 - DNA, 26 bp, Homo sapiens
tgaacacactggcataactttgcttt

SEQ ID NO: 38316 - DNA, 26 bp, Homo sapiens
gaacacactggcataactttgctttg

SEQ ID NO: 38317 - DNA, 26 bp, Homo sapiens
aacacactggcataactttgctttgg

SEQ ID NO: 38318 - DNA, 26 bp, Homo sapiens
acacactggcataactttgctttgga

SEQ ID NO: 38319 - DNA, 26 bp, Homo sapiens
cacactggcataactttgctttggaa

SEQ ID NO: 38320 - DNA, 26 bp, Homo sapiens
acactggcataactttgctttggaag

SEQ ID NO: 38321 - DNA, 26 bp, Homo sapiens
cactggcataactttgctttggaagt

SEQ ID NO: 38322 - DNA, 26 bp, Homo sapiens
actggcataactttgctttggaagtt

SEQ ID NO: 38323 - DNA, 26 bp, Homo sapiens
ctggcataactttgctttggaagtta

SEQ ID NO: 38324 - DNA, 26 bp, Homo sapiens
tggcataactttgctttggaagttat

SEQ ID NO: 38325 - DNA, 26 bp, Homo sapiens
ggcataactttgctttggaagttatt

SEQ ID NO: 38326 - DNA, 26 bp, Homo sapiens
gcataactttgctttggaagttattc

SEQ ID NO: 38327 - DNA, 26 bp, Homo sapiens
cataactttgctttggaagttattca

SEQ ID NO: 38328 - DNA, 26 bp, Homo sapiens
ataactttgctttggaagttattcag

SEQ ID NO: 38329 - DNA, 26 bp, Homo sapiens
taactttgctttggaagttattcagt

SEQ ID NO: 38330 - DNA, 26 bp, Homo sapiens
aactttgctttggaagttattcagtg

SEQ ID NO: 38331 - DNA, 26 bp, Homo sapiens
actttgctttggaagttattcagtgt

SEQ ID NO: 38332 - DNA, 26 bp, Homo sapiens
ctttgctttggaagttattcagtgtt

SEQ ID NO: 38333 - DNA, 26 bp, Homo sapiens
tttgctttggaagttattcagtgttt

SEQ ID NO: 38334 - DNA, 26 bp, Homo sapiens
ttgctttggaagttattcagtgtttt

SEQ ID NO: 38335 - DNA, 26 bp, Homo sapiens
tgctttggaagttattcagtgttttg

SEQ ID NO: 38336 - DNA, 26 bp, Homo sapiens
gctttggaagttattcagtgttttga

SEQ ID NO: 38337 - DNA, 26 bp, Homo sapiens
ctttggaagttattcagtgttttgaa

SEQ ID NO: 38338 - DNA, 26 bp, Homo sapiens
tttggaagttattcagtgttttgaaa

SEQ ID NO: 38339 - DNA, 26 bp, Homo sapiens
ttggaagttattcagtgttttgaaac

SEQ ID NO: 38340 - DNA, 26 bp, Homo sapiens
tggaagttattcagtgttttgaaaca

SEQ ID NO: 38341 - DNA, 26 bp, Homo sapiens
ggaagttattcagtgttttgaaacac

SEQ ID NO: 38342 - DNA, 26 bp, Homo sapiens
gaagttattcagtgttttgaaacaca

SEQ ID NO: 38343 - DNA, 26 bp, Homo sapiens
aagttattcagtgttttgaaacacaa

SEQ ID NO: 38344 - DNA, 26 bp, Homo sapiens
agttattcagtgttttgaaacacaag

SEQ ID NO: 38345 - DNA, 26 bp, Homo sapiens
gttattcagtgttttgaaacacaaga

SEQ ID NO: 38346 - DNA, 26 bp, Homo sapiens
ttattcagtgttttgaaacacaagac

SEQ ID NO: 38347 - DNA, 26 bp, Homo sapiens
tattcagtgttttgaaacacaagact

SEQ ID NO: 38348 - DNA, 26 bp, Homo sapiens
attcagtgttttgaaacacaagactg

SEQ ID NO: 38349 - DNA, 26 bp, Homo sapiens
ttcagtgttttgaaacacaagactga

SEQ ID NO: 38350 - DNA, 26 bp, Homo sapiens
tcagtgttttgaaacacaagactgac

SEQ ID NO: 38351 - DNA, 26 bp, Homo sapiens
cagtgttttgaaacacaagactgacg

SEQ ID NO: 38352 - DNA, 26 bp, Homo sapiens
agtgttttgaaacacaagactgacga

SEQ ID NO: 38353 - DNA, 26 bp, Homo sapiens
gtgttttgaaacacaagactgacgag

SEQ ID NO: 38354 - DNA, 26 bp, Homo sapiens
tgttttgaaacacaagactgacgagc

SEQ ID NO: 38355 - DNA, 26 bp, Homo sapiens
gttttgaaacacaagactgacgagca

SEQ ID NO: 38356 - DNA, 26 bp, Homo sapiens
ttttgaaacacaagactgacgagcac

SEQ ID NO: 38357 - DNA, 26 bp, Homo sapiens
tttgaaacacaagactgacgagcaca

SEQ ID NO: 38358 - DNA, 26 bp, Homo sapiens
ttgaaacacaagactgacgagcacat

SEQ ID NO: 38359 - DNA, 26 bp, Homo sapiens
tgaaacacaagactgacgagcacatc

SEQ ID NO: 38360 - DNA, 26 bp, Homo sapiens
gaaacacaagactgacgagcacatca

SEQ ID NO: 38361 - DNA, 26 bp, Homo sapiens
aaacacaagactgacgagcacatcaa

SEQ ID NO: 38362 - DNA, 26 bp, Homo sapiens
aacacaagactgacgagcacatcaag

SEQ ID NO: 38363 - DNA, 26 bp, Homo sapiens
acacaagactgacgagcacatcaagt

SEQ ID NO: 38364 - DNA, 26 bp, Homo sapiens
cacaagactgacgagcacatcaagtt

SEQ ID NO: 38365 - DNA, 26 bp, Homo sapiens
acaagactgacgagcacatcaagttc

SEQ ID NO: 38366 - DNA, 26 bp, Homo sapiens
caagactgacgagcacatcaagttct

SEQ ID NO: 38367 - DNA, 26 bp, Homo sapiens
aagactgacgagcacatcaagttcta

SEQ ID NO: 38368 - DNA, 26 bp, Homo sapiens
agactgacgagcacatcaagttctaa

SEQ ID NO: 38369 - DNA, 26 bp, Homo sapiens
gactgacgagcacatcaagttctaaa

SEQ ID NO: 38370 - DNA, 26 bp, Homo sapiens
actgacgagcacatcaagttctaaac

SEQ ID NO: 38371 - DNA, 26 bp, Homo sapiens
ctgacgagcacatcaagttctaaact

SEQ ID NO: 38372 - DNA, 26 bp, Homo sapiens
tgacgagcacatcaagttctaaactc

SEQ ID NO: 38373 - DNA, 26 bp, Homo sapiens
gacgagcacatcaagttctaaactca

SEQ ID NO: 38374 - DNA, 26 bp, Homo sapiens
acgagcacatcaagttctaaactcaa

SEQ ID NO: 38375 - DNA, 26 bp, Homo sapiens
cgagcacatcaagttctaaactcaac

SEQ ID NO: 38376 - DNA, 26 bp, Homo sapiens
gagcacatcaagttctaaactcaaca

SEQ ID NO: 38377 - DNA, 26 bp, Homo sapiens
agcacatcaagttctaaactcaacaa

SEQ ID NO: 38378 - DNA, 26 bp, Homo sapiens
gcacatcaagttctaaactcaacaaa

SEQ ID NO: 38379 - DNA, 26 bp, Homo sapiens
cacatcaagttctaaactcaacaaaa

SEQ ID NO: 38380 - DNA, 26 bp, Homo sapiens
acatcaagttctaaactcaacaaaat

SEQ ID NO: 38381 - DNA, 26 bp, Homo sapiens
catcaagttctaaactcaacaaaatg

SEQ ID NO: 38382 - DNA, 26 bp, Homo sapiens
atcaagttctaaactcaacaaaatga

SEQ ID NO: 38383 - DNA, 26 bp, Homo sapiens
tcaagttctaaactcaacaaaatgag

SEQ ID NO: 38384 - DNA, 26 bp, Homo sapiens
caagttctaaactcaacaaaatgaga

SEQ ID NO: 38385 - DNA, 26 bp, Homo sapiens
aagttctaaactcaacaaaatgagac

SEQ ID NO: 38386 - DNA, 26 bp, Homo sapiens
agttctaaactcaacaaaatgagacg

SEQ ID NO: 38387 - DNA, 26 bp, Homo sapiens
gttctaaactcaacaaaatgagacga

SEQ ID NO: 38388 - DNA, 26 bp, Homo sapiens
ttctaaactcaacaaaatgagacgag

SEQ ID NO: 38389 - DNA, 26 bp, Homo sapiens
tctaaactcaacaaaatgagacgaga

SEQ ID NO: 38390 - DNA, 26 bp, Homo sapiens
ctaaactcaacaaaatgagacgagag

SEQ ID NO: 38391 - DNA, 26 bp, Homo sapiens
taaactcaacaaaatgagacgagagt

SEQ ID NO: 38392 - DNA, 26 bp, Homo sapiens
aaactcaacaaaatgagacgagagta

SEQ ID NO: 38393 - DNA, 26 bp, Homo sapiens
aactcaacaaaatgagacgagagtaa

SEQ ID NO: 38394 - DNA, 26 bp, Homo sapiens
actcaacaaaatgagacgagagtaaa

SEQ ID NO: 38395 - DNA, 26 bp, Homo sapiens
ctcaacaaaatgagacgagagtaaag

SEQ ID NO: 38396 - DNA, 26 bp, Homo sapiens
tcaacaaaatgagacgagagtaaaga

SEQ ID NO: 38397 - DNA, 26 bp, Homo sapiens
caacaaaatgagacgagagtaaagag

SEQ ID NO: 38398 - DNA, 26 bp, Homo sapiens
aacaaaatgagacgagagtaaagagt

SEQ ID NO: 38399 - DNA, 26 bp, Homo sapiens
acaaaatgagacgagagtaaagagtt

SEQ ID NO: 38400 - DNA, 26 bp, Homo sapiens
caaaatgagacgagagtaaagagttt

SEQ ID NO: 38401 - DNA, 26 bp, Homo sapiens
aaaatgagacgagagtaaagagttta

SEQ ID NO: 38402 - DNA, 26 bp, Homo sapiens
aaatgagacgagagtaaagagtttac

SEQ ID NO: 38403 - DNA, 26 bp, Homo sapiens
aatgagacgagagtaaagagtttaca

SEQ ID NO: 38404 - DNA, 26 bp, Homo sapiens
atgagacgagagtaaagagtttacac

SEQ ID NO: 38405 - DNA, 26 bp, Homo sapiens
tgagacgagagtaaagagtttacaca

SEQ ID NO: 38406 - DNA, 26 bp, Homo sapiens
gagacgagagtaaagagtttacacac

SEQ ID NO: 38407 - DNA, 26 bp, Homo sapiens
agacgagagtaaagagtttacacaca

SEQ ID NO: 38408 - DNA, 26 bp, Homo sapiens
gacgagagtaaagagtttacacacac

SEQ ID NO: 38409 - DNA, 26 bp, Homo sapiens
acgagagtaaagagtttacacacacg

SEQ ID NO: 38410 - DNA, 26 bp, Homo sapiens
cgagagtaaagagtttacacacacgc

SEQ ID NO: 38411 - DNA, 26 bp, Homo sapiens
gagagtaaagagtttacacacacgca

SEQ ID NO: 38412 - DNA, 26 bp, Homo sapiens
agagtaaagagtttacacacacgcag

SEQ ID NO: 38413 - DNA, 26 bp, Homo sapiens
gagtaaagagtttacacacacgcagt

SEQ ID NO: 38414 - DNA, 26 bp, Homo sapiens
agtaaagagtttacacacacgcagtt

SEQ ID NO: 38415 - DNA, 26 bp, Homo sapiens
gtaaagagtttacacacacgcagttc

SEQ ID NO: 38416 - DNA, 26 bp, Homo sapiens
taaagagtttacacacacgcagttct

SEQ ID NO: 38417 - DNA, 26 bp, Homo sapiens
aaagagtttacacacacgcagttcta

SEQ ID NO: 38418 - DNA, 26 bp, Homo sapiens
aagagtttacacacacgcagttctat

SEQ ID NO: 38419 - DNA, 26 bp, Homo sapiens
agagtttacacacacgcagttctata

SEQ ID NO: 38420 - DNA, 26 bp, Homo sapiens
gagtttacacacacgcagttctatat

SEQ ID NO: 38421 - DNA, 26 bp, Homo sapiens
agtttacacacacgcagttctatata

SEQ ID NO: 38422 - DNA, 26 bp, Homo sapiens
gtttacacacacgcagttctatatag

SEQ ID NO: 38423 - DNA, 26 bp, Homo sapiens
tttacacacacgcagttctatatagt

SEQ ID NO: 38424 - DNA, 26 bp, Homo sapiens
ttacacacacgcagttctatatagtt

SEQ ID NO: 38425 - DNA, 26 bp, Homo sapiens
tacacacacgcagttctatatagttc

SEQ ID NO: 38426 - DNA, 26 bp, Homo sapiens
acacacacgcagttctatatagttca

SEQ ID NO: 38427 - DNA, 26 bp, Homo sapiens
cacacacgcagttctatatagttcac

SEQ ID NO: 38428 - DNA, 26 bp, Homo sapiens
acacacgcagttctatatagttcact

SEQ ID NO: 38429 - DNA, 26 bp, Homo sapiens
cacacgcagttctatatagttcactt

SEQ ID NO: 38430 - DNA, 26 bp, Homo sapiens
acacgcagttctatatagttcacttg

SEQ ID NO: 38431 - DNA, 26 bp, Homo sapiens
cacgcagttctatatagttcacttgt

SEQ ID NO: 38432 - DNA, 26 bp, Homo sapiens
acgcagttctatatagttcacttgtg

SEQ ID NO: 38433 - DNA, 26 bp, Homo sapiens
cgcagttctatatagttcacttgtgc

SEQ ID NO: 38434 - DNA, 26 bp, Homo sapiens
gcagttctatatagttcacttgtgcc

SEQ ID NO: 38435 - DNA, 26 bp, Homo sapiens
cagttctatatagttcacttgtgcct

SEQ ID NO: 38436 - DNA, 26 bp, Homo sapiens
agttctatatagttcacttgtgcctt

SEQ ID NO: 38437 - DNA, 26 bp, Homo sapiens
gttctatatagttcacttgtgccttg

SEQ ID NO: 38438 - DNA, 26 bp, Homo sapiens
ttctatatagttcacttgtgccttgg

SEQ ID NO: 38439 - DNA, 26 bp, Homo sapiens
tctatatagttcacttgtgccttgga

SEQ ID NO: 38440 - DNA, 26 bp, Homo sapiens
ctatatagttcacttgtgccttggag

SEQ ID NO: 38441 - DNA, 26 bp, Homo sapiens
tatatagttcacttgtgccttggagg

SEQ ID NO: 38442 - DNA, 26 bp, Homo sapiens
atatagttcacttgtgccttggaggg

SEQ ID NO: 38443 - DNA, 26 bp, Homo sapiens
tatagttcacttgtgccttggaggga

SEQ ID NO: 38444 - DNA, 26 bp, Homo sapiens
atagttcacttgtgccttggagggat

SEQ ID NO: 38445 - DNA, 26 bp, Homo sapiens
tagttcacttgtgccttggagggata

SEQ ID NO: 38446 - DNA, 26 bp, Homo sapiens
agttcacttgtgccttggagggatag

SEQ ID NO: 38447 - DNA, 26 bp, Homo sapiens
gttcacttgtgccttggagggatagt

SEQ ID NO: 38448 - DNA, 26 bp, Homo sapiens
ttcacttgtgccttggagggatagta

SEQ ID NO: 38449 - DNA, 26 bp, Homo sapiens
tcacttgtgccttggagggatagtat

SEQ ID NO: 38450 - DNA, 26 bp, Homo sapiens
cacttgtgccttggagggatagtatt

SEQ ID NO: 38451 - DNA, 26 bp, Homo sapiens
acttgtgccttggagggatagtatta

SEQ ID NO: 38452 - DNA, 26 bp, Homo sapiens
cttgtgccttggagggatagtattat

SEQ ID NO: 38453 - DNA, 26 bp, Homo sapiens
ttgtgccttggagggatagtattatt

SEQ ID NO: 38454 - DNA, 26 bp, Homo sapiens
tgtgccttggagggatagtattatta

SEQ ID NO: 38455 - DNA, 26 bp, Homo sapiens
gtgccttggagggatagtattattat

SEQ ID NO: 38456 - DNA, 26 bp, Homo sapiens
tgccttggagggatagtattattatc

SEQ ID NO: 38457 - DNA, 26 bp, Homo sapiens
gccttggagggatagtattattatca

SEQ ID NO: 38458 - DNA, 26 bp, Homo sapiens
ccttggagggatagtattattatcat

SEQ ID NO: 38459 - DNA, 26 bp, Homo sapiens
cttggagggatagtattattatcatt

SEQ ID NO: 38460 - DNA, 26 bp, Homo sapiens
ttggagggatagtattattatcatta

SEQ ID NO: 38461 - DNA, 26 bp, Homo sapiens
tggagggatagtattattatcattat

SEQ ID NO: 38462 - DNA, 26 bp, Homo sapiens
ggagggatagtattattatcattatt

SEQ ID NO: 38463 - DNA, 26 bp, Homo sapiens
gagggatagtattattatcattatta

SEQ ID NO: 38464 - DNA, 26 bp, Homo sapiens
agggatagtattattatcattattat

SEQ ID NO: 38465 - DNA, 26 bp, Homo sapiens
gggatagtattattatcattattatt

SEQ ID NO: 38466 - DNA, 26 bp, Homo sapiens
ggatagtattattatcattattatta

SEQ ID NO: 38467 - DNA, 26 bp, Homo sapiens
gatagtattattatcattattattaa

SEQ ID NO: 38468 - DNA, 26 bp, Homo sapiens
atagtattattatcattattattaat

SEQ ID NO: 38469 - DNA, 26 bp, Homo sapiens
tagtattattatcattattattaata

SEQ ID NO: 38470 - DNA, 26 bp, Homo sapiens
agtattattatcattattattaataa

SEQ ID NO: 38471 - DNA, 26 bp, Homo sapiens
gtattattatcattattattaataat

SEQ ID NO: 38472 - DNA, 26 bp, Homo sapiens
tattattatcattattattaataata

SEQ ID NO: 38473 - DNA, 26 bp, Homo sapiens
attattatcattattattaataataa

SEQ ID NO: 38474 - DNA, 26 bp, Homo sapiens
ttattatcattattattaataataaa

SEQ ID NO: 38475 - DNA, 26 bp, Homo sapiens
tattatcattattattaataataaaa

SEQ ID NO: 38476 - DNA, 26 bp, Homo sapiens
attatcattattattaataataaaaa

SEQ ID NO: 38477 - DNA, 26 bp, Homo sapiens
ttatcattattattaataataaaaaa

SEQ ID NO: 38478 - DNA, 26 bp, Homo sapiens
tatcattattattaataataaaaaac

SEQ ID NO: 38479 - DNA, 26 bp, Homo sapiens
atcattattattaataataaaaaaca

SEQ ID NO: 38480 - DNA, 26 bp, Homo sapiens
tcattattattaataataaaaaacac

SEQ ID NO: 38481 - DNA, 26 bp, Homo sapiens
cattattattaataataaaaaacaca

SEQ ID NO: 38482 - DNA, 26 bp, Homo sapiens
attattattaataataaaaaacacaa

SEQ ID NO: 38483 - DNA, 26 bp, Homo sapiens
ttattattaataataaaaaacacaat

SEQ ID NO: 38484 - DNA, 26 bp, Homo sapiens
tattattaataataaaaaacacaatt

SEQ ID NO: 38485 - DNA, 26 bp, Homo sapiens
attattaataataaaaaacacaattt

SEQ ID NO: 38486 - DNA, 26 bp, Homo sapiens
ttattaataataaaaaacacaatttg

SEQ ID NO: 38487 - DNA, 26 bp, Homo sapiens
tattaataataaaaaacacaatttgt

SEQ ID NO: 38488 - DNA, 26 bp, Homo sapiens
attaataataaaaaacacaatttgtc

SEQ ID NO: 38489 - DNA, 26 bp, Homo sapiens
ttaataataaaaaacacaatttgtcc

SEQ ID NO: 38490 - DNA, 26 bp, Homo sapiens
taataataaaaaacacaatttgtccc

SEQ ID NO: 38491 - DNA, 26 bp, Homo sapiens
aataataaaaaacacaatttgtccca

SEQ ID NO: 38492 - DNA, 26 bp, Homo sapiens
ataataaaaaacacaatttgtcccag

SEQ ID NO: 38493 - DNA, 26 bp, Homo sapiens
taataaaaaacacaatttgtcccagt

SEQ ID NO: 38494 - DNA, 26 bp, Homo sapiens
aataaaaaacacaatttgtcccagta

SEQ ID NO: 38495 - DNA, 26 bp, Homo sapiens
ataaaaaacacaatttgtcccagtag

SEQ ID NO: 38496 - DNA, 26 bp, Homo sapiens
taaaaaacacaatttgtcccagtagt

SEQ ID NO: 38497 - DNA, 26 bp, Homo sapiens
aaaaaacacaatttgtcccagtagta

SEQ ID NO: 38498 - DNA, 26 bp, Homo sapiens
aaaaacacaatttgtcccagtagtac

SEQ ID NO: 38499 - DNA, 26 bp, Homo sapiens
aaaacacaatttgtcccagtagtact

SEQ ID NO: 38500 - DNA, 26 bp, Homo sapiens
aaacacaatttgtcccagtagtactg

SEQ ID NO: 38501 - DNA, 26 bp, Homo sapiens
aacacaatttgtcccagtagtactgg

SEQ ID NO: 38502 - DNA, 26 bp, Homo sapiens
acacaatttgtcccagtagtactggc

SEQ ID NO: 38503 - DNA, 26 bp, Homo sapiens
cacaatttgtcccagtagtactggcc

SEQ ID NO: 38504 - DNA, 26 bp, Homo sapiens
acaatttgtcccagtagtactggcca

SEQ ID NO: 38505 - DNA, 26 bp, Homo sapiens
caatttgtcccagtagtactggccac

SEQ ID NO: 38506 - DNA, 26 bp, Homo sapiens
aatttgtcccagtagtactggccacc

SEQ ID NO: 38507 - DNA, 26 bp, Homo sapiens
atttgtcccagtagtactggccaccc

SEQ ID NO: 38508 - DNA, 26 bp, Homo sapiens
tttgtcccagtagtactggccaccct

SEQ ID NO: 38509 - DNA, 26 bp, Homo sapiens
ttgtcccagtagtactggccaccctg

SEQ ID NO: 38510 - DNA, 26 bp, Homo sapiens
tgtcccagtagtactggccaccctgt

SEQ ID NO: 38511 - DNA, 26 bp, Homo sapiens
gtcccagtagtactggccaccctgtt

SEQ ID NO: 38512 - DNA, 26 bp, Homo sapiens
tcccagtagtactggccaccctgttt

SEQ ID NO: 38513 - DNA, 26 bp, Homo sapiens
cccagtagtactggccaccctgtttt

SEQ ID NO: 38514 - DNA, 26 bp, Homo sapiens
ccagtagtactggccaccctgtttta

SEQ ID NO: 38515 - DNA, 26 bp, Homo sapiens
cagtagtactggccaccctgttttaa

SEQ ID NO: 38516 - DNA, 26 bp, Homo sapiens
agtagtactggccaccctgttttaag

SEQ ID NO: 38517 - DNA, 26 bp, Homo sapiens
gtagtactggccaccctgttttaaga

SEQ ID NO: 38518 - DNA, 26 bp, Homo sapiens
tagtactggccaccctgttttaagag

SEQ ID NO: 38519 - DNA, 26 bp, Homo sapiens
agtactggccaccctgttttaagagt

SEQ ID NO: 38520 - DNA, 26 bp, Homo sapiens
gtactggccaccctgttttaagagtt

SEQ ID NO: 38521 - DNA, 26 bp, Homo sapiens
tactggccaccctgttttaagagttt

SEQ ID NO: 38522 - DNA, 26 bp, Homo sapiens
actggccaccctgttttaagagtttt

SEQ ID NO: 38523 - DNA, 26 bp, Homo sapiens
ctggccaccctgttttaagagtttta

SEQ ID NO: 38524 - DNA, 26 bp, Homo sapiens
tggccaccctgttttaagagttttag

SEQ ID NO: 38525 - DNA, 26 bp, Homo sapiens
ggccaccctgttttaagagttttagg

SEQ ID NO: 38526 - DNA, 26 bp, Homo sapiens
gccaccctgttttaagagttttagga

SEQ ID NO: 38527 - DNA, 26 bp, Homo sapiens
ccaccctgttttaagagttttaggag

SEQ ID NO: 38528 - DNA, 26 bp, Homo sapiens
caccctgttttaagagttttaggaga

SEQ ID NO: 38529 - DNA, 26 bp, Homo sapiens
accctgttttaagagttttaggagat

SEQ ID NO: 38530 - DNA, 26 bp, Homo sapiens
ccctgttttaagagttttaggagatc

SEQ ID NO: 38531 - DNA, 26 bp, Homo sapiens
cctgttttaagagttttaggagatcc

SEQ ID NO: 38532 - DNA, 26 bp, Homo sapiens
ctgttttaagagttttaggagatccc

SEQ ID NO: 38533 - DNA, 26 bp, Homo sapiens
tgttttaagagttttaggagatccct

SEQ ID NO: 38534 - DNA, 26 bp, Homo sapiens
gttttaagagttttaggagatccctg

SEQ ID NO: 38535 - DNA, 26 bp, Homo sapiens
ttttaagagttttaggagatccctga

SEQ ID NO: 38536 - DNA, 26 bp, Homo sapiens
tttaagagttttaggagatccctgag

SEQ ID NO: 38537 - DNA, 26 bp, Homo sapiens
ttaagagttttaggagatccctgagc

SEQ ID NO: 38538 - DNA, 26 bp, Homo sapiens
taagagttttaggagatccctgagca

SEQ ID NO: 38539 - DNA, 26 bp, Homo sapiens
aagagttttaggagatccctgagcac

SEQ ID NO: 38540 - DNA, 26 bp, Homo sapiens
agagttttaggagatccctgagcaca

SEQ ID NO: 38541 - DNA, 26 bp, Homo sapiens
gagttttaggagatccctgagcacat

SEQ ID NO: 38542 - DNA, 26 bp, Homo sapiens
agttttaggagatccctgagcacatt

SEQ ID NO: 38543 - DNA, 26 bp, Homo sapiens
gttttaggagatccctgagcacattg

SEQ ID NO: 38544 - DNA, 26 bp, Homo sapiens
ttttaggagatccctgagcacattgt

SEQ ID NO: 38545 - DNA, 26 bp, Homo sapiens
tttaggagatccctgagcacattgtt

SEQ ID NO: 38546 - DNA, 26 bp, Homo sapiens
ttaggagatccctgagcacattgttt

SEQ ID NO: 38547 - DNA, 26 bp, Homo sapiens
taggagatccctgagcacattgtttc

SEQ ID NO: 38548 - DNA, 26 bp, Homo sapiens
aggagatccctgagcacattgtttct

SEQ ID NO: 38549 - DNA, 26 bp, Homo sapiens
ggagatccctgagcacattgtttctg

SEQ ID NO: 38550 - DNA, 26 bp, Homo sapiens
gagatccctgagcacattgtttctga

SEQ ID NO: 38551 - DNA, 26 bp, Homo sapiens
agatccctgagcacattgtttctgac

SEQ ID NO: 38552 - DNA, 26 bp, Homo sapiens
gatccctgagcacattgtttctgact

SEQ ID NO: 38553 - DNA, 26 bp, Homo sapiens
atccctgagcacattgtttctgactc

SEQ ID NO: 38554 - DNA, 26 bp, Homo sapiens
tccctgagcacattgtttctgactct

SEQ ID NO: 38555 - DNA, 26 bp, Homo sapiens
ccctgagcacattgtttctgactctt

SEQ ID NO: 38556 - DNA, 26 bp, Homo sapiens
cctgagcacattgtttctgactctta

SEQ ID NO: 38557 - DNA, 26 bp, Homo sapiens
ctgagcacattgtttctgactcttaa

SEQ ID NO: 38558 - DNA, 26 bp, Homo sapiens
tgagcacattgtttctgactcttaac

SEQ ID NO: 38559 - DNA, 26 bp, Homo sapiens
gagcacattgtttctgactcttaacc

SEQ ID NO: 38560 - DNA, 26 bp, Homo sapiens
agcacattgtttctgactcttaaccc

SEQ ID NO: 38561 - DNA, 26 bp, Homo sapiens
gcacattgtttctgactcttaacccc

SEQ ID NO: 38562 - DNA, 26 bp, Homo sapiens
cacattgtttctgactcttaacccca

SEQ ID NO: 38563 - DNA, 26 bp, Homo sapiens
acattgtttctgactcttaaccccaa

SEQ ID NO: 38564 - DNA, 26 bp, Homo sapiens
cattgtttctgactcttaaccccaac

SEQ ID NO: 38565 - DNA, 26 bp, Homo sapiens
attgtttctgactcttaaccccaact

SEQ ID NO: 38566 - DNA, 26 bp, Homo sapiens
ttgtttctgactcttaaccccaactc

SEQ ID NO: 38567 - DNA, 26 bp, Homo sapiens
tgtttctgactcttaaccccaactcc

SEQ ID NO: 38568 - DNA, 26 bp, Homo sapiens
gtttctgactcttaaccccaactcca

SEQ ID NO: 38569 - DNA, 26 bp, Homo sapiens
tttctgactcttaaccccaactccaa

SEQ ID NO: 38570 - DNA, 26 bp, Homo sapiens
ttctgactcttaaccccaactccaaa

SEQ ID NO: 38571 - DNA, 26 bp, Homo sapiens
tctgactcttaaccccaactccaaaa

SEQ ID NO: 38572 - DNA, 26 bp, Homo sapiens
ctgactcttaaccccaactccaaaat

SEQ ID NO: 38573 - DNA, 26 bp, Homo sapiens
tgactcttaaccccaactccaaaatg

SEQ ID NO: 38574 - DNA, 26 bp, Homo sapiens
gactcttaaccccaactccaaaatga

SEQ ID NO: 38575 - DNA, 26 bp, Homo sapiens
actcttaaccccaactccaaaatgat

SEQ ID NO: 38576 - DNA, 26 bp, Homo sapiens
ctcttaaccccaactccaaaatgata

SEQ ID NO: 38577 - DNA, 26 bp, Homo sapiens
tcttaaccccaactccaaaatgatag

SEQ ID NO: 38578 - DNA, 26 bp, Homo sapiens
cttaaccccaactccaaaatgatagg

SEQ ID NO: 38579 - DNA, 26 bp, Homo sapiens
ttaaccccaactccaaaatgataggg

SEQ ID NO: 38580 - DNA, 26 bp, Homo sapiens
taaccccaactccaaaatgatagggc

SEQ ID NO: 38581 - DNA, 26 bp, Homo sapiens
aaccccaactccaaaatgatagggct

SEQ ID NO: 38582 - DNA, 26 bp, Homo sapiens
accccaactccaaaatgatagggctt

SEQ ID NO: 38583 - DNA, 26 bp, Homo sapiens
ccccaactccaaaatgatagggcttc

SEQ ID NO: 38584 - DNA, 26 bp, Homo sapiens
cccaactccaaaatgatagggcttct

SEQ ID NO: 38585 - DNA, 26 bp, Homo sapiens
ccaactccaaaatgatagggcttcta

SEQ ID NO: 38586 - DNA, 26 bp, Homo sapiens
caactccaaaatgatagggcttctat

SEQ ID NO: 38587 - DNA, 26 bp, Homo sapiens
aactccaaaatgatagggcttctatc

SEQ ID NO: 38588 - DNA, 26 bp, Homo sapiens
actccaaaatgatagggcttctatcg

SEQ ID NO: 38589 - DNA, 26 bp, Homo sapiens
ctccaaaatgatagggcttctatcgt

SEQ ID NO: 38590 - DNA, 26 bp, Homo sapiens
tccaaaatgatagggcttctatcgtt

SEQ ID NO: 38591 - DNA, 26 bp, Homo sapiens
ccaaaatgatagggcttctatcgttg

SEQ ID NO: 38592 - DNA, 26 bp, Homo sapiens
caaaatgatagggcttctatcgttga

SEQ ID NO: 38593 - DNA, 26 bp, Homo sapiens
aaaatgatagggcttctatcgttgat

SEQ ID NO: 38594 - DNA, 26 bp, Homo sapiens
aaatgatagggcttctatcgttgata

SEQ ID NO: 38595 - DNA, 26 bp, Homo sapiens
aatgatagggcttctatcgttgatac

SEQ ID NO: 38596 - DNA, 26 bp, Homo sapiens
atgatagggcttctatcgttgatacc

SEQ ID NO: 38597 - DNA, 26 bp, Homo sapiens
tgatagggcttctatcgttgatacca

SEQ ID NO: 38598 - DNA, 26 bp, Homo sapiens
gatagggcttctatcgttgataccaa

SEQ ID NO: 38599 - DNA, 26 bp, Homo sapiens
atagggcttctatcgttgataccaag

SEQ ID NO: 38600 - DNA, 26 bp, Homo sapiens
tagggcttctatcgttgataccaaga

SEQ ID NO: 38601 - DNA, 26 bp, Homo sapiens
agggcttctatcgttgataccaagat

SEQ ID NO: 38602 - DNA, 26 bp, Homo sapiens
gggcttctatcgttgataccaagatg

SEQ ID NO: 38603 - DNA, 26 bp, Homo sapiens
ggcttctatcgttgataccaagatgg

SEQ ID NO: 38604 - DNA, 26 bp, Homo sapiens
gcttctatcgttgataccaagatgga

SEQ ID NO: 38605 - DNA, 26 bp, Homo sapiens
cttctatcgttgataccaagatggat

SEQ ID NO: 38606 - DNA, 26 bp, Homo sapiens
ttctatcgttgataccaagatggatt

SEQ ID NO: 38607 - DNA, 26 bp, Homo sapiens
tctatcgttgataccaagatggattg

SEQ ID NO: 38608 - DNA, 26 bp, Homo sapiens
ctatcgttgataccaagatggattgt

SEQ ID NO: 38609 - DNA, 26 bp, Homo sapiens
tatcgttgataccaagatggattgtc

SEQ ID NO: 38610 - DNA, 26 bp, Homo sapiens
atcgttgataccaagatggattgtca

SEQ ID NO: 38611 - DNA, 26 bp, Homo sapiens
tcgttgataccaagatggattgtcat

SEQ ID NO: 38612 - DNA, 26 bp, Homo sapiens
cgttgataccaagatggattgtcatt

SEQ ID NO: 38613 - DNA, 26 bp, Homo sapiens
gttgataccaagatggattgtcattc

SEQ ID NO: 38614 - DNA, 26 bp, Homo sapiens
ttgataccaagatggattgtcattca

SEQ ID NO: 38615 - DNA, 26 bp, Homo sapiens
tgataccaagatggattgtcattcac

SEQ ID NO: 38616 - DNA, 26 bp, Homo sapiens
gataccaagatggattgtcattcaca

SEQ ID NO: 38617 - DNA, 26 bp, Homo sapiens
ataccaagatggattgtcattcacag

SEQ ID NO: 38618 - DNA, 26 bp, Homo sapiens
taccaagatggattgtcattcacagt

SEQ ID NO: 38619 - DNA, 26 bp, Homo sapiens
accaagatggattgtcattcacagta

SEQ ID NO: 38620 - DNA, 26 bp, Homo sapiens
ccaagatggattgtcattcacagtaa

SEQ ID NO: 38621 - DNA, 26 bp, Homo sapiens
caagatggattgtcattcacagtaag

SEQ ID NO: 38622 - DNA, 26 bp, Homo sapiens
aagatggattgtcattcacagtaagt

SEQ ID NO: 38623 - DNA, 26 bp, Homo sapiens
agatggattgtcattcacagtaagtc

SEQ ID NO: 38624 - DNA, 26 bp, Homo sapiens
gatggattgtcattcacagtaagtca

SEQ ID NO: 38625 - DNA, 26 bp, Homo sapiens
atggattgtcattcacagtaagtcaa

SEQ ID NO: 38626 - DNA, 26 bp, Homo sapiens
tggattgtcattcacagtaagtcaat

SEQ ID NO: 38627 - DNA, 26 bp, Homo sapiens
ggattgtcattcacagtaagtcaatt

SEQ ID NO: 38628 - DNA, 26 bp, Homo sapiens
gattgtcattcacagtaagtcaatta

SEQ ID NO: 38629 - DNA, 26 bp, Homo sapiens
attgtcattcacagtaagtcaattat

SEQ ID NO: 38630 - DNA, 26 bp, Homo sapiens
ttgtcattcacagtaagtcaattata

SEQ ID NO: 38631 - DNA, 26 bp, Homo sapiens
tgtcattcacagtaagtcaattataa

SEQ ID NO: 38632 - DNA, 26 bp, Homo sapiens
gtcattcacagtaagtcaattataag

SEQ ID NO: 38633 - DNA, 26 bp, Homo sapiens
tcattcacagtaagtcaattataagg

SEQ ID NO: 38634 - DNA, 26 bp, Homo sapiens
cattcacagtaagtcaattataaggt

SEQ ID NO: 38635 - DNA, 26 bp, Homo sapiens
attcacagtaagtcaattataaggtg

SEQ ID NO: 38636 - DNA, 26 bp, Homo sapiens
ttcacagtaagtcaattataaggtgc

SEQ ID NO: 38637 - DNA, 26 bp, Homo sapiens
tcacagtaagtcaattataaggtgct

SEQ ID NO: 38638 - DNA, 26 bp, Homo sapiens
cacagtaagtcaattataaggtgctt

SEQ ID NO: 38639 - DNA, 26 bp, Homo sapiens
acagtaagtcaattataaggtgctta

SEQ ID NO: 38640 - DNA, 26 bp, Homo sapiens
cagtaagtcaattataaggtgcttat

SEQ ID NO: 38641 - DNA, 26 bp, Homo sapiens
agtaagtcaattataaggtgcttatt

SEQ ID NO: 38642 - DNA, 26 bp, Homo sapiens
gtaagtcaattataaggtgcttattt

SEQ ID NO: 38643 - DNA, 26 bp, Homo sapiens
taagtcaattataaggtgcttattta

SEQ ID NO: 38644 - DNA, 26 bp, Homo sapiens
aagtcaattataaggtgcttatttac

SEQ ID NO: 38645 - DNA, 26 bp, Homo sapiens
agtcaattataaggtgcttatttacc

SEQ ID NO: 38646 - DNA, 26 bp, Homo sapiens
gtcaattataaggtgcttatttaccc

SEQ ID NO: 38647 - DNA, 26 bp, Homo sapiens
tcaattataaggtgcttatttaccct

SEQ ID NO: 38648 - DNA, 26 bp, Homo sapiens
caattataaggtgcttatttaccctt

SEQ ID NO: 38649 - DNA, 26 bp, Homo sapiens
aattataaggtgcttatttacccttg

SEQ ID NO: 38650 - DNA, 26 bp, Homo sapiens
attataaggtgcttatttacccttgt

SEQ ID NO: 38651 - DNA, 26 bp, Homo sapiens
ttataaggtgcttatttacccttgtt

SEQ ID NO: 38652 - DNA, 26 bp, Homo sapiens
tataaggtgcttatttacccttgttt

SEQ ID NO: 38653 - DNA, 26 bp, Homo sapiens
ataaggtgcttatttacccttgtttt

SEQ ID NO: 38654 - DNA, 26 bp, Homo sapiens
taaggtgcttatttacccttgttttt

SEQ ID NO: 38655 - DNA, 26 bp, Homo sapiens
aaggtgcttatttacccttgtttttc

SEQ ID NO: 38656 - DNA, 26 bp, Homo sapiens
aggtgcttatttacccttgtttttca

SEQ ID NO: 38657 - DNA, 26 bp, Homo sapiens
ggtgcttatttacccttgtttttcac

SEQ ID NO: 38658 - DNA, 26 bp, Homo sapiens
gtgcttatttacccttgtttttcacc

SEQ ID NO: 38659 - DNA, 26 bp, Homo sapiens
tgcttatttacccttgtttttcacca

SEQ ID NO: 38660 - DNA, 26 bp, Homo sapiens
gcttatttacccttgtttttcaccag

SEQ ID NO: 38661 - DNA, 26 bp, Homo sapiens
cttatttacccttgtttttcaccagt

SEQ ID NO: 38662 - DNA, 26 bp, Homo sapiens
ttatttacccttgtttttcaccagtc

SEQ ID NO: 38663 - DNA, 26 bp, Homo sapiens
tatttacccttgtttttcaccagtca

SEQ ID NO: 38664 - DNA, 26 bp, Homo sapiens
atttacccttgtttttcaccagtcag

SEQ ID NO: 38665 - DNA, 26 bp, Homo sapiens
tttacccttgtttttcaccagtcagc

SEQ ID NO: 38666 - DNA, 26 bp, Homo sapiens
ttacccttgtttttcaccagtcagca

SEQ ID NO: 38667 - DNA, 26 bp, Homo sapiens
tacccttgtttttcaccagtcagcac

SEQ ID NO: 38668 - DNA, 26 bp, Homo sapiens
acccttgtttttcaccagtcagcaca

SEQ ID NO: 38669 - DNA, 26 bp, Homo sapiens
cccttgtttttcaccagtcagcacaa

SEQ ID NO: 38670 - DNA, 26 bp, Homo sapiens
ccttgtttttcaccagtcagcacaaa

SEQ ID NO: 38671 - DNA, 26 bp, Homo sapiens
cttgtttttcaccagtcagcacaaag

SEQ ID NO: 38672 - DNA, 26 bp, Homo sapiens
ttgtttttcaccagtcagcacaaaga

SEQ ID NO: 38673 - DNA, 26 bp, Homo sapiens
tgtttttcaccagtcagcacaaagaa

SEQ ID NO: 38674 - DNA, 26 bp, Homo sapiens
gtttttcaccagtcagcacaaagaac

SEQ ID NO: 38675 - DNA, 26 bp, Homo sapiens
tttttcaccagtcagcacaaagaact

SEQ ID NO: 38676 - DNA, 26 bp, Homo sapiens
ttttcaccagtcagcacaaagaactg

SEQ ID NO: 38677 - DNA, 26 bp, Homo sapiens
tttcaccagtcagcacaaagaactgt

SEQ ID NO: 38678 - DNA, 26 bp, Homo sapiens
ttcaccagtcagcacaaagaactgtc

SEQ ID NO: 38679 - DNA, 26 bp, Homo sapiens
tcaccagtcagcacaaagaactgtca

SEQ ID NO: 38680 - DNA, 26 bp, Homo sapiens
caccagtcagcacaaagaactgtcag

SEQ ID NO: 38681 - DNA, 26 bp, Homo sapiens
accagtcagcacaaagaactgtcaga

SEQ ID NO: 38682 - DNA, 26 bp, Homo sapiens
ccagtcagcacaaagaactgtcagaa

SEQ ID NO: 38683 - DNA, 26 bp, Homo sapiens
cagtcagcacaaagaactgtcagaaa

SEQ ID NO: 38684 - DNA, 26 bp, Homo sapiens
agtcagcacaaagaactgtcagaaaa

SEQ ID NO: 38685 - DNA, 26 bp, Homo sapiens
gtcagcacaaagaactgtcagaaaat

SEQ ID NO: 38686 - DNA, 26 bp, Homo sapiens
tcagcacaaagaactgtcagaaaata

SEQ ID NO: 38687 - DNA, 26 bp, Homo sapiens
cagcacaaagaactgtcagaaaataa

SEQ ID NO: 38688 - DNA, 26 bp, Homo sapiens
agcacaaagaactgtcagaaaataac

SEQ ID NO: 38689 - DNA, 26 bp, Homo sapiens
gcacaaagaactgtcagaaaataact

SEQ ID NO: 38690 - DNA, 26 bp, Homo sapiens
cacaaagaactgtcagaaaataactt

SEQ ID NO: 38691 - DNA, 26 bp, Homo sapiens
acaaagaactgtcagaaaataacttt

SEQ ID NO: 38692 - DNA, 26 bp, Homo sapiens
caaagaactgtcagaaaataactttt

SEQ ID NO: 38693 - DNA, 26 bp, Homo sapiens
aaagaactgtcagaaaataacttttt

SEQ ID NO: 38694 - DNA, 26 bp, Homo sapiens
aagaactgtcagaaaataacttttta

SEQ ID NO: 38695 - DNA, 26 bp, Homo sapiens
agaactgtcagaaaataactttttat

SEQ ID NO: 38696 - DNA, 26 bp, Homo sapiens
gaactgtcagaaaataactttttatt

SEQ ID NO: 38697 - DNA, 26 bp, Homo sapiens
aactgtcagaaaataactttttatta

SEQ ID NO: 38698 - DNA, 26 bp, Homo sapiens
actgtcagaaaataactttttattat

SEQ ID NO: 38699 - DNA, 26 bp, Homo sapiens
ctgtcagaaaataactttttattatt

SEQ ID NO: 38700 - DNA, 26 bp, Homo sapiens
tgtcagaaaataactttttattatta

SEQ ID NO: 38701 - DNA, 26 bp, Homo sapiens
gtcagaaaataactttttattattat

SEQ ID NO: 38702 - DNA, 26 bp, Homo sapiens
tcagaaaataactttttattattatc

SEQ ID NO: 38703 - DNA, 26 bp, Homo sapiens
cagaaaataactttttattattatct

SEQ ID NO: 38704 - DNA, 26 bp, Homo sapiens
agaaaataactttttattattatctt

SEQ ID NO: 38705 - DNA, 26 bp, Homo sapiens
gaaaataactttttattattatctta

SEQ ID NO: 38706 - DNA, 26 bp, Homo sapiens
aaaataactttttattattatcttaa

SEQ ID NO: 38707 - DNA, 26 bp, Homo sapiens
aaataactttttattattatcttaaa

SEQ ID NO: 38708 - DNA, 26 bp, Homo sapiens
aataactttttattattatcttaaaa

SEQ ID NO: 38709 - DNA, 26 bp, Homo sapiens
ataactttttattattatcttaaaat

SEQ ID NO: 38710 - DNA, 26 bp, Homo sapiens
taactttttattattatcttaaaata

SEQ ID NO: 38711 - DNA, 26 bp, Homo sapiens
aactttttattattatcttaaaataa

SEQ ID NO: 38712 - DNA, 26 bp, Homo sapiens
actttttattattatcttaaaataat

SEQ ID NO: 38713 - DNA, 26 bp, Homo sapiens
ctttttattattatcttaaaataata

SEQ ID NO: 38714 - DNA, 26 bp, Homo sapiens
tttttattattatcttaaaataatag

SEQ ID NO: 38715 - DNA, 26 bp, Homo sapiens
ttttattattatcttaaaataatagc

SEQ ID NO: 38716 - DNA, 26 bp, Homo sapiens
tttattattatcttaaaataatagca

SEQ ID NO: 38717 - DNA, 26 bp, Homo sapiens
ttattattatcttaaaataatagcat

SEQ ID NO: 38718 - DNA, 26 bp, Homo sapiens
tattattatcttaaaataatagcatt

SEQ ID NO: 38719 - DNA, 26 bp, Homo sapiens
attattatcttaaaataatagcattg

SEQ ID NO: 38720 - DNA, 26 bp, Homo sapiens
ttattatcttaaaataatagcattgg

SEQ ID NO: 38721 - DNA, 26 bp, Homo sapiens
tattatcttaaaataatagcattgga

SEQ ID NO: 38722 - DNA, 26 bp, Homo sapiens
attatcttaaaataatagcattggaa

SEQ ID NO: 38723 - DNA, 26 bp, Homo sapiens
ttatcttaaaataatagcattggaag

SEQ ID NO: 38724 - DNA, 26 bp, Homo sapiens
tatcttaaaataatagcattggaagg

SEQ ID NO: 38725 - DNA, 26 bp, Homo sapiens
atcttaaaataatagcattggaagga

SEQ ID NO: 38726 - DNA, 26 bp, Homo sapiens
tcttaaaataatagcattggaaggac

SEQ ID NO: 38727 - DNA, 26 bp, Homo sapiens
cttaaaataatagcattggaaggaca

SEQ ID NO: 38728 - DNA, 26 bp, Homo sapiens
ttaaaataatagcattggaaggacat

SEQ ID NO: 38729 - DNA, 26 bp, Homo sapiens
taaaataatagcattggaaggacata

SEQ ID NO: 38730 - DNA, 26 bp, Homo sapiens
aaaataatagcattggaaggacatat

SEQ ID NO: 38731 - DNA, 26 bp, Homo sapiens
aaataatagcattggaaggacatatg

SEQ ID NO: 38732 - DNA, 26 bp, Homo sapiens
aataatagcattggaaggacatatga

SEQ ID NO: 38733 - DNA, 26 bp, Homo sapiens
ataatagcattggaaggacatatgat

SEQ ID NO: 38734 - DNA, 26 bp, Homo sapiens
taatagcattggaaggacatatgatt

SEQ ID NO: 38735 - DNA, 26 bp, Homo sapiens
aatagcattggaaggacatatgattt

SEQ ID NO: 38736 - DNA, 26 bp, Homo sapiens
atagcattggaaggacatatgattta

SEQ ID NO: 38737 - DNA, 26 bp, Homo sapiens
tagcattggaaggacatatgatttaa

SEQ ID NO: 38738 - DNA, 26 bp, Homo sapiens
agcattggaaggacatatgatttaaa

SEQ ID NO: 38739 - DNA, 26 bp, Homo sapiens
gcattggaaggacatatgatttaaac

SEQ ID NO: 38740 - DNA, 26 bp, Homo sapiens
cattggaaggacatatgatttaaaca

SEQ ID NO: 38741 - DNA, 26 bp, Homo sapiens
attggaaggacatatgatttaaacaa

SEQ ID NO: 38742 - DNA, 26 bp, Homo sapiens
ttggaaggacatatgatttaaacaat

SEQ ID NO: 38743 - DNA, 26 bp, Homo sapiens
tggaaggacatatgatttaaacaatc

SEQ ID NO: 38744 - DNA, 26 bp, Homo sapiens
ggaaggacatatgatttaaacaatca

SEQ ID NO: 38745 - DNA, 26 bp, Homo sapiens
gaaggacatatgatttaaacaatcaa

SEQ ID NO: 38746 - DNA, 26 bp, Homo sapiens
aaggacatatgatttaaacaatcaat

SEQ ID NO: 38747 - DNA, 26 bp, Homo sapiens
aggacatatgatttaaacaatcaatg

SEQ ID NO: 38748 - DNA, 26 bp, Homo sapiens
ggacatatgatttaaacaatcaatgt

SEQ ID NO: 38749 - DNA, 26 bp, Homo sapiens
gacatatgatttaaacaatcaatgtt

SEQ ID NO: 38750 - DNA, 26 bp, Homo sapiens
acatatgatttaaacaatcaatgttg

SEQ ID NO: 38751 - DNA, 26 bp, Homo sapiens
catatgatttaaacaatcaatgttgg

SEQ ID NO: 38752 - DNA, 26 bp, Homo sapiens
atatgatttaaacaatcaatgttgga

SEQ ID NO: 38753 - DNA, 26 bp, Homo sapiens
tatgatttaaacaatcaatgttggaa

SEQ ID NO: 38754 - DNA, 26 bp, Homo sapiens
atgatttaaacaatcaatgttggaaa

SEQ ID NO: 38755 - DNA, 26 bp, Homo sapiens
tgatttaaacaatcaatgttggaaac

SEQ ID NO: 38756 - DNA, 26 bp, Homo sapiens
gatttaaacaatcaatgttggaaaca

SEQ ID NO: 38757 - DNA, 26 bp, Homo sapiens
atttaaacaatcaatgttggaaacag

SEQ ID NO: 38758 - DNA, 26 bp, Homo sapiens
tttaaacaatcaatgttggaaacagt

SEQ ID NO: 38759 - DNA, 26 bp, Homo sapiens
ttaaacaatcaatgttggaaacagtg

SEQ ID NO: 38760 - DNA, 26 bp, Homo sapiens
taaacaatcaatgttggaaacagtgg

SEQ ID NO: 38761 - DNA, 26 bp, Homo sapiens
aaacaatcaatgttggaaacagtggc

SEQ ID NO: 38762 - DNA, 26 bp, Homo sapiens
aacaatcaatgttggaaacagtggct

SEQ ID NO: 38763 - DNA, 26 bp, Homo sapiens
acaatcaatgttggaaacagtggctt

SEQ ID NO: 38764 - DNA, 26 bp, Homo sapiens
caatcaatgttggaaacagtggcttt

SEQ ID NO: 38765 - DNA, 26 bp, Homo sapiens
aatcaatgttggaaacagtggcttta

SEQ ID NO: 38766 - DNA, 26 bp, Homo sapiens
atcaatgttggaaacagtggctttag

SEQ ID NO: 38767 - DNA, 26 bp, Homo sapiens
tcaatgttggaaacagtggctttagg

SEQ ID NO: 38768 - DNA, 26 bp, Homo sapiens
caatgttggaaacagtggctttagga

SEQ ID NO: 38769 - DNA, 26 bp, Homo sapiens
aatgttggaaacagtggctttaggat

SEQ ID NO: 38770 - DNA, 26 bp, Homo sapiens
atgttggaaacagtggctttaggatt

SEQ ID NO: 38771 - DNA, 26 bp, Homo sapiens
tgttggaaacagtggctttaggatta

SEQ ID NO: 38772 - DNA, 26 bp, Homo sapiens
gttggaaacagtggctttaggattat

SEQ ID NO: 38773 - DNA, 26 bp, Homo sapiens
ttggaaacagtggctttaggattatt

SEQ ID NO: 38774 - DNA, 26 bp, Homo sapiens
tggaaacagtggctttaggattatta

SEQ ID NO: 38775 - DNA, 26 bp, Homo sapiens
ggaaacagtggctttaggattattat

SEQ ID NO: 38776 - DNA, 26 bp, Homo sapiens
gaaacagtggctttaggattattatc

SEQ ID NO: 38777 - DNA, 26 bp, Homo sapiens
aaacagtggctttaggattattatct

SEQ ID NO: 38778 - DNA, 26 bp, Homo sapiens
aacagtggctttaggattattatctg

SEQ ID NO: 38779 - DNA, 26 bp, Homo sapiens
acagtggctttaggattattatctgg

SEQ ID NO: 38780 - DNA, 26 bp, Homo sapiens
cagtggctttaggattattatctggc

SEQ ID NO: 38781 - DNA, 26 bp, Homo sapiens
agtggctttaggattattatctggct

SEQ ID NO: 38782 - DNA, 26 bp, Homo sapiens
gtggctttaggattattatctggctg

SEQ ID NO: 38783 - DNA, 26 bp, Homo sapiens
tggctttaggattattatctggctgc

SEQ ID NO: 38784 - DNA, 26 bp, Homo sapiens
ggctttaggattattatctggctgcc

SEQ ID NO: 38785 - DNA, 26 bp, Homo sapiens
gctttaggattattatctggctgccc

SEQ ID NO: 38786 - DNA, 26 bp, Homo sapiens
ctttaggattattatctggctgcccc

SEQ ID NO: 38787 - DNA, 26 bp, Homo sapiens
tttaggattattatctggctgcccct

SEQ ID NO: 38788 - DNA, 26 bp, Homo sapiens
ttaggattattatctggctgcccctc

SEQ ID NO: 38789 - DNA, 26 bp, Homo sapiens
taggattattatctggctgcccctca

SEQ ID NO: 38790 - DNA, 26 bp, Homo sapiens
aggattattatctggctgcccctcaa

SEQ ID NO: 38791 - DNA, 26 bp, Homo sapiens
ggattattatctggctgcccctcaac

SEQ ID NO: 38792 - DNA, 26 bp, Homo sapiens
gattattatctggctgcccctcaaca

SEQ ID NO: 38793 - DNA, 26 bp, Homo sapiens
attattatctggctgcccctcaacaa

SEQ ID NO: 38794 - DNA, 26 bp, Homo sapiens
ttattatctggctgcccctcaacaat

SEQ ID NO: 38795 - DNA, 26 bp, Homo sapiens
tattatctggctgcccctcaacaata

SEQ ID NO: 38796 - DNA, 26 bp, Homo sapiens
attatctggctgcccctcaacaataa

SEQ ID NO: 38797 - DNA, 26 bp, Homo sapiens
ttatctggctgcccctcaacaataac

SEQ ID NO: 38798 - DNA, 26 bp, Homo sapiens
tatctggctgcccctcaacaataaca

SEQ ID NO: 38799 - DNA, 26 bp, Homo sapiens
atctggctgcccctcaacaataacaa

SEQ ID NO: 38800 - DNA, 26 bp, Homo sapiens
tctggctgcccctcaacaataacaag

SEQ ID NO: 38801 - DNA, 26 bp, Homo sapiens
ctggctgcccctcaacaataacaagt

SEQ ID NO: 38802 - DNA, 26 bp, Homo sapiens
tggctgcccctcaacaataacaagtg

SEQ ID NO: 38803 - DNA, 26 bp, Homo sapiens
ggctgcccctcaacaataacaagtga

SEQ ID NO: 38804 - DNA, 26 bp, Homo sapiens
gctgcccctcaacaataacaagtgat

SEQ ID NO: 38805 - DNA, 26 bp, Homo sapiens
ctgcccctcaacaataacaagtgatt

SEQ ID NO: 38806 - DNA, 26 bp, Homo sapiens
tgcccctcaacaataacaagtgattc

SEQ ID NO: 38807 - DNA, 26 bp, Homo sapiens
gcccctcaacaataacaagtgattcg

SEQ ID NO: 38808 - DNA, 26 bp, Homo sapiens
cccctcaacaataacaagtgattcga

SEQ ID NO: 38809 - DNA, 26 bp, Homo sapiens
ccctcaacaataacaagtgattcgat

SEQ ID NO: 38810 - DNA, 26 bp, Homo sapiens
cctcaacaataacaagtgattcgatc

SEQ ID NO: 38811 - DNA, 26 bp, Homo sapiens
ctcaacaataacaagtgattcgatcg

SEQ ID NO: 38812 - DNA, 26 bp, Homo sapiens
tcaacaataacaagtgattcgatcga

SEQ ID NO: 38813 - DNA, 26 bp, Homo sapiens
caacaataacaagtgattcgatcgac

SEQ ID NO: 38814 - DNA, 26 bp, Homo sapiens
aacaataacaagtgattcgatcgaca

SEQ ID NO: 38815 - DNA, 26 bp, Homo sapiens
acaataacaagtgattcgatcgacat

SEQ ID NO: 38816 - DNA, 26 bp, Homo sapiens
caataacaagtgattcgatcgacatt

SEQ ID NO: 38817 - DNA, 26 bp, Homo sapiens
aataacaagtgattcgatcgacattc

SEQ ID NO: 38818 - DNA, 26 bp, Homo sapiens
ataacaagtgattcgatcgacattcc

SEQ ID NO: 38819 - DNA, 26 bp, Homo sapiens
taacaagtgattcgatcgacattcct

SEQ ID NO: 38820 - DNA, 26 bp, Homo sapiens
aacaagtgattcgatcgacattcctt

SEQ ID NO: 38821 - DNA, 26 bp, Homo sapiens
acaagtgattcgatcgacattcctta

SEQ ID NO: 38822 - DNA, 26 bp, Homo sapiens
caagtgattcgatcgacattccttag

SEQ ID NO: 38823 - DNA, 26 bp, Homo sapiens
aagtgattcgatcgacattccttagc

SEQ ID NO: 38824 - DNA, 26 bp, Homo sapiens
agtgattcgatcgacattccttagcc

SEQ ID NO: 38825 - DNA, 26 bp, Homo sapiens
gtgattcgatcgacattccttagcca

SEQ ID NO: 38826 - DNA, 26 bp, Homo sapiens
tgattcgatcgacattccttagccaa

SEQ ID NO: 38827 - DNA, 26 bp, Homo sapiens
gattcgatcgacattccttagccaaa

SEQ ID NO: 38828 - DNA, 26 bp, Homo sapiens
attcgatcgacattccttagccaaaa

SEQ ID NO: 38829 - DNA, 26 bp, Homo sapiens
ttcgatcgacattccttagccaaaaa

SEQ ID NO: 38830 - DNA, 26 bp, Homo sapiens
tcgatcgacattccttagccaaaaac

SEQ ID NO: 38831 - DNA, 26 bp, Homo sapiens
cgatcgacattccttagccaaaaaca

SEQ ID NO: 38832 - DNA, 26 bp, Homo sapiens
gatcgacattccttagccaaaaacaa

SEQ ID NO: 38833 - DNA, 26 bp, Homo sapiens
atcgacattccttagccaaaaacaaa

SEQ ID NO: 38834 - DNA, 26 bp, Homo sapiens
tcgacattccttagccaaaaacaaaa

SEQ ID NO: 38835 - DNA, 26 bp, Homo sapiens
cgacattccttagccaaaaacaaaag

SEQ ID NO: 38836 - DNA, 26 bp, Homo sapiens
gacattccttagccaaaaacaaaagg

SEQ ID NO: 38837 - DNA, 26 bp, Homo sapiens
acattccttagccaaaaacaaaaggc

SEQ ID NO: 38838 - DNA, 26 bp, Homo sapiens
cattccttagccaaaaacaaaaggca

SEQ ID NO: 38839 - DNA, 26 bp, Homo sapiens
attccttagccaaaaacaaaaggcaa

SEQ ID NO: 38840 - DNA, 26 bp, Homo sapiens
ttccttagccaaaaacaaaaggcaaa

SEQ ID NO: 38841 - DNA, 26 bp, Homo sapiens
tccttagccaaaaacaaaaggcaaaa

SEQ ID NO: 38842 - DNA, 26 bp, Homo sapiens
ccttagccaaaaacaaaaggcaaaac

SEQ ID NO: 38843 - DNA, 26 bp, Homo sapiens
cttagccaaaaacaaaaggcaaaaca

SEQ ID NO: 38844 - DNA, 26 bp, Homo sapiens
ttagccaaaaacaaaaggcaaaacaa

SEQ ID NO: 38845 - DNA, 26 bp, Homo sapiens
tagccaaaaacaaaaggcaaaacaaa

SEQ ID NO: 38846 - DNA, 26 bp, Homo sapiens
agccaaaaacaaaaggcaaaacaaaa

SEQ ID NO: 38847 - DNA, 26 bp, Homo sapiens
gccaaaaacaaaaggcaaaacaaaaa

SEQ ID NO: 38848 - DNA, 26 bp, Homo sapiens
ccaaaaacaaaaggcaaaacaaaaaa

SEQ ID NO: 38849 - DNA, 26 bp, Homo sapiens
caaaaacaaaaggcaaaacaaaaaaa

SEQ ID NO: 38850 - DNA, 26 bp, Homo sapiens
aaaaacaaaaggcaaaacaaaaaaaa

SEQ ID NO: 38851 - DNA, 26 bp, Homo sapiens
aaaacaaaaggcaaaacaaaaaaaac

SEQ ID NO: 38852 - DNA, 26 bp, Homo sapiens
aaacaaaaggcaaaacaaaaaaaacc

SEQ ID NO: 38853 - DNA, 26 bp, Homo sapiens
aacaaaaggcaaaacaaaaaaaacca

SEQ ID NO: 38854 - DNA, 26 bp, Homo sapiens
acaaaaggcaaaacaaaaaaaaccaa

SEQ ID NO: 38855 - DNA, 26 bp, Homo sapiens
caaaaggcaaaacaaaaaaaaccaaa

SEQ ID NO: 38856 - DNA, 26 bp, Homo sapiens
aaaaggcaaaacaaaaaaaaccaaaa

SEQ ID NO: 38857 - DNA, 26 bp, Homo sapiens
aaaggcaaaacaaaaaaaaccaaaaa

SEQ ID NO: 38858 - DNA, 26 bp, Homo sapiens
aaggcaaaacaaaaaaaaccaaaaaa

SEQ ID NO: 38859 - DNA, 26 bp, Homo sapiens
aggcaaaacaaaaaaaaccaaaaaac

SEQ ID NO: 38860 - DNA, 26 bp, Homo sapiens
ggcaaaacaaaaaaaaccaaaaaaca

SEQ ID NO: 38861 - DNA, 26 bp, Homo sapiens
gcaaaacaaaaaaaaccaaaaaacaa

SEQ ID NO: 38862 - DNA, 26 bp, Homo sapiens
caaaacaaaaaaaaccaaaaaacaaa

SEQ ID NO: 38863 - DNA, 26 bp, Homo sapiens
aaaacaaaaaaaaccaaaaaacaaaa

SEQ ID NO: 38864 - DNA, 26 bp, Homo sapiens
aaacaaaaaaaaccaaaaaacaaaaa

SEQ ID NO: 38865 - DNA, 26 bp, Homo sapiens
aacaaaaaaaaccaaaaaacaaaaaa

SEQ ID NO: 38866 - DNA, 26 bp, Homo sapiens
acaaaaaaaaccaaaaaacaaaaaaa

SEQ ID NO: 38867 - DNA, 26 bp, Homo sapiens
caaaaaaaaccaaaaaacaaaaaaac

SEQ ID NO: 38868 - DNA, 26 bp, Homo sapiens
aaaaaaaaccaaaaaacaaaaaaacc

SEQ ID NO: 38869 - DNA, 26 bp, Homo sapiens
aaaaaaaccaaaaaacaaaaaaaccc

SEQ ID NO: 38870 - DNA, 26 bp, Homo sapiens
aaaaaaccaaaaaacaaaaaaacccc

SEQ ID NO: 38871 - DNA, 26 bp, Homo sapiens
aaaaaccaaaaaacaaaaaaacccca

SEQ ID NO: 38872 - DNA, 26 bp, Homo sapiens
aaaaccaaaaaacaaaaaaaccccaa

SEQ ID NO: 38873 - DNA, 26 bp, Homo sapiens
aaaccaaaaaacaaaaaaaccccaaa

SEQ ID NO: 38874 - DNA, 26 bp, Homo sapiens
aaccaaaaaacaaaaaaaccccaaaa

SEQ ID NO: 38875 - DNA, 26 bp, Homo sapiens
accaaaaaacaaaaaaaccccaaaaa

SEQ ID NO: 38876 - DNA, 26 bp, Homo sapiens
ccaaaaaacaaaaaaaccccaaaaaa

SEQ ID NO: 38877 - DNA, 26 bp, Homo sapiens
caaaaaacaaaaaaaccccaaaaaac

SEQ ID NO: 38878 - DNA, 26 bp, Homo sapiens
aaaaaacaaaaaaaccccaaaaaact

SEQ ID NO: 38879 - DNA, 26 bp, Homo sapiens
aaaaacaaaaaaaccccaaaaaactg

SEQ ID NO: 38880 - DNA, 26 bp, Homo sapiens
aaaacaaaaaaaccccaaaaaactgt

SEQ ID NO: 38881 - DNA, 26 bp, Homo sapiens
aaacaaaaaaaccccaaaaaactgta

SEQ ID NO: 38882 - DNA, 26 bp, Homo sapiens
aacaaaaaaaccccaaaaaactgtac

SEQ ID NO: 38883 - DNA, 26 bp, Homo sapiens
acaaaaaaaccccaaaaaactgtaca

SEQ ID NO: 38884 - DNA, 26 bp, Homo sapiens
caaaaaaaccccaaaaaactgtacaa

SEQ ID NO: 38885 - DNA, 26 bp, Homo sapiens
aaaaaaaccccaaaaaactgtacaaa

SEQ ID NO: 38886 - DNA, 26 bp, Homo sapiens
aaaaaaccccaaaaaactgtacaaat

SEQ ID NO: 38887 - DNA, 26 bp, Homo sapiens
aaaaaccccaaaaaactgtacaaata

SEQ ID NO: 38888 - DNA, 26 bp, Homo sapiens
aaaaccccaaaaaactgtacaaatat

SEQ ID NO: 38889 - DNA, 26 bp, Homo sapiens
aaaccccaaaaaactgtacaaatatg

SEQ ID NO: 38890 - DNA, 26 bp, Homo sapiens
aaccccaaaaaactgtacaaatatgt

SEQ ID NO: 38891 - DNA, 26 bp, Homo sapiens
accccaaaaaactgtacaaatatgta

SEQ ID NO: 38892 - DNA, 26 bp, Homo sapiens
ccccaaaaaactgtacaaatatgtat

SEQ ID NO: 38893 - DNA, 26 bp, Homo sapiens
cccaaaaaactgtacaaatatgtatt

SEQ ID NO: 38894 - DNA, 26 bp, Homo sapiens
ccaaaaaactgtacaaatatgtattt

SEQ ID NO: 38895 - DNA, 26 bp, Homo sapiens
caaaaaactgtacaaatatgtatttt

SEQ ID NO: 38896 - DNA, 26 bp, Homo sapiens
aaaaaactgtacaaatatgtattttt

SEQ ID NO: 38897 - DNA, 26 bp, Homo sapiens
aaaaactgtacaaatatgtatttttc

SEQ ID NO: 38898 - DNA, 26 bp, Homo sapiens
aaaactgtacaaatatgtatttttcc

SEQ ID NO: 38899 - DNA, 26 bp, Homo sapiens
aaactgtacaaatatgtatttttccc

SEQ ID NO: 38900 - DNA, 26 bp, Homo sapiens
aactgtacaaatatgtatttttccct

SEQ ID NO: 38901 - DNA, 26 bp, Homo sapiens
actgtacaaatatgtatttttccctg

SEQ ID NO: 38902 - DNA, 26 bp, Homo sapiens
ctgtacaaatatgtatttttccctga

SEQ ID NO: 38903 - DNA, 26 bp, Homo sapiens
tgtacaaatatgtatttttccctgag

SEQ ID NO: 38904 - DNA, 26 bp, Homo sapiens
gtacaaatatgtatttttccctgagg

SEQ ID NO: 38905 - DNA, 26 bp, Homo sapiens
tacaaatatgtatttttccctgaggg

SEQ ID NO: 38906 - DNA, 26 bp, Homo sapiens
acaaatatgtatttttccctgaggga

SEQ ID NO: 38907 - DNA, 26 bp, Homo sapiens
caaatatgtatttttccctgagggat

SEQ ID NO: 38908 - DNA, 26 bp, Homo sapiens
aaatatgtatttttccctgagggatc

SEQ ID NO: 38909 - DNA, 26 bp, Homo sapiens
aatatgtatttttccctgagggatca

SEQ ID NO: 38910 - DNA, 26 bp, Homo sapiens
atatgtatttttccctgagggatcaa

SEQ ID NO: 38911 - DNA, 26 bp, Homo sapiens
tatgtatttttccctgagggatcaag

SEQ ID NO: 38912 - DNA, 26 bp, Homo sapiens
atgtatttttccctgagggatcaagg

SEQ ID NO: 38913 - DNA, 26 bp, Homo sapiens
tgtatttttccctgagggatcaaggt

SEQ ID NO: 38914 - DNA, 26 bp, Homo sapiens
gtatttttccctgagggatcaaggta

SEQ ID NO: 38915 - DNA, 26 bp, Homo sapiens
tatttttccctgagggatcaaggtac

SEQ ID NO: 38916 - DNA, 26 bp, Homo sapiens
atttttccctgagggatcaaggtaca

SEQ ID NO: 38917 - DNA, 26 bp, Homo sapiens
tttttccctgagggatcaaggtacac

SEQ ID NO: 38918 - DNA, 26 bp, Homo sapiens
ttttccctgagggatcaaggtacacc

SEQ ID NO: 38919 - DNA, 26 bp, Homo sapiens
tttccctgagggatcaaggtacaccc

SEQ ID NO: 38920 - DNA, 26 bp, Homo sapiens
ttccctgagggatcaaggtacacccg

SEQ ID NO: 38921 - DNA, 26 bp, Homo sapiens
tccctgagggatcaaggtacacccgc

SEQ ID NO: 38922 - DNA, 26 bp, Homo sapiens
ccctgagggatcaaggtacacccgca

SEQ ID NO: 38923 - DNA, 26 bp, Homo sapiens
cctgagggatcaaggtacacccgcaa

SEQ ID NO: 38924 - DNA, 26 bp, Homo sapiens
ctgagggatcaaggtacacccgcaag

SEQ ID NO: 38925 - DNA, 26 bp, Homo sapiens
tgagggatcaaggtacacccgcaagt

SEQ ID NO: 38926 - DNA, 26 bp, Homo sapiens
gagggatcaaggtacacccgcaagtg

SEQ ID NO: 38927 - DNA, 26 bp, Homo sapiens
agggatcaaggtacacccgcaagtgc

SEQ ID NO: 38928 - DNA, 26 bp, Homo sapiens
gggatcaaggtacacccgcaagtgct

SEQ ID NO: 38929 - DNA, 26 bp, Homo sapiens
ggatcaaggtacacccgcaagtgctc

SEQ ID NO: 38930 - DNA, 26 bp, Homo sapiens
gatcaaggtacacccgcaagtgctct

SEQ ID NO: 38931 - DNA, 26 bp, Homo sapiens
atcaaggtacacccgcaagtgctcta

SEQ ID NO: 38932 - DNA, 26 bp, Homo sapiens
tcaaggtacacccgcaagtgctctat

SEQ ID NO: 38933 - DNA, 26 bp, Homo sapiens
caaggtacacccgcaagtgctctatg

SEQ ID NO: 38934 - DNA, 26 bp, Homo sapiens
aaggtacacccgcaagtgctctatgt

SEQ ID NO: 38935 - DNA, 26 bp, Homo sapiens
aggtacacccgcaagtgctctatgta

SEQ ID NO: 38936 - DNA, 26 bp, Homo sapiens
ggtacacccgcaagtgctctatgtac

SEQ ID NO: 38937 - DNA, 26 bp, Homo sapiens
gtacacccgcaagtgctctatgtaca

SEQ ID NO: 38938 - DNA, 26 bp, Homo sapiens
tacacccgcaagtgctctatgtacat

SEQ ID NO: 38939 - DNA, 26 bp, Homo sapiens
acacccgcaagtgctctatgtacata

SEQ ID NO: 38940 - DNA, 26 bp, Homo sapiens
cacccgcaagtgctctatgtacatat

SEQ ID NO: 38941 - DNA, 26 bp, Homo sapiens
acccgcaagtgctctatgtacatatt

SEQ ID NO: 38942 - DNA, 26 bp, Homo sapiens
cccgcaagtgctctatgtacatattg

SEQ ID NO: 38943 - DNA, 26 bp, Homo sapiens
ccgcaagtgctctatgtacatattgc

SEQ ID NO: 38944 - DNA, 26 bp, Homo sapiens
cgcaagtgctctatgtacatattgca

SEQ ID NO: 38945 - DNA, 26 bp, Homo sapiens
gcaagtgctctatgtacatattgcac

SEQ ID NO: 38946 - DNA, 26 bp, Homo sapiens
caagtgctctatgtacatattgcact

SEQ ID NO: 38947 - DNA, 26 bp, Homo sapiens
aagtgctctatgtacatattgcacta

SEQ ID NO: 38948 - DNA, 26 bp, Homo sapiens
agtgctctatgtacatattgcactag

SEQ ID NO: 38949 - DNA, 26 bp, Homo sapiens
gtgctctatgtacatattgcactaga

SEQ ID NO: 38950 - DNA, 26 bp, Homo sapiens
tgctctatgtacatattgcactagag

SEQ ID NO: 38951 - DNA, 26 bp, Homo sapiens
gctctatgtacatattgcactagaga

SEQ ID NO: 38952 - DNA, 26 bp, Homo sapiens
ctctatgtacatattgcactagagag

SEQ ID NO: 38953 - DNA, 26 bp, Homo sapiens
tctatgtacatattgcactagagagg

SEQ ID NO: 38954 - DNA, 26 bp, Homo sapiens
ctatgtacatattgcactagagagga

SEQ ID NO: 38955 - DNA, 26 bp, Homo sapiens
tatgtacatattgcactagagaggaa

SEQ ID NO: 38956 - DNA, 26 bp, Homo sapiens
atgtacatattgcactagagaggaat

SEQ ID NO: 38957 - DNA, 26 bp, Homo sapiens
tgtacatattgcactagagaggaatg

SEQ ID NO: 38958 - DNA, 26 bp, Homo sapiens
gtacatattgcactagagaggaatga

SEQ ID NO: 38959 - DNA, 26 bp, Homo sapiens
tacatattgcactagagaggaatgaa

SEQ ID NO: 38960 - DNA, 26 bp, Homo sapiens
acatattgcactagagaggaatgaag

SEQ ID NO: 38961 - DNA, 26 bp, Homo sapiens
catattgcactagagaggaatgaaga

SEQ ID NO: 38962 - DNA, 26 bp, Homo sapiens
atattgcactagagaggaatgaagaa

SEQ ID NO: 38963 - DNA, 26 bp, Homo sapiens
tattgcactagagaggaatgaagaac

SEQ ID NO: 38964 - DNA, 26 bp, Homo sapiens
attgcactagagaggaatgaagaaca

SEQ ID NO: 38965 - DNA, 26 bp, Homo sapiens
ttgcactagagaggaatgaagaacat

SEQ ID NO: 38966 - DNA, 26 bp, Homo sapiens
tgcactagagaggaatgaagaacatg

SEQ ID NO: 38967 - DNA, 26 bp, Homo sapiens
gcactagagaggaatgaagaacatgt

SEQ ID NO: 38968 - DNA, 26 bp, Homo sapiens
cactagagaggaatgaagaacatgtg

SEQ ID NO: 38969 - DNA, 26 bp, Homo sapiens
actagagaggaatgaagaacatgtgc

SEQ ID NO: 38970 - DNA, 26 bp, Homo sapiens
ctagagaggaatgaagaacatgtgca

SEQ ID NO: 38971 - DNA, 26 bp, Homo sapiens
tagagaggaatgaagaacatgtgcaa

SEQ ID NO: 38972 - DNA, 26 bp, Homo sapiens
agagaggaatgaagaacatgtgcaaa

SEQ ID NO: 38973 - DNA, 26 bp, Homo sapiens
gagaggaatgaagaacatgtgcaaaa

SEQ ID NO: 38974 - DNA, 26 bp, Homo sapiens
agaggaatgaagaacatgtgcaaaaa

SEQ ID NO: 38975 - DNA, 26 bp, Homo sapiens
gaggaatgaagaacatgtgcaaaaaa

SEQ ID NO: 38976 - DNA, 26 bp, Homo sapiens
aggaatgaagaacatgtgcaaaaaag

SEQ ID NO: 38977 - DNA, 26 bp, Homo sapiens
ggaatgaagaacatgtgcaaaaaagc

SEQ ID NO: 38978 - DNA, 26 bp, Homo sapiens
gaatgaagaacatgtgcaaaaaagca

SEQ ID NO: 38979 - DNA, 26 bp, Homo sapiens
aatgaagaacatgtgcaaaaaagcaa

SEQ ID NO: 38980 - DNA, 26 bp, Homo sapiens
atgaagaacatgtgcaaaaaagcaac

SEQ ID NO: 38981 - DNA, 26 bp, Homo sapiens
tgaagaacatgtgcaaaaaagcaaca

SEQ ID NO: 38982 - DNA, 26 bp, Homo sapiens
gaagaacatgtgcaaaaaagcaacaa

SEQ ID NO: 38983 - DNA, 26 bp, Homo sapiens
aagaacatgtgcaaaaaagcaacaat

SEQ ID NO: 38984 - DNA, 26 bp, Homo sapiens
agaacatgtgcaaaaaagcaacaatg

SEQ ID NO: 38985 - DNA, 26 bp, Homo sapiens
gaacatgtgcaaaaaagcaacaatga

SEQ ID NO: 38986 - DNA, 26 bp, Homo sapiens
aacatgtgcaaaaaagcaacaatgag

SEQ ID NO: 38987 - DNA, 26 bp, Homo sapiens
acatgtgcaaaaaagcaacaatgaga

SEQ ID NO: 38988 - DNA, 26 bp, Homo sapiens
catgtgcaaaaaagcaacaatgagag

SEQ ID NO: 38989 - DNA, 26 bp, Homo sapiens
atgtgcaaaaaagcaacaatgagaga

SEQ ID NO: 38990 - DNA, 26 bp, Homo sapiens
tgtgcaaaaaagcaacaatgagagaa

SEQ ID NO: 38991 - DNA, 26 bp, Homo sapiens
gtgcaaaaaagcaacaatgagagaag

SEQ ID NO: 38992 - DNA, 26 bp, Homo sapiens
tgcaaaaaagcaacaatgagagaagc

SEQ ID NO: 38993 - DNA, 26 bp, Homo sapiens
gcaaaaaagcaacaatgagagaagct

SEQ ID NO: 38994 - DNA, 26 bp, Homo sapiens
caaaaaagcaacaatgagagaagctt

SEQ ID NO: 38995 - DNA, 26 bp, Homo sapiens
aaaaaagcaacaatgagagaagctta

SEQ ID NO: 38996 - DNA, 26 bp, Homo sapiens
aaaaagcaacaatgagagaagcttac

SEQ ID NO: 38997 - DNA, 26 bp, Homo sapiens
aaaagcaacaatgagagaagcttaca

SEQ ID NO: 38998 - DNA, 26 bp, Homo sapiens
aaagcaacaatgagagaagcttacat

SEQ ID NO: 38999 - DNA, 26 bp, Homo sapiens
aagcaacaatgagagaagcttacata

SEQ ID NO: 39000 - DNA, 26 bp, Homo sapiens
agcaacaatgagagaagcttacatac

SEQ ID NO: 39001 - DNA, 26 bp, Homo sapiens
gcaacaatgagagaagcttacatact

SEQ ID NO: 39002 - DNA, 26 bp, Homo sapiens
caacaatgagagaagcttacatacta

SEQ ID NO: 39003 - DNA, 26 bp, Homo sapiens
aacaatgagagaagcttacatactac

SEQ ID NO: 39004 - DNA, 26 bp, Homo sapiens
acaatgagagaagcttacatactact

SEQ ID NO: 39005 - DNA, 26 bp, Homo sapiens
caatgagagaagcttacatactactt

SEQ ID NO: 39006 - DNA, 26 bp, Homo sapiens
aatgagagaagcttacatactactta

SEQ ID NO: 39007 - DNA, 26 bp, Homo sapiens
atgagagaagcttacatactacttaa

SEQ ID NO: 39008 - DNA, 26 bp, Homo sapiens
tgagagaagcttacatactacttaaa

SEQ ID NO: 39009 - DNA, 26 bp, Homo sapiens
gagagaagcttacatactacttaaac

SEQ ID NO: 39010 - DNA, 26 bp, Homo sapiens
agagaagcttacatactacttaaacc

SEQ ID NO: 39011 - DNA, 26 bp, Homo sapiens
gagaagcttacatactacttaaacct

SEQ ID NO: 39012 - DNA, 26 bp, Homo sapiens
agaagcttacatactacttaaacctt

SEQ ID NO: 39013 - DNA, 26 bp, Homo sapiens
gaagcttacatactacttaaaccttt

SEQ ID NO: 39014 - DNA, 26 bp, Homo sapiens
aagcttacatactacttaaacctttt

SEQ ID NO: 39015 - DNA, 26 bp, Homo sapiens
agcttacatactacttaaaccttttc

SEQ ID NO: 39016 - DNA, 26 bp, Homo sapiens
gcttacatactacttaaaccttttca

SEQ ID NO: 39017 - DNA, 26 bp, Homo sapiens
cttacatactacttaaaccttttcat

SEQ ID NO: 39018 - DNA, 26 bp, Homo sapiens
ttacatactacttaaaccttttcatg

SEQ ID NO: 39019 - DNA, 26 bp, Homo sapiens
tacatactacttaaaccttttcatga

SEQ ID NO: 39020 - DNA, 26 bp, Homo sapiens
acatactacttaaaccttttcatgaa

SEQ ID NO: 39021 - DNA, 26 bp, Homo sapiens
catactacttaaaccttttcatgaaa

SEQ ID NO: 39022 - DNA, 26 bp, Homo sapiens
atactacttaaaccttttcatgaaag

SEQ ID NO: 39023 - DNA, 26 bp, Homo sapiens
tactacttaaaccttttcatgaaaga

SEQ ID NO: 39024 - DNA, 26 bp, Homo sapiens
actacttaaaccttttcatgaaagat

SEQ ID NO: 39025 - DNA, 26 bp, Homo sapiens
ctacttaaaccttttcatgaaagata

SEQ ID NO: 39026 - DNA, 26 bp, Homo sapiens
tacttaaaccttttcatgaaagatac

SEQ ID NO: 39027 - DNA, 26 bp, Homo sapiens
acttaaaccttttcatgaaagatact

SEQ ID NO: 39028 - DNA, 26 bp, Homo sapiens
cttaaaccttttcatgaaagatacta

SEQ ID NO: 39029 - DNA, 26 bp, Homo sapiens
ttaaaccttttcatgaaagatactac

SEQ ID NO: 39030 - DNA, 26 bp, Homo sapiens
taaaccttttcatgaaagatactact

SEQ ID NO: 39031 - DNA, 26 bp, Homo sapiens
aaaccttttcatgaaagatactacta

SEQ ID NO: 39032 - DNA, 26 bp, Homo sapiens
aaccttttcatgaaagatactactag

SEQ ID NO: 39033 - DNA, 26 bp, Homo sapiens
accttttcatgaaagatactactagg

SEQ ID NO: 39034 - DNA, 26 bp, Homo sapiens
ccttttcatgaaagatactactaggt

SEQ ID NO: 39035 - DNA, 26 bp, Homo sapiens
cttttcatgaaagatactactaggtt

SEQ ID NO: 39036 - DNA, 26 bp, Homo sapiens
ttttcatgaaagatactactaggttg

SEQ ID NO: 39037 - DNA, 26 bp, Homo sapiens
tttcatgaaagatactactaggttgt

SEQ ID NO: 39038 - DNA, 26 bp, Homo sapiens
ttcatgaaagatactactaggttgtt

SEQ ID NO: 39039 - DNA, 26 bp, Homo sapiens
tcatgaaagatactactaggttgttt

SEQ ID NO: 39040 - DNA, 26 bp, Homo sapiens
catgaaagatactactaggttgtttt

SEQ ID NO: 39041 - DNA, 26 bp, Homo sapiens
atgaaagatactactaggttgttttg

SEQ ID NO: 39042 - DNA, 26 bp, Homo sapiens
tgaaagatactactaggttgttttgc

SEQ ID NO: 39043 - DNA, 26 bp, Homo sapiens
gaaagatactactaggttgttttgca

SEQ ID NO: 39044 - DNA, 26 bp, Homo sapiens
aaagatactactaggttgttttgcat

SEQ ID NO: 39045 - DNA, 26 bp, Homo sapiens
aagatactactaggttgttttgcatt

SEQ ID NO: 39046 - DNA, 26 bp, Homo sapiens
agatactactaggttgttttgcattt

SEQ ID NO: 39047 - DNA, 26 bp, Homo sapiens
gatactactaggttgttttgcatttt

SEQ ID NO: 39048 - DNA, 26 bp, Homo sapiens
atactactaggttgttttgcattttg

SEQ ID NO: 39049 - DNA, 26 bp, Homo sapiens
tactactaggttgttttgcattttgg

SEQ ID NO: 39050 - DNA, 26 bp, Homo sapiens
actactaggttgttttgcattttgga

SEQ ID NO: 39051 - DNA, 26 bp, Homo sapiens
ctactaggttgttttgcattttggaa

SEQ ID NO: 39052 - DNA, 26 bp, Homo sapiens
tactaggttgttttgcattttggaat

SEQ ID NO: 39053 - DNA, 26 bp, Homo sapiens
actaggttgttttgcattttggaatg

SEQ ID NO: 39054 - DNA, 26 bp, Homo sapiens
ctaggttgttttgcattttggaatgt

SEQ ID NO: 39055 - DNA, 26 bp, Homo sapiens
taggttgttttgcattttggaatgtc

SEQ ID NO: 39056 - DNA, 26 bp, Homo sapiens
aggttgttttgcattttggaatgtcg

SEQ ID NO: 39057 - DNA, 26 bp, Homo sapiens
ggttgttttgcattttggaatgtcgg

SEQ ID NO: 39058 - DNA, 26 bp, Homo sapiens
gttgttttgcattttggaatgtcgga

SEQ ID NO: 39059 - DNA, 26 bp, Homo sapiens
ttgttttgcattttggaatgtcggaa

SEQ ID NO: 39060 - DNA, 26 bp, Homo sapiens
tgttttgcattttggaatgtcggaac

SEQ ID NO: 39061 - DNA, 26 bp, Homo sapiens
gttttgcattttggaatgtcggaaca

SEQ ID NO: 39062 - DNA, 26 bp, Homo sapiens
ttttgcattttggaatgtcggaacac

SEQ ID NO: 39063 - DNA, 26 bp, Homo sapiens
tttgcattttggaatgtcggaacaca

SEQ ID NO: 39064 - DNA, 26 bp, Homo sapiens
ttgcattttggaatgtcggaacacaa

SEQ ID NO: 39065 - DNA, 26 bp, Homo sapiens
tgcattttggaatgtcggaacacaac

SEQ ID NO: 39066 - DNA, 26 bp, Homo sapiens
gcattttggaatgtcggaacacaaca

SEQ ID NO: 39067 - DNA, 26 bp, Homo sapiens
cattttggaatgtcggaacacaacaa

SEQ ID NO: 39068 - DNA, 26 bp, Homo sapiens
attttggaatgtcggaacacaacaac

SEQ ID NO: 39069 - DNA, 26 bp, Homo sapiens
ttttggaatgtcggaacacaacaact

SEQ ID NO: 39070 - DNA, 26 bp, Homo sapiens
tttggaatgtcggaacacaacaacta

SEQ ID NO: 39071 - DNA, 26 bp, Homo sapiens
ttggaatgtcggaacacaacaactag

SEQ ID NO: 39072 - DNA, 26 bp, Homo sapiens
tggaatgtcggaacacaacaactagc

SEQ ID NO: 39073 - DNA, 26 bp, Homo sapiens
ggaatgtcggaacacaacaactagct

SEQ ID NO: 39074 - DNA, 26 bp, Homo sapiens
gaatgtcggaacacaacaactagcta

SEQ ID NO: 39075 - DNA, 26 bp, Homo sapiens
aatgtcggaacacaacaactagctat

SEQ ID NO: 39076 - DNA, 26 bp, Homo sapiens
atgtcggaacacaacaactagctatt

SEQ ID NO: 39077 - DNA, 26 bp, Homo sapiens
tgtcggaacacaacaactagctattc

SEQ ID NO: 39078 - DNA, 26 bp, Homo sapiens
gtcggaacacaacaactagctattcc

SEQ ID NO: 39079 - DNA, 26 bp, Homo sapiens
tcggaacacaacaactagctattcct

SEQ ID NO: 39080 - DNA, 26 bp, Homo sapiens
cggaacacaacaactagctattcctt

SEQ ID NO: 39081 - DNA, 26 bp, Homo sapiens
ggaacacaacaactagctattcctta

SEQ ID NO: 39082 - DNA, 26 bp, Homo sapiens
gaacacaacaactagctattccttag

SEQ ID NO: 39083 - DNA, 26 bp, Homo sapiens
aacacaacaactagctattccttagt

SEQ ID NO: 39084 - DNA, 26 bp, Homo sapiens
acacaacaactagctattccttagtc

SEQ ID NO: 39085 - DNA, 26 bp, Homo sapiens
cacaacaactagctattccttagtct

SEQ ID NO: 39086 - DNA, 26 bp, Homo sapiens
acaacaactagctattccttagtcta

SEQ ID NO: 39087 - DNA, 26 bp, Homo sapiens
caacaactagctattccttagtctaa

SEQ ID NO: 39088 - DNA, 26 bp, Homo sapiens
aacaactagctattccttagtctaaa

SEQ ID NO: 39089 - DNA, 26 bp, Homo sapiens
acaactagctattccttagtctaaaa

SEQ ID NO: 39090 - DNA, 26 bp, Homo sapiens
caactagctattccttagtctaaaac

SEQ ID NO: 39091 - DNA, 26 bp, Homo sapiens
aactagctattccttagtctaaaact

SEQ ID NO: 39092 - DNA, 26 bp, Homo sapiens
actagctattccttagtctaaaacta

SEQ ID NO: 39093 - DNA, 26 bp, Homo sapiens
ctagctattccttagtctaaaactaa

SEQ ID NO: 39094 - DNA, 26 bp, Homo sapiens
tagctattccttagtctaaaactaaa

SEQ ID NO: 39095 - DNA, 26 bp, Homo sapiens
agctattccttagtctaaaactaaaa

SEQ ID NO: 39096 - DNA, 26 bp, Homo sapiens
gctattccttagtctaaaactaaaaa

SEQ ID NO: 39097 - DNA, 26 bp, Homo sapiens
ctattccttagtctaaaactaaaaac

SEQ ID NO: 39098 - DNA, 26 bp, Homo sapiens
tattccttagtctaaaactaaaaaca

SEQ ID NO: 39099 - DNA, 26 bp, Homo sapiens
attccttagtctaaaactaaaaacac

SEQ ID NO: 39100 - DNA, 26 bp, Homo sapiens
ttccttagtctaaaactaaaaacaca

SEQ ID NO: 39101 - DNA, 26 bp, Homo sapiens
tccttagtctaaaactaaaaacacac

SEQ ID NO: 39102 - DNA, 26 bp, Homo sapiens
ccttagtctaaaactaaaaacacaca

SEQ ID NO: 39103 - DNA, 26 bp, Homo sapiens
cttagtctaaaactaaaaacacacat

SEQ ID NO: 39104 - DNA, 26 bp, Homo sapiens
ttagtctaaaactaaaaacacacatt

SEQ ID NO: 39105 - DNA, 26 bp, Homo sapiens
tagtctaaaactaaaaacacacattt

SEQ ID NO: 39106 - DNA, 26 bp, Homo sapiens
agtctaaaactaaaaacacacatttc

SEQ ID NO: 39107 - DNA, 26 bp, Homo sapiens
gtctaaaactaaaaacacacatttct

SEQ ID NO: 39108 - DNA, 26 bp, Homo sapiens
tctaaaactaaaaacacacatttcta

SEQ ID NO: 39109 - DNA, 26 bp, Homo sapiens
ctaaaactaaaaacacacatttctac

SEQ ID NO: 39110 - DNA, 26 bp, Homo sapiens
taaaactaaaaacacacatttctact

SEQ ID NO: 39111 - DNA, 26 bp, Homo sapiens
aaaactaaaaacacacatttctacta

SEQ ID NO: 39112 - DNA, 26 bp, Homo sapiens
aaactaaaaacacacatttctactat

SEQ ID NO: 39113 - DNA, 26 bp, Homo sapiens
aactaaaaacacacatttctactatg

SEQ ID NO: 39114 - DNA, 26 bp, Homo sapiens
actaaaaacacacatttctactatgg

SEQ ID NO: 39115 - DNA, 26 bp, Homo sapiens
ctaaaaacacacatttctactatggc

SEQ ID NO: 39116 - DNA, 26 bp, Homo sapiens
taaaaacacacatttctactatggca

SEQ ID NO: 39117 - DNA, 26 bp, Homo sapiens
aaaaacacacatttctactatggcac

SEQ ID NO: 39118 - DNA, 26 bp, Homo sapiens
aaaacacacatttctactatggcaca

SEQ ID NO: 39119 - DNA, 26 bp, Homo sapiens
aaacacacatttctactatggcacat

SEQ ID NO: 39120 - DNA, 26 bp, Homo sapiens
aacacacatttctactatggcacatt

SEQ ID NO: 39121 - DNA, 26 bp, Homo sapiens
acacacatttctactatggcacattc

SEQ ID NO: 39122 - DNA, 26 bp, Homo sapiens
cacacatttctactatggcacattca

SEQ ID NO: 39123 - DNA, 26 bp, Homo sapiens
acacatttctactatggcacattcaa

SEQ ID NO: 39124 - DNA, 26 bp, Homo sapiens
cacatttctactatggcacattcaat

SEQ ID NO: 39125 - DNA, 26 bp, Homo sapiens
acatttctactatggcacattcaatg

SEQ ID NO: 39126 - DNA, 26 bp, Homo sapiens
catttctactatggcacattcaatga

SEQ ID NO: 39127 - DNA, 26 bp, Homo sapiens
atttctactatggcacattcaatgaa

SEQ ID NO: 39128 - DNA, 26 bp, Homo sapiens
tttctactatggcacattcaatgaaa

SEQ ID NO: 39129 - DNA, 26 bp, Homo sapiens
ttctactatggcacattcaatgaaat

SEQ ID NO: 39130 - DNA, 26 bp, Homo sapiens
tctactatggcacattcaatgaaata

SEQ ID NO: 39131 - DNA, 26 bp, Homo sapiens
ctactatggcacattcaatgaaataa

SEQ ID NO: 39132 - DNA, 26 bp, Homo sapiens
tactatggcacattcaatgaaataaa

SEQ ID NO: 39133 - DNA, 26 bp, Homo sapiens
actatggcacattcaatgaaataaaa

SEQ ID NO: 39134 - DNA, 26 bp, Homo sapiens
ctatggcacattcaatgaaataaaaa

SEQ ID NO: 39135 - DNA, 26 bp, Homo sapiens
tatggcacattcaatgaaataaaaag

SEQ ID NO: 39136 - DNA, 26 bp, Homo sapiens
atggcacattcaatgaaataaaaagt

SEQ ID NO: 39137 - DNA, 26 bp, Homo sapiens
tggcacattcaatgaaataaaaagtt

SEQ ID NO: 39138 - DNA, 26 bp, Homo sapiens
ggcacattcaatgaaataaaaagttt

SEQ ID NO: 39139 - DNA, 26 bp, Homo sapiens
gcacattcaatgaaataaaaagtttt

SEQ ID NO: 39140 - DNA, 26 bp, Homo sapiens
cacattcaatgaaataaaaagttttc

SEQ ID NO: 39141 - DNA, 26 bp, Homo sapiens
acattcaatgaaataaaaagttttcc

SEQ ID NO: 39142 - DNA, 26 bp, Homo sapiens
cattcaatgaaataaaaagttttcca

SEQ ID NO: 39143 - DNA, 26 bp, Homo sapiens
attcaatgaaataaaaagttttccaa

SEQ ID NO: 39144 - DNA, 26 bp, Homo sapiens
ttcaatgaaataaaaagttttccaaa

SEQ ID NO: 39145 - DNA, 26 bp, Homo sapiens
tcaatgaaataaaaagttttccaaag

SEQ ID NO: 39146 - DNA, 26 bp, Homo sapiens
caatgaaataaaaagttttccaaaga

SEQ ID NO: 39147 - DNA, 26 bp, Homo sapiens
aatgaaataaaaagttttccaaagac

SEQ ID NO: 39148 - DNA, 26 bp, Homo sapiens
atgaaataaaaagttttccaaagaca

SEQ ID NO: 39149 - DNA, 26 bp, Homo sapiens
tgaaataaaaagttttccaaagacag

SEQ ID NO: 39150 - DNA, 26 bp, Homo sapiens
gaaataaaaagttttccaaagacaga

SEQ ID NO: 39151 - DNA, 26 bp, Homo sapiens
aaataaaaagttttccaaagacagat

SEQ ID NO: 39152 - DNA, 26 bp, Homo sapiens
aataaaaagttttccaaagacagata

SEQ ID NO: 39153 - DNA, 26 bp, Homo sapiens
ataaaaagttttccaaagacagatag

SEQ ID NO: 39154 - DNA, 26 bp, Homo sapiens
taaaaagttttccaaagacagataga

SEQ ID NO: 39155 - DNA, 26 bp, Homo sapiens
aaaaagttttccaaagacagatagac

SEQ ID NO: 39156 - DNA, 26 bp, Homo sapiens
aaaagttttccaaagacagatagaca

SEQ ID NO: 39157 - DNA, 26 bp, Homo sapiens
aaagttttccaaagacagatagacaa

SEQ ID NO: 39158 - DNA, 26 bp, Homo sapiens
aagttttccaaagacagatagacaaa

SEQ ID NO: 39159 - DNA, 26 bp, Homo sapiens
agttttccaaagacagatagacaaat

SEQ ID NO: 39160 - DNA, 26 bp, Homo sapiens
gttttccaaagacagatagacaaatt

SEQ ID NO: 39161 - DNA, 26 bp, Homo sapiens
ttttccaaagacagatagacaaattc

SEQ ID NO: 39162 - DNA, 26 bp, Homo sapiens
tttccaaagacagatagacaaattcc

SEQ ID NO: 39163 - DNA, 26 bp, Homo sapiens
ttccaaagacagatagacaaattcca

SEQ ID NO: 39164 - DNA, 26 bp, Homo sapiens
tccaaagacagatagacaaattccat

SEQ ID NO: 39165 - DNA, 26 bp, Homo sapiens
ccaaagacagatagacaaattccatc

SEQ ID NO: 39166 - DNA, 26 bp, Homo sapiens
caaagacagatagacaaattccatca

SEQ ID NO: 39167 - DNA, 26 bp, Homo sapiens
aaagacagatagacaaattccatcaa

SEQ ID NO: 39168 - DNA, 26 bp, Homo sapiens
aagacagatagacaaattccatcaag

SEQ ID NO: 39169 - DNA, 26 bp, Homo sapiens
agacagatagacaaattccatcaaga

SEQ ID NO: 39170 - DNA, 26 bp, Homo sapiens
gacagatagacaaattccatcaagaa

SEQ ID NO: 39171 - DNA, 26 bp, Homo sapiens
acagatagacaaattccatcaagaaa

SEQ ID NO: 39172 - DNA, 26 bp, Homo sapiens
cagatagacaaattccatcaagaaaa

SEQ ID NO: 39173 - DNA, 26 bp, Homo sapiens
agatagacaaattccatcaagaaaat

SEQ ID NO: 39174 - DNA, 26 bp, Homo sapiens
gatagacaaattccatcaagaaaata

SEQ ID NO: 39175 - DNA, 26 bp, Homo sapiens
atagacaaattccatcaagaaaataa

SEQ ID NO: 39176 - DNA, 26 bp, Homo sapiens
tagacaaattccatcaagaaaataat

SEQ ID NO: 39177 - DNA, 26 bp, Homo sapiens
agacaaattccatcaagaaaataata

SEQ ID NO: 39178 - DNA, 26 bp, Homo sapiens
gacaaattccatcaagaaaataatac

SEQ ID NO: 39179 - DNA, 26 bp, Homo sapiens
acaaattccatcaagaaaataataca

SEQ ID NO: 39180 - DNA, 26 bp, Homo sapiens
caaattccatcaagaaaataatacaa

SEQ ID NO: 39181 - DNA, 26 bp, Homo sapiens
aaattccatcaagaaaataatacaaa

SEQ ID NO: 39182 - DNA, 26 bp, Homo sapiens
aattccatcaagaaaataatacaaag

SEQ ID NO: 39183 - DNA, 26 bp, Homo sapiens
attccatcaagaaaataatacaaagt

SEQ ID NO: 39184 - DNA, 26 bp, Homo sapiens
ttccatcaagaaaataatacaaagtt

SEQ ID NO: 39185 - DNA, 26 bp, Homo sapiens
tccatcaagaaaataatacaaagttt

SEQ ID NO: 39186 - DNA, 26 bp, Homo sapiens
ccatcaagaaaataatacaaagtttg

SEQ ID NO: 39187 - DNA, 26 bp, Homo sapiens
catcaagaaaataatacaaagtttgt

SEQ ID NO: 39188 - DNA, 26 bp, Homo sapiens
atcaagaaaataatacaaagtttgtt

SEQ ID NO: 39189 - DNA, 26 bp, Homo sapiens
tcaagaaaataatacaaagtttgttt

SEQ ID NO: 39190 - DNA, 26 bp, Homo sapiens
caagaaaataatacaaagtttgtttg

SEQ ID NO: 39191 - DNA, 26 bp, Homo sapiens
aagaaaataatacaaagtttgtttgt

SEQ ID NO: 39192 - DNA, 26 bp, Homo sapiens
agaaaataatacaaagtttgtttgtt

SEQ ID NO: 39193 - DNA, 26 bp, Homo sapiens
gaaaataatacaaagtttgtttgttt

SEQ ID NO: 39194 - DNA, 26 bp, Homo sapiens
aaaataatacaaagtttgtttgtttg

SEQ ID NO: 39195 - DNA, 26 bp, Homo sapiens
aaataatacaaagtttgtttgtttgt

SEQ ID NO: 39196 - DNA, 26 bp, Homo sapiens
aataatacaaagtttgtttgtttgta

SEQ ID NO: 39197 - DNA, 26 bp, Homo sapiens
ataatacaaagtttgtttgtttgtat

SEQ ID NO: 39198 - DNA, 26 bp, Homo sapiens
taatacaaagtttgtttgtttgtatt

SEQ ID NO: 39199 - DNA, 26 bp, Homo sapiens
aatacaaagtttgtttgtttgtattt

SEQ ID NO: 39200 - DNA, 26 bp, Homo sapiens
atacaaagtttgtttgtttgtatttt

SEQ ID NO: 39201 - DNA, 26 bp, Homo sapiens
tacaaagtttgtttgtttgtattttt

SEQ ID NO: 39202 - DNA, 26 bp, Homo sapiens
acaaagtttgtttgtttgtatttttt

SEQ ID NO: 39203 - DNA, 26 bp, Homo sapiens
caaagtttgtttgtttgtattttttt

SEQ ID NO: 39204 - DNA, 26 bp, Homo sapiens
aaagtttgtttgtttgtatttttttt

SEQ ID NO: 39205 - DNA, 26 bp, Homo sapiens
aagtttgtttgtttgtattttttttt

SEQ ID NO: 39206 - DNA, 26 bp, Homo sapiens
agtttgtttgtttgtatttttttttt

SEQ ID NO: 39207 - DNA, 26 bp, Homo sapiens
gtttgtttgtttgtattttttttttt

SEQ ID NO: 39208 - DNA, 26 bp, Homo sapiens
tttgtttgtttgtattttttttttta

SEQ ID NO: 39209 - DNA, 26 bp, Homo sapiens
ttgtttgtttgtatttttttttttag

SEQ ID NO: 39210 - DNA, 26 bp, Homo sapiens
tgtttgtttgtatttttttttttaga

SEQ ID NO: 39211 - DNA, 26 bp, Homo sapiens
gtttgtttgtatttttttttttagaa

SEQ ID NO: 39212 - DNA, 26 bp, Homo sapiens
tttgtttgtatttttttttttagaaa

SEQ ID NO: 39213 - DNA, 26 bp, Homo sapiens
ttgtttgtatttttttttttagaaaa

SEQ ID NO: 39214 - DNA, 26 bp, Homo sapiens
tgtttgtatttttttttttagaaaat

SEQ ID NO: 39215 - DNA, 26 bp, Homo sapiens
gtttgtatttttttttttagaaaatt

SEQ ID NO: 39216 - DNA, 26 bp, Homo sapiens
tttgtatttttttttttagaaaatta

SEQ ID NO: 39217 - DNA, 26 bp, Homo sapiens
ttgtatttttttttttagaaaattac

SEQ ID NO: 39218 - DNA, 26 bp, Homo sapiens
tgtatttttttttttagaaaattaca

SEQ ID NO: 39219 - DNA, 26 bp, Homo sapiens
gtatttttttttttagaaaattacat

SEQ ID NO: 39220 - DNA, 26 bp, Homo sapiens
tatttttttttttagaaaattacatt

SEQ ID NO: 39221 - DNA, 26 bp, Homo sapiens
atttttttttttagaaaattacatta

SEQ ID NO: 39222 - DNA, 26 bp, Homo sapiens
tttttttttttagaaaattacattac

SEQ ID NO: 39223 - DNA, 26 bp, Homo sapiens
ttttttttttagaaaattacattact

SEQ ID NO: 39224 - DNA, 26 bp, Homo sapiens
tttttttttagaaaattacattactt

SEQ ID NO: 39225 - DNA, 26 bp, Homo sapiens
ttttttttagaaaattacattacttt

SEQ ID NO: 39226 - DNA, 26 bp, Homo sapiens
tttttttagaaaattacattactttc

SEQ ID NO: 39227 - DNA, 26 bp, Homo sapiens
ttttttagaaaattacattactttct

SEQ ID NO: 39228 - DNA, 26 bp, Homo sapiens
tttttagaaaattacattactttctt

SEQ ID NO: 39229 - DNA, 26 bp, Homo sapiens
ttttagaaaattacattactttcttt

SEQ ID NO: 39230 - DNA, 26 bp, Homo sapiens
tttagaaaattacattactttctttc

SEQ ID NO: 39231 - DNA, 26 bp, Homo sapiens
ttagaaaattacattactttctttct

SEQ ID NO: 39232 - DNA, 26 bp, Homo sapiens
tagaaaattacattactttctttctt

SEQ ID NO: 39233 - DNA, 26 bp, Homo sapiens
agaaaattacattactttctttcttt

SEQ ID NO: 39234 - DNA, 26 bp, Homo sapiens
gaaaattacattactttctttctttg

SEQ ID NO: 39235 - DNA, 26 bp, Homo sapiens
aaaattacattactttctttctttgt

SEQ ID NO: 39236 - DNA, 26 bp, Homo sapiens
aaattacattactttctttctttgtt

SEQ ID NO: 39237 - DNA, 26 bp, Homo sapiens
aattacattactttctttctttgttt

SEQ ID NO: 39238 - DNA, 26 bp, Homo sapiens
attacattactttctttctttgtttc

SEQ ID NO: 39239 - DNA, 26 bp, Homo sapiens
ttacattactttctttctttgtttca

SEQ ID NO: 39240 - DNA, 26 bp, Homo sapiens
tacattactttctttctttgtttcac

SEQ ID NO: 39241 - DNA, 26 bp, Homo sapiens
acattactttctttctttgtttcaca

SEQ ID NO: 39242 - DNA, 26 bp, Homo sapiens
cattactttctttctttgtttcacat

SEQ ID NO: 39243 - DNA, 26 bp, Homo sapiens
attactttctttctttgtttcacatt

SEQ ID NO: 39244 - DNA, 26 bp, Homo sapiens
ttactttctttctttgtttcacatta

SEQ ID NO: 39245 - DNA, 26 bp, Homo sapiens
tactttctttctttgtttcacattac

SEQ ID NO: 39246 - DNA, 26 bp, Homo sapiens
actttctttctttgtttcacattaca

SEQ ID NO: 39247 - DNA, 26 bp, Homo sapiens
ctttctttctttgtttcacattacaa

SEQ ID NO: 39248 - DNA, 26 bp, Homo sapiens
tttctttctttgtttcacattacaaa

SEQ ID NO: 39249 - DNA, 26 bp, Homo sapiens
ttctttctttgtttcacattacaaaa

SEQ ID NO: 39250 - DNA, 26 bp, Homo sapiens
tctttctttgtttcacattacaaaat

SEQ ID NO: 39251 - DNA, 26 bp, Homo sapiens
ctttctttgtttcacattacaaaatc

SEQ ID NO: 39252 - DNA, 26 bp, Homo sapiens
tttctttgtttcacattacaaaatct

SEQ ID NO: 39253 - DNA, 26 bp, Homo sapiens
ttctttgtttcacattacaaaatctt

SEQ ID NO: 39254 - DNA, 26 bp, Homo sapiens
tctttgtttcacattacaaaatcttt

SEQ ID NO: 39255 - DNA, 26 bp, Homo sapiens
ctttgtttcacattacaaaatctttt

SEQ ID NO: 39256 - DNA, 26 bp, Homo sapiens
tttgtttcacattacaaaatcttttt

SEQ ID NO: 39257 - DNA, 26 bp, Homo sapiens
ttgtttcacattacaaaatctttttt

SEQ ID NO: 39258 - DNA, 26 bp, Homo sapiens
tgtttcacattacaaaatcttttttt

SEQ ID NO: 39259 - DNA, 26 bp, Homo sapiens
gtttcacattacaaaatctttttttc

SEQ ID NO: 39260 - DNA, 26 bp, Homo sapiens
tttcacattacaaaatctttttttct

SEQ ID NO: 39261 - DNA, 26 bp, Homo sapiens
ttcacattacaaaatctttttttctt

SEQ ID NO: 39262 - DNA, 26 bp, Homo sapiens
tcacattacaaaatctttttttcttt

SEQ ID NO: 39263 - DNA, 26 bp, Homo sapiens
cacattacaaaatctttttttcttta

SEQ ID NO: 39264 - DNA, 26 bp, Homo sapiens
acattacaaaatctttttttctttac

SEQ ID NO: 39265 - DNA, 26 bp, Homo sapiens
cattacaaaatctttttttctttaca

SEQ ID NO: 39266 - DNA, 26 bp, Homo sapiens
attacaaaatctttttttctttacac

SEQ ID NO: 39267 - DNA, 26 bp, Homo sapiens
ttacaaaatctttttttctttacaca

SEQ ID NO: 39268 - DNA, 26 bp, Homo sapiens
tacaaaatctttttttctttacacaa

SEQ ID NO: 39269 - DNA, 26 bp, Homo sapiens
acaaaatctttttttctttacacaaa

SEQ ID NO: 39270 - DNA, 26 bp, Homo sapiens
caaaatctttttttctttacacaaat

SEQ ID NO: 39271 - DNA, 26 bp, Homo sapiens
aaaatctttttttctttacacaaatc

SEQ ID NO: 39272 - DNA, 26 bp, Homo sapiens
aaatctttttttctttacacaaatca

SEQ ID NO: 39273 - DNA, 26 bp, Homo sapiens
aatctttttttctttacacaaatcac

SEQ ID NO: 39274 - DNA, 26 bp, Homo sapiens
atctttttttctttacacaaatcaca

SEQ ID NO: 39275 - DNA, 26 bp, Homo sapiens
tctttttttctttacacaaatcacat

SEQ ID NO: 39276 - DNA, 26 bp, Homo sapiens
ctttttttctttacacaaatcacatt

SEQ ID NO: 39277 - DNA, 26 bp, Homo sapiens
tttttttctttacacaaatcacattt

SEQ ID NO: 39278 - DNA, 26 bp, Homo sapiens
ttttttctttacacaaatcacatttt

SEQ ID NO: 39279 - DNA, 26 bp, Homo sapiens
tttttctttacacaaatcacatttta

SEQ ID NO: 39280 - DNA, 26 bp, Homo sapiens
ttttctttacacaaatcacattttat

SEQ ID NO: 39281 - DNA, 26 bp, Homo sapiens
tttctttacacaaatcacattttatt

SEQ ID NO: 39282 - DNA, 26 bp, Homo sapiens
ttctttacacaaatcacattttattg

SEQ ID NO: 39283 - DNA, 26 bp, Homo sapiens
tctttacacaaatcacattttattgc

SEQ ID NO: 39284 - DNA, 26 bp, Homo sapiens
ctttacacaaatcacattttattgca

SEQ ID NO: 39285 - DNA, 26 bp, Homo sapiens
tttacacaaatcacattttattgcag

SEQ ID NO: 39286 - DNA, 26 bp, Homo sapiens
ttacacaaatcacattttattgcagg

SEQ ID NO: 39287 - DNA, 26 bp, Homo sapiens
tacacaaatcacattttattgcagga

SEQ ID NO: 39288 - DNA, 26 bp, Homo sapiens
acacaaatcacattttattgcaggaa

SEQ ID NO: 39289 - DNA, 26 bp, Homo sapiens
cacaaatcacattttattgcaggaat

SEQ ID NO: 39290 - DNA, 26 bp, Homo sapiens
acaaatcacattttattgcaggaata

SEQ ID NO: 39291 - DNA, 26 bp, Homo sapiens
caaatcacattttattgcaggaatat

SEQ ID NO: 39292 - DNA, 26 bp, Homo sapiens
aaatcacattttattgcaggaatatt

SEQ ID NO: 39293 - DNA, 26 bp, Homo sapiens
aatcacattttattgcaggaatattt

SEQ ID NO: 39294 - DNA, 26 bp, Homo sapiens
atcacattttattgcaggaatatttc

SEQ ID NO: 39295 - DNA, 26 bp, Homo sapiens
tcacattttattgcaggaatatttca

SEQ ID NO: 39296 - DNA, 26 bp, Homo sapiens
cacattttattgcaggaatatttcaa

SEQ ID NO: 39297 - DNA, 26 bp, Homo sapiens
acattttattgcaggaatatttcaag

SEQ ID NO: 39298 - DNA, 26 bp, Homo sapiens
cattttattgcaggaatatttcaagt

SEQ ID NO: 39299 - DNA, 26 bp, Homo sapiens
attttattgcaggaatatttcaagtg

SEQ ID NO: 39300 - DNA, 26 bp, Homo sapiens
ttttattgcaggaatatttcaagtgc

SEQ ID NO: 39301 - DNA, 26 bp, Homo sapiens
tttattgcaggaatatttcaagtgcc

SEQ ID NO: 39302 - DNA, 26 bp, Homo sapiens
ttattgcaggaatatttcaagtgcca

SEQ ID NO: 39303 - DNA, 26 bp, Homo sapiens
tattgcaggaatatttcaagtgccat

SEQ ID NO: 39304 - DNA, 26 bp, Homo sapiens
attgcaggaatatttcaagtgccatc

SEQ ID NO: 39305 - DNA, 26 bp, Homo sapiens
ttgcaggaatatttcaagtgccatca

SEQ ID NO: 39306 - DNA, 26 bp, Homo sapiens
tgcaggaatatttcaagtgccatcaa

SEQ ID NO: 39307 - DNA, 26 bp, Homo sapiens
gcaggaatatttcaagtgccatcaaa

SEQ ID NO: 39308 - DNA, 26 bp, Homo sapiens
caggaatatttcaagtgccatcaaat

SEQ ID NO: 39309 - DNA, 26 bp, Homo sapiens
aggaatatttcaagtgccatcaaata

SEQ ID NO: 39310 - DNA, 26 bp, Homo sapiens
ggaatatttcaagtgccatcaaatat

SEQ ID NO: 39311 - DNA, 26 bp, Homo sapiens
gaatatttcaagtgccatcaaatatt

SEQ ID NO: 39312 - DNA, 26 bp, Homo sapiens
aatatttcaagtgccatcaaatattt

SEQ ID NO: 39313 - DNA, 26 bp, Homo sapiens
atatttcaagtgccatcaaatattta

SEQ ID NO: 39314 - DNA, 26 bp, Homo sapiens
tatttcaagtgccatcaaatatttat

SEQ ID NO: 39315 - DNA, 26 bp, Homo sapiens
atttcaagtgccatcaaatatttata

SEQ ID NO: 39316 - DNA, 26 bp, Homo sapiens
tttcaagtgccatcaaatatttatag

SEQ ID NO: 39317 - DNA, 26 bp, Homo sapiens
ttcaagtgccatcaaatatttataga

SEQ ID NO: 39318 - DNA, 26 bp, Homo sapiens
tcaagtgccatcaaatatttatagaa

SEQ ID NO: 39319 - DNA, 26 bp, Homo sapiens
caagtgccatcaaatatttatagaag

SEQ ID NO: 39320 - DNA, 26 bp, Homo sapiens
aagtgccatcaaatatttatagaagg

SEQ ID NO: 39321 - DNA, 26 bp, Homo sapiens
agtgccatcaaatatttatagaaggg

SEQ ID NO: 39322 - DNA, 26 bp, Homo sapiens
gtgccatcaaatatttatagaagggt

SEQ ID NO: 39323 - DNA, 26 bp, Homo sapiens
tgccatcaaatatttatagaagggtt

SEQ ID NO: 39324 - DNA, 26 bp, Homo sapiens
gccatcaaatatttatagaagggtta

SEQ ID NO: 39325 - DNA, 26 bp, Homo sapiens
ccatcaaatatttatagaagggttaa

SEQ ID NO: 39326 - DNA, 26 bp, Homo sapiens
catcaaatatttatagaagggttaaa

SEQ ID NO: 39327 - DNA, 26 bp, Homo sapiens
atcaaatatttatagaagggttaaaa

SEQ ID NO: 39328 - DNA, 26 bp, Homo sapiens
tcaaatatttatagaagggttaaaaa

SEQ ID NO: 39329 - DNA, 26 bp, Homo sapiens
caaatatttatagaagggttaaaaaa

SEQ ID NO: 39330 - DNA, 26 bp, Homo sapiens
aaatatttatagaagggttaaaaaaa

SEQ ID NO: 39331 - DNA, 26 bp, Homo sapiens
aatatttatagaagggttaaaaaaat

SEQ ID NO: 39332 - DNA, 26 bp, Homo sapiens
atatttatagaagggttaaaaaaata

SEQ ID NO: 39333 - DNA, 26 bp, Homo sapiens
tatttatagaagggttaaaaaaatag

SEQ ID NO: 39334 - DNA, 26 bp, Homo sapiens
atttatagaagggttaaaaaaataga

SEQ ID NO: 39335 - DNA, 26 bp, Homo sapiens
tttatagaagggttaaaaaaatagaa

SEQ ID NO: 39336 - DNA, 26 bp, Homo sapiens
ttatagaagggttaaaaaaatagaag

SEQ ID NO: 39337 - DNA, 26 bp, Homo sapiens
tatagaagggttaaaaaaatagaagt

SEQ ID NO: 39338 - DNA, 26 bp, Homo sapiens
atagaagggttaaaaaaatagaagtc

SEQ ID NO: 39339 - DNA, 26 bp, Homo sapiens
tagaagggttaaaaaaatagaagtct

SEQ ID NO: 39340 - DNA, 26 bp, Homo sapiens
agaagggttaaaaaaatagaagtctc

SEQ ID NO: 39341 - DNA, 26 bp, Homo sapiens
gaagggttaaaaaaatagaagtctct

SEQ ID NO: 39342 - DNA, 26 bp, Homo sapiens
aagggttaaaaaaatagaagtctctc

SEQ ID NO: 39343 - DNA, 26 bp, Homo sapiens
agggttaaaaaaatagaagtctctct

SEQ ID NO: 39344 - DNA, 26 bp, Homo sapiens
gggttaaaaaaatagaagtctctcta

SEQ ID NO: 39345 - DNA, 26 bp, Homo sapiens
ggttaaaaaaatagaagtctctctaa

SEQ ID NO: 39346 - DNA, 26 bp, Homo sapiens
gttaaaaaaatagaagtctctctaaa

SEQ ID NO: 39347 - DNA, 26 bp, Homo sapiens
ttaaaaaaatagaagtctctctaaag

SEQ ID NO: 39348 - DNA, 26 bp, Homo sapiens
taaaaaaatagaagtctctctaaagt

SEQ ID NO: 39349 - DNA, 26 bp, Homo sapiens
aaaaaaatagaagtctctctaaagtg

SEQ ID NO: 39350 - DNA, 26 bp, Homo sapiens
aaaaaatagaagtctctctaaagtgg

SEQ ID NO: 39351 - DNA, 26 bp, Homo sapiens
aaaaatagaagtctctctaaagtggt

SEQ ID NO: 39352 - DNA, 26 bp, Homo sapiens
aaaatagaagtctctctaaagtggtc

SEQ ID NO: 39353 - DNA, 26 bp, Homo sapiens
aaatagaagtctctctaaagtggtcc

SEQ ID NO: 39354 - DNA, 26 bp, Homo sapiens
aatagaagtctctctaaagtggtcca

SEQ ID NO: 39355 - DNA, 26 bp, Homo sapiens
atagaagtctctctaaagtggtccag

SEQ ID NO: 39356 - DNA, 26 bp, Homo sapiens
tagaagtctctctaaagtggtccaga

SEQ ID NO: 39357 - DNA, 26 bp, Homo sapiens
agaagtctctctaaagtggtccagac

SEQ ID NO: 39358 - DNA, 26 bp, Homo sapiens
gaagtctctctaaagtggtccagaca

SEQ ID NO: 39359 - DNA, 26 bp, Homo sapiens
aagtctctctaaagtggtccagacaa

SEQ ID NO: 39360 - DNA, 26 bp, Homo sapiens
agtctctctaaagtggtccagacaag

SEQ ID NO: 39361 - DNA, 26 bp, Homo sapiens
gtctctctaaagtggtccagacaagg

SEQ ID NO: 39362 - DNA, 26 bp, Homo sapiens
tctctctaaagtggtccagacaaggc

SEQ ID NO: 39363 - DNA, 26 bp, Homo sapiens
ctctctaaagtggtccagacaaggct

SEQ ID NO: 39364 - DNA, 26 bp, Homo sapiens
tctctaaagtggtccagacaaggctt

SEQ ID NO: 39365 - DNA, 26 bp, Homo sapiens
ctctaaagtggtccagacaaggcttt

SEQ ID NO: 39366 - DNA, 26 bp, Homo sapiens
tctaaagtggtccagacaaggctttg

SEQ ID NO: 39367 - DNA, 26 bp, Homo sapiens
ctaaagtggtccagacaaggctttgt

SEQ ID NO: 39368 - DNA, 26 bp, Homo sapiens
taaagtggtccagacaaggctttgta

SEQ ID NO: 39369 - DNA, 26 bp, Homo sapiens
aaagtggtccagacaaggctttgtat

SEQ ID NO: 39370 - DNA, 26 bp, Homo sapiens
aagtggtccagacaaggctttgtata

SEQ ID NO: 39371 - DNA, 26 bp, Homo sapiens
agtggtccagacaaggctttgtatag

SEQ ID NO: 39372 - DNA, 26 bp, Homo sapiens
gtggtccagacaaggctttgtataga

SEQ ID NO: 39373 - DNA, 26 bp, Homo sapiens
tggtccagacaaggctttgtatagaa

SEQ ID NO: 39374 - DNA, 26 bp, Homo sapiens
ggtccagacaaggctttgtatagaat

SEQ ID NO: 39375 - DNA, 26 bp, Homo sapiens
gtccagacaaggctttgtatagaata

SEQ ID NO: 39376 - DNA, 26 bp, Homo sapiens
tccagacaaggctttgtatagaataa

SEQ ID NO: 39377 - DNA, 26 bp, Homo sapiens
ccagacaaggctttgtatagaataaa

SEQ ID NO: 39378 - DNA, 26 bp, Homo sapiens
cagacaaggctttgtatagaataaat

SEQ ID NO: 39379 - DNA, 26 bp, Homo sapiens
agacaaggctttgtatagaataaatc

SEQ ID NO: 39380 - DNA, 26 bp, Homo sapiens
gacaaggctttgtatagaataaatct

SEQ ID NO: 39381 - DNA, 26 bp, Homo sapiens
acaaggctttgtatagaataaatctt

SEQ ID NO: 39382 - DNA, 26 bp, Homo sapiens
caaggctttgtatagaataaatcttt

SEQ ID NO: 39383 - DNA, 26 bp, Homo sapiens
aaggctttgtatagaataaatctttt

SEQ ID NO: 39384 - DNA, 26 bp, Homo sapiens
aggctttgtatagaataaatcttttt

SEQ ID NO: 39385 - DNA, 26 bp, Homo sapiens
ggctttgtatagaataaatctttttt

SEQ ID NO: 39386 - DNA, 26 bp, Homo sapiens
gctttgtatagaataaatcttttttt

SEQ ID NO: 39387 - DNA, 26 bp, Homo sapiens
ctttgtatagaataaatctttttttc

SEQ ID NO: 39388 - DNA, 26 bp, Homo sapiens
tttgtatagaataaatctttttttcc

SEQ ID NO: 39389 - DNA, 26 bp, Homo sapiens
ttgtatagaataaatctttttttccc

SEQ ID NO: 39390 - DNA, 26 bp, Homo sapiens
tgtatagaataaatctttttttcccc

SEQ ID NO: 39391 - DNA, 26 bp, Homo sapiens
gtatagaataaatctttttttcccca

SEQ ID NO: 39392 - DNA, 26 bp, Homo sapiens
tatagaataaatctttttttccccat

SEQ ID NO: 39393 - DNA, 26 bp, Homo sapiens
atagaataaatctttttttccccatc

SEQ ID NO: 39394 - DNA, 26 bp, Homo sapiens
tagaataaatctttttttccccatct

SEQ ID NO: 39395 - DNA, 26 bp, Homo sapiens
agaataaatctttttttccccatctt

SEQ ID NO: 39396 - DNA, 26 bp, Homo sapiens
gaataaatctttttttccccatcttc

SEQ ID NO: 39397 - DNA, 26 bp, Homo sapiens
aataaatctttttttccccatcttct

SEQ ID NO: 39398 - DNA, 26 bp, Homo sapiens
ataaatctttttttccccatcttcta

SEQ ID NO: 39399 - DNA, 26 bp, Homo sapiens
taaatctttttttccccatcttctag

SEQ ID NO: 39400 - DNA, 26 bp, Homo sapiens
aaatctttttttccccatcttctagt

SEQ ID NO: 39401 - DNA, 26 bp, Homo sapiens
aatctttttttccccatcttctagtt

SEQ ID NO: 39402 - DNA, 26 bp, Homo sapiens
atctttttttccccatcttctagttt

SEQ ID NO: 39403 - DNA, 26 bp, Homo sapiens
tctttttttccccatcttctagtttt

SEQ ID NO: 39404 - DNA, 26 bp, Homo sapiens
ctttttttccccatcttctagttttg

SEQ ID NO: 39405 - DNA, 26 bp, Homo sapiens
tttttttccccatcttctagttttga

SEQ ID NO: 39406 - DNA, 26 bp, Homo sapiens
ttttttccccatcttctagttttgat

SEQ ID NO: 39407 - DNA, 26 bp, Homo sapiens
tttttccccatcttctagttttgatt

SEQ ID NO: 39408 - DNA, 26 bp, Homo sapiens
ttttccccatcttctagttttgattt

SEQ ID NO: 39409 - DNA, 26 bp, Homo sapiens
tttccccatcttctagttttgattta

SEQ ID NO: 39410 - DNA, 26 bp, Homo sapiens
ttccccatcttctagttttgatttaa

SEQ ID NO: 39411 - DNA, 26 bp, Homo sapiens
tccccatcttctagttttgatttaag

SEQ ID NO: 39412 - DNA, 26 bp, Homo sapiens
ccccatcttctagttttgatttaagt

SEQ ID NO: 39413 - DNA, 26 bp, Homo sapiens
cccatcttctagttttgatttaagta

SEQ ID NO: 39414 - DNA, 26 bp, Homo sapiens
ccatcttctagttttgatttaagtat

SEQ ID NO: 39415 - DNA, 26 bp, Homo sapiens
catcttctagttttgatttaagtatt

SEQ ID NO: 39416 - DNA, 26 bp, Homo sapiens
atcttctagttttgatttaagtattt

SEQ ID NO: 39417 - DNA, 26 bp, Homo sapiens
tcttctagttttgatttaagtatttt

SEQ ID NO: 39418 - DNA, 26 bp, Homo sapiens
cttctagttttgatttaagtattttg

SEQ ID NO: 39419 - DNA, 26 bp, Homo sapiens
ttctagttttgatttaagtattttga

SEQ ID NO: 39420 - DNA, 26 bp, Homo sapiens
tctagttttgatttaagtattttgaa

SEQ ID NO: 39421 - DNA, 26 bp, Homo sapiens
ctagttttgatttaagtattttgaat

SEQ ID NO: 39422 - DNA, 26 bp, Homo sapiens
tagttttgatttaagtattttgaata

SEQ ID NO: 39423 - DNA, 26 bp, Homo sapiens
agttttgatttaagtattttgaatac

SEQ ID NO: 39424 - DNA, 26 bp, Homo sapiens
gttttgatttaagtattttgaataca

SEQ ID NO: 39425 - DNA, 26 bp, Homo sapiens
ttttgatttaagtattttgaatacat

SEQ ID NO: 39426 - DNA, 26 bp, Homo sapiens
tttgatttaagtattttgaatacatt

SEQ ID NO: 39427 - DNA, 26 bp, Homo sapiens
ttgatttaagtattttgaatacattt

SEQ ID NO: 39428 - DNA, 26 bp, Homo sapiens
tgatttaagtattttgaatacatttt

SEQ ID NO: 39429 - DNA, 26 bp, Homo sapiens
gatttaagtattttgaatacattttc

SEQ ID NO: 39430 - DNA, 26 bp, Homo sapiens
atttaagtattttgaatacattttct

SEQ ID NO: 39431 - DNA, 26 bp, Homo sapiens
tttaagtattttgaatacattttctt

SEQ ID NO: 39432 - DNA, 26 bp, Homo sapiens
ttaagtattttgaatacattttcttt

SEQ ID NO: 39433 - DNA, 26 bp, Homo sapiens
taagtattttgaatacattttctttt

SEQ ID NO: 39434 - DNA, 26 bp, Homo sapiens
aagtattttgaatacattttcttttc

SEQ ID NO: 39435 - DNA, 26 bp, Homo sapiens
agtattttgaatacattttcttttcc

SEQ ID NO: 39436 - DNA, 26 bp, Homo sapiens
gtattttgaatacattttcttttcca

SEQ ID NO: 39437 - DNA, 26 bp, Homo sapiens
tattttgaatacattttcttttccat

SEQ ID NO: 39438 - DNA, 26 bp, Homo sapiens
attttgaatacattttcttttccatt

SEQ ID NO: 39439 - DNA, 26 bp, Homo sapiens
ttttgaatacattttcttttccattg

SEQ ID NO: 39440 - DNA, 26 bp, Homo sapiens
tttgaatacattttcttttccattga

SEQ ID NO: 39441 - DNA, 26 bp, Homo sapiens
ttgaatacattttcttttccattgac

SEQ ID NO: 39442 - DNA, 26 bp, Homo sapiens
tgaatacattttcttttccattgaca

SEQ ID NO: 39443 - DNA, 26 bp, Homo sapiens
gaatacattttcttttccattgacac

SEQ ID NO: 39444 - DNA, 26 bp, Homo sapiens
aatacattttcttttccattgacact

SEQ ID NO: 39445 - DNA, 26 bp, Homo sapiens
atacattttcttttccattgacactt

SEQ ID NO: 39446 - DNA, 26 bp, Homo sapiens
tacattttcttttccattgacactta

SEQ ID NO: 39447 - DNA, 26 bp, Homo sapiens
acattttcttttccattgacacttag

SEQ ID NO: 39448 - DNA, 26 bp, Homo sapiens
cattttcttttccattgacacttagt

SEQ ID NO: 39449 - DNA, 26 bp, Homo sapiens
attttcttttccattgacacttagta

SEQ ID NO: 39450 - DNA, 26 bp, Homo sapiens
ttttcttttccattgacacttagtag

SEQ ID NO: 39451 - DNA, 26 bp, Homo sapiens
tttcttttccattgacacttagtagc

SEQ ID NO: 39452 - DNA, 26 bp, Homo sapiens
ttcttttccattgacacttagtagcc

SEQ ID NO: 39453 - DNA, 26 bp, Homo sapiens
tcttttccattgacacttagtagcct

SEQ ID NO: 39454 - DNA, 26 bp, Homo sapiens
cttttccattgacacttagtagccta

SEQ ID NO: 39455 - DNA, 26 bp, Homo sapiens
ttttccattgacacttagtagcctag

SEQ ID NO: 39456 - DNA, 26 bp, Homo sapiens
tttccattgacacttagtagcctaga

SEQ ID NO: 39457 - DNA, 26 bp, Homo sapiens
ttccattgacacttagtagcctagaa

SEQ ID NO: 39458 - DNA, 26 bp, Homo sapiens
tccattgacacttagtagcctagaag

SEQ ID NO: 39459 - DNA, 26 bp, Homo sapiens
ccattgacacttagtagcctagaagc

SEQ ID NO: 39460 - DNA, 26 bp, Homo sapiens
cattgacacttagtagcctagaagcg

SEQ ID NO: 39461 - DNA, 26 bp, Homo sapiens
attgacacttagtagcctagaagcgg

SEQ ID NO: 39462 - DNA, 26 bp, Homo sapiens
ttgacacttagtagcctagaagcggt

SEQ ID NO: 39463 - DNA, 26 bp, Homo sapiens
tgacacttagtagcctagaagcggtc

SEQ ID NO: 39464 - DNA, 26 bp, Homo sapiens
gacacttagtagcctagaagcggtcc

SEQ ID NO: 39465 - DNA, 26 bp, Homo sapiens
acacttagtagcctagaagcggtccg

SEQ ID NO: 39466 - DNA, 26 bp, Homo sapiens
cacttagtagcctagaagcggtccga

SEQ ID NO: 39467 - DNA, 26 bp, Homo sapiens
acttagtagcctagaagcggtccgac

SEQ ID NO: 39468 - DNA, 26 bp, Homo sapiens
cttagtagcctagaagcggtccgacg

SEQ ID NO: 39469 - DNA, 26 bp, Homo sapiens
ttagtagcctagaagcggtccgacgc

SEQ ID NO: 39470 - DNA, 26 bp, Homo sapiens
tagtagcctagaagcggtccgacgca

SEQ ID NO: 39471 - DNA, 26 bp, Homo sapiens
agtagcctagaagcggtccgacgcac

SEQ ID NO: 39472 - DNA, 26 bp, Homo sapiens
gtagcctagaagcggtccgacgcaca

SEQ ID NO: 39473 - DNA, 26 bp, Homo sapiens
tagcctagaagcggtccgacgcacac

SEQ ID NO: 39474 - DNA, 26 bp, Homo sapiens
agcctagaagcggtccgacgcacaca

SEQ ID NO: 39475 - DNA, 26 bp, Homo sapiens
gcctagaagcggtccgacgcacacac

SEQ ID NO: 39476 - DNA, 26 bp, Homo sapiens
cctagaagcggtccgacgcacacaca

SEQ ID NO: 39477 - DNA, 26 bp, Homo sapiens
ctagaagcggtccgacgcacacacat

SEQ ID NO: 39478 - DNA, 26 bp, Homo sapiens
tagaagcggtccgacgcacacacatc

SEQ ID NO: 39479 - DNA, 26 bp, Homo sapiens
agaagcggtccgacgcacacacatca

SEQ ID NO: 39480 - DNA, 26 bp, Homo sapiens
gaagcggtccgacgcacacacatcat

SEQ ID NO: 39481 - DNA, 26 bp, Homo sapiens
aagcggtccgacgcacacacatcata

SEQ ID NO: 39482 - DNA, 26 bp, Homo sapiens
agcggtccgacgcacacacatcatac

SEQ ID NO: 39483 - DNA, 26 bp, Homo sapiens
gcggtccgacgcacacacatcataca

SEQ ID NO: 39484 - DNA, 26 bp, Homo sapiens
cggtccgacgcacacacatcatacac

SEQ ID NO: 39485 - DNA, 26 bp, Homo sapiens
ggtccgacgcacacacatcatacaca

SEQ ID NO: 39486 - DNA, 26 bp, Homo sapiens
gtccgacgcacacacatcatacacat

SEQ ID NO: 39487 - DNA, 26 bp, Homo sapiens
tccgacgcacacacatcatacacatg

SEQ ID NO: 39488 - DNA, 26 bp, Homo sapiens
ccgacgcacacacatcatacacatgc

SEQ ID NO: 39489 - DNA, 26 bp, Homo sapiens
cgacgcacacacatcatacacatgca

SEQ ID NO: 39490 - DNA, 26 bp, Homo sapiens
gacgcacacacatcatacacatgcaa

SEQ ID NO: 39491 - DNA, 26 bp, Homo sapiens
acgcacacacatcatacacatgcaaa

SEQ ID NO: 39492 - DNA, 26 bp, Homo sapiens
cgcacacacatcatacacatgcaaat

SEQ ID NO: 39493 - DNA, 26 bp, Homo sapiens
gcacacacatcatacacatgcaaatc

SEQ ID NO: 39494 - DNA, 26 bp, Homo sapiens
cacacacatcatacacatgcaaatca

SEQ ID NO: 39495 - DNA, 26 bp, Homo sapiens
acacacatcatacacatgcaaatcac

SEQ ID NO: 39496 - DNA, 26 bp, Homo sapiens
cacacatcatacacatgcaaatcaca

SEQ ID NO: 39497 - DNA, 26 bp, Homo sapiens
acacatcatacacatgcaaatcacac

SEQ ID NO: 39498 - DNA, 26 bp, Homo sapiens
cacatcatacacatgcaaatcacaca

SEQ ID NO: 39499 - DNA, 26 bp, Homo sapiens
acatcatacacatgcaaatcacacac

SEQ ID NO: 39500 - DNA, 26 bp, Homo sapiens
catcatacacatgcaaatcacacaca

SEQ ID NO: 39501 - DNA, 26 bp, Homo sapiens
atcatacacatgcaaatcacacacac

SEQ ID NO: 39502 - DNA, 26 bp, Homo sapiens
tcatacacatgcaaatcacacacaca

SEQ ID NO: 39503 - DNA, 26 bp, Homo sapiens
catacacatgcaaatcacacacacac

SEQ ID NO: 39504 - DNA, 26 bp, Homo sapiens
atacacatgcaaatcacacacacaca

SEQ ID NO: 39505 - DNA, 26 bp, Homo sapiens
tacacatgcaaatcacacacacacac

SEQ ID NO: 39506 - DNA, 26 bp, Homo sapiens
acacatgcaaatcacacacacacaca

SEQ ID NO: 39507 - DNA, 26 bp, Homo sapiens
cacatgcaaatcacacacacacacac

SEQ ID NO: 39508 - DNA, 26 bp, Homo sapiens
acatgcaaatcacacacacacacaca

SEQ ID NO: 39509 - DNA, 26 bp, Homo sapiens
catgcaaatcacacacacacacacac

SEQ ID NO: 39510 - DNA, 26 bp, Homo sapiens
atgcaaatcacacacacacacacaca

SEQ ID NO: 39511 - DNA, 26 bp, Homo sapiens
tgcaaatcacacacacacacacacac

SEQ ID NO: 39512 - DNA, 26 bp, Homo sapiens
gcaaatcacacacacacacacacaca

SEQ ID NO: 39513 - DNA, 26 bp, Homo sapiens
caaatcacacacacacacacacacac

SEQ ID NO: 39514 - DNA, 26 bp, Homo sapiens
aaatcacacacacacacacacacaca

SEQ ID NO: 39515 - DNA, 26 bp, Homo sapiens
aatcacacacacacacacacacacac

SEQ ID NO: 39516 - DNA, 26 bp, Homo sapiens
atcacacacacacacacacacacaca

SEQ ID NO: 39517 - DNA, 26 bp, Homo sapiens
tcacacacacacacacacacacacac

SEQ ID NO: 39518 - DNA, 26 bp, Homo sapiens
cacacacacacacacacacacacaca

SEQ ID NO: 39519 - DNA, 26 bp, Homo sapiens
acacacacacacacacacacacacac

SEQ ID NO: 39520 - DNA, 26 bp, Homo sapiens
cacacacacacacacacacacacaca

SEQ ID NO: 39521 - DNA, 26 bp, Homo sapiens
acacacacacacacacacacacacac

SEQ ID NO: 39522 - DNA, 26 bp, Homo sapiens
cacacacacacacacacacacacaca

SEQ ID NO: 39523 - DNA, 26 bp, Homo sapiens
acacacacacacacacacacacacac

SEQ ID NO: 39524 - DNA, 26 bp, Homo sapiens
cacacacacacacacacacacacaca

SEQ ID NO: 39525 - DNA, 26 bp, Homo sapiens
acacacacacacacacacacacacac

SEQ ID NO: 39526 - DNA, 26 bp, Homo sapiens
cacacacacacacacacacacacaca

SEQ ID NO: 39527 - DNA, 26 bp, Homo sapiens
acacacacacacacacacacacacac

SEQ ID NO: 39528 - DNA, 26 bp, Homo sapiens
cacacacacacacacacacacacaca

SEQ ID NO: 39529 - DNA, 26 bp, Homo sapiens
acacacacacacacacacacacacac

SEQ ID NO: 39530 - DNA, 26 bp, Homo sapiens
cacacacacacacacacacacacaca

SEQ ID NO: 39531 - DNA, 26 bp, Homo sapiens
acacacacacacacacacacacacac

SEQ ID NO: 39532 - DNA, 26 bp, Homo sapiens
cacacacacacacacacacacacact

SEQ ID NO: 39533 - DNA, 26 bp, Homo sapiens
acacacacacacacacacacacactc

SEQ ID NO: 39534 - DNA, 26 bp, Homo sapiens
cacacacacacacacacacacactcc

SEQ ID NO: 39535 - DNA, 26 bp, Homo sapiens
acacacacacacacacacacactcct

SEQ ID NO: 39536 - DNA, 26 bp, Homo sapiens
cacacacacacacacacacactcctt

SEQ ID NO: 39537 - DNA, 26 bp, Homo sapiens
acacacacacacacacacactccttc

SEQ ID NO: 39538 - DNA, 26 bp, Homo sapiens
cacacacacacacacacactccttcc

SEQ ID NO: 39539 - DNA, 26 bp, Homo sapiens
acacacacacacacacactccttcct

SEQ ID NO: 39540 - DNA, 26 bp, Homo sapiens
cacacacacacacacactccttcctc

SEQ ID NO: 39541 - DNA, 26 bp, Homo sapiens
acacacacacacacactccttcctca

SEQ ID NO: 39542 - DNA, 26 bp, Homo sapiens
cacacacacacacactccttcctcac

SEQ ID NO: 39543 - DNA, 26 bp, Homo sapiens
acacacacacacactccttcctcacc

SEQ ID NO: 39544 - DNA, 26 bp, Homo sapiens
cacacacacacactccttcctcacct

SEQ ID NO: 39545 - DNA, 26 bp, Homo sapiens
acacacacacactccttcctcacctg

SEQ ID NO: 39546 - DNA, 26 bp, Homo sapiens
cacacacacactccttcctcacctga

SEQ ID NO: 39547 - DNA, 26 bp, Homo sapiens
acacacacactccttcctcacctgac

SEQ ID NO: 39548 - DNA, 26 bp, Homo sapiens
cacacacactccttcctcacctgacc

SEQ ID NO: 39549 - DNA, 26 bp, Homo sapiens
acacacactccttcctcacctgaccc

SEQ ID NO: 39550 - DNA, 26 bp, Homo sapiens
cacacactccttcctcacctgaccct

SEQ ID NO: 39551 - DNA, 26 bp, Homo sapiens
acacactccttcctcacctgaccctc

SEQ ID NO: 39552 - DNA, 26 bp, Homo sapiens
cacactccttcctcacctgaccctca

SEQ ID NO: 39553 - DNA, 26 bp, Homo sapiens
acactccttcctcacctgaccctcag

SEQ ID NO: 39554 - DNA, 26 bp, Homo sapiens
cactccttcctcacctgaccctcagc

SEQ ID NO: 39555 - DNA, 26 bp, Homo sapiens
actccttcctcacctgaccctcagcc

SEQ ID NO: 39556 - DNA, 26 bp, Homo sapiens
ctccttcctcacctgaccctcagccc

SEQ ID NO: 39557 - DNA, 26 bp, Homo sapiens
tccttcctcacctgaccctcagccca

SEQ ID NO: 39558 - DNA, 26 bp, Homo sapiens
ccttcctcacctgaccctcagcccac

SEQ ID NO: 39559 - DNA, 26 bp, Homo sapiens
cttcctcacctgaccctcagcccacc

SEQ ID NO: 39560 - DNA, 26 bp, Homo sapiens
ttcctcacctgaccctcagcccaccc

SEQ ID NO: 39561 - DNA, 26 bp, Homo sapiens
tcctcacctgaccctcagcccacccc

SEQ ID NO: 39562 - DNA, 26 bp, Homo sapiens
cctcacctgaccctcagcccaccccc

SEQ ID NO: 39563 - DNA, 26 bp, Homo sapiens
ctcacctgaccctcagcccaccccca

SEQ ID NO: 39564 - DNA, 26 bp, Homo sapiens
tcacctgaccctcagcccacccccat

SEQ ID NO: 39565 - DNA, 26 bp, Homo sapiens
cacctgaccctcagcccacccccata

SEQ ID NO: 39566 - DNA, 26 bp, Homo sapiens
acctgaccctcagcccacccccatac

SEQ ID NO: 39567 - DNA, 26 bp, Homo sapiens
cctgaccctcagcccacccccatacg

SEQ ID NO: 39568 - DNA, 26 bp, Homo sapiens
ctgaccctcagcccacccccatacgc

SEQ ID NO: 39569 - DNA, 26 bp, Homo sapiens
tgaccctcagcccacccccatacgct

SEQ ID NO: 39570 - DNA, 26 bp, Homo sapiens
gaccctcagcccacccccatacgctc

SEQ ID NO: 39571 - DNA, 26 bp, Homo sapiens
accctcagcccacccccatacgctca

SEQ ID NO: 39572 - DNA, 26 bp, Homo sapiens
ccctcagcccacccccatacgctcac

SEQ ID NO: 39573 - DNA, 26 bp, Homo sapiens
cctcagcccacccccatacgctcaca

SEQ ID NO: 39574 - DNA, 26 bp, Homo sapiens
ctcagcccacccccatacgctcacag

SEQ ID NO: 39575 - DNA, 26 bp, Homo sapiens
tcagcccacccccatacgctcacaga

SEQ ID NO: 39576 - DNA, 26 bp, Homo sapiens
cagcccacccccatacgctcacagat

SEQ ID NO: 39577 - DNA, 26 bp, Homo sapiens
agcccacccccatacgctcacagata

SEQ ID NO: 39578 - DNA, 26 bp, Homo sapiens
gcccacccccatacgctcacagataa

SEQ ID NO: 39579 - DNA, 26 bp, Homo sapiens
cccacccccatacgctcacagataac

SEQ ID NO: 39580 - DNA, 26 bp, Homo sapiens
ccacccccatacgctcacagataact

SEQ ID NO: 39581 - DNA, 26 bp, Homo sapiens
cacccccatacgctcacagataactg

SEQ ID NO: 39582 - DNA, 26 bp, Homo sapiens
acccccatacgctcacagataactgg

SEQ ID NO: 39583 - DNA, 26 bp, Homo sapiens
cccccatacgctcacagataactggg

SEQ ID NO: 39584 - DNA, 26 bp, Homo sapiens
ccccatacgctcacagataactgggt

SEQ ID NO: 39585 - DNA, 26 bp, Homo sapiens
cccatacgctcacagataactgggta

SEQ ID NO: 39586 - DNA, 26 bp, Homo sapiens
ccatacgctcacagataactgggtat

SEQ ID NO: 39587 - DNA, 26 bp, Homo sapiens
catacgctcacagataactgggtatc

SEQ ID NO: 39588 - DNA, 26 bp, Homo sapiens
atacgctcacagataactgggtatcc

SEQ ID NO: 39589 - DNA, 26 bp, Homo sapiens
tacgctcacagataactgggtatcca

SEQ ID NO: 39590 - DNA, 26 bp, Homo sapiens
acgctcacagataactgggtatccac

SEQ ID NO: 39591 - DNA, 26 bp, Homo sapiens
cgctcacagataactgggtatccaca

SEQ ID NO: 39592 - DNA, 26 bp, Homo sapiens
gctcacagataactgggtatccacac

SEQ ID NO: 39593 - DNA, 26 bp, Homo sapiens
ctcacagataactgggtatccacact

SEQ ID NO: 39594 - DNA, 26 bp, Homo sapiens
tcacagataactgggtatccacacta

SEQ ID NO: 39595 - DNA, 26 bp, Homo sapiens
cacagataactgggtatccacactat

SEQ ID NO: 39596 - DNA, 26 bp, Homo sapiens
acagataactgggtatccacactata

SEQ ID NO: 39597 - DNA, 26 bp, Homo sapiens
cagataactgggtatccacactataa

SEQ ID NO: 39598 - DNA, 26 bp, Homo sapiens
agataactgggtatccacactataaa

SEQ ID NO: 39599 - DNA, 26 bp, Homo sapiens
gataactgggtatccacactataaag

SEQ ID NO: 39600 - DNA, 26 bp, Homo sapiens
ataactgggtatccacactataaaga

SEQ ID NO: 39601 - DNA, 26 bp, Homo sapiens
taactgggtatccacactataaagaa

SEQ ID NO: 39602 - DNA, 26 bp, Homo sapiens
aactgggtatccacactataaagaac

SEQ ID NO: 39603 - DNA, 26 bp, Homo sapiens
actgggtatccacactataaagaaca

SEQ ID NO: 39604 - DNA, 26 bp, Homo sapiens
ctgggtatccacactataaagaacaa

SEQ ID NO: 39605 - DNA, 26 bp, Homo sapiens
tgggtatccacactataaagaacaac

SEQ ID NO: 39606 - DNA, 26 bp, Homo sapiens
gggtatccacactataaagaacaacc

SEQ ID NO: 39607 - DNA, 26 bp, Homo sapiens
ggtatccacactataaagaacaacca

SEQ ID NO: 39608 - DNA, 26 bp, Homo sapiens
gtatccacactataaagaacaaccaa

SEQ ID NO: 39609 - DNA, 26 bp, Homo sapiens
tatccacactataaagaacaaccaaa

SEQ ID NO: 39610 - DNA, 26 bp, Homo sapiens
atccacactataaagaacaaccaaac

SEQ ID NO: 39611 - DNA, 26 bp, Homo sapiens
tccacactataaagaacaaccaaact

SEQ ID NO: 39612 - DNA, 26 bp, Homo sapiens
ccacactataaagaacaaccaaactt

SEQ ID NO: 39613 - DNA, 26 bp, Homo sapiens
cacactataaagaacaaccaaactta

SEQ ID NO: 39614 - DNA, 26 bp, Homo sapiens
acactataaagaacaaccaaacttag

SEQ ID NO: 39615 - DNA, 26 bp, Homo sapiens
cactataaagaacaaccaaacttaga

SEQ ID NO: 39616 - DNA, 26 bp, Homo sapiens
actataaagaacaaccaaacttagaa

SEQ ID NO: 39617 - DNA, 26 bp, Homo sapiens
ctataaagaacaaccaaacttagaag

SEQ ID NO: 39618 - DNA, 26 bp, Homo sapiens
tataaagaacaaccaaacttagaagc

SEQ ID NO: 39619 - DNA, 26 bp, Homo sapiens
ataaagaacaaccaaacttagaagca

SEQ ID NO: 39620 - DNA, 26 bp, Homo sapiens
taaagaacaaccaaacttagaagcag

SEQ ID NO: 39621 - DNA, 26 bp, Homo sapiens
aaagaacaaccaaacttagaagcagt

SEQ ID NO: 39622 - DNA, 26 bp, Homo sapiens
aagaacaaccaaacttagaagcagtg

SEQ ID NO: 39623 - DNA, 26 bp, Homo sapiens
agaacaaccaaacttagaagcagtgt

SEQ ID NO: 39624 - DNA, 26 bp, Homo sapiens
gaacaaccaaacttagaagcagtgtc

SEQ ID NO: 39625 - DNA, 26 bp, Homo sapiens
aacaaccaaacttagaagcagtgtct

SEQ ID NO: 39626 - DNA, 26 bp, Homo sapiens
acaaccaaacttagaagcagtgtctt

SEQ ID NO: 39627 - DNA, 26 bp, Homo sapiens
caaccaaacttagaagcagtgtctta

SEQ ID NO: 39628 - DNA, 26 bp, Homo sapiens
aaccaaacttagaagcagtgtcttaa

SEQ ID NO: 39629 - DNA, 26 bp, Homo sapiens
accaaacttagaagcagtgtcttaag

SEQ ID NO: 39630 - DNA, 26 bp, Homo sapiens
ccaaacttagaagcagtgtcttaagt

SEQ ID NO: 39631 - DNA, 26 bp, Homo sapiens
caaacttagaagcagtgtcttaagtc

SEQ ID NO: 39632 - DNA, 26 bp, Homo sapiens
aaacttagaagcagtgtcttaagtca

SEQ ID NO: 39633 - DNA, 26 bp, Homo sapiens
aacttagaagcagtgtcttaagtcat

SEQ ID NO: 39634 - DNA, 26 bp, Homo sapiens
acttagaagcagtgtcttaagtcatg

SEQ ID NO: 39635 - DNA, 26 bp, Homo sapiens
cttagaagcagtgtcttaagtcatgt

SEQ ID NO: 39636 - DNA, 26 bp, Homo sapiens
ttagaagcagtgtcttaagtcatgtt

SEQ ID NO: 39637 - DNA, 26 bp, Homo sapiens
tagaagcagtgtcttaagtcatgttt

SEQ ID NO: 39638 - DNA, 26 bp, Homo sapiens
agaagcagtgtcttaagtcatgtttt

SEQ ID NO: 39639 - DNA, 26 bp, Homo sapiens
gaagcagtgtcttaagtcatgttttt

SEQ ID NO: 39640 - DNA, 26 bp, Homo sapiens
aagcagtgtcttaagtcatgtttttc

SEQ ID NO: 39641 - DNA, 26 bp, Homo sapiens
agcagtgtcttaagtcatgtttttct

SEQ ID NO: 39642 - DNA, 26 bp, Homo sapiens
gcagtgtcttaagtcatgtttttctt

SEQ ID NO: 39643 - DNA, 26 bp, Homo sapiens
cagtgtcttaagtcatgtttttctta

SEQ ID NO: 39644 - DNA, 26 bp, Homo sapiens
agtgtcttaagtcatgtttttcttaa

SEQ ID NO: 39645 - DNA, 26 bp, Homo sapiens
gtgtcttaagtcatgtttttcttaag

SEQ ID NO: 39646 - DNA, 26 bp, Homo sapiens
tgtcttaagtcatgtttttcttaagt

SEQ ID NO: 39647 - DNA, 26 bp, Homo sapiens
gtcttaagtcatgtttttcttaagtt

SEQ ID NO: 39648 - DNA, 26 bp, Homo sapiens
tcttaagtcatgtttttcttaagtta

SEQ ID NO: 39649 - DNA, 26 bp, Homo sapiens
cttaagtcatgtttttcttaagttag

SEQ ID NO: 39650 - DNA, 26 bp, Homo sapiens
ttaagtcatgtttttcttaagttaga

SEQ ID NO: 39651 - DNA, 26 bp, Homo sapiens
taagtcatgtttttcttaagttagaa

SEQ ID NO: 39652 - DNA, 26 bp, Homo sapiens
aagtcatgtttttcttaagttagaaa

SEQ ID NO: 39653 - DNA, 26 bp, Homo sapiens
agtcatgtttttcttaagttagaaag

SEQ ID NO: 39654 - DNA, 26 bp, Homo sapiens
gtcatgtttttcttaagttagaaagg

SEQ ID NO: 39655 - DNA, 26 bp, Homo sapiens
tcatgtttttcttaagttagaaaggg

SEQ ID NO: 39656 - DNA, 26 bp, Homo sapiens
catgtttttcttaagttagaaagggt

SEQ ID NO: 39657 - DNA, 26 bp, Homo sapiens
atgtttttcttaagttagaaagggtg

SEQ ID NO: 39658 - DNA, 26 bp, Homo sapiens
tgtttttcttaagttagaaagggtga

SEQ ID NO: 39659 - DNA, 26 bp, Homo sapiens
gtttttcttaagttagaaagggtgaa

SEQ ID NO: 39660 - DNA, 26 bp, Homo sapiens
tttttcttaagttagaaagggtgaat

SEQ ID NO: 39661 - DNA, 26 bp, Homo sapiens
ttttcttaagttagaaagggtgaatt

SEQ ID NO: 39662 - DNA, 26 bp, Homo sapiens
tttcttaagttagaaagggtgaatta

SEQ ID NO: 39663 - DNA, 26 bp, Homo sapiens
ttcttaagttagaaagggtgaattag

SEQ ID NO: 39664 - DNA, 26 bp, Homo sapiens
tcttaagttagaaagggtgaattagg

SEQ ID NO: 39665 - DNA, 26 bp, Homo sapiens
cttaagttagaaagggtgaattagga

SEQ ID NO: 39666 - DNA, 26 bp, Homo sapiens
ttaagttagaaagggtgaattaggat

SEQ ID NO: 39667 - DNA, 26 bp, Homo sapiens
taagttagaaagggtgaattaggatg

SEQ ID NO: 39668 - DNA, 26 bp, Homo sapiens
aagttagaaagggtgaattaggatgc

SEQ ID NO: 39669 - DNA, 26 bp, Homo sapiens
agttagaaagggtgaattaggatgct

SEQ ID NO: 39670 - DNA, 26 bp, Homo sapiens
gttagaaagggtgaattaggatgctg

SEQ ID NO: 39671 - DNA, 26 bp, Homo sapiens
ttagaaagggtgaattaggatgctga

SEQ ID NO: 39672 - DNA, 26 bp, Homo sapiens
tagaaagggtgaattaggatgctgaa

SEQ ID NO: 39673 - DNA, 26 bp, Homo sapiens
agaaagggtgaattaggatgctgaag

SEQ ID NO: 39674 - DNA, 26 bp, Homo sapiens
gaaagggtgaattaggatgctgaaga

SEQ ID NO: 39675 - DNA, 26 bp, Homo sapiens
aaagggtgaattaggatgctgaagac

SEQ ID NO: 39676 - DNA, 26 bp, Homo sapiens
aagggtgaattaggatgctgaagact

SEQ ID NO: 39677 - DNA, 26 bp, Homo sapiens
agggtgaattaggatgctgaagactt

SEQ ID NO: 39678 - DNA, 26 bp, Homo sapiens
gggtgaattaggatgctgaagacttt

SEQ ID NO: 39679 - DNA, 26 bp, Homo sapiens
ggtgaattaggatgctgaagacttta

SEQ ID NO: 39680 - DNA, 26 bp, Homo sapiens
gtgaattaggatgctgaagactttaa

SEQ ID NO: 39681 - DNA, 26 bp, Homo sapiens
tgaattaggatgctgaagactttaaa

SEQ ID NO: 39682 - DNA, 26 bp, Homo sapiens
gaattaggatgctgaagactttaaaa

SEQ ID NO: 39683 - DNA, 26 bp, Homo sapiens
aattaggatgctgaagactttaaaaa

SEQ ID NO: 39684 - DNA, 26 bp, Homo sapiens
attaggatgctgaagactttaaaaaa

SEQ ID NO: 39685 - DNA, 26 bp, Homo sapiens
ttaggatgctgaagactttaaaaaaa

SEQ ID NO: 39686 - DNA, 26 bp, Homo sapiens
taggatgctgaagactttaaaaaaaa

SEQ ID NO: 39687 - DNA, 26 bp, Homo sapiens
aggatgctgaagactttaaaaaaaaa

SEQ ID NO: 39688 - DNA, 26 bp, Homo sapiens
ggatgctgaagactttaaaaaaaaat

SEQ ID NO: 39689 - DNA, 26 bp, Homo sapiens
gatgctgaagactttaaaaaaaaatc

SEQ ID NO: 39690 - DNA, 26 bp, Homo sapiens
atgctgaagactttaaaaaaaaatcc

SEQ ID NO: 39691 - DNA, 26 bp, Homo sapiens
tgctgaagactttaaaaaaaaatcca

SEQ ID NO: 39692 - DNA, 26 bp, Homo sapiens
gctgaagactttaaaaaaaaatccat

SEQ ID NO: 39693 - DNA, 26 bp, Homo sapiens
ctgaagactttaaaaaaaaatccata

SEQ ID NO: 39694 - DNA, 26 bp, Homo sapiens
tgaagactttaaaaaaaaatccatag

SEQ ID NO: 39695 - DNA, 26 bp, Homo sapiens
gaagactttaaaaaaaaatccatagc

SEQ ID NO: 39696 - DNA, 26 bp, Homo sapiens
aagactttaaaaaaaaatccatagct

SEQ ID NO: 39697 - DNA, 26 bp, Homo sapiens
agactttaaaaaaaaatccatagctt

SEQ ID NO: 39698 - DNA, 26 bp, Homo sapiens
gactttaaaaaaaaatccatagcttt

SEQ ID NO: 39699 - DNA, 26 bp, Homo sapiens
actttaaaaaaaaatccatagcttta

SEQ ID NO: 39700 - DNA, 26 bp, Homo sapiens
ctttaaaaaaaaatccatagctttaa

SEQ ID NO: 39701 - DNA, 26 bp, Homo sapiens
tttaaaaaaaaatccatagctttaat

SEQ ID NO: 39702 - DNA, 26 bp, Homo sapiens
ttaaaaaaaaatccatagctttaata

SEQ ID NO: 39703 - DNA, 26 bp, Homo sapiens
taaaaaaaaatccatagctttaatac

SEQ ID NO: 39704 - DNA, 26 bp, Homo sapiens
aaaaaaaaatccatagctttaataca

SEQ ID NO: 39705 - DNA, 26 bp, Homo sapiens
aaaaaaaatccatagctttaatacac

SEQ ID NO: 39706 - DNA, 26 bp, Homo sapiens
aaaaaaatccatagctttaatacacg

SEQ ID NO: 39707 - DNA, 26 bp, Homo sapiens
aaaaaatccatagctttaatacacgt

SEQ ID NO: 39708 - DNA, 26 bp, Homo sapiens
aaaaatccatagctttaatacacgtt

SEQ ID NO: 39709 - DNA, 26 bp, Homo sapiens
aaaatccatagctttaatacacgtta

SEQ ID NO: 39710 - DNA, 26 bp, Homo sapiens
aaatccatagctttaatacacgttaa

SEQ ID NO: 39711 - DNA, 26 bp, Homo sapiens
aatccatagctttaatacacgttaag

SEQ ID NO: 39712 - DNA, 26 bp, Homo sapiens
atccatagctttaatacacgttaaga

SEQ ID NO: 39713 - DNA, 26 bp, Homo sapiens
tccatagctttaatacacgttaagat

SEQ ID NO: 39714 - DNA, 26 bp, Homo sapiens
ccatagctttaatacacgttaagatg

SEQ ID NO: 39715 - DNA, 26 bp, Homo sapiens
catagctttaatacacgttaagatgc

SEQ ID NO: 39716 - DNA, 26 bp, Homo sapiens
atagctttaatacacgttaagatgct

SEQ ID NO: 39717 - DNA, 26 bp, Homo sapiens
tagctttaatacacgttaagatgctg

SEQ ID NO: 39718 - DNA, 26 bp, Homo sapiens
agctttaatacacgttaagatgctga

SEQ ID NO: 39719 - DNA, 26 bp, Homo sapiens
gctttaatacacgttaagatgctgaa

SEQ ID NO: 39720 - DNA, 26 bp, Homo sapiens
ctttaatacacgttaagatgctgaac

SEQ ID NO: 39721 - DNA, 26 bp, Homo sapiens
tttaatacacgttaagatgctgaaca

SEQ ID NO: 39722 - DNA, 26 bp, Homo sapiens
ttaatacacgttaagatgctgaacac

SEQ ID NO: 39723 - DNA, 26 bp, Homo sapiens
taatacacgttaagatgctgaacact

SEQ ID NO: 39724 - DNA, 26 bp, Homo sapiens
aatacacgttaagatgctgaacactt

SEQ ID NO: 39725 - DNA, 26 bp, Homo sapiens
atacacgttaagatgctgaacacttt

SEQ ID NO: 39726 - DNA, 26 bp, Homo sapiens
tacacgttaagatgctgaacacttta

SEQ ID NO: 39727 - DNA, 26 bp, Homo sapiens
acacgttaagatgctgaacactttaa

SEQ ID NO: 39728 - DNA, 26 bp, Homo sapiens
cacgttaagatgctgaacactttaaa

SEQ ID NO: 39729 - DNA, 26 bp, Homo sapiens
acgttaagatgctgaacactttaaaa

SEQ ID NO: 39730 - DNA, 26 bp, Homo sapiens
cgttaagatgctgaacactttaaaaa

SEQ ID NO: 39731 - DNA, 26 bp, Homo sapiens
gttaagatgctgaacactttaaaaaa

SEQ ID NO: 39732 - DNA, 26 bp, Homo sapiens
ttaagatgctgaacactttaaaaaaa

SEQ ID NO: 39733 - DNA, 26 bp, Homo sapiens
taagatgctgaacactttaaaaaaaa

SEQ ID NO: 39734 - DNA, 26 bp, Homo sapiens
aagatgctgaacactttaaaaaaaat

SEQ ID NO: 39735 - DNA, 26 bp, Homo sapiens
agatgctgaacactttaaaaaaaatc

SEQ ID NO: 39736 - DNA, 26 bp, Homo sapiens
gatgctgaacactttaaaaaaaatcc

SEQ ID NO: 39737 - DNA, 26 bp, Homo sapiens
atgctgaacactttaaaaaaaatccg

SEQ ID NO: 39738 - DNA, 26 bp, Homo sapiens
tgctgaacactttaaaaaaaatccgt

SEQ ID NO: 39739 - DNA, 26 bp, Homo sapiens
gctgaacactttaaaaaaaatccgta

SEQ ID NO: 39740 - DNA, 26 bp, Homo sapiens
ctgaacactttaaaaaaaatccgtag

SEQ ID NO: 39741 - DNA, 26 bp, Homo sapiens
tgaacactttaaaaaaaatccgtagc

SEQ ID NO: 39742 - DNA, 26 bp, Homo sapiens
gaacactttaaaaaaaatccgtagct

SEQ ID NO: 39743 - DNA, 26 bp, Homo sapiens
aacactttaaaaaaaatccgtagctt

SEQ ID NO: 39744 - DNA, 26 bp, Homo sapiens
acactttaaaaaaaatccgtagcttt

SEQ ID NO: 39745 - DNA, 26 bp, Homo sapiens
cactttaaaaaaaatccgtagcttta

SEQ ID NO: 39746 - DNA, 26 bp, Homo sapiens
actttaaaaaaaatccgtagctttaa

SEQ ID NO: 39747 - DNA, 26 bp, Homo sapiens
ctttaaaaaaaatccgtagctttaac

SEQ ID NO: 39748 - DNA, 26 bp, Homo sapiens
tttaaaaaaaatccgtagctttaaca

SEQ ID NO: 39749 - DNA, 26 bp, Homo sapiens
ttaaaaaaaatccgtagctttaacac

SEQ ID NO: 39750 - DNA, 26 bp, Homo sapiens
taaaaaaaatccgtagctttaacaca

SEQ ID NO: 39751 - DNA, 26 bp, Homo sapiens
aaaaaaaatccgtagctttaacacaa

SEQ ID NO: 39752 - DNA, 26 bp, Homo sapiens
aaaaaaatccgtagctttaacacaat

SEQ ID NO: 39753 - DNA, 26 bp, Homo sapiens
aaaaaatccgtagctttaacacaatt

SEQ ID NO: 39754 - DNA, 26 bp, Homo sapiens
aaaaatccgtagctttaacacaattt

SEQ ID NO: 39755 - DNA, 26 bp, Homo sapiens
aaaatccgtagctttaacacaatttg

SEQ ID NO: 39756 - DNA, 26 bp, Homo sapiens
aaatccgtagctttaacacaatttgc

SEQ ID NO: 39757 - DNA, 26 bp, Homo sapiens
aatccgtagctttaacacaatttgca

SEQ ID NO: 39758 - DNA, 26 bp, Homo sapiens
atccgtagctttaacacaatttgcaa

SEQ ID NO: 39759 - DNA, 26 bp, Homo sapiens
tccgtagctttaacacaatttgcaaa

SEQ ID NO: 39760 - DNA, 26 bp, Homo sapiens
ccgtagctttaacacaatttgcaaac

SEQ ID NO: 39761 - DNA, 26 bp, Homo sapiens
cgtagctttaacacaatttgcaaact

SEQ ID NO: 39762 - DNA, 26 bp, Homo sapiens
gtagctttaacacaatttgcaaactg

SEQ ID NO: 39763 - DNA, 26 bp, Homo sapiens
tagctttaacacaatttgcaaactgt

SEQ ID NO: 39764 - DNA, 26 bp, Homo sapiens
agctttaacacaatttgcaaactgtc

SEQ ID NO: 39765 - DNA, 26 bp, Homo sapiens
gctttaacacaatttgcaaactgtcc

SEQ ID NO: 39766 - DNA, 26 bp, Homo sapiens
ctttaacacaatttgcaaactgtcca

SEQ ID NO: 39767 - DNA, 26 bp, Homo sapiens
tttaacacaatttgcaaactgtccaa

SEQ ID NO: 39768 - DNA, 26 bp, Homo sapiens
ttaacacaatttgcaaactgtccaaa

SEQ ID NO: 39769 - DNA, 26 bp, Homo sapiens
taacacaatttgcaaactgtccaaaa

SEQ ID NO: 39770 - DNA, 26 bp, Homo sapiens
aacacaatttgcaaactgtccaaaaa

SEQ ID NO: 39771 - DNA, 26 bp, Homo sapiens
acacaatttgcaaactgtccaaaaag

SEQ ID NO: 39772 - DNA, 26 bp, Homo sapiens
cacaatttgcaaactgtccaaaaagc

SEQ ID NO: 39773 - DNA, 26 bp, Homo sapiens
acaatttgcaaactgtccaaaaagca

SEQ ID NO: 39774 - DNA, 26 bp, Homo sapiens
caatttgcaaactgtccaaaaagcac

SEQ ID NO: 39775 - DNA, 26 bp, Homo sapiens
aatttgcaaactgtccaaaaagcact

SEQ ID NO: 39776 - DNA, 26 bp, Homo sapiens
atttgcaaactgtccaaaaagcactt

SEQ ID NO: 39777 - DNA, 26 bp, Homo sapiens
tttgcaaactgtccaaaaagcacttt

SEQ ID NO: 39778 - DNA, 26 bp, Homo sapiens
ttgcaaactgtccaaaaagcactttc

SEQ ID NO: 39779 - DNA, 26 bp, Homo sapiens
tgcaaactgtccaaaaagcactttca

SEQ ID NO: 39780 - DNA, 26 bp, Homo sapiens
gcaaactgtccaaaaagcactttcat

SEQ ID NO: 39781 - DNA, 26 bp, Homo sapiens
caaactgtccaaaaagcactttcatc

SEQ ID NO: 39782 - DNA, 26 bp, Homo sapiens
aaactgtccaaaaagcactttcatct

SEQ ID NO: 39783 - DNA, 26 bp, Homo sapiens
aactgtccaaaaagcactttcatctg

SEQ ID NO: 39784 - DNA, 26 bp, Homo sapiens
actgtccaaaaagcactttcatctgt

SEQ ID NO: 39785 - DNA, 26 bp, Homo sapiens
ctgtccaaaaagcactttcatctgta

SEQ ID NO: 39786 - DNA, 26 bp, Homo sapiens
tgtccaaaaagcactttcatctgtac

SEQ ID NO: 39787 - DNA, 26 bp, Homo sapiens
gtccaaaaagcactttcatctgtact

SEQ ID NO: 39788 - DNA, 26 bp, Homo sapiens
tccaaaaagcactttcatctgtactt

SEQ ID NO: 39789 - DNA, 26 bp, Homo sapiens
ccaaaaagcactttcatctgtacttt

SEQ ID NO: 39790 - DNA, 26 bp, Homo sapiens
caaaaagcactttcatctgtactttt

SEQ ID NO: 39791 - DNA, 26 bp, Homo sapiens
aaaaagcactttcatctgtacttttg

SEQ ID NO: 39792 - DNA, 26 bp, Homo sapiens
aaaagcactttcatctgtacttttgt

SEQ ID NO: 39793 - DNA, 26 bp, Homo sapiens
aaagcactttcatctgtacttttgtt

SEQ ID NO: 39794 - DNA, 26 bp, Homo sapiens
aagcactttcatctgtacttttgttt

SEQ ID NO: 39795 - DNA, 26 bp, Homo sapiens
agcactttcatctgtacttttgtttg

SEQ ID NO: 39796 - DNA, 26 bp, Homo sapiens
gcactttcatctgtacttttgtttgc

SEQ ID NO: 39797 - DNA, 26 bp, Homo sapiens
cactttcatctgtacttttgtttgca

SEQ ID NO: 39798 - DNA, 26 bp, Homo sapiens
actttcatctgtacttttgtttgcat

SEQ ID NO: 39799 - DNA, 26 bp, Homo sapiens
ctttcatctgtacttttgtttgcatt

SEQ ID NO: 39800 - DNA, 26 bp, Homo sapiens
tttcatctgtacttttgtttgcattg

SEQ ID NO: 39801 - DNA, 26 bp, Homo sapiens
ttcatctgtacttttgtttgcattgt

SEQ ID NO: 39802 - DNA, 26 bp, Homo sapiens
tcatctgtacttttgtttgcattgtg

SEQ ID NO: 39803 - DNA, 26 bp, Homo sapiens
catctgtacttttgtttgcattgtga

SEQ ID NO: 39804 - DNA, 26 bp, Homo sapiens
atctgtacttttgtttgcattgtgac

SEQ ID NO: 39805 - DNA, 26 bp, Homo sapiens
tctgtacttttgtttgcattgtgacc

SEQ ID NO: 39806 - DNA, 26 bp, Homo sapiens
ctgtacttttgtttgcattgtgacca

SEQ ID NO: 39807 - DNA, 26 bp, Homo sapiens
tgtacttttgtttgcattgtgaccaa

SEQ ID NO: 39808 - DNA, 26 bp, Homo sapiens
gtacttttgtttgcattgtgaccaag

SEQ ID NO: 39809 - DNA, 26 bp, Homo sapiens
tacttttgtttgcattgtgaccaagg

SEQ ID NO: 39810 - DNA, 26 bp, Homo sapiens
acttttgtttgcattgtgaccaaggc

SEQ ID NO: 39811 - DNA, 26 bp, Homo sapiens
cttttgtttgcattgtgaccaaggcc

SEQ ID NO: 39812 - DNA, 26 bp, Homo sapiens
ttttgtttgcattgtgaccaaggcca

SEQ ID NO: 39813 - DNA, 26 bp, Homo sapiens
tttgtttgcattgtgaccaaggccag

SEQ ID NO: 39814 - DNA, 26 bp, Homo sapiens
ttgtttgcattgtgaccaaggccagg

SEQ ID NO: 39815 - DNA, 26 bp, Homo sapiens
tgtttgcattgtgaccaaggccaggt

SEQ ID NO: 39816 - DNA, 26 bp, Homo sapiens
gtttgcattgtgaccaaggccaggtt

SEQ ID NO: 39817 - DNA, 26 bp, Homo sapiens
tttgcattgtgaccaaggccaggttt

SEQ ID NO: 39818 - DNA, 26 bp, Homo sapiens
ttgcattgtgaccaaggccaggtttt

SEQ ID NO: 39819 - DNA, 26 bp, Homo sapiens
tgcattgtgaccaaggccaggttttt

SEQ ID NO: 39820 - DNA, 26 bp, Homo sapiens
gcattgtgaccaaggccaggtttttc

SEQ ID NO: 39821 - DNA, 26 bp, Homo sapiens
cattgtgaccaaggccaggtttttca

SEQ ID NO: 39822 - DNA, 26 bp, Homo sapiens
attgtgaccaaggccaggtttttcac

SEQ ID NO: 39823 - DNA, 26 bp, Homo sapiens
ttgtgaccaaggccaggtttttcaca

SEQ ID NO: 39824 - DNA, 26 bp, Homo sapiens
tgtgaccaaggccaggtttttcacaa

SEQ ID NO: 39825 - DNA, 26 bp, Homo sapiens
gtgaccaaggccaggtttttcacaat

SEQ ID NO: 39826 - DNA, 26 bp, Homo sapiens
tgaccaaggccaggtttttcacaata

SEQ ID NO: 39827 - DNA, 26 bp, Homo sapiens
gaccaaggccaggtttttcacaatat

SEQ ID NO: 39828 - DNA, 26 bp, Homo sapiens
accaaggccaggtttttcacaatata

SEQ ID NO: 39829 - DNA, 26 bp, Homo sapiens
ccaaggccaggtttttcacaatataa

SEQ ID NO: 39830 - DNA, 26 bp, Homo sapiens
caaggccaggtttttcacaatataat

SEQ ID NO: 39831 - DNA, 26 bp, Homo sapiens
aaggccaggtttttcacaatataata

SEQ ID NO: 39832 - DNA, 26 bp, Homo sapiens
aggccaggtttttcacaatataataa

SEQ ID NO: 39833 - DNA, 26 bp, Homo sapiens
ggccaggtttttcacaatataataac

SEQ ID NO: 39834 - DNA, 26 bp, Homo sapiens
gccaggtttttcacaatataataacc

SEQ ID NO: 39835 - DNA, 26 bp, Homo sapiens
ccaggtttttcacaatataataacca

SEQ ID NO: 39836 - DNA, 26 bp, Homo sapiens
caggtttttcacaatataataaccat

SEQ ID NO: 39837 - DNA, 26 bp, Homo sapiens
aggtttttcacaatataataaccatt

SEQ ID NO: 39838 - DNA, 26 bp, Homo sapiens
ggtttttcacaatataataaccattt

SEQ ID NO: 39839 - DNA, 26 bp, Homo sapiens
gtttttcacaatataataaccatttg

SEQ ID NO: 39840 - DNA, 26 bp, Homo sapiens
tttttcacaatataataaccatttgg

SEQ ID NO: 39841 - DNA, 26 bp, Homo sapiens
ttttcacaatataataaccatttgga

SEQ ID NO: 39842 - DNA, 26 bp, Homo sapiens
tttcacaatataataaccatttggac

SEQ ID NO: 39843 - DNA, 26 bp, Homo sapiens
ttcacaatataataaccatttggaca

SEQ ID NO: 39844 - DNA, 26 bp, Homo sapiens
tcacaatataataaccatttggacac

SEQ ID NO: 39845 - DNA, 26 bp, Homo sapiens
cacaatataataaccatttggacacc

SEQ ID NO: 39846 - DNA, 26 bp, Homo sapiens
acaatataataaccatttggacacca

SEQ ID NO: 39847 - DNA, 26 bp, Homo sapiens
caatataataaccatttggacaccat

SEQ ID NO: 39848 - DNA, 26 bp, Homo sapiens
aatataataaccatttggacaccatt

SEQ ID NO: 39849 - DNA, 26 bp, Homo sapiens
atataataaccatttggacaccattg

SEQ ID NO: 39850 - DNA, 26 bp, Homo sapiens
tataataaccatttggacaccattgg

SEQ ID NO: 39851 - DNA, 26 bp, Homo sapiens
ataataaccatttggacaccattgga

SEQ ID NO: 39852 - DNA, 26 bp, Homo sapiens
taataaccatttggacaccattggaa

SEQ ID NO: 39853 - DNA, 26 bp, Homo sapiens
aataaccatttggacaccattggaac

SEQ ID NO: 39854 - DNA, 26 bp, Homo sapiens
ataaccatttggacaccattggaaca

SEQ ID NO: 39855 - DNA, 26 bp, Homo sapiens
taaccatttggacaccattggaacag

SEQ ID NO: 39856 - DNA, 26 bp, Homo sapiens
aaccatttggacaccattggaacaga

SEQ ID NO: 39857 - DNA, 26 bp, Homo sapiens
accatttggacaccattggaacagaa

SEQ ID NO: 39858 - DNA, 26 bp, Homo sapiens
ccatttggacaccattggaacagaag

SEQ ID NO: 39859 - DNA, 26 bp, Homo sapiens
catttggacaccattggaacagaagg

SEQ ID NO: 39860 - DNA, 26 bp, Homo sapiens
atttggacaccattggaacagaaggt

SEQ ID NO: 39861 - DNA, 26 bp, Homo sapiens
tttggacaccattggaacagaaggta

SEQ ID NO: 39862 - DNA, 26 bp, Homo sapiens
ttggacaccattggaacagaaggtat

SEQ ID NO: 39863 - DNA, 26 bp, Homo sapiens
tggacaccattggaacagaaggtatt

SEQ ID NO: 39864 - DNA, 26 bp, Homo sapiens
ggacaccattggaacagaaggtattc

SEQ ID NO: 39865 - DNA, 26 bp, Homo sapiens
gacaccattggaacagaaggtattca

SEQ ID NO: 39866 - DNA, 26 bp, Homo sapiens
acaccattggaacagaaggtattcag

SEQ ID NO: 39867 - DNA, 26 bp, Homo sapiens
caccattggaacagaaggtattcagg

SEQ ID NO: 39868 - DNA, 26 bp, Homo sapiens
accattggaacagaaggtattcaggc

SEQ ID NO: 39869 - DNA, 26 bp, Homo sapiens
ccattggaacagaaggtattcaggct

SEQ ID NO: 39870 - DNA, 26 bp, Homo sapiens
cattggaacagaaggtattcaggctt

SEQ ID NO: 39871 - DNA, 26 bp, Homo sapiens
attggaacagaaggtattcaggcttt

SEQ ID NO: 39872 - DNA, 26 bp, Homo sapiens
ttggaacagaaggtattcaggctttg

SEQ ID NO: 39873 - DNA, 26 bp, Homo sapiens
tggaacagaaggtattcaggctttgt

SEQ ID NO: 39874 - DNA, 26 bp, Homo sapiens
ggaacagaaggtattcaggctttgta

SEQ ID NO: 39875 - DNA, 26 bp, Homo sapiens
gaacagaaggtattcaggctttgtac

SEQ ID NO: 39876 - DNA, 26 bp, Homo sapiens
aacagaaggtattcaggctttgtaca

SEQ ID NO: 39877 - DNA, 26 bp, Homo sapiens
acagaaggtattcaggctttgtacaa

SEQ ID NO: 39878 - DNA, 26 bp, Homo sapiens
cagaaggtattcaggctttgtacaaa

SEQ ID NO: 39879 - DNA, 26 bp, Homo sapiens
agaaggtattcaggctttgtacaaaa

SEQ ID NO: 39880 - DNA, 26 bp, Homo sapiens
gaaggtattcaggctttgtacaaaag

SEQ ID NO: 39881 - DNA, 26 bp, Homo sapiens
aaggtattcaggctttgtacaaaagc

SEQ ID NO: 39882 - DNA, 26 bp, Homo sapiens
aggtattcaggctttgtacaaaagcc

SEQ ID NO: 39883 - DNA, 26 bp, Homo sapiens
ggtattcaggctttgtacaaaagcct

SEQ ID NO: 39884 - DNA, 26 bp, Homo sapiens
gtattcaggctttgtacaaaagcctt

SEQ ID NO: 39885 - DNA, 26 bp, Homo sapiens
tattcaggctttgtacaaaagcctta

SEQ ID NO: 39886 - DNA, 26 bp, Homo sapiens
attcaggctttgtacaaaagccttat

SEQ ID NO: 39887 - DNA, 26 bp, Homo sapiens
ttcaggctttgtacaaaagccttatt

SEQ ID NO: 39888 - DNA, 26 bp, Homo sapiens
tcaggctttgtacaaaagccttattt

SEQ ID NO: 39889 - DNA, 26 bp, Homo sapiens
caggctttgtacaaaagccttatttg

SEQ ID NO: 39890 - DNA, 26 bp, Homo sapiens
aggctttgtacaaaagccttatttgc

SEQ ID NO: 39891 - DNA, 26 bp, Homo sapiens
ggctttgtacaaaagccttatttgcc

SEQ ID NO: 39892 - DNA, 26 bp, Homo sapiens
gctttgtacaaaagccttatttgcct

SEQ ID NO: 39893 - DNA, 26 bp, Homo sapiens
ctttgtacaaaagccttatttgcctt

SEQ ID NO: 39894 - DNA, 26 bp, Homo sapiens
tttgtacaaaagccttatttgcctta

SEQ ID NO: 39895 - DNA, 26 bp, Homo sapiens
ttgtacaaaagccttatttgccttat

SEQ ID NO: 39896 - DNA, 26 bp, Homo sapiens
tgtacaaaagccttatttgccttatg

SEQ ID NO: 39897 - DNA, 26 bp, Homo sapiens
gtacaaaagccttatttgccttatgt

SEQ ID NO: 39898 - DNA, 26 bp, Homo sapiens
tacaaaagccttatttgccttatgta

SEQ ID NO: 39899 - DNA, 26 bp, Homo sapiens
acaaaagccttatttgccttatgtaa

SEQ ID NO: 39900 - DNA, 26 bp, Homo sapiens
caaaagccttatttgccttatgtaaa

SEQ ID NO: 39901 - DNA, 26 bp, Homo sapiens
aaaagccttatttgccttatgtaaaa

SEQ ID NO: 39902 - DNA, 26 bp, Homo sapiens
aaagccttatttgccttatgtaaaaa

SEQ ID NO: 39903 - DNA, 26 bp, Homo sapiens
aagccttatttgccttatgtaaaaaa

SEQ ID NO: 39904 - DNA, 26 bp, Homo sapiens
agccttatttgccttatgtaaaaaaa

SEQ ID NO: 39905 - DNA, 26 bp, Homo sapiens
gccttatttgccttatgtaaaaaaat

SEQ ID NO: 39906 - DNA, 26 bp, Homo sapiens
ccttatttgccttatgtaaaaaaatt

SEQ ID NO: 39907 - DNA, 26 bp, Homo sapiens
cttatttgccttatgtaaaaaaattg

SEQ ID NO: 39908 - DNA, 26 bp, Homo sapiens
ttatttgccttatgtaaaaaaattgt

SEQ ID NO: 39909 - DNA, 26 bp, Homo sapiens
tatttgccttatgtaaaaaaattgta

SEQ ID NO: 39910 - DNA, 26 bp, Homo sapiens
atttgccttatgtaaaaaaattgtac

SEQ ID NO: 39911 - DNA, 26 bp, Homo sapiens
tttgccttatgtaaaaaaattgtaca

SEQ ID NO: 39912 - DNA, 26 bp, Homo sapiens
ttgccttatgtaaaaaaattgtacaa

SEQ ID NO: 39913 - DNA, 26 bp, Homo sapiens
tgccttatgtaaaaaaattgtacaaa

SEQ ID NO: 39914 - DNA, 26 bp, Homo sapiens
gccttatgtaaaaaaattgtacaaag

SEQ ID NO: 39915 - DNA, 26 bp, Homo sapiens
ccttatgtaaaaaaattgtacaaagg

SEQ ID NO: 39916 - DNA, 26 bp, Homo sapiens
cttatgtaaaaaaattgtacaaaggc

SEQ ID NO: 39917 - DNA, 26 bp, Homo sapiens
ttatgtaaaaaaattgtacaaaggca

SEQ ID NO: 39918 - DNA, 26 bp, Homo sapiens
tatgtaaaaaaattgtacaaaggcat

SEQ ID NO: 39919 - DNA, 26 bp, Homo sapiens
atgtaaaaaaattgtacaaaggcatt

SEQ ID NO: 39920 - DNA, 26 bp, Homo sapiens
tgtaaaaaaattgtacaaaggcattg

SEQ ID NO: 39921 - DNA, 26 bp, Homo sapiens
gtaaaaaaattgtacaaaggcattgt

SEQ ID NO: 39922 - DNA, 26 bp, Homo sapiens
taaaaaaattgtacaaaggcattgta

SEQ ID NO: 39923 - DNA, 26 bp, Homo sapiens
aaaaaaattgtacaaaggcattgtag

SEQ ID NO: 39924 - DNA, 26 bp, Homo sapiens
aaaaaattgtacaaaggcattgtagc

SEQ ID NO: 39925 - DNA, 26 bp, Homo sapiens
aaaaattgtacaaaggcattgtagca

SEQ ID NO: 39926 - DNA, 26 bp, Homo sapiens
aaaattgtacaaaggcattgtagcag

SEQ ID NO: 39927 - DNA, 26 bp, Homo sapiens
aaattgtacaaaggcattgtagcagc

SEQ ID NO: 39928 - DNA, 26 bp, Homo sapiens
aattgtacaaaggcattgtagcagcg

SEQ ID NO: 39929 - DNA, 26 bp, Homo sapiens
attgtacaaaggcattgtagcagcgg

SEQ ID NO: 39930 - DNA, 26 bp, Homo sapiens
ttgtacaaaggcattgtagcagcggg

SEQ ID NO: 39931 - DNA, 26 bp, Homo sapiens
tgtacaaaggcattgtagcagcgggg

SEQ ID NO: 39932 - DNA, 26 bp, Homo sapiens
gtacaaaggcattgtagcagcggggc

SEQ ID NO: 39933 - DNA, 26 bp, Homo sapiens
tacaaaggcattgtagcagcggggct

SEQ ID NO: 39934 - DNA, 26 bp, Homo sapiens
acaaaggcattgtagcagcggggctg

SEQ ID NO: 39935 - DNA, 26 bp, Homo sapiens
caaaggcattgtagcagcggggctga

SEQ ID NO: 39936 - DNA, 26 bp, Homo sapiens
aaaggcattgtagcagcggggctgac

SEQ ID NO: 39937 - DNA, 26 bp, Homo sapiens
aaggcattgtagcagcggggctgaca

SEQ ID NO: 39938 - DNA, 26 bp, Homo sapiens
aggcattgtagcagcggggctgacag

SEQ ID NO: 39939 - DNA, 26 bp, Homo sapiens
ggcattgtagcagcggggctgacagt

SEQ ID NO: 39940 - DNA, 26 bp, Homo sapiens
gcattgtagcagcggggctgacagtg

SEQ ID NO: 39941 - DNA, 26 bp, Homo sapiens
cattgtagcagcggggctgacagtga

SEQ ID NO: 39942 - DNA, 26 bp, Homo sapiens
attgtagcagcggggctgacagtgat

SEQ ID NO: 39943 - DNA, 26 bp, Homo sapiens
ttgtagcagcggggctgacagtgatg

SEQ ID NO: 39944 - DNA, 26 bp, Homo sapiens
tgtagcagcggggctgacagtgatgt

SEQ ID NO: 39945 - DNA, 26 bp, Homo sapiens
gtagcagcggggctgacagtgatgtg

SEQ ID NO: 39946 - DNA, 26 bp, Homo sapiens
tagcagcggggctgacagtgatgtgg

SEQ ID NO: 39947 - DNA, 26 bp, Homo sapiens
agcagcggggctgacagtgatgtggt

SEQ ID NO: 39948 - DNA, 26 bp, Homo sapiens
gcagcggggctgacagtgatgtggtt

SEQ ID NO: 39949 - DNA, 26 bp, Homo sapiens
cagcggggctgacagtgatgtggttc

SEQ ID NO: 39950 - DNA, 26 bp, Homo sapiens
agcggggctgacagtgatgtggttcc

SEQ ID NO: 39951 - DNA, 26 bp, Homo sapiens
gcggggctgacagtgatgtggttcca

SEQ ID NO: 39952 - DNA, 26 bp, Homo sapiens
cggggctgacagtgatgtggttccaa

SEQ ID NO: 39953 - DNA, 26 bp, Homo sapiens
ggggctgacagtgatgtggttccaat

SEQ ID NO: 39954 - DNA, 26 bp, Homo sapiens
gggctgacagtgatgtggttccaatc

SEQ ID NO: 39955 - DNA, 26 bp, Homo sapiens
ggctgacagtgatgtggttccaatcc

SEQ ID NO: 39956 - DNA, 26 bp, Homo sapiens
gctgacagtgatgtggttccaatcct

SEQ ID NO: 39957 - DNA, 26 bp, Homo sapiens
ctgacagtgatgtggttccaatcctt

SEQ ID NO: 39958 - DNA, 26 bp, Homo sapiens
tgacagtgatgtggttccaatcctta

SEQ ID NO: 39959 - DNA, 26 bp, Homo sapiens
gacagtgatgtggttccaatccttaa

SEQ ID NO: 39960 - DNA, 26 bp, Homo sapiens
acagtgatgtggttccaatccttaaa

SEQ ID NO: 39961 - DNA, 26 bp, Homo sapiens
cagtgatgtggttccaatccttaaaa

SEQ ID NO: 39962 - DNA, 26 bp, Homo sapiens
agtgatgtggttccaatccttaaaag

SEQ ID NO: 39963 - DNA, 26 bp, Homo sapiens
gtgatgtggttccaatccttaaaaga

SEQ ID NO: 39964 - DNA, 26 bp, Homo sapiens
tgatgtggttccaatccttaaaagac

SEQ ID NO: 39965 - DNA, 26 bp, Homo sapiens
gatgtggttccaatccttaaaagact

SEQ ID NO: 39966 - DNA, 26 bp, Homo sapiens
atgtggttccaatccttaaaagacta

SEQ ID NO: 39967 - DNA, 26 bp, Homo sapiens
tgtggttccaatccttaaaagactat

SEQ ID NO: 39968 - DNA, 26 bp, Homo sapiens
gtggttccaatccttaaaagactatt

SEQ ID NO: 39969 - DNA, 26 bp, Homo sapiens
tggttccaatccttaaaagactattg

SEQ ID NO: 39970 - DNA, 26 bp, Homo sapiens
ggttccaatccttaaaagactattgg

SEQ ID NO: 39971 - DNA, 26 bp, Homo sapiens
gttccaatccttaaaagactattgga

SEQ ID NO: 39972 - DNA, 26 bp, Homo sapiens
ttccaatccttaaaagactattggag

SEQ ID NO: 39973 - DNA, 26 bp, Homo sapiens
tccaatccttaaaagactattggaga

SEQ ID NO: 39974 - DNA, 26 bp, Homo sapiens
ccaatccttaaaagactattggagac

SEQ ID NO: 39975 - DNA, 26 bp, Homo sapiens
caatccttaaaagactattggagact

SEQ ID NO: 39976 - DNA, 26 bp, Homo sapiens
aatccttaaaagactattggagactg

SEQ ID NO: 39977 - DNA, 26 bp, Homo sapiens
atccttaaaagactattggagactga

SEQ ID NO: 39978 - DNA, 26 bp, Homo sapiens
tccttaaaagactattggagactgaa

SEQ ID NO: 39979 - DNA, 26 bp, Homo sapiens
ccttaaaagactattggagactgaag

SEQ ID NO: 39980 - DNA, 26 bp, Homo sapiens
cttaaaagactattggagactgaagt

SEQ ID NO: 39981 - DNA, 26 bp, Homo sapiens
ttaaaagactattggagactgaagtt

SEQ ID NO: 39982 - DNA, 26 bp, Homo sapiens
taaaagactattggagactgaagttt

SEQ ID NO: 39983 - DNA, 26 bp, Homo sapiens
aaaagactattggagactgaagttta

SEQ ID NO: 39984 - DNA, 26 bp, Homo sapiens
aaagactattggagactgaagtttag

SEQ ID NO: 39985 - DNA, 26 bp, Homo sapiens
aagactattggagactgaagtttagg

SEQ ID NO: 39986 - DNA, 26 bp, Homo sapiens
agactattggagactgaagtttagga

SEQ ID NO: 39987 - DNA, 26 bp, Homo sapiens
gactattggagactgaagtttaggaa

SEQ ID NO: 39988 - DNA, 26 bp, Homo sapiens
actattggagactgaagtttaggaaa

SEQ ID NO: 39989 - DNA, 26 bp, Homo sapiens
ctattggagactgaagtttaggaaac

SEQ ID NO: 39990 - DNA, 26 bp, Homo sapiens
tattggagactgaagtttaggaaact

SEQ ID NO: 39991 - DNA, 26 bp, Homo sapiens
attggagactgaagtttaggaaactt

SEQ ID NO: 39992 - DNA, 26 bp, Homo sapiens
ttggagactgaagtttaggaaacttt

SEQ ID NO: 39993 - DNA, 26 bp, Homo sapiens
tggagactgaagtttaggaaacttta

SEQ ID NO: 39994 - DNA, 26 bp, Homo sapiens
ggagactgaagtttaggaaactttaa

SEQ ID NO: 39995 - DNA, 26 bp, Homo sapiens
gagactgaagtttaggaaactttaat

SEQ ID NO: 39996 - DNA, 26 bp, Homo sapiens
agactgaagtttaggaaactttaatt

SEQ ID NO: 39997 - DNA, 26 bp, Homo sapiens
gactgaagtttaggaaactttaatta

SEQ ID NO: 39998 - DNA, 26 bp, Homo sapiens
actgaagtttaggaaactttaattat

SEQ ID NO: 39999 - DNA, 26 bp, Homo sapiens
ctgaagtttaggaaactttaattata

SEQ ID NO: 40000 - DNA, 26 bp, Homo sapiens
tgaagtttaggaaactttaattataa

SEQ ID NO: 40001 - DNA, 26 bp, Homo sapiens
gaagtttaggaaactttaattataaa

SEQ ID NO: 40002 - DNA, 26 bp, Homo sapiens
aagtttaggaaactttaattataaaa

SEQ ID NO: 40003 - DNA, 26 bp, Homo sapiens
agtttaggaaactttaattataaaaa

SEQ ID NO: 40004 - DNA, 26 bp, Homo sapiens
gtttaggaaactttaattataaaaac

SEQ ID NO: 40005 - DNA, 26 bp, Homo sapiens
tttaggaaactttaattataaaaact

SEQ ID NO: 40006 - DNA, 26 bp, Homo sapiens
ttaggaaactttaattataaaaacta

SEQ ID NO: 40007 - DNA, 26 bp, Homo sapiens
taggaaactttaattataaaaactat

SEQ ID NO: 40008 - DNA, 26 bp, Homo sapiens
aggaaactttaattataaaaactatt

SEQ ID NO: 40009 - DNA, 26 bp, Homo sapiens
ggaaactttaattataaaaactatta

SEQ ID NO: 40010 - DNA, 26 bp, Homo sapiens
gaaactttaattataaaaactattaa

SEQ ID NO: 40011 - DNA, 26 bp, Homo sapiens
aaactttaattataaaaactattaag

SEQ ID NO: 40012 - DNA, 26 bp, Homo sapiens
aactttaattataaaaactattaagg

SEQ ID NO: 40013 - DNA, 26 bp, Homo sapiens
actttaattataaaaactattaagga

SEQ ID NO: 40014 - DNA, 26 bp, Homo sapiens
ctttaattataaaaactattaaggat

SEQ ID NO: 40015 - DNA, 26 bp, Homo sapiens
tttaattataaaaactattaaggata

SEQ ID NO: 40016 - DNA, 26 bp, Homo sapiens
ttaattataaaaactattaaggataa

SEQ ID NO: 40017 - DNA, 26 bp, Homo sapiens
taattataaaaactattaaggataat

SEQ ID NO: 40018 - DNA, 26 bp, Homo sapiens
aattataaaaactattaaggataatt

SEQ ID NO: 40019 - DNA, 26 bp, Homo sapiens
attataaaaactattaaggataattg

SEQ ID NO: 40020 - DNA, 26 bp, Homo sapiens
ttataaaaactattaaggataattgt

SEQ ID NO: 40021 - DNA, 26 bp, Homo sapiens
tataaaaactattaaggataattgtt

SEQ ID NO: 40022 - DNA, 26 bp, Homo sapiens
ataaaaactattaaggataattgttc

SEQ ID NO: 40023 - DNA, 26 bp, Homo sapiens
taaaaactattaaggataattgttct

SEQ ID NO: 40024 - DNA, 26 bp, Homo sapiens
aaaaactattaaggataattgttctg

SEQ ID NO: 40025 - DNA, 26 bp, Homo sapiens
aaaactattaaggataattgttctga

SEQ ID NO: 40026 - DNA, 26 bp, Homo sapiens
aaactattaaggataattgttctgat

SEQ ID NO: 40027 - DNA, 26 bp, Homo sapiens
aactattaaggataattgttctgata

SEQ ID NO: 40028 - DNA, 26 bp, Homo sapiens
actattaaggataattgttctgatat

SEQ ID NO: 40029 - DNA, 26 bp, Homo sapiens
ctattaaggataattgttctgatatc

SEQ ID NO: 40030 - DNA, 26 bp, Homo sapiens
tattaaggataattgttctgatatca

SEQ ID NO: 40031 - DNA, 26 bp, Homo sapiens
attaaggataattgttctgatatcac

SEQ ID NO: 40032 - DNA, 26 bp, Homo sapiens
ttaaggataattgttctgatatcacc

SEQ ID NO: 40033 - DNA, 26 bp, Homo sapiens
taaggataattgttctgatatcaccc

SEQ ID NO: 40034 - DNA, 26 bp, Homo sapiens
aaggataattgttctgatatcaccca

SEQ ID NO: 40035 - DNA, 26 bp, Homo sapiens
aggataattgttctgatatcacccaa

SEQ ID NO: 40036 - DNA, 26 bp, Homo sapiens
ggataattgttctgatatcacccaag

SEQ ID NO: 40037 - DNA, 26 bp, Homo sapiens
gataattgttctgatatcacccaagt

SEQ ID NO: 40038 - DNA, 26 bp, Homo sapiens
ataattgttctgatatcacccaagta

SEQ ID NO: 40039 - DNA, 26 bp, Homo sapiens
taattgttctgatatcacccaagtat

SEQ ID NO: 40040 - DNA, 26 bp, Homo sapiens
aattgttctgatatcacccaagtatt

SEQ ID NO: 40041 - DNA, 26 bp, Homo sapiens
attgttctgatatcacccaagtattt

SEQ ID NO: 40042 - DNA, 26 bp, Homo sapiens
ttgttctgatatcacccaagtatttt

SEQ ID NO: 40043 - DNA, 26 bp, Homo sapiens
tgttctgatatcacccaagtatttta

SEQ ID NO: 40044 - DNA, 26 bp, Homo sapiens
gttctgatatcacccaagtattttat

SEQ ID NO: 40045 - DNA, 26 bp, Homo sapiens
ttctgatatcacccaagtattttatg

SEQ ID NO: 40046 - DNA, 26 bp, Homo sapiens
tctgatatcacccaagtattttatgt

SEQ ID NO: 40047 - DNA, 26 bp, Homo sapiens
ctgatatcacccaagtattttatgtc

SEQ ID NO: 40048 - DNA, 26 bp, Homo sapiens
tgatatcacccaagtattttatgtca

SEQ ID NO: 40049 - DNA, 26 bp, Homo sapiens
gatatcacccaagtattttatgtcat

SEQ ID NO: 40050 - DNA, 26 bp, Homo sapiens
atatcacccaagtattttatgtcatc

SEQ ID NO: 40051 - DNA, 26 bp, Homo sapiens
tatcacccaagtattttatgtcatca

SEQ ID NO: 40052 - DNA, 26 bp, Homo sapiens
atcacccaagtattttatgtcatcac

SEQ ID NO: 40053 - DNA, 26 bp, Homo sapiens
tcacccaagtattttatgtcatcaca

SEQ ID NO: 40054 - DNA, 26 bp, Homo sapiens
cacccaagtattttatgtcatcacat

SEQ ID NO: 40055 - DNA, 26 bp, Homo sapiens
acccaagtattttatgtcatcacata

SEQ ID NO: 40056 - DNA, 26 bp, Homo sapiens
cccaagtattttatgtcatcacatag

SEQ ID NO: 40057 - DNA, 26 bp, Homo sapiens
ccaagtattttatgtcatcacatagg

SEQ ID NO: 40058 - DNA, 26 bp, Homo sapiens
caagtattttatgtcatcacataggt

SEQ ID NO: 40059 - DNA, 26 bp, Homo sapiens
aagtattttatgtcatcacataggtg

SEQ ID NO: 40060 - DNA, 26 bp, Homo sapiens
agtattttatgtcatcacataggtgt

SEQ ID NO: 40061 - DNA, 26 bp, Homo sapiens
gtattttatgtcatcacataggtgtt

SEQ ID NO: 40062 - DNA, 26 bp, Homo sapiens
tattttatgtcatcacataggtgttt

SEQ ID NO: 40063 - DNA, 26 bp, Homo sapiens
attttatgtcatcacataggtgtttt

SEQ ID NO: 40064 - DNA, 26 bp, Homo sapiens
ttttatgtcatcacataggtgttttt

SEQ ID NO: 40065 - DNA, 26 bp, Homo sapiens
tttatgtcatcacataggtgtttttg

SEQ ID NO: 40066 - DNA, 26 bp, Homo sapiens
ttatgtcatcacataggtgtttttgt

SEQ ID NO: 40067 - DNA, 26 bp, Homo sapiens
tatgtcatcacataggtgtttttgta

SEQ ID NO: 40068 - DNA, 26 bp, Homo sapiens
atgtcatcacataggtgtttttgtaa

SEQ ID NO: 40069 - DNA, 26 bp, Homo sapiens
tgtcatcacataggtgtttttgtaat

SEQ ID NO: 40070 - DNA, 26 bp, Homo sapiens
gtcatcacataggtgtttttgtaata

SEQ ID NO: 40071 - DNA, 26 bp, Homo sapiens
tcatcacataggtgtttttgtaataa

SEQ ID NO: 40072 - DNA, 26 bp, Homo sapiens
catcacataggtgtttttgtaataat

SEQ ID NO: 40073 - DNA, 26 bp, Homo sapiens
atcacataggtgtttttgtaataatg

SEQ ID NO: 40074 - DNA, 26 bp, Homo sapiens
tcacataggtgtttttgtaataatga

SEQ ID NO: 40075 - DNA, 26 bp, Homo sapiens
cacataggtgtttttgtaataatgaa

SEQ ID NO: 40076 - DNA, 26 bp, Homo sapiens
acataggtgtttttgtaataatgaag

SEQ ID NO: 40077 - DNA, 26 bp, Homo sapiens
cataggtgtttttgtaataatgaaga

SEQ ID NO: 40078 - DNA, 26 bp, Homo sapiens
ataggtgtttttgtaataatgaagaa

SEQ ID NO: 40079 - DNA, 26 bp, Homo sapiens
taggtgtttttgtaataatgaagaaa

SEQ ID NO: 40080 - DNA, 26 bp, Homo sapiens
aggtgtttttgtaataatgaagaaag

SEQ ID NO: 40081 - DNA, 26 bp, Homo sapiens
ggtgtttttgtaataatgaagaaagg

SEQ ID NO: 40082 - DNA, 26 bp, Homo sapiens
gtgtttttgtaataatgaagaaagga

SEQ ID NO: 40083 - DNA, 26 bp, Homo sapiens
tgtttttgtaataatgaagaaaggaa

SEQ ID NO: 40084 - DNA, 26 bp, Homo sapiens
gtttttgtaataatgaagaaaggaaa

SEQ ID NO: 40085 - DNA, 26 bp, Homo sapiens
tttttgtaataatgaagaaaggaaaa

SEQ ID NO: 40086 - DNA, 26 bp, Homo sapiens
ttttgtaataatgaagaaaggaaaat

SEQ ID NO: 40087 - DNA, 26 bp, Homo sapiens
tttgtaataatgaagaaaggaaaatg

SEQ ID NO: 40088 - DNA, 26 bp, Homo sapiens
ttgtaataatgaagaaaggaaaatgc

SEQ ID NO: 40089 - DNA, 26 bp, Homo sapiens
tgtaataatgaagaaaggaaaatgca

SEQ ID NO: 40090 - DNA, 26 bp, Homo sapiens
gtaataatgaagaaaggaaaatgcaa

SEQ ID NO: 40091 - DNA, 26 bp, Homo sapiens
taataatgaagaaaggaaaatgcaaa

SEQ ID NO: 40092 - DNA, 26 bp, Homo sapiens
aataatgaagaaaggaaaatgcaaag

SEQ ID NO: 40093 - DNA, 26 bp, Homo sapiens
ataatgaagaaaggaaaatgcaaagt

SEQ ID NO: 40094 - DNA, 26 bp, Homo sapiens
taatgaagaaaggaaaatgcaaagtt

SEQ ID NO: 40095 - DNA, 26 bp, Homo sapiens
aatgaagaaaggaaaatgcaaagttt

SEQ ID NO: 40096 - DNA, 26 bp, Homo sapiens
atgaagaaaggaaaatgcaaagtttt

SEQ ID NO: 40097 - DNA, 26 bp, Homo sapiens
tgaagaaaggaaaatgcaaagttttt

SEQ ID NO: 40098 - DNA, 26 bp, Homo sapiens
gaagaaaggaaaatgcaaagtttttc

SEQ ID NO: 40099 - DNA, 26 bp, Homo sapiens
aagaaaggaaaatgcaaagtttttca

SEQ ID NO: 40100 - DNA, 26 bp, Homo sapiens
agaaaggaaaatgcaaagtttttcac

SEQ ID NO: 40101 - DNA, 26 bp, Homo sapiens
gaaaggaaaatgcaaagtttttcaca

SEQ ID NO: 40102 - DNA, 26 bp, Homo sapiens
aaaggaaaatgcaaagtttttcacat

SEQ ID NO: 40103 - DNA, 26 bp, Homo sapiens
aaggaaaatgcaaagtttttcacatc

SEQ ID NO: 40104 - DNA, 26 bp, Homo sapiens
aggaaaatgcaaagtttttcacatcc

SEQ ID NO: 40105 - DNA, 26 bp, Homo sapiens
ggaaaatgcaaagtttttcacatcct

SEQ ID NO: 40106 - DNA, 26 bp, Homo sapiens
gaaaatgcaaagtttttcacatcctt

SEQ ID NO: 40107 - DNA, 26 bp, Homo sapiens
aaaatgcaaagtttttcacatccttt

SEQ ID NO: 40108 - DNA, 26 bp, Homo sapiens
aaatgcaaagtttttcacatcctttt

SEQ ID NO: 40109 - DNA, 26 bp, Homo sapiens
aatgcaaagtttttcacatccttttc

SEQ ID NO: 40110 - DNA, 26 bp, Homo sapiens
atgcaaagtttttcacatccttttct

SEQ ID NO: 40111 - DNA, 26 bp, Homo sapiens
tgcaaagtttttcacatccttttctg

SEQ ID NO: 40112 - DNA, 26 bp, Homo sapiens
gcaaagtttttcacatccttttctga

SEQ ID NO: 40113 - DNA, 26 bp, Homo sapiens
caaagtttttcacatccttttctgag

SEQ ID NO: 40114 - DNA, 26 bp, Homo sapiens
aaagtttttcacatccttttctgagc

SEQ ID NO: 40115 - DNA, 26 bp, Homo sapiens
aagtttttcacatccttttctgagct

SEQ ID NO: 40116 - DNA, 26 bp, Homo sapiens
agtttttcacatccttttctgagctc

SEQ ID NO: 40117 - DNA, 26 bp, Homo sapiens
gtttttcacatccttttctgagctcc

SEQ ID NO: 40118 - DNA, 26 bp, Homo sapiens
tttttcacatccttttctgagctcca

SEQ ID NO: 40119 - DNA, 26 bp, Homo sapiens
ttttcacatccttttctgagctccat

SEQ ID NO: 40120 - DNA, 26 bp, Homo sapiens
tttcacatccttttctgagctccata

SEQ ID NO: 40121 - DNA, 26 bp, Homo sapiens
ttcacatccttttctgagctccatat

SEQ ID NO: 40122 - DNA, 26 bp, Homo sapiens
tcacatccttttctgagctccatatt

SEQ ID NO: 40123 - DNA, 26 bp, Homo sapiens
cacatccttttctgagctccatattt

SEQ ID NO: 40124 - DNA, 26 bp, Homo sapiens
acatccttttctgagctccatatttt

SEQ ID NO: 40125 - DNA, 26 bp, Homo sapiens
catccttttctgagctccatattttt

SEQ ID NO: 40126 - DNA, 26 bp, Homo sapiens
atccttttctgagctccatatttttt

SEQ ID NO: 40127 - DNA, 26 bp, Homo sapiens
tccttttctgagctccatattttttt

SEQ ID NO: 40128 - DNA, 26 bp, Homo sapiens
ccttttctgagctccatatttttttt

SEQ ID NO: 40129 - DNA, 26 bp, Homo sapiens
cttttctgagctccatatttttttta

SEQ ID NO: 40130 - DNA, 26 bp, Homo sapiens
ttttctgagctccatattttttttaa

SEQ ID NO: 40131 - DNA, 26 bp, Homo sapiens
tttctgagctccatattttttttaaa

SEQ ID NO: 40132 - DNA, 26 bp, Homo sapiens
ttctgagctccatattttttttaaac

SEQ ID NO: 40133 - DNA, 26 bp, Homo sapiens
tctgagctccatattttttttaaact

SEQ ID NO: 40134 - DNA, 26 bp, Homo sapiens
ctgagctccatattttttttaaactg

SEQ ID NO: 40135 - DNA, 26 bp, Homo sapiens
tgagctccatattttttttaaactga

SEQ ID NO: 40136 - DNA, 26 bp, Homo sapiens
gagctccatattttttttaaactgaa

SEQ ID NO: 40137 - DNA, 26 bp, Homo sapiens
agctccatattttttttaaactgaat

SEQ ID NO: 40138 - DNA, 26 bp, Homo sapiens
gctccatattttttttaaactgaatt

SEQ ID NO: 40139 - DNA, 26 bp, Homo sapiens
ctccatattttttttaaactgaattt

SEQ ID NO: 40140 - DNA, 26 bp, Homo sapiens
tccatattttttttaaactgaattta

SEQ ID NO: 40141 - DNA, 26 bp, Homo sapiens
ccatattttttttaaactgaatttat

SEQ ID NO: 40142 - DNA, 26 bp, Homo sapiens
catattttttttaaactgaatttatt

SEQ ID NO: 40143 - DNA, 26 bp, Homo sapiens
atattttttttaaactgaatttattg

SEQ ID NO: 40144 - DNA, 26 bp, Homo sapiens
tattttttttaaactgaatttattgt

SEQ ID NO: 40145 - DNA, 26 bp, Homo sapiens
attttttttaaactgaatttattgtt

SEQ ID NO: 40146 - DNA, 26 bp, Homo sapiens
ttttttttaaactgaatttattgttt

SEQ ID NO: 40147 - DNA, 26 bp, Homo sapiens
tttttttaaactgaatttattgttta

SEQ ID NO: 40148 - DNA, 26 bp, Homo sapiens
ttttttaaactgaatttattgtttaa

SEQ ID NO: 40149 - DNA, 26 bp, Homo sapiens
tttttaaactgaatttattgtttaac

SEQ ID NO: 40150 - DNA, 26 bp, Homo sapiens
ttttaaactgaatttattgtttaaca

SEQ ID NO: 40151 - DNA, 26 bp, Homo sapiens
tttaaactgaatttattgtttaacat

SEQ ID NO: 40152 - DNA, 26 bp, Homo sapiens
ttaaactgaatttattgtttaacatc

SEQ ID NO: 40153 - DNA, 26 bp, Homo sapiens
taaactgaatttattgtttaacatca

SEQ ID NO: 40154 - DNA, 26 bp, Homo sapiens
aaactgaatttattgtttaacatcag

SEQ ID NO: 40155 - DNA, 26 bp, Homo sapiens
aactgaatttattgtttaacatcaga

SEQ ID NO: 40156 - DNA, 26 bp, Homo sapiens
actgaatttattgtttaacatcagat

SEQ ID NO: 40157 - DNA, 26 bp, Homo sapiens
ctgaatttattgtttaacatcagatc

SEQ ID NO: 40158 - DNA, 26 bp, Homo sapiens
tgaatttattgtttaacatcagatcc

SEQ ID NO: 40159 - DNA, 26 bp, Homo sapiens
gaatttattgtttaacatcagatccc

SEQ ID NO: 40160 - DNA, 26 bp, Homo sapiens
aatttattgtttaacatcagatccca

SEQ ID NO: 40161 - DNA, 26 bp, Homo sapiens
atttattgtttaacatcagatcccaa

SEQ ID NO: 40162 - DNA, 26 bp, Homo sapiens
tttattgtttaacatcagatcccaac

SEQ ID NO: 40163 - DNA, 26 bp, Homo sapiens
ttattgtttaacatcagatcccaact

SEQ ID NO: 40164 - DNA, 26 bp, Homo sapiens
tattgtttaacatcagatcccaactt

SEQ ID NO: 40165 - DNA, 26 bp, Homo sapiens
attgtttaacatcagatcccaactta

SEQ ID NO: 40166 - DNA, 26 bp, Homo sapiens
ttgtttaacatcagatcccaacttag

SEQ ID NO: 40167 - DNA, 26 bp, Homo sapiens
tgtttaacatcagatcccaacttaga

SEQ ID NO: 40168 - DNA, 26 bp, Homo sapiens
gtttaacatcagatcccaacttagat

SEQ ID NO: 40169 - DNA, 26 bp, Homo sapiens
tttaacatcagatcccaacttagatc

SEQ ID NO: 40170 - DNA, 26 bp, Homo sapiens
ttaacatcagatcccaacttagatcc

SEQ ID NO: 40171 - DNA, 26 bp, Homo sapiens
taacatcagatcccaacttagatcca

SEQ ID NO: 40172 - DNA, 26 bp, Homo sapiens
aacatcagatcccaacttagatccaa

SEQ ID NO: 40173 - DNA, 26 bp, Homo sapiens
acatcagatcccaacttagatccaaa

SEQ ID NO: 40174 - DNA, 26 bp, Homo sapiens
catcagatcccaacttagatccaaat

SEQ ID NO: 40175 - DNA, 26 bp, Homo sapiens
atcagatcccaacttagatccaaata

SEQ ID NO: 40176 - DNA, 26 bp, Homo sapiens
tcagatcccaacttagatccaaatag

SEQ ID NO: 40177 - DNA, 26 bp, Homo sapiens
cagatcccaacttagatccaaatagt

SEQ ID NO: 40178 - DNA, 26 bp, Homo sapiens
agatcccaacttagatccaaatagta

SEQ ID NO: 40179 - DNA, 26 bp, Homo sapiens
gatcccaacttagatccaaatagtag

SEQ ID NO: 40180 - DNA, 26 bp, Homo sapiens
atcccaacttagatccaaatagtagt

SEQ ID NO: 40181 - DNA, 26 bp, Homo sapiens
tcccaacttagatccaaatagtagtc

SEQ ID NO: 40182 - DNA, 26 bp, Homo sapiens
cccaacttagatccaaatagtagtca

SEQ ID NO: 40183 - DNA, 26 bp, Homo sapiens
ccaacttagatccaaatagtagtcag

SEQ ID NO: 40184 - DNA, 26 bp, Homo sapiens
caacttagatccaaatagtagtcagt

SEQ ID NO: 40185 - DNA, 26 bp, Homo sapiens
aacttagatccaaatagtagtcagtt

SEQ ID NO: 40186 - DNA, 26 bp, Homo sapiens
acttagatccaaatagtagtcagttg

SEQ ID NO: 40187 - DNA, 26 bp, Homo sapiens
cttagatccaaatagtagtcagttgt

SEQ ID NO: 40188 - DNA, 26 bp, Homo sapiens
ttagatccaaatagtagtcagttgtt

SEQ ID NO: 40189 - DNA, 26 bp, Homo sapiens
tagatccaaatagtagtcagttgttt

SEQ ID NO: 40190 - DNA, 26 bp, Homo sapiens
agatccaaatagtagtcagttgtttc

SEQ ID NO: 40191 - DNA, 26 bp, Homo sapiens
gatccaaatagtagtcagttgtttcc

SEQ ID NO: 40192 - DNA, 26 bp, Homo sapiens
atccaaatagtagtcagttgtttcct

SEQ ID NO: 40193 - DNA, 26 bp, Homo sapiens
tccaaatagtagtcagttgtttcctt

SEQ ID NO: 40194 - DNA, 26 bp, Homo sapiens
ccaaatagtagtcagttgtttccttg

SEQ ID NO: 40195 - DNA, 26 bp, Homo sapiens
caaatagtagtcagttgtttccttgt

SEQ ID NO: 40196 - DNA, 26 bp, Homo sapiens
aaatagtagtcagttgtttccttgtt

SEQ ID NO: 40197 - DNA, 26 bp, Homo sapiens
aatagtagtcagttgtttccttgttt

SEQ ID NO: 40198 - DNA, 26 bp, Homo sapiens
atagtagtcagttgtttccttgtttc

SEQ ID NO: 40199 - DNA, 26 bp, Homo sapiens
tagtagtcagttgtttccttgtttca

SEQ ID NO: 40200 - DNA, 26 bp, Homo sapiens
agtagtcagttgtttccttgtttcat

SEQ ID NO: 40201 - DNA, 26 bp, Homo sapiens
gtagtcagttgtttccttgtttcatg

SEQ ID NO: 40202 - DNA, 26 bp, Homo sapiens
tagtcagttgtttccttgtttcatgg

SEQ ID NO: 40203 - DNA, 26 bp, Homo sapiens
agtcagttgtttccttgtttcatgga

SEQ ID NO: 40204 - DNA, 26 bp, Homo sapiens
gtcagttgtttccttgtttcatggag

SEQ ID NO: 40205 - DNA, 26 bp, Homo sapiens
tcagttgtttccttgtttcatggagc

SEQ ID NO: 40206 - DNA, 26 bp, Homo sapiens
cagttgtttccttgtttcatggagca

SEQ ID NO: 40207 - DNA, 26 bp, Homo sapiens
agttgtttccttgtttcatggagcat

SEQ ID NO: 40208 - DNA, 26 bp, Homo sapiens
gttgtttccttgtttcatggagcatg

SEQ ID NO: 40209 - DNA, 26 bp, Homo sapiens
ttgtttccttgtttcatggagcatgt

SEQ ID NO: 40210 - DNA, 26 bp, Homo sapiens
tgtttccttgtttcatggagcatgtc

SEQ ID NO: 40211 - DNA, 26 bp, Homo sapiens
gtttccttgtttcatggagcatgtct

SEQ ID NO: 40212 - DNA, 26 bp, Homo sapiens
tttccttgtttcatggagcatgtctc

SEQ ID NO: 40213 - DNA, 26 bp, Homo sapiens
ttccttgtttcatggagcatgtctct

SEQ ID NO: 40214 - DNA, 26 bp, Homo sapiens
tccttgtttcatggagcatgtctctg

SEQ ID NO: 40215 - DNA, 26 bp, Homo sapiens
ccttgtttcatggagcatgtctctgt

SEQ ID NO: 40216 - DNA, 26 bp, Homo sapiens
cttgtttcatggagcatgtctctgtc

SEQ ID NO: 40217 - DNA, 26 bp, Homo sapiens
ttgtttcatggagcatgtctctgtct

SEQ ID NO: 40218 - DNA, 26 bp, Homo sapiens
tgtttcatggagcatgtctctgtcta

SEQ ID NO: 40219 - DNA, 26 bp, Homo sapiens
gtttcatggagcatgtctctgtctac

SEQ ID NO: 40220 - DNA, 26 bp, Homo sapiens
tttcatggagcatgtctctgtctaca

SEQ ID NO: 40221 - DNA, 26 bp, Homo sapiens
ttcatggagcatgtctctgtctacaa

SEQ ID NO: 40222 - DNA, 26 bp, Homo sapiens
tcatggagcatgtctctgtctacaat

SEQ ID NO: 40223 - DNA, 26 bp, Homo sapiens
catggagcatgtctctgtctacaatt

SEQ ID NO: 40224 - DNA, 26 bp, Homo sapiens
atggagcatgtctctgtctacaattc

SEQ ID NO: 40225 - DNA, 26 bp, Homo sapiens
tggagcatgtctctgtctacaattcc

SEQ ID NO: 40226 - DNA, 26 bp, Homo sapiens
ggagcatgtctctgtctacaattcca

SEQ ID NO: 40227 - DNA, 26 bp, Homo sapiens
gagcatgtctctgtctacaattccat

SEQ ID NO: 40228 - DNA, 26 bp, Homo sapiens
agcatgtctctgtctacaattccatc

SEQ ID NO: 40229 - DNA, 26 bp, Homo sapiens
gcatgtctctgtctacaattccatcc

SEQ ID NO: 40230 - DNA, 26 bp, Homo sapiens
catgtctctgtctacaattccatcct

SEQ ID NO: 40231 - DNA, 26 bp, Homo sapiens
atgtctctgtctacaattccatccta

SEQ ID NO: 40232 - DNA, 26 bp, Homo sapiens
tgtctctgtctacaattccatcctat

SEQ ID NO: 40233 - DNA, 26 bp, Homo sapiens
gtctctgtctacaattccatcctatt

SEQ ID NO: 40234 - DNA, 26 bp, Homo sapiens
tctctgtctacaattccatcctatta

SEQ ID NO: 40235 - DNA, 26 bp, Homo sapiens
ctctgtctacaattccatcctattat

SEQ ID NO: 40236 - DNA, 26 bp, Homo sapiens
tctgtctacaattccatcctattatg

SEQ ID NO: 40237 - DNA, 26 bp, Homo sapiens
ctgtctacaattccatcctattatgt

SEQ ID NO: 40238 - DNA, 26 bp, Homo sapiens
tgtctacaattccatcctattatgtc

SEQ ID NO: 40239 - DNA, 26 bp, Homo sapiens
gtctacaattccatcctattatgtca

SEQ ID NO: 40240 - DNA, 26 bp, Homo sapiens
tctacaattccatcctattatgtcaa

SEQ ID NO: 40241 - DNA, 26 bp, Homo sapiens
ctacaattccatcctattatgtcaat

SEQ ID NO: 40242 - DNA, 26 bp, Homo sapiens
tacaattccatcctattatgtcaatc

SEQ ID NO: 40243 - DNA, 26 bp, Homo sapiens
acaattccatcctattatgtcaatca

SEQ ID NO: 40244 - DNA, 26 bp, Homo sapiens
caattccatcctattatgtcaatcag

SEQ ID NO: 40245 - DNA, 26 bp, Homo sapiens
aattccatcctattatgtcaatcagt

SEQ ID NO: 40246 - DNA, 26 bp, Homo sapiens
attccatcctattatgtcaatcagtg

SEQ ID NO: 40247 - DNA, 26 bp, Homo sapiens
ttccatcctattatgtcaatcagtgg

SEQ ID NO: 40248 - DNA, 26 bp, Homo sapiens
tccatcctattatgtcaatcagtgga

SEQ ID NO: 40249 - DNA, 26 bp, Homo sapiens
ccatcctattatgtcaatcagtggac

SEQ ID NO: 40250 - DNA, 26 bp, Homo sapiens
catcctattatgtcaatcagtggact

SEQ ID NO: 40251 - DNA, 26 bp, Homo sapiens
atcctattatgtcaatcagtggactt

SEQ ID NO: 40252 - DNA, 26 bp, Homo sapiens
tcctattatgtcaatcagtggacttg

SEQ ID NO: 40253 - DNA, 26 bp, Homo sapiens
cctattatgtcaatcagtggacttgg

SEQ ID NO: 40254 - DNA, 26 bp, Homo sapiens
ctattatgtcaatcagtggacttggc

SEQ ID NO: 40255 - DNA, 26 bp, Homo sapiens
tattatgtcaatcagtggacttggct

SEQ ID NO: 40256 - DNA, 26 bp, Homo sapiens
attatgtcaatcagtggacttggctc

SEQ ID NO: 40257 - DNA, 26 bp, Homo sapiens
ttatgtcaatcagtggacttggctct

SEQ ID NO: 40258 - DNA, 26 bp, Homo sapiens
tatgtcaatcagtggacttggctctt

SEQ ID NO: 40259 - DNA, 26 bp, Homo sapiens
atgtcaatcagtggacttggctctta

SEQ ID NO: 40260 - DNA, 26 bp, Homo sapiens
tgtcaatcagtggacttggctcttaa

SEQ ID NO: 40261 - DNA, 26 bp, Homo sapiens
gtcaatcagtggacttggctcttaag

SEQ ID NO: 40262 - DNA, 26 bp, Homo sapiens
tcaatcagtggacttggctcttaagc

SEQ ID NO: 40263 - DNA, 26 bp, Homo sapiens
caatcagtggacttggctcttaagct

SEQ ID NO: 40264 - DNA, 26 bp, Homo sapiens
aatcagtggacttggctcttaagctc

SEQ ID NO: 40265 - DNA, 26 bp, Homo sapiens
atcagtggacttggctcttaagctcc

SEQ ID NO: 40266 - DNA, 26 bp, Homo sapiens
tcagtggacttggctcttaagctcca

SEQ ID NO: 40267 - DNA, 26 bp, Homo sapiens
cagtggacttggctcttaagctccac

SEQ ID NO: 40268 - DNA, 26 bp, Homo sapiens
agtggacttggctcttaagctccacc

SEQ ID NO: 40269 - DNA, 26 bp, Homo sapiens
gtggacttggctcttaagctccaccg

SEQ ID NO: 40270 - DNA, 26 bp, Homo sapiens
tggacttggctcttaagctccaccgc

SEQ ID NO: 40271 - DNA, 26 bp, Homo sapiens
ggacttggctcttaagctccaccgct

SEQ ID NO: 40272 - DNA, 26 bp, Homo sapiens
gacttggctcttaagctccaccgctg

SEQ ID NO: 40273 - DNA, 26 bp, Homo sapiens
acttggctcttaagctccaccgctgc

SEQ ID NO: 40274 - DNA, 26 bp, Homo sapiens
cttggctcttaagctccaccgctgct

SEQ ID NO: 40275 - DNA, 26 bp, Homo sapiens
ttggctcttaagctccaccgctgctt

SEQ ID NO: 40276 - DNA, 26 bp, Homo sapiens
tggctcttaagctccaccgctgcttt

SEQ ID NO: 40277 - DNA, 26 bp, Homo sapiens
ggctcttaagctccaccgctgctttt

SEQ ID NO: 40278 - DNA, 26 bp, Homo sapiens
gctcttaagctccaccgctgcttttc

SEQ ID NO: 40279 - DNA, 26 bp, Homo sapiens
ctcttaagctccaccgctgcttttct

SEQ ID NO: 40280 - DNA, 26 bp, Homo sapiens
tcttaagctccaccgctgcttttctt

SEQ ID NO: 40281 - DNA, 26 bp, Homo sapiens
cttaagctccaccgctgcttttcttt

SEQ ID NO: 40282 - DNA, 26 bp, Homo sapiens
ttaagctccaccgctgcttttctttc

SEQ ID NO: 40283 - DNA, 26 bp, Homo sapiens
taagctccaccgctgcttttctttca

SEQ ID NO: 40284 - DNA, 26 bp, Homo sapiens
aagctccaccgctgcttttctttcag

SEQ ID NO: 40285 - DNA, 26 bp, Homo sapiens
agctccaccgctgcttttctttcaga

SEQ ID NO: 40286 - DNA, 26 bp, Homo sapiens
gctccaccgctgcttttctttcagaa

SEQ ID NO: 40287 - DNA, 26 bp, Homo sapiens
ctccaccgctgcttttctttcagaaa

SEQ ID NO: 40288 - DNA, 26 bp, Homo sapiens
tccaccgctgcttttctttcagaaac

SEQ ID NO: 40289 - DNA, 26 bp, Homo sapiens
ccaccgctgcttttctttcagaaaca

SEQ ID NO: 40290 - DNA, 26 bp, Homo sapiens
caccgctgcttttctttcagaaacac

SEQ ID NO: 40291 - DNA, 26 bp, Homo sapiens
accgctgcttttctttcagaaacacc

SEQ ID NO: 40292 - DNA, 26 bp, Homo sapiens
ccgctgcttttctttcagaaacacct

SEQ ID NO: 40293 - DNA, 26 bp, Homo sapiens
cgctgcttttctttcagaaacacctg

SEQ ID NO: 40294 - DNA, 26 bp, Homo sapiens
gctgcttttctttcagaaacacctgg

SEQ ID NO: 40295 - DNA, 26 bp, Homo sapiens
ctgcttttctttcagaaacacctggg

SEQ ID NO: 40296 - DNA, 26 bp, Homo sapiens
tgcttttctttcagaaacacctggga

SEQ ID NO: 40297 - DNA, 26 bp, Homo sapiens
gcttttctttcagaaacacctgggaa

SEQ ID NO: 40298 - DNA, 26 bp, Homo sapiens
cttttctttcagaaacacctgggaag

SEQ ID NO: 40299 - DNA, 26 bp, Homo sapiens
ttttctttcagaaacacctgggaaga

SEQ ID NO: 40300 - DNA, 26 bp, Homo sapiens
tttctttcagaaacacctgggaagaa

SEQ ID NO: 40301 - DNA, 26 bp, Homo sapiens
ttctttcagaaacacctgggaagaag

SEQ ID NO: 40302 - DNA, 26 bp, Homo sapiens
tctttcagaaacacctgggaagaagc

SEQ ID NO: 40303 - DNA, 26 bp, Homo sapiens
ctttcagaaacacctgggaagaagca

SEQ ID NO: 40304 - DNA, 26 bp, Homo sapiens
tttcagaaacacctgggaagaagcat

SEQ ID NO: 40305 - DNA, 26 bp, Homo sapiens
ttcagaaacacctgggaagaagcatc

SEQ ID NO: 40306 - DNA, 26 bp, Homo sapiens
tcagaaacacctgggaagaagcatca

SEQ ID NO: 40307 - DNA, 26 bp, Homo sapiens
cagaaacacctgggaagaagcatcat

SEQ ID NO: 40308 - DNA, 26 bp, Homo sapiens
agaaacacctgggaagaagcatcata

SEQ ID NO: 40309 - DNA, 26 bp, Homo sapiens
gaaacacctgggaagaagcatcatat

SEQ ID NO: 40310 - DNA, 26 bp, Homo sapiens
aaacacctgggaagaagcatcatatt

SEQ ID NO: 40311 - DNA, 26 bp, Homo sapiens
aacacctgggaagaagcatcatatta

SEQ ID NO: 40312 - DNA, 26 bp, Homo sapiens
acacctgggaagaagcatcatattac

SEQ ID NO: 40313 - DNA, 26 bp, Homo sapiens
cacctgggaagaagcatcatattacc

SEQ ID NO: 40314 - DNA, 26 bp, Homo sapiens
acctgggaagaagcatcatattacct

SEQ ID NO: 40315 - DNA, 26 bp, Homo sapiens
cctgggaagaagcatcatattaccta

SEQ ID NO: 40316 - DNA, 26 bp, Homo sapiens
ctgggaagaagcatcatattacctat

SEQ ID NO: 40317 - DNA, 26 bp, Homo sapiens
tgggaagaagcatcatattacctatc

SEQ ID NO: 40318 - DNA, 26 bp, Homo sapiens
gggaagaagcatcatattacctatct

SEQ ID NO: 40319 - DNA, 26 bp, Homo sapiens
ggaagaagcatcatattacctatctt

SEQ ID NO: 40320 - DNA, 26 bp, Homo sapiens
gaagaagcatcatattacctatcttg

SEQ ID NO: 40321 - DNA, 26 bp, Homo sapiens
aagaagcatcatattacctatcttgg

SEQ ID NO: 40322 - DNA, 26 bp, Homo sapiens
agaagcatcatattacctatcttggt

SEQ ID NO: 40323 - DNA, 26 bp, Homo sapiens
gaagcatcatattacctatcttggtt

SEQ ID NO: 40324 - DNA, 26 bp, Homo sapiens
aagcatcatattacctatcttggttt

SEQ ID NO: 40325 - DNA, 26 bp, Homo sapiens
agcatcatattacctatcttggttta

SEQ ID NO: 40326 - DNA, 26 bp, Homo sapiens
gcatcatattacctatcttggtttac

SEQ ID NO: 40327 - DNA, 26 bp, Homo sapiens
catcatattacctatcttggtttacc

SEQ ID NO: 40328 - DNA, 26 bp, Homo sapiens
atcatattacctatcttggtttaccg

SEQ ID NO: 40329 - DNA, 26 bp, Homo sapiens
tcatattacctatcttggtttaccgt

SEQ ID NO: 40330 - DNA, 26 bp, Homo sapiens
catattacctatcttggtttaccgta

SEQ ID NO: 40331 - DNA, 26 bp, Homo sapiens
atattacctatcttggtttaccgtaa

SEQ ID NO: 40332 - DNA, 26 bp, Homo sapiens
tattacctatcttggtttaccgtaaa

SEQ ID NO: 40333 - DNA, 26 bp, Homo sapiens
attacctatcttggtttaccgtaaaa

SEQ ID NO: 40334 - DNA, 26 bp, Homo sapiens
ttacctatcttggtttaccgtaaaag

SEQ ID NO: 40335 - DNA, 26 bp, Homo sapiens
tacctatcttggtttaccgtaaaagc

SEQ ID NO: 40336 - DNA, 26 bp, Homo sapiens
acctatcttggtttaccgtaaaagca

SEQ ID NO: 40337 - DNA, 26 bp, Homo sapiens
cctatcttggtttaccgtaaaagcaa

SEQ ID NO: 40338 - DNA, 26 bp, Homo sapiens
ctatcttggtttaccgtaaaagcaat

SEQ ID NO: 40339 - DNA, 26 bp, Homo sapiens
tatcttggtttaccgtaaaagcaatg

SEQ ID NO: 40340 - DNA, 26 bp, Homo sapiens
atcttggtttaccgtaaaagcaatgt

SEQ ID NO: 40341 - DNA, 26 bp, Homo sapiens
tcttggtttaccgtaaaagcaatgtc

SEQ ID NO: 40342 - DNA, 26 bp, Homo sapiens
cttggtttaccgtaaaagcaatgtca

SEQ ID NO: 40343 - DNA, 26 bp, Homo sapiens
ttggtttaccgtaaaagcaatgtcac

SEQ ID NO: 40344 - DNA, 26 bp, Homo sapiens
tggtttaccgtaaaagcaatgtcacc

SEQ ID NO: 40345 - DNA, 26 bp, Homo sapiens
ggtttaccgtaaaagcaatgtcacca

SEQ ID NO: 40346 - DNA, 26 bp, Homo sapiens
gtttaccgtaaaagcaatgtcaccat

SEQ ID NO: 40347 - DNA, 26 bp, Homo sapiens
tttaccgtaaaagcaatgtcaccatg

SEQ ID NO: 40348 - DNA, 26 bp, Homo sapiens
ttaccgtaaaagcaatgtcaccatgg

SEQ ID NO: 40349 - DNA, 26 bp, Homo sapiens
taccgtaaaagcaatgtcaccatggc

SEQ ID NO: 40350 - DNA, 26 bp, Homo sapiens
accgtaaaagcaatgtcaccatggca

SEQ ID NO: 40351 - DNA, 26 bp, Homo sapiens
ccgtaaaagcaatgtcaccatggcat

SEQ ID NO: 40352 - DNA, 26 bp, Homo sapiens
cgtaaaagcaatgtcaccatggcatg

SEQ ID NO: 40353 - DNA, 26 bp, Homo sapiens
gtaaaagcaatgtcaccatggcatga

SEQ ID NO: 40354 - DNA, 26 bp, Homo sapiens
taaaagcaatgtcaccatggcatgac

SEQ ID NO: 40355 - DNA, 26 bp, Homo sapiens
aaaagcaatgtcaccatggcatgact

SEQ ID NO: 40356 - DNA, 26 bp, Homo sapiens
aaagcaatgtcaccatggcatgacta

SEQ ID NO: 40357 - DNA, 26 bp, Homo sapiens
aagcaatgtcaccatggcatgactat

SEQ ID NO: 40358 - DNA, 26 bp, Homo sapiens
agcaatgtcaccatggcatgactatt

SEQ ID NO: 40359 - DNA, 26 bp, Homo sapiens
gcaatgtcaccatggcatgactatta

SEQ ID NO: 40360 - DNA, 26 bp, Homo sapiens
caatgtcaccatggcatgactattac

SEQ ID NO: 40361 - DNA, 26 bp, Homo sapiens
aatgtcaccatggcatgactattact

SEQ ID NO: 40362 - DNA, 26 bp, Homo sapiens
atgtcaccatggcatgactattactg

SEQ ID NO: 40363 - DNA, 26 bp, Homo sapiens
tgtcaccatggcatgactattactgt

SEQ ID NO: 40364 - DNA, 26 bp, Homo sapiens
gtcaccatggcatgactattactgtg

SEQ ID NO: 40365 - DNA, 26 bp, Homo sapiens
tcaccatggcatgactattactgtgg

SEQ ID NO: 40366 - DNA, 26 bp, Homo sapiens
caccatggcatgactattactgtggt

SEQ ID NO: 40367 - DNA, 26 bp, Homo sapiens
accatggcatgactattactgtggtt

SEQ ID NO: 40368 - DNA, 26 bp, Homo sapiens
ccatggcatgactattactgtggtta

SEQ ID NO: 40369 - DNA, 26 bp, Homo sapiens
catggcatgactattactgtggttag

SEQ ID NO: 40370 - DNA, 26 bp, Homo sapiens
atggcatgactattactgtggttaga

SEQ ID NO: 40371 - DNA, 26 bp, Homo sapiens
tggcatgactattactgtggttagag

SEQ ID NO: 40372 - DNA, 26 bp, Homo sapiens
ggcatgactattactgtggttagagc

SEQ ID NO: 40373 - DNA, 26 bp, Homo sapiens
gcatgactattactgtggttagagca

SEQ ID NO: 40374 - DNA, 26 bp, Homo sapiens
catgactattactgtggttagagcat

SEQ ID NO: 40375 - DNA, 26 bp, Homo sapiens
atgactattactgtggttagagcatg

SEQ ID NO: 40376 - DNA, 26 bp, Homo sapiens
tgactattactgtggttagagcatga

SEQ ID NO: 40377 - DNA, 26 bp, Homo sapiens
gactattactgtggttagagcatgat

SEQ ID NO: 40378 - DNA, 26 bp, Homo sapiens
actattactgtggttagagcatgatt

SEQ ID NO: 40379 - DNA, 26 bp, Homo sapiens
ctattactgtggttagagcatgattg

SEQ ID NO: 40380 - DNA, 26 bp, Homo sapiens
tattactgtggttagagcatgattgt

SEQ ID NO: 40381 - DNA, 26 bp, Homo sapiens
attactgtggttagagcatgattgtt

SEQ ID NO: 40382 - DNA, 26 bp, Homo sapiens
ttactgtggttagagcatgattgttt

SEQ ID NO: 40383 - DNA, 26 bp, Homo sapiens
tactgtggttagagcatgattgtttg

SEQ ID NO: 40384 - DNA, 26 bp, Homo sapiens
actgtggttagagcatgattgtttgt

SEQ ID NO: 40385 - DNA, 26 bp, Homo sapiens
ctgtggttagagcatgattgtttgta

SEQ ID NO: 40386 - DNA, 26 bp, Homo sapiens
tgtggttagagcatgattgtttgtag

SEQ ID NO: 40387 - DNA, 26 bp, Homo sapiens
gtggttagagcatgattgtttgtagg

SEQ ID NO: 40388 - DNA, 26 bp, Homo sapiens
tggttagagcatgattgtttgtaggt

SEQ ID NO: 40389 - DNA, 26 bp, Homo sapiens
ggttagagcatgattgtttgtaggta

SEQ ID NO: 40390 - DNA, 26 bp, Homo sapiens
gttagagcatgattgtttgtaggtac

SEQ ID NO: 40391 - DNA, 26 bp, Homo sapiens
ttagagcatgattgtttgtaggtaca

SEQ ID NO: 40392 - DNA, 26 bp, Homo sapiens
tagagcatgattgtttgtaggtacat

SEQ ID NO: 40393 - DNA, 26 bp, Homo sapiens
agagcatgattgtttgtaggtacatg

SEQ ID NO: 40394 - DNA, 26 bp, Homo sapiens
gagcatgattgtttgtaggtacatgc

SEQ ID NO: 40395 - DNA, 26 bp, Homo sapiens
agcatgattgtttgtaggtacatgca

SEQ ID NO: 40396 - DNA, 26 bp, Homo sapiens
gcatgattgtttgtaggtacatgcag

SEQ ID NO: 40397 - DNA, 26 bp, Homo sapiens
catgattgtttgtaggtacatgcaga

SEQ ID NO: 40398 - DNA, 26 bp, Homo sapiens
atgattgtttgtaggtacatgcagaa

SEQ ID NO: 40399 - DNA, 26 bp, Homo sapiens
tgattgtttgtaggtacatgcagaat

SEQ ID NO: 40400 - DNA, 26 bp, Homo sapiens
gattgtttgtaggtacatgcagaatc

SEQ ID NO: 40401 - DNA, 26 bp, Homo sapiens
attgtttgtaggtacatgcagaatcc

SEQ ID NO: 40402 - DNA, 26 bp, Homo sapiens
ttgtttgtaggtacatgcagaatccc

SEQ ID NO: 40403 - DNA, 26 bp, Homo sapiens
tgtttgtaggtacatgcagaatccct

SEQ ID NO: 40404 - DNA, 26 bp, Homo sapiens
gtttgtaggtacatgcagaatccctt

SEQ ID NO: 40405 - DNA, 26 bp, Homo sapiens
tttgtaggtacatgcagaatcccttc

SEQ ID NO: 40406 - DNA, 26 bp, Homo sapiens
ttgtaggtacatgcagaatcccttct

SEQ ID NO: 40407 - DNA, 26 bp, Homo sapiens
tgtaggtacatgcagaatcccttctg

SEQ ID NO: 40408 - DNA, 26 bp, Homo sapiens
gtaggtacatgcagaatcccttctgg

SEQ ID NO: 40409 - DNA, 26 bp, Homo sapiens
taggtacatgcagaatcccttctggg

SEQ ID NO: 40410 - DNA, 26 bp, Homo sapiens
aggtacatgcagaatcccttctggga

SEQ ID NO: 40411 - DNA, 26 bp, Homo sapiens
ggtacatgcagaatcccttctgggaa

SEQ ID NO: 40412 - DNA, 26 bp, Homo sapiens
gtacatgcagaatcccttctgggaaa

SEQ ID NO: 40413 - DNA, 26 bp, Homo sapiens
tacatgcagaatcccttctgggaaaa

SEQ ID NO: 40414 - DNA, 26 bp, Homo sapiens
acatgcagaatcccttctgggaaaag

SEQ ID NO: 40415 - DNA, 26 bp, Homo sapiens
catgcagaatcccttctgggaaaagg

SEQ ID NO: 40416 - DNA, 26 bp, Homo sapiens
atgcagaatcccttctgggaaaagga

SEQ ID NO: 40417 - DNA, 26 bp, Homo sapiens
tgcagaatcccttctgggaaaaggaa

SEQ ID NO: 40418 - DNA, 26 bp, Homo sapiens
gcagaatcccttctgggaaaaggaat

SEQ ID NO: 40419 - DNA, 26 bp, Homo sapiens
cagaatcccttctgggaaaaggaatt

SEQ ID NO: 40420 - DNA, 26 bp, Homo sapiens
agaatcccttctgggaaaaggaattt

SEQ ID NO: 40421 - DNA, 26 bp, Homo sapiens
gaatcccttctgggaaaaggaatttc

SEQ ID NO: 40422 - DNA, 26 bp, Homo sapiens
aatcccttctgggaaaaggaatttct

SEQ ID NO: 40423 - DNA, 26 bp, Homo sapiens
atcccttctgggaaaaggaatttctt

SEQ ID NO: 40424 - DNA, 26 bp, Homo sapiens
tcccttctgggaaaaggaatttcttt

SEQ ID NO: 40425 - DNA, 26 bp, Homo sapiens
cccttctgggaaaaggaatttctttt

SEQ ID NO: 40426 - DNA, 26 bp, Homo sapiens
ccttctgggaaaaggaatttcttttt

SEQ ID NO: 40427 - DNA, 26 bp, Homo sapiens
cttctgggaaaaggaatttcttttta

SEQ ID NO: 40428 - DNA, 26 bp, Homo sapiens
ttctgggaaaaggaatttctttttaa

SEQ ID NO: 40429 - DNA, 26 bp, Homo sapiens
tctgggaaaaggaatttctttttaag

SEQ ID NO: 40430 - DNA, 26 bp, Homo sapiens
ctgggaaaaggaatttctttttaagt

SEQ ID NO: 40431 - DNA, 26 bp, Homo sapiens
tgggaaaaggaatttctttttaagtt

SEQ ID NO: 40432 - DNA, 26 bp, Homo sapiens
gggaaaaggaatttctttttaagttc

SEQ ID NO: 40433 - DNA, 26 bp, Homo sapiens
ggaaaaggaatttctttttaagttca

SEQ ID NO: 40434 - DNA, 26 bp, Homo sapiens
gaaaaggaatttctttttaagttcat

SEQ ID NO: 40435 - DNA, 26 bp, Homo sapiens
aaaaggaatttctttttaagttcatc

SEQ ID NO: 40436 - DNA, 26 bp, Homo sapiens
aaaggaatttctttttaagttcatca

SEQ ID NO: 40437 - DNA, 26 bp, Homo sapiens
aaggaatttctttttaagttcatcat

SEQ ID NO: 40438 - DNA, 26 bp, Homo sapiens
aggaatttctttttaagttcatcatt

SEQ ID NO: 40439 - DNA, 26 bp, Homo sapiens
ggaatttctttttaagttcatcatta

SEQ ID NO: 40440 - DNA, 26 bp, Homo sapiens
gaatttctttttaagttcatcattat

SEQ ID NO: 40441 - DNA, 26 bp, Homo sapiens
aatttctttttaagttcatcattatg

SEQ ID NO: 40442 - DNA, 26 bp, Homo sapiens
atttctttttaagttcatcattatgt

SEQ ID NO: 40443 - DNA, 26 bp, Homo sapiens
tttctttttaagttcatcattatgtt

SEQ ID NO: 40444 - DNA, 26 bp, Homo sapiens
ttctttttaagttcatcattatgttc

SEQ ID NO: 40445 - DNA, 26 bp, Homo sapiens
tctttttaagttcatcattatgttct

SEQ ID NO: 40446 - DNA, 26 bp, Homo sapiens
ctttttaagttcatcattatgttctc

SEQ ID NO: 40447 - DNA, 26 bp, Homo sapiens
tttttaagttcatcattatgttctct

SEQ ID NO: 40448 - DNA, 26 bp, Homo sapiens
ttttaagttcatcattatgttctctc

SEQ ID NO: 40449 - DNA, 26 bp, Homo sapiens
tttaagttcatcattatgttctctct

SEQ ID NO: 40450 - DNA, 26 bp, Homo sapiens
ttaagttcatcattatgttctctctc

SEQ ID NO: 40451 - DNA, 26 bp, Homo sapiens
taagttcatcattatgttctctctca

SEQ ID NO: 40452 - DNA, 26 bp, Homo sapiens
aagttcatcattatgttctctctcac

SEQ ID NO: 40453 - DNA, 26 bp, Homo sapiens
agttcatcattatgttctctctcacc

SEQ ID NO: 40454 - DNA, 26 bp, Homo sapiens
gttcatcattatgttctctctcaccc

SEQ ID NO: 40455 - DNA, 26 bp, Homo sapiens
ttcatcattatgttctctctcaccct

SEQ ID NO: 40456 - DNA, 26 bp, Homo sapiens
tcatcattatgttctctctcaccctt

SEQ ID NO: 40457 - DNA, 26 bp, Homo sapiens
catcattatgttctctctcaccctta

SEQ ID NO: 40458 - DNA, 26 bp, Homo sapiens
atcattatgttctctctcacccttag

SEQ ID NO: 40459 - DNA, 26 bp, Homo sapiens
tcattatgttctctctcacccttaga

SEQ ID NO: 40460 - DNA, 26 bp, Homo sapiens
cattatgttctctctcacccttagag

SEQ ID NO: 40461 - DNA, 26 bp, Homo sapiens
attatgttctctctcacccttagaga

SEQ ID NO: 40462 - DNA, 26 bp, Homo sapiens
ttatgttctctctcacccttagagaa

SEQ ID NO: 40463 - DNA, 26 bp, Homo sapiens
tatgttctctctcacccttagagaaa

SEQ ID NO: 40464 - DNA, 26 bp, Homo sapiens
atgttctctctcacccttagagaaat

SEQ ID NO: 40465 - DNA, 26 bp, Homo sapiens
tgttctctctcacccttagagaaatt

SEQ ID NO: 40466 - DNA, 26 bp, Homo sapiens
gttctctctcacccttagagaaattc

SEQ ID NO: 40467 - DNA, 26 bp, Homo sapiens
ttctctctcacccttagagaaattca

SEQ ID NO: 40468 - DNA, 26 bp, Homo sapiens
tctctctcacccttagagaaattcaa

SEQ ID NO: 40469 - DNA, 26 bp, Homo sapiens
ctctctcacccttagagaaattcaat

SEQ ID NO: 40470 - DNA, 26 bp, Homo sapiens
tctctcacccttagagaaattcaatt

SEQ ID NO: 40471 - DNA, 26 bp, Homo sapiens
ctctcacccttagagaaattcaatta

SEQ ID NO: 40472 - DNA, 26 bp, Homo sapiens
tctcacccttagagaaattcaattag

SEQ ID NO: 40473 - DNA, 26 bp, Homo sapiens
ctcacccttagagaaattcaattagc

SEQ ID NO: 40474 - DNA, 26 bp, Homo sapiens
tcacccttagagaaattcaattagct

SEQ ID NO: 40475 - DNA, 26 bp, Homo sapiens
cacccttagagaaattcaattagctt

SEQ ID NO: 40476 - DNA, 26 bp, Homo sapiens
acccttagagaaattcaattagcttt

SEQ ID NO: 40477 - DNA, 26 bp, Homo sapiens
cccttagagaaattcaattagctttt

SEQ ID NO: 40478 - DNA, 26 bp, Homo sapiens
ccttagagaaattcaattagctttta

SEQ ID NO: 40479 - DNA, 26 bp, Homo sapiens
cttagagaaattcaattagcttttat

SEQ ID NO: 40480 - DNA, 26 bp, Homo sapiens
ttagagaaattcaattagcttttatt

SEQ ID NO: 40481 - DNA, 26 bp, Homo sapiens
tagagaaattcaattagcttttatta

SEQ ID NO: 40482 - DNA, 26 bp, Homo sapiens
agagaaattcaattagcttttattat

SEQ ID NO: 40483 - DNA, 26 bp, Homo sapiens
gagaaattcaattagcttttattatt

SEQ ID NO: 40484 - DNA, 26 bp, Homo sapiens
agaaattcaattagcttttattattt

SEQ ID NO: 40485 - DNA, 26 bp, Homo sapiens
gaaattcaattagcttttattatttc

SEQ ID NO: 40486 - DNA, 26 bp, Homo sapiens
aaattcaattagcttttattatttca

SEQ ID NO: 40487 - DNA, 26 bp, Homo sapiens
aattcaattagcttttattatttcac

SEQ ID NO: 40488 - DNA, 26 bp, Homo sapiens
attcaattagcttttattatttcaca

SEQ ID NO: 40489 - DNA, 26 bp, Homo sapiens
ttcaattagcttttattatttcacaa

SEQ ID NO: 40490 - DNA, 26 bp, Homo sapiens
tcaattagcttttattatttcacaaa

SEQ ID NO: 40491 - DNA, 26 bp, Homo sapiens
caattagcttttattatttcacaaat

SEQ ID NO: 40492 - DNA, 26 bp, Homo sapiens
aattagcttttattatttcacaaatc

SEQ ID NO: 40493 - DNA, 26 bp, Homo sapiens
attagcttttattatttcacaaatcg

SEQ ID NO: 40494 - DNA, 26 bp, Homo sapiens
ttagcttttattatttcacaaatcga

SEQ ID NO: 40495 - DNA, 26 bp, Homo sapiens
tagcttttattatttcacaaatcgac

SEQ ID NO: 40496 - DNA, 26 bp, Homo sapiens
agcttttattatttcacaaatcgaca

SEQ ID NO: 40497 - DNA, 26 bp, Homo sapiens
gcttttattatttcacaaatcgacac

SEQ ID NO: 40498 - DNA, 26 bp, Homo sapiens
cttttattatttcacaaatcgacact

SEQ ID NO: 40499 - DNA, 26 bp, Homo sapiens
ttttattatttcacaaatcgacactg

SEQ ID NO: 40500 - DNA, 26 bp, Homo sapiens
tttattatttcacaaatcgacactgg

SEQ ID NO: 40501 - DNA, 26 bp, Homo sapiens
ttattatttcacaaatcgacactgga

SEQ ID NO: 40502 - DNA, 26 bp, Homo sapiens
tattatttcacaaatcgacactggaa

SEQ ID NO: 40503 - DNA, 26 bp, Homo sapiens
attatttcacaaatcgacactggaat

SEQ ID NO: 40504 - DNA, 26 bp, Homo sapiens
ttatttcacaaatcgacactggaatt

SEQ ID NO: 40505 - DNA, 26 bp, Homo sapiens
tatttcacaaatcgacactggaatta

SEQ ID NO: 40506 - DNA, 26 bp, Homo sapiens
atttcacaaatcgacactggaattag

SEQ ID NO: 40507 - DNA, 26 bp, Homo sapiens
tttcacaaatcgacactggaattagg

SEQ ID NO: 40508 - DNA, 26 bp, Homo sapiens
ttcacaaatcgacactggaattaggt

SEQ ID NO: 40509 - DNA, 26 bp, Homo sapiens
tcacaaatcgacactggaattaggtt

SEQ ID NO: 40510 - DNA, 26 bp, Homo sapiens
cacaaatcgacactggaattaggttt

SEQ ID NO: 40511 - DNA, 26 bp, Homo sapiens
acaaatcgacactggaattaggttta

SEQ ID NO: 40512 - DNA, 26 bp, Homo sapiens
caaatcgacactggaattaggtttag

SEQ ID NO: 40513 - DNA, 26 bp, Homo sapiens
aaatcgacactggaattaggtttagt

SEQ ID NO: 40514 - DNA, 26 bp, Homo sapiens
aatcgacactggaattaggtttagtt

SEQ ID NO: 40515 - DNA, 26 bp, Homo sapiens
atcgacactggaattaggtttagttg

SEQ ID NO: 40516 - DNA, 26 bp, Homo sapiens
tcgacactggaattaggtttagttgc

SEQ ID NO: 40517 - DNA, 26 bp, Homo sapiens
cgacactggaattaggtttagttgct

SEQ ID NO: 40518 - DNA, 26 bp, Homo sapiens
gacactggaattaggtttagttgctc

SEQ ID NO: 40519 - DNA, 26 bp, Homo sapiens
acactggaattaggtttagttgctct

SEQ ID NO: 40520 - DNA, 26 bp, Homo sapiens
cactggaattaggtttagttgctctt

SEQ ID NO: 40521 - DNA, 26 bp, Homo sapiens
actggaattaggtttagttgctcttt

SEQ ID NO: 40522 - DNA, 26 bp, Homo sapiens
ctggaattaggtttagttgctcttta

SEQ ID NO: 40523 - DNA, 26 bp, Homo sapiens
tggaattaggtttagttgctctttaa

SEQ ID NO: 40524 - DNA, 26 bp, Homo sapiens
ggaattaggtttagttgctctttaat

SEQ ID NO: 40525 - DNA, 26 bp, Homo sapiens
gaattaggtttagttgctctttaatg

SEQ ID NO: 40526 - DNA, 26 bp, Homo sapiens
aattaggtttagttgctctttaatgc

SEQ ID NO: 40527 - DNA, 26 bp, Homo sapiens
attaggtttagttgctctttaatgcg

SEQ ID NO: 40528 - DNA, 26 bp, Homo sapiens
ttaggtttagttgctctttaatgcgc

SEQ ID NO: 40529 - DNA, 26 bp, Homo sapiens
taggtttagttgctctttaatgcgct

SEQ ID NO: 40530 - DNA, 26 bp, Homo sapiens
aggtttagttgctctttaatgcgcta

SEQ ID NO: 40531 - DNA, 26 bp, Homo sapiens
ggtttagttgctctttaatgcgctag

SEQ ID NO: 40532 - DNA, 26 bp, Homo sapiens
gtttagttgctctttaatgcgctagc

SEQ ID NO: 40533 - DNA, 26 bp, Homo sapiens
tttagttgctctttaatgcgctagca

SEQ ID NO: 40534 - DNA, 26 bp, Homo sapiens
ttagttgctctttaatgcgctagcac

SEQ ID NO: 40535 - DNA, 26 bp, Homo sapiens
tagttgctctttaatgcgctagcacc

SEQ ID NO: 40536 - DNA, 26 bp, Homo sapiens
agttgctctttaatgcgctagcacct

SEQ ID NO: 40537 - DNA, 26 bp, Homo sapiens
gttgctctttaatgcgctagcacctg

SEQ ID NO: 40538 - DNA, 26 bp, Homo sapiens
ttgctctttaatgcgctagcacctga

SEQ ID NO: 40539 - DNA, 26 bp, Homo sapiens
tgctctttaatgcgctagcacctgag

SEQ ID NO: 40540 - DNA, 26 bp, Homo sapiens
gctctttaatgcgctagcacctgagg

SEQ ID NO: 40541 - DNA, 26 bp, Homo sapiens
ctctttaatgcgctagcacctgaggc

SEQ ID NO: 40542 - DNA, 26 bp, Homo sapiens
tctttaatgcgctagcacctgaggct

SEQ ID NO: 40543 - DNA, 26 bp, Homo sapiens
ctttaatgcgctagcacctgaggctg

SEQ ID NO: 40544 - DNA, 26 bp, Homo sapiens
tttaatgcgctagcacctgaggctgg

SEQ ID NO: 40545 - DNA, 26 bp, Homo sapiens
ttaatgcgctagcacctgaggctggt

SEQ ID NO: 40546 - DNA, 26 bp, Homo sapiens
taatgcgctagcacctgaggctggtc

SEQ ID NO: 40547 - DNA, 26 bp, Homo sapiens
aatgcgctagcacctgaggctggtca

SEQ ID NO: 40548 - DNA, 26 bp, Homo sapiens
atgcgctagcacctgaggctggtcat

SEQ ID NO: 40549 - DNA, 26 bp, Homo sapiens
tgcgctagcacctgaggctggtcata

SEQ ID NO: 40550 - DNA, 26 bp, Homo sapiens
gcgctagcacctgaggctggtcatat

SEQ ID NO: 40551 - DNA, 26 bp, Homo sapiens
cgctagcacctgaggctggtcatatt

SEQ ID NO: 40552 - DNA, 26 bp, Homo sapiens
gctagcacctgaggctggtcatattc

SEQ ID NO: 40553 - DNA, 26 bp, Homo sapiens
ctagcacctgaggctggtcatattca

SEQ ID NO: 40554 - DNA, 26 bp, Homo sapiens
tagcacctgaggctggtcatattcag

SEQ ID NO: 40555 - DNA, 26 bp, Homo sapiens
agcacctgaggctggtcatattcaga

SEQ ID NO: 40556 - DNA, 26 bp, Homo sapiens
gcacctgaggctggtcatattcagaa

SEQ ID NO: 40557 - DNA, 26 bp, Homo sapiens
cacctgaggctggtcatattcagaaa

SEQ ID NO: 40558 - DNA, 26 bp, Homo sapiens
acctgaggctggtcatattcagaaag

SEQ ID NO: 40559 - DNA, 26 bp, Homo sapiens
cctgaggctggtcatattcagaaagc

SEQ ID NO: 40560 - DNA, 26 bp, Homo sapiens
ctgaggctggtcatattcagaaagct

SEQ ID NO: 40561 - DNA, 26 bp, Homo sapiens
tgaggctggtcatattcagaaagctt

SEQ ID NO: 40562 - DNA, 26 bp, Homo sapiens
gaggctggtcatattcagaaagcttt

SEQ ID NO: 40563 - DNA, 26 bp, Homo sapiens
aggctggtcatattcagaaagctttg

SEQ ID NO: 40564 - DNA, 26 bp, Homo sapiens
ggctggtcatattcagaaagctttgg

SEQ ID NO: 40565 - DNA, 26 bp, Homo sapiens
gctggtcatattcagaaagctttggt

SEQ ID NO: 40566 - DNA, 26 bp, Homo sapiens
ctggtcatattcagaaagctttggtt

SEQ ID NO: 40567 - DNA, 26 bp, Homo sapiens
tggtcatattcagaaagctttggtta

SEQ ID NO: 40568 - DNA, 26 bp, Homo sapiens
ggtcatattcagaaagctttggttaa

SEQ ID NO: 40569 - DNA, 26 bp, Homo sapiens
gtcatattcagaaagctttggttaaa

SEQ ID NO: 40570 - DNA, 26 bp, Homo sapiens
tcatattcagaaagctttggttaaaa

SEQ ID NO: 40571 - DNA, 26 bp, Homo sapiens
catattcagaaagctttggttaaaaa

SEQ ID NO: 40572 - DNA, 26 bp, Homo sapiens
atattcagaaagctttggttaaaaag

SEQ ID NO: 40573 - DNA, 26 bp, Homo sapiens
tattcagaaagctttggttaaaaaga

SEQ ID NO: 40574 - DNA, 26 bp, Homo sapiens
attcagaaagctttggttaaaaagaa

SEQ ID NO: 40575 - DNA, 26 bp, Homo sapiens
ttcagaaagctttggttaaaaagaag

SEQ ID NO: 40576 - DNA, 26 bp, Homo sapiens
tcagaaagctttggttaaaaagaagt

SEQ ID NO: 40577 - DNA, 26 bp, Homo sapiens
cagaaagctttggttaaaaagaagtt

SEQ ID NO: 40578 - DNA, 26 bp, Homo sapiens
agaaagctttggttaaaaagaagtta

SEQ ID NO: 40579 - DNA, 26 bp, Homo sapiens
gaaagctttggttaaaaagaagttaa

SEQ ID NO: 40580 - DNA, 26 bp, Homo sapiens
aaagctttggttaaaaagaagttaat

SEQ ID NO: 40581 - DNA, 26 bp, Homo sapiens
aagctttggttaaaaagaagttaata

SEQ ID NO: 40582 - DNA, 26 bp, Homo sapiens
agctttggttaaaaagaagttaatat

SEQ ID NO: 40583 - DNA, 26 bp, Homo sapiens
gctttggttaaaaagaagttaatata

SEQ ID NO: 40584 - DNA, 26 bp, Homo sapiens
ctttggttaaaaagaagttaatatac

SEQ ID NO: 40585 - DNA, 26 bp, Homo sapiens
tttggttaaaaagaagttaatatact

SEQ ID NO: 40586 - DNA, 26 bp, Homo sapiens
ttggttaaaaagaagttaatatactt

SEQ ID NO: 40587 - DNA, 26 bp, Homo sapiens
tggttaaaaagaagttaatatacttt

SEQ ID NO: 40588 - DNA, 26 bp, Homo sapiens
ggttaaaaagaagttaatatacttta

SEQ ID NO: 40589 - DNA, 26 bp, Homo sapiens
gttaaaaagaagttaatatactttaa

SEQ ID NO: 40590 - DNA, 26 bp, Homo sapiens
ttaaaaagaagttaatatactttaat

SEQ ID NO: 40591 - DNA, 26 bp, Homo sapiens
taaaaagaagttaatatactttaata

SEQ ID NO: 40592 - DNA, 26 bp, Homo sapiens
aaaaagaagttaatatactttaataa

SEQ ID NO: 40593 - DNA, 26 bp, Homo sapiens
aaaagaagttaatatactttaataaa

SEQ ID NO: 40594 - DNA, 26 bp, Homo sapiens
aaagaagttaatatactttaataaaa

SEQ ID NO: 40595 - DNA, 26 bp, Homo sapiens
aagaagttaatatactttaataaaac

SEQ ID NO: 40596 - DNA, 26 bp, Homo sapiens
agaagttaatatactttaataaaacc

SEQ ID NO: 40597 - DNA, 26 bp, Homo sapiens
gaagttaatatactttaataaaacca

SEQ ID NO: 40598 - DNA, 26 bp, Homo sapiens
aagttaatatactttaataaaaccat

SEQ ID NO: 40599 - DNA, 26 bp, Homo sapiens
agttaatatactttaataaaaccatc

SEQ ID NO: 40600 - DNA, 26 bp, Homo sapiens
gttaatatactttaataaaaccatcc

SEQ ID NO: 40601 - DNA, 26 bp, Homo sapiens
ttaatatactttaataaaaccatccc

SEQ ID NO: 40602 - DNA, 26 bp, Homo sapiens
taatatactttaataaaaccatcccc

SEQ ID NO: 40603 - DNA, 26 bp, Homo sapiens
aatatactttaataaaaccatcccca

SEQ ID NO: 40604 - DNA, 26 bp, Homo sapiens
atatactttaataaaaccatccccaa

SEQ ID NO: 40605 - DNA, 26 bp, Homo sapiens
tatactttaataaaaccatccccaaa

SEQ ID NO: 40606 - DNA, 26 bp, Homo sapiens
atactttaataaaaccatccccaaat

SEQ ID NO: 40607 - DNA, 26 bp, Homo sapiens
tactttaataaaaccatccccaaatt

SEQ ID NO: 40608 - DNA, 26 bp, Homo sapiens
actttaataaaaccatccccaaattt

SEQ ID NO: 40609 - DNA, 26 bp, Homo sapiens
ctttaataaaaccatccccaaattta

SEQ ID NO: 40610 - DNA, 26 bp, Homo sapiens
tttaataaaaccatccccaaatttag

SEQ ID NO: 40611 - DNA, 26 bp, Homo sapiens
ttaataaaaccatccccaaatttagt

SEQ ID NO: 40612 - DNA, 26 bp, Homo sapiens
taataaaaccatccccaaatttagtg

SEQ ID NO: 40613 - DNA, 26 bp, Homo sapiens
aataaaaccatccccaaatttagtga

SEQ ID NO: 40614 - DNA, 26 bp, Homo sapiens
ataaaaccatccccaaatttagtgaa

SEQ ID NO: 40615 - DNA, 26 bp, Homo sapiens
taaaaccatccccaaatttagtgaat

SEQ ID NO: 40616 - DNA, 26 bp, Homo sapiens
aaaaccatccccaaatttagtgaatc

SEQ ID NO: 40617 - DNA, 26 bp, Homo sapiens
aaaccatccccaaatttagtgaatct

SEQ ID NO: 40618 - DNA, 26 bp, Homo sapiens
aaccatccccaaatttagtgaatctg

SEQ ID NO: 40619 - DNA, 26 bp, Homo sapiens
accatccccaaatttagtgaatctga

SEQ ID NO: 40620 - DNA, 26 bp, Homo sapiens
ccatccccaaatttagtgaatctgaa

SEQ ID NO: 40621 - DNA, 26 bp, Homo sapiens
catccccaaatttagtgaatctgaat

SEQ ID NO: 40622 - DNA, 26 bp, Homo sapiens
atccccaaatttagtgaatctgaatg

SEQ ID NO: 40623 - DNA, 26 bp, Homo sapiens
tccccaaatttagtgaatctgaatga

SEQ ID NO: 40624 - DNA, 26 bp, Homo sapiens
ccccaaatttagtgaatctgaatgac

SEQ ID NO: 40625 - DNA, 26 bp, Homo sapiens
cccaaatttagtgaatctgaatgaca

SEQ ID NO: 40626 - DNA, 26 bp, Homo sapiens
ccaaatttagtgaatctgaatgacaa

SEQ ID NO: 40627 - DNA, 26 bp, Homo sapiens
caaatttagtgaatctgaatgacaaa

SEQ ID NO: 40628 - DNA, 26 bp, Homo sapiens
aaatttagtgaatctgaatgacaaaa

SEQ ID NO: 40629 - DNA, 26 bp, Homo sapiens
aatttagtgaatctgaatgacaaaaa

SEQ ID NO: 40630 - DNA, 26 bp, Homo sapiens
atttagtgaatctgaatgacaaaaaa

SEQ ID NO: 40631 - DNA, 26 bp, Homo sapiens
tttagtgaatctgaatgacaaaaaaa

SEQ ID NO: 40632 - DNA, 26 bp, Homo sapiens
ttagtgaatctgaatgacaaaaaaac

SEQ ID NO: 40633 - DNA, 26 bp, Homo sapiens
tagtgaatctgaatgacaaaaaaaca

SEQ ID NO: 40634 - DNA, 26 bp, Homo sapiens
agtgaatctgaatgacaaaaaaacaa

SEQ ID NO: 40635 - DNA, 26 bp, Homo sapiens
gtgaatctgaatgacaaaaaaacaaa

SEQ ID NO: 40636 - DNA, 26 bp, Homo sapiens
tgaatctgaatgacaaaaaaacaaaa

SEQ ID NO: 40637 - DNA, 26 bp, Homo sapiens
gaatctgaatgacaaaaaaacaaaac

SEQ ID NO: 40638 - DNA, 26 bp, Homo sapiens
aatctgaatgacaaaaaaacaaaaca

SEQ ID NO: 40639 - DNA, 26 bp, Homo sapiens
atctgaatgacaaaaaaacaaaacaa

SEQ ID NO: 40640 - DNA, 26 bp, Homo sapiens
tctgaatgacaaaaaaacaaaacaaa

SEQ ID NO: 40641 - DNA, 26 bp, Homo sapiens
ctgaatgacaaaaaaacaaaacaaaa

SEQ ID NO: 40642 - DNA, 26 bp, Homo sapiens
tgaatgacaaaaaaacaaaacaaaac

SEQ ID NO: 40643 - DNA, 26 bp, Homo sapiens
gaatgacaaaaaaacaaaacaaaacc

SEQ ID NO: 40644 - DNA, 26 bp, Homo sapiens
aatgacaaaaaaacaaaacaaaacca

SEQ ID NO: 40645 - DNA, 26 bp, Homo sapiens
atgacaaaaaaacaaaacaaaaccaa

SEQ ID NO: 40646 - DNA, 26 bp, Homo sapiens
tgacaaaaaaacaaaacaaaaccaaa

SEQ ID NO: 40647 - DNA, 26 bp, Homo sapiens
gacaaaaaaacaaaacaaaaccaaaa

SEQ ID NO: 40648 - DNA, 26 bp, Homo sapiens
acaaaaaaacaaaacaaaaccaaaac

SEQ ID NO: 40649 - DNA, 26 bp, Homo sapiens
caaaaaaacaaaacaaaaccaaaacc

SEQ ID NO: 40650 - DNA, 26 bp, Homo sapiens
aaaaaaacaaaacaaaaccaaaacca

SEQ ID NO: 40651 - DNA, 26 bp, Homo sapiens
aaaaaacaaaacaaaaccaaaaccaa

SEQ ID NO: 40652 - DNA, 26 bp, Homo sapiens
aaaaacaaaacaaaaccaaaaccaaa

SEQ ID NO: 40653 - DNA, 26 bp, Homo sapiens
aaaacaaaacaaaaccaaaaccaaaa

SEQ ID NO: 40654 - DNA, 26 bp, Homo sapiens
aaacaaaacaaaaccaaaaccaaaaa

SEQ ID NO: 40655 - DNA, 26 bp, Homo sapiens
aacaaaacaaaaccaaaaccaaaaaa

SEQ ID NO: 40656 - DNA, 26 bp, Homo sapiens
acaaaacaaaaccaaaaccaaaaaac

SEQ ID NO: 40657 - DNA, 26 bp, Homo sapiens
caaaacaaaaccaaaaccaaaaaact

SEQ ID NO: 40658 - DNA, 26 bp, Homo sapiens
aaaacaaaaccaaaaccaaaaaacta

SEQ ID NO: 40659 - DNA, 26 bp, Homo sapiens
aaacaaaaccaaaaccaaaaaactaa

SEQ ID NO: 40660 - DNA, 26 bp, Homo sapiens
aacaaaaccaaaaccaaaaaactaaa

SEQ ID NO: 40661 - DNA, 26 bp, Homo sapiens
acaaaaccaaaaccaaaaaactaaaa

SEQ ID NO: 40662 - DNA, 26 bp, Homo sapiens
caaaaccaaaaccaaaaaactaaaac

SEQ ID NO: 40663 - DNA, 26 bp, Homo sapiens
aaaaccaaaaccaaaaaactaaaaca

SEQ ID NO: 40664 - DNA, 26 bp, Homo sapiens
aaaccaaaaccaaaaaactaaaacac

SEQ ID NO: 40665 - DNA, 26 bp, Homo sapiens
aaccaaaaccaaaaaactaaaacaca

SEQ ID NO: 40666 - DNA, 26 bp, Homo sapiens
accaaaaccaaaaaactaaaacacaa

SEQ ID NO: 40667 - DNA, 26 bp, Homo sapiens
ccaaaaccaaaaaactaaaacacaaa

SEQ ID NO: 40668 - DNA, 26 bp, Homo sapiens
caaaaccaaaaaactaaaacacaaaa

SEQ ID NO: 40669 - DNA, 26 bp, Homo sapiens
aaaaccaaaaaactaaaacacaaaac

SEQ ID NO: 40670 - DNA, 26 bp, Homo sapiens
aaaccaaaaaactaaaacacaaaact

SEQ ID NO: 40671 - DNA, 26 bp, Homo sapiens
aaccaaaaaactaaaacacaaaactc

SEQ ID NO: 40672 - DNA, 26 bp, Homo sapiens
accaaaaaactaaaacacaaaactca

SEQ ID NO: 40673 - DNA, 26 bp, Homo sapiens
ccaaaaaactaaaacacaaaactcaa

SEQ ID NO: 40674 - DNA, 26 bp, Homo sapiens
caaaaaactaaaacacaaaactcaaa

SEQ ID NO: 40675 - DNA, 26 bp, Homo sapiens
aaaaaactaaaacacaaaactcaaac

SEQ ID NO: 40676 - DNA, 26 bp, Homo sapiens
aaaaactaaaacacaaaactcaaaca

SEQ ID NO: 40677 - DNA, 26 bp, Homo sapiens
aaaactaaaacacaaaactcaaacaa

SEQ ID NO: 40678 - DNA, 26 bp, Homo sapiens
aaactaaaacacaaaactcaaacaaa

SEQ ID NO: 40679 - DNA, 26 bp, Homo sapiens
aactaaaacacaaaactcaaacaaaa

SEQ ID NO: 40680 - DNA, 26 bp, Homo sapiens
actaaaacacaaaactcaaacaaaaa

SEQ ID NO: 40681 - DNA, 26 bp, Homo sapiens
ctaaaacacaaaactcaaacaaaaac

SEQ ID NO: 40682 - DNA, 26 bp, Homo sapiens
taaaacacaaaactcaaacaaaaaca

SEQ ID NO: 40683 - DNA, 26 bp, Homo sapiens
aaaacacaaaactcaaacaaaaacaa

SEQ ID NO: 40684 - DNA, 26 bp, Homo sapiens
aaacacaaaactcaaacaaaaacaaa

SEQ ID NO: 40685 - DNA, 26 bp, Homo sapiens
aacacaaaactcaaacaaaaacaaaa

SEQ ID NO: 40686 - DNA, 26 bp, Homo sapiens
acacaaaactcaaacaaaaacaaaac

SEQ ID NO: 40687 - DNA, 26 bp, Homo sapiens
cacaaaactcaaacaaaaacaaaaca

SEQ ID NO: 40688 - DNA, 26 bp, Homo sapiens
acaaaactcaaacaaaaacaaaacac

SEQ ID NO: 40689 - DNA, 26 bp, Homo sapiens
caaaactcaaacaaaaacaaaacacc

SEQ ID NO: 40690 - DNA, 26 bp, Homo sapiens
aaaactcaaacaaaaacaaaacacca

SEQ ID NO: 40691 - DNA, 26 bp, Homo sapiens
aaactcaaacaaaaacaaaacaccat

SEQ ID NO: 40692 - DNA, 26 bp, Homo sapiens
aactcaaacaaaaacaaaacaccatt

SEQ ID NO: 40693 - DNA, 26 bp, Homo sapiens
actcaaacaaaaacaaaacaccattt

SEQ ID NO: 40694 - DNA, 26 bp, Homo sapiens
ctcaaacaaaaacaaaacaccatttc

SEQ ID NO: 40695 - DNA, 26 bp, Homo sapiens
tcaaacaaaaacaaaacaccatttcc

SEQ ID NO: 40696 - DNA, 26 bp, Homo sapiens
caaacaaaaacaaaacaccatttccc

SEQ ID NO: 40697 - DNA, 26 bp, Homo sapiens
aaacaaaaacaaaacaccatttcccc

SEQ ID NO: 40698 - DNA, 26 bp, Homo sapiens
aacaaaaacaaaacaccatttccccc

SEQ ID NO: 40699 - DNA, 26 bp, Homo sapiens
acaaaaacaaaacaccatttcccccc

SEQ ID NO: 40700 - DNA, 26 bp, Homo sapiens
caaaaacaaaacaccatttcccccca

SEQ ID NO: 40701 - DNA, 26 bp, Homo sapiens
aaaaacaaaacaccatttccccccag

SEQ ID NO: 40702 - DNA, 26 bp, Homo sapiens
aaaacaaaacaccatttccccccaga

SEQ ID NO: 40703 - DNA, 26 bp, Homo sapiens
aaacaaaacaccatttccccccagag

SEQ ID NO: 40704 - DNA, 26 bp, Homo sapiens
aacaaaacaccatttccccccagagg

SEQ ID NO: 40705 - DNA, 26 bp, Homo sapiens
acaaaacaccatttccccccagagga

SEQ ID NO: 40706 - DNA, 26 bp, Homo sapiens
caaaacaccatttccccccagaggag

SEQ ID NO: 40707 - DNA, 26 bp, Homo sapiens
aaaacaccatttccccccagaggaga

SEQ ID NO: 40708 - DNA, 26 bp, Homo sapiens
aaacaccatttccccccagaggagaa

SEQ ID NO: 40709 - DNA, 26 bp, Homo sapiens
aacaccatttccccccagaggagaaa

SEQ ID NO: 40710 - DNA, 26 bp, Homo sapiens
acaccatttccccccagaggagaaac

SEQ ID NO: 40711 - DNA, 26 bp, Homo sapiens
caccatttccccccagaggagaaaca

SEQ ID NO: 40712 - DNA, 26 bp, Homo sapiens
accatttccccccagaggagaaacaa

SEQ ID NO: 40713 - DNA, 26 bp, Homo sapiens
ccatttccccccagaggagaaacaat

SEQ ID NO: 40714 - DNA, 26 bp, Homo sapiens
catttccccccagaggagaaacaata

SEQ ID NO: 40715 - DNA, 26 bp, Homo sapiens
atttccccccagaggagaaacaatag

SEQ ID NO: 40716 - DNA, 26 bp, Homo sapiens
tttccccccagaggagaaacaataga

SEQ ID NO: 40717 - DNA, 26 bp, Homo sapiens
ttccccccagaggagaaacaatagaa

SEQ ID NO: 40718 - DNA, 26 bp, Homo sapiens
tccccccagaggagaaacaatagaaa

SEQ ID NO: 40719 - DNA, 26 bp, Homo sapiens
ccccccagaggagaaacaatagaaaa

SEQ ID NO: 40720 - DNA, 26 bp, Homo sapiens
cccccagaggagaaacaatagaaaaa

SEQ ID NO: 40721 - DNA, 26 bp, Homo sapiens
ccccagaggagaaacaatagaaaaaa

SEQ ID NO: 40722 - DNA, 26 bp, Homo sapiens
cccagaggagaaacaatagaaaaaaa

SEQ ID NO: 40723 - DNA, 26 bp, Homo sapiens
ccagaggagaaacaatagaaaaaaaa

SEQ ID NO: 40724 - DNA, 26 bp, Homo sapiens
cagaggagaaacaatagaaaaaaaat

SEQ ID NO: 40725 - DNA, 26 bp, Homo sapiens
agaggagaaacaatagaaaaaaaatg

SEQ ID NO: 40726 - DNA, 26 bp, Homo sapiens
gaggagaaacaatagaaaaaaaatgg

SEQ ID NO: 40727 - DNA, 26 bp, Homo sapiens
aggagaaacaatagaaaaaaaatgga

SEQ ID NO: 40728 - DNA, 26 bp, Homo sapiens
ggagaaacaatagaaaaaaaatggat

SEQ ID NO: 40729 - DNA, 26 bp, Homo sapiens
gagaaacaatagaaaaaaaatggatg

SEQ ID NO: 40730 - DNA, 26 bp, Homo sapiens
agaaacaatagaaaaaaaatggatga

SEQ ID NO: 40731 - DNA, 26 bp, Homo sapiens
gaaacaatagaaaaaaaatggatgaa

SEQ ID NO: 40732 - DNA, 26 bp, Homo sapiens
aaacaatagaaaaaaaatggatgaat

SEQ ID NO: 40733 - DNA, 26 bp, Homo sapiens
aacaatagaaaaaaaatggatgaata

SEQ ID NO: 40734 - DNA, 26 bp, Homo sapiens
acaatagaaaaaaaatggatgaataa

SEQ ID NO: 40735 - DNA, 26 bp, Homo sapiens
caatagaaaaaaaatggatgaataaa

SEQ ID NO: 40736 - DNA, 26 bp, Homo sapiens
aatagaaaaaaaatggatgaataaat

SEQ ID NO: 40737 - DNA, 26 bp, Homo sapiens
atagaaaaaaaatggatgaataaata

SEQ ID NO: 40738 - DNA, 26 bp, Homo sapiens
tagaaaaaaaatggatgaataaataa

SEQ ID NO: 40739 - DNA, 26 bp, Homo sapiens
agaaaaaaaatggatgaataaataac

SEQ ID NO: 40740 - DNA, 26 bp, Homo sapiens
gaaaaaaaatggatgaataaataact

SEQ ID NO: 40741 - DNA, 26 bp, Homo sapiens
aaaaaaaatggatgaataaataactg

SEQ ID NO: 40742 - DNA, 26 bp, Homo sapiens
aaaaaaatggatgaataaataactga

SEQ ID NO: 40743 - DNA, 26 bp, Homo sapiens
aaaaaatggatgaataaataactgaa

SEQ ID NO: 40744 - DNA, 26 bp, Homo sapiens
aaaaatggatgaataaataactgaac

SEQ ID NO: 40745 - DNA, 26 bp, Homo sapiens
aaaatggatgaataaataactgaact

SEQ ID NO: 40746 - DNA, 26 bp, Homo sapiens
aaatggatgaataaataactgaacta

SEQ ID NO: 40747 - DNA, 26 bp, Homo sapiens
aatggatgaataaataactgaactaa

SEQ ID NO: 40748 - DNA, 26 bp, Homo sapiens
atggatgaataaataactgaactaag

SEQ ID NO: 40749 - DNA, 26 bp, Homo sapiens
tggatgaataaataactgaactaagc

SEQ ID NO: 40750 - DNA, 26 bp, Homo sapiens
ggatgaataaataactgaactaagct

SEQ ID NO: 40751 - DNA, 26 bp, Homo sapiens
gatgaataaataactgaactaagctt

SEQ ID NO: 40752 - DNA, 26 bp, Homo sapiens
atgaataaataactgaactaagcttg

SEQ ID NO: 40753 - DNA, 26 bp, Homo sapiens
tgaataaataactgaactaagcttgg

SEQ ID NO: 40754 - DNA, 26 bp, Homo sapiens
gaataaataactgaactaagcttggt

SEQ ID NO: 40755 - DNA, 26 bp, Homo sapiens
aataaataactgaactaagcttggta

SEQ ID NO: 40756 - DNA, 26 bp, Homo sapiens
ataaataactgaactaagcttggtac

SEQ ID NO: 40757 - DNA, 26 bp, Homo sapiens
taaataactgaactaagcttggtact

SEQ ID NO: 40758 - DNA, 26 bp, Homo sapiens
aaataactgaactaagcttggtactc

SEQ ID NO: 40759 - DNA, 26 bp, Homo sapiens
aataactgaactaagcttggtactct

SEQ ID NO: 40760 - DNA, 26 bp, Homo sapiens
ataactgaactaagcttggtactctt

SEQ ID NO: 40761 - DNA, 26 bp, Homo sapiens
taactgaactaagcttggtactcttt

SEQ ID NO: 40762 - DNA, 26 bp, Homo sapiens
aactgaactaagcttggtactctttt

SEQ ID NO: 40763 - DNA, 26 bp, Homo sapiens
actgaactaagcttggtactcttttc

SEQ ID NO: 40764 - DNA, 26 bp, Homo sapiens
ctgaactaagcttggtactcttttca

SEQ ID NO: 40765 - DNA, 26 bp, Homo sapiens
tgaactaagcttggtactcttttcag

SEQ ID NO: 40766 - DNA, 26 bp, Homo sapiens
gaactaagcttggtactcttttcaga

SEQ ID NO: 40767 - DNA, 26 bp, Homo sapiens
aactaagcttggtactcttttcagag

SEQ ID NO: 40768 - DNA, 26 bp, Homo sapiens
actaagcttggtactcttttcagagt

SEQ ID NO: 40769 - DNA, 26 bp, Homo sapiens
ctaagcttggtactcttttcagagta

SEQ ID NO: 40770 - DNA, 26 bp, Homo sapiens
taagcttggtactcttttcagagtat

SEQ ID NO: 40771 - DNA, 26 bp, Homo sapiens
aagcttggtactcttttcagagtata

SEQ ID NO: 40772 - DNA, 26 bp, Homo sapiens
agcttggtactcttttcagagtataa

SEQ ID NO: 40773 - DNA, 26 bp, Homo sapiens
gcttggtactcttttcagagtataaa

SEQ ID NO: 40774 - DNA, 26 bp, Homo sapiens
cttggtactcttttcagagtataaat

SEQ ID NO: 40775 - DNA, 26 bp, Homo sapiens
ttggtactcttttcagagtataaata

SEQ ID NO: 40776 - DNA, 26 bp, Homo sapiens
tggtactcttttcagagtataaatac

SEQ ID NO: 40777 - DNA, 26 bp, Homo sapiens
ggtactcttttcagagtataaatact

SEQ ID NO: 40778 - DNA, 26 bp, Homo sapiens
gtactcttttcagagtataaatacta

SEQ ID NO: 40779 - DNA, 26 bp, Homo sapiens
tactcttttcagagtataaatactac

SEQ ID NO: 40780 - DNA, 26 bp, Homo sapiens
actcttttcagagtataaatactact

SEQ ID NO: 40781 - DNA, 26 bp, Homo sapiens
ctcttttcagagtataaatactactg

SEQ ID NO: 40782 - DNA, 26 bp, Homo sapiens
tcttttcagagtataaatactactga

SEQ ID NO: 40783 - DNA, 26 bp, Homo sapiens
cttttcagagtataaatactactgat

SEQ ID NO: 40784 - DNA, 26 bp, Homo sapiens
ttttcagagtataaatactactgatc

SEQ ID NO: 40785 - DNA, 26 bp, Homo sapiens
tttcagagtataaatactactgatct

SEQ ID NO: 40786 - DNA, 26 bp, Homo sapiens
ttcagagtataaatactactgatctt

SEQ ID NO: 40787 - DNA, 26 bp, Homo sapiens
tcagagtataaatactactgatcttt

SEQ ID NO: 40788 - DNA, 26 bp, Homo sapiens
cagagtataaatactactgatcttta

SEQ ID NO: 40789 - DNA, 26 bp, Homo sapiens
agagtataaatactactgatctttaa

SEQ ID NO: 40790 - DNA, 26 bp, Homo sapiens
gagtataaatactactgatctttaaa

SEQ ID NO: 40791 - DNA, 26 bp, Homo sapiens
agtataaatactactgatctttaaag

SEQ ID NO: 40792 - DNA, 26 bp, Homo sapiens
gtataaatactactgatctttaaagg

SEQ ID NO: 40793 - DNA, 26 bp, Homo sapiens
tataaatactactgatctttaaagga

SEQ ID NO: 40794 - DNA, 26 bp, Homo sapiens
ataaatactactgatctttaaaggaa

SEQ ID NO: 40795 - DNA, 26 bp, Homo sapiens
taaatactactgatctttaaaggaac

SEQ ID NO: 40796 - DNA, 26 bp, Homo sapiens
aaatactactgatctttaaaggaact

SEQ ID NO: 40797 - DNA, 26 bp, Homo sapiens
aatactactgatctttaaaggaacta

SEQ ID NO: 40798 - DNA, 26 bp, Homo sapiens
atactactgatctttaaaggaactat

SEQ ID NO: 40799 - DNA, 26 bp, Homo sapiens
tactactgatctttaaaggaactatg

SEQ ID NO: 40800 - DNA, 26 bp, Homo sapiens
actactgatctttaaaggaactatgc

SEQ ID NO: 40801 - DNA, 26 bp, Homo sapiens
ctactgatctttaaaggaactatgct

SEQ ID NO: 40802 - DNA, 26 bp, Homo sapiens
tactgatctttaaaggaactatgctt

SEQ ID NO: 40803 - DNA, 26 bp, Homo sapiens
actgatctttaaaggaactatgctta

SEQ ID NO: 40804 - DNA, 26 bp, Homo sapiens
ctgatctttaaaggaactatgcttac

SEQ ID NO: 40805 - DNA, 26 bp, Homo sapiens
tgatctttaaaggaactatgcttact

SEQ ID NO: 40806 - DNA, 26 bp, Homo sapiens
gatctttaaaggaactatgcttactt

SEQ ID NO: 40807 - DNA, 26 bp, Homo sapiens
atctttaaaggaactatgcttactta

SEQ ID NO: 40808 - DNA, 26 bp, Homo sapiens
tctttaaaggaactatgcttacttaa

SEQ ID NO: 40809 - DNA, 26 bp, Homo sapiens
ctttaaaggaactatgcttacttaaa

SEQ ID NO: 40810 - DNA, 26 bp, Homo sapiens
tttaaaggaactatgcttacttaaat

SEQ ID NO: 40811 - DNA, 26 bp, Homo sapiens
ttaaaggaactatgcttacttaaatt

SEQ ID NO: 40812 - DNA, 26 bp, Homo sapiens
taaaggaactatgcttacttaaatta

SEQ ID NO: 40813 - DNA, 26 bp, Homo sapiens
aaaggaactatgcttacttaaattaa

SEQ ID NO: 40814 - DNA, 26 bp, Homo sapiens
aaggaactatgcttacttaaattaaa

SEQ ID NO: 40815 - DNA, 26 bp, Homo sapiens
aggaactatgcttacttaaattaaag

SEQ ID NO: 40816 - DNA, 26 bp, Homo sapiens
ggaactatgcttacttaaattaaaga

SEQ ID NO: 40817 - DNA, 26 bp, Homo sapiens
gaactatgcttacttaaattaaagat

SEQ ID NO: 40818 - DNA, 26 bp, Homo sapiens
aactatgcttacttaaattaaagatt

SEQ ID NO: 40819 - DNA, 26 bp, Homo sapiens
actatgcttacttaaattaaagattt

SEQ ID NO: 40820 - DNA, 26 bp, Homo sapiens
ctatgcttacttaaattaaagatttg

SEQ ID NO: 40821 - DNA, 26 bp, Homo sapiens
tatgcttacttaaattaaagatttga

SEQ ID NO: 40822 - DNA, 26 bp, Homo sapiens
atgcttacttaaattaaagatttgat

SEQ ID NO: 40823 - DNA, 26 bp, Homo sapiens
tgcttacttaaattaaagatttgatt

SEQ ID NO: 40824 - DNA, 26 bp, Homo sapiens
gcttacttaaattaaagatttgattt

SEQ ID NO: 40825 - DNA, 26 bp, Homo sapiens
cttacttaaattaaagatttgattta

SEQ ID NO: 40826 - DNA, 26 bp, Homo sapiens
ttacttaaattaaagatttgatttaa

SEQ ID NO: 40827 - DNA, 26 bp, Homo sapiens
tacttaaattaaagatttgatttaac

SEQ ID NO: 40828 - DNA, 26 bp, Homo sapiens
acttaaattaaagatttgatttaacc

SEQ ID NO: 40829 - DNA, 26 bp, Homo sapiens
cttaaattaaagatttgatttaaccc

SEQ ID NO: 40830 - DNA, 26 bp, Homo sapiens
ttaaattaaagatttgatttaaccct

SEQ ID NO: 40831 - DNA, 26 bp, Homo sapiens
taaattaaagatttgatttaaccctt

SEQ ID NO: 40832 - DNA, 26 bp, Homo sapiens
aaattaaagatttgatttaacccttc

SEQ ID NO: 40833 - DNA, 26 bp, Homo sapiens
aattaaagatttgatttaacccttct

SEQ ID NO: 40834 - DNA, 26 bp, Homo sapiens
attaaagatttgatttaacccttctt

SEQ ID NO: 40835 - DNA, 26 bp, Homo sapiens
ttaaagatttgatttaacccttcttg

SEQ ID NO: 40836 - DNA, 26 bp, Homo sapiens
taaagatttgatttaacccttcttgc

SEQ ID NO: 40837 - DNA, 26 bp, Homo sapiens
aaagatttgatttaacccttcttgcc

SEQ ID NO: 40838 - DNA, 26 bp, Homo sapiens
aagatttgatttaacccttcttgccc

SEQ ID NO: 40839 - DNA, 26 bp, Homo sapiens
agatttgatttaacccttcttgcccc

SEQ ID NO: 40840 - DNA, 26 bp, Homo sapiens
gatttgatttaacccttcttgcccca

SEQ ID NO: 40841 - DNA, 26 bp, Homo sapiens
atttgatttaacccttcttgccccaa

SEQ ID NO: 40842 - DNA, 26 bp, Homo sapiens
tttgatttaacccttcttgccccaat

SEQ ID NO: 40843 - DNA, 26 bp, Homo sapiens
ttgatttaacccttcttgccccaata

SEQ ID NO: 40844 - DNA, 26 bp, Homo sapiens
tgatttaacccttcttgccccaatat

SEQ ID NO: 40845 - DNA, 26 bp, Homo sapiens
gatttaacccttcttgccccaatata

SEQ ID NO: 40846 - DNA, 26 bp, Homo sapiens
atttaacccttcttgccccaatataa

SEQ ID NO: 40847 - DNA, 26 bp, Homo sapiens
tttaacccttcttgccccaatataaa

SEQ ID NO: 40848 - DNA, 26 bp, Homo sapiens
ttaacccttcttgccccaatataaat

SEQ ID NO: 40849 - DNA, 26 bp, Homo sapiens
taacccttcttgccccaatataaata

SEQ ID NO: 40850 - DNA, 26 bp, Homo sapiens
aacccttcttgccccaatataaatac

SEQ ID NO: 40851 - DNA, 26 bp, Homo sapiens
acccttcttgccccaatataaatact

SEQ ID NO: 40852 - DNA, 26 bp, Homo sapiens
cccttcttgccccaatataaatacta

SEQ ID NO: 40853 - DNA, 26 bp, Homo sapiens
ccttcttgccccaatataaatactat

SEQ ID NO: 40854 - DNA, 26 bp, Homo sapiens
cttcttgccccaatataaatactata

SEQ ID NO: 40855 - DNA, 26 bp, Homo sapiens
ttcttgccccaatataaatactatat

SEQ ID NO: 40856 - DNA, 26 bp, Homo sapiens
tcttgccccaatataaatactatatg

SEQ ID NO: 40857 - DNA, 26 bp, Homo sapiens
cttgccccaatataaatactatatgc

SEQ ID NO: 40858 - DNA, 26 bp, Homo sapiens
ttgccccaatataaatactatatgct

SEQ ID NO: 40859 - DNA, 26 bp, Homo sapiens
tgccccaatataaatactatatgctg

SEQ ID NO: 40860 - DNA, 26 bp, Homo sapiens
gccccaatataaatactatatgctga

SEQ ID NO: 40861 - DNA, 26 bp, Homo sapiens
ccccaatataaatactatatgctgac

SEQ ID NO: 40862 - DNA, 26 bp, Homo sapiens
cccaatataaatactatatgctgaca

SEQ ID NO: 40863 - DNA, 26 bp, Homo sapiens
ccaatataaatactatatgctgacag

SEQ ID NO: 40864 - DNA, 26 bp, Homo sapiens
caatataaatactatatgctgacagt

SEQ ID NO: 40865 - DNA, 26 bp, Homo sapiens
aatataaatactatatgctgacagtt

SEQ ID NO: 40866 - DNA, 26 bp, Homo sapiens
atataaatactatatgctgacagtta

SEQ ID NO: 40867 - DNA, 26 bp, Homo sapiens
tataaatactatatgctgacagttag

SEQ ID NO: 40868 - DNA, 26 bp, Homo sapiens
ataaatactatatgctgacagttagc

SEQ ID NO: 40869 - DNA, 26 bp, Homo sapiens
taaatactatatgctgacagttagca

SEQ ID NO: 40870 - DNA, 26 bp, Homo sapiens
aaatactatatgctgacagttagcat

SEQ ID NO: 40871 - DNA, 26 bp, Homo sapiens
aatactatatgctgacagttagcatc

SEQ ID NO: 40872 - DNA, 26 bp, Homo sapiens
atactatatgctgacagttagcatct

SEQ ID NO: 40873 - DNA, 26 bp, Homo sapiens
tactatatgctgacagttagcatctc

SEQ ID NO: 40874 - DNA, 26 bp, Homo sapiens
actatatgctgacagttagcatctct

SEQ ID NO: 40875 - DNA, 26 bp, Homo sapiens
ctatatgctgacagttagcatctctc

SEQ ID NO: 40876 - DNA, 26 bp, Homo sapiens
tatatgctgacagttagcatctctct

SEQ ID NO: 40877 - DNA, 26 bp, Homo sapiens
atatgctgacagttagcatctctcta

SEQ ID NO: 40878 - DNA, 26 bp, Homo sapiens
tatgctgacagttagcatctctctat

SEQ ID NO: 40879 - DNA, 26 bp, Homo sapiens
atgctgacagttagcatctctctata

SEQ ID NO: 40880 - DNA, 26 bp, Homo sapiens
tgctgacagttagcatctctctataa

SEQ ID NO: 40881 - DNA, 26 bp, Homo sapiens
gctgacagttagcatctctctataaa

SEQ ID NO: 40882 - DNA, 26 bp, Homo sapiens
ctgacagttagcatctctctataaac

SEQ ID NO: 40883 - DNA, 26 bp, Homo sapiens
tgacagttagcatctctctataaaca

SEQ ID NO: 40884 - DNA, 26 bp, Homo sapiens
gacagttagcatctctctataaacac

SEQ ID NO: 40885 - DNA, 26 bp, Homo sapiens
acagttagcatctctctataaacaca

SEQ ID NO: 40886 - DNA, 26 bp, Homo sapiens
cagttagcatctctctataaacacat

SEQ ID NO: 40887 - DNA, 26 bp, Homo sapiens
agttagcatctctctataaacacata

SEQ ID NO: 40888 - DNA, 26 bp, Homo sapiens
gttagcatctctctataaacacataa

SEQ ID NO: 40889 - DNA, 26 bp, Homo sapiens
ttagcatctctctataaacacataaa

SEQ ID NO: 40890 - DNA, 26 bp, Homo sapiens
tagcatctctctataaacacataaaa

SEQ ID NO: 40891 - DNA, 26 bp, Homo sapiens
agcatctctctataaacacataaaat

SEQ ID NO: 40892 - DNA, 26 bp, Homo sapiens
gcatctctctataaacacataaaatt

SEQ ID NO: 40893 - DNA, 26 bp, Homo sapiens
catctctctataaacacataaaattt

SEQ ID NO: 40894 - DNA, 26 bp, Homo sapiens
atctctctataaacacataaaatttt

SEQ ID NO: 40895 - DNA, 26 bp, Homo sapiens
tctctctataaacacataaaatttta

SEQ ID NO: 40896 - DNA, 26 bp, Homo sapiens
ctctctataaacacataaaattttac

SEQ ID NO: 40897 - DNA, 26 bp, Homo sapiens
tctctataaacacataaaattttaca

SEQ ID NO: 40898 - DNA, 26 bp, Homo sapiens
ctctataaacacataaaattttacat

SEQ ID NO: 40899 - DNA, 26 bp, Homo sapiens
tctataaacacataaaattttacatg

SEQ ID NO: 40900 - DNA, 26 bp, Homo sapiens
ctataaacacataaaattttacatgc

SEQ ID NO: 40901 - DNA, 26 bp, Homo sapiens
tataaacacataaaattttacatgcc

SEQ ID NO: 40902 - DNA, 26 bp, Homo sapiens
ataaacacataaaattttacatgcct

SEQ ID NO: 40903 - DNA, 26 bp, Homo sapiens
taaacacataaaattttacatgcctg

SEQ ID NO: 40904 - DNA, 26 bp, Homo sapiens
aaacacataaaattttacatgcctgt

SEQ ID NO: 40905 - DNA, 26 bp, Homo sapiens
aacacataaaattttacatgcctgta

SEQ ID NO: 40906 - DNA, 26 bp, Homo sapiens
acacataaaattttacatgcctgtaa

SEQ ID NO: 40907 - DNA, 26 bp, Homo sapiens
cacataaaattttacatgcctgtaag

SEQ ID NO: 40908 - DNA, 26 bp, Homo sapiens
acataaaattttacatgcctgtaaga

SEQ ID NO: 40909 - DNA, 26 bp, Homo sapiens
cataaaattttacatgcctgtaagaa

SEQ ID NO: 40910 - DNA, 26 bp, Homo sapiens
ataaaattttacatgcctgtaagaaa

SEQ ID NO: 40911 - DNA, 26 bp, Homo sapiens
taaaattttacatgcctgtaagaaat

SEQ ID NO: 40912 - DNA, 26 bp, Homo sapiens
aaaattttacatgcctgtaagaaatt

SEQ ID NO: 40913 - DNA, 26 bp, Homo sapiens
aaattttacatgcctgtaagaaattt

SEQ ID NO: 40914 - DNA, 26 bp, Homo sapiens
aattttacatgcctgtaagaaattta

SEQ ID NO: 40915 - DNA, 26 bp, Homo sapiens
attttacatgcctgtaagaaatttaa

SEQ ID NO: 40916 - DNA, 26 bp, Homo sapiens
ttttacatgcctgtaagaaatttaaa

SEQ ID NO: 40917 - DNA, 26 bp, Homo sapiens
tttacatgcctgtaagaaatttaaag

SEQ ID NO: 40918 - DNA, 26 bp, Homo sapiens
ttacatgcctgtaagaaatttaaagg

SEQ ID NO: 40919 - DNA, 26 bp, Homo sapiens
tacatgcctgtaagaaatttaaagga

SEQ ID NO: 40920 - DNA, 26 bp, Homo sapiens
acatgcctgtaagaaatttaaaggaa

SEQ ID NO: 40921 - DNA, 26 bp, Homo sapiens
catgcctgtaagaaatttaaaggaat

SEQ ID NO: 40922 - DNA, 26 bp, Homo sapiens
atgcctgtaagaaatttaaaggaata

SEQ ID NO: 40923 - DNA, 26 bp, Homo sapiens
tgcctgtaagaaatttaaaggaatat

SEQ ID NO: 40924 - DNA, 26 bp, Homo sapiens
gcctgtaagaaatttaaaggaatatt

SEQ ID NO: 40925 - DNA, 26 bp, Homo sapiens
cctgtaagaaatttaaaggaatatta

SEQ ID NO: 40926 - DNA, 26 bp, Homo sapiens
ctgtaagaaatttaaaggaatattac

SEQ ID NO: 40927 - DNA, 26 bp, Homo sapiens
tgtaagaaatttaaaggaatattact

SEQ ID NO: 40928 - DNA, 26 bp, Homo sapiens
gtaagaaatttaaaggaatattactc

SEQ ID NO: 40929 - DNA, 26 bp, Homo sapiens
taagaaatttaaaggaatattactct

SEQ ID NO: 40930 - DNA, 26 bp, Homo sapiens
aagaaatttaaaggaatattactctt

SEQ ID NO: 40931 - DNA, 26 bp, Homo sapiens
agaaatttaaaggaatattactcttc

SEQ ID NO: 40932 - DNA, 26 bp, Homo sapiens
gaaatttaaaggaatattactcttct

SEQ ID NO: 40933 - DNA, 26 bp, Homo sapiens
aaatttaaaggaatattactcttcta

SEQ ID NO: 40934 - DNA, 26 bp, Homo sapiens
aatttaaaggaatattactcttctat

SEQ ID NO: 40935 - DNA, 26 bp, Homo sapiens
atttaaaggaatattactcttctatt

SEQ ID NO: 40936 - DNA, 26 bp, Homo sapiens
tttaaaggaatattactcttctattt

SEQ ID NO: 40937 - DNA, 26 bp, Homo sapiens
ttaaaggaatattactcttctattta

SEQ ID NO: 40938 - DNA, 26 bp, Homo sapiens
taaaggaatattactcttctatttat

SEQ ID NO: 40939 - DNA, 26 bp, Homo sapiens
aaaggaatattactcttctatttatg

SEQ ID NO: 40940 - DNA, 26 bp, Homo sapiens
aaggaatattactcttctatttatgg

SEQ ID NO: 40941 - DNA, 26 bp, Homo sapiens
aggaatattactcttctatttatggt

SEQ ID NO: 40942 - DNA, 26 bp, Homo sapiens
ggaatattactcttctatttatggtt

SEQ ID NO: 40943 - DNA, 26 bp, Homo sapiens
gaatattactcttctatttatggtta

SEQ ID NO: 40944 - DNA, 26 bp, Homo sapiens
aatattactcttctatttatggttaa

SEQ ID NO: 40945 - DNA, 26 bp, Homo sapiens
atattactcttctatttatggttaaa

SEQ ID NO: 40946 - DNA, 26 bp, Homo sapiens
tattactcttctatttatggttaaac

SEQ ID NO: 40947 - DNA, 26 bp, Homo sapiens
attactcttctatttatggttaaact

SEQ ID NO: 40948 - DNA, 26 bp, Homo sapiens
ttactcttctatttatggttaaactc

SEQ ID NO: 40949 - DNA, 26 bp, Homo sapiens
tactcttctatttatggttaaactct

SEQ ID NO: 40950 - DNA, 26 bp, Homo sapiens
actcttctatttatggttaaactctt

SEQ ID NO: 40951 - DNA, 26 bp, Homo sapiens
ctcttctatttatggttaaactctta

SEQ ID NO: 40952 - DNA, 26 bp, Homo sapiens
tcttctatttatggttaaactcttac

SEQ ID NO: 40953 - DNA, 26 bp, Homo sapiens
cttctatttatggttaaactcttact

SEQ ID NO: 40954 - DNA, 26 bp, Homo sapiens
ttctatttatggttaaactcttacta

SEQ ID NO: 40955 - DNA, 26 bp, Homo sapiens
tctatttatggttaaactcttactat

SEQ ID NO: 40956 - DNA, 26 bp, Homo sapiens
ctatttatggttaaactcttactatg

SEQ ID NO: 40957 - DNA, 26 bp, Homo sapiens
tatttatggttaaactcttactatgt

SEQ ID NO: 40958 - DNA, 26 bp, Homo sapiens
atttatggttaaactcttactatgtt

SEQ ID NO: 40959 - DNA, 26 bp, Homo sapiens
tttatggttaaactcttactatgttt

SEQ ID NO: 40960 - DNA, 26 bp, Homo sapiens
ttatggttaaactcttactatgtttt

SEQ ID NO: 40961 - DNA, 26 bp, Homo sapiens
tatggttaaactcttactatgttttt

SEQ ID NO: 40962 - DNA, 26 bp, Homo sapiens
atggttaaactcttactatgtttttg

SEQ ID NO: 40963 - DNA, 26 bp, Homo sapiens
tggttaaactcttactatgtttttgg

SEQ ID NO: 40964 - DNA, 26 bp, Homo sapiens
ggttaaactcttactatgtttttgga

SEQ ID NO: 40965 - DNA, 26 bp, Homo sapiens
gttaaactcttactatgtttttggaa

SEQ ID NO: 40966 - DNA, 26 bp, Homo sapiens
ttaaactcttactatgtttttggaaa

SEQ ID NO: 40967 - DNA, 26 bp, Homo sapiens
taaactcttactatgtttttggaaaa

SEQ ID NO: 40968 - DNA, 26 bp, Homo sapiens
aaactcttactatgtttttggaaaaa

SEQ ID NO: 40969 - DNA, 26 bp, Homo sapiens
aactcttactatgtttttggaaaaaa

SEQ ID NO: 40970 - DNA, 26 bp, Homo sapiens
actcttactatgtttttggaaaaaaa

SEQ ID NO: 40971 - DNA, 26 bp, Homo sapiens
ctcttactatgtttttggaaaaaaag

SEQ ID NO: 40972 - DNA, 26 bp, Homo sapiens
tcttactatgtttttggaaaaaaagt

SEQ ID NO: 40973 - DNA, 26 bp, Homo sapiens
cttactatgtttttggaaaaaaagtt

SEQ ID NO: 40974 - DNA, 26 bp, Homo sapiens
ttactatgtttttggaaaaaaagttg

SEQ ID NO: 40975 - DNA, 26 bp, Homo sapiens
tactatgtttttggaaaaaaagttgg

SEQ ID NO: 40976 - DNA, 26 bp, Homo sapiens
actatgtttttggaaaaaaagttgga

SEQ ID NO: 40977 - DNA, 26 bp, Homo sapiens
ctatgtttttggaaaaaaagttggat

SEQ ID NO: 40978 - DNA, 26 bp, Homo sapiens
tatgtttttggaaaaaaagttggatg

SEQ ID NO: 40979 - DNA, 26 bp, Homo sapiens
atgtttttggaaaaaaagttggatgt

SEQ ID NO: 40980 - DNA, 26 bp, Homo sapiens
tgtttttggaaaaaaagttggatgtt

SEQ ID NO: 40981 - DNA, 26 bp, Homo sapiens
gtttttggaaaaaaagttggatgtta

SEQ ID NO: 40982 - DNA, 26 bp, Homo sapiens
tttttggaaaaaaagttggatgttat

SEQ ID NO: 40983 - DNA, 26 bp, Homo sapiens
ttttggaaaaaaagttggatgttatt

SEQ ID NO: 40984 - DNA, 26 bp, Homo sapiens
tttggaaaaaaagttggatgttattt

SEQ ID NO: 40985 - DNA, 26 bp, Homo sapiens
ttggaaaaaaagttggatgttattta

SEQ ID NO: 40986 - DNA, 26 bp, Homo sapiens
tggaaaaaaagttggatgttatttag

SEQ ID NO: 40987 - DNA, 26 bp, Homo sapiens
ggaaaaaaagttggatgttatttagg

SEQ ID NO: 40988 - DNA, 26 bp, Homo sapiens
gaaaaaaagttggatgttatttaggc

SEQ ID NO: 40989 - DNA, 26 bp, Homo sapiens
aaaaaaagttggatgttatttaggct

SEQ ID NO: 40990 - DNA, 26 bp, Homo sapiens
aaaaaagttggatgttatttaggctt

SEQ ID NO: 40991 - DNA, 26 bp, Homo sapiens
aaaaagttggatgttatttaggcttc

SEQ ID NO: 40992 - DNA, 26 bp, Homo sapiens
aaaagttggatgttatttaggcttca

SEQ ID NO: 40993 - DNA, 26 bp, Homo sapiens
aaagttggatgttatttaggcttcat

SEQ ID NO: 40994 - DNA, 26 bp, Homo sapiens
aagttggatgttatttaggcttcata

SEQ ID NO: 40995 - DNA, 26 bp, Homo sapiens
agttggatgttatttaggcttcatac

SEQ ID NO: 40996 - DNA, 26 bp, Homo sapiens
gttggatgttatttaggcttcataca

SEQ ID NO: 40997 - DNA, 26 bp, Homo sapiens
ttggatgttatttaggcttcatacac

SEQ ID NO: 40998 - DNA, 26 bp, Homo sapiens
tggatgttatttaggcttcatacaca

SEQ ID NO: 40999 - DNA, 26 bp, Homo sapiens
ggatgttatttaggcttcatacacac

SEQ ID NO: 41000 - DNA, 26 bp, Homo sapiens
gatgttatttaggcttcatacacaca

SEQ ID NO: 41001 - DNA, 26 bp, Homo sapiens
atgttatttaggcttcatacacacat

SEQ ID NO: 41002 - DNA, 26 bp, Homo sapiens
tgttatttaggcttcatacacacatc

SEQ ID NO: 41003 - DNA, 26 bp, Homo sapiens
gttatttaggcttcatacacacatct

SEQ ID NO: 41004 - DNA, 26 bp, Homo sapiens
ttatttaggcttcatacacacatctg

SEQ ID NO: 41005 - DNA, 26 bp, Homo sapiens
tatttaggcttcatacacacatctgt

SEQ ID NO: 41006 - DNA, 26 bp, Homo sapiens
atttaggcttcatacacacatctgtg

SEQ ID NO: 41007 - DNA, 26 bp, Homo sapiens
tttaggcttcatacacacatctgtgt

SEQ ID NO: 41008 - DNA, 26 bp, Homo sapiens
ttaggcttcatacacacatctgtgtg

SEQ ID NO: 41009 - DNA, 26 bp, Homo sapiens
taggcttcatacacacatctgtgtga

SEQ ID NO: 41010 - DNA, 26 bp, Homo sapiens
aggcttcatacacacatctgtgtgaa

SEQ ID NO: 41011 - DNA, 26 bp, Homo sapiens
ggcttcatacacacatctgtgtgaat

SEQ ID NO: 41012 - DNA, 26 bp, Homo sapiens
gcttcatacacacatctgtgtgaata

SEQ ID NO: 41013 - DNA, 26 bp, Homo sapiens
cttcatacacacatctgtgtgaataa

SEQ ID NO: 41014 - DNA, 26 bp, Homo sapiens
ttcatacacacatctgtgtgaataat

SEQ ID NO: 41015 - DNA, 26 bp, Homo sapiens
tcatacacacatctgtgtgaataata

SEQ ID NO: 41016 - DNA, 26 bp, Homo sapiens
catacacacatctgtgtgaataatac

SEQ ID NO: 41017 - DNA, 26 bp, Homo sapiens
atacacacatctgtgtgaataatacc

SEQ ID NO: 41018 - DNA, 26 bp, Homo sapiens
tacacacatctgtgtgaataatacct

SEQ ID NO: 41019 - DNA, 26 bp, Homo sapiens
acacacatctgtgtgaataatacctt

SEQ ID NO: 41020 - DNA, 26 bp, Homo sapiens
cacacatctgtgtgaataataccttc

SEQ ID NO: 41021 - DNA, 26 bp, Homo sapiens
acacatctgtgtgaataataccttcc

SEQ ID NO: 41022 - DNA, 26 bp, Homo sapiens
cacatctgtgtgaataataccttccc

SEQ ID NO: 41023 - DNA, 26 bp, Homo sapiens
acatctgtgtgaataataccttcccc

SEQ ID NO: 41024 - DNA, 26 bp, Homo sapiens
catctgtgtgaataataccttcccct

SEQ ID NO: 41025 - DNA, 26 bp, Homo sapiens
atctgtgtgaataataccttcccctt

SEQ ID NO: 41026 - DNA, 26 bp, Homo sapiens
tctgtgtgaataataccttccccttt

SEQ ID NO: 41027 - DNA, 26 bp, Homo sapiens
ctgtgtgaataataccttcccctttt

SEQ ID NO: 41028 - DNA, 26 bp, Homo sapiens
tgtgtgaataataccttccccttttc

SEQ ID NO: 41029 - DNA, 26 bp, Homo sapiens
gtgtgaataataccttccccttttcc

SEQ ID NO: 41030 - DNA, 26 bp, Homo sapiens
tgtgaataataccttccccttttcca

SEQ ID NO: 41031 - DNA, 26 bp, Homo sapiens
gtgaataataccttccccttttccaa

SEQ ID NO: 41032 - DNA, 26 bp, Homo sapiens
tgaataataccttccccttttccaag

SEQ ID NO: 41033 - DNA, 26 bp, Homo sapiens
gaataataccttccccttttccaagt

SEQ ID NO: 41034 - DNA, 26 bp, Homo sapiens
aataataccttccccttttccaagtc

SEQ ID NO: 41035 - DNA, 26 bp, Homo sapiens
ataataccttccccttttccaagtcc

SEQ ID NO: 41036 - DNA, 26 bp, Homo sapiens
taataccttccccttttccaagtccc

SEQ ID NO: 41037 - DNA, 26 bp, Homo sapiens
aataccttccccttttccaagtccct

SEQ ID NO: 41038 - DNA, 26 bp, Homo sapiens
ataccttccccttttccaagtccctc

SEQ ID NO: 41039 - DNA, 26 bp, Homo sapiens
taccttccccttttccaagtccctca

SEQ ID NO: 41040 - DNA, 26 bp, Homo sapiens
accttccccttttccaagtccctcaa

SEQ ID NO: 41041 - DNA, 26 bp, Homo sapiens
ccttccccttttccaagtccctcaag

SEQ ID NO: 41042 - DNA, 26 bp, Homo sapiens
cttccccttttccaagtccctcaaga

SEQ ID NO: 41043 - DNA, 26 bp, Homo sapiens
ttccccttttccaagtccctcaagaa

SEQ ID NO: 41044 - DNA, 26 bp, Homo sapiens
tccccttttccaagtccctcaagaaa

SEQ ID NO: 41045 - DNA, 26 bp, Homo sapiens
ccccttttccaagtccctcaagaaac

SEQ ID NO: 41046 - DNA, 26 bp, Homo sapiens
cccttttccaagtccctcaagaaaca

SEQ ID NO: 41047 - DNA, 26 bp, Homo sapiens
ccttttccaagtccctcaagaaacaa

SEQ ID NO: 41048 - DNA, 26 bp, Homo sapiens
cttttccaagtccctcaagaaacaag

SEQ ID NO: 41049 - DNA, 26 bp, Homo sapiens
ttttccaagtccctcaagaaacaagt

SEQ ID NO: 41050 - DNA, 26 bp, Homo sapiens
tttccaagtccctcaagaaacaagtc

SEQ ID NO: 41051 - DNA, 26 bp, Homo sapiens
ttccaagtccctcaagaaacaagtca

SEQ ID NO: 41052 - DNA, 26 bp, Homo sapiens
tccaagtccctcaagaaacaagtcag

SEQ ID NO: 41053 - DNA, 26 bp, Homo sapiens
ccaagtccctcaagaaacaagtcaga

SEQ ID NO: 41054 - DNA, 26 bp, Homo sapiens
caagtccctcaagaaacaagtcagaa

SEQ ID NO: 41055 - DNA, 26 bp, Homo sapiens
aagtccctcaagaaacaagtcagaaa

SEQ ID NO: 41056 - DNA, 26 bp, Homo sapiens
agtccctcaagaaacaagtcagaaaa

SEQ ID NO: 41057 - DNA, 26 bp, Homo sapiens
gtccctcaagaaacaagtcagaaaag

SEQ ID NO: 41058 - DNA, 26 bp, Homo sapiens
tccctcaagaaacaagtcagaaaagt

SEQ ID NO: 41059 - DNA, 26 bp, Homo sapiens
ccctcaagaaacaagtcagaaaagtc

SEQ ID NO: 41060 - DNA, 26 bp, Homo sapiens
cctcaagaaacaagtcagaaaagtca

SEQ ID NO: 41061 - DNA, 26 bp, Homo sapiens
ctcaagaaacaagtcagaaaagtcag

SEQ ID NO: 41062 - DNA, 26 bp, Homo sapiens
tcaagaaacaagtcagaaaagtcagt

SEQ ID NO: 41063 - DNA, 26 bp, Homo sapiens
caagaaacaagtcagaaaagtcagtg

SEQ ID NO: 41064 - DNA, 26 bp, Homo sapiens
aagaaacaagtcagaaaagtcagtgg

SEQ ID NO: 41065 - DNA, 26 bp, Homo sapiens
agaaacaagtcagaaaagtcagtgga

SEQ ID NO: 41066 - DNA, 26 bp, Homo sapiens
gaaacaagtcagaaaagtcagtggag

SEQ ID NO: 41067 - DNA, 26 bp, Homo sapiens
aaacaagtcagaaaagtcagtggagt

SEQ ID NO: 41068 - DNA, 26 bp, Homo sapiens
aacaagtcagaaaagtcagtggagtt

SEQ ID NO: 41069 - DNA, 26 bp, Homo sapiens
acaagtcagaaaagtcagtggagtta

SEQ ID NO: 41070 - DNA, 26 bp, Homo sapiens
caagtcagaaaagtcagtggagttag

SEQ ID NO: 41071 - DNA, 26 bp, Homo sapiens
aagtcagaaaagtcagtggagttaga

SEQ ID NO: 41072 - DNA, 26 bp, Homo sapiens
agtcagaaaagtcagtggagttagaa

SEQ ID NO: 41073 - DNA, 26 bp, Homo sapiens
gtcagaaaagtcagtggagttagaaa

SEQ ID NO: 41074 - DNA, 26 bp, Homo sapiens
tcagaaaagtcagtggagttagaaac

SEQ ID NO: 41075 - DNA, 26 bp, Homo sapiens
cagaaaagtcagtggagttagaaaca

SEQ ID NO: 41076 - DNA, 26 bp, Homo sapiens
agaaaagtcagtggagttagaaacag

SEQ ID NO: 41077 - DNA, 26 bp, Homo sapiens
gaaaagtcagtggagttagaaacaga

SEQ ID NO: 41078 - DNA, 26 bp, Homo sapiens
aaaagtcagtggagttagaaacagag

SEQ ID NO: 41079 - DNA, 26 bp, Homo sapiens
aaagtcagtggagttagaaacagagt

SEQ ID NO: 41080 - DNA, 26 bp, Homo sapiens
aagtcagtggagttagaaacagagtg

SEQ ID NO: 41081 - DNA, 26 bp, Homo sapiens
agtcagtggagttagaaacagagtga

SEQ ID NO: 41082 - DNA, 26 bp, Homo sapiens
gtcagtggagttagaaacagagtgaa

SEQ ID NO: 41083 - DNA, 26 bp, Homo sapiens
tcagtggagttagaaacagagtgaag

SEQ ID NO: 41084 - DNA, 26 bp, Homo sapiens
cagtggagttagaaacagagtgaagt

SEQ ID NO: 41085 - DNA, 26 bp, Homo sapiens
agtggagttagaaacagagtgaagtg

SEQ ID NO: 41086 - DNA, 26 bp, Homo sapiens
gtggagttagaaacagagtgaagtgc

SEQ ID NO: 41087 - DNA, 26 bp, Homo sapiens
tggagttagaaacagagtgaagtgct

SEQ ID NO: 41088 - DNA, 26 bp, Homo sapiens
ggagttagaaacagagtgaagtgctc

SEQ ID NO: 41089 - DNA, 26 bp, Homo sapiens
gagttagaaacagagtgaagtgctct

SEQ ID NO: 41090 - DNA, 26 bp, Homo sapiens
agttagaaacagagtgaagtgctctg

SEQ ID NO: 41091 - DNA, 26 bp, Homo sapiens
gttagaaacagagtgaagtgctctgg

SEQ ID NO: 41092 - DNA, 26 bp, Homo sapiens
ttagaaacagagtgaagtgctctggg

SEQ ID NO: 41093 - DNA, 26 bp, Homo sapiens
tagaaacagagtgaagtgctctggga

SEQ ID NO: 41094 - DNA, 26 bp, Homo sapiens
agaaacagagtgaagtgctctgggaa

SEQ ID NO: 41095 - DNA, 26 bp, Homo sapiens
gaaacagagtgaagtgctctgggaag

SEQ ID NO: 41096 - DNA, 26 bp, Homo sapiens
aaacagagtgaagtgctctgggaagc

SEQ ID NO: 41097 - DNA, 26 bp, Homo sapiens
aacagagtgaagtgctctgggaagcc

SEQ ID NO: 41098 - DNA, 26 bp, Homo sapiens
acagagtgaagtgctctgggaagccc

SEQ ID NO: 41099 - DNA, 26 bp, Homo sapiens
cagagtgaagtgctctgggaagccca

SEQ ID NO: 41100 - DNA, 26 bp, Homo sapiens
agagtgaagtgctctgggaagcccat

SEQ ID NO: 41101 - DNA, 26 bp, Homo sapiens
gagtgaagtgctctgggaagcccatg

SEQ ID NO: 41102 - DNA, 26 bp, Homo sapiens
agtgaagtgctctgggaagcccatgc

SEQ ID NO: 41103 - DNA, 26 bp, Homo sapiens
gtgaagtgctctgggaagcccatgct

SEQ ID NO: 41104 - DNA, 26 bp, Homo sapiens
tgaagtgctctgggaagcccatgctg

SEQ ID NO: 41105 - DNA, 26 bp, Homo sapiens
gaagtgctctgggaagcccatgctgg

SEQ ID NO: 41106 - DNA, 26 bp, Homo sapiens
aagtgctctgggaagcccatgctggt

SEQ ID NO: 41107 - DNA, 26 bp, Homo sapiens
agtgctctgggaagcccatgctggta

SEQ ID NO: 41108 - DNA, 26 bp, Homo sapiens
gtgctctgggaagcccatgctggtaa

SEQ ID NO: 41109 - DNA, 26 bp, Homo sapiens
tgctctgggaagcccatgctggtaac

SEQ ID NO: 41110 - DNA, 26 bp, Homo sapiens
gctctgggaagcccatgctggtaacc

SEQ ID NO: 41111 - DNA, 26 bp, Homo sapiens
ctctgggaagcccatgctggtaacct

SEQ ID NO: 41112 - DNA, 26 bp, Homo sapiens
tctgggaagcccatgctggtaaccta

SEQ ID NO: 41113 - DNA, 26 bp, Homo sapiens
ctgggaagcccatgctggtaacctag

SEQ ID NO: 41114 - DNA, 26 bp, Homo sapiens
tgggaagcccatgctggtaacctagc

SEQ ID NO: 41115 - DNA, 26 bp, Homo sapiens
gggaagcccatgctggtaacctagca

SEQ ID NO: 41116 - DNA, 26 bp, Homo sapiens
ggaagcccatgctggtaacctagcat

SEQ ID NO: 41117 - DNA, 26 bp, Homo sapiens
gaagcccatgctggtaacctagcatg

SEQ ID NO: 41118 - DNA, 26 bp, Homo sapiens
aagcccatgctggtaacctagcatga

SEQ ID NO: 41119 - DNA, 26 bp, Homo sapiens
agcccatgctggtaacctagcatgac

SEQ ID NO: 41120 - DNA, 26 bp, Homo sapiens
gcccatgctggtaacctagcatgacg

SEQ ID NO: 41121 - DNA, 26 bp, Homo sapiens
cccatgctggtaacctagcatgacgt

SEQ ID NO: 41122 - DNA, 26 bp, Homo sapiens
ccatgctggtaacctagcatgacgtg

SEQ ID NO: 41123 - DNA, 26 bp, Homo sapiens
catgctggtaacctagcatgacgtga

SEQ ID NO: 41124 - DNA, 26 bp, Homo sapiens
atgctggtaacctagcatgacgtgaa

SEQ ID NO: 41125 - DNA, 26 bp, Homo sapiens
tgctggtaacctagcatgacgtgaag

SEQ ID NO: 41126 - DNA, 26 bp, Homo sapiens
gctggtaacctagcatgacgtgaaga

SEQ ID NO: 41127 - DNA, 26 bp, Homo sapiens
ctggtaacctagcatgacgtgaagag

SEQ ID NO: 41128 - DNA, 26 bp, Homo sapiens
tggtaacctagcatgacgtgaagagc

SEQ ID NO: 41129 - DNA, 26 bp, Homo sapiens
ggtaacctagcatgacgtgaagagct

SEQ ID NO: 41130 - DNA, 26 bp, Homo sapiens
gtaacctagcatgacgtgaagagctg

SEQ ID NO: 41131 - DNA, 26 bp, Homo sapiens
taacctagcatgacgtgaagagctgc

SEQ ID NO: 41132 - DNA, 26 bp, Homo sapiens
aacctagcatgacgtgaagagctgca

SEQ ID NO: 41133 - DNA, 26 bp, Homo sapiens
acctagcatgacgtgaagagctgcaa

SEQ ID NO: 41134 - DNA, 26 bp, Homo sapiens
cctagcatgacgtgaagagctgcaat

SEQ ID NO: 41135 - DNA, 26 bp, Homo sapiens
ctagcatgacgtgaagagctgcaatt

SEQ ID NO: 41136 - DNA, 26 bp, Homo sapiens
tagcatgacgtgaagagctgcaattc

SEQ ID NO: 41137 - DNA, 26 bp, Homo sapiens
agcatgacgtgaagagctgcaattcc

SEQ ID NO: 41138 - DNA, 26 bp, Homo sapiens
gcatgacgtgaagagctgcaattcct

SEQ ID NO: 41139 - DNA, 26 bp, Homo sapiens
catgacgtgaagagctgcaattcctg

SEQ ID NO: 41140 - DNA, 26 bp, Homo sapiens
atgacgtgaagagctgcaattcctgt

SEQ ID NO: 41141 - DNA, 26 bp, Homo sapiens
tgacgtgaagagctgcaattcctgta

SEQ ID NO: 41142 - DNA, 26 bp, Homo sapiens
gacgtgaagagctgcaattcctgtag

SEQ ID NO: 41143 - DNA, 26 bp, Homo sapiens
acgtgaagagctgcaattcctgtaga

SEQ ID NO: 41144 - DNA, 26 bp, Homo sapiens
cgtgaagagctgcaattcctgtagaa

SEQ ID NO: 41145 - DNA, 26 bp, Homo sapiens
gtgaagagctgcaattcctgtagaag

SEQ ID NO: 41146 - DNA, 26 bp, Homo sapiens
tgaagagctgcaattcctgtagaaga

SEQ ID NO: 41147 - DNA, 26 bp, Homo sapiens
gaagagctgcaattcctgtagaagat

SEQ ID NO: 41148 - DNA, 26 bp, Homo sapiens
aagagctgcaattcctgtagaagatt

SEQ ID NO: 41149 - DNA, 26 bp, Homo sapiens
agagctgcaattcctgtagaagattc

SEQ ID NO: 41150 - DNA, 26 bp, Homo sapiens
gagctgcaattcctgtagaagattcc

SEQ ID NO: 41151 - DNA, 26 bp, Homo sapiens
agctgcaattcctgtagaagattccg

SEQ ID NO: 41152 - DNA, 26 bp, Homo sapiens
gctgcaattcctgtagaagattccgc

SEQ ID NO: 41153 - DNA, 26 bp, Homo sapiens
ctgcaattcctgtagaagattccgca

SEQ ID NO: 41154 - DNA, 26 bp, Homo sapiens
tgcaattcctgtagaagattccgcag

SEQ ID NO: 41155 - DNA, 26 bp, Homo sapiens
gcaattcctgtagaagattccgcagg

SEQ ID NO: 41156 - DNA, 26 bp, Homo sapiens
caattcctgtagaagattccgcaggg

SEQ ID NO: 41157 - DNA, 26 bp, Homo sapiens
aattcctgtagaagattccgcaggga

SEQ ID NO: 41158 - DNA, 26 bp, Homo sapiens
attcctgtagaagattccgcagggac

SEQ ID NO: 41159 - DNA, 26 bp, Homo sapiens
ttcctgtagaagattccgcagggacc

SEQ ID NO: 41160 - DNA, 26 bp, Homo sapiens
tcctgtagaagattccgcagggaccc

SEQ ID NO: 41161 - DNA, 26 bp, Homo sapiens
cctgtagaagattccgcagggacccc

SEQ ID NO: 41162 - DNA, 26 bp, Homo sapiens
ctgtagaagattccgcagggacccca

SEQ ID NO: 41163 - DNA, 26 bp, Homo sapiens
tgtagaagattccgcagggaccccaa

SEQ ID NO: 41164 - DNA, 26 bp, Homo sapiens
gtagaagattccgcagggaccccaat

SEQ ID NO: 41165 - DNA, 26 bp, Homo sapiens
tagaagattccgcagggaccccaatg

SEQ ID NO: 41166 - DNA, 26 bp, Homo sapiens
agaagattccgcagggaccccaatgg

SEQ ID NO: 41167 - DNA, 26 bp, Homo sapiens
gaagattccgcagggaccccaatggc

SEQ ID NO: 41168 - DNA, 26 bp, Homo sapiens
aagattccgcagggaccccaatggca

SEQ ID NO: 41169 - DNA, 26 bp, Homo sapiens
agattccgcagggaccccaatggcag

SEQ ID NO: 41170 - DNA, 26 bp, Homo sapiens
gattccgcagggaccccaatggcaga

SEQ ID NO: 41171 - DNA, 26 bp, Homo sapiens
attccgcagggaccccaatggcagag

SEQ ID NO: 41172 - DNA, 26 bp, Homo sapiens
ttccgcagggaccccaatggcagagg

SEQ ID NO: 41173 - DNA, 26 bp, Homo sapiens
tccgcagggaccccaatggcagagga

SEQ ID NO: 41174 - DNA, 26 bp, Homo sapiens
ccgcagggaccccaatggcagaggag

SEQ ID NO: 41175 - DNA, 26 bp, Homo sapiens
cgcagggaccccaatggcagaggaga

SEQ ID NO: 41176 - DNA, 26 bp, Homo sapiens
gcagggaccccaatggcagaggagac

SEQ ID NO: 41177 - DNA, 26 bp, Homo sapiens
cagggaccccaatggcagaggagact

SEQ ID NO: 41178 - DNA, 26 bp, Homo sapiens
agggaccccaatggcagaggagacta

SEQ ID NO: 41179 - DNA, 26 bp, Homo sapiens
gggaccccaatggcagaggagactat

SEQ ID NO: 41180 - DNA, 26 bp, Homo sapiens
ggaccccaatggcagaggagactatt

SEQ ID NO: 41181 - DNA, 26 bp, Homo sapiens
gaccccaatggcagaggagactattt

SEQ ID NO: 41182 - DNA, 26 bp, Homo sapiens
accccaatggcagaggagactatttc

SEQ ID NO: 41183 - DNA, 26 bp, Homo sapiens
ccccaatggcagaggagactatttct

SEQ ID NO: 41184 - DNA, 26 bp, Homo sapiens
cccaatggcagaggagactatttctc

SEQ ID NO: 41185 - DNA, 26 bp, Homo sapiens
ccaatggcagaggagactatttctca

SEQ ID NO: 41186 - DNA, 26 bp, Homo sapiens
caatggcagaggagactatttctcag

SEQ ID NO: 41187 - DNA, 26 bp, Homo sapiens
aatggcagaggagactatttctcaga

SEQ ID NO: 41188 - DNA, 26 bp, Homo sapiens
atggcagaggagactatttctcagac

SEQ ID NO: 41189 - DNA, 26 bp, Homo sapiens
tggcagaggagactatttctcagaca

SEQ ID NO: 41190 - DNA, 26 bp, Homo sapiens
ggcagaggagactatttctcagacat

SEQ ID NO: 41191 - DNA, 26 bp, Homo sapiens
gcagaggagactatttctcagacata

SEQ ID NO: 41192 - DNA, 26 bp, Homo sapiens
cagaggagactatttctcagacataa

SEQ ID NO: 41193 - DNA, 26 bp, Homo sapiens
agaggagactatttctcagacataaa

SEQ ID NO: 41194 - DNA, 26 bp, Homo sapiens
gaggagactatttctcagacataaag

SEQ ID NO: 41195 - DNA, 26 bp, Homo sapiens
aggagactatttctcagacataaagg

SEQ ID NO: 41196 - DNA, 26 bp, Homo sapiens
ggagactatttctcagacataaaggg

SEQ ID NO: 41197 - DNA, 26 bp, Homo sapiens
gagactatttctcagacataaagggc

SEQ ID NO: 41198 - DNA, 26 bp, Homo sapiens
agactatttctcagacataaagggct

SEQ ID NO: 41199 - DNA, 26 bp, Homo sapiens
gactatttctcagacataaagggctg

SEQ ID NO: 41200 - DNA, 26 bp, Homo sapiens
actatttctcagacataaagggctgc

SEQ ID NO: 41201 - DNA, 26 bp, Homo sapiens
ctatttctcagacataaagggctgca

SEQ ID NO: 41202 - DNA, 26 bp, Homo sapiens
tatttctcagacataaagggctgcat

SEQ ID NO: 41203 - DNA, 26 bp, Homo sapiens
atttctcagacataaagggctgcatg

SEQ ID NO: 41204 - DNA, 26 bp, Homo sapiens
tttctcagacataaagggctgcatgg

SEQ ID NO: 41205 - DNA, 26 bp, Homo sapiens
ttctcagacataaagggctgcatgga

SEQ ID NO: 41206 - DNA, 26 bp, Homo sapiens
tctcagacataaagggctgcatggaa

SEQ ID NO: 41207 - DNA, 26 bp, Homo sapiens
ctcagacataaagggctgcatggaaa

SEQ ID NO: 41208 - DNA, 26 bp, Homo sapiens
tcagacataaagggctgcatggaaac

SEQ ID NO: 41209 - DNA, 26 bp, Homo sapiens
cagacataaagggctgcatggaaact

SEQ ID NO: 41210 - DNA, 26 bp, Homo sapiens
agacataaagggctgcatggaaactc

SEQ ID NO: 41211 - DNA, 26 bp, Homo sapiens
gacataaagggctgcatggaaactcc

SEQ ID NO: 41212 - DNA, 26 bp, Homo sapiens
acataaagggctgcatggaaactcct

SEQ ID NO: 41213 - DNA, 26 bp, Homo sapiens
cataaagggctgcatggaaactccta

SEQ ID NO: 41214 - DNA, 26 bp, Homo sapiens
ataaagggctgcatggaaactcctac

SEQ ID NO: 41215 - DNA, 26 bp, Homo sapiens
taaagggctgcatggaaactcctacc

SEQ ID NO: 41216 - DNA, 26 bp, Homo sapiens
aaagggctgcatggaaactcctacct

SEQ ID NO: 41217 - DNA, 26 bp, Homo sapiens
aagggctgcatggaaactcctacctt

SEQ ID NO: 41218 - DNA, 26 bp, Homo sapiens
agggctgcatggaaactcctacctta

SEQ ID NO: 41219 - DNA, 26 bp, Homo sapiens
gggctgcatggaaactcctaccttaa

SEQ ID NO: 41220 - DNA, 26 bp, Homo sapiens
ggctgcatggaaactcctaccttaac

SEQ ID NO: 41221 - DNA, 26 bp, Homo sapiens
gctgcatggaaactcctaccttaaca

SEQ ID NO: 41222 - DNA, 26 bp, Homo sapiens
ctgcatggaaactcctaccttaacac

SEQ ID NO: 41223 - DNA, 26 bp, Homo sapiens
tgcatggaaactcctaccttaacacc

SEQ ID NO: 41224 - DNA, 26 bp, Homo sapiens
gcatggaaactcctaccttaacaccc

SEQ ID NO: 41225 - DNA, 26 bp, Homo sapiens
catggaaactcctaccttaacaccca

SEQ ID NO: 41226 - DNA, 26 bp, Homo sapiens
atggaaactcctaccttaacacccat

SEQ ID NO: 41227 - DNA, 26 bp, Homo sapiens
tggaaactcctaccttaacacccatc

SEQ ID NO: 41228 - DNA, 26 bp, Homo sapiens
ggaaactcctaccttaacacccatcg

SEQ ID NO: 41229 - DNA, 26 bp, Homo sapiens
gaaactcctaccttaacacccatcgg

SEQ ID NO: 41230 - DNA, 26 bp, Homo sapiens
aaactcctaccttaacacccatcgga

SEQ ID NO: 41231 - DNA, 26 bp, Homo sapiens
aactcctaccttaacacccatcggag

SEQ ID NO: 41232 - DNA, 26 bp, Homo sapiens
actcctaccttaacacccatcggaga

SEQ ID NO: 41233 - DNA, 26 bp, Homo sapiens
ctcctaccttaacacccatcggagat

SEQ ID NO: 41234 - DNA, 26 bp, Homo sapiens
tcctaccttaacacccatcggagatg

SEQ ID NO: 41235 - DNA, 26 bp, Homo sapiens
cctaccttaacacccatcggagatgt

SEQ ID NO: 41236 - DNA, 26 bp, Homo sapiens
ctaccttaacacccatcggagatgtt

SEQ ID NO: 41237 - DNA, 26 bp, Homo sapiens
taccttaacacccatcggagatgttc

SEQ ID NO: 41238 - DNA, 26 bp, Homo sapiens
accttaacacccatcggagatgttcc

SEQ ID NO: 41239 - DNA, 26 bp, Homo sapiens
ccttaacacccatcggagatgttccc

SEQ ID NO: 41240 - DNA, 26 bp, Homo sapiens
cttaacacccatcggagatgttccct

SEQ ID NO: 41241 - DNA, 26 bp, Homo sapiens
ttaacacccatcggagatgttccctt

SEQ ID NO: 41242 - DNA, 26 bp, Homo sapiens
taacacccatcggagatgttcccttt

SEQ ID NO: 41243 - DNA, 26 bp, Homo sapiens
aacacccatcggagatgttccctttt

SEQ ID NO: 41244 - DNA, 26 bp, Homo sapiens
acacccatcggagatgttcccttttc

SEQ ID NO: 41245 - DNA, 26 bp, Homo sapiens
cacccatcggagatgttcccttttct

SEQ ID NO: 41246 - DNA, 26 bp, Homo sapiens
acccatcggagatgttcccttttctg

SEQ ID NO: 41247 - DNA, 26 bp, Homo sapiens
cccatcggagatgttcccttttctgt

SEQ ID NO: 41248 - DNA, 26 bp, Homo sapiens
ccatcggagatgttcccttttctgta

SEQ ID NO: 41249 - DNA, 26 bp, Homo sapiens
catcggagatgttcccttttctgtac

SEQ ID NO: 41250 - DNA, 26 bp, Homo sapiens
atcggagatgttcccttttctgtaca

SEQ ID NO: 41251 - DNA, 26 bp, Homo sapiens
tcggagatgttcccttttctgtacaa

SEQ ID NO: 41252 - DNA, 26 bp, Homo sapiens
cggagatgttcccttttctgtacaaa

SEQ ID NO: 41253 - DNA, 26 bp, Homo sapiens
ggagatgttcccttttctgtacaaaa

SEQ ID NO: 41254 - DNA, 26 bp, Homo sapiens
gagatgttcccttttctgtacaaaat

SEQ ID NO: 41255 - DNA, 26 bp, Homo sapiens
agatgttcccttttctgtacaaaatg

SEQ ID NO: 41256 - DNA, 26 bp, Homo sapiens
gatgttcccttttctgtacaaaatgg

SEQ ID NO: 41257 - DNA, 26 bp, Homo sapiens
atgttcccttttctgtacaaaatggt

SEQ ID NO: 41258 - DNA, 26 bp, Homo sapiens
tgttcccttttctgtacaaaatggtc

SEQ ID NO: 41259 - DNA, 26 bp, Homo sapiens
gttcccttttctgtacaaaatggtct

SEQ ID NO: 41260 - DNA, 26 bp, Homo sapiens
ttcccttttctgtacaaaatggtctt

SEQ ID NO: 41261 - DNA, 26 bp, Homo sapiens
tcccttttctgtacaaaatggtcttt

SEQ ID NO: 41262 - DNA, 26 bp, Homo sapiens
cccttttctgtacaaaatggtctttg

SEQ ID NO: 41263 - DNA, 26 bp, Homo sapiens
ccttttctgtacaaaatggtctttga

SEQ ID NO: 41264 - DNA, 26 bp, Homo sapiens
cttttctgtacaaaatggtctttgac

SEQ ID NO: 41265 - DNA, 26 bp, Homo sapiens
ttttctgtacaaaatggtctttgacc

SEQ ID NO: 41266 - DNA, 26 bp, Homo sapiens
tttctgtacaaaatggtctttgacca

SEQ ID NO: 41267 - DNA, 26 bp, Homo sapiens
ttctgtacaaaatggtctttgaccag

SEQ ID NO: 41268 - DNA, 26 bp, Homo sapiens
tctgtacaaaatggtctttgaccagt

SEQ ID NO: 41269 - DNA, 26 bp, Homo sapiens
ctgtacaaaatggtctttgaccagta

SEQ ID NO: 41270 - DNA, 26 bp, Homo sapiens
tgtacaaaatggtctttgaccagtag

SEQ ID NO: 41271 - DNA, 26 bp, Homo sapiens
gtacaaaatggtctttgaccagtagt

SEQ ID NO: 41272 - DNA, 26 bp, Homo sapiens
tacaaaatggtctttgaccagtagtt

SEQ ID NO: 41273 - DNA, 26 bp, Homo sapiens
acaaaatggtctttgaccagtagttt

SEQ ID NO: 41274 - DNA, 26 bp, Homo sapiens
caaaatggtctttgaccagtagtttg

SEQ ID NO: 41275 - DNA, 26 bp, Homo sapiens
aaaatggtctttgaccagtagtttga

SEQ ID NO: 41276 - DNA, 26 bp, Homo sapiens
aaatggtctttgaccagtagtttgaa

SEQ ID NO: 41277 - DNA, 26 bp, Homo sapiens
aatggtctttgaccagtagtttgaat

SEQ ID NO: 41278 - DNA, 26 bp, Homo sapiens
atggtctttgaccagtagtttgaatc

SEQ ID NO: 41279 - DNA, 26 bp, Homo sapiens
tggtctttgaccagtagtttgaatcc

SEQ ID NO: 41280 - DNA, 26 bp, Homo sapiens
ggtctttgaccagtagtttgaatccc

SEQ ID NO: 41281 - DNA, 26 bp, Homo sapiens
gtctttgaccagtagtttgaatccca

SEQ ID NO: 41282 - DNA, 26 bp, Homo sapiens
tctttgaccagtagtttgaatcccac

SEQ ID NO: 41283 - DNA, 26 bp, Homo sapiens
ctttgaccagtagtttgaatcccacc

SEQ ID NO: 41284 - DNA, 26 bp, Homo sapiens
tttgaccagtagtttgaatcccaccc

SEQ ID NO: 41285 - DNA, 26 bp, Homo sapiens
ttgaccagtagtttgaatcccacccc

SEQ ID NO: 41286 - DNA, 26 bp, Homo sapiens
tgaccagtagtttgaatcccacccct

SEQ ID NO: 41287 - DNA, 26 bp, Homo sapiens
gaccagtagtttgaatcccaccccta

SEQ ID NO: 41288 - DNA, 26 bp, Homo sapiens
accagtagtttgaatcccacccctag

SEQ ID NO: 41289 - DNA, 26 bp, Homo sapiens
ccagtagtttgaatcccacccctagt

SEQ ID NO: 41290 - DNA, 26 bp, Homo sapiens
cagtagtttgaatcccacccctagtg

SEQ ID NO: 41291 - DNA, 26 bp, Homo sapiens
agtagtttgaatcccacccctagtgc

SEQ ID NO: 41292 - DNA, 26 bp, Homo sapiens
gtagtttgaatcccacccctagtgcg

SEQ ID NO: 41293 - DNA, 26 bp, Homo sapiens
tagtttgaatcccacccctagtgcga

SEQ ID NO: 41294 - DNA, 26 bp, Homo sapiens
agtttgaatcccacccctagtgcgac

SEQ ID NO: 41295 - DNA, 26 bp, Homo sapiens
gtttgaatcccacccctagtgcgact

SEQ ID NO: 41296 - DNA, 26 bp, Homo sapiens
tttgaatcccacccctagtgcgacta

SEQ ID NO: 41297 - DNA, 26 bp, Homo sapiens
ttgaatcccacccctagtgcgactaa

SEQ ID NO: 41298 - DNA, 26 bp, Homo sapiens
tgaatcccacccctagtgcgactaaa

SEQ ID NO: 41299 - DNA, 26 bp, Homo sapiens
gaatcccacccctagtgcgactaaaa

SEQ ID NO: 41300 - DNA, 26 bp, Homo sapiens
aatcccacccctagtgcgactaaaat

SEQ ID NO: 41301 - DNA, 26 bp, Homo sapiens
atcccacccctagtgcgactaaaatc

SEQ ID NO: 41302 - DNA, 26 bp, Homo sapiens
tcccacccctagtgcgactaaaatca

SEQ ID NO: 41303 - DNA, 26 bp, Homo sapiens
cccacccctagtgcgactaaaatcat

SEQ ID NO: 41304 - DNA, 26 bp, Homo sapiens
ccacccctagtgcgactaaaatcatc

SEQ ID NO: 41305 - DNA, 26 bp, Homo sapiens
cacccctagtgcgactaaaatcatcg

SEQ ID NO: 41306 - DNA, 26 bp, Homo sapiens
acccctagtgcgactaaaatcatcgt

SEQ ID NO: 41307 - DNA, 26 bp, Homo sapiens
cccctagtgcgactaaaatcatcgtc

SEQ ID NO: 41308 - DNA, 26 bp, Homo sapiens
ccctagtgcgactaaaatcatcgtct

SEQ ID NO: 41309 - DNA, 26 bp, Homo sapiens
cctagtgcgactaaaatcatcgtcta

SEQ ID NO: 41310 - DNA, 26 bp, Homo sapiens
ctagtgcgactaaaatcatcgtctaa

SEQ ID NO: 41311 - DNA, 26 bp, Homo sapiens
tagtgcgactaaaatcatcgtctaaa

SEQ ID NO: 41312 - DNA, 26 bp, Homo sapiens
agtgcgactaaaatcatcgtctaaat

SEQ ID NO: 41313 - DNA, 26 bp, Homo sapiens
gtgcgactaaaatcatcgtctaaatg

SEQ ID NO: 41314 - DNA, 26 bp, Homo sapiens
tgcgactaaaatcatcgtctaaatgc

SEQ ID NO: 41315 - DNA, 26 bp, Homo sapiens
gcgactaaaatcatcgtctaaatgcc

SEQ ID NO: 41316 - DNA, 26 bp, Homo sapiens
cgactaaaatcatcgtctaaatgcct

SEQ ID NO: 41317 - DNA, 26 bp, Homo sapiens
gactaaaatcatcgtctaaatgccta

SEQ ID NO: 41318 - DNA, 26 bp, Homo sapiens
actaaaatcatcgtctaaatgcctac

SEQ ID NO: 41319 - DNA, 26 bp, Homo sapiens
ctaaaatcatcgtctaaatgcctaca

SEQ ID NO: 41320 - DNA, 26 bp, Homo sapiens
taaaatcatcgtctaaatgcctacat

SEQ ID NO: 41321 - DNA, 26 bp, Homo sapiens
aaaatcatcgtctaaatgcctacatt

SEQ ID NO: 41322 - DNA, 26 bp, Homo sapiens
aaatcatcgtctaaatgcctacattc

SEQ ID NO: 41323 - DNA, 26 bp, Homo sapiens
aatcatcgtctaaatgcctacattcc

SEQ ID NO: 41324 - DNA, 26 bp, Homo sapiens
atcatcgtctaaatgcctacattccc

SEQ ID NO: 41325 - DNA, 26 bp, Homo sapiens
tcatcgtctaaatgcctacattccca

SEQ ID NO: 41326 - DNA, 26 bp, Homo sapiens
catcgtctaaatgcctacattcccaa

SEQ ID NO: 41327 - DNA, 26 bp, Homo sapiens
atcgtctaaatgcctacattcccaaa

SEQ ID NO: 41328 - DNA, 26 bp, Homo sapiens
tcgtctaaatgcctacattcccaaaa

SEQ ID NO: 41329 - DNA, 26 bp, Homo sapiens
cgtctaaatgcctacattcccaaaag

SEQ ID NO: 41330 - DNA, 26 bp, Homo sapiens
gtctaaatgcctacattcccaaaagg

SEQ ID NO: 41331 - DNA, 26 bp, Homo sapiens
tctaaatgcctacattcccaaaaggt

SEQ ID NO: 41332 - DNA, 26 bp, Homo sapiens
ctaaatgcctacattcccaaaaggtc

SEQ ID NO: 41333 - DNA, 26 bp, Homo sapiens
taaatgcctacattcccaaaaggtca

SEQ ID NO: 41334 - DNA, 26 bp, Homo sapiens
aaatgcctacattcccaaaaggtcac

SEQ ID NO: 41335 - DNA, 26 bp, Homo sapiens
aatgcctacattcccaaaaggtcact

SEQ ID NO: 41336 - DNA, 26 bp, Homo sapiens
atgcctacattcccaaaaggtcactt

SEQ ID NO: 41337 - DNA, 26 bp, Homo sapiens
tgcctacattcccaaaaggtcacttg

SEQ ID NO: 41338 - DNA, 26 bp, Homo sapiens
gcctacattcccaaaaggtcacttgt

SEQ ID NO: 41339 - DNA, 26 bp, Homo sapiens
cctacattcccaaaaggtcacttgtt

SEQ ID NO: 41340 - DNA, 26 bp, Homo sapiens
ctacattcccaaaaggtcacttgttt

SEQ ID NO: 41341 - DNA, 26 bp, Homo sapiens
tacattcccaaaaggtcacttgtttt

SEQ ID NO: 41342 - DNA, 26 bp, Homo sapiens
acattcccaaaaggtcacttgttttt

SEQ ID NO: 41343 - DNA, 26 bp, Homo sapiens
cattcccaaaaggtcacttgttttta

SEQ ID NO: 41344 - DNA, 26 bp, Homo sapiens
attcccaaaaggtcacttgtttttaa

SEQ ID NO: 41345 - DNA, 26 bp, Homo sapiens
ttcccaaaaggtcacttgtttttaaa

SEQ ID NO: 41346 - DNA, 26 bp, Homo sapiens
tcccaaaaggtcacttgtttttaaaa

SEQ ID NO: 41347 - DNA, 26 bp, Homo sapiens
cccaaaaggtcacttgtttttaaaat

SEQ ID NO: 41348 - DNA, 26 bp, Homo sapiens
ccaaaaggtcacttgtttttaaaata

SEQ ID NO: 41349 - DNA, 26 bp, Homo sapiens
caaaaggtcacttgtttttaaaatat

SEQ ID NO: 41350 - DNA, 26 bp, Homo sapiens
aaaaggtcacttgtttttaaaatatg

SEQ ID NO: 41351 - DNA, 26 bp, Homo sapiens
aaaggtcacttgtttttaaaatatgc

SEQ ID NO: 41352 - DNA, 26 bp, Homo sapiens
aaggtcacttgtttttaaaatatgca

SEQ ID NO: 41353 - DNA, 26 bp, Homo sapiens
aggtcacttgtttttaaaatatgcac

SEQ ID NO: 41354 - DNA, 26 bp, Homo sapiens
ggtcacttgtttttaaaatatgcaca

SEQ ID NO: 41355 - DNA, 26 bp, Homo sapiens
gtcacttgtttttaaaatatgcacat

SEQ ID NO: 41356 - DNA, 26 bp, Homo sapiens
tcacttgtttttaaaatatgcacatc

SEQ ID NO: 41357 - DNA, 26 bp, Homo sapiens
cacttgtttttaaaatatgcacatct

SEQ ID NO: 41358 - DNA, 26 bp, Homo sapiens
acttgtttttaaaatatgcacatctg

SEQ ID NO: 41359 - DNA, 26 bp, Homo sapiens
cttgtttttaaaatatgcacatctgt

SEQ ID NO: 41360 - DNA, 26 bp, Homo sapiens
ttgtttttaaaatatgcacatctgtt

SEQ ID NO: 41361 - DNA, 26 bp, Homo sapiens
tgtttttaaaatatgcacatctgttt

SEQ ID NO: 41362 - DNA, 26 bp, Homo sapiens
gtttttaaaatatgcacatctgttta

SEQ ID NO: 41363 - DNA, 26 bp, Homo sapiens
tttttaaaatatgcacatctgtttat

SEQ ID NO: 41364 - DNA, 26 bp, Homo sapiens
ttttaaaatatgcacatctgtttatc

SEQ ID NO: 41365 - DNA, 26 bp, Homo sapiens
tttaaaatatgcacatctgtttatca

SEQ ID NO: 41366 - DNA, 26 bp, Homo sapiens
ttaaaatatgcacatctgtttatcag

SEQ ID NO: 41367 - DNA, 26 bp, Homo sapiens
taaaatatgcacatctgtttatcaga

SEQ ID NO: 41368 - DNA, 26 bp, Homo sapiens
aaaatatgcacatctgtttatcagac

SEQ ID NO: 41369 - DNA, 26 bp, Homo sapiens
aaatatgcacatctgtttatcagact

SEQ ID NO: 41370 - DNA, 26 bp, Homo sapiens
aatatgcacatctgtttatcagacta

SEQ ID NO: 41371 - DNA, 26 bp, Homo sapiens
atatgcacatctgtttatcagactat

SEQ ID NO: 41372 - DNA, 26 bp, Homo sapiens
tatgcacatctgtttatcagactatt

SEQ ID NO: 41373 - DNA, 26 bp, Homo sapiens
atgcacatctgtttatcagactattc

SEQ ID NO: 41374 - DNA, 26 bp, Homo sapiens
tgcacatctgtttatcagactattcc

SEQ ID NO: 41375 - DNA, 26 bp, Homo sapiens
gcacatctgtttatcagactattcct

SEQ ID NO: 41376 - DNA, 26 bp, Homo sapiens
cacatctgtttatcagactattcctt

SEQ ID NO: 41377 - DNA, 26 bp, Homo sapiens
acatctgtttatcagactattccttt

SEQ ID NO: 41378 - DNA, 26 bp, Homo sapiens
catctgtttatcagactattcctttc

SEQ ID NO: 41379 - DNA, 26 bp, Homo sapiens
atctgtttatcagactattcctttcc

SEQ ID NO: 41380 - DNA, 26 bp, Homo sapiens
tctgtttatcagactattcctttccc

SEQ ID NO: 41381 - DNA, 26 bp, Homo sapiens
ctgtttatcagactattcctttcccc

SEQ ID NO: 41382 - DNA, 26 bp, Homo sapiens
tgtttatcagactattcctttcccct

SEQ ID NO: 41383 - DNA, 26 bp, Homo sapiens
gtttatcagactattcctttcccctt

SEQ ID NO: 41384 - DNA, 26 bp, Homo sapiens
tttatcagactattcctttccccttc

SEQ ID NO: 41385 - DNA, 26 bp, Homo sapiens
ttatcagactattcctttccccttcc

SEQ ID NO: 41386 - DNA, 26 bp, Homo sapiens
tatcagactattcctttccccttccc

SEQ ID NO: 41387 - DNA, 26 bp, Homo sapiens
atcagactattcctttccccttcccc

SEQ ID NO: 41388 - DNA, 26 bp, Homo sapiens
tcagactattcctttccccttccccc

SEQ ID NO: 41389 - DNA, 26 bp, Homo sapiens
cagactattcctttccccttccccca

SEQ ID NO: 41390 - DNA, 26 bp, Homo sapiens
agactattcctttccccttcccccac

SEQ ID NO: 41391 - DNA, 26 bp, Homo sapiens
gactattcctttccccttcccccact

SEQ ID NO: 41392 - DNA, 26 bp, Homo sapiens
actattcctttccccttcccccacta

SEQ ID NO: 41393 - DNA, 26 bp, Homo sapiens
ctattcctttccccttcccccactag

SEQ ID NO: 41394 - DNA, 26 bp, Homo sapiens
tattcctttccccttcccccactagg

SEQ ID NO: 41395 - DNA, 26 bp, Homo sapiens
attcctttccccttcccccactaggg

SEQ ID NO: 41396 - DNA, 26 bp, Homo sapiens
ttcctttccccttcccccactaggga

SEQ ID NO: 41397 - DNA, 26 bp, Homo sapiens
tcctttccccttcccccactagggat

SEQ ID NO: 41398 - DNA, 26 bp, Homo sapiens
cctttccccttcccccactagggatc

SEQ ID NO: 41399 - DNA, 26 bp, Homo sapiens
ctttccccttcccccactagggatca

SEQ ID NO: 41400 - DNA, 26 bp, Homo sapiens
tttccccttcccccactagggatcat

SEQ ID NO: 41401 - DNA, 26 bp, Homo sapiens
ttccccttcccccactagggatcatt

SEQ ID NO: 41402 - DNA, 26 bp, Homo sapiens
tccccttcccccactagggatcatta

SEQ ID NO: 41403 - DNA, 26 bp, Homo sapiens
ccccttcccccactagggatcattaa

SEQ ID NO: 41404 - DNA, 26 bp, Homo sapiens
cccttcccccactagggatcattaaa

SEQ ID NO: 41405 - DNA, 26 bp, Homo sapiens
ccttcccccactagggatcattaaaa

SEQ ID NO: 41406 - DNA, 26 bp, Homo sapiens
cttcccccactagggatcattaaaaa

SEQ ID NO: 41407 - DNA, 26 bp, Homo sapiens
ttcccccactagggatcattaaaaaa

SEQ ID NO: 41408 - DNA, 26 bp, Homo sapiens
tcccccactagggatcattaaaaaaa

SEQ ID NO: 41409 - DNA, 26 bp, Homo sapiens
cccccactagggatcattaaaaaaaa

SEQ ID NO: 41410 - DNA, 26 bp, Homo sapiens
ccccactagggatcattaaaaaaaaa

SEQ ID NO: 41411 - DNA, 26 bp, Homo sapiens
cccactagggatcattaaaaaaaaaa

SEQ ID NO: 41412 - DNA, 26 bp, Homo sapiens
ccactagggatcattaaaaaaaaaaa

SEQ ID NO: 41413 - DNA, 26 bp, Homo sapiens
cactagggatcattaaaaaaaaaaaa

SEQ ID NO: 41414 - DNA, 26 bp, Homo sapiens
actagggatcattaaaaaaaaaaaaa

SEQ ID NO: 41415 - DNA, 26 bp, Homo sapiens
ctagggatcattaaaaaaaaaaaaac

SEQ ID NO: 41416 - DNA, 26 bp, Homo sapiens
tagggatcattaaaaaaaaaaaaacc

SEQ ID NO: 41417 - DNA, 26 bp, Homo sapiens
agggatcattaaaaaaaaaaaaacca

SEQ ID NO: 41418 - DNA, 26 bp, Homo sapiens
gggatcattaaaaaaaaaaaaaccat

SEQ ID NO: 41419 - DNA, 26 bp, Homo sapiens
ggatcattaaaaaaaaaaaaaccatg

SEQ ID NO: 41420 - DNA, 26 bp, Homo sapiens
gatcattaaaaaaaaaaaaaccatga

SEQ ID NO: 41421 - DNA, 26 bp, Homo sapiens
atcattaaaaaaaaaaaaaccatgaa

SEQ ID NO: 41422 - DNA, 26 bp, Homo sapiens
tcattaaaaaaaaaaaaaccatgaaa

SEQ ID NO: 41423 - DNA, 26 bp, Homo sapiens
cattaaaaaaaaaaaaaccatgaaat

SEQ ID NO: 41424 - DNA, 26 bp, Homo sapiens
attaaaaaaaaaaaaaccatgaaatt

SEQ ID NO: 41425 - DNA, 26 bp, Homo sapiens
ttaaaaaaaaaaaaaccatgaaatta

SEQ ID NO: 41426 - DNA, 26 bp, Homo sapiens
taaaaaaaaaaaaaccatgaaattaa

SEQ ID NO: 41427 - DNA, 26 bp, Homo sapiens
aaaaaaaaaaaaaccatgaaattaaa

SEQ ID NO: 41428 - DNA, 26 bp, Homo sapiens
aaaaaaaaaaaaccatgaaattaaac

SEQ ID NO: 41429 - DNA, 26 bp, Homo sapiens
aaaaaaaaaaaccatgaaattaaaca

SEQ ID NO: 41430 - DNA, 26 bp, Homo sapiens
aaaaaaaaaaccatgaaattaaacaa

SEQ ID NO: 41431 - DNA, 26 bp, Homo sapiens
aaaaaaaaaccatgaaattaaacaaa

SEQ ID NO: 41432 - DNA, 26 bp, Homo sapiens
aaaaaaaaccatgaaattaaacaaaa

SEQ ID NO: 41433 - DNA, 26 bp, Homo sapiens
aaaaaaaccatgaaattaaacaaaaa

SEQ ID NO: 41434 - DNA, 26 bp, Homo sapiens
aaaaaaccatgaaattaaacaaaaac

SEQ ID NO: 41435 - DNA, 26 bp, Homo sapiens
aaaaaccatgaaattaaacaaaaaca

SEQ ID NO: 41436 - DNA, 26 bp, Homo sapiens
aaaaccatgaaattaaacaaaaacaa

SEQ ID NO: 41437 - DNA, 26 bp, Homo sapiens
aaaccatgaaattaaacaaaaacaac

SEQ ID NO: 41438 - DNA, 26 bp, Homo sapiens
aaccatgaaattaaacaaaaacaact

SEQ ID NO: 41439 - DNA, 26 bp, Homo sapiens
accatgaaattaaacaaaaacaactc

SEQ ID NO: 41440 - DNA, 26 bp, Homo sapiens
ccatgaaattaaacaaaaacaactca

SEQ ID NO: 41441 - DNA, 26 bp, Homo sapiens
catgaaattaaacaaaaacaactcag

SEQ ID NO: 41442 - DNA, 26 bp, Homo sapiens
atgaaattaaacaaaaacaactcagt

SEQ ID NO: 41443 - DNA, 26 bp, Homo sapiens
tgaaattaaacaaaaacaactcagta

SEQ ID NO: 41444 - DNA, 26 bp, Homo sapiens
gaaattaaacaaaaacaactcagtat

SEQ ID NO: 41445 - DNA, 26 bp, Homo sapiens
aaattaaacaaaaacaactcagtatt

SEQ ID NO: 41446 - DNA, 26 bp, Homo sapiens
aattaaacaaaaacaactcagtattt

SEQ ID NO: 41447 - DNA, 26 bp, Homo sapiens
attaaacaaaaacaactcagtatttc

SEQ ID NO: 41448 - DNA, 26 bp, Homo sapiens
ttaaacaaaaacaactcagtatttct

SEQ ID NO: 41449 - DNA, 26 bp, Homo sapiens
taaacaaaaacaactcagtatttctc

SEQ ID NO: 41450 - DNA, 26 bp, Homo sapiens
aaacaaaaacaactcagtatttctca

SEQ ID NO: 41451 - DNA, 26 bp, Homo sapiens
aacaaaaacaactcagtatttctcac

SEQ ID NO: 41452 - DNA, 26 bp, Homo sapiens
acaaaaacaactcagtatttctcacc

SEQ ID NO: 41453 - DNA, 26 bp, Homo sapiens
caaaaacaactcagtatttctcacct

SEQ ID NO: 41454 - DNA, 26 bp, Homo sapiens
aaaaacaactcagtatttctcacctg

SEQ ID NO: 41455 - DNA, 26 bp, Homo sapiens
aaaacaactcagtatttctcacctga

SEQ ID NO: 41456 - DNA, 26 bp, Homo sapiens
aaacaactcagtatttctcacctgaa

SEQ ID NO: 41457 - DNA, 26 bp, Homo sapiens
aacaactcagtatttctcacctgaac

SEQ ID NO: 41458 - DNA, 26 bp, Homo sapiens
acaactcagtatttctcacctgaaca

SEQ ID NO: 41459 - DNA, 26 bp, Homo sapiens
caactcagtatttctcacctgaacac

SEQ ID NO: 41460 - DNA, 26 bp, Homo sapiens
aactcagtatttctcacctgaacaca

SEQ ID NO: 41461 - DNA, 26 bp, Homo sapiens
actcagtatttctcacctgaacacac

SEQ ID NO: 41462 - DNA, 26 bp, Homo sapiens
ctcagtatttctcacctgaacacaca

SEQ ID NO: 41463 - DNA, 26 bp, Homo sapiens
tcagtatttctcacctgaacacacaa

SEQ ID NO: 41464 - DNA, 26 bp, Homo sapiens
cagtatttctcacctgaacacacaag

SEQ ID NO: 41465 - DNA, 26 bp, Homo sapiens
agtatttctcacctgaacacacaagc

SEQ ID NO: 41466 - DNA, 26 bp, Homo sapiens
gtatttctcacctgaacacacaagcc

SEQ ID NO: 41467 - DNA, 26 bp, Homo sapiens
tatttctcacctgaacacacaagcca

SEQ ID NO: 41468 - DNA, 26 bp, Homo sapiens
atttctcacctgaacacacaagccaa

SEQ ID NO: 41469 - DNA, 26 bp, Homo sapiens
tttctcacctgaacacacaagccaaa

SEQ ID NO: 41470 - DNA, 26 bp, Homo sapiens
ttctcacctgaacacacaagccaaat

SEQ ID NO: 41471 - DNA, 26 bp, Homo sapiens
tctcacctgaacacacaagccaaata

SEQ ID NO: 41472 - DNA, 26 bp, Homo sapiens
ctcacctgaacacacaagccaaataa

SEQ ID NO: 41473 - DNA, 26 bp, Homo sapiens
tcacctgaacacacaagccaaataat

SEQ ID NO: 41474 - DNA, 26 bp, Homo sapiens
cacctgaacacacaagccaaataatc

SEQ ID NO: 41475 - DNA, 26 bp, Homo sapiens
acctgaacacacaagccaaataatct

SEQ ID NO: 41476 - DNA, 26 bp, Homo sapiens
cctgaacacacaagccaaataatctt

SEQ ID NO: 41477 - DNA, 26 bp, Homo sapiens
ctgaacacacaagccaaataatcttc

SEQ ID NO: 41478 - DNA, 26 bp, Homo sapiens
tgaacacacaagccaaataatcttct

SEQ ID NO: 41479 - DNA, 26 bp, Homo sapiens
gaacacacaagccaaataatcttcta

SEQ ID NO: 41480 - DNA, 26 bp, Homo sapiens
aacacacaagccaaataatcttctaa

SEQ ID NO: 41481 - DNA, 26 bp, Homo sapiens
acacacaagccaaataatcttctaaa

SEQ ID NO: 41482 - DNA, 26 bp, Homo sapiens
cacacaagccaaataatcttctaaat

SEQ ID NO: 41483 - DNA, 26 bp, Homo sapiens
acacaagccaaataatcttctaaata

SEQ ID NO: 41484 - DNA, 26 bp, Homo sapiens
cacaagccaaataatcttctaaatat

SEQ ID NO: 41485 - DNA, 26 bp, Homo sapiens
acaagccaaataatcttctaaatatt

SEQ ID NO: 41486 - DNA, 26 bp, Homo sapiens
caagccaaataatcttctaaatattt

SEQ ID NO: 41487 - DNA, 26 bp, Homo sapiens
aagccaaataatcttctaaatattta

SEQ ID NO: 41488 - DNA, 26 bp, Homo sapiens
agccaaataatcttctaaatatttaa

SEQ ID NO: 41489 - DNA, 26 bp, Homo sapiens
gccaaataatcttctaaatatttaat

SEQ ID NO: 41490 - DNA, 26 bp, Homo sapiens
ccaaataatcttctaaatatttaata

SEQ ID NO: 41491 - DNA, 26 bp, Homo sapiens
caaataatcttctaaatatttaataa

SEQ ID NO: 41492 - DNA, 26 bp, Homo sapiens
aaataatcttctaaatatttaataaa

SEQ ID NO: 41493 - DNA, 26 bp, Homo sapiens
aataatcttctaaatatttaataaaa

SEQ ID NO: 41494 - DNA, 26 bp, Homo sapiens
ataatcttctaaatatttaataaaat

SEQ ID NO: 41495 - DNA, 26 bp, Homo sapiens
taatcttctaaatatttaataaaata

SEQ ID NO: 41496 - DNA, 26 bp, Homo sapiens
aatcttctaaatatttaataaaataa

SEQ ID NO: 41497 - DNA, 26 bp, Homo sapiens
atcttctaaatatttaataaaataaa

SEQ ID NO: 41498 - DNA, 26 bp, Homo sapiens
tcttctaaatatttaataaaataaat

SEQ ID NO: 41499 - DNA, 26 bp, Homo sapiens
cttctaaatatttaataaaataaatt

SEQ ID NO: 41500 - DNA, 26 bp, Homo sapiens
ttctaaatatttaataaaataaatta

SEQ ID NO: 41501 - DNA, 26 bp, Homo sapiens
tctaaatatttaataaaataaattac

SEQ ID NO: 41502 - DNA, 26 bp, Homo sapiens
ctaaatatttaataaaataaattaca

SEQ ID NO: 41503 - DNA, 26 bp, Homo sapiens
taaatatttaataaaataaattacag

SEQ ID NO: 41504 - DNA, 26 bp, Homo sapiens
aaatatttaataaaataaattacagt

SEQ ID NO: 41505 - DNA, 26 bp, Homo sapiens
aatatttaataaaataaattacagtc

SEQ ID NO: 41506 - DNA, 26 bp, Homo sapiens
atatttaataaaataaattacagtcc

SEQ ID NO: 41507 - DNA, 26 bp, Homo sapiens
tatttaataaaataaattacagtcca

SEQ ID NO: 41508 - DNA, 26 bp, Homo sapiens
atttaataaaataaattacagtccac

SEQ ID NO: 41509 - DNA, 26 bp, Homo sapiens
tttaataaaataaattacagtccaca

SEQ ID NO: 41510 - DNA, 26 bp, Homo sapiens
ttaataaaataaattacagtccacag

SEQ ID NO: 41511 - DNA, 26 bp, Homo sapiens
taataaaataaattacagtccacagt

SEQ ID NO: 41512 - DNA, 26 bp, Homo sapiens
aataaaataaattacagtccacagtt

SEQ ID NO: 41513 - DNA, 26 bp, Homo sapiens
ataaaataaattacagtccacagttt

SEQ ID NO: 41514 - DNA, 26 bp, Homo sapiens
taaaataaattacagtccacagtttc

SEQ ID NO: 41515 - DNA, 26 bp, Homo sapiens
aaaataaattacagtccacagtttcc

SEQ ID NO: 41516 - DNA, 26 bp, Homo sapiens
aaataaattacagtccacagtttcct

SEQ ID NO: 41517 - DNA, 26 bp, Homo sapiens
aataaattacagtccacagtttccta

SEQ ID NO: 41518 - DNA, 26 bp, Homo sapiens
ataaattacagtccacagtttcctag

SEQ ID NO: 41519 - DNA, 26 bp, Homo sapiens
taaattacagtccacagtttcctagt

SEQ ID NO: 41520 - DNA, 26 bp, Homo sapiens
aaattacagtccacagtttcctagtg

SEQ ID NO: 41521 - DNA, 26 bp, Homo sapiens
aattacagtccacagtttcctagtga

SEQ ID NO: 41522 - DNA, 26 bp, Homo sapiens
attacagtccacagtttcctagtgaa

SEQ ID NO: 41523 - DNA, 26 bp, Homo sapiens
ttacagtccacagtttcctagtgaag

SEQ ID NO: 41524 - DNA, 26 bp, Homo sapiens
tacagtccacagtttcctagtgaaga

SEQ ID NO: 41525 - DNA, 26 bp, Homo sapiens
acagtccacagtttcctagtgaagat

SEQ ID NO: 41526 - DNA, 26 bp, Homo sapiens
cagtccacagtttcctagtgaagata

SEQ ID NO: 41527 - DNA, 26 bp, Homo sapiens
agtccacagtttcctagtgaagataa

SEQ ID NO: 41528 - DNA, 26 bp, Homo sapiens
gtccacagtttcctagtgaagataaa

SEQ ID NO: 41529 - DNA, 26 bp, Homo sapiens
tccacagtttcctagtgaagataaat

SEQ ID NO: 41530 - DNA, 26 bp, Homo sapiens
ccacagtttcctagtgaagataaata

SEQ ID NO: 41531 - DNA, 26 bp, Homo sapiens
cacagtttcctagtgaagataaatac

SEQ ID NO: 41532 - DNA, 26 bp, Homo sapiens
acagtttcctagtgaagataaataca

SEQ ID NO: 41533 - DNA, 26 bp, Homo sapiens
cagtttcctagtgaagataaatacaa

SEQ ID NO: 41534 - DNA, 26 bp, Homo sapiens
agtttcctagtgaagataaatacaag

SEQ ID NO: 41535 - DNA, 26 bp, Homo sapiens
gtttcctagtgaagataaatacaaga

SEQ ID NO: 41536 - DNA, 26 bp, Homo sapiens
tttcctagtgaagataaatacaagag

SEQ ID NO: 41537 - DNA, 26 bp, Homo sapiens
ttcctagtgaagataaatacaagagt

SEQ ID NO: 41538 - DNA, 26 bp, Homo sapiens
tcctagtgaagataaatacaagagta

SEQ ID NO: 41539 - DNA, 26 bp, Homo sapiens
cctagtgaagataaatacaagagtaa

SEQ ID NO: 41540 - DNA, 26 bp, Homo sapiens
ctagtgaagataaatacaagagtaaa

SEQ ID NO: 41541 - DNA, 26 bp, Homo sapiens
tagtgaagataaatacaagagtaaat

SEQ ID NO: 41542 - DNA, 26 bp, Homo sapiens
agtgaagataaatacaagagtaaatg

SEQ ID NO: 41543 - DNA, 26 bp, Homo sapiens
gtgaagataaatacaagagtaaatgt

SEQ ID NO: 41544 - DNA, 26 bp, Homo sapiens
tgaagataaatacaagagtaaatgtt

SEQ ID NO: 41545 - DNA, 26 bp, Homo sapiens
gaagataaatacaagagtaaatgttt

SEQ ID NO: 41546 - DNA, 26 bp, Homo sapiens
aagataaatacaagagtaaatgtttg

SEQ ID NO: 41547 - DNA, 26 bp, Homo sapiens
agataaatacaagagtaaatgtttgc

SEQ ID NO: 41548 - DNA, 26 bp, Homo sapiens
gataaatacaagagtaaatgtttgca

SEQ ID NO: 41549 - DNA, 26 bp, Homo sapiens
ataaatacaagagtaaatgtttgcag

SEQ ID NO: 41550 - DNA, 26 bp, Homo sapiens
taaatacaagagtaaatgtttgcagc

SEQ ID NO: 41551 - DNA, 26 bp, Homo sapiens
aaatacaagagtaaatgtttgcagct

SEQ ID NO: 41552 - DNA, 26 bp, Homo sapiens
aatacaagagtaaatgtttgcagcta

SEQ ID NO: 41553 - DNA, 26 bp, Homo sapiens
atacaagagtaaatgtttgcagctag

SEQ ID NO: 41554 - DNA, 26 bp, Homo sapiens
tacaagagtaaatgtttgcagctagc

SEQ ID NO: 41555 - DNA, 26 bp, Homo sapiens
acaagagtaaatgtttgcagctagca

SEQ ID NO: 41556 - DNA, 26 bp, Homo sapiens
caagagtaaatgtttgcagctagcat

SEQ ID NO: 41557 - DNA, 26 bp, Homo sapiens
aagagtaaatgtttgcagctagcatc

SEQ ID NO: 41558 - DNA, 26 bp, Homo sapiens
agagtaaatgtttgcagctagcatca

SEQ ID NO: 41559 - DNA, 26 bp, Homo sapiens
gagtaaatgtttgcagctagcatcaa

SEQ ID NO: 41560 - DNA, 26 bp, Homo sapiens
agtaaatgtttgcagctagcatcaac

SEQ ID NO: 41561 - DNA, 26 bp, Homo sapiens
gtaaatgtttgcagctagcatcaact

SEQ ID NO: 41562 - DNA, 26 bp, Homo sapiens
taaatgtttgcagctagcatcaactt

SEQ ID NO: 41563 - DNA, 26 bp, Homo sapiens
aaatgtttgcagctagcatcaacttc

SEQ ID NO: 41564 - DNA, 26 bp, Homo sapiens
aatgtttgcagctagcatcaacttca

SEQ ID NO: 41565 - DNA, 26 bp, Homo sapiens
atgtttgcagctagcatcaacttcac

SEQ ID NO: 41566 - DNA, 26 bp, Homo sapiens
tgtttgcagctagcatcaacttcact

SEQ ID NO: 41567 - DNA, 26 bp, Homo sapiens
gtttgcagctagcatcaacttcactt

SEQ ID NO: 41568 - DNA, 26 bp, Homo sapiens
tttgcagctagcatcaacttcacttt

SEQ ID NO: 41569 - DNA, 26 bp, Homo sapiens
ttgcagctagcatcaacttcacttta

SEQ ID NO: 41570 - DNA, 26 bp, Homo sapiens
tgcagctagcatcaacttcactttaa

SEQ ID NO: 41571 - DNA, 26 bp, Homo sapiens
gcagctagcatcaacttcactttaaa

SEQ ID NO: 41572 - DNA, 26 bp, Homo sapiens
cagctagcatcaacttcactttaaag

SEQ ID NO: 41573 - DNA, 26 bp, Homo sapiens
agctagcatcaacttcactttaaagg

SEQ ID NO: 41574 - DNA, 26 bp, Homo sapiens
gctagcatcaacttcactttaaaggc

SEQ ID NO: 41575 - DNA, 26 bp, Homo sapiens
ctagcatcaacttcactttaaaggct

SEQ ID NO: 41576 - DNA, 26 bp, Homo sapiens
tagcatcaacttcactttaaaggctt

SEQ ID NO: 41577 - DNA, 26 bp, Homo sapiens
agcatcaacttcactttaaaggctta

SEQ ID NO: 41578 - DNA, 26 bp, Homo sapiens
gcatcaacttcactttaaaggcttaa

SEQ ID NO: 41579 - DNA, 26 bp, Homo sapiens
catcaacttcactttaaaggcttaaa

SEQ ID NO: 41580 - DNA, 26 bp, Homo sapiens
atcaacttcactttaaaggcttaaag

SEQ ID NO: 41581 - DNA, 26 bp, Homo sapiens
tcaacttcactttaaaggcttaaagt

SEQ ID NO: 41582 - DNA, 26 bp, Homo sapiens
caacttcactttaaaggcttaaagta

SEQ ID NO: 41583 - DNA, 26 bp, Homo sapiens
aacttcactttaaaggcttaaagtat

SEQ ID NO: 41584 - DNA, 26 bp, Homo sapiens
acttcactttaaaggcttaaagtatt

SEQ ID NO: 41585 - DNA, 26 bp, Homo sapiens
cttcactttaaaggcttaaagtattt

SEQ ID NO: 41586 - DNA, 26 bp, Homo sapiens
ttcactttaaaggcttaaagtattta

SEQ ID NO: 41587 - DNA, 26 bp, Homo sapiens
tcactttaaaggcttaaagtatttaa

SEQ ID NO: 41588 - DNA, 26 bp, Homo sapiens
cactttaaaggcttaaagtatttaat

SEQ ID NO: 41589 - DNA, 26 bp, Homo sapiens
actttaaaggcttaaagtatttaata

SEQ ID NO: 41590 - DNA, 26 bp, Homo sapiens
ctttaaaggcttaaagtatttaatat

SEQ ID NO: 41591 - DNA, 26 bp, Homo sapiens
tttaaaggcttaaagtatttaatatt

SEQ ID NO: 41592 - DNA, 26 bp, Homo sapiens
ttaaaggcttaaagtatttaatattt

SEQ ID NO: 41593 - DNA, 26 bp, Homo sapiens
taaaggcttaaagtatttaatattta

SEQ ID NO: 41594 - DNA, 26 bp, Homo sapiens
aaaggcttaaagtatttaatatttaa

SEQ ID NO: 41595 - DNA, 26 bp, Homo sapiens
aaggcttaaagtatttaatatttaaa

SEQ ID NO: 41596 - DNA, 26 bp, Homo sapiens
aggcttaaagtatttaatatttaaat

SEQ ID NO: 41597 - DNA, 26 bp, Homo sapiens
ggcttaaagtatttaatatttaaata

SEQ ID NO: 41598 - DNA, 26 bp, Homo sapiens
gcttaaagtatttaatatttaaataa

SEQ ID NO: 41599 - DNA, 26 bp, Homo sapiens
cttaaagtatttaatatttaaataag

SEQ ID NO: 41600 - DNA, 26 bp, Homo sapiens
ttaaagtatttaatatttaaataaga

SEQ ID NO: 41601 - DNA, 26 bp, Homo sapiens
taaagtatttaatatttaaataagag

SEQ ID NO: 41602 - DNA, 26 bp, Homo sapiens
aaagtatttaatatttaaataagaga

SEQ ID NO: 41603 - DNA, 26 bp, Homo sapiens
aagtatttaatatttaaataagagaa

SEQ ID NO: 41604 - DNA, 26 bp, Homo sapiens
agtatttaatatttaaataagagaaa

SEQ ID NO: 41605 - DNA, 26 bp, Homo sapiens
gtatttaatatttaaataagagaaac

SEQ ID NO: 41606 - DNA, 26 bp, Homo sapiens
tatttaatatttaaataagagaaact

SEQ ID NO: 41607 - DNA, 26 bp, Homo sapiens
atttaatatttaaataagagaaactg

SEQ ID NO: 41608 - DNA, 26 bp, Homo sapiens
tttaatatttaaataagagaaactgg

SEQ ID NO: 41609 - DNA, 26 bp, Homo sapiens
ttaatatttaaataagagaaactggt

SEQ ID NO: 41610 - DNA, 26 bp, Homo sapiens
taatatttaaataagagaaactggtt

SEQ ID NO: 41611 - DNA, 26 bp, Homo sapiens
aatatttaaataagagaaactggttc

SEQ ID NO: 41612 - DNA, 26 bp, Homo sapiens
atatttaaataagagaaactggttca

SEQ ID NO: 41613 - DNA, 26 bp, Homo sapiens
tatttaaataagagaaactggttcaa

SEQ ID NO: 41614 - DNA, 26 bp, Homo sapiens
atttaaataagagaaactggttcaac

SEQ ID NO: 41615 - DNA, 26 bp, Homo sapiens
tttaaataagagaaactggttcaaca

SEQ ID NO: 41616 - DNA, 26 bp, Homo sapiens
ttaaataagagaaactggttcaacat

SEQ ID NO: 41617 - DNA, 26 bp, Homo sapiens
taaataagagaaactggttcaacatt

SEQ ID NO: 41618 - DNA, 26 bp, Homo sapiens
aaataagagaaactggttcaacattg

SEQ ID NO: 41619 - DNA, 26 bp, Homo sapiens
aataagagaaactggttcaacattgt

SEQ ID NO: 41620 - DNA, 26 bp, Homo sapiens
ataagagaaactggttcaacattgta

SEQ ID NO: 41621 - DNA, 26 bp, Homo sapiens
taagagaaactggttcaacattgtat

SEQ ID NO: 41622 - DNA, 26 bp, Homo sapiens
aagagaaactggttcaacattgtatg

SEQ ID NO: 41623 - DNA, 26 bp, Homo sapiens
agagaaactggttcaacattgtatgc

SEQ ID NO: 41624 - DNA, 26 bp, Homo sapiens
gagaaactggttcaacattgtatgct

SEQ ID NO: 41625 - DNA, 26 bp, Homo sapiens
agaaactggttcaacattgtatgctt

SEQ ID NO: 41626 - DNA, 26 bp, Homo sapiens
gaaactggttcaacattgtatgcttc

SEQ ID NO: 41627 - DNA, 26 bp, Homo sapiens
aaactggttcaacattgtatgcttcc

SEQ ID NO: 41628 - DNA, 26 bp, Homo sapiens
aactggttcaacattgtatgcttccc

SEQ ID NO: 41629 - DNA, 26 bp, Homo sapiens
actggttcaacattgtatgcttccct

SEQ ID NO: 41630 - DNA, 26 bp, Homo sapiens
ctggttcaacattgtatgcttccctc

SEQ ID NO: 41631 - DNA, 26 bp, Homo sapiens
tggttcaacattgtatgcttccctca

SEQ ID NO: 41632 - DNA, 26 bp, Homo sapiens
ggttcaacattgtatgcttccctcac

SEQ ID NO: 41633 - DNA, 26 bp, Homo sapiens
gttcaacattgtatgcttccctcacc

SEQ ID NO: 41634 - DNA, 26 bp, Homo sapiens
ttcaacattgtatgcttccctcaccc

SEQ ID NO: 41635 - DNA, 26 bp, Homo sapiens
tcaacattgtatgcttccctcaccct

SEQ ID NO: 41636 - DNA, 26 bp, Homo sapiens
caacattgtatgcttccctcaccctc

SEQ ID NO: 41637 - DNA, 26 bp, Homo sapiens
aacattgtatgcttccctcaccctcc

SEQ ID NO: 41638 - DNA, 26 bp, Homo sapiens
acattgtatgcttccctcaccctcct

SEQ ID NO: 41639 - DNA, 26 bp, Homo sapiens
cattgtatgcttccctcaccctccta

SEQ ID NO: 41640 - DNA, 26 bp, Homo sapiens
attgtatgcttccctcaccctcctat

SEQ ID NO: 41641 - DNA, 26 bp, Homo sapiens
ttgtatgcttccctcaccctcctatc

SEQ ID NO: 41642 - DNA, 26 bp, Homo sapiens
tgtatgcttccctcaccctcctatcc

SEQ ID NO: 41643 - DNA, 26 bp, Homo sapiens
gtatgcttccctcaccctcctatcca

SEQ ID NO: 41644 - DNA, 26 bp, Homo sapiens
tatgcttccctcaccctcctatccat

SEQ ID NO: 41645 - DNA, 26 bp, Homo sapiens
atgcttccctcaccctcctatccatc

SEQ ID NO: 41646 - DNA, 26 bp, Homo sapiens
tgcttccctcaccctcctatccatcg

SEQ ID NO: 41647 - DNA, 26 bp, Homo sapiens
gcttccctcaccctcctatccatcgt

SEQ ID NO: 41648 - DNA, 26 bp, Homo sapiens
cttccctcaccctcctatccatcgtt

SEQ ID NO: 41649 - DNA, 26 bp, Homo sapiens
ttccctcaccctcctatccatcgttt

SEQ ID NO: 41650 - DNA, 26 bp, Homo sapiens
tccctcaccctcctatccatcgtttt

SEQ ID NO: 41651 - DNA, 26 bp, Homo sapiens
ccctcaccctcctatccatcgttttt

SEQ ID NO: 41652 - DNA, 26 bp, Homo sapiens
cctcaccctcctatccatcgtttttc

SEQ ID NO: 41653 - DNA, 26 bp, Homo sapiens
ctcaccctcctatccatcgtttttca

SEQ ID NO: 41654 - DNA, 26 bp, Homo sapiens
tcaccctcctatccatcgtttttcaa

SEQ ID NO: 41655 - DNA, 26 bp, Homo sapiens
caccctcctatccatcgtttttcaaa

SEQ ID NO: 41656 - DNA, 26 bp, Homo sapiens
accctcctatccatcgtttttcaaat

SEQ ID NO: 41657 - DNA, 26 bp, Homo sapiens
ccctcctatccatcgtttttcaaata

SEQ ID NO: 41658 - DNA, 26 bp, Homo sapiens
cctcctatccatcgtttttcaaatat

SEQ ID NO: 41659 - DNA, 26 bp, Homo sapiens
ctcctatccatcgtttttcaaatatg

SEQ ID NO: 41660 - DNA, 26 bp, Homo sapiens
tcctatccatcgtttttcaaatatgg

SEQ ID NO: 41661 - DNA, 26 bp, Homo sapiens
cctatccatcgtttttcaaatatgga

SEQ ID NO: 41662 - DNA, 26 bp, Homo sapiens
ctatccatcgtttttcaaatatggag

SEQ ID NO: 41663 - DNA, 26 bp, Homo sapiens
tatccatcgtttttcaaatatggaga

SEQ ID NO: 41664 - DNA, 26 bp, Homo sapiens
atccatcgtttttcaaatatggagag

SEQ ID NO: 41665 - DNA, 26 bp, Homo sapiens
tccatcgtttttcaaatatggagagc

SEQ ID NO: 41666 - DNA, 26 bp, Homo sapiens
ccatcgtttttcaaatatggagagca

SEQ ID NO: 41667 - DNA, 26 bp, Homo sapiens
catcgtttttcaaatatggagagcaa

SEQ ID NO: 41668 - DNA, 26 bp, Homo sapiens
atcgtttttcaaatatggagagcaac

SEQ ID NO: 41669 - DNA, 26 bp, Homo sapiens
tcgtttttcaaatatggagagcaaca

SEQ ID NO: 41670 - DNA, 26 bp, Homo sapiens
cgtttttcaaatatggagagcaacat

SEQ ID NO: 41671 - DNA, 26 bp, Homo sapiens
gtttttcaaatatggagagcaacatt

SEQ ID NO: 41672 - DNA, 26 bp, Homo sapiens
tttttcaaatatggagagcaacattc

SEQ ID NO: 41673 - DNA, 26 bp, Homo sapiens
ttttcaaatatggagagcaacattct

SEQ ID NO: 41674 - DNA, 26 bp, Homo sapiens
tttcaaatatggagagcaacattctt

SEQ ID NO: 41675 - DNA, 26 bp, Homo sapiens
ttcaaatatggagagcaacattcttg

SEQ ID NO: 41676 - DNA, 26 bp, Homo sapiens
tcaaatatggagagcaacattcttga

SEQ ID NO: 41677 - DNA, 26 bp, Homo sapiens
caaatatggagagcaacattcttgaa

SEQ ID NO: 41678 - DNA, 26 bp, Homo sapiens
aaatatggagagcaacattcttgaat

SEQ ID NO: 41679 - DNA, 26 bp, Homo sapiens
aatatggagagcaacattcttgaatt

SEQ ID NO: 41680 - DNA, 26 bp, Homo sapiens
atatggagagcaacattcttgaatta

SEQ ID NO: 41681 - DNA, 26 bp, Homo sapiens
tatggagagcaacattcttgaattat

SEQ ID NO: 41682 - DNA, 26 bp, Homo sapiens
atggagagcaacattcttgaattata

SEQ ID NO: 41683 - DNA, 26 bp, Homo sapiens
tggagagcaacattcttgaattatag

SEQ ID NO: 41684 - DNA, 26 bp, Homo sapiens
ggagagcaacattcttgaattatagc

SEQ ID NO: 41685 - DNA, 26 bp, Homo sapiens
gagagcaacattcttgaattatagca

SEQ ID NO: 41686 - DNA, 26 bp, Homo sapiens
agagcaacattcttgaattatagcat

SEQ ID NO: 41687 - DNA, 26 bp, Homo sapiens
gagcaacattcttgaattatagcatc

SEQ ID NO: 41688 - DNA, 26 bp, Homo sapiens
agcaacattcttgaattatagcatct

SEQ ID NO: 41689 - DNA, 26 bp, Homo sapiens
gcaacattcttgaattatagcatcta

SEQ ID NO: 41690 - DNA, 26 bp, Homo sapiens
caacattcttgaattatagcatctat

SEQ ID NO: 41691 - DNA, 26 bp, Homo sapiens
aacattcttgaattatagcatctatt

SEQ ID NO: 41692 - DNA, 26 bp, Homo sapiens
acattcttgaattatagcatctattg

SEQ ID NO: 41693 - DNA, 26 bp, Homo sapiens
cattcttgaattatagcatctattga

SEQ ID NO: 41694 - DNA, 26 bp, Homo sapiens
attcttgaattatagcatctattgac

SEQ ID NO: 41695 - DNA, 26 bp, Homo sapiens
ttcttgaattatagcatctattgaca

SEQ ID NO: 41696 - DNA, 26 bp, Homo sapiens
tcttgaattatagcatctattgacaa

SEQ ID NO: 41697 - DNA, 26 bp, Homo sapiens
cttgaattatagcatctattgacaac

SEQ ID NO: 41698 - DNA, 26 bp, Homo sapiens
ttgaattatagcatctattgacaaca

SEQ ID NO: 41699 - DNA, 26 bp, Homo sapiens
tgaattatagcatctattgacaacaa

SEQ ID NO: 41700 - DNA, 26 bp, Homo sapiens
gaattatagcatctattgacaacaaa

SEQ ID NO: 41701 - DNA, 26 bp, Homo sapiens
aattatagcatctattgacaacaaat

SEQ ID NO: 41702 - DNA, 26 bp, Homo sapiens
attatagcatctattgacaacaaatc

SEQ ID NO: 41703 - DNA, 26 bp, Homo sapiens
ttatagcatctattgacaacaaatct

SEQ ID NO: 41704 - DNA, 26 bp, Homo sapiens
tatagcatctattgacaacaaatcta

SEQ ID NO: 41705 - DNA, 26 bp, Homo sapiens
atagcatctattgacaacaaatctag

SEQ ID NO: 41706 - DNA, 26 bp, Homo sapiens
tagcatctattgacaacaaatctaga

SEQ ID NO: 41707 - DNA, 26 bp, Homo sapiens
agcatctattgacaacaaatctagaa

SEQ ID NO: 41708 - DNA, 26 bp, Homo sapiens
gcatctattgacaacaaatctagaat

SEQ ID NO: 41709 - DNA, 26 bp, Homo sapiens
catctattgacaacaaatctagaatt

SEQ ID NO: 41710 - DNA, 26 bp, Homo sapiens
atctattgacaacaaatctagaatta

SEQ ID NO: 41711 - DNA, 26 bp, Homo sapiens
tctattgacaacaaatctagaattag

SEQ ID NO: 41712 - DNA, 26 bp, Homo sapiens
ctattgacaacaaatctagaattagt

SEQ ID NO: 41713 - DNA, 26 bp, Homo sapiens
tattgacaacaaatctagaattagtt

SEQ ID NO: 41714 - DNA, 26 bp, Homo sapiens
attgacaacaaatctagaattagttc

SEQ ID NO: 41715 - DNA, 26 bp, Homo sapiens
ttgacaacaaatctagaattagttca

SEQ ID NO: 41716 - DNA, 26 bp, Homo sapiens
tgacaacaaatctagaattagttcac

SEQ ID NO: 41717 - DNA, 26 bp, Homo sapiens
gacaacaaatctagaattagttcact

SEQ ID NO: 41718 - DNA, 26 bp, Homo sapiens
acaacaaatctagaattagttcactc

SEQ ID NO: 41719 - DNA, 26 bp, Homo sapiens
caacaaatctagaattagttcactct

SEQ ID NO: 41720 - DNA, 26 bp, Homo sapiens
aacaaatctagaattagttcactctg

SEQ ID NO: 41721 - DNA, 26 bp, Homo sapiens
acaaatctagaattagttcactctga

SEQ ID NO: 41722 - DNA, 26 bp, Homo sapiens
caaatctagaattagttcactctgag

SEQ ID NO: 41723 - DNA, 26 bp, Homo sapiens
aaatctagaattagttcactctgaga

SEQ ID NO: 41724 - DNA, 26 bp, Homo sapiens
aatctagaattagttcactctgagat

SEQ ID NO: 41725 - DNA, 26 bp, Homo sapiens
atctagaattagttcactctgagata

SEQ ID NO: 41726 - DNA, 26 bp, Homo sapiens
tctagaattagttcactctgagataa

SEQ ID NO: 41727 - DNA, 26 bp, Homo sapiens
ctagaattagttcactctgagataaa

SEQ ID NO: 41728 - DNA, 26 bp, Homo sapiens
tagaattagttcactctgagataaac

SEQ ID NO: 41729 - DNA, 26 bp, Homo sapiens
agaattagttcactctgagataaact

SEQ ID NO: 41730 - DNA, 26 bp, Homo sapiens
gaattagttcactctgagataaactc

SEQ ID NO: 41731 - DNA, 26 bp, Homo sapiens
aattagttcactctgagataaactca

SEQ ID NO: 41732 - DNA, 26 bp, Homo sapiens
attagttcactctgagataaactcat

SEQ ID NO: 41733 - DNA, 26 bp, Homo sapiens
ttagttcactctgagataaactcata

SEQ ID NO: 41734 - DNA, 26 bp, Homo sapiens
tagttcactctgagataaactcatag

SEQ ID NO: 41735 - DNA, 26 bp, Homo sapiens
agttcactctgagataaactcatagg

SEQ ID NO: 41736 - DNA, 26 bp, Homo sapiens
gttcactctgagataaactcataggg

SEQ ID NO: 41737 - DNA, 26 bp, Homo sapiens
ttcactctgagataaactcatagggt

SEQ ID NO: 41738 - DNA, 26 bp, Homo sapiens
tcactctgagataaactcatagggtt

SEQ ID NO: 41739 - DNA, 26 bp, Homo sapiens
cactctgagataaactcatagggttc

SEQ ID NO: 41740 - DNA, 26 bp, Homo sapiens
actctgagataaactcatagggttcc

SEQ ID NO: 41741 - DNA, 26 bp, Homo sapiens
ctctgagataaactcatagggttcct

SEQ ID NO: 41742 - DNA, 26 bp, Homo sapiens
tctgagataaactcatagggttccta

SEQ ID NO: 41743 - DNA, 26 bp, Homo sapiens
ctgagataaactcatagggttcctag

SEQ ID NO: 41744 - DNA, 26 bp, Homo sapiens
tgagataaactcatagggttcctaga

SEQ ID NO: 41745 - DNA, 26 bp, Homo sapiens
gagataaactcatagggttcctagat

SEQ ID NO: 41746 - DNA, 26 bp, Homo sapiens
agataaactcatagggttcctagatt

SEQ ID NO: 41747 - DNA, 26 bp, Homo sapiens
gataaactcatagggttcctagatta

SEQ ID NO: 41748 - DNA, 26 bp, Homo sapiens
ataaactcatagggttcctagattat

SEQ ID NO: 41749 - DNA, 26 bp, Homo sapiens
taaactcatagggttcctagattata

SEQ ID NO: 41750 - DNA, 26 bp, Homo sapiens
aaactcatagggttcctagattatac

SEQ ID NO: 41751 - DNA, 26 bp, Homo sapiens
aactcatagggttcctagattatacc

SEQ ID NO: 41752 - DNA, 26 bp, Homo sapiens
actcatagggttcctagattatacca

SEQ ID NO: 41753 - DNA, 26 bp, Homo sapiens
ctcatagggttcctagattataccaa

SEQ ID NO: 41754 - DNA, 26 bp, Homo sapiens
tcatagggttcctagattataccaag

SEQ ID NO: 41755 - DNA, 26 bp, Homo sapiens
catagggttcctagattataccaaga

SEQ ID NO: 41756 - DNA, 26 bp, Homo sapiens
atagggttcctagattataccaagaa

SEQ ID NO: 41757 - DNA, 26 bp, Homo sapiens
tagggttcctagattataccaagaac

SEQ ID NO: 41758 - DNA, 26 bp, Homo sapiens
agggttcctagattataccaagaaca

SEQ ID NO: 41759 - DNA, 26 bp, Homo sapiens
gggttcctagattataccaagaacat

SEQ ID NO: 41760 - DNA, 26 bp, Homo sapiens
ggttcctagattataccaagaacata

SEQ ID NO: 41761 - DNA, 26 bp, Homo sapiens
gttcctagattataccaagaacataa

SEQ ID NO: 41762 - DNA, 26 bp, Homo sapiens
ttcctagattataccaagaacataaa

SEQ ID NO: 41763 - DNA, 26 bp, Homo sapiens
tcctagattataccaagaacataaac

SEQ ID NO: 41764 - DNA, 26 bp, Homo sapiens
cctagattataccaagaacataaaca

SEQ ID NO: 41765 - DNA, 26 bp, Homo sapiens
ctagattataccaagaacataaacat

SEQ ID NO: 41766 - DNA, 26 bp, Homo sapiens
tagattataccaagaacataaacatt

SEQ ID NO: 41767 - DNA, 26 bp, Homo sapiens
agattataccaagaacataaacattc

SEQ ID NO: 41768 - DNA, 26 bp, Homo sapiens
gattataccaagaacataaacattca

SEQ ID NO: 41769 - DNA, 26 bp, Homo sapiens
attataccaagaacataaacattcac

SEQ ID NO: 41770 - DNA, 26 bp, Homo sapiens
ttataccaagaacataaacattcaca

SEQ ID NO: 41771 - DNA, 26 bp, Homo sapiens
tataccaagaacataaacattcacaa

SEQ ID NO: 41772 - DNA, 26 bp, Homo sapiens
ataccaagaacataaacattcacaaa

SEQ ID NO: 41773 - DNA, 26 bp, Homo sapiens
taccaagaacataaacattcacaaag

SEQ ID NO: 41774 - DNA, 26 bp, Homo sapiens
accaagaacataaacattcacaaagt

SEQ ID NO: 41775 - DNA, 26 bp, Homo sapiens
ccaagaacataaacattcacaaagta

SEQ ID NO: 41776 - DNA, 26 bp, Homo sapiens
caagaacataaacattcacaaagtaa

SEQ ID NO: 41777 - DNA, 26 bp, Homo sapiens
aagaacataaacattcacaaagtaaa

SEQ ID NO: 41778 - DNA, 26 bp, Homo sapiens
agaacataaacattcacaaagtaaat

SEQ ID NO: 41779 - DNA, 26 bp, Homo sapiens
gaacataaacattcacaaagtaaata

SEQ ID NO: 41780 - DNA, 26 bp, Homo sapiens
aacataaacattcacaaagtaaatac

SEQ ID NO: 41781 - DNA, 26 bp, Homo sapiens
acataaacattcacaaagtaaatact

SEQ ID NO: 41782 - DNA, 26 bp, Homo sapiens
cataaacattcacaaagtaaatactt

SEQ ID NO: 41783 - DNA, 26 bp, Homo sapiens
ataaacattcacaaagtaaatacttc

SEQ ID NO: 41784 - DNA, 26 bp, Homo sapiens
taaacattcacaaagtaaatacttca

SEQ ID NO: 41785 - DNA, 26 bp, Homo sapiens
aaacattcacaaagtaaatacttcat

SEQ ID NO: 41786 - DNA, 26 bp, Homo sapiens
aacattcacaaagtaaatacttcatg

SEQ ID NO: 41787 - DNA, 26 bp, Homo sapiens
acattcacaaagtaaatacttcatgt

SEQ ID NO: 41788 - DNA, 26 bp, Homo sapiens
cattcacaaagtaaatacttcatgtc

SEQ ID NO: 41789 - DNA, 26 bp, Homo sapiens
attcacaaagtaaatacttcatgtcc

SEQ ID NO: 41790 - DNA, 26 bp, Homo sapiens
ttcacaaagtaaatacttcatgtcct

SEQ ID NO: 41791 - DNA, 26 bp, Homo sapiens
tcacaaagtaaatacttcatgtcctc

SEQ ID NO: 41792 - DNA, 26 bp, Homo sapiens
cacaaagtaaatacttcatgtcctca

SEQ ID NO: 41793 - DNA, 26 bp, Homo sapiens
acaaagtaaatacttcatgtcctcac

SEQ ID NO: 41794 - DNA, 26 bp, Homo sapiens
caaagtaaatacttcatgtcctcaca

SEQ ID NO: 41795 - DNA, 26 bp, Homo sapiens
aaagtaaatacttcatgtcctcacat

SEQ ID NO: 41796 - DNA, 26 bp, Homo sapiens
aagtaaatacttcatgtcctcacatg

SEQ ID NO: 41797 - DNA, 26 bp, Homo sapiens
agtaaatacttcatgtcctcacatgg

SEQ ID NO: 41798 - DNA, 26 bp, Homo sapiens
gtaaatacttcatgtcctcacatggg

SEQ ID NO: 41799 - DNA, 26 bp, Homo sapiens
taaatacttcatgtcctcacatgggg

SEQ ID NO: 41800 - DNA, 26 bp, Homo sapiens
aaatacttcatgtcctcacatgggga

SEQ ID NO: 41801 - DNA, 26 bp, Homo sapiens
aatacttcatgtcctcacatggggag

SEQ ID NO: 41802 - DNA, 26 bp, Homo sapiens
atacttcatgtcctcacatggggagt

SEQ ID NO: 41803 - DNA, 26 bp, Homo sapiens
tacttcatgtcctcacatggggagtg

SEQ ID NO: 41804 - DNA, 26 bp, Homo sapiens
acttcatgtcctcacatggggagtgt

SEQ ID NO: 41805 - DNA, 26 bp, Homo sapiens
cttcatgtcctcacatggggagtgtg

SEQ ID NO: 41806 - DNA, 26 bp, Homo sapiens
ttcatgtcctcacatggggagtgtgc

SEQ ID NO: 41807 - DNA, 26 bp, Homo sapiens
tcatgtcctcacatggggagtgtgca

SEQ ID NO: 41808 - DNA, 26 bp, Homo sapiens
catgtcctcacatggggagtgtgcat

SEQ ID NO: 41809 - DNA, 26 bp, Homo sapiens
atgtcctcacatggggagtgtgcatt

SEQ ID NO: 41810 - DNA, 26 bp, Homo sapiens
tgtcctcacatggggagtgtgcattt

SEQ ID NO: 41811 - DNA, 26 bp, Homo sapiens
gtcctcacatggggagtgtgcatttg

SEQ ID NO: 41812 - DNA, 26 bp, Homo sapiens
tcctcacatggggagtgtgcatttgc

SEQ ID NO: 41813 - DNA, 26 bp, Homo sapiens
cctcacatggggagtgtgcatttgct

SEQ ID NO: 41814 - DNA, 26 bp, Homo sapiens
ctcacatggggagtgtgcatttgctc

SEQ ID NO: 41815 - DNA, 26 bp, Homo sapiens
tcacatggggagtgtgcatttgctca

SEQ ID NO: 41816 - DNA, 26 bp, Homo sapiens
cacatggggagtgtgcatttgctcag

SEQ ID NO: 41817 - DNA, 26 bp, Homo sapiens
acatggggagtgtgcatttgctcagg

SEQ ID NO: 41818 - DNA, 26 bp, Homo sapiens
catggggagtgtgcatttgctcagga

SEQ ID NO: 41819 - DNA, 26 bp, Homo sapiens
atggggagtgtgcatttgctcaggat

SEQ ID NO: 41820 - DNA, 26 bp, Homo sapiens
tggggagtgtgcatttgctcaggata

SEQ ID NO: 41821 - DNA, 26 bp, Homo sapiens
ggggagtgtgcatttgctcaggatat

SEQ ID NO: 41822 - DNA, 26 bp, Homo sapiens
gggagtgtgcatttgctcaggatata

SEQ ID NO: 41823 - DNA, 26 bp, Homo sapiens
ggagtgtgcatttgctcaggatataa

SEQ ID NO: 41824 - DNA, 26 bp, Homo sapiens
gagtgtgcatttgctcaggatataat

SEQ ID NO: 41825 - DNA, 26 bp, Homo sapiens
agtgtgcatttgctcaggatataatc

SEQ ID NO: 41826 - DNA, 26 bp, Homo sapiens
gtgtgcatttgctcaggatataatct

SEQ ID NO: 41827 - DNA, 26 bp, Homo sapiens
tgtgcatttgctcaggatataatctt

SEQ ID NO: 41828 - DNA, 26 bp, Homo sapiens
gtgcatttgctcaggatataatcttt

SEQ ID NO: 41829 - DNA, 26 bp, Homo sapiens
tgcatttgctcaggatataatctttg

SEQ ID NO: 41830 - DNA, 26 bp, Homo sapiens
gcatttgctcaggatataatctttgg

SEQ ID NO: 41831 - DNA, 26 bp, Homo sapiens
catttgctcaggatataatctttggg

SEQ ID NO: 41832 - DNA, 26 bp, Homo sapiens
atttgctcaggatataatctttgggt

SEQ ID NO: 41833 - DNA, 26 bp, Homo sapiens
tttgctcaggatataatctttgggtc

SEQ ID NO: 41834 - DNA, 26 bp, Homo sapiens
ttgctcaggatataatctttgggtcc

SEQ ID NO: 41835 - DNA, 26 bp, Homo sapiens
tgctcaggatataatctttgggtcct

SEQ ID NO: 41836 - DNA, 26 bp, Homo sapiens
gctcaggatataatctttgggtcctt

SEQ ID NO: 41837 - DNA, 26 bp, Homo sapiens
ctcaggatataatctttgggtccttc

SEQ ID NO: 41838 - DNA, 26 bp, Homo sapiens
tcaggatataatctttgggtccttct

SEQ ID NO: 41839 - DNA, 26 bp, Homo sapiens
caggatataatctttgggtccttctt

SEQ ID NO: 41840 - DNA, 26 bp, Homo sapiens
aggatataatctttgggtccttctta

SEQ ID NO: 41841 - DNA, 26 bp, Homo sapiens
ggatataatctttgggtccttcttat

SEQ ID NO: 41842 - DNA, 26 bp, Homo sapiens
gatataatctttgggtccttcttata

SEQ ID NO: 41843 - DNA, 26 bp, Homo sapiens
atataatctttgggtccttcttataa

SEQ ID NO: 41844 - DNA, 26 bp, Homo sapiens
tataatctttgggtccttcttataat

SEQ ID NO: 41845 - DNA, 26 bp, Homo sapiens
ataatctttgggtccttcttataata

SEQ ID NO: 41846 - DNA, 26 bp, Homo sapiens
taatctttgggtccttcttataataa

SEQ ID NO: 41847 - DNA, 26 bp, Homo sapiens
aatctttgggtccttcttataataaa

SEQ ID NO: 41848 - DNA, 26 bp, Homo sapiens
atctttgggtccttcttataataaaa

SEQ ID NO: 41849 - DNA, 26 bp, Homo sapiens
tctttgggtccttcttataataaaag

SEQ ID NO: 41850 - DNA, 26 bp, Homo sapiens
ctttgggtccttcttataataaaagc

SEQ ID NO: 41851 - DNA, 26 bp, Homo sapiens
tttgggtccttcttataataaaagct

SEQ ID NO: 41852 - DNA, 26 bp, Homo sapiens
ttgggtccttcttataataaaagcta

SEQ ID NO: 41853 - DNA, 26 bp, Homo sapiens
tgggtccttcttataataaaagctag

SEQ ID NO: 41854 - DNA, 26 bp, Homo sapiens
gggtccttcttataataaaagctaga

SEQ ID NO: 41855 - DNA, 26 bp, Homo sapiens
ggtccttcttataataaaagctagat

SEQ ID NO: 41856 - DNA, 26 bp, Homo sapiens
gtccttcttataataaaagctagatt

SEQ ID NO: 41857 - DNA, 26 bp, Homo sapiens
tccttcttataataaaagctagattc

SEQ ID NO: 41858 - DNA, 26 bp, Homo sapiens
ccttcttataataaaagctagattcc

SEQ ID NO: 41859 - DNA, 26 bp, Homo sapiens
cttcttataataaaagctagattcca

SEQ ID NO: 41860 - DNA, 26 bp, Homo sapiens
ttcttataataaaagctagattccaa

SEQ ID NO: 41861 - DNA, 26 bp, Homo sapiens
tcttataataaaagctagattccaat

SEQ ID NO: 41862 - DNA, 26 bp, Homo sapiens
cttataataaaagctagattccaata

SEQ ID NO: 41863 - DNA, 26 bp, Homo sapiens
ttataataaaagctagattccaataa

SEQ ID NO: 41864 - DNA, 26 bp, Homo sapiens
tataataaaagctagattccaataaa

SEQ ID NO: 41865 - DNA, 26 bp, Homo sapiens
ataataaaagctagattccaataaat

SEQ ID NO: 41866 - DNA, 26 bp, Homo sapiens
taataaaagctagattccaataaata

SEQ ID NO: 41867 - DNA, 26 bp, Homo sapiens
aataaaagctagattccaataaatat

SEQ ID NO: 41868 - DNA, 26 bp, Homo sapiens
ataaaagctagattccaataaatatt

SEQ ID NO: 41869 - DNA, 26 bp, Homo sapiens
taaaagctagattccaataaatattc

SEQ ID NO: 41870 - DNA, 26 bp, Homo sapiens
aaaagctagattccaataaatattct

SEQ ID NO: 41871 - DNA, 26 bp, Homo sapiens
aaagctagattccaataaatattctg

SEQ ID NO: 41872 - DNA, 26 bp, Homo sapiens
aagctagattccaataaatattctgg

SEQ ID NO: 41873 - DNA, 26 bp, Homo sapiens
agctagattccaataaatattctggt

SEQ ID NO: 41874 - DNA, 26 bp, Homo sapiens
gctagattccaataaatattctggtt

SEQ ID NO: 41875 - DNA, 26 bp, Homo sapiens
ctagattccaataaatattctggttg

SEQ ID NO: 41876 - DNA, 26 bp, Homo sapiens
tagattccaataaatattctggttgt

SEQ ID NO: 41877 - DNA, 26 bp, Homo sapiens
agattccaataaatattctggttgtt

SEQ ID NO: 41878 - DNA, 26 bp, Homo sapiens
gattccaataaatattctggttgttg

SEQ ID NO: 41879 - DNA, 26 bp, Homo sapiens
attccaataaatattctggttgttga

SEQ ID NO: 41880 - DNA, 26 bp, Homo sapiens
ttccaataaatattctggttgttgat

SEQ ID NO: 41881 - DNA, 26 bp, Homo sapiens
tccaataaatattctggttgttgatt

SEQ ID NO: 41882 - DNA, 26 bp, Homo sapiens
ccaataaatattctggttgttgattt

SEQ ID NO: 41883 - DNA, 26 bp, Homo sapiens
caataaatattctggttgttgatttg

SEQ ID NO: 41884 - DNA, 26 bp, Homo sapiens
aataaatattctggttgttgatttgt

SEQ ID NO: 41885 - DNA, 26 bp, Homo sapiens
ataaatattctggttgttgatttgtt

SEQ ID NO: 41886 - DNA, 26 bp, Homo sapiens
taaatattctggttgttgatttgttc

SEQ ID NO: 41887 - DNA, 26 bp, Homo sapiens
aaatattctggttgttgatttgttct

SEQ ID NO: 41888 - DNA, 26 bp, Homo sapiens
aatattctggttgttgatttgttctc

SEQ ID NO: 41889 - DNA, 26 bp, Homo sapiens
atattctggttgttgatttgttctca

SEQ ID NO: 41890 - DNA, 26 bp, Homo sapiens
tattctggttgttgatttgttctcaa

SEQ ID NO: 41891 - DNA, 26 bp, Homo sapiens
attctggttgttgatttgttctcaaa

SEQ ID NO: 41892 - DNA, 26 bp, Homo sapiens
ttctggttgttgatttgttctcaaag

SEQ ID NO: 41893 - DNA, 26 bp, Homo sapiens
tctggttgttgatttgttctcaaagc

SEQ ID NO: 41894 - DNA, 26 bp, Homo sapiens
ctggttgttgatttgttctcaaagca

SEQ ID NO: 41895 - DNA, 26 bp, Homo sapiens
tggttgttgatttgttctcaaagcat

SEQ ID NO: 41896 - DNA, 26 bp, Homo sapiens
ggttgttgatttgttctcaaagcata

SEQ ID NO: 41897 - DNA, 26 bp, Homo sapiens
gttgttgatttgttctcaaagcataa

SEQ ID NO: 41898 - DNA, 26 bp, Homo sapiens
ttgttgatttgttctcaaagcataag

SEQ ID NO: 41899 - DNA, 26 bp, Homo sapiens
tgttgatttgttctcaaagcataaga

SEQ ID NO: 41900 - DNA, 26 bp, Homo sapiens
gttgatttgttctcaaagcataagaa

SEQ ID NO: 41901 - DNA, 26 bp, Homo sapiens
ttgatttgttctcaaagcataagaat

SEQ ID NO: 41902 - DNA, 26 bp, Homo sapiens
tgatttgttctcaaagcataagaatt

SEQ ID NO: 41903 - DNA, 26 bp, Homo sapiens
gatttgttctcaaagcataagaattc

SEQ ID NO: 41904 - DNA, 26 bp, Homo sapiens
atttgttctcaaagcataagaattcc

SEQ ID NO: 41905 - DNA, 26 bp, Homo sapiens
tttgttctcaaagcataagaattcca

SEQ ID NO: 41906 - DNA, 26 bp, Homo sapiens
ttgttctcaaagcataagaattccaa

SEQ ID NO: 41907 - DNA, 26 bp, Homo sapiens
tgttctcaaagcataagaattccaag

SEQ ID NO: 41908 - DNA, 26 bp, Homo sapiens
gttctcaaagcataagaattccaagt

SEQ ID NO: 41909 - DNA, 26 bp, Homo sapiens
ttctcaaagcataagaattccaagtt

SEQ ID NO: 41910 - DNA, 26 bp, Homo sapiens
tctcaaagcataagaattccaagttg

SEQ ID NO: 41911 - DNA, 26 bp, Homo sapiens
ctcaaagcataagaattccaagttga

SEQ ID NO: 41912 - DNA, 26 bp, Homo sapiens
tcaaagcataagaattccaagttgag

SEQ ID NO: 41913 - DNA, 26 bp, Homo sapiens
caaagcataagaattccaagttgaga

SEQ ID NO: 41914 - DNA, 26 bp, Homo sapiens
aaagcataagaattccaagttgagac

SEQ ID NO: 41915 - DNA, 26 bp, Homo sapiens
aagcataagaattccaagttgagacc

SEQ ID NO: 41916 - DNA, 26 bp, Homo sapiens
agcataagaattccaagttgagaccg

SEQ ID NO: 41917 - DNA, 26 bp, Homo sapiens
gcataagaattccaagttgagaccga

SEQ ID NO: 41918 - DNA, 26 bp, Homo sapiens
cataagaattccaagttgagaccgag

SEQ ID NO: 41919 - DNA, 26 bp, Homo sapiens
ataagaattccaagttgagaccgagt

SEQ ID NO: 41920 - DNA, 26 bp, Homo sapiens
taagaattccaagttgagaccgagtc

SEQ ID NO: 41921 - DNA, 26 bp, Homo sapiens
aagaattccaagttgagaccgagtcc

SEQ ID NO: 41922 - DNA, 26 bp, Homo sapiens
agaattccaagttgagaccgagtcca

SEQ ID NO: 41923 - DNA, 26 bp, Homo sapiens
gaattccaagttgagaccgagtccat

SEQ ID NO: 41924 - DNA, 26 bp, Homo sapiens
aattccaagttgagaccgagtccata

SEQ ID NO: 41925 - DNA, 26 bp, Homo sapiens
attccaagttgagaccgagtccatat

SEQ ID NO: 41926 - DNA, 26 bp, Homo sapiens
ttccaagttgagaccgagtccatatt

SEQ ID NO: 41927 - DNA, 26 bp, Homo sapiens
tccaagttgagaccgagtccatattt

SEQ ID NO: 41928 - DNA, 26 bp, Homo sapiens
ccaagttgagaccgagtccatattta

SEQ ID NO: 41929 - DNA, 26 bp, Homo sapiens
caagttgagaccgagtccatatttaa

SEQ ID NO: 41930 - DNA, 26 bp, Homo sapiens
aagttgagaccgagtccatatttaac

SEQ ID NO: 41931 - DNA, 26 bp, Homo sapiens
agttgagaccgagtccatatttaact

SEQ ID NO: 41932 - DNA, 26 bp, Homo sapiens
gttgagaccgagtccatatttaacta

SEQ ID NO: 41933 - DNA, 26 bp, Homo sapiens
ttgagaccgagtccatatttaactac

SEQ ID NO: 41934 - DNA, 26 bp, Homo sapiens
tgagaccgagtccatatttaactact

SEQ ID NO: 41935 - DNA, 26 bp, Homo sapiens
gagaccgagtccatatttaactactg

SEQ ID NO: 41936 - DNA, 26 bp, Homo sapiens
agaccgagtccatatttaactactga

SEQ ID NO: 41937 - DNA, 26 bp, Homo sapiens
gaccgagtccatatttaactactgaa

SEQ ID NO: 41938 - DNA, 26 bp, Homo sapiens
accgagtccatatttaactactgaat

SEQ ID NO: 41939 - DNA, 26 bp, Homo sapiens
ccgagtccatatttaactactgaatt

SEQ ID NO: 41940 - DNA, 26 bp, Homo sapiens
cgagtccatatttaactactgaattg

SEQ ID NO: 41941 - DNA, 26 bp, Homo sapiens
gagtccatatttaactactgaattgt

SEQ ID NO: 41942 - DNA, 26 bp, Homo sapiens
agtccatatttaactactgaattgtg

SEQ ID NO: 41943 - DNA, 26 bp, Homo sapiens
gtccatatttaactactgaattgtgt

SEQ ID NO: 41944 - DNA, 26 bp, Homo sapiens
tccatatttaactactgaattgtgta

SEQ ID NO: 41945 - DNA, 26 bp, Homo sapiens
ccatatttaactactgaattgtgtaa

SEQ ID NO: 41946 - DNA, 26 bp, Homo sapiens
catatttaactactgaattgtgtaaa

SEQ ID NO: 41947 - DNA, 26 bp, Homo sapiens
atatttaactactgaattgtgtaaaa

SEQ ID NO: 41948 - DNA, 26 bp, Homo sapiens
tatttaactactgaattgtgtaaaat

SEQ ID NO: 41949 - DNA, 26 bp, Homo sapiens
atttaactactgaattgtgtaaaatg

SEQ ID NO: 41950 - DNA, 26 bp, Homo sapiens
tttaactactgaattgtgtaaaatga

SEQ ID NO: 41951 - DNA, 26 bp, Homo sapiens
ttaactactgaattgtgtaaaatgag

SEQ ID NO: 41952 - DNA, 26 bp, Homo sapiens
taactactgaattgtgtaaaatgagc

SEQ ID NO: 41953 - DNA, 26 bp, Homo sapiens
aactactgaattgtgtaaaatgagct

SEQ ID NO: 41954 - DNA, 26 bp, Homo sapiens
actactgaattgtgtaaaatgagctt

SEQ ID NO: 41955 - DNA, 26 bp, Homo sapiens
ctactgaattgtgtaaaatgagcttc

SEQ ID NO: 41956 - DNA, 26 bp, Homo sapiens
tactgaattgtgtaaaatgagcttct

SEQ ID NO: 41957 - DNA, 26 bp, Homo sapiens
actgaattgtgtaaaatgagcttctc

SEQ ID NO: 41958 - DNA, 26 bp, Homo sapiens
ctgaattgtgtaaaatgagcttctcc

SEQ ID NO: 41959 - DNA, 26 bp, Homo sapiens
tgaattgtgtaaaatgagcttctcct

SEQ ID NO: 41960 - DNA, 26 bp, Homo sapiens
gaattgtgtaaaatgagcttctcctc

SEQ ID NO: 41961 - DNA, 26 bp, Homo sapiens
aattgtgtaaaatgagcttctcctcc

SEQ ID NO: 41962 - DNA, 26 bp, Homo sapiens
attgtgtaaaatgagcttctcctccc

SEQ ID NO: 41963 - DNA, 26 bp, Homo sapiens
ttgtgtaaaatgagcttctcctcccc

SEQ ID NO: 41964 - DNA, 26 bp, Homo sapiens
tgtgtaaaatgagcttctcctccccc

SEQ ID NO: 41965 - DNA, 26 bp, Homo sapiens
gtgtaaaatgagcttctcctccccct

SEQ ID NO: 41966 - DNA, 26 bp, Homo sapiens
tgtaaaatgagcttctcctccccctc

SEQ ID NO: 41967 - DNA, 26 bp, Homo sapiens
gtaaaatgagcttctcctccccctcg

SEQ ID NO: 41968 - DNA, 26 bp, Homo sapiens
taaaatgagcttctcctccccctcgc

SEQ ID NO: 41969 - DNA, 26 bp, Homo sapiens
aaaatgagcttctcctccccctcgcc

SEQ ID NO: 41970 - DNA, 26 bp, Homo sapiens
aaatgagcttctcctccccctcgcct

SEQ ID NO: 41971 - DNA, 26 bp, Homo sapiens
aatgagcttctcctccccctcgcctc

SEQ ID NO: 41972 - DNA, 26 bp, Homo sapiens
atgagcttctcctccccctcgcctcc

SEQ ID NO: 41973 - DNA, 26 bp, Homo sapiens
tgagcttctcctccccctcgcctcca

SEQ ID NO: 41974 - DNA, 26 bp, Homo sapiens
gagcttctcctccccctcgcctccat

SEQ ID NO: 41975 - DNA, 26 bp, Homo sapiens
agcttctcctccccctcgcctccatg

SEQ ID NO: 41976 - DNA, 26 bp, Homo sapiens
gcttctcctccccctcgcctccatga

SEQ ID NO: 41977 - DNA, 26 bp, Homo sapiens
cttctcctccccctcgcctccatgag

SEQ ID NO: 41978 - DNA, 26 bp, Homo sapiens
ttctcctccccctcgcctccatgagg

SEQ ID NO: 41979 - DNA, 26 bp, Homo sapiens
tctcctccccctcgcctccatgaggt

SEQ ID NO: 41980 - DNA, 26 bp, Homo sapiens
ctcctccccctcgcctccatgaggtg

SEQ ID NO: 41981 - DNA, 26 bp, Homo sapiens
tcctccccctcgcctccatgaggtgg

SEQ ID NO: 41982 - DNA, 26 bp, Homo sapiens
cctccccctcgcctccatgaggtggc

SEQ ID NO: 41983 - DNA, 26 bp, Homo sapiens
ctccccctcgcctccatgaggtggca

SEQ ID NO: 41984 - DNA, 26 bp, Homo sapiens
tccccctcgcctccatgaggtggcat

SEQ ID NO: 41985 - DNA, 26 bp, Homo sapiens
ccccctcgcctccatgaggtggcatt

SEQ ID NO: 41986 - DNA, 26 bp, Homo sapiens
cccctcgcctccatgaggtggcattt

SEQ ID NO: 41987 - DNA, 26 bp, Homo sapiens
ccctcgcctccatgaggtggcatttt

SEQ ID NO: 41988 - DNA, 26 bp, Homo sapiens
cctcgcctccatgaggtggcatttta

SEQ ID NO: 41989 - DNA, 26 bp, Homo sapiens
ctcgcctccatgaggtggcattttaa

SEQ ID NO: 41990 - DNA, 26 bp, Homo sapiens
tcgcctccatgaggtggcattttaaa

SEQ ID NO: 41991 - DNA, 26 bp, Homo sapiens
cgcctccatgaggtggcattttaaaa

SEQ ID NO: 41992 - DNA, 26 bp, Homo sapiens
gcctccatgaggtggcattttaaaaa

SEQ ID NO: 41993 - DNA, 26 bp, Homo sapiens
cctccatgaggtggcattttaaaaag

SEQ ID NO: 41994 - DNA, 26 bp, Homo sapiens
ctccatgaggtggcattttaaaaagc

SEQ ID NO: 41995 - DNA, 26 bp, Homo sapiens
tccatgaggtggcattttaaaaagct

SEQ ID NO: 41996 - DNA, 26 bp, Homo sapiens
ccatgaggtggcattttaaaaagctt

SEQ ID NO: 41997 - DNA, 26 bp, Homo sapiens
catgaggtggcattttaaaaagcttt

SEQ ID NO: 41998 - DNA, 26 bp, Homo sapiens
atgaggtggcattttaaaaagcttta

SEQ ID NO: 41999 - DNA, 26 bp, Homo sapiens
tgaggtggcattttaaaaagctttaa

SEQ ID NO: 42000 - DNA, 26 bp, Homo sapiens
gaggtggcattttaaaaagctttaaa

SEQ ID NO: 42001 - DNA, 26 bp, Homo sapiens
aggtggcattttaaaaagctttaaaa

SEQ ID NO: 42002 - DNA, 26 bp, Homo sapiens
ggtggcattttaaaaagctttaaaaa

SEQ ID NO: 42003 - DNA, 26 bp, Homo sapiens
gtggcattttaaaaagctttaaaaaa

SEQ ID NO: 42004 - DNA, 26 bp, Homo sapiens
tggcattttaaaaagctttaaaaaaa

SEQ ID NO: 42005 - DNA, 26 bp, Homo sapiens
ggcattttaaaaagctttaaaaaaaa

SEQ ID NO: 42006 - DNA, 26 bp, Homo sapiens
gcattttaaaaagctttaaaaaaaaa

SEQ ID NO: 42007 - DNA, 26 bp, Homo sapiens
cattttaaaaagctttaaaaaaaaaa

SEQ ID NO: 42008 - DNA, 26 bp, Homo sapiens
attttaaaaagctttaaaaaaaaaaa

SEQ ID NO: 42009 - DNA, 26 bp, Homo sapiens
ttttaaaaagctttaaaaaaaaaaaa

SEQ ID NO: 42010 - DNA, 26 bp, Homo sapiens
tttaaaaagctttaaaaaaaaaaaat

SEQ ID NO: 42011 - DNA, 26 bp, Homo sapiens
ttaaaaagctttaaaaaaaaaaaatg

SEQ ID NO: 42012 - DNA, 26 bp, Homo sapiens
taaaaagctttaaaaaaaaaaaatga

SEQ ID NO: 42013 - DNA, 26 bp, Homo sapiens
aaaaagctttaaaaaaaaaaaatgag

SEQ ID NO: 42014 - DNA, 26 bp, Homo sapiens
aaaagctttaaaaaaaaaaaatgagc

SEQ ID NO: 42015 - DNA, 26 bp, Homo sapiens
aaagctttaaaaaaaaaaaatgagca

SEQ ID NO: 42016 - DNA, 26 bp, Homo sapiens
aagctttaaaaaaaaaaaatgagcat

SEQ ID NO: 42017 - DNA, 26 bp, Homo sapiens
agctttaaaaaaaaaaaatgagcatg

SEQ ID NO: 42018 - DNA, 26 bp, Homo sapiens
gctttaaaaaaaaaaaatgagcatga

SEQ ID NO: 42019 - DNA, 26 bp, Homo sapiens
ctttaaaaaaaaaaaatgagcatgat

SEQ ID NO: 42020 - DNA, 26 bp, Homo sapiens
tttaaaaaaaaaaaatgagcatgatg

SEQ ID NO: 42021 - DNA, 26 bp, Homo sapiens
ttaaaaaaaaaaaatgagcatgatgg

SEQ ID NO: 42022 - DNA, 26 bp, Homo sapiens
taaaaaaaaaaaatgagcatgatggt

SEQ ID NO: 42023 - DNA, 26 bp, Homo sapiens
aaaaaaaaaaaatgagcatgatggta

SEQ ID NO: 42024 - DNA, 26 bp, Homo sapiens
aaaaaaaaaaatgagcatgatggtat

SEQ ID NO: 42025 - DNA, 26 bp, Homo sapiens
aaaaaaaaaatgagcatgatggtata

SEQ ID NO: 42026 - DNA, 26 bp, Homo sapiens
aaaaaaaaatgagcatgatggtatat

SEQ ID NO: 42027 - DNA, 26 bp, Homo sapiens
aaaaaaaatgagcatgatggtatatg

SEQ ID NO: 42028 - DNA, 26 bp, Homo sapiens
aaaaaaatgagcatgatggtatatgt

SEQ ID NO: 42029 - DNA, 26 bp, Homo sapiens
aaaaaatgagcatgatggtatatgtc

SEQ ID NO: 42030 - DNA, 26 bp, Homo sapiens
aaaaatgagcatgatggtatatgtcc

SEQ ID NO: 42031 - DNA, 26 bp, Homo sapiens
aaaatgagcatgatggtatatgtcca

SEQ ID NO: 42032 - DNA, 26 bp, Homo sapiens
aaatgagcatgatggtatatgtccac

SEQ ID NO: 42033 - DNA, 26 bp, Homo sapiens
aatgagcatgatggtatatgtccacc

SEQ ID NO: 42034 - DNA, 26 bp, Homo sapiens
atgagcatgatggtatatgtccacca

SEQ ID NO: 42035 - DNA, 26 bp, Homo sapiens
tgagcatgatggtatatgtccaccac

SEQ ID NO: 42036 - DNA, 26 bp, Homo sapiens
gagcatgatggtatatgtccaccacg

SEQ ID NO: 42037 - DNA, 26 bp, Homo sapiens
agcatgatggtatatgtccaccacgc

SEQ ID NO: 42038 - DNA, 26 bp, Homo sapiens
gcatgatggtatatgtccaccacgcc

SEQ ID NO: 42039 - DNA, 26 bp, Homo sapiens
catgatggtatatgtccaccacgcca

SEQ ID NO: 42040 - DNA, 26 bp, Homo sapiens
atgatggtatatgtccaccacgccaa

SEQ ID NO: 42041 - DNA, 26 bp, Homo sapiens
tgatggtatatgtccaccacgccaat

SEQ ID NO: 42042 - DNA, 26 bp, Homo sapiens
gatggtatatgtccaccacgccaatc

SEQ ID NO: 42043 - DNA, 26 bp, Homo sapiens
atggtatatgtccaccacgccaatca

SEQ ID NO: 42044 - DNA, 26 bp, Homo sapiens
tggtatatgtccaccacgccaatcaa

SEQ ID NO: 42045 - DNA, 26 bp, Homo sapiens
ggtatatgtccaccacgccaatcaat

SEQ ID NO: 42046 - DNA, 26 bp, Homo sapiens
gtatatgtccaccacgccaatcaatc

SEQ ID NO: 42047 - DNA, 26 bp, Homo sapiens
tatatgtccaccacgccaatcaatca

SEQ ID NO: 42048 - DNA, 26 bp, Homo sapiens
atatgtccaccacgccaatcaatcat

SEQ ID NO: 42049 - DNA, 26 bp, Homo sapiens
tatgtccaccacgccaatcaatcatt

SEQ ID NO: 42050 - DNA, 26 bp, Homo sapiens
atgtccaccacgccaatcaatcattc

SEQ ID NO: 42051 - DNA, 26 bp, Homo sapiens
tgtccaccacgccaatcaatcattca

SEQ ID NO: 42052 - DNA, 26 bp, Homo sapiens
gtccaccacgccaatcaatcattcaa

SEQ ID NO: 42053 - DNA, 26 bp, Homo sapiens
tccaccacgccaatcaatcattcaac

SEQ ID NO: 42054 - DNA, 26 bp, Homo sapiens
ccaccacgccaatcaatcattcaact

SEQ ID NO: 42055 - DNA, 26 bp, Homo sapiens
caccacgccaatcaatcattcaactt

SEQ ID NO: 42056 - DNA, 26 bp, Homo sapiens
accacgccaatcaatcattcaacttt

SEQ ID NO: 42057 - DNA, 26 bp, Homo sapiens
ccacgccaatcaatcattcaactttg

SEQ ID NO: 42058 - DNA, 26 bp, Homo sapiens
cacgccaatcaatcattcaactttgt

SEQ ID NO: 42059 - DNA, 26 bp, Homo sapiens
acgccaatcaatcattcaactttgta

SEQ ID NO: 42060 - DNA, 26 bp, Homo sapiens
cgccaatcaatcattcaactttgtat

SEQ ID NO: 42061 - DNA, 26 bp, Homo sapiens
gccaatcaatcattcaactttgtatg

SEQ ID NO: 42062 - DNA, 26 bp, Homo sapiens
ccaatcaatcattcaactttgtatga

SEQ ID NO: 42063 - DNA, 26 bp, Homo sapiens
caatcaatcattcaactttgtatgaa

SEQ ID NO: 42064 - DNA, 26 bp, Homo sapiens
aatcaatcattcaactttgtatgaag

SEQ ID NO: 42065 - DNA, 26 bp, Homo sapiens
atcaatcattcaactttgtatgaagc

SEQ ID NO: 42066 - DNA, 26 bp, Homo sapiens
tcaatcattcaactttgtatgaagca

SEQ ID NO: 42067 - DNA, 26 bp, Homo sapiens
caatcattcaactttgtatgaagcat

SEQ ID NO: 42068 - DNA, 26 bp, Homo sapiens
aatcattcaactttgtatgaagcata

SEQ ID NO: 42069 - DNA, 26 bp, Homo sapiens
atcattcaactttgtatgaagcataa

SEQ ID NO: 42070 - DNA, 26 bp, Homo sapiens
tcattcaactttgtatgaagcataaa

SEQ ID NO: 42071 - DNA, 26 bp, Homo sapiens
cattcaactttgtatgaagcataaac

SEQ ID NO: 42072 - DNA, 26 bp, Homo sapiens
attcaactttgtatgaagcataaaca

SEQ ID NO: 42073 - DNA, 26 bp, Homo sapiens
ttcaactttgtatgaagcataaacac

SEQ ID NO: 42074 - DNA, 26 bp, Homo sapiens
tcaactttgtatgaagcataaacaca

SEQ ID NO: 42075 - DNA, 26 bp, Homo sapiens
caactttgtatgaagcataaacacat

SEQ ID NO: 42076 - DNA, 26 bp, Homo sapiens
aactttgtatgaagcataaacacatc

SEQ ID NO: 42077 - DNA, 26 bp, Homo sapiens
actttgtatgaagcataaacacatct

SEQ ID NO: 42078 - DNA, 26 bp, Homo sapiens
ctttgtatgaagcataaacacatcta

SEQ ID NO: 42079 - DNA, 26 bp, Homo sapiens
tttgtatgaagcataaacacatctat

SEQ ID NO: 42080 - DNA, 26 bp, Homo sapiens
ttgtatgaagcataaacacatctatc

SEQ ID NO: 42081 - DNA, 26 bp, Homo sapiens
tgtatgaagcataaacacatctatca

SEQ ID NO: 42082 - DNA, 26 bp, Homo sapiens
gtatgaagcataaacacatctatcat

SEQ ID NO: 42083 - DNA, 26 bp, Homo sapiens
tatgaagcataaacacatctatcatt

SEQ ID NO: 42084 - DNA, 26 bp, Homo sapiens
atgaagcataaacacatctatcatta

SEQ ID NO: 42085 - DNA, 26 bp, Homo sapiens
tgaagcataaacacatctatcattaa

SEQ ID NO: 42086 - DNA, 26 bp, Homo sapiens
gaagcataaacacatctatcattaaa

SEQ ID NO: 42087 - DNA, 26 bp, Homo sapiens
aagcataaacacatctatcattaaac

SEQ ID NO: 42088 - DNA, 26 bp, Homo sapiens
agcataaacacatctatcattaaact

SEQ ID NO: 42089 - DNA, 26 bp, Homo sapiens
gcataaacacatctatcattaaactt

SEQ ID NO: 42090 - DNA, 26 bp, Homo sapiens
cataaacacatctatcattaaactta

SEQ ID NO: 42091 - DNA, 26 bp, Homo sapiens
ataaacacatctatcattaaacttac

SEQ ID NO: 42092 - DNA, 26 bp, Homo sapiens
taaacacatctatcattaaacttacc

SEQ ID NO: 42093 - DNA, 26 bp, Homo sapiens
aaacacatctatcattaaacttacca

SEQ ID NO: 42094 - DNA, 26 bp, Homo sapiens
aacacatctatcattaaacttaccaa

SEQ ID NO: 42095 - DNA, 26 bp, Homo sapiens
acacatctatcattaaacttaccaaa

SEQ ID NO: 42096 - DNA, 26 bp, Homo sapiens
cacatctatcattaaacttaccaaaa

SEQ ID NO: 42097 - DNA, 26 bp, Homo sapiens
acatctatcattaaacttaccaaaaa

SEQ ID NO: 42098 - DNA, 26 bp, Homo sapiens
catctatcattaaacttaccaaaaag

SEQ ID NO: 42099 - DNA, 26 bp, Homo sapiens
atctatcattaaacttaccaaaaagc

SEQ ID NO: 42100 - DNA, 26 bp, Homo sapiens
tctatcattaaacttaccaaaaagca

SEQ ID NO: 42101 - DNA, 26 bp, Homo sapiens
ctatcattaaacttaccaaaaagcaa

SEQ ID NO: 42102 - DNA, 26 bp, Homo sapiens
tatcattaaacttaccaaaaagcaaa

SEQ ID NO: 42103 - DNA, 26 bp, Homo sapiens
atcattaaacttaccaaaaagcaaag

SEQ ID NO: 42104 - DNA, 26 bp, Homo sapiens
tcattaaacttaccaaaaagcaaagt

SEQ ID NO: 42105 - DNA, 26 bp, Homo sapiens
cattaaacttaccaaaaagcaaagta

SEQ ID NO: 42106 - DNA, 26 bp, Homo sapiens
attaaacttaccaaaaagcaaagtat

SEQ ID NO: 42107 - DNA, 26 bp, Homo sapiens
ttaaacttaccaaaaagcaaagtata

SEQ ID NO: 42108 - DNA, 26 bp, Homo sapiens
taaacttaccaaaaagcaaagtataa

SEQ ID NO: 42109 - DNA, 26 bp, Homo sapiens
aaacttaccaaaaagcaaagtataat

SEQ ID NO: 42110 - DNA, 26 bp, Homo sapiens
aacttaccaaaaagcaaagtataatt

SEQ ID NO: 42111 - DNA, 26 bp, Homo sapiens
acttaccaaaaagcaaagtataattt

SEQ ID NO: 42112 - DNA, 26 bp, Homo sapiens
cttaccaaaaagcaaagtataattta

SEQ ID NO: 42113 - DNA, 26 bp, Homo sapiens
ttaccaaaaagcaaagtataatttag

SEQ ID NO: 42114 - DNA, 26 bp, Homo sapiens
taccaaaaagcaaagtataatttagg

SEQ ID NO: 42115 - DNA, 26 bp, Homo sapiens
accaaaaagcaaagtataatttaggg

SEQ ID NO: 42116 - DNA, 26 bp, Homo sapiens
ccaaaaagcaaagtataatttaggga

SEQ ID NO: 42117 - DNA, 26 bp, Homo sapiens
caaaaagcaaagtataatttagggag

SEQ ID NO: 42118 - DNA, 26 bp, Homo sapiens
aaaaagcaaagtataatttagggaga

SEQ ID NO: 42119 - DNA, 26 bp, Homo sapiens
aaaagcaaagtataatttagggagag

SEQ ID NO: 42120 - DNA, 26 bp, Homo sapiens
aaagcaaagtataatttagggagagt

SEQ ID NO: 42121 - DNA, 26 bp, Homo sapiens
aagcaaagtataatttagggagagtt

SEQ ID NO: 42122 - DNA, 26 bp, Homo sapiens
agcaaagtataatttagggagagttc

SEQ ID NO: 42123 - DNA, 26 bp, Homo sapiens
gcaaagtataatttagggagagttcc

SEQ ID NO: 42124 - DNA, 26 bp, Homo sapiens
caaagtataatttagggagagttccg

SEQ ID NO: 42125 - DNA, 26 bp, Homo sapiens
aaagtataatttagggagagttccgt

SEQ ID NO: 42126 - DNA, 26 bp, Homo sapiens
aagtataatttagggagagttccgtt

SEQ ID NO: 42127 - DNA, 26 bp, Homo sapiens
agtataatttagggagagttccgttt

SEQ ID NO: 42128 - DNA, 26 bp, Homo sapiens
gtataatttagggagagttccgtttc

SEQ ID NO: 42129 - DNA, 26 bp, Homo sapiens
tataatttagggagagttccgtttct

SEQ ID NO: 42130 - DNA, 26 bp, Homo sapiens
ataatttagggagagttccgtttcta

SEQ ID NO: 42131 - DNA, 26 bp, Homo sapiens
taatttagggagagttccgtttctaa

SEQ ID NO: 42132 - DNA, 26 bp, Homo sapiens
aatttagggagagttccgtttctaat

SEQ ID NO: 42133 - DNA, 26 bp, Homo sapiens
atttagggagagttccgtttctaatt

SEQ ID NO: 42134 - DNA, 26 bp, Homo sapiens
tttagggagagttccgtttctaattc

SEQ ID NO: 42135 - DNA, 26 bp, Homo sapiens
ttagggagagttccgtttctaattcc

SEQ ID NO: 42136 - DNA, 26 bp, Homo sapiens
tagggagagttccgtttctaattcca

SEQ ID NO: 42137 - DNA, 26 bp, Homo sapiens
agggagagttccgtttctaattccaa

SEQ ID NO: 42138 - DNA, 26 bp, Homo sapiens
gggagagttccgtttctaattccaaa

SEQ ID NO: 42139 - DNA, 26 bp, Homo sapiens
ggagagttccgtttctaattccaaat

SEQ ID NO: 42140 - DNA, 26 bp, Homo sapiens
gagagttccgtttctaattccaaatt

SEQ ID NO: 42141 - DNA, 26 bp, Homo sapiens
agagttccgtttctaattccaaattc

SEQ ID NO: 42142 - DNA, 26 bp, Homo sapiens
gagttccgtttctaattccaaattca

SEQ ID NO: 42143 - DNA, 26 bp, Homo sapiens
agttccgtttctaattccaaattcac

SEQ ID NO: 42144 - DNA, 26 bp, Homo sapiens
gttccgtttctaattccaaattcaca

SEQ ID NO: 42145 - DNA, 26 bp, Homo sapiens
ttccgtttctaattccaaattcacat

SEQ ID NO: 42146 - DNA, 26 bp, Homo sapiens
tccgtttctaattccaaattcacatg

SEQ ID NO: 42147 - DNA, 26 bp, Homo sapiens
ccgtttctaattccaaattcacatgt

SEQ ID NO: 42148 - DNA, 26 bp, Homo sapiens
cgtttctaattccaaattcacatgtt

SEQ ID NO: 42149 - DNA, 26 bp, Homo sapiens
gtttctaattccaaattcacatgtta

SEQ ID NO: 42150 - DNA, 26 bp, Homo sapiens
tttctaattccaaattcacatgttaa

SEQ ID NO: 42151 - DNA, 26 bp, Homo sapiens
ttctaattccaaattcacatgttaaa

SEQ ID NO: 42152 - DNA, 26 bp, Homo sapiens
tctaattccaaattcacatgttaaaa

SEQ ID NO: 42153 - DNA, 26 bp, Homo sapiens
ctaattccaaattcacatgttaaaaa

SEQ ID NO: 42154 - DNA, 26 bp, Homo sapiens
taattccaaattcacatgttaaaaaa

SEQ ID NO: 42155 - DNA, 26 bp, Homo sapiens
aattccaaattcacatgttaaaaaaa

SEQ ID NO: 42156 - DNA, 26 bp, Homo sapiens
attccaaattcacatgttaaaaaaaa

SEQ ID NO: 42157 - DNA, 26 bp, Homo sapiens
ttccaaattcacatgttaaaaaaaaa

SEQ ID NO: 42158 - DNA, 26 bp, Homo sapiens
tccaaattcacatgttaaaaaaaaaa

SEQ ID NO: 42159 - DNA, 26 bp, Homo sapiens
ccaaattcacatgttaaaaaaaaaat

SEQ ID NO: 42160 - DNA, 26 bp, Homo sapiens
caaattcacatgttaaaaaaaaaatc

SEQ ID NO: 42161 - DNA, 26 bp, Homo sapiens
aaattcacatgttaaaaaaaaaatcc

SEQ ID NO: 42162 - DNA, 26 bp, Homo sapiens
aattcacatgttaaaaaaaaaatcca

SEQ ID NO: 42163 - DNA, 26 bp, Homo sapiens
attcacatgttaaaaaaaaaatccaa

SEQ ID NO: 42164 - DNA, 26 bp, Homo sapiens
ttcacatgttaaaaaaaaaatccaac

SEQ ID NO: 42165 - DNA, 26 bp, Homo sapiens
tcacatgttaaaaaaaaaatccaacg

SEQ ID NO: 42166 - DNA, 26 bp, Homo sapiens
cacatgttaaaaaaaaaatccaacgt

SEQ ID NO: 42167 - DNA, 26 bp, Homo sapiens
acatgttaaaaaaaaaatccaacgtg

SEQ ID NO: 42168 - DNA, 26 bp, Homo sapiens
catgttaaaaaaaaaatccaacgtgg

SEQ ID NO: 42169 - DNA, 26 bp, Homo sapiens
atgttaaaaaaaaaatccaacgtggt

SEQ ID NO: 42170 - DNA, 26 bp, Homo sapiens
tgttaaaaaaaaaatccaacgtggtg

SEQ ID NO: 42171 - DNA, 26 bp, Homo sapiens
gttaaaaaaaaaatccaacgtggtga

SEQ ID NO: 42172 - DNA, 26 bp, Homo sapiens
ttaaaaaaaaaatccaacgtggtgat

SEQ ID NO: 42173 - DNA, 26 bp, Homo sapiens
taaaaaaaaaatccaacgtggtgatt

SEQ ID NO: 42174 - DNA, 26 bp, Homo sapiens
aaaaaaaaaatccaacgtggtgattt

SEQ ID NO: 42175 - DNA, 26 bp, Homo sapiens
aaaaaaaaatccaacgtggtgatttc

SEQ ID NO: 42176 - DNA, 26 bp, Homo sapiens
aaaaaaaatccaacgtggtgatttct

SEQ ID NO: 42177 - DNA, 26 bp, Homo sapiens
aaaaaaatccaacgtggtgatttcta

SEQ ID NO: 42178 - DNA, 26 bp, Homo sapiens
aaaaaatccaacgtggtgatttctag

SEQ ID NO: 42179 - DNA, 26 bp, Homo sapiens
aaaaatccaacgtggtgatttctaga

SEQ ID NO: 42180 - DNA, 26 bp, Homo sapiens
aaaatccaacgtggtgatttctagat

SEQ ID NO: 42181 - DNA, 26 bp, Homo sapiens
aaatccaacgtggtgatttctagata

SEQ ID NO: 42182 - DNA, 26 bp, Homo sapiens
aatccaacgtggtgatttctagatat

SEQ ID NO: 42183 - DNA, 26 bp, Homo sapiens
atccaacgtggtgatttctagatatg

SEQ ID NO: 42184 - DNA, 26 bp, Homo sapiens
tccaacgtggtgatttctagatatga

SEQ ID NO: 42185 - DNA, 26 bp, Homo sapiens
ccaacgtggtgatttctagatatgac

SEQ ID NO: 42186 - DNA, 26 bp, Homo sapiens
caacgtggtgatttctagatatgacc

SEQ ID NO: 42187 - DNA, 26 bp, Homo sapiens
aacgtggtgatttctagatatgacca

SEQ ID NO: 42188 - DNA, 26 bp, Homo sapiens
acgtggtgatttctagatatgaccag

SEQ ID NO: 42189 - DNA, 26 bp, Homo sapiens
cgtggtgatttctagatatgaccagc

SEQ ID NO: 42190 - DNA, 26 bp, Homo sapiens
gtggtgatttctagatatgaccagcc

SEQ ID NO: 42191 - DNA, 26 bp, Homo sapiens
tggtgatttctagatatgaccagcca

SEQ ID NO: 42192 - DNA, 26 bp, Homo sapiens
ggtgatttctagatatgaccagccag

SEQ ID NO: 42193 - DNA, 26 bp, Homo sapiens
gtgatttctagatatgaccagccagt

SEQ ID NO: 42194 - DNA, 26 bp, Homo sapiens
tgatttctagatatgaccagccagtc

SEQ ID NO: 42195 - DNA, 26 bp, Homo sapiens
gatttctagatatgaccagccagtct

SEQ ID NO: 42196 - DNA, 26 bp, Homo sapiens
atttctagatatgaccagccagtctc

SEQ ID NO: 42197 - DNA, 26 bp, Homo sapiens
tttctagatatgaccagccagtctct

SEQ ID NO: 42198 - DNA, 26 bp, Homo sapiens
ttctagatatgaccagccagtctctt

SEQ ID NO: 42199 - DNA, 26 bp, Homo sapiens
tctagatatgaccagccagtctctta

SEQ ID NO: 42200 - DNA, 26 bp, Homo sapiens
ctagatatgaccagccagtctcttaa

SEQ ID NO: 42201 - DNA, 26 bp, Homo sapiens
tagatatgaccagccagtctcttaaa

SEQ ID NO: 42202 - DNA, 26 bp, Homo sapiens
agatatgaccagccagtctcttaaaa

SEQ ID NO: 42203 - DNA, 26 bp, Homo sapiens
gatatgaccagccagtctcttaaaaa

SEQ ID NO: 42204 - DNA, 26 bp, Homo sapiens
atatgaccagccagtctcttaaaaat

SEQ ID NO: 42205 - DNA, 26 bp, Homo sapiens
tatgaccagccagtctcttaaaaata

SEQ ID NO: 42206 - DNA, 26 bp, Homo sapiens
atgaccagccagtctcttaaaaataa

SEQ ID NO: 42207 - DNA, 26 bp, Homo sapiens
tgaccagccagtctcttaaaaataat

SEQ ID NO: 42208 - DNA, 26 bp, Homo sapiens
gaccagccagtctcttaaaaataatt

SEQ ID NO: 42209 - DNA, 26 bp, Homo sapiens
accagccagtctcttaaaaataattt

SEQ ID NO: 42210 - DNA, 26 bp, Homo sapiens
ccagccagtctcttaaaaataatttt

SEQ ID NO: 42211 - DNA, 26 bp, Homo sapiens
cagccagtctcttaaaaataattttg

SEQ ID NO: 42212 - DNA, 26 bp, Homo sapiens
agccagtctcttaaaaataattttgt

SEQ ID NO: 42213 - DNA, 26 bp, Homo sapiens
gccagtctcttaaaaataattttgta

SEQ ID NO: 42214 - DNA, 26 bp, Homo sapiens
ccagtctcttaaaaataattttgtaa

SEQ ID NO: 42215 - DNA, 26 bp, Homo sapiens
cagtctcttaaaaataattttgtaaa

SEQ ID NO: 42216 - DNA, 26 bp, Homo sapiens
agtctcttaaaaataattttgtaaac

SEQ ID NO: 42217 - DNA, 26 bp, Homo sapiens
gtctcttaaaaataattttgtaaaca

SEQ ID NO: 42218 - DNA, 26 bp, Homo sapiens
tctcttaaaaataattttgtaaacag

SEQ ID NO: 42219 - DNA, 26 bp, Homo sapiens
ctcttaaaaataattttgtaaacagc

SEQ ID NO: 42220 - DNA, 26 bp, Homo sapiens
tcttaaaaataattttgtaaacagca

SEQ ID NO: 42221 - DNA, 26 bp, Homo sapiens
cttaaaaataattttgtaaacagcag

SEQ ID NO: 42222 - DNA, 26 bp, Homo sapiens
ttaaaaataattttgtaaacagcagc

SEQ ID NO: 42223 - DNA, 26 bp, Homo sapiens
taaaaataattttgtaaacagcagca

SEQ ID NO: 42224 - DNA, 26 bp, Homo sapiens
aaaaataattttgtaaacagcagcat

SEQ ID NO: 42225 - DNA, 26 bp, Homo sapiens
aaaataattttgtaaacagcagcata

SEQ ID NO: 42226 - DNA, 26 bp, Homo sapiens
aaataattttgtaaacagcagcataa

SEQ ID NO: 42227 - DNA, 26 bp, Homo sapiens
aataattttgtaaacagcagcataaa

SEQ ID NO: 42228 - DNA, 26 bp, Homo sapiens
ataattttgtaaacagcagcataaat

SEQ ID NO: 42229 - DNA, 26 bp, Homo sapiens
taattttgtaaacagcagcataaata

SEQ ID NO: 42230 - DNA, 26 bp, Homo sapiens
aattttgtaaacagcagcataaatac

SEQ ID NO: 42231 - DNA, 26 bp, Homo sapiens
attttgtaaacagcagcataaatacc

SEQ ID NO: 42232 - DNA, 26 bp, Homo sapiens
ttttgtaaacagcagcataaatacct

SEQ ID NO: 42233 - DNA, 26 bp, Homo sapiens
tttgtaaacagcagcataaatacctc

SEQ ID NO: 42234 - DNA, 26 bp, Homo sapiens
ttgtaaacagcagcataaatacctcc

SEQ ID NO: 42235 - DNA, 26 bp, Homo sapiens
tgtaaacagcagcataaatacctccc

SEQ ID NO: 42236 - DNA, 26 bp, Homo sapiens
gtaaacagcagcataaatacctccca

SEQ ID NO: 42237 - DNA, 26 bp, Homo sapiens
taaacagcagcataaatacctcccaa

SEQ ID NO: 42238 - DNA, 26 bp, Homo sapiens
aaacagcagcataaatacctcccaac

SEQ ID NO: 42239 - DNA, 26 bp, Homo sapiens
aacagcagcataaatacctcccaacg

SEQ ID NO: 42240 - DNA, 26 bp, Homo sapiens
acagcagcataaatacctcccaacgt

SEQ ID NO: 42241 - DNA, 26 bp, Homo sapiens
cagcagcataaatacctcccaacgta

SEQ ID NO: 42242 - DNA, 26 bp, Homo sapiens
agcagcataaatacctcccaacgtac

SEQ ID NO: 42243 - DNA, 26 bp, Homo sapiens
gcagcataaatacctcccaacgtacc

SEQ ID NO: 42244 - DNA, 26 bp, Homo sapiens
cagcataaatacctcccaacgtacct

SEQ ID NO: 42245 - DNA, 26 bp, Homo sapiens
agcataaatacctcccaacgtacctt

SEQ ID NO: 42246 - DNA, 26 bp, Homo sapiens
gcataaatacctcccaacgtaccttc

SEQ ID NO: 42247 - DNA, 26 bp, Homo sapiens
cataaatacctcccaacgtaccttcc

SEQ ID NO: 42248 - DNA, 26 bp, Homo sapiens
ataaatacctcccaacgtaccttcca

SEQ ID NO: 42249 - DNA, 26 bp, Homo sapiens
taaatacctcccaacgtaccttccaa

SEQ ID NO: 42250 - DNA, 26 bp, Homo sapiens
aaatacctcccaacgtaccttccaag

SEQ ID NO: 42251 - DNA, 26 bp, Homo sapiens
aatacctcccaacgtaccttccaagc

SEQ ID NO: 42252 - DNA, 26 bp, Homo sapiens
atacctcccaacgtaccttccaagcc

SEQ ID NO: 42253 - DNA, 26 bp, Homo sapiens
tacctcccaacgtaccttccaagcct

SEQ ID NO: 42254 - DNA, 26 bp, Homo sapiens
acctcccaacgtaccttccaagcctt

SEQ ID NO: 42255 - DNA, 26 bp, Homo sapiens
cctcccaacgtaccttccaagccttc

SEQ ID NO: 42256 - DNA, 26 bp, Homo sapiens
ctcccaacgtaccttccaagccttct

SEQ ID NO: 42257 - DNA, 26 bp, Homo sapiens
tcccaacgtaccttccaagccttctc

SEQ ID NO: 42258 - DNA, 26 bp, Homo sapiens
cccaacgtaccttccaagccttctca

SEQ ID NO: 42259 - DNA, 26 bp, Homo sapiens
ccaacgtaccttccaagccttctcag

SEQ ID NO: 42260 - DNA, 26 bp, Homo sapiens
caacgtaccttccaagccttctcagt

SEQ ID NO: 42261 - DNA, 26 bp, Homo sapiens
aacgtaccttccaagccttctcagtt

SEQ ID NO: 42262 - DNA, 26 bp, Homo sapiens
acgtaccttccaagccttctcagtta

SEQ ID NO: 42263 - DNA, 26 bp, Homo sapiens
cgtaccttccaagccttctcagttaa

SEQ ID NO: 42264 - DNA, 26 bp, Homo sapiens
gtaccttccaagccttctcagttaaa

SEQ ID NO: 42265 - DNA, 26 bp, Homo sapiens
taccttccaagccttctcagttaaac

SEQ ID NO: 42266 - DNA, 26 bp, Homo sapiens
accttccaagccttctcagttaaact

SEQ ID NO: 42267 - DNA, 26 bp, Homo sapiens
ccttccaagccttctcagttaaactt

SEQ ID NO: 42268 - DNA, 26 bp, Homo sapiens
cttccaagccttctcagttaaacttg

SEQ ID NO: 42269 - DNA, 26 bp, Homo sapiens
ttccaagccttctcagttaaacttgt

SEQ ID NO: 42270 - DNA, 26 bp, Homo sapiens
tccaagccttctcagttaaacttgtg

SEQ ID NO: 42271 - DNA, 26 bp, Homo sapiens
ccaagccttctcagttaaacttgtgt

SEQ ID NO: 42272 - DNA, 26 bp, Homo sapiens
caagccttctcagttaaacttgtgtt

SEQ ID NO: 42273 - DNA, 26 bp, Homo sapiens
aagccttctcagttaaacttgtgttt

SEQ ID NO: 42274 - DNA, 26 bp, Homo sapiens
agccttctcagttaaacttgtgtttc

SEQ ID NO: 42275 - DNA, 26 bp, Homo sapiens
gccttctcagttaaacttgtgtttct

SEQ ID NO: 42276 - DNA, 26 bp, Homo sapiens
ccttctcagttaaacttgtgtttctg

SEQ ID NO: 42277 - DNA, 26 bp, Homo sapiens
cttctcagttaaacttgtgtttctgg

SEQ ID NO: 42278 - DNA, 26 bp, Homo sapiens
ttctcagttaaacttgtgtttctggt

SEQ ID NO: 42279 - DNA, 26 bp, Homo sapiens
tctcagttaaacttgtgtttctggtg

SEQ ID NO: 42280 - DNA, 26 bp, Homo sapiens
ctcagttaaacttgtgtttctggtgc

SEQ ID NO: 42281 - DNA, 26 bp, Homo sapiens
tcagttaaacttgtgtttctggtgca

SEQ ID NO: 42282 - DNA, 26 bp, Homo sapiens
cagttaaacttgtgtttctggtgcac

SEQ ID NO: 42283 - DNA, 26 bp, Homo sapiens
agttaaacttgtgtttctggtgcaca

SEQ ID NO: 42284 - DNA, 26 bp, Homo sapiens
gttaaacttgtgtttctggtgcacat

SEQ ID NO: 42285 - DNA, 26 bp, Homo sapiens
ttaaacttgtgtttctggtgcacatg

SEQ ID NO: 42286 - DNA, 26 bp, Homo sapiens
taaacttgtgtttctggtgcacatgc

SEQ ID NO: 42287 - DNA, 26 bp, Homo sapiens
aaacttgtgtttctggtgcacatgcg

SEQ ID NO: 42288 - DNA, 26 bp, Homo sapiens
aacttgtgtttctggtgcacatgcga

SEQ ID NO: 42289 - DNA, 26 bp, Homo sapiens
acttgtgtttctggtgcacatgcgac

SEQ ID NO: 42290 - DNA, 26 bp, Homo sapiens
cttgtgtttctggtgcacatgcgaca

SEQ ID NO: 42291 - DNA, 26 bp, Homo sapiens
ttgtgtttctggtgcacatgcgacac

SEQ ID NO: 42292 - DNA, 26 bp, Homo sapiens
tgtgtttctggtgcacatgcgacacg

SEQ ID NO: 42293 - DNA, 26 bp, Homo sapiens
gtgtttctggtgcacatgcgacacga

SEQ ID NO: 42294 - DNA, 26 bp, Homo sapiens
tgtttctggtgcacatgcgacacgac

SEQ ID NO: 42295 - DNA, 26 bp, Homo sapiens
gtttctggtgcacatgcgacacgaca

SEQ ID NO: 42296 - DNA, 26 bp, Homo sapiens
tttctggtgcacatgcgacacgacag

SEQ ID NO: 42297 - DNA, 26 bp, Homo sapiens
ttctggtgcacatgcgacacgacagt

SEQ ID NO: 42298 - DNA, 26 bp, Homo sapiens
tctggtgcacatgcgacacgacagtg

SEQ ID NO: 42299 - DNA, 26 bp, Homo sapiens
ctggtgcacatgcgacacgacagtga

SEQ ID NO: 42300 - DNA, 26 bp, Homo sapiens
tggtgcacatgcgacacgacagtgaa

SEQ ID NO: 42301 - DNA, 26 bp, Homo sapiens
ggtgcacatgcgacacgacagtgaac

SEQ ID NO: 42302 - DNA, 26 bp, Homo sapiens
gtgcacatgcgacacgacagtgaaca

SEQ ID NO: 42303 - DNA, 26 bp, Homo sapiens
tgcacatgcgacacgacagtgaacac

SEQ ID NO: 42304 - DNA, 26 bp, Homo sapiens
gcacatgcgacacgacagtgaacacg

SEQ ID NO: 42305 - DNA, 26 bp, Homo sapiens
cacatgcgacacgacagtgaacacgc

SEQ ID NO: 42306 - DNA, 26 bp, Homo sapiens
acatgcgacacgacagtgaacacgct

SEQ ID NO: 42307 - DNA, 26 bp, Homo sapiens
catgcgacacgacagtgaacacgcta

SEQ ID NO: 42308 - DNA, 26 bp, Homo sapiens
atgcgacacgacagtgaacacgctag

SEQ ID NO: 42309 - DNA, 26 bp, Homo sapiens
tgcgacacgacagtgaacacgctagc

SEQ ID NO: 42310 - DNA, 26 bp, Homo sapiens
gcgacacgacagtgaacacgctagca

SEQ ID NO: 42311 - DNA, 26 bp, Homo sapiens
cgacacgacagtgaacacgctagcat

SEQ ID NO: 42312 - DNA, 26 bp, Homo sapiens
gacacgacagtgaacacgctagcatt

SEQ ID NO: 42313 - DNA, 26 bp, Homo sapiens
acacgacagtgaacacgctagcattt

SEQ ID NO: 42314 - DNA, 26 bp, Homo sapiens
cacgacagtgaacacgctagcattta

SEQ ID NO: 42315 - DNA, 26 bp, Homo sapiens
acgacagtgaacacgctagcatttaa

SEQ ID NO: 42316 - DNA, 26 bp, Homo sapiens
cgacagtgaacacgctagcatttaat

SEQ ID NO: 42317 - DNA, 26 bp, Homo sapiens
gacagtgaacacgctagcatttaatt

SEQ ID NO: 42318 - DNA, 26 bp, Homo sapiens
acagtgaacacgctagcatttaattt

SEQ ID NO: 42319 - DNA, 26 bp, Homo sapiens
cagtgaacacgctagcatttaattta

SEQ ID NO: 42320 - DNA, 26 bp, Homo sapiens
agtgaacacgctagcatttaatttaa

SEQ ID NO: 42321 - DNA, 26 bp, Homo sapiens
gtgaacacgctagcatttaatttaaa

SEQ ID NO: 42322 - DNA, 26 bp, Homo sapiens
tgaacacgctagcatttaatttaaag

SEQ ID NO: 42323 - DNA, 26 bp, Homo sapiens
gaacacgctagcatttaatttaaaga

SEQ ID NO: 42324 - DNA, 26 bp, Homo sapiens
aacacgctagcatttaatttaaagaa

SEQ ID NO: 42325 - DNA, 26 bp, Homo sapiens
acacgctagcatttaatttaaagaaa

SEQ ID NO: 42326 - DNA, 26 bp, Homo sapiens
cacgctagcatttaatttaaagaaaa

SEQ ID NO: 42327 - DNA, 26 bp, Homo sapiens
acgctagcatttaatttaaagaaaaa

SEQ ID NO: 42328 - DNA, 26 bp, Homo sapiens
cgctagcatttaatttaaagaaaaag

SEQ ID NO: 42329 - DNA, 26 bp, Homo sapiens
gctagcatttaatttaaagaaaaagg

SEQ ID NO: 42330 - DNA, 26 bp, Homo sapiens
ctagcatttaatttaaagaaaaaggt

SEQ ID NO: 42331 - DNA, 26 bp, Homo sapiens
tagcatttaatttaaagaaaaaggtg

SEQ ID NO: 42332 - DNA, 26 bp, Homo sapiens
agcatttaatttaaagaaaaaggtgc

SEQ ID NO: 42333 - DNA, 26 bp, Homo sapiens
gcatttaatttaaagaaaaaggtgca

SEQ ID NO: 42334 - DNA, 26 bp, Homo sapiens
catttaatttaaagaaaaaggtgcaa

SEQ ID NO: 42335 - DNA, 26 bp, Homo sapiens
atttaatttaaagaaaaaggtgcaaa

SEQ ID NO: 42336 - DNA, 26 bp, Homo sapiens
tttaatttaaagaaaaaggtgcaaaa

SEQ ID NO: 42337 - DNA, 26 bp, Homo sapiens
ttaatttaaagaaaaaggtgcaaaat

SEQ ID NO: 42338 - DNA, 26 bp, Homo sapiens
taatttaaagaaaaaggtgcaaaatg

SEQ ID NO: 42339 - DNA, 26 bp, Homo sapiens
aatttaaagaaaaaggtgcaaaatga

SEQ ID NO: 42340 - DNA, 26 bp, Homo sapiens
atttaaagaaaaaggtgcaaaatgaa

SEQ ID NO: 42341 - DNA, 26 bp, Homo sapiens
tttaaagaaaaaggtgcaaaatgaaa

SEQ ID NO: 42342 - DNA, 26 bp, Homo sapiens
ttaaagaaaaaggtgcaaaatgaaag

SEQ ID NO: 42343 - DNA, 26 bp, Homo sapiens
taaagaaaaaggtgcaaaatgaaagt

SEQ ID NO: 42344 - DNA, 26 bp, Homo sapiens
aaagaaaaaggtgcaaaatgaaagtg

SEQ ID NO: 42345 - DNA, 26 bp, Homo sapiens
aagaaaaaggtgcaaaatgaaagtgc

SEQ ID NO: 42346 - DNA, 26 bp, Homo sapiens
agaaaaaggtgcaaaatgaaagtgcc

SEQ ID NO: 42347 - DNA, 26 bp, Homo sapiens
gaaaaaggtgcaaaatgaaagtgcct

SEQ ID NO: 42348 - DNA, 26 bp, Homo sapiens
aaaaaggtgcaaaatgaaagtgcctt

SEQ ID NO: 42349 - DNA, 26 bp, Homo sapiens
aaaaggtgcaaaatgaaagtgcctta

SEQ ID NO: 42350 - DNA, 26 bp, Homo sapiens
aaaggtgcaaaatgaaagtgccttat

SEQ ID NO: 42351 - DNA, 26 bp, Homo sapiens
aaggtgcaaaatgaaagtgccttatc

SEQ ID NO: 42352 - DNA, 26 bp, Homo sapiens
aggtgcaaaatgaaagtgccttatca

SEQ ID NO: 42353 - DNA, 26 bp, Homo sapiens
ggtgcaaaatgaaagtgccttatcaa

SEQ ID NO: 42354 - DNA, 26 bp, Homo sapiens
gtgcaaaatgaaagtgccttatcaat

SEQ ID NO: 42355 - DNA, 26 bp, Homo sapiens
tgcaaaatgaaagtgccttatcaatt

SEQ ID NO: 42356 - DNA, 26 bp, Homo sapiens
gcaaaatgaaagtgccttatcaattc

SEQ ID NO: 42357 - DNA, 26 bp, Homo sapiens
caaaatgaaagtgccttatcaattca

SEQ ID NO: 42358 - DNA, 26 bp, Homo sapiens
aaaatgaaagtgccttatcaattcaa

SEQ ID NO: 42359 - DNA, 26 bp, Homo sapiens
aaatgaaagtgccttatcaattcaac

SEQ ID NO: 42360 - DNA, 26 bp, Homo sapiens
aatgaaagtgccttatcaattcaaca

SEQ ID NO: 42361 - DNA, 26 bp, Homo sapiens
atgaaagtgccttatcaattcaacag

SEQ ID NO: 42362 - DNA, 26 bp, Homo sapiens
tgaaagtgccttatcaattcaacagg

SEQ ID NO: 42363 - DNA, 26 bp, Homo sapiens
gaaagtgccttatcaattcaacagga

SEQ ID NO: 42364 - DNA, 26 bp, Homo sapiens
aaagtgccttatcaattcaacaggaa

SEQ ID NO: 42365 - DNA, 26 bp, Homo sapiens
aagtgccttatcaattcaacaggaaa

SEQ ID NO: 42366 - DNA, 26 bp, Homo sapiens
agtgccttatcaattcaacaggaaaa

SEQ ID NO: 42367 - DNA, 26 bp, Homo sapiens
gtgccttatcaattcaacaggaaaag

SEQ ID NO: 42368 - DNA, 26 bp, Homo sapiens
tgccttatcaattcaacaggaaaagc

SEQ ID NO: 42369 - DNA, 26 bp, Homo sapiens
gccttatcaattcaacaggaaaagct

SEQ ID NO: 42370 - DNA, 26 bp, Homo sapiens
ccttatcaattcaacaggaaaagcta

SEQ ID NO: 42371 - DNA, 26 bp, Homo sapiens
cttatcaattcaacaggaaaagctac

SEQ ID NO: 42372 - DNA, 26 bp, Homo sapiens
ttatcaattcaacaggaaaagctaca

SEQ ID NO: 42373 - DNA, 26 bp, Homo sapiens
tatcaattcaacaggaaaagctacac

SEQ ID NO: 42374 - DNA, 26 bp, Homo sapiens
atcaattcaacaggaaaagctacacc

SEQ ID NO: 42375 - DNA, 26 bp, Homo sapiens
tcaattcaacaggaaaagctacacca

SEQ ID NO: 42376 - DNA, 26 bp, Homo sapiens
caattcaacaggaaaagctacaccag

SEQ ID NO: 42377 - DNA, 26 bp, Homo sapiens
aattcaacaggaaaagctacaccagt

SEQ ID NO: 42378 - DNA, 26 bp, Homo sapiens
attcaacaggaaaagctacaccagta

SEQ ID NO: 42379 - DNA, 26 bp, Homo sapiens
ttcaacaggaaaagctacaccagtaa

SEQ ID NO: 42380 - DNA, 26 bp, Homo sapiens
tcaacaggaaaagctacaccagtaac

SEQ ID NO: 42381 - DNA, 26 bp, Homo sapiens
caacaggaaaagctacaccagtaact

SEQ ID NO: 42382 - DNA, 26 bp, Homo sapiens
aacaggaaaagctacaccagtaacta

SEQ ID NO: 42383 - DNA, 26 bp, Homo sapiens
acaggaaaagctacaccagtaactac

SEQ ID NO: 42384 - DNA, 26 bp, Homo sapiens
caggaaaagctacaccagtaactaca

SEQ ID NO: 42385 - DNA, 26 bp, Homo sapiens
aggaaaagctacaccagtaactacat

SEQ ID NO: 42386 - DNA, 26 bp, Homo sapiens
ggaaaagctacaccagtaactacatt

SEQ ID NO: 42387 - DNA, 26 bp, Homo sapiens
gaaaagctacaccagtaactacattt

SEQ ID NO: 42388 - DNA, 26 bp, Homo sapiens
aaaagctacaccagtaactacatttt

SEQ ID NO: 42389 - DNA, 26 bp, Homo sapiens
aaagctacaccagtaactacatttta

SEQ ID NO: 42390 - DNA, 26 bp, Homo sapiens
aagctacaccagtaactacattttat

SEQ ID NO: 42391 - DNA, 26 bp, Homo sapiens
agctacaccagtaactacattttata

SEQ ID NO: 42392 - DNA, 26 bp, Homo sapiens
gctacaccagtaactacattttatat

SEQ ID NO: 42393 - DNA, 26 bp, Homo sapiens
ctacaccagtaactacattttatatt

SEQ ID NO: 42394 - DNA, 26 bp, Homo sapiens
tacaccagtaactacattttatatta

SEQ ID NO: 42395 - DNA, 26 bp, Homo sapiens
acaccagtaactacattttatattac

SEQ ID NO: 42396 - DNA, 26 bp, Homo sapiens
caccagtaactacattttatattact

SEQ ID NO: 42397 - DNA, 26 bp, Homo sapiens
accagtaactacattttatattactt

SEQ ID NO: 42398 - DNA, 26 bp, Homo sapiens
ccagtaactacattttatattactta

SEQ ID NO: 42399 - DNA, 26 bp, Homo sapiens
cagtaactacattttatattacttaa

SEQ ID NO: 42400 - DNA, 26 bp, Homo sapiens
agtaactacattttatattacttaaa

SEQ ID NO: 42401 - DNA, 26 bp, Homo sapiens
gtaactacattttatattacttaaaa

SEQ ID NO: 42402 - DNA, 26 bp, Homo sapiens
taactacattttatattacttaaaac

SEQ ID NO: 42403 - DNA, 26 bp, Homo sapiens
aactacattttatattacttaaaaca

SEQ ID NO: 42404 - DNA, 26 bp, Homo sapiens
actacattttatattacttaaaacaa

SEQ ID NO: 42405 - DNA, 26 bp, Homo sapiens
ctacattttatattacttaaaacaat

SEQ ID NO: 42406 - DNA, 26 bp, Homo sapiens
tacattttatattacttaaaacaata

SEQ ID NO: 42407 - DNA, 26 bp, Homo sapiens
acattttatattacttaaaacaatat

SEQ ID NO: 42408 - DNA, 26 bp, Homo sapiens
cattttatattacttaaaacaatata

SEQ ID NO: 42409 - DNA, 26 bp, Homo sapiens
attttatattacttaaaacaatatat

SEQ ID NO: 42410 - DNA, 26 bp, Homo sapiens
ttttatattacttaaaacaatatata

SEQ ID NO: 42411 - DNA, 26 bp, Homo sapiens
tttatattacttaaaacaatatataa

SEQ ID NO: 42412 - DNA, 26 bp, Homo sapiens
ttatattacttaaaacaatatataaa

SEQ ID NO: 42413 - DNA, 26 bp, Homo sapiens
tatattacttaaaacaatatataaac

SEQ ID NO: 42414 - DNA, 26 bp, Homo sapiens
atattacttaaaacaatatataaaca

SEQ ID NO: 42415 - DNA, 26 bp, Homo sapiens
tattacttaaaacaatatataaacaa

SEQ ID NO: 42416 - DNA, 26 bp, Homo sapiens
attacttaaaacaatatataaacaat

SEQ ID NO: 42417 - DNA, 26 bp, Homo sapiens
ttacttaaaacaatatataaacaata

SEQ ID NO: 42418 - DNA, 26 bp, Homo sapiens
tacttaaaacaatatataaacaatat

SEQ ID NO: 42419 - DNA, 26 bp, Homo sapiens
acttaaaacaatatataaacaatatc

SEQ ID NO: 42420 - DNA, 26 bp, Homo sapiens
cttaaaacaatatataaacaatatct

SEQ ID NO: 42421 - DNA, 26 bp, Homo sapiens
ttaaaacaatatataaacaatatctc

SEQ ID NO: 42422 - DNA, 26 bp, Homo sapiens
taaaacaatatataaacaatatctct

SEQ ID NO: 42423 - DNA, 26 bp, Homo sapiens
aaaacaatatataaacaatatctctt

SEQ ID NO: 42424 - DNA, 26 bp, Homo sapiens
aaacaatatataaacaatatctcttt

SEQ ID NO: 42425 - DNA, 26 bp, Homo sapiens
aacaatatataaacaatatctctttt

SEQ ID NO: 42426 - DNA, 26 bp, Homo sapiens
acaatatataaacaatatctctttta

SEQ ID NO: 42427 - DNA, 26 bp, Homo sapiens
caatatataaacaatatctcttttag

SEQ ID NO: 42428 - DNA, 26 bp, Homo sapiens
aatatataaacaatatctcttttagc

SEQ ID NO: 42429 - DNA, 26 bp, Homo sapiens
atatataaacaatatctcttttagct

SEQ ID NO: 42430 - DNA, 26 bp, Homo sapiens
tatataaacaatatctcttttagcta

SEQ ID NO: 42431 - DNA, 26 bp, Homo sapiens
atataaacaatatctcttttagctat

SEQ ID NO: 42432 - DNA, 26 bp, Homo sapiens
tataaacaatatctcttttagctata

SEQ ID NO: 42433 - DNA, 26 bp, Homo sapiens
ataaacaatatctcttttagctatat

SEQ ID NO: 42434 - DNA, 26 bp, Homo sapiens
taaacaatatctcttttagctatata

SEQ ID NO: 42435 - DNA, 26 bp, Homo sapiens
aaacaatatctcttttagctatatat

SEQ ID NO: 42436 - DNA, 26 bp, Homo sapiens
aacaatatctcttttagctatatata

SEQ ID NO: 42437 - DNA, 26 bp, Homo sapiens
acaatatctcttttagctatatatag

SEQ ID NO: 42438 - DNA, 26 bp, Homo sapiens
caatatctcttttagctatatatagt

SEQ ID NO: 42439 - DNA, 26 bp, Homo sapiens
aatatctcttttagctatatatagtc

SEQ ID NO: 42440 - DNA, 26 bp, Homo sapiens
atatctcttttagctatatatagtct

SEQ ID NO: 42441 - DNA, 26 bp, Homo sapiens
tatctcttttagctatatatagtctt

SEQ ID NO: 42442 - DNA, 26 bp, Homo sapiens
atctcttttagctatatatagtcttc

SEQ ID NO: 42443 - DNA, 26 bp, Homo sapiens
tctcttttagctatatatagtcttca

SEQ ID NO: 42444 - DNA, 26 bp, Homo sapiens
ctcttttagctatatatagtcttcat

SEQ ID NO: 42445 - DNA, 26 bp, Homo sapiens
tcttttagctatatatagtcttcatg

SEQ ID NO: 42446 - DNA, 26 bp, Homo sapiens
cttttagctatatatagtcttcatgc

SEQ ID NO: 42447 - DNA, 26 bp, Homo sapiens
ttttagctatatatagtcttcatgcc

SEQ ID NO: 42448 - DNA, 26 bp, Homo sapiens
tttagctatatatagtcttcatgccc

SEQ ID NO: 42449 - DNA, 26 bp, Homo sapiens
ttagctatatatagtcttcatgccca

SEQ ID NO: 42450 - DNA, 26 bp, Homo sapiens
tagctatatatagtcttcatgcccat

SEQ ID NO: 42451 - DNA, 26 bp, Homo sapiens
agctatatatagtcttcatgcccatt

SEQ ID NO: 42452 - DNA, 26 bp, Homo sapiens
gctatatatagtcttcatgcccattt

SEQ ID NO: 42453 - DNA, 26 bp, Homo sapiens
ctatatatagtcttcatgcccattta

SEQ ID NO: 42454 - DNA, 26 bp, Homo sapiens
tatatatagtcttcatgcccatttac

SEQ ID NO: 42455 - DNA, 26 bp, Homo sapiens
atatatagtcttcatgcccatttacc

SEQ ID NO: 42456 - DNA, 26 bp, Homo sapiens
tatatagtcttcatgcccatttaccc

SEQ ID NO: 42457 - DNA, 26 bp, Homo sapiens
atatagtcttcatgcccatttaccct

SEQ ID NO: 42458 - DNA, 26 bp, Homo sapiens
tatagtcttcatgcccatttaccctg

SEQ ID NO: 42459 - DNA, 26 bp, Homo sapiens
atagtcttcatgcccatttaccctgt

SEQ ID NO: 42460 - DNA, 26 bp, Homo sapiens
tagtcttcatgcccatttaccctgta

SEQ ID NO: 42461 - DNA, 26 bp, Homo sapiens
agtcttcatgcccatttaccctgtaa

SEQ ID NO: 42462 - DNA, 26 bp, Homo sapiens
gtcttcatgcccatttaccctgtaat

SEQ ID NO: 42463 - DNA, 26 bp, Homo sapiens
tcttcatgcccatttaccctgtaata

SEQ ID NO: 42464 - DNA, 26 bp, Homo sapiens
cttcatgcccatttaccctgtaatat

SEQ ID NO: 42465 - DNA, 26 bp, Homo sapiens
ttcatgcccatttaccctgtaatata

SEQ ID NO: 42466 - DNA, 26 bp, Homo sapiens
tcatgcccatttaccctgtaatatat

SEQ ID NO: 42467 - DNA, 26 bp, Homo sapiens
catgcccatttaccctgtaatatatt

SEQ ID NO: 42468 - DNA, 26 bp, Homo sapiens
atgcccatttaccctgtaatatatta

SEQ ID NO: 42469 - DNA, 26 bp, Homo sapiens
tgcccatttaccctgtaatatattat

SEQ ID NO: 42470 - DNA, 26 bp, Homo sapiens
gcccatttaccctgtaatatattata

SEQ ID NO: 42471 - DNA, 26 bp, Homo sapiens
cccatttaccctgtaatatattataa

SEQ ID NO: 42472 - DNA, 26 bp, Homo sapiens
ccatttaccctgtaatatattataat

SEQ ID NO: 42473 - DNA, 26 bp, Homo sapiens
catttaccctgtaatatattataatg

SEQ ID NO: 42474 - DNA, 26 bp, Homo sapiens
atttaccctgtaatatattataatgc

SEQ ID NO: 42475 - DNA, 26 bp, Homo sapiens
tttaccctgtaatatattataatgct

SEQ ID NO: 42476 - DNA, 26 bp, Homo sapiens
ttaccctgtaatatattataatgcta

SEQ ID NO: 42477 - DNA, 26 bp, Homo sapiens
taccctgtaatatattataatgctat

SEQ ID NO: 42478 - DNA, 26 bp, Homo sapiens
accctgtaatatattataatgctatt

SEQ ID NO: 42479 - DNA, 26 bp, Homo sapiens
ccctgtaatatattataatgctattg

SEQ ID NO: 42480 - DNA, 26 bp, Homo sapiens
cctgtaatatattataatgctattgt

SEQ ID NO: 42481 - DNA, 26 bp, Homo sapiens
ctgtaatatattataatgctattgtt

SEQ ID NO: 42482 - DNA, 26 bp, Homo sapiens
tgtaatatattataatgctattgttg

SEQ ID NO: 42483 - DNA, 26 bp, Homo sapiens
gtaatatattataatgctattgttgc

SEQ ID NO: 42484 - DNA, 26 bp, Homo sapiens
taatatattataatgctattgttgct

SEQ ID NO: 42485 - DNA, 26 bp, Homo sapiens
aatatattataatgctattgttgcta

SEQ ID NO: 42486 - DNA, 26 bp, Homo sapiens
atatattataatgctattgttgctac

SEQ ID NO: 42487 - DNA, 26 bp, Homo sapiens
tatattataatgctattgttgctact

SEQ ID NO: 42488 - DNA, 26 bp, Homo sapiens
atattataatgctattgttgctactg

SEQ ID NO: 42489 - DNA, 26 bp, Homo sapiens
tattataatgctattgttgctactgc

SEQ ID NO: 42490 - DNA, 26 bp, Homo sapiens
attataatgctattgttgctactgct

SEQ ID NO: 42491 - DNA, 26 bp, Homo sapiens
ttataatgctattgttgctactgcta

SEQ ID NO: 42492 - DNA, 26 bp, Homo sapiens
tataatgctattgttgctactgctat

SEQ ID NO: 42493 - DNA, 26 bp, Homo sapiens
ataatgctattgttgctactgctatg

SEQ ID NO: 42494 - DNA, 26 bp, Homo sapiens
taatgctattgttgctactgctatgg

SEQ ID NO: 42495 - DNA, 26 bp, Homo sapiens
aatgctattgttgctactgctatgga

SEQ ID NO: 42496 - DNA, 26 bp, Homo sapiens
atgctattgttgctactgctatggac

SEQ ID NO: 42497 - DNA, 26 bp, Homo sapiens
tgctattgttgctactgctatggacc

SEQ ID NO: 42498 - DNA, 26 bp, Homo sapiens
gctattgttgctactgctatggaccc

SEQ ID NO: 42499 - DNA, 26 bp, Homo sapiens
ctattgttgctactgctatggaccct

SEQ ID NO: 42500 - DNA, 26 bp, Homo sapiens
tattgttgctactgctatggaccctt

SEQ ID NO: 42501 - DNA, 26 bp, Homo sapiens
attgttgctactgctatggacccttt

SEQ ID NO: 42502 - DNA, 26 bp, Homo sapiens
ttgttgctactgctatggaccctttt

SEQ ID NO: 42503 - DNA, 26 bp, Homo sapiens
tgttgctactgctatggacccttttc

SEQ ID NO: 42504 - DNA, 26 bp, Homo sapiens
gttgctactgctatggacccttttca

SEQ ID NO: 42505 - DNA, 26 bp, Homo sapiens
ttgctactgctatggacccttttcat

SEQ ID NO: 42506 - DNA, 26 bp, Homo sapiens
tgctactgctatggacccttttcatg

SEQ ID NO: 42507 - DNA, 26 bp, Homo sapiens
gctactgctatggacccttttcatgc

SEQ ID NO: 42508 - DNA, 26 bp, Homo sapiens
ctactgctatggacccttttcatgcc

SEQ ID NO: 42509 - DNA, 26 bp, Homo sapiens
tactgctatggacccttttcatgcca

SEQ ID NO: 42510 - DNA, 26 bp, Homo sapiens
actgctatggacccttttcatgccat

SEQ ID NO: 42511 - DNA, 26 bp, Homo sapiens
ctgctatggacccttttcatgccatc

SEQ ID NO: 42512 - DNA, 26 bp, Homo sapiens
tgctatggacccttttcatgccatcc

SEQ ID NO: 42513 - DNA, 26 bp, Homo sapiens
gctatggacccttttcatgccatcct

SEQ ID NO: 42514 - DNA, 26 bp, Homo sapiens
ctatggacccttttcatgccatcctg

SEQ ID NO: 42515 - DNA, 26 bp, Homo sapiens
tatggacccttttcatgccatcctgc

SEQ ID NO: 42516 - DNA, 26 bp, Homo sapiens
atggacccttttcatgccatcctgcg

SEQ ID NO: 42517 - DNA, 26 bp, Homo sapiens
tggacccttttcatgccatcctgcgg

SEQ ID NO: 42518 - DNA, 26 bp, Homo sapiens
ggacccttttcatgccatcctgcgga

SEQ ID NO: 42519 - DNA, 26 bp, Homo sapiens
gacccttttcatgccatcctgcggac

SEQ ID NO: 42520 - DNA, 26 bp, Homo sapiens
acccttttcatgccatcctgcggact

SEQ ID NO: 42521 - DNA, 26 bp, Homo sapiens
cccttttcatgccatcctgcggactg

SEQ ID NO: 42522 - DNA, 26 bp, Homo sapiens
ccttttcatgccatcctgcggactgg

SEQ ID NO: 42523 - DNA, 26 bp, Homo sapiens
cttttcatgccatcctgcggactggc

SEQ ID NO: 42524 - DNA, 26 bp, Homo sapiens
ttttcatgccatcctgcggactggca

SEQ ID NO: 42525 - DNA, 26 bp, Homo sapiens
tttcatgccatcctgcggactggcaa

SEQ ID NO: 42526 - DNA, 26 bp, Homo sapiens
ttcatgccatcctgcggactggcaat

SEQ ID NO: 42527 - DNA, 26 bp, Homo sapiens
tcatgccatcctgcggactggcaata

SEQ ID NO: 42528 - DNA, 26 bp, Homo sapiens
catgccatcctgcggactggcaataa

SEQ ID NO: 42529 - DNA, 26 bp, Homo sapiens
atgccatcctgcggactggcaataat

SEQ ID NO: 42530 - DNA, 26 bp, Homo sapiens
tgccatcctgcggactggcaataatc

SEQ ID NO: 42531 - DNA, 26 bp, Homo sapiens
gccatcctgcggactggcaataatcg

SEQ ID NO: 42532 - DNA, 26 bp, Homo sapiens
ccatcctgcggactggcaataatcgg

SEQ ID NO: 42533 - DNA, 26 bp, Homo sapiens
catcctgcggactggcaataatcggt

SEQ ID NO: 42534 - DNA, 26 bp, Homo sapiens
atcctgcggactggcaataatcggtg

SEQ ID NO: 42535 - DNA, 26 bp, Homo sapiens
tcctgcggactggcaataatcggtga

SEQ ID NO: 42536 - DNA, 26 bp, Homo sapiens
cctgcggactggcaataatcggtgaa

SEQ ID NO: 42537 - DNA, 26 bp, Homo sapiens
ctgcggactggcaataatcggtgaaa

SEQ ID NO: 42538 - DNA, 26 bp, Homo sapiens
tgcggactggcaataatcggtgaaaa

SEQ ID NO: 42539 - DNA, 26 bp, Homo sapiens
gcggactggcaataatcggtgaaaaa

SEQ ID NO: 42540 - DNA, 26 bp, Homo sapiens
cggactggcaataatcggtgaaaaaa

SEQ ID NO: 42541 - DNA, 26 bp, Homo sapiens
ggactggcaataatcggtgaaaaaat

SEQ ID NO: 42542 - DNA, 26 bp, Homo sapiens
gactggcaataatcggtgaaaaaata

SEQ ID NO: 42543 - DNA, 26 bp, Homo sapiens
actggcaataatcggtgaaaaaataa

SEQ ID NO: 42544 - DNA, 26 bp, Homo sapiens
ctggcaataatcggtgaaaaaataaa

SEQ ID NO: 42545 - DNA, 26 bp, Homo sapiens
tggcaataatcggtgaaaaaataaaa

SEQ ID NO: 42546 - DNA, 26 bp, Homo sapiens
ggcaataatcggtgaaaaaataaaaa

SEQ ID NO: 42547 - DNA, 26 bp, Homo sapiens
gcaataatcggtgaaaaaataaaaac

SEQ ID NO: 42548 - DNA, 26 bp, Homo sapiens
caataatcggtgaaaaaataaaaact

SEQ ID NO: 42549 - DNA, 26 bp, Homo sapiens
aataatcggtgaaaaaataaaaactt

SEQ ID NO: 42550 - DNA, 26 bp, Homo sapiens
ataatcggtgaaaaaataaaaacttc

SEQ ID NO: 42551 - DNA, 26 bp, Homo sapiens
taatcggtgaaaaaataaaaacttcc

SEQ ID NO: 42552 - DNA, 26 bp, Homo sapiens
aatcggtgaaaaaataaaaacttcct

SEQ ID NO: 42553 - DNA, 26 bp, Homo sapiens
atcggtgaaaaaataaaaacttcctt

SEQ ID NO: 42554 - DNA, 26 bp, Homo sapiens
tcggtgaaaaaataaaaacttccttc

SEQ ID NO: 42555 - DNA, 26 bp, Homo sapiens
cggtgaaaaaataaaaacttccttca

SEQ ID NO: 42556 - DNA, 26 bp, Homo sapiens
ggtgaaaaaataaaaacttccttcat

SEQ ID NO: 42557 - DNA, 26 bp, Homo sapiens
gtgaaaaaataaaaacttccttcatg

SEQ ID NO: 42558 - DNA, 26 bp, Homo sapiens
tgaaaaaataaaaacttccttcatga

SEQ ID NO: 42559 - DNA, 26 bp, Homo sapiens
gaaaaaataaaaacttccttcatgaa

SEQ ID NO: 42560 - DNA, 26 bp, Homo sapiens
aaaaaataaaaacttccttcatgaaa

SEQ ID NO: 42561 - DNA, 26 bp, Homo sapiens
aaaaataaaaacttccttcatgaaac

SEQ ID NO: 42562 - DNA, 26 bp, Homo sapiens
aaaataaaaacttccttcatgaaaca

SEQ ID NO: 42563 - DNA, 26 bp, Homo sapiens
aaataaaaacttccttcatgaaacaa

SEQ ID NO: 42564 - DNA, 26 bp, Homo sapiens
aataaaaacttccttcatgaaacaaa

SEQ ID NO: 42565 - DNA, 26 bp, Homo sapiens
ataaaaacttccttcatgaaacaaag

SEQ ID NO: 42566 - DNA, 26 bp, Homo sapiens
taaaaacttccttcatgaaacaaaga

SEQ ID NO: 42567 - DNA, 26 bp, Homo sapiens
aaaaacttccttcatgaaacaaagag

SEQ ID NO: 42568 - DNA, 26 bp, Homo sapiens
aaaacttccttcatgaaacaaagagc

SEQ ID NO: 42569 - DNA, 26 bp, Homo sapiens
aaacttccttcatgaaacaaagagct

SEQ ID NO: 42570 - DNA, 26 bp, Homo sapiens
aacttccttcatgaaacaaagagcta

SEQ ID NO: 42571 - DNA, 26 bp, Homo sapiens
acttccttcatgaaacaaagagctag

SEQ ID NO: 42572 - DNA, 26 bp, Homo sapiens
cttccttcatgaaacaaagagctagt

SEQ ID NO: 42573 - DNA, 26 bp, Homo sapiens
ttccttcatgaaacaaagagctagtt

SEQ ID NO: 42574 - DNA, 26 bp, Homo sapiens
tccttcatgaaacaaagagctagttg

SEQ ID NO: 42575 - DNA, 26 bp, Homo sapiens
ccttcatgaaacaaagagctagttgt

SEQ ID NO: 42576 - DNA, 26 bp, Homo sapiens
cttcatgaaacaaagagctagttgtg

SEQ ID NO: 42577 - DNA, 26 bp, Homo sapiens
ttcatgaaacaaagagctagttgtgc

SEQ ID NO: 42578 - DNA, 26 bp, Homo sapiens
tcatgaaacaaagagctagttgtgca

SEQ ID NO: 42579 - DNA, 26 bp, Homo sapiens
catgaaacaaagagctagttgtgcaa

SEQ ID NO: 42580 - DNA, 26 bp, Homo sapiens
atgaaacaaagagctagttgtgcaaa

SEQ ID NO: 42581 - DNA, 26 bp, Homo sapiens
tgaaacaaagagctagttgtgcaaag

SEQ ID NO: 42582 - DNA, 26 bp, Homo sapiens
gaaacaaagagctagttgtgcaaagt

SEQ ID NO: 42583 - DNA, 26 bp, Homo sapiens
aaacaaagagctagttgtgcaaagta

SEQ ID NO: 42584 - DNA, 26 bp, Homo sapiens
aacaaagagctagttgtgcaaagtaa

SEQ ID NO: 42585 - DNA, 26 bp, Homo sapiens
acaaagagctagttgtgcaaagtaat

SEQ ID NO: 42586 - DNA, 26 bp, Homo sapiens
caaagagctagttgtgcaaagtaatg

SEQ ID NO: 42587 - DNA, 26 bp, Homo sapiens
aaagagctagttgtgcaaagtaatgc

SEQ ID NO: 42588 - DNA, 26 bp, Homo sapiens
aagagctagttgtgcaaagtaatgcc

SEQ ID NO: 42589 - DNA, 26 bp, Homo sapiens
agagctagttgtgcaaagtaatgccg

SEQ ID NO: 42590 - DNA, 26 bp, Homo sapiens
gagctagttgtgcaaagtaatgccgc

SEQ ID NO: 42591 - DNA, 26 bp, Homo sapiens
agctagttgtgcaaagtaatgccgca

SEQ ID NO: 42592 - DNA, 26 bp, Homo sapiens
gctagttgtgcaaagtaatgccgcaa

SEQ ID NO: 42593 - DNA, 26 bp, Homo sapiens
ctagttgtgcaaagtaatgccgcaac

SEQ ID NO: 42594 - DNA, 26 bp, Homo sapiens
tagttgtgcaaagtaatgccgcaacc

SEQ ID NO: 42595 - DNA, 26 bp, Homo sapiens
agttgtgcaaagtaatgccgcaacct

SEQ ID NO: 42596 - DNA, 26 bp, Homo sapiens
gttgtgcaaagtaatgccgcaacctc

SEQ ID NO: 42597 - DNA, 26 bp, Homo sapiens
ttgtgcaaagtaatgccgcaacctcc

SEQ ID NO: 42598 - DNA, 26 bp, Homo sapiens
tgtgcaaagtaatgccgcaacctccg

SEQ ID NO: 42599 - DNA, 26 bp, Homo sapiens
gtgcaaagtaatgccgcaacctccgc

SEQ ID NO: 42600 - DNA, 26 bp, Homo sapiens
tgcaaagtaatgccgcaacctccgct

SEQ ID NO: 42601 - DNA, 26 bp, Homo sapiens
gcaaagtaatgccgcaacctccgcta

SEQ ID NO: 42602 - DNA, 26 bp, Homo sapiens
caaagtaatgccgcaacctccgctat

SEQ ID NO: 42603 - DNA, 26 bp, Homo sapiens
aaagtaatgccgcaacctccgctatg

SEQ ID NO: 42604 - DNA, 26 bp, Homo sapiens
aagtaatgccgcaacctccgctatgc

SEQ ID NO: 42605 - DNA, 26 bp, Homo sapiens
agtaatgccgcaacctccgctatgca

SEQ ID NO: 42606 - DNA, 26 bp, Homo sapiens
gtaatgccgcaacctccgctatgcac

SEQ ID NO: 42607 - DNA, 26 bp, Homo sapiens
taatgccgcaacctccgctatgcaca

SEQ ID NO: 42608 - DNA, 26 bp, Homo sapiens
aatgccgcaacctccgctatgcacac

SEQ ID NO: 42609 - DNA, 26 bp, Homo sapiens
atgccgcaacctccgctatgcacacc

SEQ ID NO: 42610 - DNA, 26 bp, Homo sapiens
tgccgcaacctccgctatgcacacca

SEQ ID NO: 42611 - DNA, 26 bp, Homo sapiens
gccgcaacctccgctatgcacaccag

SEQ ID NO: 42612 - DNA, 26 bp, Homo sapiens
ccgcaacctccgctatgcacaccagt

SEQ ID NO: 42613 - DNA, 26 bp, Homo sapiens
cgcaacctccgctatgcacaccagtc

SEQ ID NO: 42614 - DNA, 26 bp, Homo sapiens
gcaacctccgctatgcacaccagtca

SEQ ID NO: 42615 - DNA, 26 bp, Homo sapiens
caacctccgctatgcacaccagtcac

SEQ ID NO: 42616 - DNA, 26 bp, Homo sapiens
aacctccgctatgcacaccagtcacc

SEQ ID NO: 42617 - DNA, 26 bp, Homo sapiens
acctccgctatgcacaccagtcaccg

SEQ ID NO: 42618 - DNA, 26 bp, Homo sapiens
cctccgctatgcacaccagtcaccga

SEQ ID NO: 42619 - DNA, 26 bp, Homo sapiens
ctccgctatgcacaccagtcaccgat

SEQ ID NO: 42620 - DNA, 26 bp, Homo sapiens
tccgctatgcacaccagtcaccgatt

SEQ ID NO: 42621 - DNA, 26 bp, Homo sapiens
ccgctatgcacaccagtcaccgatta

SEQ ID NO: 42622 - DNA, 26 bp, Homo sapiens
cgctatgcacaccagtcaccgattat

SEQ ID NO: 42623 - DNA, 26 bp, Homo sapiens
gctatgcacaccagtcaccgattatt

SEQ ID NO: 42624 - DNA, 26 bp, Homo sapiens
ctatgcacaccagtcaccgattattg

SEQ ID NO: 42625 - DNA, 26 bp, Homo sapiens
tatgcacaccagtcaccgattattgc

SEQ ID NO: 42626 - DNA, 26 bp, Homo sapiens
atgcacaccagtcaccgattattgct

SEQ ID NO: 42627 - DNA, 26 bp, Homo sapiens
tgcacaccagtcaccgattattgctg

SEQ ID NO: 42628 - DNA, 26 bp, Homo sapiens
gcacaccagtcaccgattattgctgg

SEQ ID NO: 42629 - DNA, 26 bp, Homo sapiens
cacaccagtcaccgattattgctgga

SEQ ID NO: 42630 - DNA, 26 bp, Homo sapiens
acaccagtcaccgattattgctggac

SEQ ID NO: 42631 - DNA, 26 bp, Homo sapiens
caccagtcaccgattattgctggact

SEQ ID NO: 42632 - DNA, 26 bp, Homo sapiens
accagtcaccgattattgctggactc

SEQ ID NO: 42633 - DNA, 26 bp, Homo sapiens
ccagtcaccgattattgctggactct

SEQ ID NO: 42634 - DNA, 26 bp, Homo sapiens
cagtcaccgattattgctggactctc

SEQ ID NO: 42635 - DNA, 26 bp, Homo sapiens
agtcaccgattattgctggactctct

SEQ ID NO: 42636 - DNA, 26 bp, Homo sapiens
gtcaccgattattgctggactctctg

SEQ ID NO: 42637 - DNA, 26 bp, Homo sapiens
tcaccgattattgctggactctctgt

SEQ ID NO: 42638 - DNA, 26 bp, Homo sapiens
caccgattattgctggactctctgtt

SEQ ID NO: 42639 - DNA, 26 bp, Homo sapiens
accgattattgctggactctctgttg

SEQ ID NO: 42640 - DNA, 26 bp, Homo sapiens
ccgattattgctggactctctgttgt

SEQ ID NO: 42641 - DNA, 26 bp, Homo sapiens
cgattattgctggactctctgttgtt

SEQ ID NO: 42642 - DNA, 26 bp, Homo sapiens
gattattgctggactctctgttgtta

SEQ ID NO: 42643 - DNA, 26 bp, Homo sapiens
attattgctggactctctgttgttac

SEQ ID NO: 42644 - DNA, 26 bp, Homo sapiens
ttattgctggactctctgttgttact

SEQ ID NO: 42645 - DNA, 26 bp, Homo sapiens
tattgctggactctctgttgttactg

SEQ ID NO: 42646 - DNA, 26 bp, Homo sapiens
attgctggactctctgttgttactga

SEQ ID NO: 42647 - DNA, 26 bp, Homo sapiens
ttgctggactctctgttgttactgac

SEQ ID NO: 42648 - DNA, 26 bp, Homo sapiens
tgctggactctctgttgttactgaca

SEQ ID NO: 42649 - DNA, 26 bp, Homo sapiens
gctggactctctgttgttactgacag

SEQ ID NO: 42650 - DNA, 26 bp, Homo sapiens
ctggactctctgttgttactgacaga

SEQ ID NO: 42651 - DNA, 26 bp, Homo sapiens
tggactctctgttgttactgacagat

SEQ ID NO: 42652 - DNA, 26 bp, Homo sapiens
ggactctctgttgttactgacagatt

SEQ ID NO: 42653 - DNA, 26 bp, Homo sapiens
gactctctgttgttactgacagattg

SEQ ID NO: 42654 - DNA, 26 bp, Homo sapiens
actctctgttgttactgacagattgg

SEQ ID NO: 42655 - DNA, 26 bp, Homo sapiens
ctctctgttgttactgacagattggt

SEQ ID NO: 42656 - DNA, 26 bp, Homo sapiens
tctctgttgttactgacagattggtg

SEQ ID NO: 42657 - DNA, 26 bp, Homo sapiens
ctctgttgttactgacagattggtga

SEQ ID NO: 42658 - DNA, 26 bp, Homo sapiens
tctgttgttactgacagattggtgac

SEQ ID NO: 42659 - DNA, 26 bp, Homo sapiens
ctgttgttactgacagattggtgact

SEQ ID NO: 42660 - DNA, 26 bp, Homo sapiens
tgttgttactgacagattggtgactc

SEQ ID NO: 42661 - DNA, 26 bp, Homo sapiens
gttgttactgacagattggtgactct

SEQ ID NO: 42662 - DNA, 26 bp, Homo sapiens
ttgttactgacagattggtgactctg

SEQ ID NO: 42663 - DNA, 26 bp, Homo sapiens
tgttactgacagattggtgactctgt

SEQ ID NO: 42664 - DNA, 26 bp, Homo sapiens
gttactgacagattggtgactctgta

SEQ ID NO: 42665 - DNA, 26 bp, Homo sapiens
ttactgacagattggtgactctgtag

SEQ ID NO: 42666 - DNA, 26 bp, Homo sapiens
tactgacagattggtgactctgtaga

SEQ ID NO: 42667 - DNA, 26 bp, Homo sapiens
actgacagattggtgactctgtagaa

SEQ ID NO: 42668 - DNA, 26 bp, Homo sapiens
ctgacagattggtgactctgtagaaa

SEQ ID NO: 42669 - DNA, 26 bp, Homo sapiens
tgacagattggtgactctgtagaaag

SEQ ID NO: 42670 - DNA, 26 bp, Homo sapiens
gacagattggtgactctgtagaaagt

SEQ ID NO: 42671 - DNA, 26 bp, Homo sapiens
acagattggtgactctgtagaaagtc

SEQ ID NO: 42672 - DNA, 26 bp, Homo sapiens
cagattggtgactctgtagaaagtct

SEQ ID NO: 42673 - DNA, 26 bp, Homo sapiens
agattggtgactctgtagaaagtctg

SEQ ID NO: 42674 - DNA, 26 bp, Homo sapiens
gattggtgactctgtagaaagtctgt

SEQ ID NO: 42675 - DNA, 26 bp, Homo sapiens
attggtgactctgtagaaagtctgtg

SEQ ID NO: 42676 - DNA, 26 bp, Homo sapiens
ttggtgactctgtagaaagtctgtgg

SEQ ID NO: 42677 - DNA, 26 bp, Homo sapiens
tggtgactctgtagaaagtctgtggg

SEQ ID NO: 42678 - DNA, 26 bp, Homo sapiens
ggtgactctgtagaaagtctgtgggc

SEQ ID NO: 42679 - DNA, 26 bp, Homo sapiens
gtgactctgtagaaagtctgtgggca

SEQ ID NO: 42680 - DNA, 26 bp, Homo sapiens
tgactctgtagaaagtctgtgggcag

SEQ ID NO: 42681 - DNA, 26 bp, Homo sapiens
gactctgtagaaagtctgtgggcagt

SEQ ID NO: 42682 - DNA, 26 bp, Homo sapiens
actctgtagaaagtctgtgggcagtg

SEQ ID NO: 42683 - DNA, 26 bp, Homo sapiens
ctctgtagaaagtctgtgggcagtga

SEQ ID NO: 42684 - DNA, 26 bp, Homo sapiens
tctgtagaaagtctgtgggcagtgag

SEQ ID NO: 42685 - DNA, 26 bp, Homo sapiens
ctgtagaaagtctgtgggcagtgagc

SEQ ID NO: 42686 - DNA, 26 bp, Homo sapiens
tgtagaaagtctgtgggcagtgagct

SEQ ID NO: 42687 - DNA, 26 bp, Homo sapiens
gtagaaagtctgtgggcagtgagcta

SEQ ID NO: 42688 - DNA, 26 bp, Homo sapiens
tagaaagtctgtgggcagtgagctac

SEQ ID NO: 42689 - DNA, 26 bp, Homo sapiens
agaaagtctgtgggcagtgagctaca

SEQ ID NO: 42690 - DNA, 26 bp, Homo sapiens
gaaagtctgtgggcagtgagctacaa

SEQ ID NO: 42691 - DNA, 26 bp, Homo sapiens
aaagtctgtgggcagtgagctacaag

SEQ ID NO: 42692 - DNA, 26 bp, Homo sapiens
aagtctgtgggcagtgagctacaaga

SEQ ID NO: 42693 - DNA, 26 bp, Homo sapiens
agtctgtgggcagtgagctacaagaa

SEQ ID NO: 42694 - DNA, 26 bp, Homo sapiens
gtctgtgggcagtgagctacaagaaa

SEQ ID NO: 42695 - DNA, 26 bp, Homo sapiens
tctgtgggcagtgagctacaagaaaa

SEQ ID NO: 42696 - DNA, 26 bp, Homo sapiens
ctgtgggcagtgagctacaagaaaag

SEQ ID NO: 42697 - DNA, 26 bp, Homo sapiens
tgtgggcagtgagctacaagaaaagg

SEQ ID NO: 42698 - DNA, 26 bp, Homo sapiens
gtgggcagtgagctacaagaaaagga

SEQ ID NO: 42699 - DNA, 26 bp, Homo sapiens
tgggcagtgagctacaagaaaaggaa

SEQ ID NO: 42700 - DNA, 26 bp, Homo sapiens
gggcagtgagctacaagaaaaggaaa

SEQ ID NO: 42701 - DNA, 26 bp, Homo sapiens
ggcagtgagctacaagaaaaggaaat

SEQ ID NO: 42702 - DNA, 26 bp, Homo sapiens
gcagtgagctacaagaaaaggaaatc

SEQ ID NO: 42703 - DNA, 26 bp, Homo sapiens
cagtgagctacaagaaaaggaaatcc

SEQ ID NO: 42704 - DNA, 26 bp, Homo sapiens
agtgagctacaagaaaaggaaatcct

SEQ ID NO: 42705 - DNA, 26 bp, Homo sapiens
gtgagctacaagaaaaggaaatcctc

SEQ ID NO: 42706 - DNA, 26 bp, Homo sapiens
tgagctacaagaaaaggaaatcctcc

SEQ ID NO: 42707 - DNA, 26 bp, Homo sapiens
gagctacaagaaaaggaaatcctccg

SEQ ID NO: 42708 - DNA, 26 bp, Homo sapiens
agctacaagaaaaggaaatcctccga

SEQ ID NO: 42709 - DNA, 26 bp, Homo sapiens
gctacaagaaaaggaaatcctccgac

SEQ ID NO: 42710 - DNA, 26 bp, Homo sapiens
ctacaagaaaaggaaatcctccgact

SEQ ID NO: 42711 - DNA, 26 bp, Homo sapiens
tacaagaaaaggaaatcctccgactt

SEQ ID NO: 42712 - DNA, 26 bp, Homo sapiens
acaagaaaaggaaatcctccgacttt

SEQ ID NO: 42713 - DNA, 26 bp, Homo sapiens
caagaaaaggaaatcctccgacttta

SEQ ID NO: 42714 - DNA, 26 bp, Homo sapiens
aagaaaaggaaatcctccgactttag

SEQ ID NO: 42715 - DNA, 26 bp, Homo sapiens
agaaaaggaaatcctccgactttagt

SEQ ID NO: 42716 - DNA, 26 bp, Homo sapiens
gaaaaggaaatcctccgactttagta

SEQ ID NO: 42717 - DNA, 26 bp, Homo sapiens
aaaaggaaatcctccgactttagtac

SEQ ID NO: 42718 - DNA, 26 bp, Homo sapiens
aaaggaaatcctccgactttagtacc

SEQ ID NO: 42719 - DNA, 26 bp, Homo sapiens
aaggaaatcctccgactttagtaccc

SEQ ID NO: 42720 - DNA, 26 bp, Homo sapiens
aggaaatcctccgactttagtaccct

SEQ ID NO: 42721 - DNA, 26 bp, Homo sapiens
ggaaatcctccgactttagtaccctc

SEQ ID NO: 42722 - DNA, 26 bp, Homo sapiens
gaaatcctccgactttagtaccctcc

SEQ ID NO: 42723 - DNA, 26 bp, Homo sapiens
aaatcctccgactttagtaccctcct

SEQ ID NO: 42724 - DNA, 26 bp, Homo sapiens
aatcctccgactttagtaccctcctc

SEQ ID NO: 42725 - DNA, 26 bp, Homo sapiens
atcctccgactttagtaccctcctcc

SEQ ID NO: 42726 - DNA, 26 bp, Homo sapiens
tcctccgactttagtaccctcctcct

SEQ ID NO: 42727 - DNA, 26 bp, Homo sapiens
cctccgactttagtaccctcctcctg

SEQ ID NO: 42728 - DNA, 26 bp, Homo sapiens
ctccgactttagtaccctcctcctgt

SEQ ID NO: 42729 - DNA, 26 bp, Homo sapiens
tccgactttagtaccctcctcctgtt

SEQ ID NO: 42730 - DNA, 26 bp, Homo sapiens
ccgactttagtaccctcctcctgttg

SEQ ID NO: 42731 - DNA, 26 bp, Homo sapiens
cgactttagtaccctcctcctgttgt

SEQ ID NO: 42732 - DNA, 26 bp, Homo sapiens
gactttagtaccctcctcctgttgta

SEQ ID NO: 42733 - DNA, 26 bp, Homo sapiens
actttagtaccctcctcctgttgtaa

SEQ ID NO: 42734 - DNA, 26 bp, Homo sapiens
ctttagtaccctcctcctgttgtaaa

SEQ ID NO: 42735 - DNA, 26 bp, Homo sapiens
tttagtaccctcctcctgttgtaaac

SEQ ID NO: 42736 - DNA, 26 bp, Homo sapiens
ttagtaccctcctcctgttgtaaaca

SEQ ID NO: 42737 - DNA, 26 bp, Homo sapiens
tagtaccctcctcctgttgtaaacag

SEQ ID NO: 42738 - DNA, 26 bp, Homo sapiens
agtaccctcctcctgttgtaaacaga

SEQ ID NO: 42739 - DNA, 26 bp, Homo sapiens
gtaccctcctcctgttgtaaacagag

SEQ ID NO: 42740 - DNA, 26 bp, Homo sapiens
taccctcctcctgttgtaaacagagg

SEQ ID NO: 42741 - DNA, 26 bp, Homo sapiens
accctcctcctgttgtaaacagaggt

SEQ ID NO: 42742 - DNA, 26 bp, Homo sapiens
ccctcctcctgttgtaaacagaggtc

SEQ ID NO: 42743 - DNA, 26 bp, Homo sapiens
cctcctcctgttgtaaacagaggtca

SEQ ID NO: 42744 - DNA, 26 bp, Homo sapiens
ctcctcctgttgtaaacagaggtcaa

SEQ ID NO: 42745 - DNA, 26 bp, Homo sapiens
tcctcctgttgtaaacagaggtcaat

SEQ ID NO: 42746 - DNA, 26 bp, Homo sapiens
cctcctgttgtaaacagaggtcaatg

SEQ ID NO: 42747 - DNA, 26 bp, Homo sapiens
ctcctgttgtaaacagaggtcaatga

SEQ ID NO: 42748 - DNA, 26 bp, Homo sapiens
tcctgttgtaaacagaggtcaatgat

SEQ ID NO: 42749 - DNA, 26 bp, Homo sapiens
cctgttgtaaacagaggtcaatgatc

SEQ ID NO: 42750 - DNA, 26 bp, Homo sapiens
ctgttgtaaacagaggtcaatgatca

SEQ ID NO: 42751 - DNA, 26 bp, Homo sapiens
tgttgtaaacagaggtcaatgatcaa

SEQ ID NO: 42752 - DNA, 26 bp, Homo sapiens
gttgtaaacagaggtcaatgatcaag

SEQ ID NO: 42753 - DNA, 26 bp, Homo sapiens
ttgtaaacagaggtcaatgatcaaga

SEQ ID NO: 42754 - DNA, 26 bp, Homo sapiens
tgtaaacagaggtcaatgatcaagaa

SEQ ID NO: 42755 - DNA, 26 bp, Homo sapiens
gtaaacagaggtcaatgatcaagaag

SEQ ID NO: 42756 - DNA, 26 bp, Homo sapiens
taaacagaggtcaatgatcaagaagt

SEQ ID NO: 42757 - DNA, 26 bp, Homo sapiens
aaacagaggtcaatgatcaagaagtc

SEQ ID NO: 42758 - DNA, 26 bp, Homo sapiens
aacagaggtcaatgatcaagaagtca

SEQ ID NO: 42759 - DNA, 26 bp, Homo sapiens
acagaggtcaatgatcaagaagtcaa

SEQ ID NO: 42760 - DNA, 26 bp, Homo sapiens
cagaggtcaatgatcaagaagtcaag

SEQ ID NO: 42761 - DNA, 26 bp, Homo sapiens
agaggtcaatgatcaagaagtcaaga

SEQ ID NO: 42762 - DNA, 26 bp, Homo sapiens
gaggtcaatgatcaagaagtcaagac

SEQ ID NO: 42763 - DNA, 26 bp, Homo sapiens
aggtcaatgatcaagaagtcaagaca

SEQ ID NO: 42764 - DNA, 26 bp, Homo sapiens
ggtcaatgatcaagaagtcaagacag

SEQ ID NO: 42765 - DNA, 26 bp, Homo sapiens
gtcaatgatcaagaagtcaagacaga

SEQ ID NO: 42766 - DNA, 26 bp, Homo sapiens
tcaatgatcaagaagtcaagacagaa

SEQ ID NO: 42767 - DNA, 26 bp, Homo sapiens
caatgatcaagaagtcaagacagaaa

SEQ ID NO: 42768 - DNA, 26 bp, Homo sapiens
aatgatcaagaagtcaagacagaaaa

SEQ ID NO: 42769 - DNA, 26 bp, Homo sapiens
atgatcaagaagtcaagacagaaaaa

SEQ ID NO: 42770 - DNA, 26 bp, Homo sapiens
tgatcaagaagtcaagacagaaaaag

SEQ ID NO: 42771 - DNA, 26 bp, Homo sapiens
gatcaagaagtcaagacagaaaaagg

SEQ ID NO: 42772 - DNA, 26 bp, Homo sapiens
atcaagaagtcaagacagaaaaaggg

SEQ ID NO: 42773 - DNA, 26 bp, Homo sapiens
tcaagaagtcaagacagaaaaagggt

SEQ ID NO: 42774 - DNA, 26 bp, Homo sapiens
caagaagtcaagacagaaaaagggtc

SEQ ID NO: 42775 - DNA, 26 bp, Homo sapiens
aagaagtcaagacagaaaaagggtcc

SEQ ID NO: 42776 - DNA, 26 bp, Homo sapiens
agaagtcaagacagaaaaagggtcca

SEQ ID NO: 42777 - DNA, 26 bp, Homo sapiens
gaagtcaagacagaaaaagggtccat

SEQ ID NO: 42778 - DNA, 26 bp, Homo sapiens
aagtcaagacagaaaaagggtccata

SEQ ID NO: 42779 - DNA, 26 bp, Homo sapiens
agtcaagacagaaaaagggtccatat

SEQ ID NO: 42780 - DNA, 26 bp, Homo sapiens
gtcaagacagaaaaagggtccatatc

SEQ ID NO: 42781 - DNA, 26 bp, Homo sapiens
tcaagacagaaaaagggtccatatct

SEQ ID NO: 42782 - DNA, 26 bp, Homo sapiens
caagacagaaaaagggtccatatctg

SEQ ID NO: 42783 - DNA, 26 bp, Homo sapiens
aagacagaaaaagggtccatatctgt

SEQ ID NO: 42784 - DNA, 26 bp, Homo sapiens
agacagaaaaagggtccatatctgta

SEQ ID NO: 42785 - DNA, 26 bp, Homo sapiens
gacagaaaaagggtccatatctgtag

SEQ ID NO: 42786 - DNA, 26 bp, Homo sapiens
acagaaaaagggtccatatctgtagg

SEQ ID NO: 42787 - DNA, 26 bp, Homo sapiens
cagaaaaagggtccatatctgtaggc

SEQ ID NO: 42788 - DNA, 26 bp, Homo sapiens
agaaaaagggtccatatctgtaggca

SEQ ID NO: 42789 - DNA, 26 bp, Homo sapiens
gaaaaagggtccatatctgtaggcat

SEQ ID NO: 42790 - DNA, 26 bp, Homo sapiens
aaaaagggtccatatctgtaggcata

SEQ ID NO: 42791 - DNA, 26 bp, Homo sapiens
aaaagggtccatatctgtaggcataa

SEQ ID NO: 42792 - DNA, 26 bp, Homo sapiens
aaagggtccatatctgtaggcataat

SEQ ID NO: 42793 - DNA, 26 bp, Homo sapiens
aagggtccatatctgtaggcataatg

SEQ ID NO: 42794 - DNA, 26 bp, Homo sapiens
agggtccatatctgtaggcataatgg

SEQ ID NO: 42795 - DNA, 26 bp, Homo sapiens
gggtccatatctgtaggcataatgga

SEQ ID NO: 42796 - DNA, 26 bp, Homo sapiens
ggtccatatctgtaggcataatggaa

SEQ ID NO: 42797 - DNA, 26 bp, Homo sapiens
gtccatatctgtaggcataatggaaa

SEQ ID NO: 42798 - DNA, 26 bp, Homo sapiens
tccatatctgtaggcataatggaaat

SEQ ID NO: 42799 - DNA, 26 bp, Homo sapiens
ccatatctgtaggcataatggaaatc

SEQ ID NO: 42800 - DNA, 26 bp, Homo sapiens
catatctgtaggcataatggaaatca

SEQ ID NO: 42801 - DNA, 26 bp, Homo sapiens
atatctgtaggcataatggaaatcat

SEQ ID NO: 42802 - DNA, 26 bp, Homo sapiens
tatctgtaggcataatggaaatcata

SEQ ID NO: 42803 - DNA, 26 bp, Homo sapiens
atctgtaggcataatggaaatcatat

SEQ ID NO: 42804 - DNA, 26 bp, Homo sapiens
tctgtaggcataatggaaatcatatg

SEQ ID NO: 42805 - DNA, 26 bp, Homo sapiens
ctgtaggcataatggaaatcatatgc

SEQ ID NO: 42806 - DNA, 26 bp, Homo sapiens
tgtaggcataatggaaatcatatgca

SEQ ID NO: 42807 - DNA, 26 bp, Homo sapiens
gtaggcataatggaaatcatatgcat

SEQ ID NO: 42808 - DNA, 26 bp, Homo sapiens
taggcataatggaaatcatatgcatg

SEQ ID NO: 42809 - DNA, 26 bp, Homo sapiens
aggcataatggaaatcatatgcatga

SEQ ID NO: 42810 - DNA, 26 bp, Homo sapiens
ggcataatggaaatcatatgcatgag

SEQ ID NO: 42811 - DNA, 26 bp, Homo sapiens
gcataatggaaatcatatgcatgaga

SEQ ID NO: 42812 - DNA, 26 bp, Homo sapiens
cataatggaaatcatatgcatgagaa

SEQ ID NO: 42813 - DNA, 26 bp, Homo sapiens
ataatggaaatcatatgcatgagaaa

SEQ ID NO: 42814 - DNA, 26 bp, Homo sapiens
taatggaaatcatatgcatgagaaaa

SEQ ID NO: 42815 - DNA, 26 bp, Homo sapiens
aatggaaatcatatgcatgagaaaaa

SEQ ID NO: 42816 - DNA, 26 bp, Homo sapiens
atggaaatcatatgcatgagaaaaac

SEQ ID NO: 42817 - DNA, 26 bp, Homo sapiens
tggaaatcatatgcatgagaaaaaca

SEQ ID NO: 42818 - DNA, 26 bp, Homo sapiens
ggaaatcatatgcatgagaaaaacaa

SEQ ID NO: 42819 - DNA, 26 bp, Homo sapiens
gaaatcatatgcatgagaaaaacaag

SEQ ID NO: 42820 - DNA, 26 bp, Homo sapiens
aaatcatatgcatgagaaaaacaagt

SEQ ID NO: 42821 - DNA, 26 bp, Homo sapiens
aatcatatgcatgagaaaaacaagtt

SEQ ID NO: 42822 - DNA, 26 bp, Homo sapiens
atcatatgcatgagaaaaacaagttc

SEQ ID NO: 42823 - DNA, 26 bp, Homo sapiens
tcatatgcatgagaaaaacaagttca

SEQ ID NO: 42824 - DNA, 26 bp, Homo sapiens
catatgcatgagaaaaacaagttcaa

SEQ ID NO: 42825 - DNA, 26 bp, Homo sapiens
atatgcatgagaaaaacaagttcaac

SEQ ID NO: 42826 - DNA, 26 bp, Homo sapiens
tatgcatgagaaaaacaagttcaact

SEQ ID NO: 42827 - DNA, 26 bp, Homo sapiens
atgcatgagaaaaacaagttcaactt

SEQ ID NO: 42828 - DNA, 26 bp, Homo sapiens
tgcatgagaaaaacaagttcaacttt

SEQ ID NO: 42829 - DNA, 26 bp, Homo sapiens
gcatgagaaaaacaagttcaactttt

SEQ ID NO: 42830 - DNA, 26 bp, Homo sapiens
catgagaaaaacaagttcaactttta

SEQ ID NO: 42831 - DNA, 26 bp, Homo sapiens
atgagaaaaacaagttcaacttttat

SEQ ID NO: 42832 - DNA, 26 bp, Homo sapiens
tgagaaaaacaagttcaacttttatt

SEQ ID NO: 42833 - DNA, 26 bp, Homo sapiens
gagaaaaacaagttcaacttttattt

SEQ ID NO: 42834 - DNA, 26 bp, Homo sapiens
agaaaaacaagttcaacttttatttg

SEQ ID NO: 42835 - DNA, 26 bp, Homo sapiens
gaaaaacaagttcaacttttatttgt

SEQ ID NO: 42836 - DNA, 26 bp, Homo sapiens
aaaaacaagttcaacttttatttgtt

SEQ ID NO: 42837 - DNA, 26 bp, Homo sapiens
aaaacaagttcaacttttatttgttt

SEQ ID NO: 42838 - DNA, 26 bp, Homo sapiens
aaacaagttcaacttttatttgtttt

SEQ ID NO: 42839 - DNA, 26 bp, Homo sapiens
aacaagttcaacttttatttgttttc

SEQ ID NO: 42840 - DNA, 26 bp, Homo sapiens
acaagttcaacttttatttgttttca

SEQ ID NO: 42841 - DNA, 26 bp, Homo sapiens
caagttcaacttttatttgttttcat

SEQ ID NO: 42842 - DNA, 26 bp, Homo sapiens
aagttcaacttttatttgttttcatt

SEQ ID NO: 42843 - DNA, 26 bp, Homo sapiens
agttcaacttttatttgttttcattg

SEQ ID NO: 42844 - DNA, 26 bp, Homo sapiens
gttcaacttttatttgttttcattgt

SEQ ID NO: 42845 - DNA, 26 bp, Homo sapiens
ttcaacttttatttgttttcattgtt

SEQ ID NO: 42846 - DNA, 26 bp, Homo sapiens
tcaacttttatttgttttcattgttt

SEQ ID NO: 42847 - DNA, 26 bp, Homo sapiens
caacttttatttgttttcattgtttc

SEQ ID NO: 42848 - DNA, 26 bp, Homo sapiens
aacttttatttgttttcattgtttcc

SEQ ID NO: 42849 - DNA, 26 bp, Homo sapiens
acttttatttgttttcattgtttccc

SEQ ID NO: 42850 - DNA, 26 bp, Homo sapiens
cttttatttgttttcattgtttcccc

SEQ ID NO: 42851 - DNA, 26 bp, Homo sapiens
ttttatttgttttcattgtttcccct

SEQ ID NO: 42852 - DNA, 26 bp, Homo sapiens
tttatttgttttcattgtttcccctc

SEQ ID NO: 42853 - DNA, 26 bp, Homo sapiens
ttatttgttttcattgtttcccctcc

SEQ ID NO: 42854 - DNA, 26 bp, Homo sapiens
tatttgttttcattgtttcccctcct

SEQ ID NO: 42855 - DNA, 26 bp, Homo sapiens
atttgttttcattgtttcccctcctt

SEQ ID NO: 42856 - DNA, 26 bp, Homo sapiens
tttgttttcattgtttcccctccttt

SEQ ID NO: 42857 - DNA, 26 bp, Homo sapiens
ttgttttcattgtttcccctcctttg

SEQ ID NO: 42858 - DNA, 26 bp, Homo sapiens
tgttttcattgtttcccctcctttgc

SEQ ID NO: 42859 - DNA, 26 bp, Homo sapiens
gttttcattgtttcccctcctttgcc

SEQ ID NO: 42860 - DNA, 26 bp, Homo sapiens
ttttcattgtttcccctcctttgcct

SEQ ID NO: 42861 - DNA, 26 bp, Homo sapiens
tttcattgtttcccctcctttgcctg

SEQ ID NO: 42862 - DNA, 26 bp, Homo sapiens
ttcattgtttcccctcctttgcctga

SEQ ID NO: 42863 - DNA, 26 bp, Homo sapiens
tcattgtttcccctcctttgcctgac

SEQ ID NO: 42864 - DNA, 26 bp, Homo sapiens
cattgtttcccctcctttgcctgacc

SEQ ID NO: 42865 - DNA, 26 bp, Homo sapiens
attgtttcccctcctttgcctgaccc

SEQ ID NO: 42866 - DNA, 26 bp, Homo sapiens
ttgtttcccctcctttgcctgacccc

SEQ ID NO: 42867 - DNA, 26 bp, Homo sapiens
tgtttcccctcctttgcctgaccccg

SEQ ID NO: 42868 - DNA, 26 bp, Homo sapiens
gtttcccctcctttgcctgaccccga

SEQ ID NO: 42869 - DNA, 26 bp, Homo sapiens
tttcccctcctttgcctgaccccgat

SEQ ID NO: 42870 - DNA, 26 bp, Homo sapiens
ttcccctcctttgcctgaccccgatc

SEQ ID NO: 42871 - DNA, 26 bp, Homo sapiens
tcccctcctttgcctgaccccgatca

SEQ ID NO: 42872 - DNA, 26 bp, Homo sapiens
cccctcctttgcctgaccccgatcac

SEQ ID NO: 42873 - DNA, 26 bp, Homo sapiens
ccctcctttgcctgaccccgatcacc

SEQ ID NO: 42874 - DNA, 26 bp, Homo sapiens
cctcctttgcctgaccccgatcacca

SEQ ID NO: 42875 - DNA, 26 bp, Homo sapiens
ctcctttgcctgaccccgatcaccaa

SEQ ID NO: 42876 - DNA, 26 bp, Homo sapiens
tcctttgcctgaccccgatcaccaaa

SEQ ID NO: 42877 - DNA, 26 bp, Homo sapiens
cctttgcctgaccccgatcaccaaaa

SEQ ID NO: 42878 - DNA, 26 bp, Homo sapiens
ctttgcctgaccccgatcaccaaaag

SEQ ID NO: 42879 - DNA, 26 bp, Homo sapiens
tttgcctgaccccgatcaccaaaaga

SEQ ID NO: 42880 - DNA, 26 bp, Homo sapiens
ttgcctgaccccgatcaccaaaagat

SEQ ID NO: 42881 - DNA, 26 bp, Homo sapiens
tgcctgaccccgatcaccaaaagatg

SEQ ID NO: 42882 - DNA, 26 bp, Homo sapiens
gcctgaccccgatcaccaaaagatgt

SEQ ID NO: 42883 - DNA, 26 bp, Homo sapiens
cctgaccccgatcaccaaaagatgtg

SEQ ID NO: 42884 - DNA, 26 bp, Homo sapiens
ctgaccccgatcaccaaaagatgtgc

SEQ ID NO: 42885 - DNA, 26 bp, Homo sapiens
tgaccccgatcaccaaaagatgtgca

SEQ ID NO: 42886 - DNA, 26 bp, Homo sapiens
gaccccgatcaccaaaagatgtgcag

SEQ ID NO: 42887 - DNA, 26 bp, Homo sapiens
accccgatcaccaaaagatgtgcagt

SEQ ID NO: 42888 - DNA, 26 bp, Homo sapiens
ccccgatcaccaaaagatgtgcagtg

SEQ ID NO: 42889 - DNA, 26 bp, Homo sapiens
cccgatcaccaaaagatgtgcagtgt

SEQ ID NO: 42890 - DNA, 26 bp, Homo sapiens
ccgatcaccaaaagatgtgcagtgtg

SEQ ID NO: 42891 - DNA, 26 bp, Homo sapiens
cgatcaccaaaagatgtgcagtgtgt

SEQ ID NO: 42892 - DNA, 26 bp, Homo sapiens
gatcaccaaaagatgtgcagtgtgtg

SEQ ID NO: 42893 - DNA, 26 bp, Homo sapiens
atcaccaaaagatgtgcagtgtgtgg

SEQ ID NO: 42894 - DNA, 26 bp, Homo sapiens
tcaccaaaagatgtgcagtgtgtggc

SEQ ID NO: 42895 - DNA, 26 bp, Homo sapiens
caccaaaagatgtgcagtgtgtggcg

SEQ ID NO: 42896 - DNA, 26 bp, Homo sapiens
accaaaagatgtgcagtgtgtggcgc

SEQ ID NO: 42897 - DNA, 26 bp, Homo sapiens
ccaaaagatgtgcagtgtgtggcgct

SEQ ID NO: 42898 - DNA, 26 bp, Homo sapiens
caaaagatgtgcagtgtgtggcgctc

SEQ ID NO: 42899 - DNA, 26 bp, Homo sapiens
aaaagatgtgcagtgtgtggcgctcc

SEQ ID NO: 42900 - DNA, 26 bp, Homo sapiens
aaagatgtgcagtgtgtggcgctcca

SEQ ID NO: 42901 - DNA, 26 bp, Homo sapiens
aagatgtgcagtgtgtggcgctccag

SEQ ID NO: 42902 - DNA, 26 bp, Homo sapiens
agatgtgcagtgtgtggcgctccagg

SEQ ID NO: 42903 - DNA, 26 bp, Homo sapiens
gatgtgcagtgtgtggcgctccaggt

SEQ ID NO: 42904 - DNA, 26 bp, Homo sapiens
atgtgcagtgtgtggcgctccaggtc

SEQ ID NO: 42905 - DNA, 26 bp, Homo sapiens
tgtgcagtgtgtggcgctccaggtct

SEQ ID NO: 42906 - DNA, 26 bp, Homo sapiens
gtgcagtgtgtggcgctccaggtctg

SEQ ID NO: 42907 - DNA, 26 bp, Homo sapiens
tgcagtgtgtggcgctccaggtctgt

SEQ ID NO: 42908 - DNA, 26 bp, Homo sapiens
gcagtgtgtggcgctccaggtctgtg

SEQ ID NO: 42909 - DNA, 26 bp, Homo sapiens
cagtgtgtggcgctccaggtctgtgc

SEQ ID NO: 42910 - DNA, 26 bp, Homo sapiens
agtgtgtggcgctccaggtctgtgca

SEQ ID NO: 42911 - DNA, 26 bp, Homo sapiens
gtgtgtggcgctccaggtctgtgcag

SEQ ID NO: 42912 - DNA, 26 bp, Homo sapiens
tgtgtggcgctccaggtctgtgcagg

SEQ ID NO: 42913 - DNA, 26 bp, Homo sapiens
gtgtggcgctccaggtctgtgcaggg

SEQ ID NO: 42914 - DNA, 26 bp, Homo sapiens
tgtggcgctccaggtctgtgcagggc

SEQ ID NO: 42915 - DNA, 26 bp, Homo sapiens
gtggcgctccaggtctgtgcagggcc

SEQ ID NO: 42916 - DNA, 26 bp, Homo sapiens
tggcgctccaggtctgtgcagggcca

SEQ ID NO: 42917 - DNA, 26 bp, Homo sapiens
ggcgctccaggtctgtgcagggccat

SEQ ID NO: 42918 - DNA, 26 bp, Homo sapiens
gcgctccaggtctgtgcagggccata

SEQ ID NO: 42919 - DNA, 26 bp, Homo sapiens
cgctccaggtctgtgcagggccatat

SEQ ID NO: 42920 - DNA, 26 bp, Homo sapiens
gctccaggtctgtgcagggccatata

SEQ ID NO: 42921 - DNA, 26 bp, Homo sapiens
ctccaggtctgtgcagggccatataa

SEQ ID NO: 42922 - DNA, 26 bp, Homo sapiens
tccaggtctgtgcagggccatataaa

SEQ ID NO: 42923 - DNA, 26 bp, Homo sapiens
ccaggtctgtgcagggccatataaag

SEQ ID NO: 42924 - DNA, 26 bp, Homo sapiens
caggtctgtgcagggccatataaagt

SEQ ID NO: 42925 - DNA, 26 bp, Homo sapiens
aggtctgtgcagggccatataaagtg

SEQ ID NO: 42926 - DNA, 26 bp, Homo sapiens
ggtctgtgcagggccatataaagtgt

SEQ ID NO: 42927 - DNA, 26 bp, Homo sapiens
gtctgtgcagggccatataaagtgtc

SEQ ID NO: 42928 - DNA, 26 bp, Homo sapiens
tctgtgcagggccatataaagtgtct

SEQ ID NO: 42929 - DNA, 26 bp, Homo sapiens
ctgtgcagggccatataaagtgtctc

SEQ ID NO: 42930 - DNA, 26 bp, Homo sapiens
tgtgcagggccatataaagtgtctcg

SEQ ID NO: 42931 - DNA, 26 bp, Homo sapiens
gtgcagggccatataaagtgtctcgg

SEQ ID NO: 42932 - DNA, 26 bp, Homo sapiens
tgcagggccatataaagtgtctcggt

SEQ ID NO: 42933 - DNA, 26 bp, Homo sapiens
gcagggccatataaagtgtctcggtt

SEQ ID NO: 42934 - DNA, 26 bp, Homo sapiens
cagggccatataaagtgtctcggtta

SEQ ID NO: 42935 - DNA, 26 bp, Homo sapiens
agggccatataaagtgtctcggttaa

SEQ ID NO: 42936 - DNA, 26 bp, Homo sapiens
gggccatataaagtgtctcggttaat

SEQ ID NO: 42937 - DNA, 26 bp, Homo sapiens
ggccatataaagtgtctcggttaatt

SEQ ID NO: 42938 - DNA, 26 bp, Homo sapiens
gccatataaagtgtctcggttaattt

SEQ ID NO: 42939 - DNA, 26 bp, Homo sapiens
ccatataaagtgtctcggttaatttt

SEQ ID NO: 42940 - DNA, 26 bp, Homo sapiens
catataaagtgtctcggttaattttt

SEQ ID NO: 42941 - DNA, 26 bp, Homo sapiens
atataaagtgtctcggttaatttttt

SEQ ID NO: 42942 - DNA, 26 bp, Homo sapiens
tataaagtgtctcggttaattttttt

SEQ ID NO: 42943 - DNA, 26 bp, Homo sapiens
ataaagtgtctcggttaatttttttg

SEQ ID NO: 42944 - DNA, 26 bp, Homo sapiens
taaagtgtctcggttaatttttttgt

SEQ ID NO: 42945 - DNA, 26 bp, Homo sapiens
aaagtgtctcggttaatttttttgtt

SEQ ID NO: 42946 - DNA, 26 bp, Homo sapiens
aagtgtctcggttaatttttttgttt

SEQ ID NO: 42947 - DNA, 26 bp, Homo sapiens
agtgtctcggttaatttttttgtttg

SEQ ID NO: 42948 - DNA, 26 bp, Homo sapiens
gtgtctcggttaatttttttgtttgt

SEQ ID NO: 42949 - DNA, 26 bp, Homo sapiens
tgtctcggttaatttttttgtttgtt

SEQ ID NO: 42950 - DNA, 26 bp, Homo sapiens
gtctcggttaatttttttgtttgttt

SEQ ID NO: 42951 - DNA, 26 bp, Homo sapiens
tctcggttaatttttttgtttgtttt

SEQ ID NO: 42952 - DNA, 26 bp, Homo sapiens
ctcggttaatttttttgtttgttttt

SEQ ID NO: 42953 - DNA, 26 bp, Homo sapiens
tcggttaatttttttgtttgtttttc

SEQ ID NO: 42954 - DNA, 26 bp, Homo sapiens
cggttaatttttttgtttgtttttca

SEQ ID NO: 42955 - DNA, 26 bp, Homo sapiens
ggttaatttttttgtttgtttttcat

SEQ ID NO: 42956 - DNA, 26 bp, Homo sapiens
gttaatttttttgtttgtttttcatg

SEQ ID NO: 42957 - DNA, 26 bp, Homo sapiens
ttaatttttttgtttgtttttcatgt

SEQ ID NO: 42958 - DNA, 26 bp, Homo sapiens
taatttttttgtttgtttttcatgtt

SEQ ID NO: 42959 - DNA, 26 bp, Homo sapiens
aatttttttgtttgtttttcatgttt

SEQ ID NO: 42960 - DNA, 26 bp, Homo sapiens
atttttttgtttgtttttcatgtttg

SEQ ID NO: 42961 - DNA, 26 bp, Homo sapiens
tttttttgtttgtttttcatgtttgt

SEQ ID NO: 42962 - DNA, 26 bp, Homo sapiens
ttttttgtttgtttttcatgtttgta

SEQ ID NO: 42963 - DNA, 26 bp, Homo sapiens
tttttgtttgtttttcatgtttgtac

SEQ ID NO: 42964 - DNA, 26 bp, Homo sapiens
ttttgtttgtttttcatgtttgtact

SEQ ID NO: 42965 - DNA, 26 bp, Homo sapiens
tttgtttgtttttcatgtttgtactt

SEQ ID NO: 42966 - DNA, 26 bp, Homo sapiens
ttgtttgtttttcatgtttgtacttc

SEQ ID NO: 42967 - DNA, 26 bp, Homo sapiens
tgtttgtttttcatgtttgtacttca

SEQ ID NO: 42968 - DNA, 26 bp, Homo sapiens
gtttgtttttcatgtttgtacttcag

SEQ ID NO: 42969 - DNA, 26 bp, Homo sapiens
tttgtttttcatgtttgtacttcaga

SEQ ID NO: 42970 - DNA, 26 bp, Homo sapiens
ttgtttttcatgtttgtacttcagac

SEQ ID NO: 42971 - DNA, 26 bp, Homo sapiens
tgtttttcatgtttgtacttcagaca

SEQ ID NO: 42972 - DNA, 26 bp, Homo sapiens
gtttttcatgtttgtacttcagacat

SEQ ID NO: 42973 - DNA, 26 bp, Homo sapiens
tttttcatgtttgtacttcagacatt

SEQ ID NO: 42974 - DNA, 26 bp, Homo sapiens
ttttcatgtttgtacttcagacattc

SEQ ID NO: 42975 - DNA, 26 bp, Homo sapiens
tttcatgtttgtacttcagacattct

SEQ ID NO: 42976 - DNA, 26 bp, Homo sapiens
ttcatgtttgtacttcagacattcta

SEQ ID NO: 42977 - DNA, 26 bp, Homo sapiens
tcatgtttgtacttcagacattctag

SEQ ID NO: 42978 - DNA, 26 bp, Homo sapiens
catgtttgtacttcagacattctaga

SEQ ID NO: 42979 - DNA, 26 bp, Homo sapiens
atgtttgtacttcagacattctagaa

SEQ ID NO: 42980 - DNA, 26 bp, Homo sapiens
tgtttgtacttcagacattctagaag

SEQ ID NO: 42981 - DNA, 26 bp, Homo sapiens
gtttgtacttcagacattctagaagt

SEQ ID NO: 42982 - DNA, 26 bp, Homo sapiens
tttgtacttcagacattctagaagtg

SEQ ID NO: 42983 - DNA, 26 bp, Homo sapiens
ttgtacttcagacattctagaagtgc

SEQ ID NO: 42984 - DNA, 26 bp, Homo sapiens
tgtacttcagacattctagaagtgct

SEQ ID NO: 42985 - DNA, 26 bp, Homo sapiens
gtacttcagacattctagaagtgctt

SEQ ID NO: 42986 - DNA, 26 bp, Homo sapiens
tacttcagacattctagaagtgctta

SEQ ID NO: 42987 - DNA, 26 bp, Homo sapiens
acttcagacattctagaagtgcttag

SEQ ID NO: 42988 - DNA, 26 bp, Homo sapiens
cttcagacattctagaagtgcttagg

SEQ ID NO: 42989 - DNA, 26 bp, Homo sapiens
ttcagacattctagaagtgcttaggt

SEQ ID NO: 42990 - DNA, 26 bp, Homo sapiens
tcagacattctagaagtgcttaggtg

SEQ ID NO: 42991 - DNA, 26 bp, Homo sapiens
cagacattctagaagtgcttaggtga

SEQ ID NO: 42992 - DNA, 26 bp, Homo sapiens
agacattctagaagtgcttaggtgat

SEQ ID NO: 42993 - DNA, 26 bp, Homo sapiens
gacattctagaagtgcttaggtgata

SEQ ID NO: 42994 - DNA, 26 bp, Homo sapiens
acattctagaagtgcttaggtgataa

SEQ ID NO: 42995 - DNA, 26 bp, Homo sapiens
cattctagaagtgcttaggtgataac

SEQ ID NO: 42996 - DNA, 26 bp, Homo sapiens
attctagaagtgcttaggtgataaca

SEQ ID NO: 42997 - DNA, 26 bp, Homo sapiens
ttctagaagtgcttaggtgataacat

SEQ ID NO: 42998 - DNA, 26 bp, Homo sapiens
tctagaagtgcttaggtgataacatt

SEQ ID NO: 42999 - DNA, 26 bp, Homo sapiens
ctagaagtgcttaggtgataacattt

SEQ ID NO: 43000 - DNA, 26 bp, Homo sapiens
tagaagtgcttaggtgataacattta

SEQ ID NO: 43001 - DNA, 26 bp, Homo sapiens
agaagtgcttaggtgataacatttac

SEQ ID NO: 43002 - DNA, 26 bp, Homo sapiens
gaagtgcttaggtgataacatttacc

SEQ ID NO: 43003 - DNA, 26 bp, Homo sapiens
aagtgcttaggtgataacatttaccc

SEQ ID NO: 43004 - DNA, 26 bp, Homo sapiens
agtgcttaggtgataacatttaccca

SEQ ID NO: 43005 - DNA, 26 bp, Homo sapiens
gtgcttaggtgataacatttacccat

SEQ ID NO: 43006 - DNA, 26 bp, Homo sapiens
tgcttaggtgataacatttacccatc

SEQ ID NO: 43007 - DNA, 26 bp, Homo sapiens
gcttaggtgataacatttacccatca

SEQ ID NO: 43008 - DNA, 26 bp, Homo sapiens
cttaggtgataacatttacccatcaa

SEQ ID NO: 43009 - DNA, 26 bp, Homo sapiens
ttaggtgataacatttacccatcaat

SEQ ID NO: 43010 - DNA, 26 bp, Homo sapiens
taggtgataacatttacccatcaatt

SEQ ID NO: 43011 - DNA, 26 bp, Homo sapiens
aggtgataacatttacccatcaattt

SEQ ID NO: 43012 - DNA, 26 bp, Homo sapiens
ggtgataacatttacccatcaatttg

SEQ ID NO: 43013 - DNA, 26 bp, Homo sapiens
gtgataacatttacccatcaatttgc

SEQ ID NO: 43014 - DNA, 26 bp, Homo sapiens
tgataacatttacccatcaatttgca

SEQ ID NO: 43015 - DNA, 26 bp, Homo sapiens
gataacatttacccatcaatttgcat

SEQ ID NO: 43016 - DNA, 26 bp, Homo sapiens
ataacatttacccatcaatttgcatt

SEQ ID NO: 43017 - DNA, 26 bp, Homo sapiens
taacatttacccatcaatttgcattg

SEQ ID NO: 43018 - DNA, 26 bp, Homo sapiens
aacatttacccatcaatttgcattgc

SEQ ID NO: 43019 - DNA, 26 bp, Homo sapiens
acatttacccatcaatttgcattgct

SEQ ID NO: 43020 - DNA, 26 bp, Homo sapiens
catttacccatcaatttgcattgctg

SEQ ID NO: 43021 - DNA, 26 bp, Homo sapiens
atttacccatcaatttgcattgctgg

SEQ ID NO: 43022 - DNA, 26 bp, Homo sapiens
tttacccatcaatttgcattgctggc

SEQ ID NO: 43023 - DNA, 26 bp, Homo sapiens
ttacccatcaatttgcattgctggct

SEQ ID NO: 43024 - DNA, 26 bp, Homo sapiens
tacccatcaatttgcattgctggctc

SEQ ID NO: 43025 - DNA, 26 bp, Homo sapiens
acccatcaatttgcattgctggctca

SEQ ID NO: 43026 - DNA, 26 bp, Homo sapiens
cccatcaatttgcattgctggctcaa

SEQ ID NO: 43027 - DNA, 26 bp, Homo sapiens
ccatcaatttgcattgctggctcaaa

SEQ ID NO: 43028 - DNA, 26 bp, Homo sapiens
catcaatttgcattgctggctcaaat

SEQ ID NO: 43029 - DNA, 26 bp, Homo sapiens
atcaatttgcattgctggctcaaatt

SEQ ID NO: 43030 - DNA, 26 bp, Homo sapiens
tcaatttgcattgctggctcaaattc

SEQ ID NO: 43031 - DNA, 26 bp, Homo sapiens
caatttgcattgctggctcaaattct

SEQ ID NO: 43032 - DNA, 26 bp, Homo sapiens
aatttgcattgctggctcaaattctg

SEQ ID NO: 43033 - DNA, 26 bp, Homo sapiens
atttgcattgctggctcaaattctga

SEQ ID NO: 43034 - DNA, 26 bp, Homo sapiens
tttgcattgctggctcaaattctgaa

SEQ ID NO: 43035 - DNA, 26 bp, Homo sapiens
ttgcattgctggctcaaattctgaag

SEQ ID NO: 43036 - DNA, 26 bp, Homo sapiens
tgcattgctggctcaaattctgaagt

SEQ ID NO: 43037 - DNA, 26 bp, Homo sapiens
gcattgctggctcaaattctgaagtg

SEQ ID NO: 43038 - DNA, 26 bp, Homo sapiens
cattgctggctcaaattctgaagtga

SEQ ID NO: 43039 - DNA, 26 bp, Homo sapiens
attgctggctcaaattctgaagtgaa

SEQ ID NO: 43040 - DNA, 26 bp, Homo sapiens
ttgctggctcaaattctgaagtgaac

SEQ ID NO: 43041 - DNA, 26 bp, Homo sapiens
tgctggctcaaattctgaagtgaaca

SEQ ID NO: 43042 - DNA, 26 bp, Homo sapiens
gctggctcaaattctgaagtgaacaa

SEQ ID NO: 43043 - DNA, 26 bp, Homo sapiens
ctggctcaaattctgaagtgaacaac

SEQ ID NO: 43044 - DNA, 26 bp, Homo sapiens
tggctcaaattctgaagtgaacaact

SEQ ID NO: 43045 - DNA, 26 bp, Homo sapiens
ggctcaaattctgaagtgaacaactc

SEQ ID NO: 43046 - DNA, 26 bp, Homo sapiens
gctcaaattctgaagtgaacaactcc

SEQ ID NO: 43047 - DNA, 26 bp, Homo sapiens
ctcaaattctgaagtgaacaactcct

SEQ ID NO: 43048 - DNA, 26 bp, Homo sapiens
tcaaattctgaagtgaacaactcctt

SEQ ID NO: 43049 - DNA, 26 bp, Homo sapiens
caaattctgaagtgaacaactccttg

SEQ ID NO: 43050 - DNA, 26 bp, Homo sapiens
aaattctgaagtgaacaactccttgt

SEQ ID NO: 43051 - DNA, 26 bp, Homo sapiens
aattctgaagtgaacaactccttgta

SEQ ID NO: 43052 - DNA, 26 bp, Homo sapiens
attctgaagtgaacaactccttgtat

SEQ ID NO: 43053 - DNA, 26 bp, Homo sapiens
ttctgaagtgaacaactccttgtata

SEQ ID NO: 43054 - DNA, 26 bp, Homo sapiens
tctgaagtgaacaactccttgtataa

SEQ ID NO: 43055 - DNA, 26 bp, Homo sapiens
ctgaagtgaacaactccttgtataat

SEQ ID NO: 43056 - DNA, 26 bp, Homo sapiens
tgaagtgaacaactccttgtataatg

SEQ ID NO: 43057 - DNA, 26 bp, Homo sapiens
gaagtgaacaactccttgtataatgg

SEQ ID NO: 43058 - DNA, 26 bp, Homo sapiens
aagtgaacaactccttgtataatgga

SEQ ID NO: 43059 - DNA, 26 bp, Homo sapiens
agtgaacaactccttgtataatggag

SEQ ID NO: 43060 - DNA, 26 bp, Homo sapiens
gtgaacaactccttgtataatggagg

SEQ ID NO: 43061 - DNA, 26 bp, Homo sapiens
tgaacaactccttgtataatggagga

SEQ ID NO: 43062 - DNA, 26 bp, Homo sapiens
gaacaactccttgtataatggaggaa

SEQ ID NO: 43063 - DNA, 26 bp, Homo sapiens
aacaactccttgtataatggaggaaa

SEQ ID NO: 43064 - DNA, 26 bp, Homo sapiens
acaactccttgtataatggaggaaaa

SEQ ID NO: 43065 - DNA, 26 bp, Homo sapiens
caactccttgtataatggaggaaaat

SEQ ID NO: 43066 - DNA, 26 bp, Homo sapiens
aactccttgtataatggaggaaaatg

SEQ ID NO: 43067 - DNA, 26 bp, Homo sapiens
actccttgtataatggaggaaaatga

SEQ ID NO: 43068 - DNA, 26 bp, Homo sapiens
ctccttgtataatggaggaaaatgaa

SEQ ID NO: 43069 - DNA, 26 bp, Homo sapiens
tccttgtataatggaggaaaatgaag

SEQ ID NO: 43070 - DNA, 26 bp, Homo sapiens
ccttgtataatggaggaaaatgaagt

SEQ ID NO: 43071 - DNA, 26 bp, Homo sapiens
cttgtataatggaggaaaatgaagtc

SEQ ID NO: 43072 - DNA, 26 bp, Homo sapiens
ttgtataatggaggaaaatgaagtcg

SEQ ID NO: 43073 - DNA, 26 bp, Homo sapiens
tgtataatggaggaaaatgaagtcgc

SEQ ID NO: 43074 - DNA, 26 bp, Homo sapiens
gtataatggaggaaaatgaagtcgca

SEQ ID NO: 43075 - DNA, 26 bp, Homo sapiens
tataatggaggaaaatgaagtcgcac

SEQ ID NO: 43076 - DNA, 26 bp, Homo sapiens
ataatggaggaaaatgaagtcgcaca

SEQ ID NO: 43077 - DNA, 26 bp, Homo sapiens
taatggaggaaaatgaagtcgcacaa

SEQ ID NO: 43078 - DNA, 26 bp, Homo sapiens
aatggaggaaaatgaagtcgcacaat

SEQ ID NO: 43079 - DNA, 26 bp, Homo sapiens
atggaggaaaatgaagtcgcacaatg

SEQ ID NO: 43080 - DNA, 26 bp, Homo sapiens
tggaggaaaatgaagtcgcacaatgt

SEQ ID NO: 43081 - DNA, 26 bp, Homo sapiens
ggaggaaaatgaagtcgcacaatgtc

SEQ ID NO: 43082 - DNA, 26 bp, Homo sapiens
gaggaaaatgaagtcgcacaatgtct

SEQ ID NO: 43083 - DNA, 26 bp, Homo sapiens
aggaaaatgaagtcgcacaatgtctg

SEQ ID NO: 43084 - DNA, 26 bp, Homo sapiens
ggaaaatgaagtcgcacaatgtctgg

SEQ ID NO: 43085 - DNA, 26 bp, Homo sapiens
gaaaatgaagtcgcacaatgtctggg

SEQ ID NO: 43086 - DNA, 26 bp, Homo sapiens
aaaatgaagtcgcacaatgtctgggt

SEQ ID NO: 43087 - DNA, 26 bp, Homo sapiens
aaatgaagtcgcacaatgtctgggta

SEQ ID NO: 43088 - DNA, 26 bp, Homo sapiens
aatgaagtcgcacaatgtctgggtat

SEQ ID NO: 43089 - DNA, 26 bp, Homo sapiens
atgaagtcgcacaatgtctgggtata

SEQ ID NO: 43090 - DNA, 26 bp, Homo sapiens
tgaagtcgcacaatgtctgggtatat

SEQ ID NO: 43091 - DNA, 26 bp, Homo sapiens
gaagtcgcacaatgtctgggtatatt

SEQ ID NO: 43092 - DNA, 26 bp, Homo sapiens
aagtcgcacaatgtctgggtatattg

SEQ ID NO: 43093 - DNA, 26 bp, Homo sapiens
agtcgcacaatgtctgggtatattgc

SEQ ID NO: 43094 - DNA, 26 bp, Homo sapiens
gtcgcacaatgtctgggtatattgct

SEQ ID NO: 43095 - DNA, 26 bp, Homo sapiens
tcgcacaatgtctgggtatattgctt

SEQ ID NO: 43096 - DNA, 26 bp, Homo sapiens
cgcacaatgtctgggtatattgcttt

SEQ ID NO: 43097 - DNA, 26 bp, Homo sapiens
gcacaatgtctgggtatattgcttta

SEQ ID NO: 43098 - DNA, 26 bp, Homo sapiens
cacaatgtctgggtatattgctttaa

SEQ ID NO: 43099 - DNA, 26 bp, Homo sapiens
acaatgtctgggtatattgctttaaa

SEQ ID NO: 43100 - DNA, 26 bp, Homo sapiens
caatgtctgggtatattgctttaaat

SEQ ID NO: 43101 - DNA, 26 bp, Homo sapiens
aatgtctgggtatattgctttaaatg

SEQ ID NO: 43102 - DNA, 26 bp, Homo sapiens
atgtctgggtatattgctttaaatgc

SEQ ID NO: 43103 - DNA, 26 bp, Homo sapiens
tgtctgggtatattgctttaaatgcc

SEQ ID NO: 43104 - DNA, 26 bp, Homo sapiens
gtctgggtatattgctttaaatgcca

SEQ ID NO: 43105 - DNA, 26 bp, Homo sapiens
tctgggtatattgctttaaatgccat

SEQ ID NO: 43106 - DNA, 26 bp, Homo sapiens
ctgggtatattgctttaaatgccatt

SEQ ID NO: 43107 - DNA, 26 bp, Homo sapiens
tgggtatattgctttaaatgccatta

SEQ ID NO: 43108 - DNA, 26 bp, Homo sapiens
gggtatattgctttaaatgccattag

SEQ ID NO: 43109 - DNA, 26 bp, Homo sapiens
ggtatattgctttaaatgccattagc

SEQ ID NO: 43110 - DNA, 26 bp, Homo sapiens
gtatattgctttaaatgccattagct

SEQ ID NO: 43111 - DNA, 26 bp, Homo sapiens
tatattgctttaaatgccattagctt

SEQ ID NO: 43112 - DNA, 26 bp, Homo sapiens
atattgctttaaatgccattagcttt

SEQ ID NO: 43113 - DNA, 26 bp, Homo sapiens
tattgctttaaatgccattagctttt

SEQ ID NO: 43114 - DNA, 26 bp, Homo sapiens
attgctttaaatgccattagcttttc

SEQ ID NO: 43115 - DNA, 26 bp, Homo sapiens
ttgctttaaatgccattagcttttct

SEQ ID NO: 43116 - DNA, 26 bp, Homo sapiens
tgctttaaatgccattagcttttctg

SEQ ID NO: 43117 - DNA, 26 bp, Homo sapiens
gctttaaatgccattagcttttctgt

SEQ ID NO: 43118 - DNA, 26 bp, Homo sapiens
ctttaaatgccattagcttttctgta

SEQ ID NO: 43119 - DNA, 26 bp, Homo sapiens
tttaaatgccattagcttttctgtat

SEQ ID NO: 43120 - DNA, 26 bp, Homo sapiens
ttaaatgccattagcttttctgtatg

SEQ ID NO: 43121 - DNA, 26 bp, Homo sapiens
taaatgccattagcttttctgtatgt

SEQ ID NO: 43122 - DNA, 26 bp, Homo sapiens
aaatgccattagcttttctgtatgtc

SEQ ID NO: 43123 - DNA, 26 bp, Homo sapiens
aatgccattagcttttctgtatgtcg

SEQ ID NO: 43124 - DNA, 26 bp, Homo sapiens
atgccattagcttttctgtatgtcgt

SEQ ID NO: 43125 - DNA, 26 bp, Homo sapiens
tgccattagcttttctgtatgtcgtc

SEQ ID NO: 43126 - DNA, 26 bp, Homo sapiens
gccattagcttttctgtatgtcgtcc

SEQ ID NO: 43127 - DNA, 26 bp, Homo sapiens
ccattagcttttctgtatgtcgtcca

SEQ ID NO: 43128 - DNA, 26 bp, Homo sapiens
cattagcttttctgtatgtcgtccac

SEQ ID NO: 43129 - DNA, 26 bp, Homo sapiens
attagcttttctgtatgtcgtccaca

SEQ ID NO: 43130 - DNA, 26 bp, Homo sapiens
ttagcttttctgtatgtcgtccacat

SEQ ID NO: 43131 - DNA, 26 bp, Homo sapiens
tagcttttctgtatgtcgtccacata

SEQ ID NO: 43132 - DNA, 26 bp, Homo sapiens
agcttttctgtatgtcgtccacataa

SEQ ID NO: 43133 - DNA, 26 bp, Homo sapiens
gcttttctgtatgtcgtccacataag

SEQ ID NO: 43134 - DNA, 26 bp, Homo sapiens
cttttctgtatgtcgtccacataagg

SEQ ID NO: 43135 - DNA, 26 bp, Homo sapiens
ttttctgtatgtcgtccacataaggc

SEQ ID NO: 43136 - DNA, 26 bp, Homo sapiens
tttctgtatgtcgtccacataaggct

SEQ ID NO: 43137 - DNA, 26 bp, Homo sapiens
ttctgtatgtcgtccacataaggctc

SEQ ID NO: 43138 - DNA, 26 bp, Homo sapiens
tctgtatgtcgtccacataaggctct

SEQ ID NO: 43139 - DNA, 26 bp, Homo sapiens
ctgtatgtcgtccacataaggctctt

SEQ ID NO: 43140 - DNA, 26 bp, Homo sapiens
tgtatgtcgtccacataaggctctta

SEQ ID NO: 43141 - DNA, 26 bp, Homo sapiens
gtatgtcgtccacataaggctcttaa

SEQ ID NO: 43142 - DNA, 26 bp, Homo sapiens
tatgtcgtccacataaggctcttaag

SEQ ID NO: 43143 - DNA, 26 bp, Homo sapiens
atgtcgtccacataaggctcttaagg

SEQ ID NO: 43144 - DNA, 26 bp, Homo sapiens
tgtcgtccacataaggctcttaaggt

SEQ ID NO: 43145 - DNA, 26 bp, Homo sapiens
gtcgtccacataaggctcttaaggta

SEQ ID NO: 43146 - DNA, 26 bp, Homo sapiens
tcgtccacataaggctcttaaggtag

SEQ ID NO: 43147 - DNA, 26 bp, Homo sapiens
cgtccacataaggctcttaaggtaga

SEQ ID NO: 43148 - DNA, 26 bp, Homo sapiens
gtccacataaggctcttaaggtagac

SEQ ID NO: 43149 - DNA, 26 bp, Homo sapiens
tccacataaggctcttaaggtagaca

SEQ ID NO: 43150 - DNA, 26 bp, Homo sapiens
ccacataaggctcttaaggtagacac

SEQ ID NO: 43151 - DNA, 26 bp, Homo sapiens
cacataaggctcttaaggtagacacc

SEQ ID NO: 43152 - DNA, 26 bp, Homo sapiens
acataaggctcttaaggtagacacct

SEQ ID NO: 43153 - DNA, 26 bp, Homo sapiens
cataaggctcttaaggtagacacctt

SEQ ID NO: 43154 - DNA, 26 bp, Homo sapiens
ataaggctcttaaggtagacaccttg

SEQ ID NO: 43155 - DNA, 26 bp, Homo sapiens
taaggctcttaaggtagacaccttgc

SEQ ID NO: 43156 - DNA, 26 bp, Homo sapiens
aaggctcttaaggtagacaccttgca

SEQ ID NO: 43157 - DNA, 26 bp, Homo sapiens
aggctcttaaggtagacaccttgcat

SEQ ID NO: 43158 - DNA, 26 bp, Homo sapiens
ggctcttaaggtagacaccttgcata

SEQ ID NO: 43159 - DNA, 26 bp, Homo sapiens
gctcttaaggtagacaccttgcatat

SEQ ID NO: 43160 - DNA, 26 bp, Homo sapiens
ctcttaaggtagacaccttgcatatt

SEQ ID NO: 43161 - DNA, 26 bp, Homo sapiens
tcttaaggtagacaccttgcatatta

SEQ ID NO: 43162 - DNA, 26 bp, Homo sapiens
cttaaggtagacaccttgcatattaa

SEQ ID NO: 43163 - DNA, 26 bp, Homo sapiens
ttaaggtagacaccttgcatattaac

SEQ ID NO: 43164 - DNA, 26 bp, Homo sapiens
taaggtagacaccttgcatattaact

SEQ ID NO: 43165 - DNA, 26 bp, Homo sapiens
aaggtagacaccttgcatattaactt

SEQ ID NO: 43166 - DNA, 26 bp, Homo sapiens
aggtagacaccttgcatattaacttt

SEQ ID NO: 43167 - DNA, 26 bp, Homo sapiens
ggtagacaccttgcatattaactttg

SEQ ID NO: 43168 - DNA, 26 bp, Homo sapiens
gtagacaccttgcatattaactttgt

SEQ ID NO: 43169 - DNA, 26 bp, Homo sapiens
tagacaccttgcatattaactttgtt

SEQ ID NO: 43170 - DNA, 26 bp, Homo sapiens
agacaccttgcatattaactttgtta

SEQ ID NO: 43171 - DNA, 26 bp, Homo sapiens
gacaccttgcatattaactttgttag

SEQ ID NO: 43172 - DNA, 26 bp, Homo sapiens
acaccttgcatattaactttgttagt

SEQ ID NO: 43173 - DNA, 26 bp, Homo sapiens
caccttgcatattaactttgttagta

SEQ ID NO: 43174 - DNA, 26 bp, Homo sapiens
accttgcatattaactttgttagtat

SEQ ID NO: 43175 - DNA, 26 bp, Homo sapiens
ccttgcatattaactttgttagtatt

SEQ ID NO: 43176 - DNA, 26 bp, Homo sapiens
cttgcatattaactttgttagtattc

SEQ ID NO: 43177 - DNA, 26 bp, Homo sapiens
ttgcatattaactttgttagtattcc

SEQ ID NO: 43178 - DNA, 26 bp, Homo sapiens
tgcatattaactttgttagtattcca

SEQ ID NO: 43179 - DNA, 26 bp, Homo sapiens
gcatattaactttgttagtattccat

SEQ ID NO: 43180 - DNA, 26 bp, Homo sapiens
catattaactttgttagtattccatc

SEQ ID NO: 43181 - DNA, 26 bp, Homo sapiens
atattaactttgttagtattccatct

SEQ ID NO: 43182 - DNA, 26 bp, Homo sapiens
tattaactttgttagtattccatctt

SEQ ID NO: 43183 - DNA, 26 bp, Homo sapiens
attaactttgttagtattccatcttc

SEQ ID NO: 43184 - DNA, 26 bp, Homo sapiens
ttaactttgttagtattccatcttct

SEQ ID NO: 43185 - DNA, 26 bp, Homo sapiens
taactttgttagtattccatcttctc

SEQ ID NO: 43186 - DNA, 26 bp, Homo sapiens
aactttgttagtattccatcttctcg

SEQ ID NO: 43187 - DNA, 26 bp, Homo sapiens
actttgttagtattccatcttctcgg

SEQ ID NO: 43188 - DNA, 26 bp, Homo sapiens
ctttgttagtattccatcttctcggt

SEQ ID NO: 43189 - DNA, 26 bp, Homo sapiens
tttgttagtattccatcttctcggtg

SEQ ID NO: 43190 - DNA, 26 bp, Homo sapiens
ttgttagtattccatcttctcggtga

SEQ ID NO: 43191 - DNA, 26 bp, Homo sapiens
tgttagtattccatcttctcggtgat

SEQ ID NO: 43192 - DNA, 26 bp, Homo sapiens
gttagtattccatcttctcggtgatt

SEQ ID NO: 43193 - DNA, 26 bp, Homo sapiens
ttagtattccatcttctcggtgattc

SEQ ID NO: 43194 - DNA, 26 bp, Homo sapiens
tagtattccatcttctcggtgattct

SEQ ID NO: 43195 - DNA, 26 bp, Homo sapiens
agtattccatcttctcggtgattctt

SEQ ID NO: 43196 - DNA, 26 bp, Homo sapiens
gtattccatcttctcggtgattcttc

SEQ ID NO: 43197 - DNA, 26 bp, Homo sapiens
tattccatcttctcggtgattcttct

SEQ ID NO: 43198 - DNA, 26 bp, Homo sapiens
attccatcttctcggtgattcttctg

SEQ ID NO: 43199 - DNA, 26 bp, Homo sapiens
ttccatcttctcggtgattcttctgt

SEQ ID NO: 43200 - DNA, 26 bp, Homo sapiens
tccatcttctcggtgattcttctgta

SEQ ID NO: 43201 - DNA, 26 bp, Homo sapiens
ccatcttctcggtgattcttctgtag

SEQ ID NO: 43202 - DNA, 26 bp, Homo sapiens
catcttctcggtgattcttctgtagg

SEQ ID NO: 43203 - DNA, 26 bp, Homo sapiens
atcttctcggtgattcttctgtagga

SEQ ID NO: 43204 - DNA, 26 bp, Homo sapiens
tcttctcggtgattcttctgtaggac

SEQ ID NO: 43205 - DNA, 26 bp, Homo sapiens
cttctcggtgattcttctgtaggacg

SEQ ID NO: 43206 - DNA, 26 bp, Homo sapiens
ttctcggtgattcttctgtaggacgt

SEQ ID NO: 43207 - DNA, 26 bp, Homo sapiens
tctcggtgattcttctgtaggacgtg

SEQ ID NO: 43208 - DNA, 26 bp, Homo sapiens
ctcggtgattcttctgtaggacgtgt

SEQ ID NO: 43209 - DNA, 26 bp, Homo sapiens
tcggtgattcttctgtaggacgtgtt

SEQ ID NO: 43210 - DNA, 26 bp, Homo sapiens
cggtgattcttctgtaggacgtgttg

SEQ ID NO: 43211 - DNA, 26 bp, Homo sapiens
ggtgattcttctgtaggacgtgttga

SEQ ID NO: 43212 - DNA, 26 bp, Homo sapiens
gtgattcttctgtaggacgtgttgaa

SEQ ID NO: 43213 - DNA, 26 bp, Homo sapiens
tgattcttctgtaggacgtgttgaag

SEQ ID NO: 43214 - DNA, 26 bp, Homo sapiens
gattcttctgtaggacgtgttgaaga

SEQ ID NO: 43215 - DNA, 26 bp, Homo sapiens
attcttctgtaggacgtgttgaagag

SEQ ID NO: 43216 - DNA, 26 bp, Homo sapiens
ttcttctgtaggacgtgttgaagagc

SEQ ID NO: 43217 - DNA, 26 bp, Homo sapiens
tcttctgtaggacgtgttgaagagct

SEQ ID NO: 43218 - DNA, 26 bp, Homo sapiens
cttctgtaggacgtgttgaagagcta

SEQ ID NO: 43219 - DNA, 26 bp, Homo sapiens
ttctgtaggacgtgttgaagagctag

SEQ ID NO: 43220 - DNA, 26 bp, Homo sapiens
tctgtaggacgtgttgaagagctagc

SEQ ID NO: 43221 - DNA, 26 bp, Homo sapiens
ctgtaggacgtgttgaagagctagct

SEQ ID NO: 43222 - DNA, 26 bp, Homo sapiens
tgtaggacgtgttgaagagctagctg

SEQ ID NO: 43223 - DNA, 26 bp, Homo sapiens
gtaggacgtgttgaagagctagctga

SEQ ID NO: 43224 - DNA, 26 bp, Homo sapiens
taggacgtgttgaagagctagctgaa

SEQ ID NO: 43225 - DNA, 26 bp, Homo sapiens
aggacgtgttgaagagctagctgaat

SEQ ID NO: 43226 - DNA, 26 bp, Homo sapiens
ggacgtgttgaagagctagctgaatt

SEQ ID NO: 43227 - DNA, 26 bp, Homo sapiens
gacgtgttgaagagctagctgaattt

SEQ ID NO: 43228 - DNA, 26 bp, Homo sapiens
acgtgttgaagagctagctgaatttt

SEQ ID NO: 43229 - DNA, 26 bp, Homo sapiens
cgtgttgaagagctagctgaattttc

SEQ ID NO: 43230 - DNA, 26 bp, Homo sapiens
gtgttgaagagctagctgaattttct

SEQ ID NO: 43231 - DNA, 26 bp, Homo sapiens
tgttgaagagctagctgaattttctg

SEQ ID NO: 43232 - DNA, 26 bp, Homo sapiens
gttgaagagctagctgaattttctgt

SEQ ID NO: 43233 - DNA, 26 bp, Homo sapiens
ttgaagagctagctgaattttctgtt

SEQ ID NO: 43234 - DNA, 26 bp, Homo sapiens
tgaagagctagctgaattttctgttg

SEQ ID NO: 43235 - DNA, 26 bp, Homo sapiens
gaagagctagctgaattttctgttgc

SEQ ID NO: 43236 - DNA, 26 bp, Homo sapiens
aagagctagctgaattttctgttgca

SEQ ID NO: 43237 - DNA, 26 bp, Homo sapiens
agagctagctgaattttctgttgcag

SEQ ID NO: 43238 - DNA, 26 bp, Homo sapiens
gagctagctgaattttctgttgcagt

SEQ ID NO: 43239 - DNA, 26 bp, Homo sapiens
agctagctgaattttctgttgcagtt

SEQ ID NO: 43240 - DNA, 26 bp, Homo sapiens
gctagctgaattttctgttgcagttt

SEQ ID NO: 43241 - DNA, 26 bp, Homo sapiens
ctagctgaattttctgttgcagtttt

SEQ ID NO: 43242 - DNA, 26 bp, Homo sapiens
tagctgaattttctgttgcagttttt

SEQ ID NO: 43243 - DNA, 26 bp, Homo sapiens
agctgaattttctgttgcagtttttc

SEQ ID NO: 43244 - DNA, 26 bp, Homo sapiens
gctgaattttctgttgcagtttttca

SEQ ID NO: 43245 - DNA, 26 bp, Homo sapiens
ctgaattttctgttgcagtttttcaa

SEQ ID NO: 43246 - DNA, 26 bp, Homo sapiens
tgaattttctgttgcagtttttcaat

SEQ ID NO: 43247 - DNA, 26 bp, Homo sapiens
gaattttctgttgcagtttttcaatt

SEQ ID NO: 43248 - DNA, 26 bp, Homo sapiens
aattttctgttgcagtttttcaattt

SEQ ID NO: 43249 - DNA, 26 bp, Homo sapiens
attttctgttgcagtttttcaatttt

SEQ ID NO: 43250 - DNA, 26 bp, Homo sapiens
ttttctgttgcagtttttcaattttt

SEQ ID NO: 43251 - DNA, 26 bp, Homo sapiens
tttctgttgcagtttttcaattttta

SEQ ID NO: 43252 - DNA, 26 bp, Homo sapiens
ttctgttgcagtttttcaatttttac

SEQ ID NO: 43253 - DNA, 26 bp, Homo sapiens
tctgttgcagtttttcaatttttacc

SEQ ID NO: 43254 - DNA, 26 bp, Homo sapiens
ctgttgcagtttttcaatttttacct

SEQ ID NO: 43255 - DNA, 26 bp, Homo sapiens
tgttgcagtttttcaatttttacctt

SEQ ID NO: 43256 - DNA, 26 bp, Homo sapiens
gttgcagtttttcaatttttaccttt

SEQ ID NO: 43257 - DNA, 26 bp, Homo sapiens
ttgcagtttttcaatttttacctttt

SEQ ID NO: 43258 - DNA, 26 bp, Homo sapiens
tgcagtttttcaatttttaccttttc

SEQ ID NO: 43259 - DNA, 26 bp, Homo sapiens
gcagtttttcaatttttaccttttct

SEQ ID NO: 43260 - DNA, 26 bp, Homo sapiens
cagtttttcaatttttaccttttctt

SEQ ID NO: 43261 - DNA, 26 bp, Homo sapiens
agtttttcaatttttaccttttcttg

SEQ ID NO: 43262 - DNA, 26 bp, Homo sapiens
gtttttcaatttttaccttttcttgc

SEQ ID NO: 43263 - DNA, 26 bp, Homo sapiens
tttttcaatttttaccttttcttgca

SEQ ID NO: 43264 - DNA, 26 bp, Homo sapiens
ttttcaatttttaccttttcttgcag

SEQ ID NO: 43265 - DNA, 26 bp, Homo sapiens
tttcaatttttaccttttcttgcagc

SEQ ID NO: 43266 - DNA, 26 bp, Homo sapiens
ttcaatttttaccttttcttgcagcc

SEQ ID NO: 43267 - DNA, 26 bp, Homo sapiens
tcaatttttaccttttcttgcagcca

SEQ ID NO: 43268 - DNA, 26 bp, Homo sapiens
caatttttaccttttcttgcagccat

SEQ ID NO: 43269 - DNA, 26 bp, Homo sapiens
aatttttaccttttcttgcagccatg

SEQ ID NO: 43270 - DNA, 26 bp, Homo sapiens
atttttaccttttcttgcagccatga

SEQ ID NO: 43271 - DNA, 26 bp, Homo sapiens
tttttaccttttcttgcagccatgag

SEQ ID NO: 43272 - DNA, 26 bp, Homo sapiens
ttttaccttttcttgcagccatgagc

SEQ ID NO: 43273 - DNA, 26 bp, Homo sapiens
tttaccttttcttgcagccatgagcg

SEQ ID NO: 43274 - DNA, 26 bp, Homo sapiens
ttaccttttcttgcagccatgagcga

SEQ ID NO: 43275 - DNA, 26 bp, Homo sapiens
taccttttcttgcagccatgagcgat

SEQ ID NO: 43276 - DNA, 26 bp, Homo sapiens
accttttcttgcagccatgagcgatc

SEQ ID NO: 43277 - DNA, 26 bp, Homo sapiens
ccttttcttgcagccatgagcgatct

SEQ ID NO: 43278 - DNA, 26 bp, Homo sapiens
cttttcttgcagccatgagcgatctg

SEQ ID NO: 43279 - DNA, 26 bp, Homo sapiens
ttttcttgcagccatgagcgatctgc

SEQ ID NO: 43280 - DNA, 26 bp, Homo sapiens
tttcttgcagccatgagcgatctgct

SEQ ID NO: 43281 - DNA, 26 bp, Homo sapiens
ttcttgcagccatgagcgatctgctg

SEQ ID NO: 43282 - DNA, 26 bp, Homo sapiens
tcttgcagccatgagcgatctgctga

SEQ ID NO: 43283 - DNA, 26 bp, Homo sapiens
cttgcagccatgagcgatctgctgac

SEQ ID NO: 43284 - DNA, 26 bp, Homo sapiens
ttgcagccatgagcgatctgctgaca

SEQ ID NO: 43285 - DNA, 26 bp, Homo sapiens
tgcagccatgagcgatctgctgacat

SEQ ID NO: 43286 - DNA, 26 bp, Homo sapiens
gcagccatgagcgatctgctgacatc

SEQ ID NO: 43287 - DNA, 26 bp, Homo sapiens
cagccatgagcgatctgctgacatca

SEQ ID NO: 43288 - DNA, 26 bp, Homo sapiens
agccatgagcgatctgctgacatcag

SEQ ID NO: 43289 - DNA, 26 bp, Homo sapiens
gccatgagcgatctgctgacatcagt

SEQ ID NO: 43290 - DNA, 26 bp, Homo sapiens
ccatgagcgatctgctgacatcagta

SEQ ID NO: 43291 - DNA, 26 bp, Homo sapiens
catgagcgatctgctgacatcagtac

SEQ ID NO: 43292 - DNA, 26 bp, Homo sapiens
atgagcgatctgctgacatcagtaca

SEQ ID NO: 43293 - DNA, 26 bp, Homo sapiens
tgagcgatctgctgacatcagtacaa

SEQ ID NO: 43294 - DNA, 26 bp, Homo sapiens
gagcgatctgctgacatcagtacaaa

SEQ ID NO: 43295 - DNA, 26 bp, Homo sapiens
agcgatctgctgacatcagtacaaat

SEQ ID NO: 43296 - DNA, 26 bp, Homo sapiens
gcgatctgctgacatcagtacaaatg

SEQ ID NO: 43297 - DNA, 26 bp, Homo sapiens
cgatctgctgacatcagtacaaatgc

SEQ ID NO: 43298 - DNA, 26 bp, Homo sapiens
gatctgctgacatcagtacaaatgca

SEQ ID NO: 43299 - DNA, 26 bp, Homo sapiens
atctgctgacatcagtacaaatgcag

SEQ ID NO: 43300 - DNA, 26 bp, Homo sapiens
tctgctgacatcagtacaaatgcaga

SEQ ID NO: 43301 - DNA, 26 bp, Homo sapiens
ctgctgacatcagtacaaatgcagaa

SEQ ID NO: 43302 - DNA, 26 bp, Homo sapiens
tgctgacatcagtacaaatgcagaaa

SEQ ID NO: 43303 - DNA, 26 bp, Homo sapiens
gctgacatcagtacaaatgcagaaaa

SEQ ID NO: 43304 - DNA, 26 bp, Homo sapiens
ctgacatcagtacaaatgcagaaaat

SEQ ID NO: 43305 - DNA, 26 bp, Homo sapiens
tgacatcagtacaaatgcagaaaata

SEQ ID NO: 43306 - DNA, 26 bp, Homo sapiens
gacatcagtacaaatgcagaaaataa

SEQ ID NO: 43307 - DNA, 26 bp, Homo sapiens
acatcagtacaaatgcagaaaataat

SEQ ID NO: 43308 - DNA, 26 bp, Homo sapiens
catcagtacaaatgcagaaaataatg

SEQ ID NO: 43309 - DNA, 26 bp, Homo sapiens
atcagtacaaatgcagaaaataatgc

SEQ ID NO: 43310 - DNA, 26 bp, Homo sapiens
tcagtacaaatgcagaaaataatgca

SEQ ID NO: 43311 - DNA, 26 bp, Homo sapiens
cagtacaaatgcagaaaataatgcaa

SEQ ID NO: 43312 - DNA, 26 bp, Homo sapiens
agtacaaatgcagaaaataatgcaat

SEQ ID NO: 43313 - DNA, 26 bp, Homo sapiens
gtacaaatgcagaaaataatgcaatt

SEQ ID NO: 43314 - DNA, 26 bp, Homo sapiens
tacaaatgcagaaaataatgcaattt

SEQ ID NO: 43315 - DNA, 26 bp, Homo sapiens
acaaatgcagaaaataatgcaatttc

SEQ ID NO: 43316 - DNA, 26 bp, Homo sapiens
caaatgcagaaaataatgcaatttca

SEQ ID NO: 43317 - DNA, 26 bp, Homo sapiens
aaatgcagaaaataatgcaatttcat

SEQ ID NO: 43318 - DNA, 26 bp, Homo sapiens
aatgcagaaaataatgcaatttcatc

SEQ ID NO: 43319 - DNA, 26 bp, Homo sapiens
atgcagaaaataatgcaatttcatct

SEQ ID NO: 43320 - DNA, 26 bp, Homo sapiens
tgcagaaaataatgcaatttcatctt

SEQ ID NO: 43321 - DNA, 26 bp, Homo sapiens
gcagaaaataatgcaatttcatcttc

SEQ ID NO: 43322 - DNA, 26 bp, Homo sapiens
cagaaaataatgcaatttcatcttca

SEQ ID NO: 43323 - DNA, 26 bp, Homo sapiens
agaaaataatgcaatttcatcttcag

SEQ ID NO: 43324 - DNA, 26 bp, Homo sapiens
gaaaataatgcaatttcatcttcagt

SEQ ID NO: 43325 - DNA, 26 bp, Homo sapiens
aaaataatgcaatttcatcttcagtc

SEQ ID NO: 43326 - DNA, 26 bp, Homo sapiens
aaataatgcaatttcatcttcagtca

SEQ ID NO: 43327 - DNA, 26 bp, Homo sapiens
aataatgcaatttcatcttcagtcag

SEQ ID NO: 43328 - DNA, 26 bp, Homo sapiens
ataatgcaatttcatcttcagtcagg

SEQ ID NO: 43329 - DNA, 26 bp, Homo sapiens
taatgcaatttcatcttcagtcaggt

SEQ ID NO: 43330 - DNA, 26 bp, Homo sapiens
aatgcaatttcatcttcagtcaggtg

SEQ ID NO: 43331 - DNA, 26 bp, Homo sapiens
atgcaatttcatcttcagtcaggtgc

SEQ ID NO: 43332 - DNA, 26 bp, Homo sapiens
tgcaatttcatcttcagtcaggtgca

SEQ ID NO: 43333 - DNA, 26 bp, Homo sapiens
gcaatttcatcttcagtcaggtgcat

SEQ ID NO: 43334 - DNA, 26 bp, Homo sapiens
caatttcatcttcagtcaggtgcata

SEQ ID NO: 43335 - DNA, 26 bp, Homo sapiens
aatttcatcttcagtcaggtgcatag

SEQ ID NO: 43336 - DNA, 26 bp, Homo sapiens
atttcatcttcagtcaggtgcataga

SEQ ID NO: 43337 - DNA, 26 bp, Homo sapiens
tttcatcttcagtcaggtgcatagaa

SEQ ID NO: 43338 - DNA, 26 bp, Homo sapiens
ttcatcttcagtcaggtgcatagaac

SEQ ID NO: 43339 - DNA, 26 bp, Homo sapiens
tcatcttcagtcaggtgcatagaaca

SEQ ID NO: 43340 - DNA, 26 bp, Homo sapiens
catcttcagtcaggtgcatagaacat

SEQ ID NO: 43341 - DNA, 26 bp, Homo sapiens
atcttcagtcaggtgcatagaacata

SEQ ID NO: 43342 - DNA, 26 bp, Homo sapiens
tcttcagtcaggtgcatagaacataa

SEQ ID NO: 43343 - DNA, 26 bp, Homo sapiens
cttcagtcaggtgcatagaacataaa

SEQ ID NO: 43344 - DNA, 26 bp, Homo sapiens
ttcagtcaggtgcatagaacataaac

SEQ ID NO: 43345 - DNA, 26 bp, Homo sapiens
tcagtcaggtgcatagaacataaact

SEQ ID NO: 43346 - DNA, 26 bp, Homo sapiens
cagtcaggtgcatagaacataaactc

SEQ ID NO: 43347 - DNA, 26 bp, Homo sapiens
agtcaggtgcatagaacataaactct

SEQ ID NO: 43348 - DNA, 26 bp, Homo sapiens
gtcaggtgcatagaacataaactctt

SEQ ID NO: 43349 - DNA, 26 bp, Homo sapiens
tcaggtgcatagaacataaactcttt

SEQ ID NO: 43350 - DNA, 26 bp, Homo sapiens
caggtgcatagaacataaactctttc

SEQ ID NO: 43351 - DNA, 26 bp, Homo sapiens
aggtgcatagaacataaactctttcc

SEQ ID NO: 43352 - DNA, 26 bp, Homo sapiens
ggtgcatagaacataaactctttcca

SEQ ID NO: 43353 - DNA, 26 bp, Homo sapiens
gtgcatagaacataaactctttccaa

SEQ ID NO: 43354 - DNA, 26 bp, Homo sapiens
tgcatagaacataaactctttccaaa

SEQ ID NO: 43355 - DNA, 26 bp, Homo sapiens
gcatagaacataaactctttccaaat

SEQ ID NO: 43356 - DNA, 26 bp, Homo sapiens
catagaacataaactctttccaaatt

SEQ ID NO: 43357 - DNA, 26 bp, Homo sapiens
atagaacataaactctttccaaattc

SEQ ID NO: 43358 - DNA, 26 bp, Homo sapiens
tagaacataaactctttccaaattca

SEQ ID NO: 43359 - DNA, 26 bp, Homo sapiens
agaacataaactctttccaaattcaa

SEQ ID NO: 43360 - DNA, 26 bp, Homo sapiens
gaacataaactctttccaaattcaaa

SEQ ID NO: 43361 - DNA, 26 bp, Homo sapiens
aacataaactctttccaaattcaaac

SEQ ID NO: 43362 - DNA, 26 bp, Homo sapiens
acataaactctttccaaattcaaaca

SEQ ID NO: 43363 - DNA, 26 bp, Homo sapiens
cataaactctttccaaattcaaacac

SEQ ID NO: 43364 - DNA, 26 bp, Homo sapiens
ataaactctttccaaattcaaacaca

SEQ ID NO: 43365 - DNA, 26 bp, Homo sapiens
taaactctttccaaattcaaacacaa

SEQ ID NO: 43366 - DNA, 26 bp, Homo sapiens
aaactctttccaaattcaaacacaaa

SEQ ID NO: 43367 - DNA, 26 bp, Homo sapiens
aactctttccaaattcaaacacaaag

SEQ ID NO: 43368 - DNA, 26 bp, Homo sapiens
actctttccaaattcaaacacaaagc

SEQ ID NO: 43369 - DNA, 26 bp, Homo sapiens
ctctttccaaattcaaacacaaagct

SEQ ID NO: 43370 - DNA, 26 bp, Homo sapiens
tctttccaaattcaaacacaaagcta

SEQ ID NO: 43371 - DNA, 26 bp, Homo sapiens
ctttccaaattcaaacacaaagctaa

SEQ ID NO: 43372 - DNA, 26 bp, Homo sapiens
tttccaaattcaaacacaaagctaat

SEQ ID NO: 43373 - DNA, 26 bp, Homo sapiens
ttccaaattcaaacacaaagctaata

SEQ ID NO: 43374 - DNA, 26 bp, Homo sapiens
tccaaattcaaacacaaagctaataa

SEQ ID NO: 43375 - DNA, 26 bp, Homo sapiens
ccaaattcaaacacaaagctaataaa

SEQ ID NO: 43376 - DNA, 26 bp, Homo sapiens
caaattcaaacacaaagctaataaag

SEQ ID NO: 43377 - DNA, 26 bp, Homo sapiens
aaattcaaacacaaagctaataaagt

SEQ ID NO: 43378 - DNA, 26 bp, Homo sapiens
aattcaaacacaaagctaataaagtc

SEQ ID NO: 43379 - DNA, 26 bp, Homo sapiens
attcaaacacaaagctaataaagtct

SEQ ID NO: 43380 - DNA, 26 bp, Homo sapiens
ttcaaacacaaagctaataaagtctt

SEQ ID NO: 43381 - DNA, 26 bp, Homo sapiens
tcaaacacaaagctaataaagtcttc

SEQ ID NO: 43382 - DNA, 26 bp, Homo sapiens
caaacacaaagctaataaagtcttca

SEQ ID NO: 43383 - DNA, 26 bp, Homo sapiens
aaacacaaagctaataaagtcttcac

SEQ ID NO: 43384 - DNA, 26 bp, Homo sapiens
aacacaaagctaataaagtcttcaca

SEQ ID NO: 43385 - DNA, 26 bp, Homo sapiens
acacaaagctaataaagtcttcacaa

SEQ ID NO: 43386 - DNA, 26 bp, Homo sapiens
cacaaagctaataaagtcttcacaac

SEQ ID NO: 43387 - DNA, 26 bp, Homo sapiens
acaaagctaataaagtcttcacaacc

SEQ ID NO: 43388 - DNA, 26 bp, Homo sapiens
caaagctaataaagtcttcacaacct

SEQ ID NO: 43389 - DNA, 26 bp, Homo sapiens
aaagctaataaagtcttcacaaccta

SEQ ID NO: 43390 - DNA, 26 bp, Homo sapiens
aagctaataaagtcttcacaacctaa

SEQ ID NO: 43391 - DNA, 26 bp, Homo sapiens
agctaataaagtcttcacaacctaag

SEQ ID NO: 43392 - DNA, 26 bp, Homo sapiens
gctaataaagtcttcacaacctaagg

SEQ ID NO: 43393 - DNA, 26 bp, Homo sapiens
ctaataaagtcttcacaacctaagga

SEQ ID NO: 43394 - DNA, 26 bp, Homo sapiens
taataaagtcttcacaacctaaggat

SEQ ID NO: 43395 - DNA, 26 bp, Homo sapiens
aataaagtcttcacaacctaaggatt

SEQ ID NO: 43396 - DNA, 26 bp, Homo sapiens
ataaagtcttcacaacctaaggattt

SEQ ID NO: 43397 - DNA, 26 bp, Homo sapiens
taaagtcttcacaacctaaggatttg

SEQ ID NO: 43398 - DNA, 26 bp, Homo sapiens
aaagtcttcacaacctaaggatttga

SEQ ID NO: 43399 - DNA, 26 bp, Homo sapiens
aagtcttcacaacctaaggatttgaa

SEQ ID NO: 43400 - DNA, 26 bp, Homo sapiens
agtcttcacaacctaaggatttgaag

SEQ ID NO: 43401 - DNA, 26 bp, Homo sapiens
gtcttcacaacctaaggatttgaaga

SEQ ID NO: 43402 - DNA, 26 bp, Homo sapiens
tcttcacaacctaaggatttgaagac

SEQ ID NO: 43403 - DNA, 26 bp, Homo sapiens
cttcacaacctaaggatttgaagacg

SEQ ID NO: 43404 - DNA, 26 bp, Homo sapiens
ttcacaacctaaggatttgaagacgt

SEQ ID NO: 43405 - DNA, 26 bp, Homo sapiens
tcacaacctaaggatttgaagacgtc

SEQ ID NO: 43406 - DNA, 26 bp, Homo sapiens
cacaacctaaggatttgaagacgtcg

SEQ ID NO: 43407 - DNA, 26 bp, Homo sapiens
acaacctaaggatttgaagacgtcgg

SEQ ID NO: 43408 - DNA, 26 bp, Homo sapiens
caacctaaggatttgaagacgtcggg

SEQ ID NO: 43409 - DNA, 26 bp, Homo sapiens
aacctaaggatttgaagacgtcgggg

SEQ ID NO: 43410 - DNA, 26 bp, Homo sapiens
acctaaggatttgaagacgtcggggc

SEQ ID NO: 43411 - DNA, 26 bp, Homo sapiens
cctaaggatttgaagacgtcggggct

SEQ ID NO: 43412 - DNA, 26 bp, Homo sapiens
ctaaggatttgaagacgtcggggctg

SEQ ID NO: 43413 - DNA, 26 bp, Homo sapiens
taaggatttgaagacgtcggggctgg

SEQ ID NO: 43414 - DNA, 26 bp, Homo sapiens
aaggatttgaagacgtcggggctggc

SEQ ID NO: 43415 - DNA, 26 bp, Homo sapiens
aggatttgaagacgtcggggctggca

SEQ ID NO: 43416 - DNA, 26 bp, Homo sapiens
ggatttgaagacgtcggggctggcat

SEQ ID NO: 43417 - DNA, 26 bp, Homo sapiens
gatttgaagacgtcggggctggcata

SEQ ID NO: 43418 - DNA, 26 bp, Homo sapiens
atttgaagacgtcggggctggcatac

SEQ ID NO: 43419 - DNA, 26 bp, Homo sapiens
tttgaagacgtcggggctggcatact

SEQ ID NO: 43420 - DNA, 26 bp, Homo sapiens
ttgaagacgtcggggctggcatactt

SEQ ID NO: 43421 - DNA, 26 bp, Homo sapiens
tgaagacgtcggggctggcatacttc

SEQ ID NO: 43422 - DNA, 26 bp, Homo sapiens
gaagacgtcggggctggcatacttcc

SEQ ID NO: 43423 - DNA, 26 bp, Homo sapiens
aagacgtcggggctggcatacttccc

SEQ ID NO: 43424 - DNA, 26 bp, Homo sapiens
agacgtcggggctggcatacttccca

SEQ ID NO: 43425 - DNA, 26 bp, Homo sapiens
gacgtcggggctggcatacttcccat

SEQ ID NO: 43426 - DNA, 26 bp, Homo sapiens
acgtcggggctggcatacttcccatc

SEQ ID NO: 43427 - DNA, 26 bp, Homo sapiens
cgtcggggctggcatacttcccatca

SEQ ID NO: 43428 - DNA, 26 bp, Homo sapiens
gtcggggctggcatacttcccatcaa

SEQ ID NO: 43429 - DNA, 26 bp, Homo sapiens
tcggggctggcatacttcccatcaaa

SEQ ID NO: 43430 - DNA, 26 bp, Homo sapiens
cggggctggcatacttcccatcaaag

SEQ ID NO: 43431 - DNA, 26 bp, Homo sapiens
ggggctggcatacttcccatcaaagt

SEQ ID NO: 43432 - DNA, 26 bp, Homo sapiens
gggctggcatacttcccatcaaagta

SEQ ID NO: 43433 - DNA, 26 bp, Homo sapiens
ggctggcatacttcccatcaaagtac

SEQ ID NO: 43434 - DNA, 26 bp, Homo sapiens
gctggcatacttcccatcaaagtaca

SEQ ID NO: 43435 - DNA, 26 bp, Homo sapiens
ctggcatacttcccatcaaagtacac

SEQ ID NO: 43436 - DNA, 26 bp, Homo sapiens
tggcatacttcccatcaaagtacacg

SEQ ID NO: 43437 - DNA, 26 bp, Homo sapiens
ggcatacttcccatcaaagtacacgg

SEQ ID NO: 43438 - DNA, 26 bp, Homo sapiens
gcatacttcccatcaaagtacacggt

SEQ ID NO: 43439 - DNA, 26 bp, Homo sapiens
catacttcccatcaaagtacacggtg

SEQ ID NO: 43440 - DNA, 26 bp, Homo sapiens
atacttcccatcaaagtacacggtgt

SEQ ID NO: 43441 - DNA, 26 bp, Homo sapiens
tacttcccatcaaagtacacggtgtt

SEQ ID NO: 43442 - DNA, 26 bp, Homo sapiens
acttcccatcaaagtacacggtgttg

SEQ ID NO: 43443 - DNA, 26 bp, Homo sapiens
cttcccatcaaagtacacggtgttgt

SEQ ID NO: 43444 - DNA, 26 bp, Homo sapiens
ttcccatcaaagtacacggtgttgtt

SEQ ID NO: 43445 - DNA, 26 bp, Homo sapiens
tcccatcaaagtacacggtgttgttc

SEQ ID NO: 43446 - DNA, 26 bp, Homo sapiens
cccatcaaagtacacggtgttgttct

SEQ ID NO: 43447 - DNA, 26 bp, Homo sapiens
ccatcaaagtacacggtgttgttctg

SEQ ID NO: 43448 - DNA, 26 bp, Homo sapiens
catcaaagtacacggtgttgttctga

SEQ ID NO: 43449 - DNA, 26 bp, Homo sapiens
atcaaagtacacggtgttgttctgag

SEQ ID NO: 43450 - DNA, 26 bp, Homo sapiens
tcaaagtacacggtgttgttctgaga

SEQ ID NO: 43451 - DNA, 26 bp, Homo sapiens
caaagtacacggtgttgttctgagag

SEQ ID NO: 43452 - DNA, 26 bp, Homo sapiens
aaagtacacggtgttgttctgagagt

SEQ ID NO: 43453 - DNA, 26 bp, Homo sapiens
aagtacacggtgttgttctgagagtc

SEQ ID NO: 43454 - DNA, 26 bp, Homo sapiens
agtacacggtgttgttctgagagtca

SEQ ID NO: 43455 - DNA, 26 bp, Homo sapiens
gtacacggtgttgttctgagagtcaa

SEQ ID NO: 43456 - DNA, 26 bp, Homo sapiens
tacacggtgttgttctgagagtcaaa

SEQ ID NO: 43457 - DNA, 26 bp, Homo sapiens
acacggtgttgttctgagagtcaaag

SEQ ID NO: 43458 - DNA, 26 bp, Homo sapiens
cacggtgttgttctgagagtcaaagg

SEQ ID NO: 43459 - DNA, 26 bp, Homo sapiens
acggtgttgttctgagagtcaaaggc

SEQ ID NO: 43460 - DNA, 26 bp, Homo sapiens
cggtgttgttctgagagtcaaaggca

SEQ ID NO: 43461 - DNA, 26 bp, Homo sapiens
ggtgttgttctgagagtcaaaggcac

SEQ ID NO: 43462 - DNA, 26 bp, Homo sapiens
gtgttgttctgagagtcaaaggcacg

SEQ ID NO: 43463 - DNA, 26 bp, Homo sapiens
tgttgttctgagagtcaaaggcacgg

SEQ ID NO: 43464 - DNA, 26 bp, Homo sapiens
gttgttctgagagtcaaaggcacggc

SEQ ID NO: 43465 - DNA, 26 bp, Homo sapiens
ttgttctgagagtcaaaggcacggca

SEQ ID NO: 43466 - DNA, 26 bp, Homo sapiens
tgttctgagagtcaaaggcacggcac

SEQ ID NO: 43467 - DNA, 26 bp, Homo sapiens
gttctgagagtcaaaggcacggcaca

SEQ ID NO: 43468 - DNA, 26 bp, Homo sapiens
ttctgagagtcaaaggcacggcacat

SEQ ID NO: 43469 - DNA, 26 bp, Homo sapiens
tctgagagtcaaaggcacggcacatt

SEQ ID NO: 43470 - DNA, 26 bp, Homo sapiens
ctgagagtcaaaggcacggcacattc

SEQ ID NO: 43471 - DNA, 26 bp, Homo sapiens
tgagagtcaaaggcacggcacattct

SEQ ID NO: 43472 - DNA, 26 bp, Homo sapiens
gagagtcaaaggcacggcacattctg

SEQ ID NO: 43473 - DNA, 26 bp, Homo sapiens
agagtcaaaggcacggcacattctga

SEQ ID NO: 43474 - DNA, 26 bp, Homo sapiens
gagtcaaaggcacggcacattctgat

SEQ ID NO: 43475 - DNA, 26 bp, Homo sapiens
agtcaaaggcacggcacattctgata

SEQ ID NO: 43476 - DNA, 26 bp, Homo sapiens
gtcaaaggcacggcacattctgataa

SEQ ID NO: 43477 - DNA, 26 bp, Homo sapiens
tcaaaggcacggcacattctgataaa

SEQ ID NO: 43478 - DNA, 26 bp, Homo sapiens
caaaggcacggcacattctgataaac

SEQ ID NO: 43479 - DNA, 26 bp, Homo sapiens
aaaggcacggcacattctgataaaca

SEQ ID NO: 43480 - DNA, 26 bp, Homo sapiens
aaggcacggcacattctgataaacac

SEQ ID NO: 43481 - DNA, 26 bp, Homo sapiens
aggcacggcacattctgataaacacc

SEQ ID NO: 43482 - DNA, 26 bp, Homo sapiens
ggcacggcacattctgataaacacca

SEQ ID NO: 43483 - DNA, 26 bp, Homo sapiens
gcacggcacattctgataaacaccac

SEQ ID NO: 43484 - DNA, 26 bp, Homo sapiens
cacggcacattctgataaacaccacc

SEQ ID NO: 43485 - DNA, 26 bp, Homo sapiens
acggcacattctgataaacaccacct

SEQ ID NO: 43486 - DNA, 26 bp, Homo sapiens
cggcacattctgataaacaccacctc

SEQ ID NO: 43487 - DNA, 26 bp, Homo sapiens
ggcacattctgataaacaccacctct

SEQ ID NO: 43488 - DNA, 26 bp, Homo sapiens
gcacattctgataaacaccacctcta

SEQ ID NO: 43489 - DNA, 26 bp, Homo sapiens
cacattctgataaacaccacctctag

SEQ ID NO: 43490 - DNA, 26 bp, Homo sapiens
acattctgataaacaccacctctaga

SEQ ID NO: 43491 - DNA, 26 bp, Homo sapiens
cattctgataaacaccacctctagag

SEQ ID NO: 43492 - DNA, 26 bp, Homo sapiens
attctgataaacaccacctctagaga

SEQ ID NO: 43493 - DNA, 26 bp, Homo sapiens
ttctgataaacaccacctctagagaa

SEQ ID NO: 43494 - DNA, 26 bp, Homo sapiens
tctgataaacaccacctctagagaac

SEQ ID NO: 43495 - DNA, 26 bp, Homo sapiens
ctgataaacaccacctctagagaacc

SEQ ID NO: 43496 - DNA, 26 bp, Homo sapiens
tgataaacaccacctctagagaacct

SEQ ID NO: 43497 - DNA, 26 bp, Homo sapiens
gataaacaccacctctagagaacctg

SEQ ID NO: 43498 - DNA, 26 bp, Homo sapiens
ataaacaccacctctagagaacctgc

SEQ ID NO: 43499 - DNA, 26 bp, Homo sapiens
taaacaccacctctagagaacctgct

SEQ ID NO: 43500 - DNA, 26 bp, Homo sapiens
aaacaccacctctagagaacctgctt

SEQ ID NO: 43501 - DNA, 26 bp, Homo sapiens
aacaccacctctagagaacctgcttt

SEQ ID NO: 43502 - DNA, 26 bp, Homo sapiens
acaccacctctagagaacctgctttt

SEQ ID NO: 43503 - DNA, 26 bp, Homo sapiens
caccacctctagagaacctgctttta

SEQ ID NO: 43504 - DNA, 26 bp, Homo sapiens
accacctctagagaacctgcttttag

SEQ ID NO: 43505 - DNA, 26 bp, Homo sapiens
ccacctctagagaacctgcttttaga

SEQ ID NO: 43506 - DNA, 26 bp, Homo sapiens
cacctctagagaacctgcttttagaa

SEQ ID NO: 43507 - DNA, 26 bp, Homo sapiens
acctctagagaacctgcttttagaag

SEQ ID NO: 43508 - DNA, 26 bp, Homo sapiens
cctctagagaacctgcttttagaagc

SEQ ID NO: 43509 - DNA, 26 bp, Homo sapiens
ctctagagaacctgcttttagaagca

SEQ ID NO: 43510 - DNA, 26 bp, Homo sapiens
tctagagaacctgcttttagaagcac

SEQ ID NO: 43511 - DNA, 26 bp, Homo sapiens
ctagagaacctgcttttagaagcaca

SEQ ID NO: 43512 - DNA, 26 bp, Homo sapiens
tagagaacctgcttttagaagcacaa

SEQ ID NO: 43513 - DNA, 26 bp, Homo sapiens
agagaacctgcttttagaagcacaat

SEQ ID NO: 43514 - DNA, 26 bp, Homo sapiens
gagaacctgcttttagaagcacaatt

SEQ ID NO: 43515 - DNA, 26 bp, Homo sapiens
agaacctgcttttagaagcacaattt

SEQ ID NO: 43516 - DNA, 26 bp, Homo sapiens
gaacctgcttttagaagcacaatttg

SEQ ID NO: 43517 - DNA, 26 bp, Homo sapiens
aacctgcttttagaagcacaatttga

SEQ ID NO: 43518 - DNA, 26 bp, Homo sapiens
acctgcttttagaagcacaatttgat

SEQ ID NO: 43519 - DNA, 26 bp, Homo sapiens
cctgcttttagaagcacaatttgatc

SEQ ID NO: 43520 - DNA, 26 bp, Homo sapiens
ctgcttttagaagcacaatttgatca

SEQ ID NO: 43521 - DNA, 26 bp, Homo sapiens
tgcttttagaagcacaatttgatcat

SEQ ID NO: 43522 - DNA, 26 bp, Homo sapiens
gcttttagaagcacaatttgatcatt

SEQ ID NO: 43523 - DNA, 26 bp, Homo sapiens
cttttagaagcacaatttgatcattt

SEQ ID NO: 43524 - DNA, 26 bp, Homo sapiens
ttttagaagcacaatttgatcatttt

SEQ ID NO: 43525 - DNA, 26 bp, Homo sapiens
tttagaagcacaatttgatcattttg

SEQ ID NO: 43526 - DNA, 26 bp, Homo sapiens
ttagaagcacaatttgatcattttga

SEQ ID NO: 43527 - DNA, 26 bp, Homo sapiens
tagaagcacaatttgatcattttgac

SEQ ID NO: 43528 - DNA, 26 bp, Homo sapiens
agaagcacaatttgatcattttgaca

SEQ ID NO: 43529 - DNA, 26 bp, Homo sapiens
gaagcacaatttgatcattttgacac

SEQ ID NO: 43530 - DNA, 26 bp, Homo sapiens
aagcacaatttgatcattttgacaca

SEQ ID NO: 43531 - DNA, 26 bp, Homo sapiens
agcacaatttgatcattttgacacag

SEQ ID NO: 43532 - DNA, 26 bp, Homo sapiens
gcacaatttgatcattttgacacagt

SEQ ID NO: 43533 - DNA, 26 bp, Homo sapiens
cacaatttgatcattttgacacagtt

SEQ ID NO: 43534 - DNA, 26 bp, Homo sapiens
acaatttgatcattttgacacagttc

SEQ ID NO: 43535 - DNA, 26 bp, Homo sapiens
caatttgatcattttgacacagttcc

SEQ ID NO: 43536 - DNA, 26 bp, Homo sapiens
aatttgatcattttgacacagttcca

SEQ ID NO: 43537 - DNA, 26 bp, Homo sapiens
atttgatcattttgacacagttccat

SEQ ID NO: 43538 - DNA, 26 bp, Homo sapiens
tttgatcattttgacacagttccata

SEQ ID NO: 43539 - DNA, 26 bp, Homo sapiens
ttgatcattttgacacagttccataa

SEQ ID NO: 43540 - DNA, 26 bp, Homo sapiens
tgatcattttgacacagttccataaa

SEQ ID NO: 43541 - DNA, 26 bp, Homo sapiens
gatcattttgacacagttccataaat

SEQ ID NO: 43542 - DNA, 26 bp, Homo sapiens
atcattttgacacagttccataaatc

SEQ ID NO: 43543 - DNA, 26 bp, Homo sapiens
tcattttgacacagttccataaatcc

SEQ ID NO: 43544 - DNA, 26 bp, Homo sapiens
cattttgacacagttccataaatcca

SEQ ID NO: 43545 - DNA, 26 bp, Homo sapiens
attttgacacagttccataaatccat

SEQ ID NO: 43546 - DNA, 26 bp, Homo sapiens
ttttgacacagttccataaatccatc

SEQ ID NO: 43547 - DNA, 26 bp, Homo sapiens
tttgacacagttccataaatccatca

SEQ ID NO: 43548 - DNA, 26 bp, Homo sapiens
ttgacacagttccataaatccatcaa

SEQ ID NO: 43549 - DNA, 26 bp, Homo sapiens
tgacacagttccataaatccatcaat

SEQ ID NO: 43550 - DNA, 26 bp, Homo sapiens
gacacagttccataaatccatcaatg

SEQ ID NO: 43551 - DNA, 26 bp, Homo sapiens
acacagttccataaatccatcaatgc

SEQ ID NO: 43552 - DNA, 26 bp, Homo sapiens
cacagttccataaatccatcaatgcg

SEQ ID NO: 43553 - DNA, 26 bp, Homo sapiens
acagttccataaatccatcaatgcgt

SEQ ID NO: 43554 - DNA, 26 bp, Homo sapiens
cagttccataaatccatcaatgcgtt

SEQ ID NO: 43555 - DNA, 26 bp, Homo sapiens
agttccataaatccatcaatgcgttt

SEQ ID NO: 43556 - DNA, 26 bp, Homo sapiens
gttccataaatccatcaatgcgtttg

SEQ ID NO: 43557 - DNA, 26 bp, Homo sapiens
ttccataaatccatcaatgcgtttgg

SEQ ID NO: 43558 - DNA, 26 bp, Homo sapiens
tccataaatccatcaatgcgtttggc

SEQ ID NO: 43559 - DNA, 26 bp, Homo sapiens
ccataaatccatcaatgcgtttggca

SEQ ID NO: 43560 - DNA, 26 bp, Homo sapiens
cataaatccatcaatgcgtttggcaa

SEQ ID NO: 43561 - DNA, 26 bp, Homo sapiens
ataaatccatcaatgcgtttggcaaa

SEQ ID NO: 43562 - DNA, 26 bp, Homo sapiens
taaatccatcaatgcgtttggcaaac

SEQ ID NO: 43563 - DNA, 26 bp, Homo sapiens
aaatccatcaatgcgtttggcaaact

SEQ ID NO: 43564 - DNA, 26 bp, Homo sapiens
aatccatcaatgcgtttggcaaactc

SEQ ID NO: 43565 - DNA, 26 bp, Homo sapiens
atccatcaatgcgtttggcaaactcc

SEQ ID NO: 43566 - DNA, 26 bp, Homo sapiens
tccatcaatgcgtttggcaaactcca

SEQ ID NO: 43567 - DNA, 26 bp, Homo sapiens
ccatcaatgcgtttggcaaactccac

SEQ ID NO: 43568 - DNA, 26 bp, Homo sapiens
catcaatgcgtttggcaaactccacc

SEQ ID NO: 43569 - DNA, 26 bp, Homo sapiens
atcaatgcgtttggcaaactccacca

SEQ ID NO: 43570 - DNA, 26 bp, Homo sapiens
tcaatgcgtttggcaaactccaccac

SEQ ID NO: 43571 - DNA, 26 bp, Homo sapiens
caatgcgtttggcaaactccaccaca

SEQ ID NO: 43572 - DNA, 26 bp, Homo sapiens
aatgcgtttggcaaactccaccacat

SEQ ID NO: 43573 - DNA, 26 bp, Homo sapiens
atgcgtttggcaaactccaccacata

SEQ ID NO: 43574 - DNA, 26 bp, Homo sapiens
tgcgtttggcaaactccaccacatac

SEQ ID NO: 43575 - DNA, 26 bp, Homo sapiens
gcgtttggcaaactccaccacatact

SEQ ID NO: 43576 - DNA, 26 bp, Homo sapiens
cgtttggcaaactccaccacatactg

SEQ ID NO: 43577 - DNA, 26 bp, Homo sapiens
gtttggcaaactccaccacatactgt

SEQ ID NO: 43578 - DNA, 26 bp, Homo sapiens
tttggcaaactccaccacatactgta

SEQ ID NO: 43579 - DNA, 26 bp, Homo sapiens
ttggcaaactccaccacatactgtat

SEQ ID NO: 43580 - DNA, 26 bp, Homo sapiens
tggcaaactccaccacatactgtata

SEQ ID NO: 43581 - DNA, 26 bp, Homo sapiens
ggcaaactccaccacatactgtatag

SEQ ID NO: 43582 - DNA, 26 bp, Homo sapiens
gcaaactccaccacatactgtatagc

SEQ ID NO: 43583 - DNA, 26 bp, Homo sapiens
caaactccaccacatactgtatagct

SEQ ID NO: 43584 - DNA, 26 bp, Homo sapiens
aaactccaccacatactgtatagctt

SEQ ID NO: 43585 - DNA, 26 bp, Homo sapiens
aactccaccacatactgtatagcttc

SEQ ID NO: 43586 - DNA, 26 bp, Homo sapiens
actccaccacatactgtatagcttct

SEQ ID NO: 43587 - DNA, 26 bp, Homo sapiens
ctccaccacatactgtatagcttctg

SEQ ID NO: 43588 - DNA, 26 bp, Homo sapiens
tccaccacatactgtatagcttctgt

SEQ ID NO: 43589 - DNA, 26 bp, Homo sapiens
ccaccacatactgtatagcttctgta

SEQ ID NO: 43590 - DNA, 26 bp, Homo sapiens
caccacatactgtatagcttctgtaa

SEQ ID NO: 43591 - DNA, 26 bp, Homo sapiens
accacatactgtatagcttctgtaat

SEQ ID NO: 43592 - DNA, 26 bp, Homo sapiens
ccacatactgtatagcttctgtaatt

SEQ ID NO: 43593 - DNA, 26 bp, Homo sapiens
cacatactgtatagcttctgtaattt

SEQ ID NO: 43594 - DNA, 26 bp, Homo sapiens
acatactgtatagcttctgtaatttt

SEQ ID NO: 43595 - DNA, 26 bp, Homo sapiens
catactgtatagcttctgtaattttg

SEQ ID NO: 43596 - DNA, 26 bp, Homo sapiens
atactgtatagcttctgtaattttga

SEQ ID NO: 43597 - DNA, 26 bp, Homo sapiens
tactgtatagcttctgtaattttgat

SEQ ID NO: 43598 - DNA, 26 bp, Homo sapiens
actgtatagcttctgtaattttgatg

SEQ ID NO: 43599 - DNA, 26 bp, Homo sapiens
ctgtatagcttctgtaattttgatgg

SEQ ID NO: 43600 - DNA, 26 bp, Homo sapiens
tgtatagcttctgtaattttgatggc

SEQ ID NO: 43601 - DNA, 26 bp, Homo sapiens
gtatagcttctgtaattttgatggca

SEQ ID NO: 43602 - DNA, 26 bp, Homo sapiens
tatagcttctgtaattttgatggcac

SEQ ID NO: 43603 - DNA, 26 bp, Homo sapiens
atagcttctgtaattttgatggcaca

SEQ ID NO: 43604 - DNA, 26 bp, Homo sapiens
tagcttctgtaattttgatggcacac

SEQ ID NO: 43605 - DNA, 26 bp, Homo sapiens
agcttctgtaattttgatggcacaca

SEQ ID NO: 43606 - DNA, 26 bp, Homo sapiens
gcttctgtaattttgatggcacacaa

SEQ ID NO: 43607 - DNA, 26 bp, Homo sapiens
cttctgtaattttgatggcacacaat

SEQ ID NO: 43608 - DNA, 26 bp, Homo sapiens
ttctgtaattttgatggcacacaatt

SEQ ID NO: 43609 - DNA, 26 bp, Homo sapiens
tctgtaattttgatggcacacaattg

SEQ ID NO: 43610 - DNA, 26 bp, Homo sapiens
ctgtaattttgatggcacacaattgc

SEQ ID NO: 43611 - DNA, 26 bp, Homo sapiens
tgtaattttgatggcacacaattgcc

SEQ ID NO: 43612 - DNA, 26 bp, Homo sapiens
gtaattttgatggcacacaattgcca

SEQ ID NO: 43613 - DNA, 26 bp, Homo sapiens
taattttgatggcacacaattgccac

SEQ ID NO: 43614 - DNA, 26 bp, Homo sapiens
aattttgatggcacacaattgccaca

SEQ ID NO: 43615 - DNA, 26 bp, Homo sapiens
attttgatggcacacaattgccacat

SEQ ID NO: 43616 - DNA, 26 bp, Homo sapiens
ttttgatggcacacaattgccacatc

SEQ ID NO: 43617 - DNA, 26 bp, Homo sapiens
tttgatggcacacaattgccacatca

SEQ ID NO: 43618 - DNA, 26 bp, Homo sapiens
ttgatggcacacaattgccacatcac

SEQ ID NO: 43619 - DNA, 26 bp, Homo sapiens
tgatggcacacaattgccacatcacc

SEQ ID NO: 43620 - DNA, 26 bp, Homo sapiens
gatggcacacaattgccacatcacct

SEQ ID NO: 43621 - DNA, 26 bp, Homo sapiens
atggcacacaattgccacatcacctc

SEQ ID NO: 43622 - DNA, 26 bp, Homo sapiens
tggcacacaattgccacatcacctcc

SEQ ID NO: 43623 - DNA, 26 bp, Homo sapiens
ggcacacaattgccacatcacctccc

SEQ ID NO: 43624 - DNA, 26 bp, Homo sapiens
gcacacaattgccacatcacctcccg

SEQ ID NO: 43625 - DNA, 26 bp, Homo sapiens
cacacaattgccacatcacctcccgc

SEQ ID NO: 43626 - DNA, 26 bp, Homo sapiens
acacaattgccacatcacctcccgct

SEQ ID NO: 43627 - DNA, 26 bp, Homo sapiens
cacaattgccacatcacctcccgctg

SEQ ID NO: 43628 - DNA, 26 bp, Homo sapiens
acaattgccacatcacctcccgctgc

SEQ ID NO: 43629 - DNA, 26 bp, Homo sapiens
caattgccacatcacctcccgctgct

SEQ ID NO: 43630 - DNA, 26 bp, Homo sapiens
aattgccacatcacctcccgctgctt

SEQ ID NO: 43631 - DNA, 26 bp, Homo sapiens
attgccacatcacctcccgctgcttg

SEQ ID NO: 43632 - DNA, 26 bp, Homo sapiens
ttgccacatcacctcccgctgcttgt

SEQ ID NO: 43633 - DNA, 26 bp, Homo sapiens
tgccacatcacctcccgctgcttgtt

SEQ ID NO: 43634 - DNA, 26 bp, Homo sapiens
gccacatcacctcccgctgcttgttt

SEQ ID NO: 43635 - DNA, 26 bp, Homo sapiens
ccacatcacctcccgctgcttgtttt

SEQ ID NO: 43636 - DNA, 26 bp, Homo sapiens
cacatcacctcccgctgcttgttttg

SEQ ID NO: 43637 - DNA, 26 bp, Homo sapiens
acatcacctcccgctgcttgttttga

SEQ ID NO: 43638 - DNA, 26 bp, Homo sapiens
catcacctcccgctgcttgttttgat

SEQ ID NO: 43639 - DNA, 26 bp, Homo sapiens
atcacctcccgctgcttgttttgata

SEQ ID NO: 43640 - DNA, 26 bp, Homo sapiens
tcacctcccgctgcttgttttgatag

SEQ ID NO: 43641 - DNA, 26 bp, Homo sapiens
cacctcccgctgcttgttttgatagt

SEQ ID NO: 43642 - DNA, 26 bp, Homo sapiens
acctcccgctgcttgttttgatagtt

SEQ ID NO: 43643 - DNA, 26 bp, Homo sapiens
cctcccgctgcttgttttgatagttc

SEQ ID NO: 43644 - DNA, 26 bp, Homo sapiens
ctcccgctgcttgttttgatagttct

SEQ ID NO: 43645 - DNA, 26 bp, Homo sapiens
tcccgctgcttgttttgatagttctc

SEQ ID NO: 43646 - DNA, 26 bp, Homo sapiens
cccgctgcttgttttgatagttctca

SEQ ID NO: 43647 - DNA, 26 bp, Homo sapiens
ccgctgcttgttttgatagttctcaa

SEQ ID NO: 43648 - DNA, 26 bp, Homo sapiens
cgctgcttgttttgatagttctcaat

SEQ ID NO: 43649 - DNA, 26 bp, Homo sapiens
gctgcttgttttgatagttctcaatt

SEQ ID NO: 43650 - DNA, 26 bp, Homo sapiens
ctgcttgttttgatagttctcaattt

SEQ ID NO: 43651 - DNA, 26 bp, Homo sapiens
tgcttgttttgatagttctcaatttc

SEQ ID NO: 43652 - DNA, 26 bp, Homo sapiens
gcttgttttgatagttctcaatttct

SEQ ID NO: 43653 - DNA, 26 bp, Homo sapiens
cttgttttgatagttctcaatttctt

SEQ ID NO: 43654 - DNA, 26 bp, Homo sapiens
ttgttttgatagttctcaatttcttc

SEQ ID NO: 43655 - DNA, 26 bp, Homo sapiens
tgttttgatagttctcaatttcttcc

SEQ ID NO: 43656 - DNA, 26 bp, Homo sapiens
gttttgatagttctcaatttcttcct

SEQ ID NO: 43657 - DNA, 26 bp, Homo sapiens
ttttgatagttctcaatttcttcctg

SEQ ID NO: 43658 - DNA, 26 bp, Homo sapiens
tttgatagttctcaatttcttcctgt

SEQ ID NO: 43659 - DNA, 26 bp, Homo sapiens
ttgatagttctcaatttcttcctgta

SEQ ID NO: 43660 - DNA, 26 bp, Homo sapiens
tgatagttctcaatttcttcctgtaa

SEQ ID NO: 43661 - DNA, 26 bp, Homo sapiens
gatagttctcaatttcttcctgtaaa

SEQ ID NO: 43662 - DNA, 26 bp, Homo sapiens
atagttctcaatttcttcctgtaaaa

SEQ ID NO: 43663 - DNA, 26 bp, Homo sapiens
tagttctcaatttcttcctgtaaaaa

SEQ ID NO: 43664 - DNA, 26 bp, Homo sapiens
agttctcaatttcttcctgtaaaaag

SEQ ID NO: 43665 - DNA, 26 bp, Homo sapiens
gttctcaatttcttcctgtaaaaagg

SEQ ID NO: 43666 - DNA, 26 bp, Homo sapiens
ttctcaatttcttcctgtaaaaaggt

SEQ ID NO: 43667 - DNA, 26 bp, Homo sapiens
tctcaatttcttcctgtaaaaaggtc

SEQ ID NO: 43668 - DNA, 26 bp, Homo sapiens
ctcaatttcttcctgtaaaaaggtct

SEQ ID NO: 43669 - DNA, 26 bp, Homo sapiens
tcaatttcttcctgtaaaaaggtctg

SEQ ID NO: 43670 - DNA, 26 bp, Homo sapiens
caatttcttcctgtaaaaaggtctgc

SEQ ID NO: 43671 - DNA, 26 bp, Homo sapiens
aatttcttcctgtaaaaaggtctgcc

SEQ ID NO: 43672 - DNA, 26 bp, Homo sapiens
atttcttcctgtaaaaaggtctgcca

SEQ ID NO: 43673 - DNA, 26 bp, Homo sapiens
tttcttcctgtaaaaaggtctgccac

SEQ ID NO: 43674 - DNA, 26 bp, Homo sapiens
ttcttcctgtaaaaaggtctgccacg

SEQ ID NO: 43675 - DNA, 26 bp, Homo sapiens
tcttcctgtaaaaaggtctgccacgt

SEQ ID NO: 43676 - DNA, 26 bp, Homo sapiens
cttcctgtaaaaaggtctgccacgtt

SEQ ID NO: 43677 - DNA, 26 bp, Homo sapiens
ttcctgtaaaaaggtctgccacgtta

SEQ ID NO: 43678 - DNA, 26 bp, Homo sapiens
tcctgtaaaaaggtctgccacgttat

SEQ ID NO: 43679 - DNA, 26 bp, Homo sapiens
cctgtaaaaaggtctgccacgttatc

SEQ ID NO: 43680 - DNA, 26 bp, Homo sapiens
ctgtaaaaaggtctgccacgttatct

SEQ ID NO: 43681 - DNA, 26 bp, Homo sapiens
tgtaaaaaggtctgccacgttatctg

SEQ ID NO: 43682 - DNA, 26 bp, Homo sapiens
gtaaaaaggtctgccacgttatctgc

SEQ ID NO: 43683 - DNA, 26 bp, Homo sapiens
taaaaaggtctgccacgttatctgct

SEQ ID NO: 43684 - DNA, 26 bp, Homo sapiens
aaaaaggtctgccacgttatctgctg

SEQ ID NO: 43685 - DNA, 26 bp, Homo sapiens
aaaaggtctgccacgttatctgctgg

SEQ ID NO: 43686 - DNA, 26 bp, Homo sapiens
aaaggtctgccacgttatctgctgga

SEQ ID NO: 43687 - DNA, 26 bp, Homo sapiens
aaggtctgccacgttatctgctggag

SEQ ID NO: 43688 - DNA, 26 bp, Homo sapiens
aggtctgccacgttatctgctggagc

SEQ ID NO: 43689 - DNA, 26 bp, Homo sapiens
ggtctgccacgttatctgctggagct

SEQ ID NO: 43690 - DNA, 26 bp, Homo sapiens
gtctgccacgttatctgctggagctc

SEQ ID NO: 43691 - DNA, 26 bp, Homo sapiens
tctgccacgttatctgctggagctct

SEQ ID NO: 43692 - DNA, 26 bp, Homo sapiens
ctgccacgttatctgctggagctctt

SEQ ID NO: 43693 - DNA, 26 bp, Homo sapiens
tgccacgttatctgctggagctcttc

SEQ ID NO: 43694 - DNA, 26 bp, Homo sapiens
gccacgttatctgctggagctcttct

SEQ ID NO: 43695 - DNA, 26 bp, Homo sapiens
ccacgttatctgctggagctcttctc

SEQ ID NO: 43696 - DNA, 26 bp, Homo sapiens
cacgttatctgctggagctcttctct

SEQ ID NO: 43697 - DNA, 26 bp, Homo sapiens
acgttatctgctggagctcttctctc

SEQ ID NO: 43698 - DNA, 26 bp, Homo sapiens
cgttatctgctggagctcttctctca

SEQ ID NO: 43699 - DNA, 26 bp, Homo sapiens
gttatctgctggagctcttctctcaa

SEQ ID NO: 43700 - DNA, 26 bp, Homo sapiens
ttatctgctggagctcttctctcaag

SEQ ID NO: 43701 - DNA, 26 bp, Homo sapiens
tatctgctggagctcttctctcaagt

SEQ ID NO: 43702 - DNA, 26 bp, Homo sapiens
atctgctggagctcttctctcaagta

SEQ ID NO: 43703 - DNA, 26 bp, Homo sapiens
tctgctggagctcttctctcaagtat

SEQ ID NO: 43704 - DNA, 26 bp, Homo sapiens
ctgctggagctcttctctcaagtatt

SEQ ID NO: 43705 - DNA, 26 bp, Homo sapiens
tgctggagctcttctctcaagtattg

SEQ ID NO: 43706 - DNA, 26 bp, Homo sapiens
gctggagctcttctctcaagtattgg

SEQ ID NO: 43707 - DNA, 26 bp, Homo sapiens
ctggagctcttctctcaagtattggc

SEQ ID NO: 43708 - DNA, 26 bp, Homo sapiens
tggagctcttctctcaagtattggca

SEQ ID NO: 43709 - DNA, 26 bp, Homo sapiens
ggagctcttctctcaagtattggcag

SEQ ID NO: 43710 - DNA, 26 bp, Homo sapiens
gagctcttctctcaagtattggcagg

SEQ ID NO: 43711 - DNA, 26 bp, Homo sapiens
agctcttctctcaagtattggcaggt

SEQ ID NO: 43712 - DNA, 26 bp, Homo sapiens
gctcttctctcaagtattggcaggtt

SEQ ID NO: 43713 - DNA, 26 bp, Homo sapiens
ctcttctctcaagtattggcaggttt

SEQ ID NO: 43714 - DNA, 26 bp, Homo sapiens
tcttctctcaagtattggcaggtttc

SEQ ID NO: 43715 - DNA, 26 bp, Homo sapiens
cttctctcaagtattggcaggtttcc

SEQ ID NO: 43716 - DNA, 26 bp, Homo sapiens
ttctctcaagtattggcaggtttcca

SEQ ID NO: 43717 - DNA, 26 bp, Homo sapiens
tctctcaagtattggcaggtttccag

SEQ ID NO: 43718 - DNA, 26 bp, Homo sapiens
ctctcaagtattggcaggtttccaga

SEQ ID NO: 43719 - DNA, 26 bp, Homo sapiens
tctcaagtattggcaggtttccagat

SEQ ID NO: 43720 - DNA, 26 bp, Homo sapiens
ctcaagtattggcaggtttccagatg

SEQ ID NO: 43721 - DNA, 26 bp, Homo sapiens
tcaagtattggcaggtttccagatgc

SEQ ID NO: 43722 - DNA, 26 bp, Homo sapiens
caagtattggcaggtttccagatgcg

SEQ ID NO: 43723 - DNA, 26 bp, Homo sapiens
aagtattggcaggtttccagatgcga

SEQ ID NO: 43724 - DNA, 26 bp, Homo sapiens
agtattggcaggtttccagatgcgat

SEQ ID NO: 43725 - DNA, 26 bp, Homo sapiens
gtattggcaggtttccagatgcgatt

SEQ ID NO: 43726 - DNA, 26 bp, Homo sapiens
tattggcaggtttccagatgcgattt

SEQ ID NO: 43727 - DNA, 26 bp, Homo sapiens
attggcaggtttccagatgcgattta

SEQ ID NO: 43728 - DNA, 26 bp, Homo sapiens
ttggcaggtttccagatgcgatttag

SEQ ID NO: 43729 - DNA, 26 bp, Homo sapiens
tggcaggtttccagatgcgatttaga

SEQ ID NO: 43730 - DNA, 26 bp, Homo sapiens
ggcaggtttccagatgcgatttagat

SEQ ID NO: 43731 - DNA, 26 bp, Homo sapiens
gcaggtttccagatgcgatttagata

SEQ ID NO: 43732 - DNA, 26 bp, Homo sapiens
caggtttccagatgcgatttagatat

SEQ ID NO: 43733 - DNA, 26 bp, Homo sapiens
aggtttccagatgcgatttagatata

SEQ ID NO: 43734 - DNA, 26 bp, Homo sapiens
ggtttccagatgcgatttagatatat

SEQ ID NO: 43735 - DNA, 26 bp, Homo sapiens
gtttccagatgcgatttagatatatt

SEQ ID NO: 43736 - DNA, 26 bp, Homo sapiens
tttccagatgcgatttagatatattc

SEQ ID NO: 43737 - DNA, 26 bp, Homo sapiens
ttccagatgcgatttagatatattct

SEQ ID NO: 43738 - DNA, 26 bp, Homo sapiens
tccagatgcgatttagatatattctg

SEQ ID NO: 43739 - DNA, 26 bp, Homo sapiens
ccagatgcgatttagatatattctgt

SEQ ID NO: 43740 - DNA, 26 bp, Homo sapiens
cagatgcgatttagatatattctgtg

SEQ ID NO: 43741 - DNA, 26 bp, Homo sapiens
agatgcgatttagatatattctgtgc

SEQ ID NO: 43742 - DNA, 26 bp, Homo sapiens
gatgcgatttagatatattctgtgca

SEQ ID NO: 43743 - DNA, 26 bp, Homo sapiens
atgcgatttagatatattctgtgcaa

SEQ ID NO: 43744 - DNA, 26 bp, Homo sapiens
tgcgatttagatatattctgtgcaag

SEQ ID NO: 43745 - DNA, 26 bp, Homo sapiens
gcgatttagatatattctgtgcaagg

SEQ ID NO: 43746 - DNA, 26 bp, Homo sapiens
cgatttagatatattctgtgcaaggt

SEQ ID NO: 43747 - DNA, 26 bp, Homo sapiens
gatttagatatattctgtgcaaggtg

SEQ ID NO: 43748 - DNA, 26 bp, Homo sapiens
atttagatatattctgtgcaaggtgt

SEQ ID NO: 43749 - DNA, 26 bp, Homo sapiens
tttagatatattctgtgcaaggtgtt

SEQ ID NO: 43750 - DNA, 26 bp, Homo sapiens
ttagatatattctgtgcaaggtgttc

SEQ ID NO: 43751 - DNA, 26 bp, Homo sapiens
tagatatattctgtgcaaggtgttct

SEQ ID NO: 43752 - DNA, 26 bp, Homo sapiens
agatatattctgtgcaaggtgttcta

SEQ ID NO: 43753 - DNA, 26 bp, Homo sapiens
gatatattctgtgcaaggtgttctaa

SEQ ID NO: 43754 - DNA, 26 bp, Homo sapiens
atatattctgtgcaaggtgttctaat

SEQ ID NO: 43755 - DNA, 26 bp, Homo sapiens
tatattctgtgcaaggtgttctaatt

SEQ ID NO: 43756 - DNA, 26 bp, Homo sapiens
atattctgtgcaaggtgttctaattc

SEQ ID NO: 43757 - DNA, 26 bp, Homo sapiens
tattctgtgcaaggtgttctaattct

SEQ ID NO: 43758 - DNA, 26 bp, Homo sapiens
attctgtgcaaggtgttctaattctg

SEQ ID NO: 43759 - DNA, 26 bp, Homo sapiens
ttctgtgcaaggtgttctaattctgc

SEQ ID NO: 43760 - DNA, 26 bp, Homo sapiens
tctgtgcaaggtgttctaattctgcc

SEQ ID NO: 43761 - DNA, 26 bp, Homo sapiens
ctgtgcaaggtgttctaattctgcca

SEQ ID NO: 43762 - DNA, 26 bp, Homo sapiens
tgtgcaaggtgttctaattctgccat

SEQ ID NO: 43763 - DNA, 26 bp, Homo sapiens
gtgcaaggtgttctaattctgccatg

SEQ ID NO: 43764 - DNA, 26 bp, Homo sapiens
tgcaaggtgttctaattctgccatgg

SEQ ID NO: 43765 - DNA, 26 bp, Homo sapiens
gcaaggtgttctaattctgccatgga

SEQ ID NO: 43766 - DNA, 26 bp, Homo sapiens
caaggtgttctaattctgccatggac

SEQ ID NO: 43767 - DNA, 26 bp, Homo sapiens
aaggtgttctaattctgccatggaca

SEQ ID NO: 43768 - DNA, 26 bp, Homo sapiens
aggtgttctaattctgccatggacac

SEQ ID NO: 43769 - DNA, 26 bp, Homo sapiens
ggtgttctaattctgccatggacaca

SEQ ID NO: 43770 - DNA, 26 bp, Homo sapiens
gtgttctaattctgccatggacacag

SEQ ID NO: 43771 - DNA, 26 bp, Homo sapiens
tgttctaattctgccatggacacagt

SEQ ID NO: 43772 - DNA, 26 bp, Homo sapiens
gttctaattctgccatggacacagtt

SEQ ID NO: 43773 - DNA, 26 bp, Homo sapiens
ttctaattctgccatggacacagttg

SEQ ID NO: 43774 - DNA, 26 bp, Homo sapiens
tctaattctgccatggacacagttgg

SEQ ID NO: 43775 - DNA, 26 bp, Homo sapiens
ctaattctgccatggacacagttggg

SEQ ID NO: 43776 - DNA, 26 bp, Homo sapiens
taattctgccatggacacagttgggg

SEQ ID NO: 43777 - DNA, 26 bp, Homo sapiens
aattctgccatggacacagttgggga

SEQ ID NO: 43778 - DNA, 26 bp, Homo sapiens
attctgccatggacacagttggggaa

SEQ ID NO: 43779 - DNA, 26 bp, Homo sapiens
ttctgccatggacacagttggggaag

SEQ ID NO: 43780 - DNA, 26 bp, Homo sapiens
tctgccatggacacagttggggaagt

SEQ ID NO: 43781 - DNA, 26 bp, Homo sapiens
ctgccatggacacagttggggaagtc

SEQ ID NO: 43782 - DNA, 26 bp, Homo sapiens
tgccatggacacagttggggaagtct

SEQ ID NO: 43783 - DNA, 26 bp, Homo sapiens
gccatggacacagttggggaagtctc

SEQ ID NO: 43784 - DNA, 26 bp, Homo sapiens
ccatggacacagttggggaagtctcg

SEQ ID NO: 43785 - DNA, 26 bp, Homo sapiens
catggacacagttggggaagtctcgc

SEQ ID NO: 43786 - DNA, 26 bp, Homo sapiens
atggacacagttggggaagtctcgcc

SEQ ID NO: 43787 - DNA, 26 bp, Homo sapiens
tggacacagttggggaagtctcgccg

SEQ ID NO: 43788 - DNA, 26 bp, Homo sapiens
ggacacagttggggaagtctcgccgt

SEQ ID NO: 43789 - DNA, 26 bp, Homo sapiens
gacacagttggggaagtctcgccgtt

SEQ ID NO: 43790 - DNA, 26 bp, Homo sapiens
acacagttggggaagtctcgccgttg

SEQ ID NO: 43791 - DNA, 26 bp, Homo sapiens
cacagttggggaagtctcgccgttgg

SEQ ID NO: 43792 - DNA, 26 bp, Homo sapiens
acagttggggaagtctcgccgttggt

SEQ ID NO: 43793 - DNA, 26 bp, Homo sapiens
cagttggggaagtctcgccgttggtg

SEQ ID NO: 43794 - DNA, 26 bp, Homo sapiens
agttggggaagtctcgccgttggtga

SEQ ID NO: 43795 - DNA, 26 bp, Homo sapiens
gttggggaagtctcgccgttggtgaa

SEQ ID NO: 43796 - DNA, 26 bp, Homo sapiens
ttggggaagtctcgccgttggtgaac

SEQ ID NO: 43797 - DNA, 26 bp, Homo sapiens
tggggaagtctcgccgttggtgaacg

SEQ ID NO: 43798 - DNA, 26 bp, Homo sapiens
ggggaagtctcgccgttggtgaacga

SEQ ID NO: 43799 - DNA, 26 bp, Homo sapiens
gggaagtctcgccgttggtgaacgaa

SEQ ID NO: 43800 - DNA, 26 bp, Homo sapiens
ggaagtctcgccgttggtgaacgaac

SEQ ID NO: 43801 - DNA, 26 bp, Homo sapiens
gaagtctcgccgttggtgaacgaaca

SEQ ID NO: 43802 - DNA, 26 bp, Homo sapiens
aagtctcgccgttggtgaacgaacag

SEQ ID NO: 43803 - DNA, 26 bp, Homo sapiens
agtctcgccgttggtgaacgaacagt

SEQ ID NO: 43804 - DNA, 26 bp, Homo sapiens
gtctcgccgttggtgaacgaacagta

SEQ ID NO: 43805 - DNA, 26 bp, Homo sapiens
tctcgccgttggtgaacgaacagtag

SEQ ID NO: 43806 - DNA, 26 bp, Homo sapiens
ctcgccgttggtgaacgaacagtagg

SEQ ID NO: 43807 - DNA, 26 bp, Homo sapiens
tcgccgttggtgaacgaacagtaggg

SEQ ID NO: 43808 - DNA, 26 bp, Homo sapiens
cgccgttggtgaacgaacagtaggga

SEQ ID NO: 43809 - DNA, 26 bp, Homo sapiens
gccgttggtgaacgaacagtagggaa

SEQ ID NO: 43810 - DNA, 26 bp, Homo sapiens
ccgttggtgaacgaacagtagggaaa

SEQ ID NO: 43811 - DNA, 26 bp, Homo sapiens
cgttggtgaacgaacagtagggaaag

SEQ ID NO: 43812 - DNA, 26 bp, Homo sapiens
gttggtgaacgaacagtagggaaaga

SEQ ID NO: 43813 - DNA, 26 bp, Homo sapiens
ttggtgaacgaacagtagggaaagaa

SEQ ID NO: 43814 - DNA, 26 bp, Homo sapiens
tggtgaacgaacagtagggaaagaag

SEQ ID NO: 43815 - DNA, 26 bp, Homo sapiens
ggtgaacgaacagtagggaaagaagc

SEQ ID NO: 43816 - DNA, 26 bp, Homo sapiens
gtgaacgaacagtagggaaagaagcc

SEQ ID NO: 43817 - DNA, 26 bp, Homo sapiens
tgaacgaacagtagggaaagaagcct

SEQ ID NO: 43818 - DNA, 26 bp, Homo sapiens
gaacgaacagtagggaaagaagcctg

SEQ ID NO: 43819 - DNA, 26 bp, Homo sapiens
aacgaacagtagggaaagaagcctga

SEQ ID NO: 43820 - DNA, 26 bp, Homo sapiens
acgaacagtagggaaagaagcctgat

SEQ ID NO: 43821 - DNA, 26 bp, Homo sapiens
cgaacagtagggaaagaagcctgatg

SEQ ID NO: 43822 - DNA, 26 bp, Homo sapiens
gaacagtagggaaagaagcctgatgc

SEQ ID NO: 43823 - DNA, 26 bp, Homo sapiens
aacagtagggaaagaagcctgatgct

SEQ ID NO: 43824 - DNA, 26 bp, Homo sapiens
acagtagggaaagaagcctgatgctg

SEQ ID NO: 43825 - DNA, 26 bp, Homo sapiens
cagtagggaaagaagcctgatgctgg

SEQ ID NO: 43826 - DNA, 26 bp, Homo sapiens
agtagggaaagaagcctgatgctggt

SEQ ID NO: 43827 - DNA, 26 bp, Homo sapiens
gtagggaaagaagcctgatgctggtg

SEQ ID NO: 43828 - DNA, 26 bp, Homo sapiens
tagggaaagaagcctgatgctggtgt

SEQ ID NO: 43829 - DNA, 26 bp, Homo sapiens
agggaaagaagcctgatgctggtgtg

SEQ ID NO: 43830 - DNA, 26 bp, Homo sapiens
gggaaagaagcctgatgctggtgtgt

SEQ ID NO: 43831 - DNA, 26 bp, Homo sapiens
ggaaagaagcctgatgctggtgtgta

SEQ ID NO: 43832 - DNA, 26 bp, Homo sapiens
gaaagaagcctgatgctggtgtgtag

SEQ ID NO: 43833 - DNA, 26 bp, Homo sapiens
aaagaagcctgatgctggtgtgtagt

SEQ ID NO: 43834 - DNA, 26 bp, Homo sapiens
aagaagcctgatgctggtgtgtagtc

SEQ ID NO: 43835 - DNA, 26 bp, Homo sapiens
agaagcctgatgctggtgtgtagtca

SEQ ID NO: 43836 - DNA, 26 bp, Homo sapiens
gaagcctgatgctggtgtgtagtcac

SEQ ID NO: 43837 - DNA, 26 bp, Homo sapiens
aagcctgatgctggtgtgtagtcaca

SEQ ID NO: 43838 - DNA, 26 bp, Homo sapiens
agcctgatgctggtgtgtagtcacat

SEQ ID NO: 43839 - DNA, 26 bp, Homo sapiens
gcctgatgctggtgtgtagtcacata

SEQ ID NO: 43840 - DNA, 26 bp, Homo sapiens
cctgatgctggtgtgtagtcacatat

SEQ ID NO: 43841 - DNA, 26 bp, Homo sapiens
ctgatgctggtgtgtagtcacatatt

SEQ ID NO: 43842 - DNA, 26 bp, Homo sapiens
tgatgctggtgtgtagtcacatattg

SEQ ID NO: 43843 - DNA, 26 bp, Homo sapiens
gatgctggtgtgtagtcacatattgg

SEQ ID NO: 43844 - DNA, 26 bp, Homo sapiens
atgctggtgtgtagtcacatattggt

SEQ ID NO: 43845 - DNA, 26 bp, Homo sapiens
tgctggtgtgtagtcacatattggtt

SEQ ID NO: 43846 - DNA, 26 bp, Homo sapiens
gctggtgtgtagtcacatattggttc

SEQ ID NO: 43847 - DNA, 26 bp, Homo sapiens
ctggtgtgtagtcacatattggttct

SEQ ID NO: 43848 - DNA, 26 bp, Homo sapiens
tggtgtgtagtcacatattggttctg

SEQ ID NO: 43849 - DNA, 26 bp, Homo sapiens
ggtgtgtagtcacatattggttctgg

SEQ ID NO: 43850 - DNA, 26 bp, Homo sapiens
gtgtgtagtcacatattggttctggt

SEQ ID NO: 43851 - DNA, 26 bp, Homo sapiens
tgtgtagtcacatattggttctggtt

SEQ ID NO: 43852 - DNA, 26 bp, Homo sapiens
gtgtagtcacatattggttctggttt

SEQ ID NO: 43853 - DNA, 26 bp, Homo sapiens
tgtagtcacatattggttctggtttg

SEQ ID NO: 43854 - DNA, 26 bp, Homo sapiens
gtagtcacatattggttctggtttga

SEQ ID NO: 43855 - DNA, 26 bp, Homo sapiens
tagtcacatattggttctggtttgat

SEQ ID NO: 43856 - DNA, 26 bp, Homo sapiens
agtcacatattggttctggtttgatt

SEQ ID NO: 43857 - DNA, 26 bp, Homo sapiens
gtcacatattggttctggtttgattc

SEQ ID NO: 43858 - DNA, 26 bp, Homo sapiens
tcacatattggttctggtttgattcc

SEQ ID NO: 43859 - DNA, 26 bp, Homo sapiens
cacatattggttctggtttgattcca

SEQ ID NO: 43860 - DNA, 26 bp, Homo sapiens
acatattggttctggtttgattccat

SEQ ID NO: 43861 - DNA, 26 bp, Homo sapiens
catattggttctggtttgattccatt

SEQ ID NO: 43862 - DNA, 26 bp, Homo sapiens
atattggttctggtttgattccattg

SEQ ID NO: 43863 - DNA, 26 bp, Homo sapiens
tattggttctggtttgattccattga

SEQ ID NO: 43864 - DNA, 26 bp, Homo sapiens
attggttctggtttgattccattgat

SEQ ID NO: 43865 - DNA, 26 bp, Homo sapiens
ttggttctggtttgattccattgata

SEQ ID NO: 43866 - DNA, 26 bp, Homo sapiens
tggttctggtttgattccattgatat

SEQ ID NO: 43867 - DNA, 26 bp, Homo sapiens
ggttctggtttgattccattgatatc

SEQ ID NO: 43868 - DNA, 26 bp, Homo sapiens
gttctggtttgattccattgatatca

SEQ ID NO: 43869 - DNA, 26 bp, Homo sapiens
ttctggtttgattccattgatatcaa

SEQ ID NO: 43870 - DNA, 26 bp, Homo sapiens
tctggtttgattccattgatatcaag

SEQ ID NO: 43871 - DNA, 26 bp, Homo sapiens
ctggtttgattccattgatatcaaga

SEQ ID NO: 43872 - DNA, 26 bp, Homo sapiens
tggtttgattccattgatatcaagac

SEQ ID NO: 43873 - DNA, 26 bp, Homo sapiens
ggtttgattccattgatatcaagacc

SEQ ID NO: 43874 - DNA, 26 bp, Homo sapiens
gtttgattccattgatatcaagacct

SEQ ID NO: 43875 - DNA, 26 bp, Homo sapiens
tttgattccattgatatcaagacctg

SEQ ID NO: 43876 - DNA, 26 bp, Homo sapiens
ttgattccattgatatcaagacctga

SEQ ID NO: 43877 - DNA, 26 bp, Homo sapiens
tgattccattgatatcaagacctgac

SEQ ID NO: 43878 - DNA, 26 bp, Homo sapiens
gattccattgatatcaagacctgact

SEQ ID NO: 43879 - DNA, 26 bp, Homo sapiens
attccattgatatcaagacctgactg

SEQ ID NO: 43880 - DNA, 26 bp, Homo sapiens
ttccattgatatcaagacctgactgg

SEQ ID NO: 43881 - DNA, 26 bp, Homo sapiens
tccattgatatcaagacctgactggt

SEQ ID NO: 43882 - DNA, 26 bp, Homo sapiens
ccattgatatcaagacctgactggtc

SEQ ID NO: 43883 - DNA, 26 bp, Homo sapiens
cattgatatcaagacctgactggtct

SEQ ID NO: 43884 - DNA, 26 bp, Homo sapiens
attgatatcaagacctgactggtctg

SEQ ID NO: 43885 - DNA, 26 bp, Homo sapiens
ttgatatcaagacctgactggtctgg

SEQ ID NO: 43886 - DNA, 26 bp, Homo sapiens
tgatatcaagacctgactggtctggg

SEQ ID NO: 43887 - DNA, 26 bp, Homo sapiens
gatatcaagacctgactggtctgggg

SEQ ID NO: 43888 - DNA, 26 bp, Homo sapiens
atatcaagacctgactggtctgggga

SEQ ID NO: 43889 - DNA, 26 bp, Homo sapiens
tatcaagacctgactggtctggggaa

SEQ ID NO: 43890 - DNA, 26 bp, Homo sapiens
atcaagacctgactggtctggggaag

SEQ ID NO: 43891 - DNA, 26 bp, Homo sapiens
tcaagacctgactggtctggggaagg

SEQ ID NO: 43892 - DNA, 26 bp, Homo sapiens
caagacctgactggtctggggaaggc

SEQ ID NO: 43893 - DNA, 26 bp, Homo sapiens
aagacctgactggtctggggaaggct

SEQ ID NO: 43894 - DNA, 26 bp, Homo sapiens
agacctgactggtctggggaaggctg

SEQ ID NO: 43895 - DNA, 26 bp, Homo sapiens
gacctgactggtctggggaaggctgt

SEQ ID NO: 43896 - DNA, 26 bp, Homo sapiens
acctgactggtctggggaaggctgta

SEQ ID NO: 43897 - DNA, 26 bp, Homo sapiens
cctgactggtctggggaaggctgtat

SEQ ID NO: 43898 - DNA, 26 bp, Homo sapiens
ctgactggtctggggaaggctgtatg

SEQ ID NO: 43899 - DNA, 26 bp, Homo sapiens
tgactggtctggggaaggctgtatgt

SEQ ID NO: 43900 - DNA, 26 bp, Homo sapiens
gactggtctggggaaggctgtatgtc

SEQ ID NO: 43901 - DNA, 26 bp, Homo sapiens
actggtctggggaaggctgtatgtcc

SEQ ID NO: 43902 - DNA, 26 bp, Homo sapiens
ctggtctggggaaggctgtatgtcca

SEQ ID NO: 43903 - DNA, 26 bp, Homo sapiens
tggtctggggaaggctgtatgtccag

SEQ ID NO: 43904 - DNA, 26 bp, Homo sapiens
ggtctggggaaggctgtatgtccagg

SEQ ID NO: 43905 - DNA, 26 bp, Homo sapiens
gtctggggaaggctgtatgtccaggt

SEQ ID NO: 43906 - DNA, 26 bp, Homo sapiens
tctggggaaggctgtatgtccaggta

SEQ ID NO: 43907 - DNA, 26 bp, Homo sapiens
ctggggaaggctgtatgtccaggtag

SEQ ID NO: 43908 - DNA, 26 bp, Homo sapiens
tggggaaggctgtatgtccaggtaga

SEQ ID NO: 43909 - DNA, 26 bp, Homo sapiens
ggggaaggctgtatgtccaggtagaa

SEQ ID NO: 43910 - DNA, 26 bp, Homo sapiens
gggaaggctgtatgtccaggtagaag

SEQ ID NO: 43911 - DNA, 26 bp, Homo sapiens
ggaaggctgtatgtccaggtagaagc

SEQ ID NO: 43912 - DNA, 26 bp, Homo sapiens
gaaggctgtatgtccaggtagaagct

SEQ ID NO: 43913 - DNA, 26 bp, Homo sapiens
aaggctgtatgtccaggtagaagctg

SEQ ID NO: 43914 - DNA, 26 bp, Homo sapiens
aggctgtatgtccaggtagaagctgc

SEQ ID NO: 43915 - DNA, 26 bp, Homo sapiens
ggctgtatgtccaggtagaagctgct

SEQ ID NO: 43916 - DNA, 26 bp, Homo sapiens
gctgtatgtccaggtagaagctgctg

SEQ ID NO: 43917 - DNA, 26 bp, Homo sapiens
ctgtatgtccaggtagaagctgctga

SEQ ID NO: 43918 - DNA, 26 bp, Homo sapiens
tgtatgtccaggtagaagctgctgac

SEQ ID NO: 43919 - DNA, 26 bp, Homo sapiens
gtatgtccaggtagaagctgctgacg

SEQ ID NO: 43920 - DNA, 26 bp, Homo sapiens
tatgtccaggtagaagctgctgacgg

SEQ ID NO: 43921 - DNA, 26 bp, Homo sapiens
atgtccaggtagaagctgctgacggc

SEQ ID NO: 43922 - DNA, 26 bp, Homo sapiens
tgtccaggtagaagctgctgacggcg

SEQ ID NO: 43923 - DNA, 26 bp, Homo sapiens
gtccaggtagaagctgctgacggcgg

SEQ ID NO: 43924 - DNA, 26 bp, Homo sapiens
tccaggtagaagctgctgacggcgga

SEQ ID NO: 43925 - DNA, 26 bp, Homo sapiens
ccaggtagaagctgctgacggcggag

SEQ ID NO: 43926 - DNA, 26 bp, Homo sapiens
caggtagaagctgctgacggcggagt

SEQ ID NO: 43927 - DNA, 26 bp, Homo sapiens
aggtagaagctgctgacggcggagtc

SEQ ID NO: 43928 - DNA, 26 bp, Homo sapiens
ggtagaagctgctgacggcggagtct

SEQ ID NO: 43929 - DNA, 26 bp, Homo sapiens
gtagaagctgctgacggcggagtctg

SEQ ID NO: 43930 - DNA, 26 bp, Homo sapiens
tagaagctgctgacggcggagtctgc

SEQ ID NO: 43931 - DNA, 26 bp, Homo sapiens
agaagctgctgacggcggagtctgcc

SEQ ID NO: 43932 - DNA, 26 bp, Homo sapiens
gaagctgctgacggcggagtctgcct

SEQ ID NO: 43933 - DNA, 26 bp, Homo sapiens
aagctgctgacggcggagtctgcctt

SEQ ID NO: 43934 - DNA, 26 bp, Homo sapiens
agctgctgacggcggagtctgcctta

SEQ ID NO: 43935 - DNA, 26 bp, Homo sapiens
gctgctgacggcggagtctgccttac

SEQ ID NO: 43936 - DNA, 26 bp, Homo sapiens
ctgctgacggcggagtctgccttact

SEQ ID NO: 43937 - DNA, 26 bp, Homo sapiens
tgctgacggcggagtctgccttactc

SEQ ID NO: 43938 - DNA, 26 bp, Homo sapiens
gctgacggcggagtctgccttactcc

SEQ ID NO: 43939 - DNA, 26 bp, Homo sapiens
ctgacggcggagtctgccttactccc

SEQ ID NO: 43940 - DNA, 26 bp, Homo sapiens
tgacggcggagtctgccttactcccc

SEQ ID NO: 43941 - DNA, 26 bp, Homo sapiens
gacggcggagtctgccttactcccct

SEQ ID NO: 43942 - DNA, 26 bp, Homo sapiens
acggcggagtctgccttactcccctc

SEQ ID NO: 43943 - DNA, 26 bp, Homo sapiens
cggcggagtctgccttactcccctca

SEQ ID NO: 43944 - DNA, 26 bp, Homo sapiens
ggcggagtctgccttactcccctcag

SEQ ID NO: 43945 - DNA, 26 bp, Homo sapiens
gcggagtctgccttactcccctcagg

SEQ ID NO: 43946 - DNA, 26 bp, Homo sapiens
cggagtctgccttactcccctcaggg

SEQ ID NO: 43947 - DNA, 26 bp, Homo sapiens
ggagtctgccttactcccctcagggg

SEQ ID NO: 43948 - DNA, 26 bp, Homo sapiens
gagtctgccttactcccctcaggggt

SEQ ID NO: 43949 - DNA, 26 bp, Homo sapiens
agtctgccttactcccctcaggggtg

SEQ ID NO: 43950 - DNA, 26 bp, Homo sapiens
gtctgccttactcccctcaggggtgt

SEQ ID NO: 43951 - DNA, 26 bp, Homo sapiens
tctgccttactcccctcaggggtgtg

SEQ ID NO: 43952 - DNA, 26 bp, Homo sapiens
ctgccttactcccctcaggggtgtgc

SEQ ID NO: 43953 - DNA, 26 bp, Homo sapiens
tgccttactcccctcaggggtgtgcc

SEQ ID NO: 43954 - DNA, 26 bp, Homo sapiens
gccttactcccctcaggggtgtgccc

SEQ ID NO: 43955 - DNA, 26 bp, Homo sapiens
ccttactcccctcaggggtgtgcccg

SEQ ID NO: 43956 - DNA, 26 bp, Homo sapiens
cttactcccctcaggggtgtgcccgt

SEQ ID NO: 43957 - DNA, 26 bp, Homo sapiens
ttactcccctcaggggtgtgcccgtc

SEQ ID NO: 43958 - DNA, 26 bp, Homo sapiens
tactcccctcaggggtgtgcccgtca

SEQ ID NO: 43959 - DNA, 26 bp, Homo sapiens
actcccctcaggggtgtgcccgtcaa

SEQ ID NO: 43960 - DNA, 26 bp, Homo sapiens
ctcccctcaggggtgtgcccgtcaat

SEQ ID NO: 43961 - DNA, 26 bp, Homo sapiens
tcccctcaggggtgtgcccgtcaatg

SEQ ID NO: 43962 - DNA, 26 bp, Homo sapiens
cccctcaggggtgtgcccgtcaatgt

SEQ ID NO: 43963 - DNA, 26 bp, Homo sapiens
ccctcaggggtgtgcccgtcaatgta

SEQ ID NO: 43964 - DNA, 26 bp, Homo sapiens
cctcaggggtgtgcccgtcaatgtag

SEQ ID NO: 43965 - DNA, 26 bp, Homo sapiens
ctcaggggtgtgcccgtcaatgtagt

SEQ ID NO: 43966 - DNA, 26 bp, Homo sapiens
tcaggggtgtgcccgtcaatgtagtt

SEQ ID NO: 43967 - DNA, 26 bp, Homo sapiens
caggggtgtgcccgtcaatgtagtta

SEQ ID NO: 43968 - DNA, 26 bp, Homo sapiens
aggggtgtgcccgtcaatgtagttac

SEQ ID NO: 43969 - DNA, 26 bp, Homo sapiens
ggggtgtgcccgtcaatgtagttact

SEQ ID NO: 43970 - DNA, 26 bp, Homo sapiens
gggtgtgcccgtcaatgtagttactg

SEQ ID NO: 43971 - DNA, 26 bp, Homo sapiens
ggtgtgcccgtcaatgtagttactga

SEQ ID NO: 43972 - DNA, 26 bp, Homo sapiens
gtgtgcccgtcaatgtagttactgag

SEQ ID NO: 43973 - DNA, 26 bp, Homo sapiens
tgtgcccgtcaatgtagttactgagg

SEQ ID NO: 43974 - DNA, 26 bp, Homo sapiens
gtgcccgtcaatgtagttactgaggt

SEQ ID NO: 43975 - DNA, 26 bp, Homo sapiens
tgcccgtcaatgtagttactgaggtc

SEQ ID NO: 43976 - DNA, 26 bp, Homo sapiens
gcccgtcaatgtagttactgaggtcg

SEQ ID NO: 43977 - DNA, 26 bp, Homo sapiens
cccgtcaatgtagttactgaggtcgt

SEQ ID NO: 43978 - DNA, 26 bp, Homo sapiens
ccgtcaatgtagttactgaggtcgtc

SEQ ID NO: 43979 - DNA, 26 bp, Homo sapiens
cgtcaatgtagttactgaggtcgtcg

SEQ ID NO: 43980 - DNA, 26 bp, Homo sapiens
gtcaatgtagttactgaggtcgtcgt

SEQ ID NO: 43981 - DNA, 26 bp, Homo sapiens
tcaatgtagttactgaggtcgtcgtg

SEQ ID NO: 43982 - DNA, 26 bp, Homo sapiens
caatgtagttactgaggtcgtcgtga

SEQ ID NO: 43983 - DNA, 26 bp, Homo sapiens
aatgtagttactgaggtcgtcgtgaa

SEQ ID NO: 43984 - DNA, 26 bp, Homo sapiens
atgtagttactgaggtcgtcgtgaag

SEQ ID NO: 43985 - DNA, 26 bp, Homo sapiens
tgtagttactgaggtcgtcgtgaagt

SEQ ID NO: 43986 - DNA, 26 bp, Homo sapiens
gtagttactgaggtcgtcgtgaagtt

SEQ ID NO: 43987 - DNA, 26 bp, Homo sapiens
tagttactgaggtcgtcgtgaagttc

SEQ ID NO: 43988 - DNA, 26 bp, Homo sapiens
agttactgaggtcgtcgtgaagttcc

SEQ ID NO: 43989 - DNA, 26 bp, Homo sapiens
gttactgaggtcgtcgtgaagttccg

SEQ ID NO: 43990 - DNA, 26 bp, Homo sapiens
ttactgaggtcgtcgtgaagttccgt

SEQ ID NO: 43991 - DNA, 26 bp, Homo sapiens
tactgaggtcgtcgtgaagttccgtc

SEQ ID NO: 43992 - DNA, 26 bp, Homo sapiens
actgaggtcgtcgtgaagttccgtca

SEQ ID NO: 43993 - DNA, 26 bp, Homo sapiens
ctgaggtcgtcgtgaagttccgtcag

SEQ ID NO: 43994 - DNA, 26 bp, Homo sapiens
tgaggtcgtcgtgaagttccgtcagc

SEQ ID NO: 43995 - DNA, 26 bp, Homo sapiens
gaggtcgtcgtgaagttccgtcagcc

SEQ ID NO: 43996 - DNA, 26 bp, Homo sapiens
aggtcgtcgtgaagttccgtcagccc

SEQ ID NO: 43997 - DNA, 26 bp, Homo sapiens
ggtcgtcgtgaagttccgtcagcccg

SEQ ID NO: 43998 - DNA, 26 bp, Homo sapiens
gtcgtcgtgaagttccgtcagcccgt

SEQ ID NO: 43999 - DNA, 26 bp, Homo sapiens
tcgtcgtgaagttccgtcagcccgtt

SEQ ID NO: 44000 - DNA, 26 bp, Homo sapiens
cgtcgtgaagttccgtcagcccgttg

SEQ ID NO: 44001 - DNA, 26 bp, Homo sapiens
gtcgtgaagttccgtcagcccgttgg

SEQ ID NO: 44002 - DNA, 26 bp, Homo sapiens
tcgtgaagttccgtcagcccgttggc

SEQ ID NO: 44003 - DNA, 26 bp, Homo sapiens
cgtgaagttccgtcagcccgttggcc

SEQ ID NO: 44004 - DNA, 26 bp, Homo sapiens
gtgaagttccgtcagcccgttggccg

SEQ ID NO: 44005 - DNA, 26 bp, Homo sapiens
tgaagttccgtcagcccgttggccga

SEQ ID NO: 44006 - DNA, 26 bp, Homo sapiens
gaagttccgtcagcccgttggccgag

SEQ ID NO: 44007 - DNA, 26 bp, Homo sapiens
aagttccgtcagcccgttggccgaga

SEQ ID NO: 44008 - DNA, 26 bp, Homo sapiens
agttccgtcagcccgttggccgagat

SEQ ID NO: 44009 - DNA, 26 bp, Homo sapiens
gttccgtcagcccgttggccgagatg

SEQ ID NO: 44010 - DNA, 26 bp, Homo sapiens
ttccgtcagcccgttggccgagatgt

SEQ ID NO: 44011 - DNA, 26 bp, Homo sapiens
tccgtcagcccgttggccgagatgtt

SEQ ID NO: 44012 - DNA, 26 bp, Homo sapiens
ccgtcagcccgttggccgagatgttg

SEQ ID NO: 44013 - DNA, 26 bp, Homo sapiens
cgtcagcccgttggccgagatgttgt

SEQ ID NO: 44014 - DNA, 26 bp, Homo sapiens
gtcagcccgttggccgagatgttgta

SEQ ID NO: 44015 - DNA, 26 bp, Homo sapiens
tcagcccgttggccgagatgttgtag

SEQ ID NO: 44016 - DNA, 26 bp, Homo sapiens
cagcccgttggccgagatgttgtagg

SEQ ID NO: 44017 - DNA, 26 bp, Homo sapiens
agcccgttggccgagatgttgtaggt

SEQ ID NO: 44018 - DNA, 26 bp, Homo sapiens
gcccgttggccgagatgttgtaggtg

SEQ ID NO: 44019 - DNA, 26 bp, Homo sapiens
cccgttggccgagatgttgtaggtgg

SEQ ID NO: 44020 - DNA, 26 bp, Homo sapiens
ccgttggccgagatgttgtaggtggg

SEQ ID NO: 44021 - DNA, 26 bp, Homo sapiens
cgttggccgagatgttgtaggtgggc

SEQ ID NO: 44022 - DNA, 26 bp, Homo sapiens
gttggccgagatgttgtaggtgggcg

SEQ ID NO: 44023 - DNA, 26 bp, Homo sapiens
ttggccgagatgttgtaggtgggcgt

SEQ ID NO: 44024 - DNA, 26 bp, Homo sapiens
tggccgagatgttgtaggtgggcgtc

SEQ ID NO: 44025 - DNA, 26 bp, Homo sapiens
ggccgagatgttgtaggtgggcgtca

SEQ ID NO: 44026 - DNA, 26 bp, Homo sapiens
gccgagatgttgtaggtgggcgtcag

SEQ ID NO: 44027 - DNA, 26 bp, Homo sapiens
ccgagatgttgtaggtgggcgtcagc

SEQ ID NO: 44028 - DNA, 26 bp, Homo sapiens
cgagatgttgtaggtgggcgtcagcg

SEQ ID NO: 44029 - DNA, 26 bp, Homo sapiens
gagatgttgtaggtgggcgtcagcgg

SEQ ID NO: 44030 - DNA, 26 bp, Homo sapiens
agatgttgtaggtgggcgtcagcggc

SEQ ID NO: 44031 - DNA, 26 bp, Homo sapiens
gatgttgtaggtgggcgtcagcggct

SEQ ID NO: 44032 - DNA, 26 bp, Homo sapiens
atgttgtaggtgggcgtcagcggctc

SEQ ID NO: 44033 - DNA, 26 bp, Homo sapiens
tgttgtaggtgggcgtcagcggctca

SEQ ID NO: 44034 - DNA, 26 bp, Homo sapiens
gttgtaggtgggcgtcagcggctcag

SEQ ID NO: 44035 - DNA, 26 bp, Homo sapiens
ttgtaggtgggcgtcagcggctcagc

SEQ ID NO: 44036 - DNA, 26 bp, Homo sapiens
tgtaggtgggcgtcagcggctcagcc

SEQ ID NO: 44037 - DNA, 26 bp, Homo sapiens
gtaggtgggcgtcagcggctcagcct

SEQ ID NO: 44038 - DNA, 26 bp, Homo sapiens
taggtgggcgtcagcggctcagcctc

SEQ ID NO: 44039 - DNA, 26 bp, Homo sapiens
aggtgggcgtcagcggctcagcctct

SEQ ID NO: 44040 - DNA, 26 bp, Homo sapiens
ggtgggcgtcagcggctcagcctctc

SEQ ID NO: 44041 - DNA, 26 bp, Homo sapiens
gtgggcgtcagcggctcagcctctcc

SEQ ID NO: 44042 - DNA, 26 bp, Homo sapiens
tgggcgtcagcggctcagcctctcca

SEQ ID NO: 44043 - DNA, 26 bp, Homo sapiens
gggcgtcagcggctcagcctctccag

SEQ ID NO: 44044 - DNA, 26 bp, Homo sapiens
ggcgtcagcggctcagcctctccagg

SEQ ID NO: 44045 - DNA, 26 bp, Homo sapiens
gcgtcagcggctcagcctctccaggc

SEQ ID NO: 44046 - DNA, 26 bp, Homo sapiens
cgtcagcggctcagcctctccaggct

SEQ ID NO: 44047 - DNA, 26 bp, Homo sapiens
gtcagcggctcagcctctccaggctg

SEQ ID NO: 44048 - DNA, 26 bp, Homo sapiens
tcagcggctcagcctctccaggctgc

SEQ ID NO: 44049 - DNA, 26 bp, Homo sapiens
cagcggctcagcctctccaggctgct

SEQ ID NO: 44050 - DNA, 26 bp, Homo sapiens
agcggctcagcctctccaggctgctg

SEQ ID NO: 44051 - DNA, 26 bp, Homo sapiens
gcggctcagcctctccaggctgctgc

SEQ ID NO: 44052 - DNA, 26 bp, Homo sapiens
cggctcagcctctccaggctgctgct

SEQ ID NO: 44053 - DNA, 26 bp, Homo sapiens
ggctcagcctctccaggctgctgctg

SEQ ID NO: 44054 - DNA, 26 bp, Homo sapiens
gctcagcctctccaggctgctgctgg

SEQ ID NO: 44055 - DNA, 26 bp, Homo sapiens
ctcagcctctccaggctgctgctggt

SEQ ID NO: 44056 - DNA, 26 bp, Homo sapiens
tcagcctctccaggctgctgctggtg

SEQ ID NO: 44057 - DNA, 26 bp, Homo sapiens
cagcctctccaggctgctgctggtgg

SEQ ID NO: 44058 - DNA, 26 bp, Homo sapiens
agcctctccaggctgctgctggtggt

SEQ ID NO: 44059 - DNA, 26 bp, Homo sapiens
gcctctccaggctgctgctggtggtc

SEQ ID NO: 44060 - DNA, 26 bp, Homo sapiens
cctctccaggctgctgctggtggtcg

SEQ ID NO: 44061 - DNA, 26 bp, Homo sapiens
ctctccaggctgctgctggtggtcgc

SEQ ID NO: 44062 - DNA, 26 bp, Homo sapiens
tctccaggctgctgctggtggtcgcg

SEQ ID NO: 44063 - DNA, 26 bp, Homo sapiens
ctccaggctgctgctggtggtcgcgc

SEQ ID NO: 44064 - DNA, 26 bp, Homo sapiens
tccaggctgctgctggtggtcgcgct

SEQ ID NO: 44065 - DNA, 26 bp, Homo sapiens
ccaggctgctgctggtggtcgcgctg

SEQ ID NO: 44066 - DNA, 26 bp, Homo sapiens
caggctgctgctggtggtcgcgctgc

SEQ ID NO: 44067 - DNA, 26 bp, Homo sapiens
aggctgctgctggtggtcgcgctgct

SEQ ID NO: 44068 - DNA, 26 bp, Homo sapiens
ggctgctgctggtggtcgcgctgctg

SEQ ID NO: 44069 - DNA, 26 bp, Homo sapiens
gctgctgctggtggtcgcgctgctgc

SEQ ID NO: 44070 - DNA, 26 bp, Homo sapiens
ctgctgctggtggtcgcgctgctgct

SEQ ID NO: 44071 - DNA, 26 bp, Homo sapiens
tgctgctggtggtcgcgctgctgctg

SEQ ID NO: 44072 - DNA, 26 bp, Homo sapiens
gctgctggtggtcgcgctgctgctgc

SEQ ID NO: 44073 - DNA, 26 bp, Homo sapiens
ctgctggtggtcgcgctgctgctgct

SEQ ID NO: 44074 - DNA, 26 bp, Homo sapiens
tgctggtggtcgcgctgctgctgctg

SEQ ID NO: 44075 - DNA, 26 bp, Homo sapiens
gctggtggtcgcgctgctgctgctgc

SEQ ID NO: 44076 - DNA, 26 bp, Homo sapiens
ctggtggtcgcgctgctgctgctgca

SEQ ID NO: 44077 - DNA, 26 bp, Homo sapiens
tggtggtcgcgctgctgctgctgcat

SEQ ID NO: 44078 - DNA, 26 bp, Homo sapiens
ggtggtcgcgctgctgctgctgcatc

SEQ ID NO: 44079 - DNA, 26 bp, Homo sapiens
gtggtcgcgctgctgctgctgcatcc

SEQ ID NO: 44080 - DNA, 26 bp, Homo sapiens
tggtcgcgctgctgctgctgcatccg

SEQ ID NO: 44081 - DNA, 26 bp, Homo sapiens
ggtcgcgctgctgctgctgcatccgg

SEQ ID NO: 44082 - DNA, 26 bp, Homo sapiens
gtcgcgctgctgctgctgcatccggt

SEQ ID NO: 44083 - DNA, 26 bp, Homo sapiens
tcgcgctgctgctgctgcatccggtg

SEQ ID NO: 44084 - DNA, 26 bp, Homo sapiens
cgcgctgctgctgctgcatccggtgt

SEQ ID NO: 44085 - DNA, 26 bp, Homo sapiens
gcgctgctgctgctgcatccggtgtt

SEQ ID NO: 44086 - DNA, 26 bp, Homo sapiens
cgctgctgctgctgcatccggtgttt

SEQ ID NO: 44087 - DNA, 26 bp, Homo sapiens
gctgctgctgctgcatccggtgtttc

SEQ ID NO: 44088 - DNA, 26 bp, Homo sapiens
ctgctgctgctgcatccggtgtttct

SEQ ID NO: 44089 - DNA, 26 bp, Homo sapiens
tgctgctgctgcatccggtgtttctg

SEQ ID NO: 44090 - DNA, 26 bp, Homo sapiens
gctgctgctgcatccggtgtttctgt

SEQ ID NO: 44091 - DNA, 26 bp, Homo sapiens
ctgctgctgcatccggtgtttctgta

SEQ ID NO: 44092 - DNA, 26 bp, Homo sapiens
tgctgctgcatccggtgtttctgtac

SEQ ID NO: 44093 - DNA, 26 bp, Homo sapiens
gctgctgcatccggtgtttctgtact

SEQ ID NO: 44094 - DNA, 26 bp, Homo sapiens
ctgctgcatccggtgtttctgtactt

SEQ ID NO: 44095 - DNA, 26 bp, Homo sapiens
tgctgcatccggtgtttctgtacttc

SEQ ID NO: 44096 - DNA, 26 bp, Homo sapiens
gctgcatccggtgtttctgtacttct

SEQ ID NO: 44097 - DNA, 26 bp, Homo sapiens
ctgcatccggtgtttctgtacttctg

SEQ ID NO: 44098 - DNA, 26 bp, Homo sapiens
tgcatccggtgtttctgtacttctgc

SEQ ID NO: 44099 - DNA, 26 bp, Homo sapiens
gcatccggtgtttctgtacttctgca

SEQ ID NO: 44100 - DNA, 26 bp, Homo sapiens
catccggtgtttctgtacttctgcat

SEQ ID NO: 44101 - DNA, 26 bp, Homo sapiens
atccggtgtttctgtacttctgcata

SEQ ID NO: 44102 - DNA, 26 bp, Homo sapiens
tccggtgtttctgtacttctgcatac

SEQ ID NO: 44103 - DNA, 26 bp, Homo sapiens
ccggtgtttctgtacttctgcataca

SEQ ID NO: 44104 - DNA, 26 bp, Homo sapiens
cggtgtttctgtacttctgcatacaa

SEQ ID NO: 44105 - DNA, 26 bp, Homo sapiens
ggtgtttctgtacttctgcatacaag

SEQ ID NO: 44106 - DNA, 26 bp, Homo sapiens
gtgtttctgtacttctgcatacaagc

SEQ ID NO: 44107 - DNA, 26 bp, Homo sapiens
tgtttctgtacttctgcatacaagct

SEQ ID NO: 44108 - DNA, 26 bp, Homo sapiens
gtttctgtacttctgcatacaagctg

SEQ ID NO: 44109 - DNA, 26 bp, Homo sapiens
tttctgtacttctgcatacaagctgt

SEQ ID NO: 44110 - DNA, 26 bp, Homo sapiens
ttctgtacttctgcatacaagctgtc

SEQ ID NO: 44111 - DNA, 26 bp, Homo sapiens
tctgtacttctgcatacaagctgtct

SEQ ID NO: 44112 - DNA, 26 bp, Homo sapiens
ctgtacttctgcatacaagctgtctc

SEQ ID NO: 44113 - DNA, 26 bp, Homo sapiens
tgtacttctgcatacaagctgtctct

SEQ ID NO: 44114 - DNA, 26 bp, Homo sapiens
gtacttctgcatacaagctgtctctc

SEQ ID NO: 44115 - DNA, 26 bp, Homo sapiens
tacttctgcatacaagctgtctctct

SEQ ID NO: 44116 - DNA, 26 bp, Homo sapiens
acttctgcatacaagctgtctctctg

SEQ ID NO: 44117 - DNA, 26 bp, Homo sapiens
cttctgcatacaagctgtctctctgc

SEQ ID NO: 44118 - DNA, 26 bp, Homo sapiens
ttctgcatacaagctgtctctctgct

SEQ ID NO: 44119 - DNA, 26 bp, Homo sapiens
tctgcatacaagctgtctctctgctt

SEQ ID NO: 44120 - DNA, 26 bp, Homo sapiens
ctgcatacaagctgtctctctgcttt

SEQ ID NO: 44121 - DNA, 26 bp, Homo sapiens
tgcatacaagctgtctctctgctttt

SEQ ID NO: 44122 - DNA, 26 bp, Homo sapiens
gcatacaagctgtctctctgcttttt

SEQ ID NO: 44123 - DNA, 26 bp, Homo sapiens
catacaagctgtctctctgctttttt

SEQ ID NO: 44124 - DNA, 26 bp, Homo sapiens
atacaagctgtctctctgcttttttg

SEQ ID NO: 44125 - DNA, 26 bp, Homo sapiens
tacaagctgtctctctgcttttttga

SEQ ID NO: 44126 - DNA, 26 bp, Homo sapiens
acaagctgtctctctgcttttttgac

SEQ ID NO: 44127 - DNA, 26 bp, Homo sapiens
caagctgtctctctgcttttttgaca

SEQ ID NO: 44128 - DNA, 26 bp, Homo sapiens
aagctgtctctctgcttttttgacat

SEQ ID NO: 44129 - DNA, 26 bp, Homo sapiens
agctgtctctctgcttttttgacatt

SEQ ID NO: 44130 - DNA, 26 bp, Homo sapiens
gctgtctctctgcttttttgacattc

SEQ ID NO: 44131 - DNA, 26 bp, Homo sapiens
ctgtctctctgcttttttgacattcg

SEQ ID NO: 44132 - DNA, 26 bp, Homo sapiens
tgtctctctgcttttttgacattcgg

SEQ ID NO: 44133 - DNA, 26 bp, Homo sapiens
gtctctctgcttttttgacattcggc

SEQ ID NO: 44134 - DNA, 26 bp, Homo sapiens
tctctctgcttttttgacattcggcc

SEQ ID NO: 44135 - DNA, 26 bp, Homo sapiens
ctctctgcttttttgacattcggcca

SEQ ID NO: 44136 - DNA, 26 bp, Homo sapiens
tctctgcttttttgacattcggccaa

SEQ ID NO: 44137 - DNA, 26 bp, Homo sapiens
ctctgcttttttgacattcggccaaa

SEQ ID NO: 44138 - DNA, 26 bp, Homo sapiens
tctgcttttttgacattcggccaaat

SEQ ID NO: 44139 - DNA, 26 bp, Homo sapiens
ctgcttttttgacattcggccaaatt

SEQ ID NO: 44140 - DNA, 26 bp, Homo sapiens
tgcttttttgacattcggccaaattt

SEQ ID NO: 44141 - DNA, 26 bp, Homo sapiens
gcttttttgacattcggccaaatttt

SEQ ID NO: 44142 - DNA, 26 bp, Homo sapiens
cttttttgacattcggccaaatttta

SEQ ID NO: 44143 - DNA, 26 bp, Homo sapiens
ttttttgacattcggccaaattttac

SEQ ID NO: 44144 - DNA, 26 bp, Homo sapiens
tttttgacattcggccaaattttaca

SEQ ID NO: 44145 - DNA, 26 bp, Homo sapiens
ttttgacattcggccaaattttacag

SEQ ID NO: 44146 - DNA, 26 bp, Homo sapiens
tttgacattcggccaaattttacagc

SEQ ID NO: 44147 - DNA, 26 bp, Homo sapiens
ttgacattcggccaaattttacagca

SEQ ID NO: 44148 - DNA, 26 bp, Homo sapiens
tgacattcggccaaattttacagcat

SEQ ID NO: 44149 - DNA, 26 bp, Homo sapiens
gacattcggccaaattttacagcatc

SEQ ID NO: 44150 - DNA, 26 bp, Homo sapiens
acattcggccaaattttacagcatct

SEQ ID NO: 44151 - DNA, 26 bp, Homo sapiens
cattcggccaaattttacagcatctc

SEQ ID NO: 44152 - DNA, 26 bp, Homo sapiens
attcggccaaattttacagcatctcg

SEQ ID NO: 44153 - DNA, 26 bp, Homo sapiens
ttcggccaaattttacagcatctcga

SEQ ID NO: 44154 - DNA, 26 bp, Homo sapiens
tcggccaaattttacagcatctcgag

SEQ ID NO: 44155 - DNA, 26 bp, Homo sapiens
cggccaaattttacagcatctcgaga

SEQ ID NO: 44156 - DNA, 26 bp, Homo sapiens
ggccaaattttacagcatctcgagac

SEQ ID NO: 44157 - DNA, 26 bp, Homo sapiens
gccaaattttacagcatctcgagaca

SEQ ID NO: 44158 - DNA, 26 bp, Homo sapiens
ccaaattttacagcatctcgagacat

SEQ ID NO: 44159 - DNA, 26 bp, Homo sapiens
caaattttacagcatctcgagacatc

SEQ ID NO: 44160 - DNA, 26 bp, Homo sapiens
aaattttacagcatctcgagacatcc

SEQ ID NO: 44161 - DNA, 26 bp, Homo sapiens
aattttacagcatctcgagacatccc

SEQ ID NO: 44162 - DNA, 26 bp, Homo sapiens
attttacagcatctcgagacatccct

SEQ ID NO: 44163 - DNA, 26 bp, Homo sapiens
ttttacagcatctcgagacatcccta

SEQ ID NO: 44164 - DNA, 26 bp, Homo sapiens
tttacagcatctcgagacatccctac

SEQ ID NO: 44165 - DNA, 26 bp, Homo sapiens
ttacagcatctcgagacatccctacg

SEQ ID NO: 44166 - DNA, 26 bp, Homo sapiens
tacagcatctcgagacatccctacgg

SEQ ID NO: 44167 - DNA, 26 bp, Homo sapiens
acagcatctcgagacatccctacggc

SEQ ID NO: 44168 - DNA, 26 bp, Homo sapiens
cagcatctcgagacatccctacggca

SEQ ID NO: 44169 - DNA, 26 bp, Homo sapiens
agcatctcgagacatccctacggcaa

SEQ ID NO: 44170 - DNA, 26 bp, Homo sapiens
gcatctcgagacatccctacggcaag

SEQ ID NO: 44171 - DNA, 26 bp, Homo sapiens
catctcgagacatccctacggcaagg

SEQ ID NO: 44172 - DNA, 26 bp, Homo sapiens
atctcgagacatccctacggcaaggc

SEQ ID NO: 44173 - DNA, 26 bp, Homo sapiens
tctcgagacatccctacggcaaggca

SEQ ID NO: 44174 - DNA, 26 bp, Homo sapiens
ctcgagacatccctacggcaaggcat

SEQ ID NO: 44175 - DNA, 26 bp, Homo sapiens
tcgagacatccctacggcaaggcatt

SEQ ID NO: 44176 - DNA, 26 bp, Homo sapiens
cgagacatccctacggcaaggcattt

SEQ ID NO: 44177 - DNA, 26 bp, Homo sapiens
gagacatccctacggcaaggcatttc

SEQ ID NO: 44178 - DNA, 26 bp, Homo sapiens
agacatccctacggcaaggcatttct

SEQ ID NO: 44179 - DNA, 26 bp, Homo sapiens
gacatccctacggcaaggcatttctg

SEQ ID NO: 44180 - DNA, 26 bp, Homo sapiens
acatccctacggcaaggcatttctgt

SEQ ID NO: 44181 - DNA, 26 bp, Homo sapiens
catccctacggcaaggcatttctgta

SEQ ID NO: 44182 - DNA, 26 bp, Homo sapiens
atccctacggcaaggcatttctgtaa

SEQ ID NO: 44183 - DNA, 26 bp, Homo sapiens
tccctacggcaaggcatttctgtaat

SEQ ID NO: 44184 - DNA, 26 bp, Homo sapiens
ccctacggcaaggcatttctgtaatc

SEQ ID NO: 44185 - DNA, 26 bp, Homo sapiens
cctacggcaaggcatttctgtaatcg

SEQ ID NO: 44186 - DNA, 26 bp, Homo sapiens
ctacggcaaggcatttctgtaatcga

SEQ ID NO: 44187 - DNA, 26 bp, Homo sapiens
tacggcaaggcatttctgtaatcgac

SEQ ID NO: 44188 - DNA, 26 bp, Homo sapiens
acggcaaggcatttctgtaatcgaca

SEQ ID NO: 44189 - DNA, 26 bp, Homo sapiens
cggcaaggcatttctgtaatcgacag

SEQ ID NO: 44190 - DNA, 26 bp, Homo sapiens
ggcaaggcatttctgtaatcgacagt

SEQ ID NO: 44191 - DNA, 26 bp, Homo sapiens
gcaaggcatttctgtaatcgacagtg

SEQ ID NO: 44192 - DNA, 26 bp, Homo sapiens
caaggcatttctgtaatcgacagtgt

SEQ ID NO: 44193 - DNA, 26 bp, Homo sapiens
aaggcatttctgtaatcgacagtgtt

SEQ ID NO: 44194 - DNA, 26 bp, Homo sapiens
aggcatttctgtaatcgacagtgttg

SEQ ID NO: 44195 - DNA, 26 bp, Homo sapiens
ggcatttctgtaatcgacagtgttgg

SEQ ID NO: 44196 - DNA, 26 bp, Homo sapiens
gcatttctgtaatcgacagtgttggc

SEQ ID NO: 44197 - DNA, 26 bp, Homo sapiens
catttctgtaatcgacagtgttggca

SEQ ID NO: 44198 - DNA, 26 bp, Homo sapiens
atttctgtaatcgacagtgttggcag

SEQ ID NO: 44199 - DNA, 26 bp, Homo sapiens
tttctgtaatcgacagtgttggcagc

SEQ ID NO: 44200 - DNA, 26 bp, Homo sapiens
ttctgtaatcgacagtgttggcagcg

SEQ ID NO: 44201 - DNA, 26 bp, Homo sapiens
tctgtaatcgacagtgttggcagcgg

SEQ ID NO: 44202 - DNA, 26 bp, Homo sapiens
ctgtaatcgacagtgttggcagcggt

SEQ ID NO: 44203 - DNA, 26 bp, Homo sapiens
tgtaatcgacagtgttggcagcggtt

SEQ ID NO: 44204 - DNA, 26 bp, Homo sapiens
gtaatcgacagtgttggcagcggttt

SEQ ID NO: 44205 - DNA, 26 bp, Homo sapiens
taatcgacagtgttggcagcggtttc

SEQ ID NO: 44206 - DNA, 26 bp, Homo sapiens
aatcgacagtgttggcagcggtttct

SEQ ID NO: 44207 - DNA, 26 bp, Homo sapiens
atcgacagtgttggcagcggtttcta

SEQ ID NO: 44208 - DNA, 26 bp, Homo sapiens
tcgacagtgttggcagcggtttctac

SEQ ID NO: 44209 - DNA, 26 bp, Homo sapiens
cgacagtgttggcagcggtttctact

SEQ ID NO: 44210 - DNA, 26 bp, Homo sapiens
gacagtgttggcagcggtttctactg

SEQ ID NO: 44211 - DNA, 26 bp, Homo sapiens
acagtgttggcagcggtttctactgg

SEQ ID NO: 44212 - DNA, 26 bp, Homo sapiens
cagtgttggcagcggtttctactggt

SEQ ID NO: 44213 - DNA, 26 bp, Homo sapiens
agtgttggcagcggtttctactggtt

SEQ ID NO: 44214 - DNA, 26 bp, Homo sapiens
gtgttggcagcggtttctactggttc

SEQ ID NO: 44215 - DNA, 26 bp, Homo sapiens
tgttggcagcggtttctactggttcg

SEQ ID NO: 44216 - DNA, 26 bp, Homo sapiens
gttggcagcggtttctactggttcga

SEQ ID NO: 44217 - DNA, 26 bp, Homo sapiens
ttggcagcggtttctactggttcgat

SEQ ID NO: 44218 - DNA, 26 bp, Homo sapiens
tggcagcggtttctactggttcgatc

SEQ ID NO: 44219 - DNA, 26 bp, Homo sapiens
ggcagcggtttctactggttcgatca

SEQ ID NO: 44220 - DNA, 26 bp, Homo sapiens
gcagcggtttctactggttcgatcaa

SEQ ID NO: 44221 - DNA, 26 bp, Homo sapiens
cagcggtttctactggttcgatcaat

SEQ ID NO: 44222 - DNA, 26 bp, Homo sapiens
agcggtttctactggttcgatcaatc

SEQ ID NO: 44223 - DNA, 26 bp, Homo sapiens
gcggtttctactggttcgatcaatca

SEQ ID NO: 44224 - DNA, 26 bp, Homo sapiens
cggtttctactggttcgatcaatcaa

SEQ ID NO: 44225 - DNA, 26 bp, Homo sapiens
ggtttctactggttcgatcaatcaaa

SEQ ID NO: 44226 - DNA, 26 bp, Homo sapiens
gtttctactggttcgatcaatcaaac

SEQ ID NO: 44227 - DNA, 26 bp, Homo sapiens
tttctactggttcgatcaatcaaaca

SEQ ID NO: 44228 - DNA, 26 bp, Homo sapiens
ttctactggttcgatcaatcaaacag

SEQ ID NO: 44229 - DNA, 26 bp, Homo sapiens
tctactggttcgatcaatcaaacagt

SEQ ID NO: 44230 - DNA, 26 bp, Homo sapiens
ctactggttcgatcaatcaaacagtt

SEQ ID NO: 44231 - DNA, 26 bp, Homo sapiens
tactggttcgatcaatcaaacagttc

SEQ ID NO: 44232 - DNA, 26 bp, Homo sapiens
actggttcgatcaatcaaacagttct

SEQ ID NO: 44233 - DNA, 26 bp, Homo sapiens
ctggttcgatcaatcaaacagttctt

SEQ ID NO: 44234 - DNA, 26 bp, Homo sapiens
tggttcgatcaatcaaacagttcttc

SEQ ID NO: 44235 - DNA, 26 bp, Homo sapiens
ggttcgatcaatcaaacagttcttct

SEQ ID NO: 44236 - DNA, 26 bp, Homo sapiens
gttcgatcaatcaaacagttcttctg

SEQ ID NO: 44237 - DNA, 26 bp, Homo sapiens
ttcgatcaatcaaacagttcttctga

SEQ ID NO: 44238 - DNA, 26 bp, Homo sapiens
tcgatcaatcaaacagttcttctgac

SEQ ID NO: 44239 - DNA, 26 bp, Homo sapiens
cgatcaatcaaacagttcttctgacg

SEQ ID NO: 44240 - DNA, 26 bp, Homo sapiens
gatcaatcaaacagttcttctgacga

SEQ ID NO: 44241 - DNA, 26 bp, Homo sapiens
atcaatcaaacagttcttctgacgag

SEQ ID NO: 44242 - DNA, 26 bp, Homo sapiens
tcaatcaaacagttcttctgacgagg

SEQ ID NO: 44243 - DNA, 26 bp, Homo sapiens
caatcaaacagttcttctgacgagga

SEQ ID NO: 44244 - DNA, 26 bp, Homo sapiens
aatcaaacagttcttctgacgaggac

SEQ ID NO: 44245 - DNA, 26 bp, Homo sapiens
atcaaacagttcttctgacgaggaca

SEQ ID NO: 44246 - DNA, 26 bp, Homo sapiens
tcaaacagttcttctgacgaggacag

SEQ ID NO: 44247 - DNA, 26 bp, Homo sapiens
caaacagttcttctgacgaggacagg

SEQ ID NO: 44248 - DNA, 26 bp, Homo sapiens
aaacagttcttctgacgaggacagga

SEQ ID NO: 44249 - DNA, 26 bp, Homo sapiens
aacagttcttctgacgaggacaggag

SEQ ID NO: 44250 - DNA, 26 bp, Homo sapiens
acagttcttctgacgaggacaggagt

SEQ ID NO: 44251 - DNA, 26 bp, Homo sapiens
cagttcttctgacgaggacaggagta

SEQ ID NO: 44252 - DNA, 26 bp, Homo sapiens
agttcttctgacgaggacaggagtag

SEQ ID NO: 44253 - DNA, 26 bp, Homo sapiens
gttcttctgacgaggacaggagtagg

SEQ ID NO: 44254 - DNA, 26 bp, Homo sapiens
ttcttctgacgaggacaggagtaggt

SEQ ID NO: 44255 - DNA, 26 bp, Homo sapiens
tcttctgacgaggacaggagtaggtg

SEQ ID NO: 44256 - DNA, 26 bp, Homo sapiens
cttctgacgaggacaggagtaggtgg

SEQ ID NO: 44257 - DNA, 26 bp, Homo sapiens
ttctgacgaggacaggagtaggtggc

SEQ ID NO: 44258 - DNA, 26 bp, Homo sapiens
tctgacgaggacaggagtaggtggca

SEQ ID NO: 44259 - DNA, 26 bp, Homo sapiens
ctgacgaggacaggagtaggtggcat

SEQ ID NO: 44260 - DNA, 26 bp, Homo sapiens
tgacgaggacaggagtaggtggcatt

SEQ ID NO: 44261 - DNA, 26 bp, Homo sapiens
gacgaggacaggagtaggtggcattg

SEQ ID NO: 44262 - DNA, 26 bp, Homo sapiens
acgaggacaggagtaggtggcattgc

SEQ ID NO: 44263 - DNA, 26 bp, Homo sapiens
cgaggacaggagtaggtggcattgct

SEQ ID NO: 44264 - DNA, 26 bp, Homo sapiens
gaggacaggagtaggtggcattgctt

SEQ ID NO: 44265 - DNA, 26 bp, Homo sapiens
aggacaggagtaggtggcattgcttt

SEQ ID NO: 44266 - DNA, 26 bp, Homo sapiens
ggacaggagtaggtggcattgctttg

SEQ ID NO: 44267 - DNA, 26 bp, Homo sapiens
gacaggagtaggtggcattgctttgc

SEQ ID NO: 44268 - DNA, 26 bp, Homo sapiens
acaggagtaggtggcattgctttgct

SEQ ID NO: 44269 - DNA, 26 bp, Homo sapiens
caggagtaggtggcattgctttgctg

SEQ ID NO: 44270 - DNA, 26 bp, Homo sapiens
aggagtaggtggcattgctttgctga

SEQ ID NO: 44271 - DNA, 26 bp, Homo sapiens
ggagtaggtggcattgctttgctgac

SEQ ID NO: 44272 - DNA, 26 bp, Homo sapiens
gagtaggtggcattgctttgctgact

SEQ ID NO: 44273 - DNA, 26 bp, Homo sapiens
agtaggtggcattgctttgctgactt

SEQ ID NO: 44274 - DNA, 26 bp, Homo sapiens
gtaggtggcattgctttgctgacttc

SEQ ID NO: 44275 - DNA, 26 bp, Homo sapiens
taggtggcattgctttgctgacttct

SEQ ID NO: 44276 - DNA, 26 bp, Homo sapiens
aggtggcattgctttgctgacttctc

SEQ ID NO: 44277 - DNA, 26 bp, Homo sapiens
ggtggcattgctttgctgacttctcc

SEQ ID NO: 44278 - DNA, 26 bp, Homo sapiens
gtggcattgctttgctgacttctcct

SEQ ID NO: 44279 - DNA, 26 bp, Homo sapiens
tggcattgctttgctgacttctcctg

SEQ ID NO: 44280 - DNA, 26 bp, Homo sapiens
ggcattgctttgctgacttctcctga

SEQ ID NO: 44281 - DNA, 26 bp, Homo sapiens
gcattgctttgctgacttctcctgaa

SEQ ID NO: 44282 - DNA, 26 bp, Homo sapiens
cattgctttgctgacttctcctgaaa

SEQ ID NO: 44283 - DNA, 26 bp, Homo sapiens
attgctttgctgacttctcctgaaaa

SEQ ID NO: 44284 - DNA, 26 bp, Homo sapiens
ttgctttgctgacttctcctgaaaaa

SEQ ID NO: 44285 - DNA, 26 bp, Homo sapiens
tgctttgctgacttctcctgaaaaag

SEQ ID NO: 44286 - DNA, 26 bp, Homo sapiens
gctttgctgacttctcctgaaaaagc

SEQ ID NO: 44287 - DNA, 26 bp, Homo sapiens
ctttgctgacttctcctgaaaaagcc

SEQ ID NO: 44288 - DNA, 26 bp, Homo sapiens
tttgctgacttctcctgaaaaagccc

SEQ ID NO: 44289 - DNA, 26 bp, Homo sapiens
ttgctgacttctcctgaaaaagccct

SEQ ID NO: 44290 - DNA, 26 bp, Homo sapiens
tgctgacttctcctgaaaaagccctt

SEQ ID NO: 44291 - DNA, 26 bp, Homo sapiens
gctgacttctcctgaaaaagcccttg

SEQ ID NO: 44292 - DNA, 26 bp, Homo sapiens
ctgacttctcctgaaaaagcccttgc

SEQ ID NO: 44293 - DNA, 26 bp, Homo sapiens
tgacttctcctgaaaaagcccttgca

SEQ ID NO: 44294 - DNA, 26 bp, Homo sapiens
gacttctcctgaaaaagcccttgcag

SEQ ID NO: 44295 - DNA, 26 bp, Homo sapiens
acttctcctgaaaaagcccttgcagc

SEQ ID NO: 44296 - DNA, 26 bp, Homo sapiens
cttctcctgaaaaagcccttgcagcc

SEQ ID NO: 44297 - DNA, 26 bp, Homo sapiens
ttctcctgaaaaagcccttgcagcct

SEQ ID NO: 44298 - DNA, 26 bp, Homo sapiens
tctcctgaaaaagcccttgcagcctt

SEQ ID NO: 44299 - DNA, 26 bp, Homo sapiens
ctcctgaaaaagcccttgcagccttc

SEQ ID NO: 44300 - DNA, 26 bp, Homo sapiens
tcctgaaaaagcccttgcagccttca

SEQ ID NO: 44301 - DNA, 26 bp, Homo sapiens
cctgaaaaagcccttgcagccttcac

SEQ ID NO: 44302 - DNA, 26 bp, Homo sapiens
ctgaaaaagcccttgcagccttcaca

SEQ ID NO: 44303 - DNA, 26 bp, Homo sapiens
tgaaaaagcccttgcagccttcacat

SEQ ID NO: 44304 - DNA, 26 bp, Homo sapiens
gaaaaagcccttgcagccttcacatg

SEQ ID NO: 44305 - DNA, 26 bp, Homo sapiens
aaaaagcccttgcagccttcacatgt

SEQ ID NO: 44306 - DNA, 26 bp, Homo sapiens
aaaagcccttgcagccttcacatgta

SEQ ID NO: 44307 - DNA, 26 bp, Homo sapiens
aaagcccttgcagccttcacatgtaa

SEQ ID NO: 44308 - DNA, 26 bp, Homo sapiens
aagcccttgcagccttcacatgtaat

SEQ ID NO: 44309 - DNA, 26 bp, Homo sapiens
agcccttgcagccttcacatgtaatg

SEQ ID NO: 44310 - DNA, 26 bp, Homo sapiens
gcccttgcagccttcacatgtaatga

SEQ ID NO: 44311 - DNA, 26 bp, Homo sapiens
cccttgcagccttcacatgtaatgac

SEQ ID NO: 44312 - DNA, 26 bp, Homo sapiens
ccttgcagccttcacatgtaatgaca

SEQ ID NO: 44313 - DNA, 26 bp, Homo sapiens
cttgcagccttcacatgtaatgacac

SEQ ID NO: 44314 - DNA, 26 bp, Homo sapiens
ttgcagccttcacatgtaatgacacc

SEQ ID NO: 44315 - DNA, 26 bp, Homo sapiens
tgcagccttcacatgtaatgacacca

SEQ ID NO: 44316 - DNA, 26 bp, Homo sapiens
gcagccttcacatgtaatgacaccat

SEQ ID NO: 44317 - DNA, 26 bp, Homo sapiens
cagccttcacatgtaatgacaccata

SEQ ID NO: 44318 - DNA, 26 bp, Homo sapiens
agccttcacatgtaatgacaccataa

SEQ ID NO: 44319 - DNA, 26 bp, Homo sapiens
gccttcacatgtaatgacaccataat

SEQ ID NO: 44320 - DNA, 26 bp, Homo sapiens
ccttcacatgtaatgacaccataatg

SEQ ID NO: 44321 - DNA, 26 bp, Homo sapiens
cttcacatgtaatgacaccataatgg

SEQ ID NO: 44322 - DNA, 26 bp, Homo sapiens
ttcacatgtaatgacaccataatgga

SEQ ID NO: 44323 - DNA, 26 bp, Homo sapiens
tcacatgtaatgacaccataatggat

SEQ ID NO: 44324 - DNA, 26 bp, Homo sapiens
cacatgtaatgacaccataatggatt

SEQ ID NO: 44325 - DNA, 26 bp, Homo sapiens
acatgtaatgacaccataatggattc

SEQ ID NO: 44326 - DNA, 26 bp, Homo sapiens
catgtaatgacaccataatggattcc

SEQ ID NO: 44327 - DNA, 26 bp, Homo sapiens
atgtaatgacaccataatggattcct

SEQ ID NO: 44328 - DNA, 26 bp, Homo sapiens
tgtaatgacaccataatggattcctg

SEQ ID NO: 44329 - DNA, 26 bp, Homo sapiens
gtaatgacaccataatggattcctga

SEQ ID NO: 44330 - DNA, 26 bp, Homo sapiens
taatgacaccataatggattcctgat

SEQ ID NO: 44331 - DNA, 26 bp, Homo sapiens
aatgacaccataatggattcctgatg

SEQ ID NO: 44332 - DNA, 26 bp, Homo sapiens
atgacaccataatggattcctgatga

SEQ ID NO: 44333 - DNA, 26 bp, Homo sapiens
tgacaccataatggattcctgatgat

SEQ ID NO: 44334 - DNA, 26 bp, Homo sapiens
gacaccataatggattcctgatgatt

SEQ ID NO: 44335 - DNA, 26 bp, Homo sapiens
acaccataatggattcctgatgattt

SEQ ID NO: 44336 - DNA, 26 bp, Homo sapiens
caccataatggattcctgatgatttg

SEQ ID NO: 44337 - DNA, 26 bp, Homo sapiens
accataatggattcctgatgatttgt

SEQ ID NO: 44338 - DNA, 26 bp, Homo sapiens
ccataatggattcctgatgatttgtc

SEQ ID NO: 44339 - DNA, 26 bp, Homo sapiens
cataatggattcctgatgatttgtct

SEQ ID NO: 44340 - DNA, 26 bp, Homo sapiens
ataatggattcctgatgatttgtctc

SEQ ID NO: 44341 - DNA, 26 bp, Homo sapiens
taatggattcctgatgatttgtctcc

SEQ ID NO: 44342 - DNA, 26 bp, Homo sapiens
aatggattcctgatgatttgtctcca

SEQ ID NO: 44343 - DNA, 26 bp, Homo sapiens
atggattcctgatgatttgtctccac

SEQ ID NO: 44344 - DNA, 26 bp, Homo sapiens
tggattcctgatgatttgtctccaca

SEQ ID NO: 44345 - DNA, 26 bp, Homo sapiens
ggattcctgatgatttgtctccacag

SEQ ID NO: 44346 - DNA, 26 bp, Homo sapiens
gattcctgatgatttgtctccacaga

SEQ ID NO: 44347 - DNA, 26 bp, Homo sapiens
attcctgatgatttgtctccacagat

SEQ ID NO: 44348 - DNA, 26 bp, Homo sapiens
ttcctgatgatttgtctccacagatc

SEQ ID NO: 44349 - DNA, 26 bp, Homo sapiens
tcctgatgatttgtctccacagatct

SEQ ID NO: 44350 - DNA, 26 bp, Homo sapiens
cctgatgatttgtctccacagatctt

SEQ ID NO: 44351 - DNA, 26 bp, Homo sapiens
ctgatgatttgtctccacagatcttg

SEQ ID NO: 44352 - DNA, 26 bp, Homo sapiens
tgatgatttgtctccacagatcttgc

SEQ ID NO: 44353 - DNA, 26 bp, Homo sapiens
gatgatttgtctccacagatcttgca

SEQ ID NO: 44354 - DNA, 26 bp, Homo sapiens
atgatttgtctccacagatcttgcat

SEQ ID NO: 44355 - DNA, 26 bp, Homo sapiens
tgatttgtctccacagatcttgcatg

SEQ ID NO: 44356 - DNA, 26 bp, Homo sapiens
gatttgtctccacagatcttgcatgg

SEQ ID NO: 44357 - DNA, 26 bp, Homo sapiens
atttgtctccacagatcttgcatgga

SEQ ID NO: 44358 - DNA, 26 bp, Homo sapiens
tttgtctccacagatcttgcatggaa

SEQ ID NO: 44359 - DNA, 26 bp, Homo sapiens
ttgtctccacagatcttgcatggaat

SEQ ID NO: 44360 - DNA, 26 bp, Homo sapiens
tgtctccacagatcttgcatggaata

SEQ ID NO: 44361 - DNA, 26 bp, Homo sapiens
gtctccacagatcttgcatggaataa

SEQ ID NO: 44362 - DNA, 26 bp, Homo sapiens
tctccacagatcttgcatggaataat

SEQ ID NO: 44363 - DNA, 26 bp, Homo sapiens
ctccacagatcttgcatggaataatt

SEQ ID NO: 44364 - DNA, 26 bp, Homo sapiens
tccacagatcttgcatggaataattt

SEQ ID NO: 44365 - DNA, 26 bp, Homo sapiens
ccacagatcttgcatggaataatttc

SEQ ID NO: 44366 - DNA, 26 bp, Homo sapiens
cacagatcttgcatggaataatttca

SEQ ID NO: 44367 - DNA, 26 bp, Homo sapiens
acagatcttgcatggaataatttcaa

SEQ ID NO: 44368 - DNA, 26 bp, Homo sapiens
cagatcttgcatggaataatttcaat

SEQ ID NO: 44369 - DNA, 26 bp, Homo sapiens
agatcttgcatggaataatttcaatt

SEQ ID NO: 44370 - DNA, 26 bp, Homo sapiens
gatcttgcatggaataatttcaattt

SEQ ID NO: 44371 - DNA, 26 bp, Homo sapiens
atcttgcatggaataatttcaatttg

SEQ ID NO: 44372 - DNA, 26 bp, Homo sapiens
tcttgcatggaataatttcaatttga

SEQ ID NO: 44373 - DNA, 26 bp, Homo sapiens
cttgcatggaataatttcaatttgag

SEQ ID NO: 44374 - DNA, 26 bp, Homo sapiens
ttgcatggaataatttcaatttgaga

SEQ ID NO: 44375 - DNA, 26 bp, Homo sapiens
tgcatggaataatttcaatttgagat

SEQ ID NO: 44376 - DNA, 26 bp, Homo sapiens
gcatggaataatttcaatttgagatg

SEQ ID NO: 44377 - DNA, 26 bp, Homo sapiens
catggaataatttcaatttgagatgt

SEQ ID NO: 44378 - DNA, 26 bp, Homo sapiens
atggaataatttcaatttgagatgta

SEQ ID NO: 44379 - DNA, 26 bp, Homo sapiens
tggaataatttcaatttgagatgtat

SEQ ID NO: 44380 - DNA, 26 bp, Homo sapiens
ggaataatttcaatttgagatgtatg

SEQ ID NO: 44381 - DNA, 26 bp, Homo sapiens
gaataatttcaatttgagatgtatgt

SEQ ID NO: 44382 - DNA, 26 bp, Homo sapiens
aataatttcaatttgagatgtatgtg

SEQ ID NO: 44383 - DNA, 26 bp, Homo sapiens
ataatttcaatttgagatgtatgtgt

SEQ ID NO: 44384 - DNA, 26 bp, Homo sapiens
taatttcaatttgagatgtatgtgtc

SEQ ID NO: 44385 - DNA, 26 bp, Homo sapiens
aatttcaatttgagatgtatgtgtct

SEQ ID NO: 44386 - DNA, 26 bp, Homo sapiens
atttcaatttgagatgtatgtgtctt

SEQ ID NO: 44387 - DNA, 26 bp, Homo sapiens
tttcaatttgagatgtatgtgtcttc

SEQ ID NO: 44388 - DNA, 26 bp, Homo sapiens
ttcaatttgagatgtatgtgtcttct

SEQ ID NO: 44389 - DNA, 26 bp, Homo sapiens
tcaatttgagatgtatgtgtcttctt

SEQ ID NO: 44390 - DNA, 26 bp, Homo sapiens
caatttgagatgtatgtgtcttcttc

SEQ ID NO: 44391 - DNA, 26 bp, Homo sapiens
aatttgagatgtatgtgtcttcttcg

SEQ ID NO: 44392 - DNA, 26 bp, Homo sapiens
atttgagatgtatgtgtcttcttcgt

SEQ ID NO: 44393 - DNA, 26 bp, Homo sapiens
tttgagatgtatgtgtcttcttcgtt

SEQ ID NO: 44394 - DNA, 26 bp, Homo sapiens
ttgagatgtatgtgtcttcttcgtta

SEQ ID NO: 44395 - DNA, 26 bp, Homo sapiens
tgagatgtatgtgtcttcttcgttac

SEQ ID NO: 44396 - DNA, 26 bp, Homo sapiens
gagatgtatgtgtcttcttcgttact

SEQ ID NO: 44397 - DNA, 26 bp, Homo sapiens
agatgtatgtgtcttcttcgttactg

SEQ ID NO: 44398 - DNA, 26 bp, Homo sapiens
gatgtatgtgtcttcttcgttactga

SEQ ID NO: 44399 - DNA, 26 bp, Homo sapiens
atgtatgtgtcttcttcgttactgag

SEQ ID NO: 44400 - DNA, 26 bp, Homo sapiens
tgtatgtgtcttcttcgttactgaga

SEQ ID NO: 44401 - DNA, 26 bp, Homo sapiens
gtatgtgtcttcttcgttactgagat

SEQ ID NO: 44402 - DNA, 26 bp, Homo sapiens
tatgtgtcttcttcgttactgagata

SEQ ID NO: 44403 - DNA, 26 bp, Homo sapiens
atgtgtcttcttcgttactgagatac

SEQ ID NO: 44404 - DNA, 26 bp, Homo sapiens
tgtgtcttcttcgttactgagatacc

SEQ ID NO: 44405 - DNA, 26 bp, Homo sapiens
gtgtcttcttcgttactgagatacct

SEQ ID NO: 44406 - DNA, 26 bp, Homo sapiens
tgtcttcttcgttactgagatacctc

SEQ ID NO: 44407 - DNA, 26 bp, Homo sapiens
gtcttcttcgttactgagatacctct

SEQ ID NO: 44408 - DNA, 26 bp, Homo sapiens
tcttcttcgttactgagatacctctg

SEQ ID NO: 44409 - DNA, 26 bp, Homo sapiens
cttcttcgttactgagatacctctgc

SEQ ID NO: 44410 - DNA, 26 bp, Homo sapiens
ttcttcgttactgagatacctctgct

SEQ ID NO: 44411 - DNA, 26 bp, Homo sapiens
tcttcgttactgagatacctctgctg

SEQ ID NO: 44412 - DNA, 26 bp, Homo sapiens
cttcgttactgagatacctctgctgg

SEQ ID NO: 44413 - DNA, 26 bp, Homo sapiens
ttcgttactgagatacctctgctggt

SEQ ID NO: 44414 - DNA, 26 bp, Homo sapiens
tcgttactgagatacctctgctggtg

SEQ ID NO: 44415 - DNA, 26 bp, Homo sapiens
cgttactgagatacctctgctggtgc

SEQ ID NO: 44416 - DNA, 26 bp, Homo sapiens
gttactgagatacctctgctggtgct

SEQ ID NO: 44417 - DNA, 26 bp, Homo sapiens
ttactgagatacctctgctggtgctg

SEQ ID NO: 44418 - DNA, 26 bp, Homo sapiens
tactgagatacctctgctggtgctgg

SEQ ID NO: 44419 - DNA, 26 bp, Homo sapiens
actgagatacctctgctggtgctgga

SEQ ID NO: 44420 - DNA, 26 bp, Homo sapiens
ctgagatacctctgctggtgctggaa

SEQ ID NO: 44421 - DNA, 26 bp, Homo sapiens
tgagatacctctgctggtgctggaat

SEQ ID NO: 44422 - DNA, 26 bp, Homo sapiens
gagatacctctgctggtgctggaata

SEQ ID NO: 44423 - DNA, 26 bp, Homo sapiens
agatacctctgctggtgctggaatag

SEQ ID NO: 44424 - DNA, 26 bp, Homo sapiens
gatacctctgctggtgctggaatagc

SEQ ID NO: 44425 - DNA, 26 bp, Homo sapiens
atacctctgctggtgctggaatagct

SEQ ID NO: 44426 - DNA, 26 bp, Homo sapiens
tacctctgctggtgctggaatagctc

SEQ ID NO: 44427 - DNA, 26 bp, Homo sapiens
acctctgctggtgctggaatagctct

SEQ ID NO: 44428 - DNA, 26 bp, Homo sapiens
cctctgctggtgctggaatagctctg

SEQ ID NO: 44429 - DNA, 26 bp, Homo sapiens
ctctgctggtgctggaatagctctgt

SEQ ID NO: 44430 - DNA, 26 bp, Homo sapiens
tctgctggtgctggaatagctctgtc

SEQ ID NO: 44431 - DNA, 26 bp, Homo sapiens
ctgctggtgctggaatagctctgtct

SEQ ID NO: 44432 - DNA, 26 bp, Homo sapiens
tgctggtgctggaatagctctgtctg

SEQ ID NO: 44433 - DNA, 26 bp, Homo sapiens
gctggtgctggaatagctctgtctgc

SEQ ID NO: 44434 - DNA, 26 bp, Homo sapiens
ctggtgctggaatagctctgtctgcg

SEQ ID NO: 44435 - DNA, 26 bp, Homo sapiens
tggtgctggaatagctctgtctgcgc

SEQ ID NO: 44436 - DNA, 26 bp, Homo sapiens
ggtgctggaatagctctgtctgcgca

SEQ ID NO: 44437 - DNA, 26 bp, Homo sapiens
gtgctggaatagctctgtctgcgcac

SEQ ID NO: 44438 - DNA, 26 bp, Homo sapiens
tgctggaatagctctgtctgcgcacc

SEQ ID NO: 44439 - DNA, 26 bp, Homo sapiens
gctggaatagctctgtctgcgcaccg

SEQ ID NO: 44440 - DNA, 26 bp, Homo sapiens
ctggaatagctctgtctgcgcaccgg

SEQ ID NO: 44441 - DNA, 26 bp, Homo sapiens
tggaatagctctgtctgcgcaccggg

SEQ ID NO: 44442 - DNA, 26 bp, Homo sapiens
ggaatagctctgtctgcgcaccgggg

SEQ ID NO: 44443 - DNA, 26 bp, Homo sapiens
gaatagctctgtctgcgcaccggggc

SEQ ID NO: 44444 - DNA, 26 bp, Homo sapiens
aatagctctgtctgcgcaccggggca

SEQ ID NO: 44445 - DNA, 26 bp, Homo sapiens
atagctctgtctgcgcaccggggcag

SEQ ID NO: 44446 - DNA, 26 bp, Homo sapiens
tagctctgtctgcgcaccggggcagg

SEQ ID NO: 44447 - DNA, 26 bp, Homo sapiens
agctctgtctgcgcaccggggcaggc

SEQ ID NO: 44448 - DNA, 26 bp, Homo sapiens
gctctgtctgcgcaccggggcaggcg

SEQ ID NO: 44449 - DNA, 26 bp, Homo sapiens
ctctgtctgcgcaccggggcaggcgg

SEQ ID NO: 44450 - DNA, 26 bp, Homo sapiens
tctgtctgcgcaccggggcaggcggc

SEQ ID NO: 44451 - DNA, 26 bp, Homo sapiens
ctgtctgcgcaccggggcaggcggct

SEQ ID NO: 44452 - DNA, 26 bp, Homo sapiens
tgtctgcgcaccggggcaggcggctc

SEQ ID NO: 44453 - DNA, 26 bp, Homo sapiens
gtctgcgcaccggggcaggcggctcg

SEQ ID NO: 44454 - DNA, 26 bp, Homo sapiens
tctgcgcaccggggcaggcggctcgc

SEQ ID NO: 44455 - DNA, 26 bp, Homo sapiens
ctgcgcaccggggcaggcggctcgct

SEQ ID NO: 44456 - DNA, 26 bp, Homo sapiens
tgcgcaccggggcaggcggctcgctc

SEQ ID NO: 44457 - DNA, 26 bp, Homo sapiens
gcgcaccggggcaggcggctcgctct

SEQ ID NO: 44458 - DNA, 26 bp, Homo sapiens
cgcaccggggcaggcggctcgctctt

SEQ ID NO: 44459 - DNA, 26 bp, Homo sapiens
gcaccggggcaggcggctcgctcttg

SEQ ID NO: 44460 - DNA, 26 bp, Homo sapiens
caccggggcaggcggctcgctcttgc

SEQ ID NO: 44461 - DNA, 26 bp, Homo sapiens
accggggcaggcggctcgctcttgcg

SEQ ID NO: 44462 - DNA, 26 bp, Homo sapiens
ccggggcaggcggctcgctcttgcgg

SEQ ID NO: 44463 - DNA, 26 bp, Homo sapiens
cggggcaggcggctcgctcttgcggg

SEQ ID NO: 44464 - DNA, 26 bp, Homo sapiens
ggggcaggcggctcgctcttgcgggc

SEQ ID NO: 44465 - DNA, 26 bp, Homo sapiens
gggcaggcggctcgctcttgcgggcg

SEQ ID NO: 44466 - DNA, 26 bp, Homo sapiens
ggcaggcggctcgctcttgcgggcgg

SEQ ID NO: 44467 - DNA, 26 bp, Homo sapiens
gcaggcggctcgctcttgcgggcgga

SEQ ID NO: 44468 - DNA, 26 bp, Homo sapiens
caggcggctcgctcttgcgggcggat

SEQ ID NO: 44469 - DNA, 26 bp, Homo sapiens
aggcggctcgctcttgcgggcggatt

SEQ ID NO: 44470 - DNA, 26 bp, Homo sapiens
ggcggctcgctcttgcgggcggattc

SEQ ID NO: 44471 - DNA, 26 bp, Homo sapiens
gcggctcgctcttgcgggcggattcc

SEQ ID NO: 44472 - DNA, 26 bp, Homo sapiens
cggctcgctcttgcgggcggattcct

SEQ ID NO: 44473 - DNA, 26 bp, Homo sapiens
ggctcgctcttgcgggcggattcctg

SEQ ID NO: 44474 - DNA, 26 bp, Homo sapiens
gctcgctcttgcgggcggattcctgg

SEQ ID NO: 44475 - DNA, 26 bp, Homo sapiens
ctcgctcttgcgggcggattcctggt

SEQ ID NO: 44476 - DNA, 26 bp, Homo sapiens
tcgctcttgcgggcggattcctggtt

SEQ ID NO: 44477 - DNA, 26 bp, Homo sapiens
cgctcttgcgggcggattcctggttc

SEQ ID NO: 44478 - DNA, 26 bp, Homo sapiens
gctcttgcgggcggattcctggttca

SEQ ID NO: 44479 - DNA, 26 bp, Homo sapiens
ctcttgcgggcggattcctggttcag

SEQ ID NO: 44480 - DNA, 26 bp, Homo sapiens
tcttgcgggcggattcctggttcagc

SEQ ID NO: 44481 - DNA, 26 bp, Homo sapiens
cttgcgggcggattcctggttcagcg

SEQ ID NO: 44482 - DNA, 26 bp, Homo sapiens
ttgcgggcggattcctggttcagcgg

SEQ ID NO: 44483 - DNA, 26 bp, Homo sapiens
tgcgggcggattcctggttcagcggg

SEQ ID NO: 44484 - DNA, 26 bp, Homo sapiens
gcgggcggattcctggttcagcgggg

SEQ ID NO: 44485 - DNA, 26 bp, Homo sapiens
cgggcggattcctggttcagcggggt

SEQ ID NO: 44486 - DNA, 26 bp, Homo sapiens
gggcggattcctggttcagcggggtc

SEQ ID NO: 44487 - DNA, 26 bp, Homo sapiens
ggcggattcctggttcagcggggtct

SEQ ID NO: 44488 - DNA, 26 bp, Homo sapiens
gcggattcctggttcagcggggtctc

SEQ ID NO: 44489 - DNA, 26 bp, Homo sapiens
cggattcctggttcagcggggtctcc

SEQ ID NO: 44490 - DNA, 26 bp, Homo sapiens
ggattcctggttcagcggggtctccc

SEQ ID NO: 44491 - DNA, 26 bp, Homo sapiens
gattcctggttcagcggggtctccct

SEQ ID NO: 44492 - DNA, 26 bp, Homo sapiens
attcctggttcagcggggtctccctg

SEQ ID NO: 44493 - DNA, 26 bp, Homo sapiens
ttcctggttcagcggggtctccctgg

SEQ ID NO: 44494 - DNA, 26 bp, Homo sapiens
tcctggttcagcggggtctccctgga

SEQ ID NO: 44495 - DNA, 26 bp, Homo sapiens
cctggttcagcggggtctccctggag

SEQ ID NO: 44496 - DNA, 26 bp, Homo sapiens
ctggttcagcggggtctccctggagc

SEQ ID NO: 44497 - DNA, 26 bp, Homo sapiens
tggttcagcggggtctccctggagcc

SEQ ID NO: 44498 - DNA, 26 bp, Homo sapiens
ggttcagcggggtctccctggagccg

SEQ ID NO: 44499 - DNA, 26 bp, Homo sapiens
gttcagcggggtctccctggagccgg

SEQ ID NO: 44500 - DNA, 26 bp, Homo sapiens
ttcagcggggtctccctggagccggc

SEQ ID NO: 44501 - DNA, 26 bp, Homo sapiens
tcagcggggtctccctggagccggcg

SEQ ID NO: 44502 - DNA, 26 bp, Homo sapiens
cagcggggtctccctggagccggcgg

SEQ ID NO: 44503 - DNA, 26 bp, Homo sapiens
agcggggtctccctggagccggcggc

SEQ ID NO: 44504 - DNA, 26 bp, Homo sapiens
gcggggtctccctggagccggcggcc

SEQ ID NO: 44505 - DNA, 26 bp, Homo sapiens
cggggtctccctggagccggcggccg

SEQ ID NO: 44506 - DNA, 26 bp, Homo sapiens
ggggtctccctggagccggcggccgc

SEQ ID NO: 44507 - DNA, 26 bp, Homo sapiens
gggtctccctggagccggcggccgcg

SEQ ID NO: 44508 - DNA, 26 bp, Homo sapiens
ggtctccctggagccggcggccgcgt

SEQ ID NO: 44509 - DNA, 26 bp, Homo sapiens
gtctccctggagccggcggccgcgtc

SEQ ID NO: 44510 - DNA, 26 bp, Homo sapiens
tctccctggagccggcggccgcgtcc

SEQ ID NO: 44511 - DNA, 26 bp, Homo sapiens
ctccctggagccggcggccgcgtccg

SEQ ID NO: 44512 - DNA, 26 bp, Homo sapiens
tccctggagccggcggccgcgtccgc

SEQ ID NO: 44513 - DNA, 26 bp, Homo sapiens
ccctggagccggcggccgcgtccgcg

SEQ ID NO: 44514 - DNA, 26 bp, Homo sapiens
cctggagccggcggccgcgtccgcgc

SEQ ID NO: 44515 - DNA, 26 bp, Homo sapiens
ctggagccggcggccgcgtccgcgcc

SEQ ID NO: 44516 - DNA, 26 bp, Homo sapiens
tggagccggcggccgcgtccgcgccg

SEQ ID NO: 44517 - DNA, 26 bp, Homo sapiens
ggagccggcggccgcgtccgcgccgc

SEQ ID NO: 44518 - DNA, 26 bp, Homo sapiens
gagccggcggccgcgtccgcgccgct

SEQ ID NO: 44519 - DNA, 26 bp, Homo sapiens
agccggcggccgcgtccgcgccgctg

SEQ ID NO: 44520 - DNA, 26 bp, Homo sapiens
gccggcggccgcgtccgcgccgctgc

SEQ ID NO: 44521 - DNA, 26 bp, Homo sapiens
ccggcggccgcgtccgcgccgctgct

SEQ ID NO: 44522 - DNA, 26 bp, Homo sapiens
cggcggccgcgtccgcgccgctgctg

SEQ ID NO: 44523 - DNA, 26 bp, Homo sapiens
ggcggccgcgtccgcgccgctgctgc

SEQ ID NO: 44524 - DNA, 26 bp, Homo sapiens
gcggccgcgtccgcgccgctgctgcc

SEQ ID NO: 44525 - DNA, 26 bp, Homo sapiens
cggccgcgtccgcgccgctgctgcct

SEQ ID NO: 44526 - DNA, 26 bp, Homo sapiens
ggccgcgtccgcgccgctgctgcctg

SEQ ID NO: 44527 - DNA, 26 bp, Homo sapiens
gccgcgtccgcgccgctgctgcctgg

SEQ ID NO: 44528 - DNA, 26 bp, Homo sapiens
ccgcgtccgcgccgctgctgcctggc

SEQ ID NO: 44529 - DNA, 26 bp, Homo sapiens
cgcgtccgcgccgctgctgcctggct

SEQ ID NO: 44530 - DNA, 26 bp, Homo sapiens
gcgtccgcgccgctgctgcctggctc

SEQ ID NO: 44531 - DNA, 26 bp, Homo sapiens
cgtccgcgccgctgctgcctggctcg

SEQ ID NO: 44532 - DNA, 26 bp, Homo sapiens
gtccgcgccgctgctgcctggctcgc

SEQ ID NO: 44533 - DNA, 26 bp, Homo sapiens
tccgcgccgctgctgcctggctcgct

SEQ ID NO: 44534 - DNA, 26 bp, Homo sapiens
ccgcgccgctgctgcctggctcgctg

SEQ ID NO: 44535 - DNA, 26 bp, Homo sapiens
cgcgccgctgctgcctggctcgctgg

SEQ ID NO: 44536 - DNA, 26 bp, Homo sapiens
gcgccgctgctgcctggctcgctggc

SEQ ID NO: 44537 - DNA, 26 bp, Homo sapiens
cgccgctgctgcctggctcgctggcg

SEQ ID NO: 44538 - DNA, 26 bp, Homo sapiens
gccgctgctgcctggctcgctggcgg

SEQ ID NO: 44539 - DNA, 26 bp, Homo sapiens
ccgctgctgcctggctcgctggcggc

SEQ ID NO: 44540 - DNA, 26 bp, Homo sapiens
cgctgctgcctggctcgctggcggcg

SEQ ID NO: 44541 - DNA, 26 bp, Homo sapiens
gctgctgcctggctcgctggcggcgg

SEQ ID NO: 44542 - DNA, 26 bp, Homo sapiens
ctgctgcctggctcgctggcggcggg

SEQ ID NO: 44543 - DNA, 26 bp, Homo sapiens
tgctgcctggctcgctggcggcgggg

SEQ ID NO: 44544 - DNA, 26 bp, Homo sapiens
gctgcctggctcgctggcggcggggt

SEQ ID NO: 44545 - DNA, 26 bp, Homo sapiens
ctgcctggctcgctggcggcggggtc

SEQ ID NO: 44546 - DNA, 26 bp, Homo sapiens
tgcctggctcgctggcggcggggtcg

SEQ ID NO: 44547 - DNA, 26 bp, Homo sapiens
gcctggctcgctggcggcggggtcgg

SEQ ID NO: 44548 - DNA, 26 bp, Homo sapiens
cctggctcgctggcggcggggtcggg

SEQ ID NO: 44549 - DNA, 26 bp, Homo sapiens
ctggctcgctggcggcggggtcgggg

SEQ ID NO: 44550 - DNA, 26 bp, Homo sapiens
tggctcgctggcggcggggtcggggg

SEQ ID NO: 44551 - DNA, 26 bp, Homo sapiens
ggctcgctggcggcggggtcgggggc

SEQ ID NO: 44552 - DNA, 26 bp, Homo sapiens
gctcgctggcggcggggtcgggggct

SEQ ID NO: 44553 - DNA, 26 bp, Homo sapiens
ctcgctggcggcggggtcgggggctg

SEQ ID NO: 44554 - DNA, 26 bp, Homo sapiens
tcgctggcggcggggtcgggggctgc

SEQ ID NO: 44555 - DNA, 26 bp, Homo sapiens
cgctggcggcggggtcgggggctgcc

SEQ ID NO: 44556 - DNA, 26 bp, Homo sapiens
gctggcggcggggtcgggggctgccg

SEQ ID NO: 44557 - DNA, 26 bp, Homo sapiens
ctggcggcggggtcgggggctgccgg

SEQ ID NO: 44558 - DNA, 26 bp, Homo sapiens
tggcggcggggtcgggggctgccgga

SEQ ID NO: 44559 - DNA, 26 bp, Homo sapiens
ggcggcggggtcgggggctgccggag

SEQ ID NO: 44560 - DNA, 26 bp, Homo sapiens
gcggcggggtcgggggctgccggagc

SEQ ID NO: 44561 - DNA, 26 bp, Homo sapiens
cggcggggtcgggggctgccggagct

SEQ ID NO: 44562 - DNA, 26 bp, Homo sapiens
ggcggggtcgggggctgccggagctg

SEQ ID NO: 44563 - DNA, 26 bp, Homo sapiens
gcggggtcgggggctgccggagctga

SEQ ID NO: 44564 - DNA, 26 bp, Homo sapiens
cggggtcgggggctgccggagctgac

SEQ ID NO: 44565 - DNA, 26 bp, Homo sapiens
ggggtcgggggctgccggagctgact

SEQ ID NO: 44566 - DNA, 26 bp, Homo sapiens
gggtcgggggctgccggagctgactc

SEQ ID NO: 44567 - DNA, 26 bp, Homo sapiens
ggtcgggggctgccggagctgactcc

SEQ ID NO: 44568 - DNA, 26 bp, Homo sapiens
gtcgggggctgccggagctgactcca

SEQ ID NO: 44569 - DNA, 26 bp, Homo sapiens
tcgggggctgccggagctgactccat

SEQ ID NO: 44570 - DNA, 26 bp, Homo sapiens
cgggggctgccggagctgactccatg

SEQ ID NO: 44571 - DNA, 26 bp, Homo sapiens
gggggctgccggagctgactccatgt

SEQ ID NO: 44572 - DNA, 26 bp, Homo sapiens
ggggctgccggagctgactccatgtt

SEQ ID NO: 44573 - DNA, 26 bp, Homo sapiens
gggctgccggagctgactccatgttt

SEQ ID NO: 44574 - DNA, 26 bp, Homo sapiens
ggctgccggagctgactccatgtttt

SEQ ID NO: 44575 - DNA, 26 bp, Homo sapiens
gctgccggagctgactccatgttttt

SEQ ID NO: 44576 - DNA, 26 bp, Homo sapiens
ctgccggagctgactccatgtttttt

SEQ ID NO: 44577 - DNA, 26 bp, Homo sapiens
tgccggagctgactccatgttttttc

SEQ ID NO: 44578 - DNA, 26 bp, Homo sapiens
gccggagctgactccatgttttttcc

SEQ ID NO: 44579 - DNA, 26 bp, Homo sapiens
ccggagctgactccatgttttttccc

SEQ ID NO: 44580 - DNA, 26 bp, Homo sapiens
cggagctgactccatgttttttccca

SEQ ID NO: 44581 - DNA, 26 bp, Homo sapiens
ggagctgactccatgttttttcccaa

SEQ ID NO: 44582 - DNA, 26 bp, Homo sapiens
gagctgactccatgttttttcccaat

SEQ ID NO: 44583 - DNA, 26 bp, Homo sapiens
agctgactccatgttttttcccaatg

SEQ ID NO: 44584 - DNA, 26 bp, Homo sapiens
gctgactccatgttttttcccaatgt

SEQ ID NO: 44585 - DNA, 26 bp, Homo sapiens
ctgactccatgttttttcccaatgta

SEQ ID NO: 44586 - DNA, 26 bp, Homo sapiens
tgactccatgttttttcccaatgtag

SEQ ID NO: 44587 - DNA, 26 bp, Homo sapiens
gactccatgttttttcccaatgtaga

SEQ ID NO: 44588 - DNA, 26 bp, Homo sapiens
actccatgttttttcccaatgtagag

SEQ ID NO: 44589 - DNA, 26 bp, Homo sapiens
ctccatgttttttcccaatgtagaga

SEQ ID NO: 44590 - DNA, 26 bp, Homo sapiens
tccatgttttttcccaatgtagagat

SEQ ID NO: 44591 - DNA, 26 bp, Homo sapiens
ccatgttttttcccaatgtagagatc

SEQ ID NO: 44592 - DNA, 26 bp, Homo sapiens
catgttttttcccaatgtagagatcg

SEQ ID NO: 44593 - DNA, 26 bp, Homo sapiens
atgttttttcccaatgtagagatcgc

SEQ ID NO: 44594 - DNA, 26 bp, Homo sapiens
tgttttttcccaatgtagagatcgct

SEQ ID NO: 44595 - DNA, 26 bp, Homo sapiens
gttttttcccaatgtagagatcgctg

SEQ ID NO: 44596 - DNA, 26 bp, Homo sapiens
ttttttcccaatgtagagatcgctgg

SEQ ID NO: 44597 - DNA, 26 bp, Homo sapiens
tttttcccaatgtagagatcgctgga

SEQ ID NO: 44598 - DNA, 26 bp, Homo sapiens
ttttcccaatgtagagatcgctggag

SEQ ID NO: 44599 - DNA, 26 bp, Homo sapiens
tttcccaatgtagagatcgctggaga

SEQ ID NO: 44600 - DNA, 26 bp, Homo sapiens
ttcccaatgtagagatcgctggagat

SEQ ID NO: 44601 - DNA, 26 bp, Homo sapiens
tcccaatgtagagatcgctggagatg

SEQ ID NO: 44602 - DNA, 26 bp, Homo sapiens
cccaatgtagagatcgctggagatgg

SEQ ID NO: 44603 - DNA, 26 bp, Homo sapiens
ccaatgtagagatcgctggagatggc

SEQ ID NO: 44604 - DNA, 26 bp, Homo sapiens
caatgtagagatcgctggagatggcg

SEQ ID NO: 44605 - DNA, 26 bp, Homo sapiens
aatgtagagatcgctggagatggcga

SEQ ID NO: 44606 - DNA, 26 bp, Homo sapiens
atgtagagatcgctggagatggcgag

SEQ ID NO: 44607 - DNA, 26 bp, Homo sapiens
tgtagagatcgctggagatggcgagc

SEQ ID NO: 44608 - DNA, 26 bp, Homo sapiens
gtagagatcgctggagatggcgagct

SEQ ID NO: 44609 - DNA, 26 bp, Homo sapiens
tagagatcgctggagatggcgagctc

SEQ ID NO: 44610 - DNA, 26 bp, Homo sapiens
agagatcgctggagatggcgagctcc

SEQ ID NO: 44611 - DNA, 26 bp, Homo sapiens
gagatcgctggagatggcgagctccg

SEQ ID NO: 44612 - DNA, 26 bp, Homo sapiens
agatcgctggagatggcgagctccga

SEQ ID NO: 44613 - DNA, 26 bp, Homo sapiens
gatcgctggagatggcgagctccgag

SEQ ID NO: 44614 - DNA, 26 bp, Homo sapiens
atcgctggagatggcgagctccgaga

SEQ ID NO: 44615 - DNA, 26 bp, Homo sapiens
tcgctggagatggcgagctccgagac

SEQ ID NO: 44616 - DNA, 26 bp, Homo sapiens
cgctggagatggcgagctccgagact

SEQ ID NO: 44617 - DNA, 26 bp, Homo sapiens
gctggagatggcgagctccgagactc

SEQ ID NO: 44618 - DNA, 26 bp, Homo sapiens
ctggagatggcgagctccgagactcc

SEQ ID NO: 44619 - DNA, 26 bp, Homo sapiens
tggagatggcgagctccgagactccc

SEQ ID NO: 44620 - DNA, 26 bp, Homo sapiens
ggagatggcgagctccgagactccct

SEQ ID NO: 44621 - DNA, 26 bp, Homo sapiens
gagatggcgagctccgagactccctc

SEQ ID NO: 44622 - DNA, 26 bp, Homo sapiens
agatggcgagctccgagactccctct

SEQ ID NO: 44623 - DNA, 26 bp, Homo sapiens
gatggcgagctccgagactccctcta

SEQ ID NO: 44624 - DNA, 26 bp, Homo sapiens
atggcgagctccgagactccctctat

SEQ ID NO: 44625 - DNA, 26 bp, Homo sapiens
tggcgagctccgagactccctctatc

SEQ ID NO: 44626 - DNA, 26 bp, Homo sapiens
ggcgagctccgagactccctctatct

SEQ ID NO: 44627 - DNA, 26 bp, Homo sapiens
gcgagctccgagactccctctatctt

SEQ ID NO: 44628 - DNA, 26 bp, Homo sapiens
cgagctccgagactccctctatcttc

SEQ ID NO: 44629 - DNA, 26 bp, Homo sapiens
gagctccgagactccctctatcttct

SEQ ID NO: 44630 - DNA, 26 bp, Homo sapiens
agctccgagactccctctatcttctg

SEQ ID NO: 44631 - DNA, 26 bp, Homo sapiens
gctccgagactccctctatcttctgt

SEQ ID NO: 44632 - DNA, 26 bp, Homo sapiens
ctccgagactccctctatcttctgtt

SEQ ID NO: 44633 - DNA, 26 bp, Homo sapiens
tccgagactccctctatcttctgttt

SEQ ID NO: 44634 - DNA, 26 bp, Homo sapiens
ccgagactccctctatcttctgtttt

SEQ ID NO: 44635 - DNA, 26 bp, Homo sapiens
cgagactccctctatcttctgttttc

SEQ ID NO: 44636 - DNA, 26 bp, Homo sapiens
gagactccctctatcttctgttttca

SEQ ID NO: 44637 - DNA, 26 bp, Homo sapiens
agactccctctatcttctgttttcag

SEQ ID NO: 44638 - DNA, 26 bp, Homo sapiens
gactccctctatcttctgttttcaga

SEQ ID NO: 44639 - DNA, 26 bp, Homo sapiens
actccctctatcttctgttttcagag

SEQ ID NO: 44640 - DNA, 26 bp, Homo sapiens
ctccctctatcttctgttttcagagc

SEQ ID NO: 44641 - DNA, 26 bp, Homo sapiens
tccctctatcttctgttttcagagca

SEQ ID NO: 44642 - DNA, 26 bp, Homo sapiens
ccctctatcttctgttttcagagcaa

SEQ ID NO: 44643 - DNA, 26 bp, Homo sapiens
cctctatcttctgttttcagagcaac

SEQ ID NO: 44644 - DNA, 26 bp, Homo sapiens
ctctatcttctgttttcagagcaact

SEQ ID NO: 44645 - DNA, 26 bp, Homo sapiens
tctatcttctgttttcagagcaactc

SEQ ID NO: 44646 - DNA, 26 bp, Homo sapiens
ctatcttctgttttcagagcaactct

SEQ ID NO: 44647 - DNA, 26 bp, Homo sapiens
tatcttctgttttcagagcaactcta

SEQ ID NO: 44648 - DNA, 26 bp, Homo sapiens
atcttctgttttcagagcaactctat

SEQ ID NO: 44649 - DNA, 26 bp, Homo sapiens
tcttctgttttcagagcaactctatg

SEQ ID NO: 44650 - DNA, 26 bp, Homo sapiens
cttctgttttcagagcaactctatgg

SEQ ID NO: 44651 - DNA, 26 bp, Homo sapiens
ttctgttttcagagcaactctatggt

SEQ ID NO: 44652 - DNA, 26 bp, Homo sapiens
tctgttttcagagcaactctatggta

SEQ ID NO: 44653 - DNA, 26 bp, Homo sapiens
ctgttttcagagcaactctatggtac

SEQ ID NO: 44654 - DNA, 26 bp, Homo sapiens
tcactttttaacaaggtggtaaaact

SEQ ID NO: 44655 - DNA, 26 bp, Homo sapiens
cactttttaacaaggtggtaaaactt

SEQ ID NO: 44656 - DNA, 26 bp, Homo sapiens
actttttaacaaggtggtaaaacttc

SEQ ID NO: 44657 - DNA, 26 bp, Homo sapiens
ctttttaacaaggtggtaaaacttcc

SEQ ID NO: 44658 - DNA, 26 bp, Homo sapiens
tttttaacaaggtggtaaaacttccc

SEQ ID NO: 44659 - DNA, 26 bp, Homo sapiens
ttttaacaaggtggtaaaacttccct

SEQ ID NO: 44660 - DNA, 26 bp, Homo sapiens
tttaacaaggtggtaaaacttccctt

SEQ ID NO: 44661 - DNA, 26 bp, Homo sapiens
ttaacaaggtggtaaaacttcccttt

SEQ ID NO: 44662 - DNA, 26 bp, Homo sapiens
taacaaggtggtaaaacttccctttt

SEQ ID NO: 44663 - DNA, 26 bp, Homo sapiens
aacaaggtggtaaaacttcccttttg

SEQ ID NO: 44664 - DNA, 26 bp, Homo sapiens
acaaggtggtaaaacttcccttttgc

SEQ ID NO: 44665 - DNA, 26 bp, Homo sapiens
caaggtggtaaaacttcccttttgca

SEQ ID NO: 44666 - DNA, 26 bp, Homo sapiens
aaggtggtaaaacttcccttttgcaa

SEQ ID NO: 44667 - DNA, 26 bp, Homo sapiens
aggtggtaaaacttcccttttgcaaa

SEQ ID NO: 44668 - DNA, 26 bp, Homo sapiens
ggtggtaaaacttcccttttgcaaag

SEQ ID NO: 44669 - DNA, 26 bp, Homo sapiens
gtggtaaaacttcccttttgcaaaga

SEQ ID NO: 44670 - DNA, 26 bp, Homo sapiens
tggtaaaacttcccttttgcaaagaa

SEQ ID NO: 44671 - DNA, 26 bp, Homo sapiens
ggtaaaacttcccttttgcaaagaat

SEQ ID NO: 44672 - DNA, 26 bp, Homo sapiens
gtaaaacttcccttttgcaaagaata

SEQ ID NO: 44673 - DNA, 26 bp, Homo sapiens
taaaacttcccttttgcaaagaatag

SEQ ID NO: 44674 - DNA, 26 bp, Homo sapiens
aaaacttcccttttgcaaagaatagc

SEQ ID NO: 44675 - DNA, 26 bp, Homo sapiens
aaacttcccttttgcaaagaatagca

SEQ ID NO: 44676 - DNA, 26 bp, Homo sapiens
aacttcccttttgcaaagaatagcat

SEQ ID NO: 44677 - DNA, 26 bp, Homo sapiens
acttcccttttgcaaagaatagcata

SEQ ID NO: 44678 - DNA, 26 bp, Homo sapiens
cttcccttttgcaaagaatagcataa

SEQ ID NO: 44679 - DNA, 26 bp, Homo sapiens
ttcccttttgcaaagaatagcataac

SEQ ID NO: 44680 - DNA, 26 bp, Homo sapiens
tcccttttgcaaagaatagcataaca

SEQ ID NO: 44681 - DNA, 26 bp, Homo sapiens
cccttttgcaaagaatagcataacat

SEQ ID NO: 44682 - DNA, 26 bp, Homo sapiens
ccttttgcaaagaatagcataacatt

SEQ ID NO: 44683 - DNA, 26 bp, Homo sapiens
cttttgcaaagaatagcataacattt

SEQ ID NO: 44684 - DNA, 26 bp, Homo sapiens
ttttgcaaagaatagcataacatttt

SEQ ID NO: 44685 - DNA, 26 bp, Homo sapiens
tttgcaaagaatagcataacattttt

SEQ ID NO: 44686 - DNA, 26 bp, Homo sapiens
ttgcaaagaatagcataacatttttg

SEQ ID NO: 44687 - DNA, 26 bp, Homo sapiens
tgcaaagaatagcataacatttttgt

SEQ ID NO: 44688 - DNA, 26 bp, Homo sapiens
gcaaagaatagcataacatttttgta

SEQ ID NO: 44689 - DNA, 26 bp, Homo sapiens
caaagaatagcataacatttttgtat

SEQ ID NO: 44690 - DNA, 26 bp, Homo sapiens
aaagaatagcataacatttttgtata

SEQ ID NO: 44691 - DNA, 26 bp, Homo sapiens
aagaatagcataacatttttgtatat

SEQ ID NO: 44692 - DNA, 26 bp, Homo sapiens
agaatagcataacatttttgtatatg

SEQ ID NO: 44693 - DNA, 26 bp, Homo sapiens
gaatagcataacatttttgtatatgt

SEQ ID NO: 44694 - DNA, 26 bp, Homo sapiens
aatagcataacatttttgtatatgtc

SEQ ID NO: 44695 - DNA, 26 bp, Homo sapiens
atagcataacatttttgtatatgtca

SEQ ID NO: 44696 - DNA, 26 bp, Homo sapiens
tagcataacatttttgtatatgtcaa

SEQ ID NO: 44697 - DNA, 26 bp, Homo sapiens
agcataacatttttgtatatgtcaat

SEQ ID NO: 44698 - DNA, 26 bp, Homo sapiens
gcataacatttttgtatatgtcaatc

SEQ ID NO: 44699 - DNA, 26 bp, Homo sapiens
cataacatttttgtatatgtcaatca

SEQ ID NO: 44700 - DNA, 26 bp, Homo sapiens
ataacatttttgtatatgtcaatcag

SEQ ID NO: 44701 - DNA, 26 bp, Homo sapiens
taacatttttgtatatgtcaatcagc

SEQ ID NO: 44702 - DNA, 26 bp, Homo sapiens
aacatttttgtatatgtcaatcagcc

SEQ ID NO: 44703 - DNA, 26 bp, Homo sapiens
acatttttgtatatgtcaatcagcct

SEQ ID NO: 44704 - DNA, 26 bp, Homo sapiens
catttttgtatatgtcaatcagcctg

SEQ ID NO: 44705 - DNA, 26 bp, Homo sapiens
atttttgtatatgtcaatcagcctgt

SEQ ID NO: 44706 - DNA, 26 bp, Homo sapiens
tttttgtatatgtcaatcagcctgtt

SEQ ID NO: 44707 - DNA, 26 bp, Homo sapiens
ttttgtatatgtcaatcagcctgttt

SEQ ID NO: 44708 - DNA, 26 bp, Homo sapiens
tttgtatatgtcaatcagcctgtttt

SEQ ID NO: 44709 - DNA, 26 bp, Homo sapiens
ttgtatatgtcaatcagcctgttttg

SEQ ID NO: 44710 - DNA, 26 bp, Homo sapiens
tgtatatgtcaatcagcctgttttgc

SEQ ID NO: 44711 - DNA, 26 bp, Homo sapiens
gtatatgtcaatcagcctgttttgca

SEQ ID NO: 44712 - DNA, 26 bp, Homo sapiens
tatatgtcaatcagcctgttttgcac

SEQ ID NO: 44713 - DNA, 26 bp, Homo sapiens
atatgtcaatcagcctgttttgcacc

SEQ ID NO: 44714 - DNA, 26 bp, Homo sapiens
tatgtcaatcagcctgttttgcacca

SEQ ID NO: 44715 - DNA, 26 bp, Homo sapiens
atgtcaatcagcctgttttgcaccaa

SEQ ID NO: 44716 - DNA, 26 bp, Homo sapiens
tgtcaatcagcctgttttgcaccaac

SEQ ID NO: 44717 - DNA, 26 bp, Homo sapiens
gtcaatcagcctgttttgcaccaact

SEQ ID NO: 44718 - DNA, 26 bp, Homo sapiens
tcaatcagcctgttttgcaccaactt

SEQ ID NO: 44719 - DNA, 26 bp, Homo sapiens
caatcagcctgttttgcaccaacttg

SEQ ID NO: 44720 - DNA, 26 bp, Homo sapiens
aatcagcctgttttgcaccaacttga

SEQ ID NO: 44721 - DNA, 26 bp, Homo sapiens
atcagcctgttttgcaccaacttgaa

SEQ ID NO: 44722 - DNA, 26 bp, Homo sapiens
tcagcctgttttgcaccaacttgaaa

SEQ ID NO: 44723 - DNA, 26 bp, Homo sapiens
cagcctgttttgcaccaacttgaaag

SEQ ID NO: 44724 - DNA, 26 bp, Homo sapiens
agcctgttttgcaccaacttgaaagc

SEQ ID NO: 44725 - DNA, 26 bp, Homo sapiens
gcctgttttgcaccaacttgaaagca

SEQ ID NO: 44726 - DNA, 26 bp, Homo sapiens
cctgttttgcaccaacttgaaagcaa

SEQ ID NO: 44727 - DNA, 26 bp, Homo sapiens
ctgttttgcaccaacttgaaagcaat

SEQ ID NO: 44728 - DNA, 26 bp, Homo sapiens
tgttttgcaccaacttgaaagcaatg

SEQ ID NO: 44729 - DNA, 26 bp, Homo sapiens
gttttgcaccaacttgaaagcaatga

SEQ ID NO: 44730 - DNA, 26 bp, Homo sapiens
ttttgcaccaacttgaaagcaatgaa

SEQ ID NO: 44731 - DNA, 26 bp, Homo sapiens
tttgcaccaacttgaaagcaatgaac

SEQ ID NO: 44732 - DNA, 26 bp, Homo sapiens
ttgcaccaacttgaaagcaatgaaca

SEQ ID NO: 44733 - DNA, 26 bp, Homo sapiens
tgcaccaacttgaaagcaatgaacac

SEQ ID NO: 44734 - DNA, 26 bp, Homo sapiens
gcaccaacttgaaagcaatgaacaca

SEQ ID NO: 44735 - DNA, 26 bp, Homo sapiens
caccaacttgaaagcaatgaacacaa

SEQ ID NO: 44736 - DNA, 26 bp, Homo sapiens
accaacttgaaagcaatgaacacaat

SEQ ID NO: 44737 - DNA, 26 bp, Homo sapiens
ccaacttgaaagcaatgaacacaatc

SEQ ID NO: 44738 - DNA, 26 bp, Homo sapiens
caacttgaaagcaatgaacacaatct

SEQ ID NO: 44739 - DNA, 26 bp, Homo sapiens
aacttgaaagcaatgaacacaatctc

SEQ ID NO: 44740 - DNA, 26 bp, Homo sapiens
acttgaaagcaatgaacacaatctcc

SEQ ID NO: 44741 - DNA, 26 bp, Homo sapiens
cttgaaagcaatgaacacaatctcca

SEQ ID NO: 44742 - DNA, 26 bp, Homo sapiens
ttgaaagcaatgaacacaatctccat

SEQ ID NO: 44743 - DNA, 26 bp, Homo sapiens
tgaaagcaatgaacacaatctccatt

SEQ ID NO: 44744 - DNA, 26 bp, Homo sapiens
gaaagcaatgaacacaatctccattc

SEQ ID NO: 44745 - DNA, 26 bp, Homo sapiens
aaagcaatgaacacaatctccattcc

SEQ ID NO: 44746 - DNA, 26 bp, Homo sapiens
aagcaatgaacacaatctccattcca

SEQ ID NO: 44747 - DNA, 26 bp, Homo sapiens
agcaatgaacacaatctccattccaa

SEQ ID NO: 44748 - DNA, 26 bp, Homo sapiens
gcaatgaacacaatctccattccaac

SEQ ID NO: 44749 - DNA, 26 bp, Homo sapiens
caatgaacacaatctccattccaacg

SEQ ID NO: 44750 - DNA, 26 bp, Homo sapiens
aatgaacacaatctccattccaacga

SEQ ID NO: 44751 - DNA, 26 bp, Homo sapiens
atgaacacaatctccattccaacgat

SEQ ID NO: 44752 - DNA, 26 bp, Homo sapiens
tgaacacaatctccattccaacgatg

SEQ ID NO: 44753 - DNA, 26 bp, Homo sapiens
gaacacaatctccattccaacgatga

SEQ ID NO: 44754 - DNA, 26 bp, Homo sapiens
aacacaatctccattccaacgatgat

SEQ ID NO: 44755 - DNA, 26 bp, Homo sapiens
acacaatctccattccaacgatgata

SEQ ID NO: 44756 - DNA, 26 bp, Homo sapiens
cacaatctccattccaacgatgatat

SEQ ID NO: 44757 - DNA, 26 bp, Homo sapiens
acaatctccattccaacgatgatata

SEQ ID NO: 44758 - DNA, 26 bp, Homo sapiens
caatctccattccaacgatgatataa

SEQ ID NO: 44759 - DNA, 26 bp, Homo sapiens
aatctccattccaacgatgatataaa

SEQ ID NO: 44760 - DNA, 26 bp, Homo sapiens
atctccattccaacgatgatataaat

SEQ ID NO: 44761 - DNA, 26 bp, Homo sapiens
tctccattccaacgatgatataaatg

SEQ ID NO: 44762 - DNA, 26 bp, Homo sapiens
ctccattccaacgatgatataaatgg

SEQ ID NO: 44763 - DNA, 26 bp, Homo sapiens
tccattccaacgatgatataaatgga

SEQ ID NO: 44764 - DNA, 26 bp, Homo sapiens
ccattccaacgatgatataaatggag

SEQ ID NO: 44765 - DNA, 26 bp, Homo sapiens
cattccaacgatgatataaatggaga

SEQ ID NO: 44766 - DNA, 26 bp, Homo sapiens
attccaacgatgatataaatggagaa

SEQ ID NO: 44767 - DNA, 26 bp, Homo sapiens
ttccaacgatgatataaatggagaag

SEQ ID NO: 44768 - DNA, 26 bp, Homo sapiens
tccaacgatgatataaatggagaaga

SEQ ID NO: 44769 - DNA, 26 bp, Homo sapiens
ccaacgatgatataaatggagaagaa

SEQ ID NO: 44770 - DNA, 26 bp, Homo sapiens
caacgatgatataaatggagaagaac

SEQ ID NO: 44771 - DNA, 26 bp, Homo sapiens
aacgatgatataaatggagaagaaca

SEQ ID NO: 44772 - DNA, 26 bp, Homo sapiens
acgatgatataaatggagaagaacag

SEQ ID NO: 44773 - DNA, 26 bp, Homo sapiens
cgatgatataaatggagaagaacagg

SEQ ID NO: 44774 - DNA, 26 bp, Homo sapiens
gatgatataaatggagaagaacagga

SEQ ID NO: 44775 - DNA, 26 bp, Homo sapiens
atgatataaatggagaagaacaggaa

SEQ ID NO: 44776 - DNA, 26 bp, Homo sapiens
tgatataaatggagaagaacaggaag

SEQ ID NO: 44777 - DNA, 26 bp, Homo sapiens
gatataaatggagaagaacaggaaga

SEQ ID NO: 44778 - DNA, 26 bp, Homo sapiens
atataaatggagaagaacaggaagaa

SEQ ID NO: 44779 - DNA, 26 bp, Homo sapiens
tataaatggagaagaacaggaagaag

SEQ ID NO: 44780 - DNA, 26 bp, Homo sapiens
ataaatggagaagaacaggaagaagt

SEQ ID NO: 44781 - DNA, 26 bp, Homo sapiens
taaatggagaagaacaggaagaagtt

SEQ ID NO: 44782 - DNA, 26 bp, Homo sapiens
aaatggagaagaacaggaagaagtta

SEQ ID NO: 44783 - DNA, 26 bp, Homo sapiens
aatggagaagaacaggaagaagttag

SEQ ID NO: 44784 - DNA, 26 bp, Homo sapiens
atggagaagaacaggaagaagttagg

SEQ ID NO: 44785 - DNA, 26 bp, Homo sapiens
tggagaagaacaggaagaagttaggg

SEQ ID NO: 44786 - DNA, 26 bp, Homo sapiens
ggagaagaacaggaagaagttagggt

SEQ ID NO: 44787 - DNA, 26 bp, Homo sapiens
gagaagaacaggaagaagttagggtg

SEQ ID NO: 44788 - DNA, 26 bp, Homo sapiens
agaagaacaggaagaagttagggtgt

SEQ ID NO: 44789 - DNA, 26 bp, Homo sapiens
gaagaacaggaagaagttagggtgtt

SEQ ID NO: 44790 - DNA, 26 bp, Homo sapiens
aagaacaggaagaagttagggtgttc

SEQ ID NO: 44791 - DNA, 26 bp, Homo sapiens
agaacaggaagaagttagggtgttct

SEQ ID NO: 44792 - DNA, 26 bp, Homo sapiens
gaacaggaagaagttagggtgttcta

SEQ ID NO: 44793 - DNA, 26 bp, Homo sapiens
aacaggaagaagttagggtgttctaa

SEQ ID NO: 44794 - DNA, 26 bp, Homo sapiens
acaggaagaagttagggtgttctaaa

SEQ ID NO: 44795 - DNA, 26 bp, Homo sapiens
caggaagaagttagggtgttctaaaa

SEQ ID NO: 44796 - DNA, 26 bp, Homo sapiens
aggaagaagttagggtgttctaaaac

SEQ ID NO: 44797 - DNA, 26 bp, Homo sapiens
ggaagaagttagggtgttctaaaaca

SEQ ID NO: 44798 - DNA, 26 bp, Homo sapiens
gaagaagttagggtgttctaaaacag

SEQ ID NO: 44799 - DNA, 26 bp, Homo sapiens
aagaagttagggtgttctaaaacagt

SEQ ID NO: 44800 - DNA, 26 bp, Homo sapiens
agaagttagggtgttctaaaacagta

SEQ ID NO: 44801 - DNA, 26 bp, Homo sapiens
gaagttagggtgttctaaaacagtat

SEQ ID NO: 44802 - DNA, 26 bp, Homo sapiens
aagttagggtgttctaaaacagtatc

SEQ ID NO: 44803 - DNA, 26 bp, Homo sapiens
agttagggtgttctaaaacagtatcc

SEQ ID NO: 44804 - DNA, 26 bp, Homo sapiens
gttagggtgttctaaaacagtatccc

SEQ ID NO: 44805 - DNA, 26 bp, Homo sapiens
ttagggtgttctaaaacagtatcccc

SEQ ID NO: 44806 - DNA, 26 bp, Homo sapiens
tagggtgttctaaaacagtatcccca

SEQ ID NO: 44807 - DNA, 26 bp, Homo sapiens
agggtgttctaaaacagtatccccaa

SEQ ID NO: 44808 - DNA, 26 bp, Homo sapiens
gggtgttctaaaacagtatccccaaa

SEQ ID NO: 44809 - DNA, 26 bp, Homo sapiens
ggtgttctaaaacagtatccccaaac

SEQ ID NO: 44810 - DNA, 26 bp, Homo sapiens
gtgttctaaaacagtatccccaaacc

SEQ ID NO: 44811 - DNA, 26 bp, Homo sapiens
tgttctaaaacagtatccccaaaccc

SEQ ID NO: 44812 - DNA, 26 bp, Homo sapiens
gttctaaaacagtatccccaaaccca

SEQ ID NO: 44813 - DNA, 26 bp, Homo sapiens
ttctaaaacagtatccccaaacccaa

SEQ ID NO: 44814 - DNA, 26 bp, Homo sapiens
tctaaaacagtatccccaaacccaat

SEQ ID NO: 44815 - DNA, 26 bp, Homo sapiens
ctaaaacagtatccccaaacccaatg

SEQ ID NO: 44816 - DNA, 26 bp, Homo sapiens
taaaacagtatccccaaacccaatgg

SEQ ID NO: 44817 - DNA, 26 bp, Homo sapiens
aaaacagtatccccaaacccaatggt

SEQ ID NO: 44818 - DNA, 26 bp, Homo sapiens
aaacagtatccccaaacccaatggtg

SEQ ID NO: 44819 - DNA, 26 bp, Homo sapiens
aacagtatccccaaacccaatggtgg

SEQ ID NO: 44820 - DNA, 26 bp, Homo sapiens
acagtatccccaaacccaatggtggt

SEQ ID NO: 44821 - DNA, 26 bp, Homo sapiens
cagtatccccaaacccaatggtggtg

SEQ ID NO: 44822 - DNA, 26 bp, Homo sapiens
agtatccccaaacccaatggtggtga

SEQ ID NO: 44823 - DNA, 26 bp, Homo sapiens
gtatccccaaacccaatggtggtgag

SEQ ID NO: 44824 - DNA, 26 bp, Homo sapiens
tatccccaaacccaatggtggtgagt

SEQ ID NO: 44825 - DNA, 26 bp, Homo sapiens
atccccaaacccaatggtggtgagtg

SEQ ID NO: 44826 - DNA, 26 bp, Homo sapiens
tccccaaacccaatggtggtgagtgt

SEQ ID NO: 44827 - DNA, 26 bp, Homo sapiens
ccccaaacccaatggtggtgagtgtg

SEQ ID NO: 44828 - DNA, 26 bp, Homo sapiens
cccaaacccaatggtggtgagtgtga

SEQ ID NO: 44829 - DNA, 26 bp, Homo sapiens
ccaaacccaatggtggtgagtgtgac

SEQ ID NO: 44830 - DNA, 26 bp, Homo sapiens
caaacccaatggtggtgagtgtgaca

SEQ ID NO: 44831 - DNA, 26 bp, Homo sapiens
aaacccaatggtggtgagtgtgacaa

SEQ ID NO: 44832 - DNA, 26 bp, Homo sapiens
aacccaatggtggtgagtgtgacaaa

SEQ ID NO: 44833 - DNA, 26 bp, Homo sapiens
acccaatggtggtgagtgtgacaaag

SEQ ID NO: 44834 - DNA, 26 bp, Homo sapiens
cccaatggtggtgagtgtgacaaagc

SEQ ID NO: 44835 - DNA, 26 bp, Homo sapiens
ccaatggtggtgagtgtgacaaagca

SEQ ID NO: 44836 - DNA, 26 bp, Homo sapiens
caatggtggtgagtgtgacaaagcag

SEQ ID NO: 44837 - DNA, 26 bp, Homo sapiens
aatggtggtgagtgtgacaaagcaga

SEQ ID NO: 44838 - DNA, 26 bp, Homo sapiens
atggtggtgagtgtgacaaagcagaa

SEQ ID NO: 44839 - DNA, 26 bp, Homo sapiens
tggtggtgagtgtgacaaagcagaaa

SEQ ID NO: 44840 - DNA, 26 bp, Homo sapiens
ggtggtgagtgtgacaaagcagaaat

SEQ ID NO: 44841 - DNA, 26 bp, Homo sapiens
gtggtgagtgtgacaaagcagaaata

SEQ ID NO: 44842 - DNA, 26 bp, Homo sapiens
tggtgagtgtgacaaagcagaaatag

SEQ ID NO: 44843 - DNA, 26 bp, Homo sapiens
ggtgagtgtgacaaagcagaaataga

SEQ ID NO: 44844 - DNA, 26 bp, Homo sapiens
gtgagtgtgacaaagcagaaatagaa

SEQ ID NO: 44845 - DNA, 26 bp, Homo sapiens
tgagtgtgacaaagcagaaatagaag

SEQ ID NO: 44846 - DNA, 26 bp, Homo sapiens
gagtgtgacaaagcagaaatagaagg

SEQ ID NO: 44847 - DNA, 26 bp, Homo sapiens
agtgtgacaaagcagaaatagaaggc

SEQ ID NO: 44848 - DNA, 26 bp, Homo sapiens
gtgtgacaaagcagaaatagaaggca

SEQ ID NO: 44849 - DNA, 26 bp, Homo sapiens
tgtgacaaagcagaaatagaaggcat

SEQ ID NO: 44850 - DNA, 26 bp, Homo sapiens
gtgacaaagcagaaatagaaggcatt

SEQ ID NO: 44851 - DNA, 26 bp, Homo sapiens
tgacaaagcagaaatagaaggcattc

SEQ ID NO: 44852 - DNA, 26 bp, Homo sapiens
gacaaagcagaaatagaaggcattct

SEQ ID NO: 44853 - DNA, 26 bp, Homo sapiens
acaaagcagaaatagaaggcattctc

SEQ ID NO: 44854 - DNA, 26 bp, Homo sapiens
caaagcagaaatagaaggcattctcg

SEQ ID NO: 44855 - DNA, 26 bp, Homo sapiens
aaagcagaaatagaaggcattctcga

SEQ ID NO: 44856 - DNA, 26 bp, Homo sapiens
aagcagaaatagaaggcattctcgaa

SEQ ID NO: 44857 - DNA, 26 bp, Homo sapiens
agcagaaatagaaggcattctcgaaa

SEQ ID NO: 44858 - DNA, 26 bp, Homo sapiens
gcagaaatagaaggcattctcgaaat

SEQ ID NO: 44859 - DNA, 26 bp, Homo sapiens
cagaaatagaaggcattctcgaaatc

SEQ ID NO: 44860 - DNA, 26 bp, Homo sapiens
agaaatagaaggcattctcgaaatcc

SEQ ID NO: 44861 - DNA, 26 bp, Homo sapiens
gaaatagaaggcattctcgaaatcca

SEQ ID NO: 44862 - DNA, 26 bp, Homo sapiens
aaatagaaggcattctcgaaatccaa

SEQ ID NO: 44863 - DNA, 26 bp, Homo sapiens
aatagaaggcattctcgaaatccaac

SEQ ID NO: 44864 - DNA, 26 bp, Homo sapiens
atagaaggcattctcgaaatccaact

SEQ ID NO: 44865 - DNA, 26 bp, Homo sapiens
tagaaggcattctcgaaatccaactg

SEQ ID NO: 44866 - DNA, 26 bp, Homo sapiens
agaaggcattctcgaaatccaactgt

SEQ ID NO: 44867 - DNA, 26 bp, Homo sapiens
gaaggcattctcgaaatccaactgtg

SEQ ID NO: 44868 - DNA, 26 bp, Homo sapiens
aaggcattctcgaaatccaactgtgt

SEQ ID NO: 44869 - DNA, 26 bp, Homo sapiens
aggcattctcgaaatccaactgtgtc

SEQ ID NO: 44870 - DNA, 26 bp, Homo sapiens
ggcattctcgaaatccaactgtgtct

SEQ ID NO: 44871 - DNA, 26 bp, Homo sapiens
gcattctcgaaatccaactgtgtctc

SEQ ID NO: 44872 - DNA, 26 bp, Homo sapiens
cattctcgaaatccaactgtgtctcc

SEQ ID NO: 44873 - DNA, 26 bp, Homo sapiens
attctcgaaatccaactgtgtctccc

SEQ ID NO: 44874 - DNA, 26 bp, Homo sapiens
ttctcgaaatccaactgtgtctccca

SEQ ID NO: 44875 - DNA, 26 bp, Homo sapiens
tctcgaaatccaactgtgtctcccag

SEQ ID NO: 44876 - DNA, 26 bp, Homo sapiens
ctcgaaatccaactgtgtctcccaga

SEQ ID NO: 44877 - DNA, 26 bp, Homo sapiens
tcgaaatccaactgtgtctcccagaa

SEQ ID NO: 44878 - DNA, 26 bp, Homo sapiens
cgaaatccaactgtgtctcccagaag

SEQ ID NO: 44879 - DNA, 26 bp, Homo sapiens
gaaatccaactgtgtctcccagaagg

SEQ ID NO: 44880 - DNA, 26 bp, Homo sapiens
aaatccaactgtgtctcccagaaggg

SEQ ID NO: 44881 - DNA, 26 bp, Homo sapiens
aatccaactgtgtctcccagaagggg

SEQ ID NO: 44882 - DNA, 26 bp, Homo sapiens
atccaactgtgtctcccagaagggga

SEQ ID NO: 44883 - DNA, 26 bp, Homo sapiens
tccaactgtgtctcccagaaggggag

SEQ ID NO: 44884 - DNA, 26 bp, Homo sapiens
ccaactgtgtctcccagaaggggagg

SEQ ID NO: 44885 - DNA, 26 bp, Homo sapiens
caactgtgtctcccagaaggggagga

SEQ ID NO: 44886 - DNA, 26 bp, Homo sapiens
aactgtgtctcccagaaggggaggat

SEQ ID NO: 44887 - DNA, 26 bp, Homo sapiens
actgtgtctcccagaaggggaggatg

SEQ ID NO: 44888 - DNA, 26 bp, Homo sapiens
ctgtgtctcccagaaggggaggatgg

SEQ ID NO: 44889 - DNA, 26 bp, Homo sapiens
tgtgtctcccagaaggggaggatggc

SEQ ID NO: 44890 - DNA, 26 bp, Homo sapiens
gtgtctcccagaaggggaggatggca

SEQ ID NO: 44891 - DNA, 26 bp, Homo sapiens
tgtctcccagaaggggaggatggcag

SEQ ID NO: 44892 - DNA, 26 bp, Homo sapiens
gtctcccagaaggggaggatggcagc

SEQ ID NO: 44893 - DNA, 26 bp, Homo sapiens
tctcccagaaggggaggatggcagct

SEQ ID NO: 44894 - DNA, 26 bp, Homo sapiens
ctcccagaaggggaggatggcagctg

SEQ ID NO: 44895 - DNA, 26 bp, Homo sapiens
tcccagaaggggaggatggcagctgc

SEQ ID NO: 44896 - DNA, 26 bp, Homo sapiens
cccagaaggggaggatggcagctgca

SEQ ID NO: 44897 - DNA, 26 bp, Homo sapiens
ccagaaggggaggatggcagctgcac

SEQ ID NO: 44898 - DNA, 26 bp, Homo sapiens
cagaaggggaggatggcagctgcaca

SEQ ID NO: 44899 - DNA, 26 bp, Homo sapiens
agaaggggaggatggcagctgcacag

SEQ ID NO: 44900 - DNA, 26 bp, Homo sapiens
gaaggggaggatggcagctgcacagg

SEQ ID NO: 44901 - DNA, 26 bp, Homo sapiens
aaggggaggatggcagctgcacagga

SEQ ID NO: 44902 - DNA, 26 bp, Homo sapiens
aggggaggatggcagctgcacaggaa

SEQ ID NO: 44903 - DNA, 26 bp, Homo sapiens
ggggaggatggcagctgcacaggaaa

SEQ ID NO: 44904 - DNA, 26 bp, Homo sapiens
gggaggatggcagctgcacaggaaat

SEQ ID NO: 44905 - DNA, 26 bp, Homo sapiens
ggaggatggcagctgcacaggaaatg

SEQ ID NO: 44906 - DNA, 26 bp, Homo sapiens
gaggatggcagctgcacaggaaatgt

SEQ ID NO: 44907 - DNA, 26 bp, Homo sapiens
aggatggcagctgcacaggaaatgta

SEQ ID NO: 44908 - DNA, 26 bp, Homo sapiens
ggatggcagctgcacaggaaatgtag

SEQ ID NO: 44909 - DNA, 26 bp, Homo sapiens
gatggcagctgcacaggaaatgtagg

SEQ ID NO: 44910 - DNA, 26 bp, Homo sapiens
atggcagctgcacaggaaatgtaggc

SEQ ID NO: 44911 - DNA, 26 bp, Homo sapiens
tggcagctgcacaggaaatgtaggca

SEQ ID NO: 44912 - DNA, 26 bp, Homo sapiens
ggcagctgcacaggaaatgtaggcaa

SEQ ID NO: 44913 - DNA, 26 bp, Homo sapiens
gcagctgcacaggaaatgtaggcaaa

SEQ ID NO: 44914 - DNA, 26 bp, Homo sapiens
cagctgcacaggaaatgtaggcaaaa

SEQ ID NO: 44915 - DNA, 26 bp, Homo sapiens
agctgcacaggaaatgtaggcaaaaa

SEQ ID NO: 44916 - DNA, 26 bp, Homo sapiens
gctgcacaggaaatgtaggcaaaaac

SEQ ID NO: 44917 - DNA, 26 bp, Homo sapiens
ctgcacaggaaatgtaggcaaaaaca

SEQ ID NO: 44918 - DNA, 26 bp, Homo sapiens
tgcacaggaaatgtaggcaaaaacaa

SEQ ID NO: 44919 - DNA, 26 bp, Homo sapiens
gcacaggaaatgtaggcaaaaacaat

SEQ ID NO: 44920 - DNA, 26 bp, Homo sapiens
cacaggaaatgtaggcaaaaacaata

SEQ ID NO: 44921 - DNA, 26 bp, Homo sapiens
acaggaaatgtaggcaaaaacaataa

SEQ ID NO: 44922 - DNA, 26 bp, Homo sapiens
caggaaatgtaggcaaaaacaataag

SEQ ID NO: 44923 - DNA, 26 bp, Homo sapiens
aggaaatgtaggcaaaaacaataagg

SEQ ID NO: 44924 - DNA, 26 bp, Homo sapiens
ggaaatgtaggcaaaaacaataaggg

SEQ ID NO: 44925 - DNA, 26 bp, Homo sapiens
gaaatgtaggcaaaaacaataagggc

SEQ ID NO: 44926 - DNA, 26 bp, Homo sapiens
aaatgtaggcaaaaacaataagggca

SEQ ID NO: 44927 - DNA, 26 bp, Homo sapiens
aatgtaggcaaaaacaataagggcaa

SEQ ID NO: 44928 - DNA, 26 bp, Homo sapiens
atgtaggcaaaaacaataagggcaat

SEQ ID NO: 44929 - DNA, 26 bp, Homo sapiens
tgtaggcaaaaacaataagggcaatg

SEQ ID NO: 44930 - DNA, 26 bp, Homo sapiens
gtaggcaaaaacaataagggcaatga

SEQ ID NO: 44931 - DNA, 26 bp, Homo sapiens
taggcaaaaacaataagggcaatgat

SEQ ID NO: 44932 - DNA, 26 bp, Homo sapiens
aggcaaaaacaataagggcaatgatg

SEQ ID NO: 44933 - DNA, 26 bp, Homo sapiens
ggcaaaaacaataagggcaatgatgg

SEQ ID NO: 44934 - DNA, 26 bp, Homo sapiens
gcaaaaacaataagggcaatgatggg

SEQ ID NO: 44935 - DNA, 26 bp, Homo sapiens
caaaaacaataagggcaatgatgggg

SEQ ID NO: 44936 - DNA, 26 bp, Homo sapiens
aaaaacaataagggcaatgatgggga

SEQ ID NO: 44937 - DNA, 26 bp, Homo sapiens
aaaacaataagggcaatgatggggag

SEQ ID NO: 44938 - DNA, 26 bp, Homo sapiens
aaacaataagggcaatgatggggagg

SEQ ID NO: 44939 - DNA, 26 bp, Homo sapiens
aacaataagggcaatgatggggaggg

SEQ ID NO: 44940 - DNA, 26 bp, Homo sapiens
acaataagggcaatgatggggagggg

SEQ ID NO: 44941 - DNA, 26 bp, Homo sapiens
caataagggcaatgatggggaggggg

SEQ ID NO: 44942 - DNA, 26 bp, Homo sapiens
aataagggcaatgatggggaggggga

SEQ ID NO: 44943 - DNA, 26 bp, Homo sapiens
ataagggcaatgatggggagggggat

SEQ ID NO: 44944 - DNA, 26 bp, Homo sapiens
taagggcaatgatggggagggggatg

SEQ ID NO: 44945 - DNA, 26 bp, Homo sapiens
aagggcaatgatggggagggggatgt

SEQ ID NO: 44946 - DNA, 26 bp, Homo sapiens
agggcaatgatggggagggggatgtc

SEQ ID NO: 44947 - DNA, 26 bp, Homo sapiens
gggcaatgatggggagggggatgtcc

SEQ ID NO: 44948 - DNA, 26 bp, Homo sapiens
ggcaatgatggggagggggatgtcca

SEQ ID NO: 44949 - DNA, 26 bp, Homo sapiens
gcaatgatggggagggggatgtccaa

SEQ ID NO: 44950 - DNA, 26 bp, Homo sapiens
caatgatggggagggggatgtccaac

SEQ ID NO: 44951 - DNA, 26 bp, Homo sapiens
aatgatggggagggggatgtccaacc

SEQ ID NO: 44952 - DNA, 26 bp, Homo sapiens
atgatggggagggggatgtccaacct

SEQ ID NO: 44953 - DNA, 26 bp, Homo sapiens
tgatggggagggggatgtccaacctc

SEQ ID NO: 44954 - DNA, 26 bp, Homo sapiens
gatggggagggggatgtccaacctct

SEQ ID NO: 44955 - DNA, 26 bp, Homo sapiens
atggggagggggatgtccaacctctc

SEQ ID NO: 44956 - DNA, 26 bp, Homo sapiens
tggggagggggatgtccaacctctcc

SEQ ID NO: 44957 - DNA, 26 bp, Homo sapiens
ggggagggggatgtccaacctctcca

SEQ ID NO: 44958 - DNA, 26 bp, Homo sapiens
gggagggggatgtccaacctctccac

SEQ ID NO: 44959 - DNA, 26 bp, Homo sapiens
ggagggggatgtccaacctctccacc

SEQ ID NO: 44960 - DNA, 26 bp, Homo sapiens
gagggggatgtccaacctctccacct

SEQ ID NO: 44961 - DNA, 26 bp, Homo sapiens
agggggatgtccaacctctccacctg

SEQ ID NO: 44962 - DNA, 26 bp, Homo sapiens
gggggatgtccaacctctccacctgc

SEQ ID NO: 44963 - DNA, 26 bp, Homo sapiens
ggggatgtccaacctctccacctgct

SEQ ID NO: 44964 - DNA, 26 bp, Homo sapiens
gggatgtccaacctctccacctgctg

SEQ ID NO: 44965 - DNA, 26 bp, Homo sapiens
ggatgtccaacctctccacctgctgt

SEQ ID NO: 44966 - DNA, 26 bp, Homo sapiens
gatgtccaacctctccacctgctgtc

SEQ ID NO: 44967 - DNA, 26 bp, Homo sapiens
atgtccaacctctccacctgctgtcc

SEQ ID NO: 44968 - DNA, 26 bp, Homo sapiens
tgtccaacctctccacctgctgtcca

SEQ ID NO: 44969 - DNA, 26 bp, Homo sapiens
gtccaacctctccacctgctgtccaa

SEQ ID NO: 44970 - DNA, 26 bp, Homo sapiens
tccaacctctccacctgctgtccaac

SEQ ID NO: 44971 - DNA, 26 bp, Homo sapiens
ccaacctctccacctgctgtccaact

SEQ ID NO: 44972 - DNA, 26 bp, Homo sapiens
caacctctccacctgctgtccaactt

SEQ ID NO: 44973 - DNA, 26 bp, Homo sapiens
aacctctccacctgctgtccaacttc

SEQ ID NO: 44974 - DNA, 26 bp, Homo sapiens
acctctccacctgctgtccaacttca

SEQ ID NO: 44975 - DNA, 26 bp, Homo sapiens
cctctccacctgctgtccaacttcat

SEQ ID NO: 44976 - DNA, 26 bp, Homo sapiens
ctctccacctgctgtccaacttcatc

SEQ ID NO: 44977 - DNA, 26 bp, Homo sapiens
tctccacctgctgtccaacttcatcc

SEQ ID NO: 44978 - DNA, 26 bp, Homo sapiens
ctccacctgctgtccaacttcatcca

SEQ ID NO: 44979 - DNA, 26 bp, Homo sapiens
tccacctgctgtccaacttcatccag

SEQ ID NO: 44980 - DNA, 26 bp, Homo sapiens
ccacctgctgtccaacttcatccagg

SEQ ID NO: 44981 - DNA, 26 bp, Homo sapiens
cacctgctgtccaacttcatccaggt

SEQ ID NO: 44982 - DNA, 26 bp, Homo sapiens
acctgctgtccaacttcatccaggtt

SEQ ID NO: 44983 - DNA, 26 bp, Homo sapiens
cctgctgtccaacttcatccaggttg

SEQ ID NO: 44984 - DNA, 26 bp, Homo sapiens
ctgctgtccaacttcatccaggttgc

SEQ ID NO: 44985 - DNA, 26 bp, Homo sapiens
tgctgtccaacttcatccaggttgct

SEQ ID NO: 44986 - DNA, 26 bp, Homo sapiens
gctgtccaacttcatccaggttgctg

SEQ ID NO: 44987 - DNA, 26 bp, Homo sapiens
ctgtccaacttcatccaggttgctga

SEQ ID NO: 44988 - DNA, 26 bp, Homo sapiens
tgtccaacttcatccaggttgctgat

SEQ ID NO: 44989 - DNA, 26 bp, Homo sapiens
gtccaacttcatccaggttgctgatg

SEQ ID NO: 44990 - DNA, 26 bp, Homo sapiens
tccaacttcatccaggttgctgatga

SEQ ID NO: 44991 - DNA, 26 bp, Homo sapiens
ccaacttcatccaggttgctgatgat

SEQ ID NO: 44992 - DNA, 26 bp, Homo sapiens
caacttcatccaggttgctgatgatg

SEQ ID NO: 44993 - DNA, 26 bp, Homo sapiens
aacttcatccaggttgctgatgatgg

SEQ ID NO: 44994 - DNA, 26 bp, Homo sapiens
acttcatccaggttgctgatgatgga

SEQ ID NO: 44995 - DNA, 26 bp, Homo sapiens
cttcatccaggttgctgatgatggag

SEQ ID NO: 44996 - DNA, 26 bp, Homo sapiens
ttcatccaggttgctgatgatggagt

SEQ ID NO: 44997 - DNA, 26 bp, Homo sapiens
tcatccaggttgctgatgatggagta

SEQ ID NO: 44998 - DNA, 26 bp, Homo sapiens
catccaggttgctgatgatggagtat

SEQ ID NO: 44999 - DNA, 26 bp, Homo sapiens
atccaggttgctgatgatggagtatg

SEQ ID NO: 45000 - DNA, 26 bp, Homo sapiens
tccaggttgctgatgatggagtatga

SEQ ID NO: 45001 - DNA, 26 bp, Homo sapiens
ccaggttgctgatgatggagtatgag

SEQ ID NO: 45002 - DNA, 26 bp, Homo sapiens
caggttgctgatgatggagtatgaga

SEQ ID NO: 45003 - DNA, 26 bp, Homo sapiens
aggttgctgatgatggagtatgagag

SEQ ID NO: 45004 - DNA, 26 bp, Homo sapiens
ggttgctgatgatggagtatgagagt

SEQ ID NO: 45005 - DNA, 26 bp, Homo sapiens
gttgctgatgatggagtatgagagtc

SEQ ID NO: 45006 - DNA, 26 bp, Homo sapiens
ttgctgatgatggagtatgagagtct

SEQ ID NO: 45007 - DNA, 26 bp, Homo sapiens
tgctgatgatggagtatgagagtctt

SEQ ID NO: 45008 - DNA, 26 bp, Homo sapiens
gctgatgatggagtatgagagtcttc

SEQ ID NO: 45009 - DNA, 26 bp, Homo sapiens
ctgatgatggagtatgagagtcttcc

SEQ ID NO: 45010 - DNA, 26 bp, Homo sapiens
tgatgatggagtatgagagtcttccc

SEQ ID NO: 45011 - DNA, 26 bp, Homo sapiens
gatgatggagtatgagagtcttccca

SEQ ID NO: 45012 - DNA, 26 bp, Homo sapiens
atgatggagtatgagagtcttcccaa

SEQ ID NO: 45013 - DNA, 26 bp, Homo sapiens
tgatggagtatgagagtcttcccaac

SEQ ID NO: 45014 - DNA, 26 bp, Homo sapiens
gatggagtatgagagtcttcccaaca

SEQ ID NO: 45015 - DNA, 26 bp, Homo sapiens
atggagtatgagagtcttcccaacac

SEQ ID NO: 45016 - DNA, 26 bp, Homo sapiens
tggagtatgagagtcttcccaacacc

SEQ ID NO: 45017 - DNA, 26 bp, Homo sapiens
ggagtatgagagtcttcccaacacca

SEQ ID NO: 45018 - DNA, 26 bp, Homo sapiens
gagtatgagagtcttcccaacaccag

SEQ ID NO: 45019 - DNA, 26 bp, Homo sapiens
agtatgagagtcttcccaacaccagt

SEQ ID NO: 45020 - DNA, 26 bp, Homo sapiens
gtatgagagtcttcccaacaccagtt

SEQ ID NO: 45021 - DNA, 26 bp, Homo sapiens
tatgagagtcttcccaacaccagttc

SEQ ID NO: 45022 - DNA, 26 bp, Homo sapiens
atgagagtcttcccaacaccagttcg

SEQ ID NO: 45023 - DNA, 26 bp, Homo sapiens
tgagagtcttcccaacaccagttcgg

SEQ ID NO: 45024 - DNA, 26 bp, Homo sapiens
gagagtcttcccaacaccagttcggg

SEQ ID NO: 45025 - DNA, 26 bp, Homo sapiens
agagtcttcccaacaccagttcggga

SEQ ID NO: 45026 - DNA, 26 bp, Homo sapiens
gagtcttcccaacaccagttcgggac

SEQ ID NO: 45027 - DNA, 26 bp, Homo sapiens
agtcttcccaacaccagttcgggaca

SEQ ID NO: 45028 - DNA, 26 bp, Homo sapiens
gtcttcccaacaccagttcgggacac

SEQ ID NO: 45029 - DNA, 26 bp, Homo sapiens
tcttcccaacaccagttcgggacacg

SEQ ID NO: 45030 - DNA, 26 bp, Homo sapiens
cttcccaacaccagttcgggacacga

SEQ ID NO: 45031 - DNA, 26 bp, Homo sapiens
ttcccaacaccagttcgggacacgag

SEQ ID NO: 45032 - DNA, 26 bp, Homo sapiens
tcccaacaccagttcgggacacgagt

SEQ ID NO: 45033 - DNA, 26 bp, Homo sapiens
cccaacaccagttcgggacacgagtt

SEQ ID NO: 45034 - DNA, 26 bp, Homo sapiens
ccaacaccagttcgggacacgagtta

SEQ ID NO: 45035 - DNA, 26 bp, Homo sapiens
caacaccagttcgggacacgagttac

SEQ ID NO: 45036 - DNA, 26 bp, Homo sapiens
aacaccagttcgggacacgagttact

SEQ ID NO: 45037 - DNA, 26 bp, Homo sapiens
acaccagttcgggacacgagttactc

SEQ ID NO: 45038 - DNA, 26 bp, Homo sapiens
caccagttcgggacacgagttactcc

SEQ ID NO: 45039 - DNA, 26 bp, Homo sapiens
accagttcgggacacgagttactcct

SEQ ID NO: 45040 - DNA, 26 bp, Homo sapiens
ccagttcgggacacgagttactcctc

SEQ ID NO: 45041 - DNA, 26 bp, Homo sapiens
cagttcgggacacgagttactcctct

SEQ ID NO: 45042 - DNA, 26 bp, Homo sapiens
agttcgggacacgagttactcctctc

SEQ ID NO: 45043 - DNA, 26 bp, Homo sapiens
gttcgggacacgagttactcctctcc

SEQ ID NO: 45044 - DNA, 26 bp, Homo sapiens
ttcgggacacgagttactcctctcca

SEQ ID NO: 45045 - DNA, 26 bp, Homo sapiens
tcgggacacgagttactcctctccat

SEQ ID NO: 45046 - DNA, 26 bp, Homo sapiens
cgggacacgagttactcctctccatg

SEQ ID NO: 45047 - DNA, 26 bp, Homo sapiens
gggacacgagttactcctctccatgg

SEQ ID NO: 45048 - DNA, 26 bp, Homo sapiens
ggacacgagttactcctctccatggc

SEQ ID NO: 45049 - DNA, 26 bp, Homo sapiens
gacacgagttactcctctccatggct

SEQ ID NO: 45050 - DNA, 26 bp, Homo sapiens
acacgagttactcctctccatggctt

SEQ ID NO: 45051 - DNA, 26 bp, Homo sapiens
cacgagttactcctctccatggcttg

SEQ ID NO: 45052 - DNA, 26 bp, Homo sapiens
acgagttactcctctccatggcttgt

SEQ ID NO: 45053 - DNA, 26 bp, Homo sapiens
cgagttactcctctccatggcttgtg

SEQ ID NO: 45054 - DNA, 26 bp, Homo sapiens
gagttactcctctccatggcttgtgg

SEQ ID NO: 45055 - DNA, 26 bp, Homo sapiens
agttactcctctccatggcttgtggg

SEQ ID NO: 45056 - DNA, 26 bp, Homo sapiens
gttactcctctccatggcttgtgggg

SEQ ID NO: 45057 - DNA, 26 bp, Homo sapiens
ttactcctctccatggcttgtggggg

SEQ ID NO: 45058 - DNA, 26 bp, Homo sapiens
tactcctctccatggcttgtgggggc

SEQ ID NO: 45059 - DNA, 26 bp, Homo sapiens
actcctctccatggcttgtgggggca

SEQ ID NO: 45060 - DNA, 26 bp, Homo sapiens
ctcctctccatggcttgtgggggcag

SEQ ID NO: 45061 - DNA, 26 bp, Homo sapiens
tcctctccatggcttgtgggggcagt

SEQ ID NO: 45062 - DNA, 26 bp, Homo sapiens
cctctccatggcttgtgggggcagtt

SEQ ID NO: 45063 - DNA, 26 bp, Homo sapiens
ctctccatggcttgtgggggcagttg

SEQ ID NO: 45064 - DNA, 26 bp, Homo sapiens
tctccatggcttgtgggggcagttgc

SEQ ID NO: 45065 - DNA, 26 bp, Homo sapiens
ctccatggcttgtgggggcagttgca

SEQ ID NO: 45066 - DNA, 26 bp, Homo sapiens
tccatggcttgtgggggcagttgcag

SEQ ID NO: 45067 - DNA, 26 bp, Homo sapiens
ccatggcttgtgggggcagttgcagt

SEQ ID NO: 45068 - DNA, 26 bp, Homo sapiens
catggcttgtgggggcagttgcagtg

SEQ ID NO: 45069 - DNA, 26 bp, Homo sapiens
atggcttgtgggggcagttgcagtgt

SEQ ID NO: 45070 - DNA, 26 bp, Homo sapiens
tggcttgtgggggcagttgcagtgtg

SEQ ID NO: 45071 - DNA, 26 bp, Homo sapiens
ggcttgtgggggcagttgcagtgtgt

SEQ ID NO: 45072 - DNA, 26 bp, Homo sapiens
gcttgtgggggcagttgcagtgtgtt

SEQ ID NO: 45073 - DNA, 26 bp, Homo sapiens
cttgtgggggcagttgcagtgtgttc

SEQ ID NO: 45074 - DNA, 26 bp, Homo sapiens
ttgtgggggcagttgcagtgtgttct

SEQ ID NO: 45075 - DNA, 26 bp, Homo sapiens
tgtgggggcagttgcagtgtgttctg

SEQ ID NO: 45076 - DNA, 26 bp, Homo sapiens
gtgggggcagttgcagtgtgttctgt

SEQ ID NO: 45077 - DNA, 26 bp, Homo sapiens
tgggggcagttgcagtgtgttctgtt

SEQ ID NO: 45078 - DNA, 26 bp, Homo sapiens
gggggcagttgcagtgtgttctgttt

SEQ ID NO: 45079 - DNA, 26 bp, Homo sapiens
ggggcagttgcagtgtgttctgtttc

SEQ ID NO: 45080 - DNA, 26 bp, Homo sapiens
gggcagttgcagtgtgttctgtttct

SEQ ID NO: 45081 - DNA, 26 bp, Homo sapiens
ggcagttgcagtgtgttctgtttctc

SEQ ID NO: 45082 - DNA, 26 bp, Homo sapiens
gcagttgcagtgtgttctgtttctct

SEQ ID NO: 45083 - DNA, 26 bp, Homo sapiens
cagttgcagtgtgttctgtttctcta

SEQ ID NO: 45084 - DNA, 26 bp, Homo sapiens
agttgcagtgtgttctgtttctctag

SEQ ID NO: 45085 - DNA, 26 bp, Homo sapiens
gttgcagtgtgttctgtttctctagc

SEQ ID NO: 45086 - DNA, 26 bp, Homo sapiens
ttgcagtgtgttctgtttctctagcg

SEQ ID NO: 45087 - DNA, 26 bp, Homo sapiens
tgcagtgtgttctgtttctctagcgc

SEQ ID NO: 45088 - DNA, 26 bp, Homo sapiens
gcagtgtgttctgtttctctagcgca

SEQ ID NO: 45089 - DNA, 26 bp, Homo sapiens
cagtgtgttctgtttctctagcgcat

SEQ ID NO: 45090 - DNA, 26 bp, Homo sapiens
agtgtgttctgtttctctagcgcatg

SEQ ID NO: 45091 - DNA, 26 bp, Homo sapiens
gtgtgttctgtttctctagcgcatga

SEQ ID NO: 45092 - DNA, 26 bp, Homo sapiens
tgtgttctgtttctctagcgcatgag

SEQ ID NO: 45093 - DNA, 26 bp, Homo sapiens
gtgttctgtttctctagcgcatgaga

SEQ ID NO: 45094 - DNA, 26 bp, Homo sapiens
tgttctgtttctctagcgcatgagat

SEQ ID NO: 45095 - DNA, 26 bp, Homo sapiens
gttctgtttctctagcgcatgagatc

SEQ ID NO: 45096 - DNA, 26 bp, Homo sapiens
ttctgtttctctagcgcatgagatct

SEQ ID NO: 45097 - DNA, 26 bp, Homo sapiens
tctgtttctctagcgcatgagatctc

SEQ ID NO: 45098 - DNA, 26 bp, Homo sapiens
ctgtttctctagcgcatgagatctct

SEQ ID NO: 45099 - DNA, 26 bp, Homo sapiens
tgtttctctagcgcatgagatctctc

SEQ ID NO: 45100 - DNA, 26 bp, Homo sapiens
gtttctctagcgcatgagatctctca

SEQ ID NO: 45101 - DNA, 26 bp, Homo sapiens
tttctctagcgcatgagatctctcaa

SEQ ID NO: 45102 - DNA, 26 bp, Homo sapiens
ttctctagcgcatgagatctctcaaa

SEQ ID NO: 45103 - DNA, 26 bp, Homo sapiens
tctctagcgcatgagatctctcaaac

SEQ ID NO: 45104 - DNA, 26 bp, Homo sapiens
ctctagcgcatgagatctctcaaaca

SEQ ID NO: 45105 - DNA, 26 bp, Homo sapiens
tctagcgcatgagatctctcaaacag

SEQ ID NO: 45106 - DNA, 26 bp, Homo sapiens
ctagcgcatgagatctctcaaacagc

SEQ ID NO: 45107 - DNA, 26 bp, Homo sapiens
tagcgcatgagatctctcaaacagct

SEQ ID NO: 45108 - DNA, 26 bp, Homo sapiens
agcgcatgagatctctcaaacagctc

SEQ ID NO: 45109 - DNA, 26 bp, Homo sapiens
gcgcatgagatctctcaaacagctcc

SEQ ID NO: 45110 - DNA, 26 bp, Homo sapiens
cgcatgagatctctcaaacagctcca

SEQ ID NO: 45111 - DNA, 26 bp, Homo sapiens
gcatgagatctctcaaacagctccat

SEQ ID NO: 45112 - DNA, 26 bp, Homo sapiens
catgagatctctcaaacagctccatg

SEQ ID NO: 45113 - DNA, 26 bp, Homo sapiens
atgagatctctcaaacagctccatgc

SEQ ID NO: 45114 - DNA, 26 bp, Homo sapiens
tgagatctctcaaacagctccatgct

SEQ ID NO: 45115 - DNA, 26 bp, Homo sapiens
gagatctctcaaacagctccatgctg

SEQ ID NO: 45116 - DNA, 26 bp, Homo sapiens
agatctctcaaacagctccatgctgc

SEQ ID NO: 45117 - DNA, 26 bp, Homo sapiens
gatctctcaaacagctccatgctgca

SEQ ID NO: 45118 - DNA, 26 bp, Homo sapiens
atctctcaaacagctccatgctgcag

SEQ ID NO: 45119 - DNA, 26 bp, Homo sapiens
tctctcaaacagctccatgctgcagc

SEQ ID NO: 45120 - DNA, 26 bp, Homo sapiens
ctctcaaacagctccatgctgcagct

SEQ ID NO: 45121 - DNA, 26 bp, Homo sapiens
tctcaaacagctccatgctgcagctt

SEQ ID NO: 45122 - DNA, 26 bp, Homo sapiens
ctcaaacagctccatgctgcagcttg

SEQ ID NO: 45123 - DNA, 26 bp, Homo sapiens
tcaaacagctccatgctgcagcttgg

SEQ ID NO: 45124 - DNA, 26 bp, Homo sapiens
caaacagctccatgctgcagcttggg

SEQ ID NO: 45125 - DNA, 26 bp, Homo sapiens
aaacagctccatgctgcagcttgggc

SEQ ID NO: 45126 - DNA, 26 bp, Homo sapiens
aacagctccatgctgcagcttgggcg

SEQ ID NO: 45127 - DNA, 26 bp, Homo sapiens
acagctccatgctgcagcttgggcgt

SEQ ID NO: 45128 - DNA, 26 bp, Homo sapiens
cagctccatgctgcagcttgggcgtg

SEQ ID NO: 45129 - DNA, 26 bp, Homo sapiens
agctccatgctgcagcttgggcgtga

SEQ ID NO: 45130 - DNA, 26 bp, Homo sapiens
gctccatgctgcagcttgggcgtgaa

SEQ ID NO: 45131 - DNA, 26 bp, Homo sapiens
ctccatgctgcagcttgggcgtgaag

SEQ ID NO: 45132 - DNA, 26 bp, Homo sapiens
tccatgctgcagcttgggcgtgaagg

SEQ ID NO: 45133 - DNA, 26 bp, Homo sapiens
ccatgctgcagcttgggcgtgaagga

SEQ ID NO: 45134 - DNA, 26 bp, Homo sapiens
catgctgcagcttgggcgtgaaggac

SEQ ID NO: 45135 - DNA, 26 bp, Homo sapiens
atgctgcagcttgggcgtgaaggaca

SEQ ID NO: 45136 - DNA, 26 bp, Homo sapiens
tgctgcagcttgggcgtgaaggacat

SEQ ID NO: 45137 - DNA, 26 bp, Homo sapiens
gctgcagcttgggcgtgaaggacatg

SEQ ID NO: 45138 - DNA, 26 bp, Homo sapiens
ctgcagcttgggcgtgaaggacatgt

SEQ ID NO: 45139 - DNA, 26 bp, Homo sapiens
tgcagcttgggcgtgaaggacatgtg

SEQ ID NO: 45140 - DNA, 26 bp, Homo sapiens
gcagcttgggcgtgaaggacatgtgc

SEQ ID NO: 45141 - DNA, 26 bp, Homo sapiens
cagcttgggcgtgaaggacatgtgcc

SEQ ID NO: 45142 - DNA, 26 bp, Homo sapiens
agcttgggcgtgaaggacatgtgcca

SEQ ID NO: 45143 - DNA, 26 bp, Homo sapiens
gcttgggcgtgaaggacatgtgccaa

SEQ ID NO: 45144 - DNA, 26 bp, Homo sapiens
cttgggcgtgaaggacatgtgccaag

SEQ ID NO: 45145 - DNA, 26 bp, Homo sapiens
ttgggcgtgaaggacatgtgccaagt

SEQ ID NO: 45146 - DNA, 26 bp, Homo sapiens
tgggcgtgaaggacatgtgccaagtt

SEQ ID NO: 45147 - DNA, 26 bp, Homo sapiens
gggcgtgaaggacatgtgccaagttt

SEQ ID NO: 45148 - DNA, 26 bp, Homo sapiens
ggcgtgaaggacatgtgccaagtttg

SEQ ID NO: 45149 - DNA, 26 bp, Homo sapiens
gcgtgaaggacatgtgccaagtttgg

SEQ ID NO: 45150 - DNA, 26 bp, Homo sapiens
cgtgaaggacatgtgccaagtttggg

SEQ ID NO: 45151 - DNA, 26 bp, Homo sapiens
gtgaaggacatgtgccaagtttgggg

SEQ ID NO: 45152 - DNA, 26 bp, Homo sapiens
tgaaggacatgtgccaagtttggggc

SEQ ID NO: 45153 - DNA, 26 bp, Homo sapiens
gaaggacatgtgccaagtttggggcc

SEQ ID NO: 45154 - DNA, 26 bp, Homo sapiens
aaggacatgtgccaagtttggggcct

SEQ ID NO: 45155 - DNA, 26 bp, Homo sapiens
aggacatgtgccaagtttggggcctg

SEQ ID NO: 45156 - DNA, 26 bp, Homo sapiens
ggacatgtgccaagtttggggcctgg

SEQ ID NO: 45157 - DNA, 26 bp, Homo sapiens
gacatgtgccaagtttggggcctgga

SEQ ID NO: 45158 - DNA, 26 bp, Homo sapiens
acatgtgccaagtttggggcctggaa

SEQ ID NO: 45159 - DNA, 26 bp, Homo sapiens
catgtgccaagtttggggcctggaag

SEQ ID NO: 45160 - DNA, 26 bp, Homo sapiens
atgtgccaagtttggggcctggaagc

SEQ ID NO: 45161 - DNA, 26 bp, Homo sapiens
tgtgccaagtttggggcctggaagct

SEQ ID NO: 45162 - DNA, 26 bp, Homo sapiens
gtgccaagtttggggcctggaagctc

SEQ ID NO: 45163 - DNA, 26 bp, Homo sapiens
tgccaagtttggggcctggaagctct

SEQ ID NO: 45164 - DNA, 26 bp, Homo sapiens
gccaagtttggggcctggaagctctt

SEQ ID NO: 45165 - DNA, 26 bp, Homo sapiens
ccaagtttggggcctggaagctcttc

SEQ ID NO: 45166 - DNA, 26 bp, Homo sapiens
caagtttggggcctggaagctcttca

SEQ ID NO: 45167 - DNA, 26 bp, Homo sapiens
aagtttggggcctggaagctcttcag

SEQ ID NO: 45168 - DNA, 26 bp, Homo sapiens
agtttggggcctggaagctcttcagc

SEQ ID NO: 45169 - DNA, 26 bp, Homo sapiens
gtttggggcctggaagctcttcagca

SEQ ID NO: 45170 - DNA, 26 bp, Homo sapiens
tttggggcctggaagctcttcagcac

SEQ ID NO: 45171 - DNA, 26 bp, Homo sapiens
ttggggcctggaagctcttcagcact

SEQ ID NO: 45172 - DNA, 26 bp, Homo sapiens
tggggcctggaagctcttcagcactg

SEQ ID NO: 45173 - DNA, 26 bp, Homo sapiens
ggggcctggaagctcttcagcactga

SEQ ID NO: 45174 - DNA, 26 bp, Homo sapiens
gggcctggaagctcttcagcactgat

SEQ ID NO: 45175 - DNA, 26 bp, Homo sapiens
ggcctggaagctcttcagcactgatg

SEQ ID NO: 45176 - DNA, 26 bp, Homo sapiens
gcctggaagctcttcagcactgatga

SEQ ID NO: 45177 - DNA, 26 bp, Homo sapiens
cctggaagctcttcagcactgatgat

SEQ ID NO: 45178 - DNA, 26 bp, Homo sapiens
ctggaagctcttcagcactgatgatg

SEQ ID NO: 45179 - DNA, 26 bp, Homo sapiens
tggaagctcttcagcactgatgatga

SEQ ID NO: 45180 - DNA, 26 bp, Homo sapiens
ggaagctcttcagcactgatgatgat

SEQ ID NO: 45181 - DNA, 26 bp, Homo sapiens
gaagctcttcagcactgatgatgatc

SEQ ID NO: 45182 - DNA, 26 bp, Homo sapiens
aagctcttcagcactgatgatgatct

SEQ ID NO: 45183 - DNA, 26 bp, Homo sapiens
agctcttcagcactgatgatgatctg

SEQ ID NO: 45184 - DNA, 26 bp, Homo sapiens
gctcttcagcactgatgatgatctga

SEQ ID NO: 45185 - DNA, 26 bp, Homo sapiens
ctcttcagcactgatgatgatctgag

SEQ ID NO: 45186 - DNA, 26 bp, Homo sapiens
tcttcagcactgatgatgatctgagg

SEQ ID NO: 45187 - DNA, 26 bp, Homo sapiens
cttcagcactgatgatgatctgaggg

SEQ ID NO: 45188 - DNA, 26 bp, Homo sapiens
ttcagcactgatgatgatctgaggga

SEQ ID NO: 45189 - DNA, 26 bp, Homo sapiens
tcagcactgatgatgatctgagggac

SEQ ID NO: 45190 - DNA, 26 bp, Homo sapiens
cagcactgatgatgatctgagggaca

SEQ ID NO: 45191 - DNA, 26 bp, Homo sapiens
agcactgatgatgatctgagggacag

SEQ ID NO: 45192 - DNA, 26 bp, Homo sapiens
gcactgatgatgatctgagggacagc

SEQ ID NO: 45193 - DNA, 26 bp, Homo sapiens
cactgatgatgatctgagggacagct

SEQ ID NO: 45194 - DNA, 26 bp, Homo sapiens
actgatgatgatctgagggacagctt

SEQ ID NO: 45195 - DNA, 26 bp, Homo sapiens
ctgatgatgatctgagggacagcttc

SEQ ID NO: 45196 - DNA, 26 bp, Homo sapiens
tgatgatgatctgagggacagcttca

SEQ ID NO: 45197 - DNA, 26 bp, Homo sapiens
gatgatgatctgagggacagcttcat

SEQ ID NO: 45198 - DNA, 26 bp, Homo sapiens
atgatgatctgagggacagcttcatc

SEQ ID NO: 45199 - DNA, 26 bp, Homo sapiens
tgatgatctgagggacagcttcatct

SEQ ID NO: 45200 - DNA, 26 bp, Homo sapiens
gatgatctgagggacagcttcatctg

SEQ ID NO: 45201 - DNA, 26 bp, Homo sapiens
atgatctgagggacagcttcatctgc

SEQ ID NO: 45202 - DNA, 26 bp, Homo sapiens
tgatctgagggacagcttcatctgcg

SEQ ID NO: 45203 - DNA, 26 bp, Homo sapiens
gatctgagggacagcttcatctgcgg

SEQ ID NO: 45204 - DNA, 26 bp, Homo sapiens
atctgagggacagcttcatctgcggg

SEQ ID NO: 45205 - DNA, 26 bp, Homo sapiens
tctgagggacagcttcatctgcgggc

SEQ ID NO: 45206 - DNA, 26 bp, Homo sapiens
ctgagggacagcttcatctgcgggct

SEQ ID NO: 45207 - DNA, 26 bp, Homo sapiens
tgagggacagcttcatctgcgggctt

SEQ ID NO: 45208 - DNA, 26 bp, Homo sapiens
gagggacagcttcatctgcgggcttg

SEQ ID NO: 45209 - DNA, 26 bp, Homo sapiens
agggacagcttcatctgcgggcttgg

SEQ ID NO: 45210 - DNA, 26 bp, Homo sapiens
gggacagcttcatctgcgggcttggg

SEQ ID NO: 45211 - DNA, 26 bp, Homo sapiens
ggacagcttcatctgcgggcttgggg

SEQ ID NO: 45212 - DNA, 26 bp, Homo sapiens
gacagcttcatctgcgggcttggggt

SEQ ID NO: 45213 - DNA, 26 bp, Homo sapiens
acagcttcatctgcgggcttggggtc

SEQ ID NO: 45214 - DNA, 26 bp, Homo sapiens
cagcttcatctgcgggcttggggtcc

SEQ ID NO: 45215 - DNA, 26 bp, Homo sapiens
agcttcatctgcgggcttggggtccg

SEQ ID NO: 45216 - DNA, 26 bp, Homo sapiens
gcttcatctgcgggcttggggtccgg

SEQ ID NO: 45217 - DNA, 26 bp, Homo sapiens
cttcatctgcgggcttggggtccggt

SEQ ID NO: 45218 - DNA, 26 bp, Homo sapiens
ttcatctgcgggcttggggtccggtt

SEQ ID NO: 45219 - DNA, 26 bp, Homo sapiens
tcatctgcgggcttggggtccggttt

SEQ ID NO: 45220 - DNA, 26 bp, Homo sapiens
catctgcgggcttggggtccggtttt

SEQ ID NO: 45221 - DNA, 26 bp, Homo sapiens
atctgcgggcttggggtccggttttt

SEQ ID NO: 45222 - DNA, 26 bp, Homo sapiens
tctgcgggcttggggtccggtttttt

SEQ ID NO: 45223 - DNA, 26 bp, Homo sapiens
ctgcgggcttggggtccggttttttc

SEQ ID NO: 45224 - DNA, 26 bp, Homo sapiens
tgcgggcttggggtccggttttttct

SEQ ID NO: 45225 - DNA, 26 bp, Homo sapiens
gcgggcttggggtccggttttttctt

SEQ ID NO: 45226 - DNA, 26 bp, Homo sapiens
cgggcttggggtccggttttttcttg

SEQ ID NO: 45227 - DNA, 26 bp, Homo sapiens
gggcttggggtccggttttttcttga

SEQ ID NO: 45228 - DNA, 26 bp, Homo sapiens
ggcttggggtccggttttttcttgaa

SEQ ID NO: 45229 - DNA, 26 bp, Homo sapiens
gcttggggtccggttttttcttgaag

SEQ ID NO: 45230 - DNA, 26 bp, Homo sapiens
cttggggtccggttttttcttgaaga

SEQ ID NO: 45231 - DNA, 26 bp, Homo sapiens
ttggggtccggttttttcttgaagag

SEQ ID NO: 45232 - DNA, 26 bp, Homo sapiens
tggggtccggttttttcttgaagaga

SEQ ID NO: 45233 - DNA, 26 bp, Homo sapiens
ggggtccggttttttcttgaagagag

SEQ ID NO: 45234 - DNA, 26 bp, Homo sapiens
gggtccggttttttcttgaagagaga

SEQ ID NO: 45235 - DNA, 26 bp, Homo sapiens
ggtccggttttttcttgaagagagat

SEQ ID NO: 45236 - DNA, 26 bp, Homo sapiens
gtccggttttttcttgaagagagatt

SEQ ID NO: 45237 - DNA, 26 bp, Homo sapiens
tccggttttttcttgaagagagattt

SEQ ID NO: 45238 - DNA, 26 bp, Homo sapiens
ccggttttttcttgaagagagatttg

SEQ ID NO: 45239 - DNA, 26 bp, Homo sapiens
cggttttttcttgaagagagatttgg

SEQ ID NO: 45240 - DNA, 26 bp, Homo sapiens
ggttttttcttgaagagagatttggg

SEQ ID NO: 45241 - DNA, 26 bp, Homo sapiens
gttttttcttgaagagagatttgggg

SEQ ID NO: 45242 - DNA, 26 bp, Homo sapiens
ttttttcttgaagagagatttggggc

SEQ ID NO: 45243 - DNA, 26 bp, Homo sapiens
tttttcttgaagagagatttggggca

SEQ ID NO: 45244 - DNA, 26 bp, Homo sapiens
ttttcttgaagagagatttggggcac

SEQ ID NO: 45245 - DNA, 26 bp, Homo sapiens
tttcttgaagagagatttggggcacc

SEQ ID NO: 45246 - DNA, 26 bp, Homo sapiens
ttcttgaagagagatttggggcacca

SEQ ID NO: 45247 - DNA, 26 bp, Homo sapiens
tcttgaagagagatttggggcaccac

SEQ ID NO: 45248 - DNA, 26 bp, Homo sapiens
cttgaagagagatttggggcaccact

SEQ ID NO: 45249 - DNA, 26 bp, Homo sapiens
ttgaagagagatttggggcaccactt

SEQ ID NO: 45250 - DNA, 26 bp, Homo sapiens
tgaagagagatttggggcaccacttg

SEQ ID NO: 45251 - DNA, 26 bp, Homo sapiens
gaagagagatttggggcaccacttgg

SEQ ID NO: 45252 - DNA, 26 bp, Homo sapiens
aagagagatttggggcaccacttgga

SEQ ID NO: 45253 - DNA, 26 bp, Homo sapiens
agagagatttggggcaccacttggag

SEQ ID NO: 45254 - DNA, 26 bp, Homo sapiens
gagagatttggggcaccacttggaga

SEQ ID NO: 45255 - DNA, 26 bp, Homo sapiens
agagatttggggcaccacttggagag

SEQ ID NO: 45256 - DNA, 26 bp, Homo sapiens
gagatttggggcaccacttggagagg

SEQ ID NO: 45257 - DNA, 26 bp, Homo sapiens
agatttggggcaccacttggagagga

SEQ ID NO: 45258 - DNA, 26 bp, Homo sapiens
gatttggggcaccacttggagaggag

SEQ ID NO: 45259 - DNA, 26 bp, Homo sapiens
atttggggcaccacttggagaggagg

SEQ ID NO: 45260 - DNA, 26 bp, Homo sapiens
tttggggcaccacttggagaggaggg

SEQ ID NO: 45261 - DNA, 26 bp, Homo sapiens
ttggggcaccacttggagaggagggg

SEQ ID NO: 45262 - DNA, 26 bp, Homo sapiens
tggggcaccacttggagaggaggggg

SEQ ID NO: 45263 - DNA, 26 bp, Homo sapiens
ggggcaccacttggagaggagggggc

SEQ ID NO: 45264 - DNA, 26 bp, Homo sapiens
gggcaccacttggagaggagggggcg

SEQ ID NO: 45265 - DNA, 26 bp, Homo sapiens
ggcaccacttggagaggagggggcgg

SEQ ID NO: 45266 - DNA, 26 bp, Homo sapiens
gcaccacttggagaggagggggcggg

SEQ ID NO: 45267 - DNA, 26 bp, Homo sapiens
caccacttggagaggagggggcgggt

SEQ ID NO: 45268 - DNA, 26 bp, Homo sapiens
accacttggagaggagggggcgggta

SEQ ID NO: 45269 - DNA, 26 bp, Homo sapiens
ccacttggagaggagggggcgggtaa

SEQ ID NO: 45270 - DNA, 26 bp, Homo sapiens
cacttggagaggagggggcgggtaaa

SEQ ID NO: 45271 - DNA, 26 bp, Homo sapiens
acttggagaggagggggcgggtaaag

SEQ ID NO: 45272 - DNA, 26 bp, Homo sapiens
cttggagaggagggggcgggtaaaga

SEQ ID NO: 45273 - DNA, 26 bp, Homo sapiens
ttggagaggagggggcgggtaaagaa

SEQ ID NO: 45274 - DNA, 26 bp, Homo sapiens
tggagaggagggggcgggtaaagaaa

SEQ ID NO: 45275 - DNA, 26 bp, Homo sapiens
ggagaggagggggcgggtaaagaaag

SEQ ID NO: 45276 - DNA, 26 bp, Homo sapiens
gagaggagggggcgggtaaagaaagg

SEQ ID NO: 45277 - DNA, 26 bp, Homo sapiens
agaggagggggcgggtaaagaaaggg

SEQ ID NO: 45278 - DNA, 26 bp, Homo sapiens
gaggagggggcgggtaaagaaaggga

SEQ ID NO: 45279 - DNA, 26 bp, Homo sapiens
aggagggggcgggtaaagaaagggaa

SEQ ID NO: 45280 - DNA, 26 bp, Homo sapiens
ggagggggcgggtaaagaaagggaat

SEQ ID NO: 45281 - DNA, 26 bp, Homo sapiens
gagggggcgggtaaagaaagggaatt

SEQ ID NO: 45282 - DNA, 26 bp, Homo sapiens
agggggcgggtaaagaaagggaattt

SEQ ID NO: 45283 - DNA, 26 bp, Homo sapiens
gggggcgggtaaagaaagggaatttt

SEQ ID NO: 45284 - DNA, 26 bp, Homo sapiens
ggggcgggtaaagaaagggaattttc

SEQ ID NO: 45285 - DNA, 26 bp, Homo sapiens
gggcgggtaaagaaagggaattttcg

SEQ ID NO: 45286 - DNA, 26 bp, Homo sapiens
ggcgggtaaagaaagggaattttcgg

SEQ ID NO: 45287 - DNA, 26 bp, Homo sapiens
gcgggtaaagaaagggaattttcgga

SEQ ID NO: 45288 - DNA, 26 bp, Homo sapiens
cgggtaaagaaagggaattttcggaa

SEQ ID NO: 45289 - DNA, 26 bp, Homo sapiens
gggtaaagaaagggaattttcggaac

SEQ ID NO: 45290 - DNA, 26 bp, Homo sapiens
ggtaaagaaagggaattttcggaacc

SEQ ID NO: 45291 - DNA, 26 bp, Homo sapiens
gtaaagaaagggaattttcggaaccg

SEQ ID NO: 45292 - DNA, 26 bp, Homo sapiens
taaagaaagggaattttcggaaccga

SEQ ID NO: 45293 - DNA, 26 bp, Homo sapiens
aaagaaagggaattttcggaaccgat

SEQ ID NO: 45294 - DNA, 26 bp, Homo sapiens
aagaaagggaattttcggaaccgatt

SEQ ID NO: 45295 - DNA, 26 bp, Homo sapiens
agaaagggaattttcggaaccgatta

SEQ ID NO: 45296 - DNA, 26 bp, Homo sapiens
gaaagggaattttcggaaccgattat

SEQ ID NO: 45297 - DNA, 26 bp, Homo sapiens
aaagggaattttcggaaccgattata

SEQ ID NO: 45298 - DNA, 26 bp, Homo sapiens
aagggaattttcggaaccgattataa

SEQ ID NO: 45299 - DNA, 26 bp, Homo sapiens
agggaattttcggaaccgattataag

SEQ ID NO: 45300 - DNA, 26 bp, Homo sapiens
gggaattttcggaaccgattataaga

SEQ ID NO: 45301 - DNA, 26 bp, Homo sapiens
ggaattttcggaaccgattataagat

SEQ ID NO: 45302 - DNA, 26 bp, Homo sapiens
gaattttcggaaccgattataagatg

SEQ ID NO: 45303 - DNA, 26 bp, Homo sapiens
aattttcggaaccgattataagatgt

SEQ ID NO: 45304 - DNA, 26 bp, Homo sapiens
attttcggaaccgattataagatgta

SEQ ID NO: 45305 - DNA, 26 bp, Homo sapiens
ttttcggaaccgattataagatgtag

SEQ ID NO: 45306 - DNA, 26 bp, Homo sapiens
tttcggaaccgattataagatgtaga

SEQ ID NO: 45307 - DNA, 26 bp, Homo sapiens
ttcggaaccgattataagatgtagat

SEQ ID NO: 45308 - DNA, 26 bp, Homo sapiens
tcggaaccgattataagatgtagata

SEQ ID NO: 45309 - DNA, 26 bp, Homo sapiens
cggaaccgattataagatgtagataa

SEQ ID NO: 45310 - DNA, 26 bp, Homo sapiens
ggaaccgattataagatgtagataag

SEQ ID NO: 45311 - DNA, 26 bp, Homo sapiens
gaaccgattataagatgtagataaga

SEQ ID NO: 45312 - DNA, 26 bp, Homo sapiens
aaccgattataagatgtagataagat

SEQ ID NO: 45313 - DNA, 26 bp, Homo sapiens
accgattataagatgtagataagatg

SEQ ID NO: 45314 - DNA, 26 bp, Homo sapiens
ccgattataagatgtagataagatgg

SEQ ID NO: 45315 - DNA, 26 bp, Homo sapiens
cgattataagatgtagataagatggt

SEQ ID NO: 45316 - DNA, 26 bp, Homo sapiens
gattataagatgtagataagatggtt

SEQ ID NO: 45317 - DNA, 26 bp, Homo sapiens
attataagatgtagataagatggttg

SEQ ID NO: 45318 - DNA, 26 bp, Homo sapiens
ttataagatgtagataagatggttgc

SEQ ID NO: 45319 - DNA, 26 bp, Homo sapiens
tataagatgtagataagatggttgcc

SEQ ID NO: 45320 - DNA, 26 bp, Homo sapiens
ataagatgtagataagatggttgcca

SEQ ID NO: 45321 - DNA, 26 bp, Homo sapiens
taagatgtagataagatggttgccag

SEQ ID NO: 45322 - DNA, 26 bp, Homo sapiens
aagatgtagataagatggttgccagg

SEQ ID NO: 45323 - DNA, 26 bp, Homo sapiens
agatgtagataagatggttgccagga

SEQ ID NO: 45324 - DNA, 26 bp, Homo sapiens
gatgtagataagatggttgccaggat

SEQ ID NO: 45325 - DNA, 26 bp, Homo sapiens
atgtagataagatggttgccaggatg

SEQ ID NO: 45326 - DNA, 26 bp, Homo sapiens
tgtagataagatggttgccaggatgt

SEQ ID NO: 45327 - DNA, 26 bp, Homo sapiens
gtagataagatggttgccaggatgtc

SEQ ID NO: 45328 - DNA, 26 bp, Homo sapiens
tagataagatggttgccaggatgtcg

SEQ ID NO: 45329 - DNA, 26 bp, Homo sapiens
agataagatggttgccaggatgtcgc

SEQ ID NO: 45330 - DNA, 26 bp, Homo sapiens
gataagatggttgccaggatgtcgcc

SEQ ID NO: 45331 - DNA, 26 bp, Homo sapiens
ataagatggttgccaggatgtcgcct

SEQ ID NO: 45332 - DNA, 26 bp, Homo sapiens
taagatggttgccaggatgtcgcctg

SEQ ID NO: 45333 - DNA, 26 bp, Homo sapiens
aagatggttgccaggatgtcgcctgt

SEQ ID NO: 45334 - DNA, 26 bp, Homo sapiens
agatggttgccaggatgtcgcctgtg

SEQ ID NO: 45335 - DNA, 26 bp, Homo sapiens
gatggttgccaggatgtcgcctgtgt

SEQ ID NO: 45336 - DNA, 26 bp, Homo sapiens
atggttgccaggatgtcgcctgtgtc

SEQ ID NO: 45337 - DNA, 26 bp, Homo sapiens
tggttgccaggatgtcgcctgtgtcc

SEQ ID NO: 45338 - DNA, 26 bp, Homo sapiens
ggttgccaggatgtcgcctgtgtccg

SEQ ID NO: 45339 - DNA, 26 bp, Homo sapiens
gttgccaggatgtcgcctgtgtccgt

SEQ ID NO: 45340 - DNA, 26 bp, Homo sapiens
ttgccaggatgtcgcctgtgtccgtg

SEQ ID NO: 45341 - DNA, 26 bp, Homo sapiens
tgccaggatgtcgcctgtgtccgtga

SEQ ID NO: 45342 - DNA, 26 bp, Homo sapiens
gccaggatgtcgcctgtgtccgtgag

SEQ ID NO: 45343 - DNA, 26 bp, Homo sapiens
ccaggatgtcgcctgtgtccgtgaga

SEQ ID NO: 45344 - DNA, 26 bp, Homo sapiens
caggatgtcgcctgtgtccgtgagaa

SEQ ID NO: 45345 - DNA, 26 bp, Homo sapiens
aggatgtcgcctgtgtccgtgagaac

SEQ ID NO: 45346 - DNA, 26 bp, Homo sapiens
ggatgtcgcctgtgtccgtgagaacg

SEQ ID NO: 45347 - DNA, 26 bp, Homo sapiens
gatgtcgcctgtgtccgtgagaacga

SEQ ID NO: 45348 - DNA, 26 bp, Homo sapiens
atgtcgcctgtgtccgtgagaacgag

SEQ ID NO: 45349 - DNA, 26 bp, Homo sapiens
tgtcgcctgtgtccgtgagaacgagg

SEQ ID NO: 45350 - DNA, 26 bp, Homo sapiens
gtcgcctgtgtccgtgagaacgagga

SEQ ID NO: 45351 - DNA, 26 bp, Homo sapiens
tcgcctgtgtccgtgagaacgaggaa

SEQ ID NO: 45352 - DNA, 26 bp, Homo sapiens
cgcctgtgtccgtgagaacgaggaac

SEQ ID NO: 45353 - DNA, 26 bp, Homo sapiens
gcctgtgtccgtgagaacgaggaaca

SEQ ID NO: 45354 - DNA, 26 bp, Homo sapiens
cctgtgtccgtgagaacgaggaacat

SEQ ID NO: 45355 - DNA, 26 bp, Homo sapiens
ctgtgtccgtgagaacgaggaacatc

SEQ ID NO: 45356 - DNA, 26 bp, Homo sapiens
tgtgtccgtgagaacgaggaacatca

SEQ ID NO: 45357 - DNA, 26 bp, Homo sapiens
gtgtccgtgagaacgaggaacatcag

SEQ ID NO: 45358 - DNA, 26 bp, Homo sapiens
tgtccgtgagaacgaggaacatcagg

SEQ ID NO: 45359 - DNA, 26 bp, Homo sapiens
gtccgtgagaacgaggaacatcaggg

SEQ ID NO: 45360 - DNA, 26 bp, Homo sapiens
tccgtgagaacgaggaacatcagggg

SEQ ID NO: 45361 - DNA, 26 bp, Homo sapiens
ccgtgagaacgaggaacatcaggggg

SEQ ID NO: 45362 - DNA, 26 bp, Homo sapiens
cgtgagaacgaggaacatcaggggga

SEQ ID NO: 45363 - DNA, 26 bp, Homo sapiens
gtgagaacgaggaacatcagggggat

SEQ ID NO: 45364 - DNA, 26 bp, Homo sapiens
tgagaacgaggaacatcagggggata

SEQ ID NO: 45365 - DNA, 26 bp, Homo sapiens
gagaacgaggaacatcagggggatac

SEQ ID NO: 45366 - DNA, 26 bp, Homo sapiens
agaacgaggaacatcagggggatacc

SEQ ID NO: 45367 - DNA, 26 bp, Homo sapiens
gaacgaggaacatcagggggatacca

SEQ ID NO: 45368 - DNA, 26 bp, Homo sapiens
aacgaggaacatcagggggataccaa

SEQ ID NO: 45369 - DNA, 26 bp, Homo sapiens
acgaggaacatcagggggataccaaa

SEQ ID NO: 45370 - DNA, 26 bp, Homo sapiens
cgaggaacatcagggggataccaaag

SEQ ID NO: 45371 - DNA, 26 bp, Homo sapiens
gaggaacatcagggggataccaaaga

SEQ ID NO: 45372 - DNA, 26 bp, Homo sapiens
aggaacatcagggggataccaaagag

SEQ ID NO: 45373 - DNA, 26 bp, Homo sapiens
ggaacatcagggggataccaaagaga

SEQ ID NO: 45374 - DNA, 26 bp, Homo sapiens
gaacatcagggggataccaaagagag

SEQ ID NO: 45375 - DNA, 26 bp, Homo sapiens
aacatcagggggataccaaagagagc

SEQ ID NO: 45376 - DNA, 26 bp, Homo sapiens
acatcagggggataccaaagagagca

SEQ ID NO: 45377 - DNA, 26 bp, Homo sapiens
catcagggggataccaaagagagcat

SEQ ID NO: 45378 - DNA, 26 bp, Homo sapiens
atcagggggataccaaagagagcata

SEQ ID NO: 45379 - DNA, 26 bp, Homo sapiens
tcagggggataccaaagagagcatag

SEQ ID NO: 45380 - DNA, 26 bp, Homo sapiens
cagggggataccaaagagagcataga

SEQ ID NO: 45381 - DNA, 26 bp, Homo sapiens
agggggataccaaagagagcatagag

SEQ ID NO: 45382 - DNA, 26 bp, Homo sapiens
gggggataccaaagagagcatagagc

SEQ ID NO: 45383 - DNA, 26 bp, Homo sapiens
ggggataccaaagagagcatagagca

SEQ ID NO: 45384 - DNA, 26 bp, Homo sapiens
gggataccaaagagagcatagagcat

SEQ ID NO: 45385 - DNA, 26 bp, Homo sapiens
ggataccaaagagagcatagagcatg

SEQ ID NO: 45386 - DNA, 26 bp, Homo sapiens
gataccaaagagagcatagagcatgc

SEQ ID NO: 45387 - DNA, 26 bp, Homo sapiens
ataccaaagagagcatagagcatgca

SEQ ID NO: 45388 - DNA, 26 bp, Homo sapiens
taccaaagagagcatagagcatgcac

SEQ ID NO: 45389 - DNA, 26 bp, Homo sapiens
accaaagagagcatagagcatgcaca

SEQ ID NO: 45390 - DNA, 26 bp, Homo sapiens
ccaaagagagcatagagcatgcacaa

SEQ ID NO: 45391 - DNA, 26 bp, Homo sapiens
caaagagagcatagagcatgcacaag

SEQ ID NO: 45392 - DNA, 26 bp, Homo sapiens
aaagagagcatagagcatgcacaagt

SEQ ID NO: 45393 - DNA, 26 bp, Homo sapiens
aagagagcatagagcatgcacaagta

SEQ ID NO: 45394 - DNA, 26 bp, Homo sapiens
agagagcatagagcatgcacaagtac

SEQ ID NO: 45395 - DNA, 26 bp, Homo sapiens
gagagcatagagcatgcacaagtact

SEQ ID NO: 45396 - DNA, 26 bp, Homo sapiens
agagcatagagcatgcacaagtactt

SEQ ID NO: 45397 - DNA, 26 bp, Homo sapiens
gagcatagagcatgcacaagtacttg

SEQ ID NO: 45398 - DNA, 26 bp, Homo sapiens
agcatagagcatgcacaagtacttgc

SEQ ID NO: 45399 - DNA, 26 bp, Homo sapiens
gcatagagcatgcacaagtacttgcc

SEQ ID NO: 45400 - DNA, 26 bp, Homo sapiens
catagagcatgcacaagtacttgcca

SEQ ID NO: 45401 - DNA, 26 bp, Homo sapiens
atagagcatgcacaagtacttgccaa

SEQ ID NO: 45402 - DNA, 26 bp, Homo sapiens
tagagcatgcacaagtacttgccaag

SEQ ID NO: 45403 - DNA, 26 bp, Homo sapiens
agagcatgcacaagtacttgccaagc

SEQ ID NO: 45404 - DNA, 26 bp, Homo sapiens
gagcatgcacaagtacttgccaagcc

SEQ ID NO: 45405 - DNA, 26 bp, Homo sapiens
agcatgcacaagtacttgccaagcct

SEQ ID NO: 45406 - DNA, 26 bp, Homo sapiens
gcatgcacaagtacttgccaagcctg

SEQ ID NO: 45407 - DNA, 26 bp, Homo sapiens
catgcacaagtacttgccaagcctgg

SEQ ID NO: 45408 - DNA, 26 bp, Homo sapiens
atgcacaagtacttgccaagcctggt

SEQ ID NO: 45409 - DNA, 26 bp, Homo sapiens
tgcacaagtacttgccaagcctggtg

SEQ ID NO: 45410 - DNA, 26 bp, Homo sapiens
gcacaagtacttgccaagcctggtga

SEQ ID NO: 45411 - DNA, 26 bp, Homo sapiens
cacaagtacttgccaagcctggtgac

SEQ ID NO: 45412 - DNA, 26 bp, Homo sapiens
acaagtacttgccaagcctggtgacg

SEQ ID NO: 45413 - DNA, 26 bp, Homo sapiens
caagtacttgccaagcctggtgacgg

SEQ ID NO: 45414 - DNA, 26 bp, Homo sapiens
aagtacttgccaagcctggtgacggg

SEQ ID NO: 45415 - DNA, 26 bp, Homo sapiens
agtacttgccaagcctggtgacgggg

SEQ ID NO: 45416 - DNA, 26 bp, Homo sapiens
gtacttgccaagcctggtgacggggt

SEQ ID NO: 45417 - DNA, 26 bp, Homo sapiens
tacttgccaagcctggtgacggggta

SEQ ID NO: 45418 - DNA, 26 bp, Homo sapiens
acttgccaagcctggtgacggggtag

SEQ ID NO: 45419 - DNA, 26 bp, Homo sapiens
cttgccaagcctggtgacggggtaga

SEQ ID NO: 45420 - DNA, 26 bp, Homo sapiens
ttgccaagcctggtgacggggtagat

SEQ ID NO: 45421 - DNA, 26 bp, Homo sapiens
tgccaagcctggtgacggggtagatg

SEQ ID NO: 45422 - DNA, 26 bp, Homo sapiens
gccaagcctggtgacggggtagatgt

SEQ ID NO: 45423 - DNA, 26 bp, Homo sapiens
ccaagcctggtgacggggtagatgta

SEQ ID NO: 45424 - DNA, 26 bp, Homo sapiens
caagcctggtgacggggtagatgtag

SEQ ID NO: 45425 - DNA, 26 bp, Homo sapiens
aagcctggtgacggggtagatgtagc

SEQ ID NO: 45426 - DNA, 26 bp, Homo sapiens
agcctggtgacggggtagatgtagcc

SEQ ID NO: 45427 - DNA, 26 bp, Homo sapiens
gcctggtgacggggtagatgtagcca

SEQ ID NO: 45428 - DNA, 26 bp, Homo sapiens
cctggtgacggggtagatgtagccat

SEQ ID NO: 45429 - DNA, 26 bp, Homo sapiens
ctggtgacggggtagatgtagccata

SEQ ID NO: 45430 - DNA, 26 bp, Homo sapiens
tggtgacggggtagatgtagccatag

SEQ ID NO: 45431 - DNA, 26 bp, Homo sapiens
ggtgacggggtagatgtagccatagc

SEQ ID NO: 45432 - DNA, 26 bp, Homo sapiens
gtgacggggtagatgtagccatagcc

SEQ ID NO: 45433 - DNA, 26 bp, Homo sapiens
tgacggggtagatgtagccatagccc

SEQ ID NO: 45434 - DNA, 26 bp, Homo sapiens
gacggggtagatgtagccatagccca

SEQ ID NO: 45435 - DNA, 26 bp, Homo sapiens
acggggtagatgtagccatagcccac

SEQ ID NO: 45436 - DNA, 26 bp, Homo sapiens
cggggtagatgtagccatagcccacg

SEQ ID NO: 45437 - DNA, 26 bp, Homo sapiens
ggggtagatgtagccatagcccacgg

SEQ ID NO: 45438 - DNA, 26 bp, Homo sapiens
gggtagatgtagccatagcccacggt

SEQ ID NO: 45439 - DNA, 26 bp, Homo sapiens
ggtagatgtagccatagcccacggtg

SEQ ID NO: 45440 - DNA, 26 bp, Homo sapiens
gtagatgtagccatagcccacggtgc

SEQ ID NO: 45441 - DNA, 26 bp, Homo sapiens
tagatgtagccatagcccacggtgct

SEQ ID NO: 45442 - DNA, 26 bp, Homo sapiens
agatgtagccatagcccacggtgctg

SEQ ID NO: 45443 - DNA, 26 bp, Homo sapiens
gatgtagccatagcccacggtgctga

SEQ ID NO: 45444 - DNA, 26 bp, Homo sapiens
atgtagccatagcccacggtgctgaa

SEQ ID NO: 45445 - DNA, 26 bp, Homo sapiens
tgtagccatagcccacggtgctgaac

SEQ ID NO: 45446 - DNA, 26 bp, Homo sapiens
gtagccatagcccacggtgctgaaca

SEQ ID NO: 45447 - DNA, 26 bp, Homo sapiens
tagccatagcccacggtgctgaacac

SEQ ID NO: 45448 - DNA, 26 bp, Homo sapiens
agccatagcccacggtgctgaacacc

SEQ ID NO: 45449 - DNA, 26 bp, Homo sapiens
gccatagcccacggtgctgaacaccg

SEQ ID NO: 45450 - DNA, 26 bp, Homo sapiens
ccatagcccacggtgctgaacaccgt

SEQ ID NO: 45451 - DNA, 26 bp, Homo sapiens
catagcccacggtgctgaacaccgtg

SEQ ID NO: 45452 - DNA, 26 bp, Homo sapiens
atagcccacggtgctgaacaccgtgc

SEQ ID NO: 45453 - DNA, 26 bp, Homo sapiens
tagcccacggtgctgaacaccgtgca

SEQ ID NO: 45454 - DNA, 26 bp, Homo sapiens
agcccacggtgctgaacaccgtgcag

SEQ ID NO: 45455 - DNA, 26 bp, Homo sapiens
gcccacggtgctgaacaccgtgcagc

SEQ ID NO: 45456 - DNA, 26 bp, Homo sapiens
cccacggtgctgaacaccgtgcagca

SEQ ID NO: 45457 - DNA, 26 bp, Homo sapiens
ccacggtgctgaacaccgtgcagcag

SEQ ID NO: 45458 - DNA, 26 bp, Homo sapiens
cacggtgctgaacaccgtgcagcaga

SEQ ID NO: 45459 - DNA, 26 bp, Homo sapiens
acggtgctgaacaccgtgcagcagaa

SEQ ID NO: 45460 - DNA, 26 bp, Homo sapiens
cggtgctgaacaccgtgcagcagaaa

SEQ ID NO: 45461 - DNA, 26 bp, Homo sapiens
ggtgctgaacaccgtgcagcagaaaa

SEQ ID NO: 45462 - DNA, 26 bp, Homo sapiens
gtgctgaacaccgtgcagcagaaaaa

SEQ ID NO: 45463 - DNA, 26 bp, Homo sapiens
tgctgaacaccgtgcagcagaaaaag

SEQ ID NO: 45464 - DNA, 26 bp, Homo sapiens
gctgaacaccgtgcagcagaaaaaga

SEQ ID NO: 45465 - DNA, 26 bp, Homo sapiens
ctgaacaccgtgcagcagaaaaagag

SEQ ID NO: 45466 - DNA, 26 bp, Homo sapiens
tgaacaccgtgcagcagaaaaagagc

SEQ ID NO: 45467 - DNA, 26 bp, Homo sapiens
gaacaccgtgcagcagaaaaagagcg

SEQ ID NO: 45468 - DNA, 26 bp, Homo sapiens
aacaccgtgcagcagaaaaagagcga

SEQ ID NO: 45469 - DNA, 26 bp, Homo sapiens
acaccgtgcagcagaaaaagagcgag

SEQ ID NO: 45470 - DNA, 26 bp, Homo sapiens
caccgtgcagcagaaaaagagcgagc

SEQ ID NO: 45471 - DNA, 26 bp, Homo sapiens
accgtgcagcagaaaaagagcgagct

SEQ ID NO: 45472 - DNA, 26 bp, Homo sapiens
ccgtgcagcagaaaaagagcgagctc

SEQ ID NO: 45473 - DNA, 26 bp, Homo sapiens
cgtgcagcagaaaaagagcgagctca

SEQ ID NO: 45474 - DNA, 26 bp, Homo sapiens
gtgcagcagaaaaagagcgagctcag

SEQ ID NO: 45475 - DNA, 26 bp, Homo sapiens
tgcagcagaaaaagagcgagctcagg

SEQ ID NO: 45476 - DNA, 26 bp, Homo sapiens
gcagcagaaaaagagcgagctcagga

SEQ ID NO: 45477 - DNA, 26 bp, Homo sapiens
cagcagaaaaagagcgagctcaggaa

SEQ ID NO: 45478 - DNA, 26 bp, Homo sapiens
agcagaaaaagagcgagctcaggaag

SEQ ID NO: 45479 - DNA, 26 bp, Homo sapiens
gcagaaaaagagcgagctcaggaagg

SEQ ID NO: 45480 - DNA, 26 bp, Homo sapiens
cagaaaaagagcgagctcaggaagga

SEQ ID NO: 45481 - DNA, 26 bp, Homo sapiens
agaaaaagagcgagctcaggaaggac

SEQ ID NO: 45482 - DNA, 26 bp, Homo sapiens
gaaaaagagcgagctcaggaaggacc

SEQ ID NO: 45483 - DNA, 26 bp, Homo sapiens
aaaaagagcgagctcaggaaggacca

SEQ ID NO: 45484 - DNA, 26 bp, Homo sapiens
aaaagagcgagctcaggaaggaccag

SEQ ID NO: 45485 - DNA, 26 bp, Homo sapiens
aaagagcgagctcaggaaggaccagt

SEQ ID NO: 45486 - DNA, 26 bp, Homo sapiens
aagagcgagctcaggaaggaccagtg

SEQ ID NO: 45487 - DNA, 26 bp, Homo sapiens
agagcgagctcaggaaggaccagtgt

SEQ ID NO: 45488 - DNA, 26 bp, Homo sapiens
gagcgagctcaggaaggaccagtgtg

SEQ ID NO: 45489 - DNA, 26 bp, Homo sapiens
agcgagctcaggaaggaccagtgtgt

SEQ ID NO: 45490 - DNA, 26 bp, Homo sapiens
gcgagctcaggaaggaccagtgtgtg

SEQ ID NO: 45491 - DNA, 26 bp, Homo sapiens
cgagctcaggaaggaccagtgtgtgg

SEQ ID NO: 45492 - DNA, 26 bp, Homo sapiens
gagctcaggaaggaccagtgtgtggt

SEQ ID NO: 45493 - DNA, 26 bp, Homo sapiens
agctcaggaaggaccagtgtgtggtc

SEQ ID NO: 45494 - DNA, 26 bp, Homo sapiens
gctcaggaaggaccagtgtgtggtcc

SEQ ID NO: 45495 - DNA, 26 bp, Homo sapiens
ctcaggaaggaccagtgtgtggtcct

SEQ ID NO: 45496 - DNA, 26 bp, Homo sapiens
tcaggaaggaccagtgtgtggtcctg

SEQ ID NO: 45497 - DNA, 26 bp, Homo sapiens
caggaaggaccagtgtgtggtcctgt

SEQ ID NO: 45498 - DNA, 26 bp, Homo sapiens
aggaaggaccagtgtgtggtcctgtt

SEQ ID NO: 45499 - DNA, 26 bp, Homo sapiens
ggaaggaccagtgtgtggtcctgtta

SEQ ID NO: 45500 - DNA, 26 bp, Homo sapiens
gaaggaccagtgtgtggtcctgttaa

SEQ ID NO: 45501 - DNA, 26 bp, Homo sapiens
aaggaccagtgtgtggtcctgttaaa

SEQ ID NO: 45502 - DNA, 26 bp, Homo sapiens
aggaccagtgtgtggtcctgttaaac

SEQ ID NO: 45503 - DNA, 26 bp, Homo sapiens
ggaccagtgtgtggtcctgttaaacc

SEQ ID NO: 45504 - DNA, 26 bp, Homo sapiens
gaccagtgtgtggtcctgttaaacca

SEQ ID NO: 45505 - DNA, 26 bp, Homo sapiens
accagtgtgtggtcctgttaaaccac

SEQ ID NO: 45506 - DNA, 26 bp, Homo sapiens
ccagtgtgtggtcctgttaaaccact

SEQ ID NO: 45507 - DNA, 26 bp, Homo sapiens
cagtgtgtggtcctgttaaaccactg

SEQ ID NO: 45508 - DNA, 26 bp, Homo sapiens
agtgtgtggtcctgttaaaccactga

SEQ ID NO: 45509 - DNA, 26 bp, Homo sapiens
gtgtgtggtcctgttaaaccactgag

SEQ ID NO: 45510 - DNA, 26 bp, Homo sapiens
tgtgtggtcctgttaaaccactgagg

SEQ ID NO: 45511 - DNA, 26 bp, Homo sapiens
gtgtggtcctgttaaaccactgaggc

SEQ ID NO: 45512 - DNA, 26 bp, Homo sapiens
tgtggtcctgttaaaccactgaggct

SEQ ID NO: 45513 - DNA, 26 bp, Homo sapiens
gtggtcctgttaaaccactgaggctt

SEQ ID NO: 45514 - DNA, 26 bp, Homo sapiens
tggtcctgttaaaccactgaggcttc

SEQ ID NO: 45515 - DNA, 26 bp, Homo sapiens
ggtcctgttaaaccactgaggcttca

SEQ ID NO: 45516 - DNA, 26 bp, Homo sapiens
gtcctgttaaaccactgaggcttcac

SEQ ID NO: 45517 - DNA, 26 bp, Homo sapiens
tcctgttaaaccactgaggcttcacc

SEQ ID NO: 45518 - DNA, 26 bp, Homo sapiens
cctgttaaaccactgaggcttcacct

SEQ ID NO: 45519 - DNA, 26 bp, Homo sapiens
ctgttaaaccactgaggcttcacctt

SEQ ID NO: 45520 - DNA, 26 bp, Homo sapiens
tgttaaaccactgaggcttcaccttc

SEQ ID NO: 45521 - DNA, 26 bp, Homo sapiens
gttaaaccactgaggcttcaccttct

SEQ ID NO: 45522 - DNA, 26 bp, Homo sapiens
ttaaaccactgaggcttcaccttctg

SEQ ID NO: 45523 - DNA, 26 bp, Homo sapiens
taaaccactgaggcttcaccttctgc

SEQ ID NO: 45524 - DNA, 26 bp, Homo sapiens
aaaccactgaggcttcaccttctgca

SEQ ID NO: 45525 - DNA, 26 bp, Homo sapiens
aaccactgaggcttcaccttctgcag

SEQ ID NO: 45526 - DNA, 26 bp, Homo sapiens
accactgaggcttcaccttctgcaga

SEQ ID NO: 45527 - DNA, 26 bp, Homo sapiens
ccactgaggcttcaccttctgcagat

SEQ ID NO: 45528 - DNA, 26 bp, Homo sapiens
cactgaggcttcaccttctgcagatg

SEQ ID NO: 45529 - DNA, 26 bp, Homo sapiens
actgaggcttcaccttctgcagatgc

SEQ ID NO: 45530 - DNA, 26 bp, Homo sapiens
ctgaggcttcaccttctgcagatgcc

SEQ ID NO: 45531 - DNA, 26 bp, Homo sapiens
tgaggcttcaccttctgcagatgccc

SEQ ID NO: 45532 - DNA, 26 bp, Homo sapiens
gaggcttcaccttctgcagatgcccc

SEQ ID NO: 45533 - DNA, 26 bp, Homo sapiens
aggcttcaccttctgcagatgcccct

SEQ ID NO: 45534 - DNA, 26 bp, Homo sapiens
ggcttcaccttctgcagatgcccctg

SEQ ID NO: 45535 - DNA, 26 bp, Homo sapiens
gcttcaccttctgcagatgcccctgg

SEQ ID NO: 45536 - DNA, 26 bp, Homo sapiens
cttcaccttctgcagatgcccctgga

SEQ ID NO: 45537 - DNA, 26 bp, Homo sapiens
ttcaccttctgcagatgcccctggag

SEQ ID NO: 45538 - DNA, 26 bp, Homo sapiens
tcaccttctgcagatgcccctggaga

SEQ ID NO: 45539 - DNA, 26 bp, Homo sapiens
caccttctgcagatgcccctggagat

SEQ ID NO: 45540 - DNA, 26 bp, Homo sapiens
accttctgcagatgcccctggagatc

SEQ ID NO: 45541 - DNA, 26 bp, Homo sapiens
ccttctgcagatgcccctggagatcc

SEQ ID NO: 45542 - DNA, 26 bp, Homo sapiens
cttctgcagatgcccctggagatcct

SEQ ID NO: 45543 - DNA, 26 bp, Homo sapiens
ttctgcagatgcccctggagatcctg

SEQ ID NO: 45544 - DNA, 26 bp, Homo sapiens
tctgcagatgcccctggagatcctgt

SEQ ID NO: 45545 - DNA, 26 bp, Homo sapiens
ctgcagatgcccctggagatcctgtt

SEQ ID NO: 45546 - DNA, 26 bp, Homo sapiens
tgcagatgcccctggagatcctgttt

SEQ ID NO: 45547 - DNA, 26 bp, Homo sapiens
gcagatgcccctggagatcctgtttt

SEQ ID NO: 45548 - DNA, 26 bp, Homo sapiens
cagatgcccctggagatcctgttttc

SEQ ID NO: 45549 - DNA, 26 bp, Homo sapiens
agatgcccctggagatcctgttttct

SEQ ID NO: 45550 - DNA, 26 bp, Homo sapiens
gatgcccctggagatcctgttttctg

SEQ ID NO: 45551 - DNA, 26 bp, Homo sapiens
atgcccctggagatcctgttttctgt

SEQ ID NO: 45552 - DNA, 26 bp, Homo sapiens
tgcccctggagatcctgttttctgtc

SEQ ID NO: 45553 - DNA, 26 bp, Homo sapiens
gcccctggagatcctgttttctgtct

SEQ ID NO: 45554 - DNA, 26 bp, Homo sapiens
cccctggagatcctgttttctgtctt

SEQ ID NO: 45555 - DNA, 26 bp, Homo sapiens
ccctggagatcctgttttctgtcttc

SEQ ID NO: 45556 - DNA, 26 bp, Homo sapiens
cctggagatcctgttttctgtcttcc

SEQ ID NO: 45557 - DNA, 26 bp, Homo sapiens
ctggagatcctgttttctgtcttcca

SEQ ID NO: 45558 - DNA, 26 bp, Homo sapiens
tggagatcctgttttctgtcttccac

SEQ ID NO: 45559 - DNA, 26 bp, Homo sapiens
ggagatcctgttttctgtcttccacc

SEQ ID NO: 45560 - DNA, 26 bp, Homo sapiens
gagatcctgttttctgtcttccacca

SEQ ID NO: 45561 - DNA, 26 bp, Homo sapiens
agatcctgttttctgtcttccaccac

SEQ ID NO: 45562 - DNA, 26 bp, Homo sapiens
gatcctgttttctgtcttccaccact

SEQ ID NO: 45563 - DNA, 26 bp, Homo sapiens
atcctgttttctgtcttccaccactg

SEQ ID NO: 45564 - DNA, 26 bp, Homo sapiens
tcctgttttctgtcttccaccactgt

SEQ ID NO: 45565 - DNA, 26 bp, Homo sapiens
cctgttttctgtcttccaccactgtt

SEQ ID NO: 45566 - DNA, 26 bp, Homo sapiens
ctgttttctgtcttccaccactgttt

SEQ ID NO: 45567 - DNA, 26 bp, Homo sapiens
tgttttctgtcttccaccactgtttc

SEQ ID NO: 45568 - DNA, 26 bp, Homo sapiens
gttttctgtcttccaccactgtttca

SEQ ID NO: 45569 - DNA, 26 bp, Homo sapiens
ttttctgtcttccaccactgtttcac

SEQ ID NO: 45570 - DNA, 26 bp, Homo sapiens
tttctgtcttccaccactgtttcact

SEQ ID NO: 45571 - DNA, 26 bp, Homo sapiens
ttctgtcttccaccactgtttcactg

SEQ ID NO: 45572 - DNA, 26 bp, Homo sapiens
tctgtcttccaccactgtttcactgc

SEQ ID NO: 45573 - DNA, 26 bp, Homo sapiens
ctgtcttccaccactgtttcactgca

SEQ ID NO: 45574 - DNA, 26 bp, Homo sapiens
tgtcttccaccactgtttcactgcag

SEQ ID NO: 45575 - DNA, 26 bp, Homo sapiens
gtcttccaccactgtttcactgcagt

SEQ ID NO: 45576 - DNA, 26 bp, Homo sapiens
tcttccaccactgtttcactgcagtt

SEQ ID NO: 45577 - DNA, 26 bp, Homo sapiens
cttccaccactgtttcactgcagttc

SEQ ID NO: 45578 - DNA, 26 bp, Homo sapiens
ttccaccactgtttcactgcagttca

SEQ ID NO: 45579 - DNA, 26 bp, Homo sapiens
tccaccactgtttcactgcagttcaa

SEQ ID NO: 45580 - DNA, 26 bp, Homo sapiens
ccaccactgtttcactgcagttcaag

SEQ ID NO: 45581 - DNA, 26 bp, Homo sapiens
caccactgtttcactgcagttcaaga

SEQ ID NO: 45582 - DNA, 26 bp, Homo sapiens
accactgtttcactgcagttcaagat

SEQ ID NO: 45583 - DNA, 26 bp, Homo sapiens
ccactgtttcactgcagttcaagatt

SEQ ID NO: 45584 - DNA, 26 bp, Homo sapiens
cactgtttcactgcagttcaagattc

SEQ ID NO: 45585 - DNA, 26 bp, Homo sapiens
actgtttcactgcagttcaagattct

SEQ ID NO: 45586 - DNA, 26 bp, Homo sapiens
ctgtttcactgcagttcaagattctg

SEQ ID NO: 45587 - DNA, 26 bp, Homo sapiens
tgtttcactgcagttcaagattctgc

SEQ ID NO: 45588 - DNA, 26 bp, Homo sapiens
gtttcactgcagttcaagattctgca

SEQ ID NO: 45589 - DNA, 26 bp, Homo sapiens
tttcactgcagttcaagattctgcag

SEQ ID NO: 45590 - DNA, 26 bp, Homo sapiens
ttcactgcagttcaagattctgcaga

SEQ ID NO: 45591 - DNA, 26 bp, Homo sapiens
tcactgcagttcaagattctgcagag

SEQ ID NO: 45592 - DNA, 26 bp, Homo sapiens
cactgcagttcaagattctgcagagc

SEQ ID NO: 45593 - DNA, 26 bp, Homo sapiens
actgcagttcaagattctgcagagct

SEQ ID NO: 45594 - DNA, 26 bp, Homo sapiens
ctgcagttcaagattctgcagagctc

SEQ ID NO: 45595 - DNA, 26 bp, Homo sapiens
tgcagttcaagattctgcagagctcc

SEQ ID NO: 45596 - DNA, 26 bp, Homo sapiens
gcagttcaagattctgcagagctcct

SEQ ID NO: 45597 - DNA, 26 bp, Homo sapiens
cagttcaagattctgcagagctcctc

SEQ ID NO: 45598 - DNA, 26 bp, Homo sapiens
agttcaagattctgcagagctcctcc

SEQ ID NO: 45599 - DNA, 26 bp, Homo sapiens
gttcaagattctgcagagctcctcca

SEQ ID NO: 45600 - DNA, 26 bp, Homo sapiens
ttcaagattctgcagagctcctccaa

SEQ ID NO: 45601 - DNA, 26 bp, Homo sapiens
tcaagattctgcagagctcctccaag

SEQ ID NO: 45602 - DNA, 26 bp, Homo sapiens
caagattctgcagagctcctccaaga

SEQ ID NO: 45603 - DNA, 26 bp, Homo sapiens
aagattctgcagagctcctccaagaa

SEQ ID NO: 45604 - DNA, 26 bp, Homo sapiens
agattctgcagagctcctccaagaac

SEQ ID NO: 45605 - DNA, 26 bp, Homo sapiens
gattctgcagagctcctccaagaact

SEQ ID NO: 45606 - DNA, 26 bp, Homo sapiens
attctgcagagctcctccaagaactt

SEQ ID NO: 45607 - DNA, 26 bp, Homo sapiens
ttctgcagagctcctccaagaacttc

SEQ ID NO: 45608 - DNA, 26 bp, Homo sapiens
tctgcagagctcctccaagaacttct

SEQ ID NO: 45609 - DNA, 26 bp, Homo sapiens
ctgcagagctcctccaagaacttctc

SEQ ID NO: 45610 - DNA, 26 bp, Homo sapiens
tgcagagctcctccaagaacttctca

SEQ ID NO: 45611 - DNA, 26 bp, Homo sapiens
gcagagctcctccaagaacttctcaa

SEQ ID NO: 45612 - DNA, 26 bp, Homo sapiens
cagagctcctccaagaacttctcaaa

SEQ ID NO: 45613 - DNA, 26 bp, Homo sapiens
agagctcctccaagaacttctcaaac

SEQ ID NO: 45614 - DNA, 26 bp, Homo sapiens
gagctcctccaagaacttctcaaact

SEQ ID NO: 45615 - DNA, 26 bp, Homo sapiens
agctcctccaagaacttctcaaactc

SEQ ID NO: 45616 - DNA, 26 bp, Homo sapiens
gctcctccaagaacttctcaaactct

SEQ ID NO: 45617 - DNA, 26 bp, Homo sapiens
ctcctccaagaacttctcaaactctc

SEQ ID NO: 45618 - DNA, 26 bp, Homo sapiens
tcctccaagaacttctcaaactctcc

SEQ ID NO: 45619 - DNA, 26 bp, Homo sapiens
cctccaagaacttctcaaactctcca

SEQ ID NO: 45620 - DNA, 26 bp, Homo sapiens
ctccaagaacttctcaaactctccat

SEQ ID NO: 45621 - DNA, 26 bp, Homo sapiens
tccaagaacttctcaaactctccatc

SEQ ID NO: 45622 - DNA, 26 bp, Homo sapiens
ccaagaacttctcaaactctccatca

SEQ ID NO: 45623 - DNA, 26 bp, Homo sapiens
caagaacttctcaaactctccatcat

SEQ ID NO: 45624 - DNA, 26 bp, Homo sapiens
aagaacttctcaaactctccatcatc

SEQ ID NO: 45625 - DNA, 26 bp, Homo sapiens
agaacttctcaaactctccatcatct

SEQ ID NO: 45626 - DNA, 26 bp, Homo sapiens
gaacttctcaaactctccatcatctg

SEQ ID NO: 45627 - DNA, 26 bp, Homo sapiens
aacttctcaaactctccatcatctgc

SEQ ID NO: 45628 - DNA, 26 bp, Homo sapiens
acttctcaaactctccatcatctgct

SEQ ID NO: 45629 - DNA, 26 bp, Homo sapiens
cttctcaaactctccatcatctgctg

SEQ ID NO: 45630 - DNA, 26 bp, Homo sapiens
ttctcaaactctccatcatctgctgc

SEQ ID NO: 45631 - DNA, 26 bp, Homo sapiens
tctcaaactctccatcatctgctgcc

SEQ ID NO: 45632 - DNA, 26 bp, Homo sapiens
ctcaaactctccatcatctgctgcca

SEQ ID NO: 45633 - DNA, 26 bp, Homo sapiens
tcaaactctccatcatctgctgccac

SEQ ID NO: 45634 - DNA, 26 bp, Homo sapiens
caaactctccatcatctgctgccacc

SEQ ID NO: 45635 - DNA, 26 bp, Homo sapiens
aaactctccatcatctgctgccacca

SEQ ID NO: 45636 - DNA, 26 bp, Homo sapiens
aactctccatcatctgctgccaccag

SEQ ID NO: 45637 - DNA, 26 bp, Homo sapiens
actctccatcatctgctgccaccagg

SEQ ID NO: 45638 - DNA, 26 bp, Homo sapiens
ctctccatcatctgctgccaccagga

SEQ ID NO: 45639 - DNA, 26 bp, Homo sapiens
tctccatcatctgctgccaccaggac

SEQ ID NO: 45640 - DNA, 26 bp, Homo sapiens
ctccatcatctgctgccaccaggacc

SEQ ID NO: 45641 - DNA, 26 bp, Homo sapiens
tccatcatctgctgccaccaggacct

SEQ ID NO: 45642 - DNA, 26 bp, Homo sapiens
ccatcatctgctgccaccaggacctg

SEQ ID NO: 45643 - DNA, 26 bp, Homo sapiens
catcatctgctgccaccaggacctgg

SEQ ID NO: 45644 - DNA, 26 bp, Homo sapiens
atcatctgctgccaccaggacctggc

SEQ ID NO: 45645 - DNA, 26 bp, Homo sapiens
tcatctgctgccaccaggacctggcc

SEQ ID NO: 45646 - DNA, 26 bp, Homo sapiens
catctgctgccaccaggacctggccg

SEQ ID NO: 45647 - DNA, 26 bp, Homo sapiens
atctgctgccaccaggacctggccgt

SEQ ID NO: 45648 - DNA, 26 bp, Homo sapiens
tctgctgccaccaggacctggccgtc

SEQ ID NO: 45649 - DNA, 26 bp, Homo sapiens
ctgctgccaccaggacctggccgtcc

SEQ ID NO: 45650 - DNA, 26 bp, Homo sapiens
tgctgccaccaggacctggccgtcct

SEQ ID NO: 45651 - DNA, 26 bp, Homo sapiens
gctgccaccaggacctggccgtcctc

SEQ ID NO: 45652 - DNA, 26 bp, Homo sapiens
ctgccaccaggacctggccgtcctca

SEQ ID NO: 45653 - DNA, 26 bp, Homo sapiens
tgccaccaggacctggccgtcctcaa

SEQ ID NO: 45654 - DNA, 26 bp, Homo sapiens
gccaccaggacctggccgtcctcaat

SEQ ID NO: 45655 - DNA, 26 bp, Homo sapiens
ccaccaggacctggccgtcctcaatg

SEQ ID NO: 45656 - DNA, 26 bp, Homo sapiens
caccaggacctggccgtcctcaatgg

SEQ ID NO: 45657 - DNA, 26 bp, Homo sapiens
accaggacctggccgtcctcaatggc

SEQ ID NO: 45658 - DNA, 26 bp, Homo sapiens
ccaggacctggccgtcctcaatggca

SEQ ID NO: 45659 - DNA, 26 bp, Homo sapiens
caggacctggccgtcctcaatggcag

SEQ ID NO: 45660 - DNA, 26 bp, Homo sapiens
aggacctggccgtcctcaatggcaga

SEQ ID NO: 45661 - DNA, 26 bp, Homo sapiens
ggacctggccgtcctcaatggcagag

SEQ ID NO: 45662 - DNA, 26 bp, Homo sapiens
gacctggccgtcctcaatggcagaga

SEQ ID NO: 45663 - DNA, 26 bp, Homo sapiens
acctggccgtcctcaatggcagagaa

SEQ ID NO: 45664 - DNA, 26 bp, Homo sapiens
cctggccgtcctcaatggcagagaag

SEQ ID NO: 45665 - DNA, 26 bp, Homo sapiens
ctggccgtcctcaatggcagagaaga

SEQ ID NO: 45666 - DNA, 26 bp, Homo sapiens
tggccgtcctcaatggcagagaagac

SEQ ID NO: 45667 - DNA, 26 bp, Homo sapiens
ggccgtcctcaatggcagagaagacc

SEQ ID NO: 45668 - DNA, 26 bp, Homo sapiens
gccgtcctcaatggcagagaagacca

SEQ ID NO: 45669 - DNA, 26 bp, Homo sapiens
ccgtcctcaatggcagagaagaccac

SEQ ID NO: 45670 - DNA, 26 bp, Homo sapiens
cgtcctcaatggcagagaagaccaca

SEQ ID NO: 45671 - DNA, 26 bp, Homo sapiens
gtcctcaatggcagagaagaccacag

SEQ ID NO: 45672 - DNA, 26 bp, Homo sapiens
tcctcaatggcagagaagaccacagc

SEQ ID NO: 45673 - DNA, 26 bp, Homo sapiens
cctcaatggcagagaagaccacagca

SEQ ID NO: 45674 - DNA, 26 bp, Homo sapiens
ctcaatggcagagaagaccacagcac

SEQ ID NO: 45675 - DNA, 26 bp, Homo sapiens
tcaatggcagagaagaccacagcacc

SEQ ID NO: 45676 - DNA, 26 bp, Homo sapiens
caatggcagagaagaccacagcaccc

SEQ ID NO: 45677 - DNA, 26 bp, Homo sapiens
aatggcagagaagaccacagcaccca

SEQ ID NO: 45678 - DNA, 26 bp, Homo sapiens
atggcagagaagaccacagcacccac

SEQ ID NO: 45679 - DNA, 26 bp, Homo sapiens
tggcagagaagaccacagcacccacc

SEQ ID NO: 45680 - DNA, 26 bp, Homo sapiens
ggcagagaagaccacagcacccacca

SEQ ID NO: 45681 - DNA, 26 bp, Homo sapiens
gcagagaagaccacagcacccaccag

SEQ ID NO: 45682 - DNA, 26 bp, Homo sapiens
cagagaagaccacagcacccaccagg

SEQ ID NO: 45683 - DNA, 26 bp, Homo sapiens
agagaagaccacagcacccaccaggg

SEQ ID NO: 45684 - DNA, 26 bp, Homo sapiens
gagaagaccacagcacccaccagggc

SEQ ID NO: 45685 - DNA, 26 bp, Homo sapiens
agaagaccacagcacccaccagggcg

SEQ ID NO: 45686 - DNA, 26 bp, Homo sapiens
gaagaccacagcacccaccagggcgt

SEQ ID NO: 45687 - DNA, 26 bp, Homo sapiens
aagaccacagcacccaccagggcgta

SEQ ID NO: 45688 - DNA, 26 bp, Homo sapiens
agaccacagcacccaccagggcgtag

SEQ ID NO: 45689 - DNA, 26 bp, Homo sapiens
gaccacagcacccaccagggcgtagg

SEQ ID NO: 45690 - DNA, 26 bp, Homo sapiens
accacagcacccaccagggcgtaggt

SEQ ID NO: 45691 - DNA, 26 bp, Homo sapiens
ccacagcacccaccagggcgtaggtc

SEQ ID NO: 45692 - DNA, 26 bp, Homo sapiens
cacagcacccaccagggcgtaggtca

SEQ ID NO: 45693 - DNA, 26 bp, Homo sapiens
acagcacccaccagggcgtaggtcac

SEQ ID NO: 45694 - DNA, 26 bp, Homo sapiens
cagcacccaccagggcgtaggtcacc

SEQ ID NO: 45695 - DNA, 26 bp, Homo sapiens
agcacccaccagggcgtaggtcacca

SEQ ID NO: 45696 - DNA, 26 bp, Homo sapiens
gcacccaccagggcgtaggtcaccag

SEQ ID NO: 45697 - DNA, 26 bp, Homo sapiens
cacccaccagggcgtaggtcaccaga

SEQ ID NO: 45698 - DNA, 26 bp, Homo sapiens
acccaccagggcgtaggtcaccagaa

SEQ ID NO: 45699 - DNA, 26 bp, Homo sapiens
cccaccagggcgtaggtcaccagaaa

SEQ ID NO: 45700 - DNA, 26 bp, Homo sapiens
ccaccagggcgtaggtcaccagaaag

SEQ ID NO: 45701 - DNA, 26 bp, Homo sapiens
caccagggcgtaggtcaccagaaagc

SEQ ID NO: 45702 - DNA, 26 bp, Homo sapiens
accagggcgtaggtcaccagaaagca

SEQ ID NO: 45703 - DNA, 26 bp, Homo sapiens
ccagggcgtaggtcaccagaaagcag

SEQ ID NO: 45704 - DNA, 26 bp, Homo sapiens
cagggcgtaggtcaccagaaagcaga

SEQ ID NO: 45705 - DNA, 26 bp, Homo sapiens
agggcgtaggtcaccagaaagcagag

SEQ ID NO: 45706 - DNA, 26 bp, Homo sapiens
gggcgtaggtcaccagaaagcagagg

SEQ ID NO: 45707 - DNA, 26 bp, Homo sapiens
ggcgtaggtcaccagaaagcagagga

SEQ ID NO: 45708 - DNA, 26 bp, Homo sapiens
gcgtaggtcaccagaaagcagaggaa

SEQ ID NO: 45709 - DNA, 26 bp, Homo sapiens
cgtaggtcaccagaaagcagaggaag

SEQ ID NO: 45710 - DNA, 26 bp, Homo sapiens
gtaggtcaccagaaagcagaggaagc

SEQ ID NO: 45711 - DNA, 26 bp, Homo sapiens
taggtcaccagaaagcagaggaagca

SEQ ID NO: 45712 - DNA, 26 bp, Homo sapiens
aggtcaccagaaagcagaggaagcag

SEQ ID NO: 45713 - DNA, 26 bp, Homo sapiens
ggtcaccagaaagcagaggaagcaga

SEQ ID NO: 45714 - DNA, 26 bp, Homo sapiens
gtcaccagaaagcagaggaagcagag

SEQ ID NO: 45715 - DNA, 26 bp, Homo sapiens
tcaccagaaagcagaggaagcagagg

SEQ ID NO: 45716 - DNA, 26 bp, Homo sapiens
caccagaaagcagaggaagcagaggc

SEQ ID NO: 45717 - DNA, 26 bp, Homo sapiens
accagaaagcagaggaagcagaggcc

SEQ ID NO: 45718 - DNA, 26 bp, Homo sapiens
ccagaaagcagaggaagcagaggcca

SEQ ID NO: 45719 - DNA, 26 bp, Homo sapiens
cagaaagcagaggaagcagaggccag

SEQ ID NO: 45720 - DNA, 26 bp, Homo sapiens
agaaagcagaggaagcagaggccagg

SEQ ID NO: 45721 - DNA, 26 bp, Homo sapiens
gaaagcagaggaagcagaggccaggg

SEQ ID NO: 45722 - DNA, 26 bp, Homo sapiens
aaagcagaggaagcagaggccaggga

SEQ ID NO: 45723 - DNA, 26 bp, Homo sapiens
aagcagaggaagcagaggccagggaa

SEQ ID NO: 45724 - DNA, 26 bp, Homo sapiens
agcagaggaagcagaggccagggaag

SEQ ID NO: 45725 - DNA, 26 bp, Homo sapiens
gcagaggaagcagaggccagggaaga

SEQ ID NO: 45726 - DNA, 26 bp, Homo sapiens
cagaggaagcagaggccagggaagag

SEQ ID NO: 45727 - DNA, 26 bp, Homo sapiens
agaggaagcagaggccagggaagagc

SEQ ID NO: 45728 - DNA, 26 bp, Homo sapiens
gaggaagcagaggccagggaagagct

SEQ ID NO: 45729 - DNA, 26 bp, Homo sapiens
aggaagcagaggccagggaagagctt

SEQ ID NO: 45730 - DNA, 26 bp, Homo sapiens
ggaagcagaggccagggaagagcttt

SEQ ID NO: 45731 - DNA, 26 bp, Homo sapiens
gaagcagaggccagggaagagctttc

SEQ ID NO: 45732 - DNA, 26 bp, Homo sapiens
aagcagaggccagggaagagctttcc

SEQ ID NO: 45733 - DNA, 26 bp, Homo sapiens
agcagaggccagggaagagctttccc

SEQ ID NO: 45734 - DNA, 26 bp, Homo sapiens
gcagaggccagggaagagctttccca

SEQ ID NO: 45735 - DNA, 26 bp, Homo sapiens
cagaggccagggaagagctttcccag

SEQ ID NO: 45736 - DNA, 26 bp, Homo sapiens
agaggccagggaagagctttcccagg

SEQ ID NO: 45737 - DNA, 26 bp, Homo sapiens
gaggccagggaagagctttcccaggg

SEQ ID NO: 45738 - DNA, 26 bp, Homo sapiens
aggccagggaagagctttcccagggc

SEQ ID NO: 45739 - DNA, 26 bp, Homo sapiens
ggccagggaagagctttcccagggcc

SEQ ID NO: 45740 - DNA, 26 bp, Homo sapiens
gccagggaagagctttcccagggcct

SEQ ID NO: 45741 - DNA, 26 bp, Homo sapiens
ccagggaagagctttcccagggcctc

SEQ ID NO: 45742 - DNA, 26 bp, Homo sapiens
cagggaagagctttcccagggcctct

SEQ ID NO: 45743 - DNA, 26 bp, Homo sapiens
agggaagagctttcccagggcctctg

SEQ ID NO: 45744 - DNA, 26 bp, Homo sapiens
gggaagagctttcccagggcctctgg

SEQ ID NO: 45745 - DNA, 26 bp, Homo sapiens
ggaagagctttcccagggcctctggg

SEQ ID NO: 45746 - DNA, 26 bp, Homo sapiens
gaagagctttcccagggcctctgggc

SEQ ID NO: 45747 - DNA, 26 bp, Homo sapiens
aagagctttcccagggcctctgggca

SEQ ID NO: 45748 - DNA, 26 bp, Homo sapiens
agagctttcccagggcctctgggcag

SEQ ID NO: 45749 - DNA, 26 bp, Homo sapiens
gagctttcccagggcctctgggcagc

SEQ ID NO: 45750 - DNA, 26 bp, Homo sapiens
agctttcccagggcctctgggcagca

SEQ ID NO: 45751 - DNA, 26 bp, Homo sapiens
gctttcccagggcctctgggcagcat

SEQ ID NO: 45752 - DNA, 26 bp, Homo sapiens
ctttcccagggcctctgggcagcatc

SEQ ID NO: 45753 - DNA, 26 bp, Homo sapiens
tttcccagggcctctgggcagcatct

SEQ ID NO: 45754 - DNA, 26 bp, Homo sapiens
ttcccagggcctctgggcagcatctc

SEQ ID NO: 45755 - DNA, 26 bp, Homo sapiens
tcccagggcctctgggcagcatctcc

SEQ ID NO: 45756 - DNA, 26 bp, Homo sapiens
cccagggcctctgggcagcatctcct

SEQ ID NO: 45757 - DNA, 26 bp, Homo sapiens
ccagggcctctgggcagcatctcctg

SEQ ID NO: 45758 - DNA, 26 bp, Homo sapiens
cagggcctctgggcagcatctcctgg

SEQ ID NO: 45759 - DNA, 26 bp, Homo sapiens
agggcctctgggcagcatctcctggc

SEQ ID NO: 45760 - DNA, 26 bp, Homo sapiens
gggcctctgggcagcatctcctggcc

SEQ ID NO: 45761 - DNA, 26 bp, Homo sapiens
ggcctctgggcagcatctcctggcct

SEQ ID NO: 45762 - DNA, 26 bp, Homo sapiens
gcctctgggcagcatctcctggcctg

SEQ ID NO: 45763 - DNA, 26 bp, Homo sapiens
cctctgggcagcatctcctggcctgg

SEQ ID NO: 45764 - DNA, 26 bp, Homo sapiens
ctctgggcagcatctcctggcctggg

SEQ ID NO: 45765 - DNA, 26 bp, Homo sapiens
tctgggcagcatctcctggcctgggg

SEQ ID NO: 45766 - DNA, 26 bp, Homo sapiens
ctgggcagcatctcctggcctggggg

SEQ ID NO: 45767 - DNA, 26 bp, Homo sapiens
tgggcagcatctcctggcctgggggt

SEQ ID NO: 45768 - DNA, 26 bp, Homo sapiens
gggcagcatctcctggcctgggggtg

SEQ ID NO: 45769 - DNA, 26 bp, Homo sapiens
ggcagcatctcctggcctgggggtgc

SEQ ID NO: 45770 - DNA, 26 bp, Homo sapiens
gcagcatctcctggcctgggggtgcc

SEQ ID NO: 45771 - DNA, 26 bp, Homo sapiens
cagcatctcctggcctgggggtgccc

SEQ ID NO: 45772 - DNA, 26 bp, Homo sapiens
agcatctcctggcctgggggtgcccc

SEQ ID NO: 45773 - DNA, 26 bp, Homo sapiens
gcatctcctggcctgggggtgccccg

SEQ ID NO: 45774 - DNA, 26 bp, Homo sapiens
catctcctggcctgggggtgccccga

SEQ ID NO: 45775 - DNA, 26 bp, Homo sapiens
atctcctggcctgggggtgccccgag

SEQ ID NO: 45776 - DNA, 26 bp, Homo sapiens
tctcctggcctgggggtgccccgaga

SEQ ID NO: 45777 - DNA, 26 bp, Homo sapiens
ctcctggcctgggggtgccccgagac

SEQ ID NO: 45778 - DNA, 26 bp, Homo sapiens
tcctggcctgggggtgccccgagacc

SEQ ID NO: 45779 - DNA, 26 bp, Homo sapiens
cctggcctgggggtgccccgagacct

SEQ ID NO: 45780 - DNA, 26 bp, Homo sapiens
ctggcctgggggtgccccgagacctc

SEQ ID NO: 45781 - DNA, 26 bp, Homo sapiens
tggcctgggggtgccccgagacctcc

SEQ ID NO: 45782 - DNA, 26 bp, Homo sapiens
ggcctgggggtgccccgagacctcca

SEQ ID NO: 45783 - DNA, 26 bp, Homo sapiens
gcctgggggtgccccgagacctccat

SEQ ID NO: 45784 - DNA, 26 bp, Homo sapiens
ttcgctcaatggaaatagtggatttt

SEQ ID NO: 45785 - DNA, 26 bp, Homo sapiens
tcgctcaatggaaatagtggattttt

SEQ ID NO: 45786 - DNA, 26 bp, Homo sapiens
cgctcaatggaaatagtggattttta

SEQ ID NO: 45787 - DNA, 26 bp, Homo sapiens
gctcaatggaaatagtggatttttac

SEQ ID NO: 45788 - DNA, 26 bp, Homo sapiens
ctcaatggaaatagtggatttttact

SEQ ID NO: 45789 - DNA, 26 bp, Homo sapiens
tcaatggaaatagtggatttttactg

SEQ ID NO: 45790 - DNA, 26 bp, Homo sapiens
caatggaaatagtggatttttactgg

SEQ ID NO: 45791 - DNA, 26 bp, Homo sapiens
aatggaaatagtggatttttactggg

SEQ ID NO: 45792 - DNA, 26 bp, Homo sapiens
atggaaatagtggatttttactgggt

SEQ ID NO: 45793 - DNA, 26 bp, Homo sapiens
tggaaatagtggatttttactgggta

SEQ ID NO: 45794 - DNA, 26 bp, Homo sapiens
ggaaatagtggatttttactgggtag

SEQ ID NO: 45795 - DNA, 26 bp, Homo sapiens
gaaatagtggatttttactgggtagc

SEQ ID NO: 45796 - DNA, 26 bp, Homo sapiens
aaatagtggatttttactgggtagca

SEQ ID NO: 45797 - DNA, 26 bp, Homo sapiens
aatagtggatttttactgggtagcag

SEQ ID NO: 45798 - DNA, 26 bp, Homo sapiens
atagtggatttttactgggtagcagg

SEQ ID NO: 45799 - DNA, 26 bp, Homo sapiens
tagtggatttttactgggtagcagga

SEQ ID NO: 45800 - DNA, 26 bp, Homo sapiens
agtggatttttactgggtagcaggac

SEQ ID NO: 45801 - DNA, 26 bp, Homo sapiens
gtggatttttactgggtagcaggacc

SEQ ID NO: 45802 - DNA, 26 bp, Homo sapiens
tggatttttactgggtagcaggacct

SEQ ID NO: 45803 - DNA, 26 bp, Homo sapiens
ggatttttactgggtagcaggacctc

SEQ ID NO: 45804 - DNA, 26 bp, Homo sapiens
gatttttactgggtagcaggacctcc

SEQ ID NO: 45805 - DNA, 26 bp, Homo sapiens
atttttactgggtagcaggacctccg

SEQ ID NO: 45806 - DNA, 26 bp, Homo sapiens
tttttactgggtagcaggacctccgc

SEQ ID NO: 45807 - DNA, 26 bp, Homo sapiens
ttttactgggtagcaggacctccgcg

SEQ ID NO: 45808 - DNA, 26 bp, Homo sapiens
tttactgggtagcaggacctccgcga

SEQ ID NO: 45809 - DNA, 26 bp, Homo sapiens
ttactgggtagcaggacctccgcgac

SEQ ID NO: 45810 - DNA, 26 bp, Homo sapiens
tactgggtagcaggacctccgcgacc

SEQ ID NO: 45811 - DNA, 26 bp, Homo sapiens
actgggtagcaggacctccgcgacca

SEQ ID NO: 45812 - DNA, 26 bp, Homo sapiens
ctgggtagcaggacctccgcgaccac

SEQ ID NO: 45813 - DNA, 26 bp, Homo sapiens
tgggtagcaggacctccgcgaccacc

SEQ ID NO: 45814 - DNA, 26 bp, Homo sapiens
gggtagcaggacctccgcgaccaccc

SEQ ID NO: 45815 - DNA, 26 bp, Homo sapiens
ggtagcaggacctccgcgaccacccg

SEQ ID NO: 45816 - DNA, 26 bp, Homo sapiens
gtagcaggacctccgcgaccacccgc

SEQ ID NO: 45817 - DNA, 26 bp, Homo sapiens
tagcaggacctccgcgaccacccgct

SEQ ID NO: 45818 - DNA, 26 bp, Homo sapiens
agcaggacctccgcgaccacccgctg

SEQ ID NO: 45819 - DNA, 26 bp, Homo sapiens
gcaggacctccgcgaccacccgctgc

SEQ ID NO: 45820 - DNA, 26 bp, Homo sapiens
caggacctccgcgaccacccgctgcg

SEQ ID NO: 45821 - DNA, 26 bp, Homo sapiens
aggacctccgcgaccacccgctgcgc

SEQ ID NO: 45822 - DNA, 26 bp, Homo sapiens
ggacctccgcgaccacccgctgcgca

SEQ ID NO: 45823 - DNA, 26 bp, Homo sapiens
gacctccgcgaccacccgctgcgcat

SEQ ID NO: 45824 - DNA, 26 bp, Homo sapiens
acctccgcgaccacccgctgcgcatg

SEQ ID NO: 45825 - DNA, 26 bp, Homo sapiens
cctccgcgaccacccgctgcgcatgc

SEQ ID NO: 45826 - DNA, 26 bp, Homo sapiens
ctccgcgaccacccgctgcgcatgcg

SEQ ID NO: 45827 - DNA, 26 bp, Homo sapiens
tccgcgaccacccgctgcgcatgcgc

SEQ ID NO: 45828 - DNA, 26 bp, Homo sapiens
ccgcgaccacccgctgcgcatgcgct

SEQ ID NO: 45829 - DNA, 26 bp, Homo sapiens
cgcgaccacccgctgcgcatgcgctt

SEQ ID NO: 45830 - DNA, 26 bp, Homo sapiens
gcgaccacccgctgcgcatgcgcttc

SEQ ID NO: 45831 - DNA, 26 bp, Homo sapiens
cgaccacccgctgcgcatgcgcttca

SEQ ID NO: 45832 - DNA, 26 bp, Homo sapiens
gaccacccgctgcgcatgcgcttcac

SEQ ID NO: 45833 - DNA, 26 bp, Homo sapiens
accacccgctgcgcatgcgcttcact

SEQ ID NO: 45834 - DNA, 26 bp, Homo sapiens
ccacccgctgcgcatgcgcttcactt

SEQ ID NO: 45835 - DNA, 26 bp, Homo sapiens
cacccgctgcgcatgcgcttcacttg

SEQ ID NO: 45836 - DNA, 26 bp, Homo sapiens
acccgctgcgcatgcgcttcacttgg

SEQ ID NO: 45837 - DNA, 26 bp, Homo sapiens
cccgctgcgcatgcgcttcacttggg

SEQ ID NO: 45838 - DNA, 26 bp, Homo sapiens
ccgctgcgcatgcgcttcacttgggc

SEQ ID NO: 45839 - DNA, 26 bp, Homo sapiens
cgctgcgcatgcgcttcacttgggcg

SEQ ID NO: 45840 - DNA, 26 bp, Homo sapiens
gctgcgcatgcgcttcacttgggcgt

SEQ ID NO: 45841 - DNA, 26 bp, Homo sapiens
ctgcgcatgcgcttcacttgggcgtc

SEQ ID NO: 45842 - DNA, 26 bp, Homo sapiens
tgcgcatgcgcttcacttgggcgtca

SEQ ID NO: 45843 - DNA, 26 bp, Homo sapiens
gcgcatgcgcttcacttgggcgtcac

SEQ ID NO: 45844 - DNA, 26 bp, Homo sapiens
cgcatgcgcttcacttgggcgtcacc

SEQ ID NO: 45845 - DNA, 26 bp, Homo sapiens
gcatgcgcttcacttgggcgtcaccc

SEQ ID NO: 45846 - DNA, 26 bp, Homo sapiens
catgcgcttcacttgggcgtcacccg

SEQ ID NO: 45847 - DNA, 26 bp, Homo sapiens
atgcgcttcacttgggcgtcacccgg

SEQ ID NO: 45848 - DNA, 26 bp, Homo sapiens
tgcgcttcacttgggcgtcacccggg

SEQ ID NO: 45849 - DNA, 26 bp, Homo sapiens
gcgcttcacttgggcgtcacccgggg

SEQ ID NO: 45850 - DNA, 26 bp, Homo sapiens
cgcttcacttgggcgtcacccgggga

SEQ ID NO: 45851 - DNA, 26 bp, Homo sapiens
gcttcacttgggcgtcacccggggaa

SEQ ID NO: 45852 - DNA, 26 bp, Homo sapiens
cttcacttgggcgtcacccggggaac

SEQ ID NO: 45853 - DNA, 26 bp, Homo sapiens
ttcacttgggcgtcacccggggaact

SEQ ID NO: 45854 - DNA, 26 bp, Homo sapiens
tcacttgggcgtcacccggggaactg

SEQ ID NO: 45855 - DNA, 26 bp, Homo sapiens
cacttgggcgtcacccggggaactgc

SEQ ID NO: 45856 - DNA, 26 bp, Homo sapiens
acttgggcgtcacccggggaactgcg

SEQ ID NO: 45857 - DNA, 26 bp, Homo sapiens
cttgggcgtcacccggggaactgcgc

SEQ ID NO: 45858 - DNA, 26 bp, Homo sapiens
ttgggcgtcacccggggaactgcgcc

SEQ ID NO: 45859 - DNA, 26 bp, Homo sapiens
tgggcgtcacccggggaactgcgcct

SEQ ID NO: 45860 - DNA, 26 bp, Homo sapiens
gggcgtcacccggggaactgcgcctg

SEQ ID NO: 45861 - DNA, 26 bp, Homo sapiens
ggcgtcacccggggaactgcgcctgc

SEQ ID NO: 45862 - DNA, 26 bp, Homo sapiens
gcgtcacccggggaactgcgcctgcg

SEQ ID NO: 45863 - DNA, 26 bp, Homo sapiens
cgtcacccggggaactgcgcctgcgc

SEQ ID NO: 45864 - DNA, 26 bp, Homo sapiens
gtcacccggggaactgcgcctgcgca

SEQ ID NO: 45865 - DNA, 26 bp, Homo sapiens
tcacccggggaactgcgcctgcgcag

SEQ ID NO: 45866 - DNA, 26 bp, Homo sapiens
cacccggggaactgcgcctgcgcagt

SEQ ID NO: 45867 - DNA, 26 bp, Homo sapiens
acccggggaactgcgcctgcgcagtc

SEQ ID NO: 45868 - DNA, 26 bp, Homo sapiens
cccggggaactgcgcctgcgcagtct

SEQ ID NO: 45869 - DNA, 26 bp, Homo sapiens
ccggggaactgcgcctgcgcagtctc

SEQ ID NO: 45870 - DNA, 26 bp, Homo sapiens
cggggaactgcgcctgcgcagtctct

SEQ ID NO: 45871 - DNA, 26 bp, Homo sapiens
ggggaactgcgcctgcgcagtctctc

SEQ ID NO: 45872 - DNA, 26 bp, Homo sapiens
gggaactgcgcctgcgcagtctctcc

SEQ ID NO: 45873 - DNA, 26 bp, Homo sapiens
ggaactgcgcctgcgcagtctctccc

SEQ ID NO: 45874 - DNA, 26 bp, Homo sapiens
gaactgcgcctgcgcagtctctcccc

SEQ ID NO: 45875 - DNA, 26 bp, Homo sapiens
aactgcgcctgcgcagtctctcccca

SEQ ID NO: 45876 - DNA, 26 bp, Homo sapiens
actgcgcctgcgcagtctctccccat

SEQ ID NO: 45877 - DNA, 26 bp, Homo sapiens
ctgcgcctgcgcagtctctccccatc

SEQ ID NO: 45878 - DNA, 26 bp, Homo sapiens
tgcgcctgcgcagtctctccccatcc

SEQ ID NO: 45879 - DNA, 26 bp, Homo sapiens
gcgcctgcgcagtctctccccatccg

SEQ ID NO: 45880 - DNA, 26 bp, Homo sapiens
cgcctgcgcagtctctccccatccga

SEQ ID NO: 45881 - DNA, 26 bp, Homo sapiens
gcctgcgcagtctctccccatccgag

SEQ ID NO: 45882 - DNA, 26 bp, Homo sapiens
cctgcgcagtctctccccatccgagg

SEQ ID NO: 45883 - DNA, 26 bp, Homo sapiens
ctgcgcagtctctccccatccgaggt

SEQ ID NO: 45884 - DNA, 26 bp, Homo sapiens
tgcgcagtctctccccatccgaggtc

SEQ ID NO: 45885 - DNA, 26 bp, Homo sapiens
gcgcagtctctccccatccgaggtcc

SEQ ID NO: 45886 - DNA, 26 bp, Homo sapiens
cgcagtctctccccatccgaggtccg

SEQ ID NO: 45887 - DNA, 26 bp, Homo sapiens
gcagtctctccccatccgaggtccgc

SEQ ID NO: 45888 - DNA, 26 bp, Homo sapiens
cagtctctccccatccgaggtccgct

SEQ ID NO: 45889 - DNA, 26 bp, Homo sapiens
agtctctccccatccgaggtccgctc

SEQ ID NO: 45890 - DNA, 26 bp, Homo sapiens
gtctctccccatccgaggtccgctcc

SEQ ID NO: 45891 - DNA, 26 bp, Homo sapiens
tctctccccatccgaggtccgctccg

SEQ ID NO: 45892 - DNA, 26 bp, Homo sapiens
ctctccccatccgaggtccgctccgc

SEQ ID NO: 45893 - DNA, 26 bp, Homo sapiens
tctccccatccgaggtccgctccgcg

SEQ ID NO: 45894 - DNA, 26 bp, Homo sapiens
ctccccatccgaggtccgctccgcga

SEQ ID NO: 45895 - DNA, 26 bp, Homo sapiens
tccccatccgaggtccgctccgcgag

SEQ ID NO: 45896 - DNA, 26 bp, Homo sapiens
ccccatccgaggtccgctccgcgagt

SEQ ID NO: 45897 - DNA, 26 bp, Homo sapiens
cccatccgaggtccgctccgcgagtg

SEQ ID NO: 45898 - DNA, 26 bp, Homo sapiens
ccatccgaggtccgctccgcgagtgc

SEQ ID NO: 45899 - DNA, 26 bp, Homo sapiens
catccgaggtccgctccgcgagtgcg

SEQ ID NO: 45900 - DNA, 26 bp, Homo sapiens
atccgaggtccgctccgcgagtgcga

SEQ ID NO: 45901 - DNA, 26 bp, Homo sapiens
tccgaggtccgctccgcgagtgcgag

SEQ ID NO: 45902 - DNA, 26 bp, Homo sapiens
ccgaggtccgctccgcgagtgcgagc

SEQ ID NO: 45903 - DNA, 26 bp, Homo sapiens
cgaggtccgctccgcgagtgcgagcg

SEQ ID NO: 45904 - DNA, 26 bp, Homo sapiens
gaggtccgctccgcgagtgcgagcgc

SEQ ID NO: 45905 - DNA, 26 bp, Homo sapiens
aggtccgctccgcgagtgcgagcgcg

SEQ ID NO: 45906 - DNA, 26 bp, Homo sapiens
ggtccgctccgcgagtgcgagcgcgc

SEQ ID NO: 45907 - DNA, 26 bp, Homo sapiens
gtccgctccgcgagtgcgagcgcgcg

SEQ ID NO: 45908 - DNA, 26 bp, Homo sapiens
tccgctccgcgagtgcgagcgcgcgc

SEQ ID NO: 45909 - DNA, 26 bp, Homo sapiens
ccgctccgcgagtgcgagcgcgcgcc

SEQ ID NO: 45910 - DNA, 26 bp, Homo sapiens
cgctccgcgagtgcgagcgcgcgcca

SEQ ID NO: 45911 - DNA, 26 bp, Homo sapiens
gctccgcgagtgcgagcgcgcgccag

SEQ ID NO: 45912 - DNA, 26 bp, Homo sapiens
ctccgcgagtgcgagcgcgcgccagg

SEQ ID NO: 45913 - DNA, 26 bp, Homo sapiens
tccgcgagtgcgagcgcgcgccaggc

SEQ ID NO: 45914 - DNA, 26 bp, Homo sapiens
ccgcgagtgcgagcgcgcgccaggcc

SEQ ID NO: 45915 - DNA, 26 bp, Homo sapiens
cgcgagtgcgagcgcgcgccaggccc

SEQ ID NO: 45916 - DNA, 26 bp, Homo sapiens
gcgagtgcgagcgcgcgccaggccca

SEQ ID NO: 45917 - DNA, 26 bp, Homo sapiens
cgagtgcgagcgcgcgccaggcccac

SEQ ID NO: 45918 - DNA, 26 bp, Homo sapiens
gagtgcgagcgcgcgccaggcccacc

SEQ ID NO: 45919 - DNA, 26 bp, Homo sapiens
agtgcgagcgcgcgccaggcccaccc

SEQ ID NO: 45920 - DNA, 26 bp, Homo sapiens
gtgcgagcgcgcgccaggcccacccg

SEQ ID NO: 45921 - DNA, 26 bp, Homo sapiens
tgcgagcgcgcgccaggcccacccgg

SEQ ID NO: 45922 - DNA, 26 bp, Homo sapiens
gcgagcgcgcgccaggcccacccggg

SEQ ID NO: 45923 - DNA, 26 bp, Homo sapiens
cgagcgcgcgccaggcccacccgggc

SEQ ID NO: 45924 - DNA, 26 bp, Homo sapiens
gagcgcgcgccaggcccacccgggcg

SEQ ID NO: 45925 - DNA, 26 bp, Homo sapiens
agcgcgcgccaggcccacccgggcgc

SEQ ID NO: 45926 - DNA, 26 bp, Homo sapiens
gcgcgcgccaggcccacccgggcgct

SEQ ID NO: 45927 - DNA, 26 bp, Homo sapiens
cgcgcgccaggcccacccgggcgctg

SEQ ID NO: 45928 - DNA, 26 bp, Homo sapiens
gcgcgccaggcccacccgggcgctgc

SEQ ID NO: 45929 - DNA, 26 bp, Homo sapiens
cgcgccaggcccacccgggcgctgct

SEQ ID NO: 45930 - DNA, 26 bp, Homo sapiens
gcgccaggcccacccgggcgctgctc

SEQ ID NO: 45931 - DNA, 26 bp, Homo sapiens
cgccaggcccacccgggcgctgctct

SEQ ID NO: 45932 - DNA, 26 bp, Homo sapiens
gccaggcccacccgggcgctgctctt

SEQ ID NO: 45933 - DNA, 26 bp, Homo sapiens
ccaggcccacccgggcgctgctcttc

SEQ ID NO: 45934 - DNA, 26 bp, Homo sapiens
caggcccacccgggcgctgctcttca

SEQ ID NO: 45935 - DNA, 26 bp, Homo sapiens
aggcccacccgggcgctgctcttcat

SEQ ID NO: 45936 - DNA, 26 bp, Homo sapiens
ggcccacccgggcgctgctcttcatg

SEQ ID NO: 45937 - DNA, 26 bp, Homo sapiens
gcccacccgggcgctgctcttcatgt

SEQ ID NO: 45938 - DNA, 26 bp, Homo sapiens
cccacccgggcgctgctcttcatgtc

SEQ ID NO: 45939 - DNA, 26 bp, Homo sapiens
ccacccgggcgctgctcttcatgtcc

SEQ ID NO: 45940 - DNA, 26 bp, Homo sapiens
cacccgggcgctgctcttcatgtccc

SEQ ID NO: 45941 - DNA, 26 bp, Homo sapiens
acccgggcgctgctcttcatgtcccc

SEQ ID NO: 45942 - DNA, 26 bp, Homo sapiens
cccgggcgctgctcttcatgtccccg

SEQ ID NO: 45943 - DNA, 26 bp, Homo sapiens
ccgggcgctgctcttcatgtccccgc

SEQ ID NO: 45944 - DNA, 26 bp, Homo sapiens
cgggcgctgctcttcatgtccccgcg

SEQ ID NO: 45945 - DNA, 26 bp, Homo sapiens
gggcgctgctcttcatgtccccgcgg

SEQ ID NO: 45946 - DNA, 26 bp, Homo sapiens
ggcgctgctcttcatgtccccgcggt

SEQ ID NO: 45947 - DNA, 26 bp, Homo sapiens
gcgctgctcttcatgtccccgcggtc

SEQ ID NO: 45948 - DNA, 26 bp, Homo sapiens
cgctgctcttcatgtccccgcggtcg

SEQ ID NO: 45949 - DNA, 26 bp, Homo sapiens
gctgctcttcatgtccccgcggtcga

SEQ ID NO: 45950 - DNA, 26 bp, Homo sapiens
ctgctcttcatgtccccgcggtcgaa

SEQ ID NO: 45951 - DNA, 26 bp, Homo sapiens
tgctcttcatgtccccgcggtcgaag

SEQ ID NO: 45952 - DNA, 26 bp, Homo sapiens
gctcttcatgtccccgcggtcgaaga

SEQ ID NO: 45953 - DNA, 26 bp, Homo sapiens
ctcttcatgtccccgcggtcgaagac

SEQ ID NO: 45954 - DNA, 26 bp, Homo sapiens
tcttcatgtccccgcggtcgaagacg

SEQ ID NO: 45955 - DNA, 26 bp, Homo sapiens
cttcatgtccccgcggtcgaagacgg

SEQ ID NO: 45956 - DNA, 26 bp, Homo sapiens
ttcatgtccccgcggtcgaagacggc

SEQ ID NO: 45957 - DNA, 26 bp, Homo sapiens
tcatgtccccgcggtcgaagacggcc

SEQ ID NO: 45958 - DNA, 26 bp, Homo sapiens
catgtccccgcggtcgaagacggcca

SEQ ID NO: 45959 - DNA, 26 bp, Homo sapiens
atgtccccgcggtcgaagacggccac

SEQ ID NO: 45960 - DNA, 26 bp, Homo sapiens
tgtccccgcggtcgaagacggccaca

SEQ ID NO: 45961 - DNA, 26 bp, Homo sapiens
gtccccgcggtcgaagacggccacat

SEQ ID NO: 45962 - DNA, 26 bp, Homo sapiens
tccccgcggtcgaagacggccacata

SEQ ID NO: 45963 - DNA, 26 bp, Homo sapiens
ccccgcggtcgaagacggccacatac

SEQ ID NO: 45964 - DNA, 26 bp, Homo sapiens
cccgcggtcgaagacggccacatacg

SEQ ID NO: 45965 - DNA, 26 bp, Homo sapiens
ccgcggtcgaagacggccacatacgt

SEQ ID NO: 45966 - DNA, 26 bp, Homo sapiens
cgcggtcgaagacggccacatacgtc

SEQ ID NO: 45967 - DNA, 26 bp, Homo sapiens
gcggtcgaagacggccacatacgtcc

SEQ ID NO: 45968 - DNA, 26 bp, Homo sapiens
cggtcgaagacggccacatacgtccc

SEQ ID NO: 45969 - DNA, 26 bp, Homo sapiens
ggtcgaagacggccacatacgtcccc

SEQ ID NO: 45970 - DNA, 26 bp, Homo sapiens
gtcgaagacggccacatacgtcccca

SEQ ID NO: 45971 - DNA, 26 bp, Homo sapiens
tcgaagacggccacatacgtccccaa

SEQ ID NO: 45972 - DNA, 26 bp, Homo sapiens
cgaagacggccacatacgtccccaag

SEQ ID NO: 45973 - DNA, 26 bp, Homo sapiens
gaagacggccacatacgtccccaaga

SEQ ID NO: 45974 - DNA, 26 bp, Homo sapiens
aagacggccacatacgtccccaagaa

SEQ ID NO: 45975 - DNA, 26 bp, Homo sapiens
agacggccacatacgtccccaagaag

SEQ ID NO: 45976 - DNA, 26 bp, Homo sapiens
gacggccacatacgtccccaagaaga

SEQ ID NO: 45977 - DNA, 26 bp, Homo sapiens
acggccacatacgtccccaagaagac

SEQ ID NO: 45978 - DNA, 26 bp, Homo sapiens
cggccacatacgtccccaagaagacg

SEQ ID NO: 45979 - DNA, 26 bp, Homo sapiens
ggccacatacgtccccaagaagacgt

SEQ ID NO: 45980 - DNA, 26 bp, Homo sapiens
gccacatacgtccccaagaagacgtc

SEQ ID NO: 45981 - DNA, 26 bp, Homo sapiens
ccacatacgtccccaagaagacgtca

SEQ ID NO: 45982 - DNA, 26 bp, Homo sapiens
cacatacgtccccaagaagacgtcac

SEQ ID NO: 45983 - DNA, 26 bp, Homo sapiens
acatacgtccccaagaagacgtcacc

SEQ ID NO: 45984 - DNA, 26 bp, Homo sapiens
catacgtccccaagaagacgtcaccg

SEQ ID NO: 45985 - DNA, 26 bp, Homo sapiens
atacgtccccaagaagacgtcaccga

SEQ ID NO: 45986 - DNA, 26 bp, Homo sapiens
tacgtccccaagaagacgtcaccgag

SEQ ID NO: 45987 - DNA, 26 bp, Homo sapiens
acgtccccaagaagacgtcaccgagg

SEQ ID NO: 45988 - DNA, 26 bp, Homo sapiens
cgtccccaagaagacgtcaccgagga

SEQ ID NO: 45989 - DNA, 26 bp, Homo sapiens
gtccccaagaagacgtcaccgaggat

SEQ ID NO: 45990 - DNA, 26 bp, Homo sapiens
tccccaagaagacgtcaccgaggatc

SEQ ID NO: 45991 - DNA, 26 bp, Homo sapiens
ccccaagaagacgtcaccgaggatcc

SEQ ID NO: 45992 - DNA, 26 bp, Homo sapiens
cccaagaagacgtcaccgaggatcca

SEQ ID NO: 45993 - DNA, 26 bp, Homo sapiens
ccaagaagacgtcaccgaggatccag

SEQ ID NO: 45994 - DNA, 26 bp, Homo sapiens
caagaagacgtcaccgaggatccaga

SEQ ID NO: 45995 - DNA, 26 bp, Homo sapiens
aagaagacgtcaccgaggatccagaa

SEQ ID NO: 45996 - DNA, 26 bp, Homo sapiens
agaagacgtcaccgaggatccagaag

SEQ ID NO: 45997 - DNA, 26 bp, Homo sapiens
gaagacgtcaccgaggatccagaagg

SEQ ID NO: 45998 - DNA, 26 bp, Homo sapiens
aagacgtcaccgaggatccagaaggg

SEQ ID NO: 45999 - DNA, 26 bp, Homo sapiens
agacgtcaccgaggatccagaagggc

SEQ ID NO: 46000 - DNA, 26 bp, Homo sapiens
gacgtcaccgaggatccagaagggcc

SEQ ID NO: 46001 - DNA, 26 bp, Homo sapiens
acgtcaccgaggatccagaagggccc

SEQ ID NO: 46002 - DNA, 26 bp, Homo sapiens
cgtcaccgaggatccagaagggccct

SEQ ID NO: 46003 - DNA, 26 bp, Homo sapiens
gtcaccgaggatccagaagggccctg

SEQ ID NO: 46004 - DNA, 26 bp, Homo sapiens
tcaccgaggatccagaagggccctgc

SEQ ID NO: 46005 - DNA, 26 bp, Homo sapiens
caccgaggatccagaagggccctgca

SEQ ID NO: 46006 - DNA, 26 bp, Homo sapiens
accgaggatccagaagggccctgcag

SEQ ID NO: 46007 - DNA, 26 bp, Homo sapiens
ccgaggatccagaagggccctgcagg

SEQ ID NO: 46008 - DNA, 26 bp, Homo sapiens
cgaggatccagaagggccctgcaggc

SEQ ID NO: 46009 - DNA, 26 bp, Homo sapiens
gaggatccagaagggccctgcaggcg

SEQ ID NO: 46010 - DNA, 26 bp, Homo sapiens
aggatccagaagggccctgcaggcgg

SEQ ID NO: 46011 - DNA, 26 bp, Homo sapiens
ggatccagaagggccctgcaggcgga

SEQ ID NO: 46012 - DNA, 26 bp, Homo sapiens
gatccagaagggccctgcaggcggag

SEQ ID NO: 46013 - DNA, 26 bp, Homo sapiens
atccagaagggccctgcaggcggagg

SEQ ID NO: 46014 - DNA, 26 bp, Homo sapiens
tccagaagggccctgcaggcggaggg

SEQ ID NO: 46015 - DNA, 26 bp, Homo sapiens
ccagaagggccctgcaggcggaggga

SEQ ID NO: 46016 - DNA, 26 bp, Homo sapiens
cagaagggccctgcaggcggagggac

SEQ ID NO: 46017 - DNA, 26 bp, Homo sapiens
agaagggccctgcaggcggagggaca

SEQ ID NO: 46018 - DNA, 26 bp, Homo sapiens
gaagggccctgcaggcggagggacat

SEQ ID NO: 46019 - DNA, 26 bp, Homo sapiens
aagggccctgcaggcggagggacatc

SEQ ID NO: 46020 - DNA, 26 bp, Homo sapiens
agggccctgcaggcggagggacatcc

SEQ ID NO: 46021 - DNA, 26 bp, Homo sapiens
gggccctgcaggcggagggacatcca

SEQ ID NO: 46022 - DNA, 26 bp, Homo sapiens
ggccctgcaggcggagggacatccag

SEQ ID NO: 46023 - DNA, 26 bp, Homo sapiens
gccctgcaggcggagggacatccagg

SEQ ID NO: 46024 - DNA, 26 bp, Homo sapiens
ccctgcaggcggagggacatccaggg

SEQ ID NO: 46025 - DNA, 26 bp, Homo sapiens
cctgcaggcggagggacatccagggc

SEQ ID NO: 46026 - DNA, 26 bp, Homo sapiens
ctgcaggcggagggacatccagggcc

SEQ ID NO: 46027 - DNA, 26 bp, Homo sapiens
tgcaggcggagggacatccagggcct

SEQ ID NO: 46028 - DNA, 26 bp, Homo sapiens
gcaggcggagggacatccagggcctg

SEQ ID NO: 46029 - DNA, 26 bp, Homo sapiens
caggcggagggacatccagggcctgg

SEQ ID NO: 46030 - DNA, 26 bp, Homo sapiens
aggcggagggacatccagggcctgga

SEQ ID NO: 46031 - DNA, 26 bp, Homo sapiens
ggcggagggacatccagggcctggaa

SEQ ID NO: 46032 - DNA, 26 bp, Homo sapiens
gcggagggacatccagggcctggaaa

SEQ ID NO: 46033 - DNA, 26 bp, Homo sapiens
cggagggacatccagggcctggaaac

SEQ ID NO: 46034 - DNA, 26 bp, Homo sapiens
ggagggacatccagggcctggaaacc

SEQ ID NO: 46035 - DNA, 26 bp, Homo sapiens
gagggacatccagggcctggaaaccg

SEQ ID NO: 46036 - DNA, 26 bp, Homo sapiens
agggacatccagggcctggaaaccgg

SEQ ID NO: 46037 - DNA, 26 bp, Homo sapiens
gggacatccagggcctggaaaccgga

SEQ ID NO: 46038 - DNA, 26 bp, Homo sapiens
ggacatccagggcctggaaaccggac

SEQ ID NO: 46039 - DNA, 26 bp, Homo sapiens
gacatccagggcctggaaaccggaca

SEQ ID NO: 46040 - DNA, 26 bp, Homo sapiens
acatccagggcctggaaaccggacaa

SEQ ID NO: 46041 - DNA, 26 bp, Homo sapiens
catccagggcctggaaaccggacaag

SEQ ID NO: 46042 - DNA, 26 bp, Homo sapiens
atccagggcctggaaaccggacaagc

SEQ ID NO: 46043 - DNA, 26 bp, Homo sapiens
tccagggcctggaaaccggacaagca

SEQ ID NO: 46044 - DNA, 26 bp, Homo sapiens
ccagggcctggaaaccggacaagcag

SEQ ID NO: 46045 - DNA, 26 bp, Homo sapiens
cagggcctggaaaccggacaagcaga

SEQ ID NO: 46046 - DNA, 26 bp, Homo sapiens
agggcctggaaaccggacaagcagag

SEQ ID NO: 46047 - DNA, 26 bp, Homo sapiens
gggcctggaaaccggacaagcagagg

SEQ ID NO: 46048 - DNA, 26 bp, Homo sapiens
ggcctggaaaccggacaagcagaggc

SEQ ID NO: 46049 - DNA, 26 bp, Homo sapiens
gcctggaaaccggacaagcagaggcg

SEQ ID NO: 46050 - DNA, 26 bp, Homo sapiens
cctggaaaccggacaagcagaggcgg

SEQ ID NO: 46051 - DNA, 26 bp, Homo sapiens
ctggaaaccggacaagcagaggcgga

SEQ ID NO: 46052 - DNA, 26 bp, Homo sapiens
tggaaaccggacaagcagaggcggac

SEQ ID NO: 46053 - DNA, 26 bp, Homo sapiens
ggaaaccggacaagcagaggcggacg

SEQ ID NO: 46054 - DNA, 26 bp, Homo sapiens
gaaaccggacaagcagaggcggacgc

SEQ ID NO: 46055 - DNA, 26 bp, Homo sapiens
aaaccggacaagcagaggcggacgcc

SEQ ID NO: 46056 - DNA, 26 bp, Homo sapiens
aaccggacaagcagaggcggacgcca

SEQ ID NO: 46057 - DNA, 26 bp, Homo sapiens
accggacaagcagaggcggacgccat

SEQ ID NO: 46058 - DNA, 26 bp, Homo sapiens
ccggacaagcagaggcggacgccatt

SEQ ID NO: 46059 - DNA, 26 bp, Homo sapiens
cggacaagcagaggcggacgccattt

SEQ ID NO: 46060 - DNA, 26 bp, Homo sapiens
ggacaagcagaggcggacgccatttc

SEQ ID NO: 46061 - DNA, 26 bp, Homo sapiens
gacaagcagaggcggacgccatttcg

SEQ ID NO: 46062 - DNA, 26 bp, Homo sapiens
acaagcagaggcggacgccatttcga

SEQ ID NO: 46063 - DNA, 26 bp, Homo sapiens
caagcagaggcggacgccatttcgag

SEQ ID NO: 46064 - DNA, 26 bp, Homo sapiens
aagcagaggcggacgccatttcgagt

SEQ ID NO: 46065 - DNA, 26 bp, Homo sapiens
agcagaggcggacgccatttcgagta

SEQ ID NO: 46066 - DNA, 26 bp, Homo sapiens
gcagaggcggacgccatttcgagtag

SEQ ID NO: 46067 - DNA, 26 bp, Homo sapiens
cagaggcggacgccatttcgagtagt

SEQ ID NO: 46068 - DNA, 26 bp, Homo sapiens
agaggcggacgccatttcgagtagtc

SEQ ID NO: 46069 - DNA, 26 bp, Homo sapiens
gaggcggacgccatttcgagtagtct

SEQ ID NO: 46070 - DNA, 26 bp, Homo sapiens
aggcggacgccatttcgagtagtctg

SEQ ID NO: 46071 - DNA, 26 bp, Homo sapiens
ggcggacgccatttcgagtagtctgg

SEQ ID NO: 46072 - DNA, 26 bp, Homo sapiens
gcggacgccatttcgagtagtctgga

SEQ ID NO: 46073 - DNA, 26 bp, Homo sapiens
cggacgccatttcgagtagtctggat

SEQ ID NO: 46074 - DNA, 26 bp, Homo sapiens
ggacgccatttcgagtagtctggatg

SEQ ID NO: 46075 - DNA, 26 bp, Homo sapiens
gacgccatttcgagtagtctggatga

SEQ ID NO: 46076 - DNA, 26 bp, Homo sapiens
acgccatttcgagtagtctggatgac

SEQ ID NO: 46077 - DNA, 26 bp, Homo sapiens
cgccatttcgagtagtctggatgacg

SEQ ID NO: 46078 - DNA, 26 bp, Homo sapiens
gccatttcgagtagtctggatgacgt

SEQ ID NO: 46079 - DNA, 26 bp, Homo sapiens
ccatttcgagtagtctggatgacgta

SEQ ID NO: 46080 - DNA, 26 bp, Homo sapiens
catttcgagtagtctggatgacgtaa

SEQ ID NO: 46081 - DNA, 26 bp, Homo sapiens
atttcgagtagtctggatgacgtaat

SEQ ID NO: 46082 - DNA, 26 bp, Homo sapiens
tttcgagtagtctggatgacgtaatc

SEQ ID NO: 46083 - DNA, 26 bp, Homo sapiens
ttcgagtagtctggatgacgtaatca

SEQ ID NO: 46084 - DNA, 26 bp, Homo sapiens
tcgagtagtctggatgacgtaatcat

SEQ ID NO: 46085 - DNA, 26 bp, Homo sapiens
cgagtagtctggatgacgtaatcatg

SEQ ID NO: 46086 - DNA, 26 bp, Homo sapiens
gagtagtctggatgacgtaatcatgg

SEQ ID NO: 46087 - DNA, 26 bp, Homo sapiens
agtagtctggatgacgtaatcatggg

SEQ ID NO: 46088 - DNA, 26 bp, Homo sapiens
gtagtctggatgacgtaatcatgggc

SEQ ID NO: 46089 - DNA, 26 bp, Homo sapiens
tagtctggatgacgtaatcatgggcc

SEQ ID NO: 46090 - DNA, 26 bp, Homo sapiens
agtctggatgacgtaatcatgggccg

SEQ ID NO: 46091 - DNA, 26 bp, Homo sapiens
gtctggatgacgtaatcatgggccgt

SEQ ID NO: 46092 - DNA, 26 bp, Homo sapiens
tctggatgacgtaatcatgggccgtg

SEQ ID NO: 46093 - DNA, 26 bp, Homo sapiens
ctggatgacgtaatcatgggccgtga

SEQ ID NO: 46094 - DNA, 26 bp, Homo sapiens
tggatgacgtaatcatgggccgtgag

SEQ ID NO: 46095 - DNA, 26 bp, Homo sapiens
ggatgacgtaatcatgggccgtgagg

SEQ ID NO: 46096 - DNA, 26 bp, Homo sapiens
gatgacgtaatcatgggccgtgaggt

SEQ ID NO: 46097 - DNA, 26 bp, Homo sapiens
atgacgtaatcatgggccgtgaggtt

SEQ ID NO: 46098 - DNA, 26 bp, Homo sapiens
tgacgtaatcatgggccgtgaggtta

SEQ ID NO: 46099 - DNA, 26 bp, Homo sapiens
gacgtaatcatgggccgtgaggttaa

SEQ ID NO: 46100 - DNA, 26 bp, Homo sapiens
acgtaatcatgggccgtgaggttaaa

SEQ ID NO: 46101 - DNA, 26 bp, Homo sapiens
cgtaatcatgggccgtgaggttaaac

SEQ ID NO: 46102 - DNA, 26 bp, Homo sapiens
gtaatcatgggccgtgaggttaaacc

SEQ ID NO: 46103 - DNA, 26 bp, Homo sapiens
taatcatgggccgtgaggttaaacca

SEQ ID NO: 46104 - DNA, 26 bp, Homo sapiens
aatcatgggccgtgaggttaaaccag

SEQ ID NO: 46105 - DNA, 26 bp, Homo sapiens
atcatgggccgtgaggttaaaccaga

SEQ ID NO: 46106 - DNA, 26 bp, Homo sapiens
tcatgggccgtgaggttaaaccagac

SEQ ID NO: 46107 - DNA, 26 bp, Homo sapiens
catgggccgtgaggttaaaccagacc

SEQ ID NO: 46108 - DNA, 26 bp, Homo sapiens
atgggccgtgaggttaaaccagaccc

SEQ ID NO: 46109 - DNA, 26 bp, Homo sapiens
tgggccgtgaggttaaaccagacccc

SEQ ID NO: 46110 - DNA, 26 bp, Homo sapiens
gggccgtgaggttaaaccagaccccc

SEQ ID NO: 46111 - DNA, 26 bp, Homo sapiens
ggccgtgaggttaaaccagacccccc

SEQ ID NO: 46112 - DNA, 26 bp, Homo sapiens
gccgtgaggttaaaccagaccccccc

SEQ ID NO: 46113 - DNA, 26 bp, Homo sapiens
ccgtgaggttaaaccagaccccccca

SEQ ID NO: 46114 - DNA, 26 bp, Homo sapiens
cgtgaggttaaaccagacccccccaa

SEQ ID NO: 46115 - DNA, 26 bp, Homo sapiens
gtgaggttaaaccagacccccccaag

SEQ ID NO: 46116 - DNA, 26 bp, Homo sapiens
tgaggttaaaccagacccccccaaga

SEQ ID NO: 46117 - DNA, 26 bp, Homo sapiens
gaggttaaaccagacccccccaagaa

SEQ ID NO: 46118 - DNA, 26 bp, Homo sapiens
aggttaaaccagacccccccaagaag

SEQ ID NO: 46119 - DNA, 26 bp, Homo sapiens
ggttaaaccagacccccccaagaagg

SEQ ID NO: 46120 - DNA, 26 bp, Homo sapiens
gttaaaccagacccccccaagaagga

SEQ ID NO: 46121 - DNA, 26 bp, Homo sapiens
ttaaaccagacccccccaagaaggaa

SEQ ID NO: 46122 - DNA, 26 bp, Homo sapiens
taaaccagacccccccaagaaggaag

SEQ ID NO: 46123 - DNA, 26 bp, Homo sapiens
aaaccagacccccccaagaaggaagg

SEQ ID NO: 46124 - DNA, 26 bp, Homo sapiens
aaccagacccccccaagaaggaagga

SEQ ID NO: 46125 - DNA, 26 bp, Homo sapiens
accagacccccccaagaaggaaggag

SEQ ID NO: 46126 - DNA, 26 bp, Homo sapiens
ccagacccccccaagaaggaaggaga

SEQ ID NO: 46127 - DNA, 26 bp, Homo sapiens
cagacccccccaagaaggaaggagac

SEQ ID NO: 46128 - DNA, 26 bp, Homo sapiens
agacccccccaagaaggaaggagact

SEQ ID NO: 46129 - DNA, 26 bp, Homo sapiens
gacccccccaagaaggaaggagactg

SEQ ID NO: 46130 - DNA, 26 bp, Homo sapiens
acccccccaagaaggaaggagactgc

SEQ ID NO: 46131 - DNA, 26 bp, Homo sapiens
cccccccaagaaggaaggagactgcg

SEQ ID NO: 46132 - DNA, 26 bp, Homo sapiens
ccccccaagaaggaaggagactgcgg

SEQ ID NO: 46133 - DNA, 26 bp, Homo sapiens
cccccaagaaggaaggagactgcggg

SEQ ID NO: 46134 - DNA, 26 bp, Homo sapiens
ccccaagaaggaaggagactgcgggg

SEQ ID NO: 46135 - DNA, 26 bp, Homo sapiens
cccaagaaggaaggagactgcgggga

SEQ ID NO: 46136 - DNA, 26 bp, Homo sapiens
ccaagaaggaaggagactgcggggag

SEQ ID NO: 46137 - DNA, 26 bp, Homo sapiens
caagaaggaaggagactgcggggagc

SEQ ID NO: 46138 - DNA, 26 bp, Homo sapiens
aagaaggaaggagactgcggggagct

SEQ ID NO: 46139 - DNA, 26 bp, Homo sapiens
agaaggaaggagactgcggggagctt

SEQ ID NO: 46140 - DNA, 26 bp, Homo sapiens
gaaggaaggagactgcggggagcttt

SEQ ID NO: 46141 - DNA, 26 bp, Homo sapiens
aaggaaggagactgcggggagctttg

SEQ ID NO: 46142 - DNA, 26 bp, Homo sapiens
aggaaggagactgcggggagctttgg

SEQ ID NO: 46143 - DNA, 26 bp, Homo sapiens
ggaaggagactgcggggagctttggg

SEQ ID NO: 46144 - DNA, 26 bp, Homo sapiens
gaaggagactgcggggagctttggga

SEQ ID NO: 46145 - DNA, 26 bp, Homo sapiens
aaggagactgcggggagctttgggat

SEQ ID NO: 46146 - DNA, 26 bp, Homo sapiens
aggagactgcggggagctttgggatt

SEQ ID NO: 46147 - DNA, 26 bp, Homo sapiens
ggagactgcggggagctttgggattt

SEQ ID NO: 46148 - DNA, 26 bp, Homo sapiens
gagactgcggggagctttgggatttc

SEQ ID NO: 46149 - DNA, 26 bp, Homo sapiens
agactgcggggagctttgggatttcc

SEQ ID NO: 46150 - DNA, 26 bp, Homo sapiens
gactgcggggagctttgggatttccg

SEQ ID NO: 46151 - DNA, 26 bp, Homo sapiens
actgcggggagctttgggatttccga

SEQ ID NO: 46152 - DNA, 26 bp, Homo sapiens
ctgcggggagctttgggatttccgag

SEQ ID NO: 46153 - DNA, 26 bp, Homo sapiens
tgcggggagctttgggatttccgagc

SEQ ID NO: 46154 - DNA, 26 bp, Homo sapiens
gcggggagctttgggatttccgagca

SEQ ID NO: 46155 - DNA, 26 bp, Homo sapiens
cggggagctttgggatttccgagcac

SEQ ID NO: 46156 - DNA, 26 bp, Homo sapiens
ggggagctttgggatttccgagcaca

SEQ ID NO: 46157 - DNA, 26 bp, Homo sapiens
gggagctttgggatttccgagcacag

SEQ ID NO: 46158 - DNA, 26 bp, Homo sapiens
ggagctttgggatttccgagcacagg

SEQ ID NO: 46159 - DNA, 26 bp, Homo sapiens
gagctttgggatttccgagcacagga

SEQ ID NO: 46160 - DNA, 26 bp, Homo sapiens
agctttgggatttccgagcacaggat

SEQ ID NO: 46161 - DNA, 26 bp, Homo sapiens
gctttgggatttccgagcacaggatg

SEQ ID NO: 46162 - DNA, 26 bp, Homo sapiens
ctttgggatttccgagcacaggatga

SEQ ID NO: 46163 - DNA, 26 bp, Homo sapiens
tttgggatttccgagcacaggatgat

SEQ ID NO: 46164 - DNA, 26 bp, Homo sapiens
ttgggatttccgagcacaggatgatg

SEQ ID NO: 46165 - DNA, 26 bp, Homo sapiens
tgggatttccgagcacaggatgatgt

SEQ ID NO: 46166 - DNA, 26 bp, Homo sapiens
gggatttccgagcacaggatgatgta

SEQ ID NO: 46167 - DNA, 26 bp, Homo sapiens
ggatttccgagcacaggatgatgtac

SEQ ID NO: 46168 - DNA, 26 bp, Homo sapiens
gatttccgagcacaggatgatgtact

SEQ ID NO: 46169 - DNA, 26 bp, Homo sapiens
atttccgagcacaggatgatgtactc

SEQ ID NO: 46170 - DNA, 26 bp, Homo sapiens
tttccgagcacaggatgatgtactcc

SEQ ID NO: 46171 - DNA, 26 bp, Homo sapiens
ttccgagcacaggatgatgtactccc

SEQ ID NO: 46172 - DNA, 26 bp, Homo sapiens
tccgagcacaggatgatgtactcccc

SEQ ID NO: 46173 - DNA, 26 bp, Homo sapiens
ccgagcacaggatgatgtactcccca

SEQ ID NO: 46174 - DNA, 26 bp, Homo sapiens
cgagcacaggatgatgtactccccag

SEQ ID NO: 46175 - DNA, 26 bp, Homo sapiens
gagcacaggatgatgtactccccagc

SEQ ID NO: 46176 - DNA, 26 bp, Homo sapiens
agcacaggatgatgtactccccagcc

SEQ ID NO: 46177 - DNA, 26 bp, Homo sapiens
gcacaggatgatgtactccccagcca

SEQ ID NO: 46178 - DNA, 26 bp, Homo sapiens
cacaggatgatgtactccccagccag

SEQ ID NO: 46179 - DNA, 26 bp, Homo sapiens
acaggatgatgtactccccagccagc

SEQ ID NO: 46180 - DNA, 26 bp, Homo sapiens
caggatgatgtactccccagccagca

SEQ ID NO: 46181 - DNA, 26 bp, Homo sapiens
aggatgatgtactccccagccagcaa

SEQ ID NO: 46182 - DNA, 26 bp, Homo sapiens
ggatgatgtactccccagccagcaag

SEQ ID NO: 46183 - DNA, 26 bp, Homo sapiens
gatgatgtactccccagccagcaagg

SEQ ID NO: 46184 - DNA, 26 bp, Homo sapiens
atgatgtactccccagccagcaaggg

SEQ ID NO: 46185 - DNA, 26 bp, Homo sapiens
tgatgtactccccagccagcaagggg

SEQ ID NO: 46186 - DNA, 26 bp, Homo sapiens
gatgtactccccagccagcaagggga

SEQ ID NO: 46187 - DNA, 26 bp, Homo sapiens
atgtactccccagccagcaaggggat

SEQ ID NO: 46188 - DNA, 26 bp, Homo sapiens
tgtactccccagccagcaaggggatt

SEQ ID NO: 46189 - DNA, 26 bp, Homo sapiens
gtactccccagccagcaaggggattc

SEQ ID NO: 46190 - DNA, 26 bp, Homo sapiens
tactccccagccagcaaggggattcc

SEQ ID NO: 46191 - DNA, 26 bp, Homo sapiens
actccccagccagcaaggggattccc

SEQ ID NO: 46192 - DNA, 26 bp, Homo sapiens
ctccccagccagcaaggggattcccc

SEQ ID NO: 46193 - DNA, 26 bp, Homo sapiens
tccccagccagcaaggggattccccc

SEQ ID NO: 46194 - DNA, 26 bp, Homo sapiens
ccccagccagcaaggggattccccca

SEQ ID NO: 46195 - DNA, 26 bp, Homo sapiens
cccagccagcaaggggattcccccaa

SEQ ID NO: 46196 - DNA, 26 bp, Homo sapiens
ccagccagcaaggggattcccccaat

SEQ ID NO: 46197 - DNA, 26 bp, Homo sapiens
cagccagcaaggggattcccccaatg

SEQ ID NO: 46198 - DNA, 26 bp, Homo sapiens
agccagcaaggggattcccccaatgg

SEQ ID NO: 46199 - DNA, 26 bp, Homo sapiens
gccagcaaggggattcccccaatggc

SEQ ID NO: 46200 - DNA, 26 bp, Homo sapiens
ccagcaaggggattcccccaatggct

SEQ ID NO: 46201 - DNA, 26 bp, Homo sapiens
cagcaaggggattcccccaatggctg

SEQ ID NO: 46202 - DNA, 26 bp, Homo sapiens
agcaaggggattcccccaatggctgc

SEQ ID NO: 46203 - DNA, 26 bp, Homo sapiens
gcaaggggattcccccaatggctgca

SEQ ID NO: 46204 - DNA, 26 bp, Homo sapiens
caaggggattcccccaatggctgcat

SEQ ID NO: 46205 - DNA, 26 bp, Homo sapiens
aaggggattcccccaatggctgcatg

SEQ ID NO: 46206 - DNA, 26 bp, Homo sapiens
aggggattcccccaatggctgcatgc

SEQ ID NO: 46207 - DNA, 26 bp, Homo sapiens
ggggattcccccaatggctgcatgca

SEQ ID NO: 46208 - DNA, 26 bp, Homo sapiens
gggattcccccaatggctgcatgcag

SEQ ID NO: 46209 - DNA, 26 bp, Homo sapiens
ggattcccccaatggctgcatgcagg

SEQ ID NO: 46210 - DNA, 26 bp, Homo sapiens
gattcccccaatggctgcatgcaggg

SEQ ID NO: 46211 - DNA, 26 bp, Homo sapiens
attcccccaatggctgcatgcagggc

SEQ ID NO: 46212 - DNA, 26 bp, Homo sapiens
ttcccccaatggctgcatgcagggcc

SEQ ID NO: 46213 - DNA, 26 bp, Homo sapiens
tcccccaatggctgcatgcagggccc

SEQ ID NO: 46214 - DNA, 26 bp, Homo sapiens
cccccaatggctgcatgcagggcccg

SEQ ID NO: 46215 - DNA, 26 bp, Homo sapiens
ccccaatggctgcatgcagggcccgg

SEQ ID NO: 46216 - DNA, 26 bp, Homo sapiens
cccaatggctgcatgcagggcccgga

SEQ ID NO: 46217 - DNA, 26 bp, Homo sapiens
ccaatggctgcatgcagggcccggat

SEQ ID NO: 46218 - DNA, 26 bp, Homo sapiens
caatggctgcatgcagggcccggatc

SEQ ID NO: 46219 - DNA, 26 bp, Homo sapiens
aatggctgcatgcagggcccggatct

SEQ ID NO: 46220 - DNA, 26 bp, Homo sapiens
atggctgcatgcagggcccggatctc

SEQ ID NO: 46221 - DNA, 26 bp, Homo sapiens
tggctgcatgcagggcccggatctcc

SEQ ID NO: 46222 - DNA, 26 bp, Homo sapiens
ggctgcatgcagggcccggatctcct

SEQ ID NO: 46223 - DNA, 26 bp, Homo sapiens
gctgcatgcagggcccggatctcctc

SEQ ID NO: 46224 - DNA, 26 bp, Homo sapiens
ctgcatgcagggcccggatctcctca

SEQ ID NO: 46225 - DNA, 26 bp, Homo sapiens
tgcatgcagggcccggatctcctcag

SEQ ID NO: 46226 - DNA, 26 bp, Homo sapiens
gcatgcagggcccggatctcctcagt

SEQ ID NO: 46227 - DNA, 26 bp, Homo sapiens
catgcagggcccggatctcctcagtg

SEQ ID NO: 46228 - DNA, 26 bp, Homo sapiens
atgcagggcccggatctcctcagtgg

SEQ ID NO: 46229 - DNA, 26 bp, Homo sapiens
tgcagggcccggatctcctcagtggg

SEQ ID NO: 46230 - DNA, 26 bp, Homo sapiens
gcagggcccggatctcctcagtgggt

SEQ ID NO: 46231 - DNA, 26 bp, Homo sapiens
cagggcccggatctcctcagtgggtc

SEQ ID NO: 46232 - DNA, 26 bp, Homo sapiens
agggcccggatctcctcagtgggtcc

SEQ ID NO: 46233 - DNA, 26 bp, Homo sapiens
gggcccggatctcctcagtgggtcct

SEQ ID NO: 46234 - DNA, 26 bp, Homo sapiens
ggcccggatctcctcagtgggtcctg

SEQ ID NO: 46235 - DNA, 26 bp, Homo sapiens
gcccggatctcctcagtgggtcctgt

SEQ ID NO: 46236 - DNA, 26 bp, Homo sapiens
cccggatctcctcagtgggtcctgtg

SEQ ID NO: 46237 - DNA, 26 bp, Homo sapiens
ccggatctcctcagtgggtcctgtga

SEQ ID NO: 46238 - DNA, 26 bp, Homo sapiens
cggatctcctcagtgggtcctgtgat

SEQ ID NO: 46239 - DNA, 26 bp, Homo sapiens
ggatctcctcagtgggtcctgtgatg

SEQ ID NO: 46240 - DNA, 26 bp, Homo sapiens
gatctcctcagtgggtcctgtgatga

SEQ ID NO: 46241 - DNA, 26 bp, Homo sapiens
atctcctcagtgggtcctgtgatgag

SEQ ID NO: 46242 - DNA, 26 bp, Homo sapiens
tctcctcagtgggtcctgtgatgagg

SEQ ID NO: 46243 - DNA, 26 bp, Homo sapiens
ctcctcagtgggtcctgtgatgaggg

SEQ ID NO: 46244 - DNA, 26 bp, Homo sapiens
tcctcagtgggtcctgtgatgaggga

SEQ ID NO: 46245 - DNA, 26 bp, Homo sapiens
cctcagtgggtcctgtgatgagggac

SEQ ID NO: 46246 - DNA, 26 bp, Homo sapiens
ctcagtgggtcctgtgatgagggacg

SEQ ID NO: 46247 - DNA, 26 bp, Homo sapiens
tcagtgggtcctgtgatgagggacgt

SEQ ID NO: 46248 - DNA, 26 bp, Homo sapiens
cagtgggtcctgtgatgagggacgtg

SEQ ID NO: 46249 - DNA, 26 bp, Homo sapiens
agtgggtcctgtgatgagggacgtgc

SEQ ID NO: 46250 - DNA, 26 bp, Homo sapiens
gtgggtcctgtgatgagggacgtgcc

SEQ ID NO: 46251 - DNA, 26 bp, Homo sapiens
tgggtcctgtgatgagggacgtgccc

SEQ ID NO: 46252 - DNA, 26 bp, Homo sapiens
gggtcctgtgatgagggacgtgcccg

SEQ ID NO: 46253 - DNA, 26 bp, Homo sapiens
ggtcctgtgatgagggacgtgcccgt

SEQ ID NO: 46254 - DNA, 26 bp, Homo sapiens
gtcctgtgatgagggacgtgcccgta

SEQ ID NO: 46255 - DNA, 26 bp, Homo sapiens
tcctgtgatgagggacgtgcccgtat

SEQ ID NO: 46256 - DNA, 26 bp, Homo sapiens
cctgtgatgagggacgtgcccgtatc

SEQ ID NO: 46257 - DNA, 26 bp, Homo sapiens
ctgtgatgagggacgtgcccgtatcc

SEQ ID NO: 46258 - DNA, 26 bp, Homo sapiens
tgtgatgagggacgtgcccgtatcca

SEQ ID NO: 46259 - DNA, 26 bp, Homo sapiens
gtgatgagggacgtgcccgtatccag

SEQ ID NO: 46260 - DNA, 26 bp, Homo sapiens
tgatgagggacgtgcccgtatccagg

SEQ ID NO: 46261 - DNA, 26 bp, Homo sapiens
gatgagggacgtgcccgtatccagga

SEQ ID NO: 46262 - DNA, 26 bp, Homo sapiens
atgagggacgtgcccgtatccaggat

SEQ ID NO: 46263 - DNA, 26 bp, Homo sapiens
tgagggacgtgcccgtatccaggatg

SEQ ID NO: 46264 - DNA, 26 bp, Homo sapiens
gagggacgtgcccgtatccaggatgg

SEQ ID NO: 46265 - DNA, 26 bp, Homo sapiens
agggacgtgcccgtatccaggatggc

SEQ ID NO: 46266 - DNA, 26 bp, Homo sapiens
gggacgtgcccgtatccaggatggca

SEQ ID NO: 46267 - DNA, 26 bp, Homo sapiens
ggacgtgcccgtatccaggatggcag

SEQ ID NO: 46268 - DNA, 26 bp, Homo sapiens
gacgtgcccgtatccaggatggcagc

SEQ ID NO: 46269 - DNA, 26 bp, Homo sapiens
acgtgcccgtatccaggatggcagca

SEQ ID NO: 46270 - DNA, 26 bp, Homo sapiens
cgtgcccgtatccaggatggcagcac

SEQ ID NO: 46271 - DNA, 26 bp, Homo sapiens
gtgcccgtatccaggatggcagcaca

SEQ ID NO: 46272 - DNA, 26 bp, Homo sapiens
tgcccgtatccaggatggcagcacag

SEQ ID NO: 46273 - DNA, 26 bp, Homo sapiens
gcccgtatccaggatggcagcacagc

SEQ ID NO: 46274 - DNA, 26 bp, Homo sapiens
cccgtatccaggatggcagcacagcc

SEQ ID NO: 46275 - DNA, 26 bp, Homo sapiens
ccgtatccaggatggcagcacagccc

SEQ ID NO: 46276 - DNA, 26 bp, Homo sapiens
cgtatccaggatggcagcacagccct

SEQ ID NO: 46277 - DNA, 26 bp, Homo sapiens
gtatccaggatggcagcacagccctt

SEQ ID NO: 46278 - DNA, 26 bp, Homo sapiens
tatccaggatggcagcacagcccttg

SEQ ID NO: 46279 - DNA, 26 bp, Homo sapiens
atccaggatggcagcacagcccttgg

SEQ ID NO: 46280 - DNA, 26 bp, Homo sapiens
tccaggatggcagcacagcccttggc

SEQ ID NO: 46281 - DNA, 26 bp, Homo sapiens
ccaggatggcagcacagcccttggca

SEQ ID NO: 46282 - DNA, 26 bp, Homo sapiens
caggatggcagcacagcccttggcac

SEQ ID NO: 46283 - DNA, 26 bp, Homo sapiens
aggatggcagcacagcccttggcaca

SEQ ID NO: 46284 - DNA, 26 bp, Homo sapiens
ggatggcagcacagcccttggcacag

SEQ ID NO: 46285 - DNA, 26 bp, Homo sapiens
gatggcagcacagcccttggcacaga

SEQ ID NO: 46286 - DNA, 26 bp, Homo sapiens
atggcagcacagcccttggcacagag

SEQ ID NO: 46287 - DNA, 26 bp, Homo sapiens
tggcagcacagcccttggcacagaga

SEQ ID NO: 46288 - DNA, 26 bp, Homo sapiens
ggcagcacagcccttggcacagagag

SEQ ID NO: 46289 - DNA, 26 bp, Homo sapiens
gcagcacagcccttggcacagagagt

SEQ ID NO: 46290 - DNA, 26 bp, Homo sapiens
cagcacagcccttggcacagagagtc

SEQ ID NO: 46291 - DNA, 26 bp, Homo sapiens
agcacagcccttggcacagagagtca

SEQ ID NO: 46292 - DNA, 26 bp, Homo sapiens
gcacagcccttggcacagagagtcag

SEQ ID NO: 46293 - DNA, 26 bp, Homo sapiens
cacagcccttggcacagagagtcagc

SEQ ID NO: 46294 - DNA, 26 bp, Homo sapiens
acagcccttggcacagagagtcagcc

SEQ ID NO: 46295 - DNA, 26 bp, Homo sapiens
cagcccttggcacagagagtcagccc

SEQ ID NO: 46296 - DNA, 26 bp, Homo sapiens
agcccttggcacagagagtcagccct

SEQ ID NO: 46297 - DNA, 26 bp, Homo sapiens
gcccttggcacagagagtcagccctg

SEQ ID NO: 46298 - DNA, 26 bp, Homo sapiens
cccttggcacagagagtcagccctgg

SEQ ID NO: 46299 - DNA, 26 bp, Homo sapiens
ccttggcacagagagtcagccctggg

SEQ ID NO: 46300 - DNA, 26 bp, Homo sapiens
cttggcacagagagtcagccctgggc

SEQ ID NO: 46301 - DNA, 26 bp, Homo sapiens
ttggcacagagagtcagccctgggcc

SEQ ID NO: 46302 - DNA, 26 bp, Homo sapiens
tggcacagagagtcagccctgggccc

SEQ ID NO: 46303 - DNA, 26 bp, Homo sapiens
ggcacagagagtcagccctgggccca

SEQ ID NO: 46304 - DNA, 26 bp, Homo sapiens
gcacagagagtcagccctgggcccac

SEQ ID NO: 46305 - DNA, 26 bp, Homo sapiens
cacagagagtcagccctgggcccacc

SEQ ID NO: 46306 - DNA, 26 bp, Homo sapiens
acagagagtcagccctgggcccacct

SEQ ID NO: 46307 - DNA, 26 bp, Homo sapiens
cagagagtcagccctgggcccacctt

SEQ ID NO: 46308 - DNA, 26 bp, Homo sapiens
agagagtcagccctgggcccaccttc

SEQ ID NO: 46309 - DNA, 26 bp, Homo sapiens
gagagtcagccctgggcccaccttca

SEQ ID NO: 46310 - DNA, 26 bp, Homo sapiens
agagtcagccctgggcccaccttcac

SEQ ID NO: 46311 - DNA, 26 bp, Homo sapiens
gagtcagccctgggcccaccttcaca

SEQ ID NO: 46312 - DNA, 26 bp, Homo sapiens
agtcagccctgggcccaccttcacac

SEQ ID NO: 46313 - DNA, 26 bp, Homo sapiens
gtcagccctgggcccaccttcacacg

SEQ ID NO: 46314 - DNA, 26 bp, Homo sapiens
tcagccctgggcccaccttcacacgc

SEQ ID NO: 46315 - DNA, 26 bp, Homo sapiens
cagccctgggcccaccttcacacgct

SEQ ID NO: 46316 - DNA, 26 bp, Homo sapiens
agccctgggcccaccttcacacgctc

SEQ ID NO: 46317 - DNA, 26 bp, Homo sapiens
gccctgggcccaccttcacacgctcc

SEQ ID NO: 46318 - DNA, 26 bp, Homo sapiens
ccctgggcccaccttcacacgctcca

SEQ ID NO: 46319 - DNA, 26 bp, Homo sapiens
cctgggcccaccttcacacgctccat

SEQ ID NO: 46320 - DNA, 26 bp, Homo sapiens
ctgggcccaccttcacacgctccatg

SEQ ID NO: 46321 - DNA, 26 bp, Homo sapiens
tgggcccaccttcacacgctccatgt

SEQ ID NO: 46322 - DNA, 26 bp, Homo sapiens
gggcccaccttcacacgctccatgtg

SEQ ID NO: 46323 - DNA, 26 bp, Homo sapiens
ggcccaccttcacacgctccatgtgg

SEQ ID NO: 46324 - DNA, 26 bp, Homo sapiens
gcccaccttcacacgctccatgtgga

SEQ ID NO: 46325 - DNA, 26 bp, Homo sapiens
cccaccttcacacgctccatgtggat

SEQ ID NO: 46326 - DNA, 26 bp, Homo sapiens
ccaccttcacacgctccatgtggatc

SEQ ID NO: 46327 - DNA, 26 bp, Homo sapiens
caccttcacacgctccatgtggatct

SEQ ID NO: 46328 - DNA, 26 bp, Homo sapiens
accttcacacgctccatgtggatctg

SEQ ID NO: 46329 - DNA, 26 bp, Homo sapiens
ccttcacacgctccatgtggatctgc

SEQ ID NO: 46330 - DNA, 26 bp, Homo sapiens
cttcacacgctccatgtggatctgcc

SEQ ID NO: 46331 - DNA, 26 bp, Homo sapiens
ttcacacgctccatgtggatctgcca

SEQ ID NO: 46332 - DNA, 26 bp, Homo sapiens
tcacacgctccatgtggatctgccag

SEQ ID NO: 46333 - DNA, 26 bp, Homo sapiens
cacacgctccatgtggatctgccagt

SEQ ID NO: 46334 - DNA, 26 bp, Homo sapiens
acacgctccatgtggatctgccagta

SEQ ID NO: 46335 - DNA, 26 bp, Homo sapiens
cacgctccatgtggatctgccagtag

SEQ ID NO: 46336 - DNA, 26 bp, Homo sapiens
acgctccatgtggatctgccagtagg

SEQ ID NO: 46337 - DNA, 26 bp, Homo sapiens
cgctccatgtggatctgccagtaggc

SEQ ID NO: 46338 - DNA, 26 bp, Homo sapiens
gctccatgtggatctgccagtaggca

SEQ ID NO: 46339 - DNA, 26 bp, Homo sapiens
ctccatgtggatctgccagtaggcag

SEQ ID NO: 46340 - DNA, 26 bp, Homo sapiens
tccatgtggatctgccagtaggcagg

SEQ ID NO: 46341 - DNA, 26 bp, Homo sapiens
ccatgtggatctgccagtaggcaggg

SEQ ID NO: 46342 - DNA, 26 bp, Homo sapiens
catgtggatctgccagtaggcaggga

SEQ ID NO: 46343 - DNA, 26 bp, Homo sapiens
atgtggatctgccagtaggcagggac

SEQ ID NO: 46344 - DNA, 26 bp, Homo sapiens
tgtggatctgccagtaggcagggacc

SEQ ID NO: 46345 - DNA, 26 bp, Homo sapiens
gtggatctgccagtaggcagggaccg

SEQ ID NO: 46346 - DNA, 26 bp, Homo sapiens
tggatctgccagtaggcagggaccgt

SEQ ID NO: 46347 - DNA, 26 bp, Homo sapiens
ggatctgccagtaggcagggaccgtg

SEQ ID NO: 46348 - DNA, 26 bp, Homo sapiens
gatctgccagtaggcagggaccgtga

SEQ ID NO: 46349 - DNA, 26 bp, Homo sapiens
atctgccagtaggcagggaccgtgac

SEQ ID NO: 46350 - DNA, 26 bp, Homo sapiens
tctgccagtaggcagggaccgtgact

SEQ ID NO: 46351 - DNA, 26 bp, Homo sapiens
ctgccagtaggcagggaccgtgactg

SEQ ID NO: 46352 - DNA, 26 bp, Homo sapiens
tgccagtaggcagggaccgtgactgg

SEQ ID NO: 46353 - DNA, 26 bp, Homo sapiens
gccagtaggcagggaccgtgactggc

SEQ ID NO: 46354 - DNA, 26 bp, Homo sapiens
ccagtaggcagggaccgtgactggca

SEQ ID NO: 46355 - DNA, 26 bp, Homo sapiens
cagtaggcagggaccgtgactggcac

SEQ ID NO: 46356 - DNA, 26 bp, Homo sapiens
agtaggcagggaccgtgactggcacg

SEQ ID NO: 46357 - DNA, 26 bp, Homo sapiens
gtaggcagggaccgtgactggcacga

SEQ ID NO: 46358 - DNA, 26 bp, Homo sapiens
taggcagggaccgtgactggcacgaa

SEQ ID NO: 46359 - DNA, 26 bp, Homo sapiens
aggcagggaccgtgactggcacgaag

SEQ ID NO: 46360 - DNA, 26 bp, Homo sapiens
ggcagggaccgtgactggcacgaagg

SEQ ID NO: 46361 - DNA, 26 bp, Homo sapiens
gcagggaccgtgactggcacgaaggt

SEQ ID NO: 46362 - DNA, 26 bp, Homo sapiens
cagggaccgtgactggcacgaaggtg

SEQ ID NO: 46363 - DNA, 26 bp, Homo sapiens
agggaccgtgactggcacgaaggtga

SEQ ID NO: 46364 - DNA, 26 bp, Homo sapiens
gggaccgtgactggcacgaaggtgag

SEQ ID NO: 46365 - DNA, 26 bp, Homo sapiens
ggaccgtgactggcacgaaggtgagg

SEQ ID NO: 46366 - DNA, 26 bp, Homo sapiens
gaccgtgactggcacgaaggtgaggg

SEQ ID NO: 46367 - DNA, 26 bp, Homo sapiens
accgtgactggcacgaaggtgagggg

SEQ ID NO: 46368 - DNA, 26 bp, Homo sapiens
ccgtgactggcacgaaggtgaggggt

SEQ ID NO: 46369 - DNA, 26 bp, Homo sapiens
cgtgactggcacgaaggtgaggggtg

SEQ ID NO: 46370 - DNA, 26 bp, Homo sapiens
gtgactggcacgaaggtgaggggtgg

SEQ ID NO: 46371 - DNA, 26 bp, Homo sapiens
tgactggcacgaaggtgaggggtggg

SEQ ID NO: 46372 - DNA, 26 bp, Homo sapiens
gactggcacgaaggtgaggggtggga

SEQ ID NO: 46373 - DNA, 26 bp, Homo sapiens
actggcacgaaggtgaggggtgggat

SEQ ID NO: 46374 - DNA, 26 bp, Homo sapiens
ctggcacgaaggtgaggggtgggatg

SEQ ID NO: 46375 - DNA, 26 bp, Homo sapiens
tggcacgaaggtgaggggtgggatgt

SEQ ID NO: 46376 - DNA, 26 bp, Homo sapiens
ggcacgaaggtgaggggtgggatgta

SEQ ID NO: 46377 - DNA, 26 bp, Homo sapiens
gcacgaaggtgaggggtgggatgtag

SEQ ID NO: 46378 - DNA, 26 bp, Homo sapiens
cacgaaggtgaggggtgggatgtagt

SEQ ID NO: 46379 - DNA, 26 bp, Homo sapiens
acgaaggtgaggggtgggatgtagtg

SEQ ID NO: 46380 - DNA, 26 bp, Homo sapiens
cgaaggtgaggggtgggatgtagtgt

SEQ ID NO: 46381 - DNA, 26 bp, Homo sapiens
gaaggtgaggggtgggatgtagtgtg

SEQ ID NO: 46382 - DNA, 26 bp, Homo sapiens
aaggtgaggggtgggatgtagtgtgc

SEQ ID NO: 46383 - DNA, 26 bp, Homo sapiens
aggtgaggggtgggatgtagtgtgcc

SEQ ID NO: 46384 - DNA, 26 bp, Homo sapiens
ggtgaggggtgggatgtagtgtgccg

SEQ ID NO: 46385 - DNA, 26 bp, Homo sapiens
gtgaggggtgggatgtagtgtgccgg

SEQ ID NO: 46386 - DNA, 26 bp, Homo sapiens
tgaggggtgggatgtagtgtgccggg

SEQ ID NO: 46387 - DNA, 26 bp, Homo sapiens
gaggggtgggatgtagtgtgccgggt

SEQ ID NO: 46388 - DNA, 26 bp, Homo sapiens
aggggtgggatgtagtgtgccgggtc

SEQ ID NO: 46389 - DNA, 26 bp, Homo sapiens
ggggtgggatgtagtgtgccgggtcc

SEQ ID NO: 46390 - DNA, 26 bp, Homo sapiens
gggtgggatgtagtgtgccgggtccg

SEQ ID NO: 46391 - DNA, 26 bp, Homo sapiens
ggtgggatgtagtgtgccgggtccga

SEQ ID NO: 46392 - DNA, 26 bp, Homo sapiens
gtgggatgtagtgtgccgggtccgag

SEQ ID NO: 46393 - DNA, 26 bp, Homo sapiens
tgggatgtagtgtgccgggtccgagc

SEQ ID NO: 46394 - DNA, 26 bp, Homo sapiens
gggatgtagtgtgccgggtccgagcc

SEQ ID NO: 46395 - DNA, 26 bp, Homo sapiens
ggatgtagtgtgccgggtccgagccc

SEQ ID NO: 46396 - DNA, 26 bp, Homo sapiens
gatgtagtgtgccgggtccgagcccc

SEQ ID NO: 46397 - DNA, 26 bp, Homo sapiens
atgtagtgtgccgggtccgagccccc

SEQ ID NO: 46398 - DNA, 26 bp, Homo sapiens
tgtagtgtgccgggtccgagcccccc

SEQ ID NO: 46399 - DNA, 26 bp, Homo sapiens
gtagtgtgccgggtccgagcccccca

SEQ ID NO: 46400 - DNA, 26 bp, Homo sapiens
tagtgtgccgggtccgagccccccag

SEQ ID NO: 46401 - DNA, 26 bp, Homo sapiens
agtgtgccgggtccgagccccccagg

SEQ ID NO: 46402 - DNA, 26 bp, Homo sapiens
gtgtgccgggtccgagccccccagga

SEQ ID NO: 46403 - DNA, 26 bp, Homo sapiens
tgtgccgggtccgagccccccaggac

SEQ ID NO: 46404 - DNA, 26 bp, Homo sapiens
gtgccgggtccgagccccccaggacc

SEQ ID NO: 46405 - DNA, 26 bp, Homo sapiens
tgccgggtccgagccccccaggacca

SEQ ID NO: 46406 - DNA, 26 bp, Homo sapiens
gccgggtccgagccccccaggaccag

SEQ ID NO: 46407 - DNA, 26 bp, Homo sapiens
ccgggtccgagccccccaggaccagc

SEQ ID NO: 46408 - DNA, 26 bp, Homo sapiens
cgggtccgagccccccaggaccagct

SEQ ID NO: 46409 - DNA, 26 bp, Homo sapiens
gggtccgagccccccaggaccagctc

SEQ ID NO: 46410 - DNA, 26 bp, Homo sapiens
ggtccgagccccccaggaccagctct

SEQ ID NO: 46411 - DNA, 26 bp, Homo sapiens
gtccgagccccccaggaccagctctc

SEQ ID NO: 46412 - DNA, 26 bp, Homo sapiens
tccgagccccccaggaccagctctcc

SEQ ID NO: 46413 - DNA, 26 bp, Homo sapiens
ccgagccccccaggaccagctctcct

SEQ ID NO: 46414 - DNA, 26 bp, Homo sapiens
cgagccccccaggaccagctctcctc

SEQ ID NO: 46415 - DNA, 26 bp, Homo sapiens
gagccccccaggaccagctctcctcc

SEQ ID NO: 46416 - DNA, 26 bp, Homo sapiens
agccccccaggaccagctctcctcca

SEQ ID NO: 46417 - DNA, 26 bp, Homo sapiens
gccccccaggaccagctctcctccat

SEQ ID NO: 46418 - DNA, 26 bp, Homo sapiens
ccccccaggaccagctctcctccatc

SEQ ID NO: 46419 - DNA, 26 bp, Homo sapiens
cccccaggaccagctctcctccatca

SEQ ID NO: 46420 - DNA, 26 bp, Homo sapiens
ccccaggaccagctctcctccatcag

SEQ ID NO: 46421 - DNA, 26 bp, Homo sapiens
cccaggaccagctctcctccatcagg

SEQ ID NO: 46422 - DNA, 26 bp, Homo sapiens
ccaggaccagctctcctccatcaggc

SEQ ID NO: 46423 - DNA, 26 bp, Homo sapiens
caggaccagctctcctccatcaggct

SEQ ID NO: 46424 - DNA, 26 bp, Homo sapiens
aggaccagctctcctccatcaggctc

SEQ ID NO: 46425 - DNA, 26 bp, Homo sapiens
ggaccagctctcctccatcaggctct

SEQ ID NO: 46426 - DNA, 26 bp, Homo sapiens
gaccagctctcctccatcaggctctt

SEQ ID NO: 46427 - DNA, 26 bp, Homo sapiens
accagctctcctccatcaggctcttc

SEQ ID NO: 46428 - DNA, 26 bp, Homo sapiens
ccagctctcctccatcaggctcttca

SEQ ID NO: 46429 - DNA, 26 bp, Homo sapiens
cagctctcctccatcaggctcttcag

SEQ ID NO: 46430 - DNA, 26 bp, Homo sapiens
agctctcctccatcaggctcttcagg

SEQ ID NO: 46431 - DNA, 26 bp, Homo sapiens
gctctcctccatcaggctcttcaggg

SEQ ID NO: 46432 - DNA, 26 bp, Homo sapiens
ctctcctccatcaggctcttcagggt

SEQ ID NO: 46433 - DNA, 26 bp, Homo sapiens
tctcctccatcaggctcttcagggtc

SEQ ID NO: 46434 - DNA, 26 bp, Homo sapiens
ctcctccatcaggctcttcagggtcc

SEQ ID NO: 46435 - DNA, 26 bp, Homo sapiens
tcctccatcaggctcttcagggtccc

SEQ ID NO: 46436 - DNA, 26 bp, Homo sapiens
cctccatcaggctcttcagggtccct

SEQ ID NO: 46437 - DNA, 26 bp, Homo sapiens
ctccatcaggctcttcagggtccctg

SEQ ID NO: 46438 - DNA, 26 bp, Homo sapiens
tccatcaggctcttcagggtccctgt

SEQ ID NO: 46439 - DNA, 26 bp, Homo sapiens
ccatcaggctcttcagggtccctgtt

SEQ ID NO: 46440 - DNA, 26 bp, Homo sapiens
catcaggctcttcagggtccctgttg

SEQ ID NO: 46441 - DNA, 26 bp, Homo sapiens
atcaggctcttcagggtccctgttga

SEQ ID NO: 46442 - DNA, 26 bp, Homo sapiens
tcaggctcttcagggtccctgttgag

SEQ ID NO: 46443 - DNA, 26 bp, Homo sapiens
caggctcttcagggtccctgttgagg

SEQ ID NO: 46444 - DNA, 26 bp, Homo sapiens
aggctcttcagggtccctgttgaggt

SEQ ID NO: 46445 - DNA, 26 bp, Homo sapiens
ggctcttcagggtccctgttgaggta

SEQ ID NO: 46446 - DNA, 26 bp, Homo sapiens
gctcttcagggtccctgttgaggtaa

SEQ ID NO: 46447 - DNA, 26 bp, Homo sapiens
ctcttcagggtccctgttgaggtaaa

SEQ ID NO: 46448 - DNA, 26 bp, Homo sapiens
tcttcagggtccctgttgaggtaaaa

SEQ ID NO: 46449 - DNA, 26 bp, Homo sapiens
cttcagggtccctgttgaggtaaaag

SEQ ID NO: 46450 - DNA, 26 bp, Homo sapiens
ttcagggtccctgttgaggtaaaagg

SEQ ID NO: 46451 - DNA, 26 bp, Homo sapiens
tcagggtccctgttgaggtaaaagga

SEQ ID NO: 46452 - DNA, 26 bp, Homo sapiens
cagggtccctgttgaggtaaaaggag

SEQ ID NO: 46453 - DNA, 26 bp, Homo sapiens
agggtccctgttgaggtaaaaggaga

SEQ ID NO: 46454 - DNA, 26 bp, Homo sapiens
gggtccctgttgaggtaaaaggagaa

SEQ ID NO: 46455 - DNA, 26 bp, Homo sapiens
ggtccctgttgaggtaaaaggagaag

SEQ ID NO: 46456 - DNA, 26 bp, Homo sapiens
gtccctgttgaggtaaaaggagaaga

SEQ ID NO: 46457 - DNA, 26 bp, Homo sapiens
tccctgttgaggtaaaaggagaagac

SEQ ID NO: 46458 - DNA, 26 bp, Homo sapiens
ccctgttgaggtaaaaggagaagaca

SEQ ID NO: 46459 - DNA, 26 bp, Homo sapiens
cctgttgaggtaaaaggagaagacag

SEQ ID NO: 46460 - DNA, 26 bp, Homo sapiens
ctgttgaggtaaaaggagaagacagg

SEQ ID NO: 46461 - DNA, 26 bp, Homo sapiens
tgttgaggtaaaaggagaagacaggc

SEQ ID NO: 46462 - DNA, 26 bp, Homo sapiens
gttgaggtaaaaggagaagacaggct

SEQ ID NO: 46463 - DNA, 26 bp, Homo sapiens
ttgaggtaaaaggagaagacaggctt

SEQ ID NO: 46464 - DNA, 26 bp, Homo sapiens
tgaggtaaaaggagaagacaggctta

SEQ ID NO: 46465 - DNA, 26 bp, Homo sapiens
gaggtaaaaggagaagacaggcttat

SEQ ID NO: 46466 - DNA, 26 bp, Homo sapiens
aggtaaaaggagaagacaggcttatc

SEQ ID NO: 46467 - DNA, 26 bp, Homo sapiens
ggtaaaaggagaagacaggcttatcc

SEQ ID NO: 46468 - DNA, 26 bp, Homo sapiens
gtaaaaggagaagacaggcttatcca

SEQ ID NO: 46469 - DNA, 26 bp, Homo sapiens
taaaaggagaagacaggcttatccaa

SEQ ID NO: 46470 - DNA, 26 bp, Homo sapiens
aaaaggagaagacaggcttatccaat

SEQ ID NO: 46471 - DNA, 26 bp, Homo sapiens
aaaggagaagacaggcttatccaata

SEQ ID NO: 46472 - DNA, 26 bp, Homo sapiens
aaggagaagacaggcttatccaatag

SEQ ID NO: 46473 - DNA, 26 bp, Homo sapiens
aggagaagacaggcttatccaatagc

SEQ ID NO: 46474 - DNA, 26 bp, Homo sapiens
ggagaagacaggcttatccaatagcc

SEQ ID NO: 46475 - DNA, 26 bp, Homo sapiens
gagaagacaggcttatccaatagccc

SEQ ID NO: 46476 - DNA, 26 bp, Homo sapiens
agaagacaggcttatccaatagcccc

SEQ ID NO: 46477 - DNA, 26 bp, Homo sapiens
gaagacaggcttatccaatagcccct

SEQ ID NO: 46478 - DNA, 26 bp, Homo sapiens
aagacaggcttatccaatagcccctg

SEQ ID NO: 46479 - DNA, 26 bp, Homo sapiens
agacaggcttatccaatagcccctgc

SEQ ID NO: 46480 - DNA, 26 bp, Homo sapiens
gacaggcttatccaatagcccctgct

SEQ ID NO: 46481 - DNA, 26 bp, Homo sapiens
acaggcttatccaatagcccctgctc

SEQ ID NO: 46482 - DNA, 26 bp, Homo sapiens
caggcttatccaatagcccctgctcc

SEQ ID NO: 46483 - DNA, 26 bp, Homo sapiens
aggcttatccaatagcccctgctcca

SEQ ID NO: 46484 - DNA, 26 bp, Homo sapiens
ggcttatccaatagcccctgctccac

SEQ ID NO: 46485 - DNA, 26 bp, Homo sapiens
gcttatccaatagcccctgctccacc

SEQ ID NO: 46486 - DNA, 26 bp, Homo sapiens
cttatccaatagcccctgctccacca

SEQ ID NO: 46487 - DNA, 26 bp, Homo sapiens
ttatccaatagcccctgctccaccag

SEQ ID NO: 46488 - DNA, 26 bp, Homo sapiens
tatccaatagcccctgctccaccagt

SEQ ID NO: 46489 - DNA, 26 bp, Homo sapiens
atccaatagcccctgctccaccagta

SEQ ID NO: 46490 - DNA, 26 bp, Homo sapiens
tccaatagcccctgctccaccagtac

SEQ ID NO: 46491 - DNA, 26 bp, Homo sapiens
ccaatagcccctgctccaccagtaca

SEQ ID NO: 46492 - DNA, 26 bp, Homo sapiens
caatagcccctgctccaccagtacat

SEQ ID NO: 46493 - DNA, 26 bp, Homo sapiens
aatagcccctgctccaccagtacatc

SEQ ID NO: 46494 - DNA, 26 bp, Homo sapiens
atagcccctgctccaccagtacatcc

SEQ ID NO: 46495 - DNA, 26 bp, Homo sapiens
tagcccctgctccaccagtacatcca

SEQ ID NO: 46496 - DNA, 26 bp, Homo sapiens
agcccctgctccaccagtacatccat

SEQ ID NO: 46497 - DNA, 26 bp, Homo sapiens
gcccctgctccaccagtacatccatc

SEQ ID NO: 46498 - DNA, 26 bp, Homo sapiens
cccctgctccaccagtacatccatcg

SEQ ID NO: 46499 - DNA, 26 bp, Homo sapiens
ccctgctccaccagtacatccatcgg

SEQ ID NO: 46500 - DNA, 26 bp, Homo sapiens
cctgctccaccagtacatccatcggg

SEQ ID NO: 46501 - DNA, 26 bp, Homo sapiens
ctgctccaccagtacatccatcgggg

SEQ ID NO: 46502 - DNA, 26 bp, Homo sapiens
tgctccaccagtacatccatcggggg

SEQ ID NO: 46503 - DNA, 26 bp, Homo sapiens
gctccaccagtacatccatcgggggc

SEQ ID NO: 46504 - DNA, 26 bp, Homo sapiens
ctccaccagtacatccatcgggggcc

SEQ ID NO: 46505 - DNA, 26 bp, Homo sapiens
tccaccagtacatccatcgggggccg

SEQ ID NO: 46506 - DNA, 26 bp, Homo sapiens
ccaccagtacatccatcgggggccga

SEQ ID NO: 46507 - DNA, 26 bp, Homo sapiens
caccagtacatccatcgggggccgaa

SEQ ID NO: 46508 - DNA, 26 bp, Homo sapiens
accagtacatccatcgggggccgaac

SEQ ID NO: 46509 - DNA, 26 bp, Homo sapiens
ccagtacatccatcgggggccgaact

SEQ ID NO: 46510 - DNA, 26 bp, Homo sapiens
cagtacatccatcgggggccgaactc

SEQ ID NO: 46511 - DNA, 26 bp, Homo sapiens
agtacatccatcgggggccgaactcc

SEQ ID NO: 46512 - DNA, 26 bp, Homo sapiens
gtacatccatcgggggccgaactcct

SEQ ID NO: 46513 - DNA, 26 bp, Homo sapiens
tacatccatcgggggccgaactcctt

SEQ ID NO: 46514 - DNA, 26 bp, Homo sapiens
acatccatcgggggccgaactccttc

SEQ ID NO: 46515 - DNA, 26 bp, Homo sapiens
catccatcgggggccgaactccttcc

SEQ ID NO: 46516 - DNA, 26 bp, Homo sapiens
atccatcgggggccgaactccttcca

SEQ ID NO: 46517 - DNA, 26 bp, Homo sapiens
tccatcgggggccgaactccttccac

SEQ ID NO: 46518 - DNA, 26 bp, Homo sapiens
ccatcgggggccgaactccttccaca

SEQ ID NO: 46519 - DNA, 26 bp, Homo sapiens
catcgggggccgaactccttccacag

SEQ ID NO: 46520 - DNA, 26 bp, Homo sapiens
atcgggggccgaactccttccacaga

SEQ ID NO: 46521 - DNA, 26 bp, Homo sapiens
tcgggggccgaactccttccacagac

SEQ ID NO: 46522 - DNA, 26 bp, Homo sapiens
cgggggccgaactccttccacagaca

SEQ ID NO: 46523 - DNA, 26 bp, Homo sapiens
gggggccgaactccttccacagacag

SEQ ID NO: 46524 - DNA, 26 bp, Homo sapiens
ggggccgaactccttccacagacaga

SEQ ID NO: 46525 - DNA, 26 bp, Homo sapiens
gggccgaactccttccacagacagaa

SEQ ID NO: 46526 - DNA, 26 bp, Homo sapiens
ggccgaactccttccacagacagaat

SEQ ID NO: 46527 - DNA, 26 bp, Homo sapiens
gccgaactccttccacagacagaatg

SEQ ID NO: 46528 - DNA, 26 bp, Homo sapiens
ccgaactccttccacagacagaatgg

SEQ ID NO: 46529 - DNA, 26 bp, Homo sapiens
cgaactccttccacagacagaatggg

SEQ ID NO: 46530 - DNA, 26 bp, Homo sapiens
gaactccttccacagacagaatggga

SEQ ID NO: 46531 - DNA, 26 bp, Homo sapiens
aactccttccacagacagaatgggaa

SEQ ID NO: 46532 - DNA, 26 bp, Homo sapiens
actccttccacagacagaatgggaaa

SEQ ID NO: 46533 - DNA, 26 bp, Homo sapiens
ctccttccacagacagaatgggaaaa

SEQ ID NO: 46534 - DNA, 26 bp, Homo sapiens
tccttccacagacagaatgggaaaac

SEQ ID NO: 46535 - DNA, 26 bp, Homo sapiens
ccttccacagacagaatgggaaaacc

SEQ ID NO: 46536 - DNA, 26 bp, Homo sapiens
cttccacagacagaatgggaaaaccg

SEQ ID NO: 46537 - DNA, 26 bp, Homo sapiens
ttccacagacagaatgggaaaaccga

SEQ ID NO: 46538 - DNA, 26 bp, Homo sapiens
tccacagacagaatgggaaaaccgag

SEQ ID NO: 46539 - DNA, 26 bp, Homo sapiens
ccacagacagaatgggaaaaccgagg

SEQ ID NO: 46540 - DNA, 26 bp, Homo sapiens
cacagacagaatgggaaaaccgaggc

SEQ ID NO: 46541 - DNA, 26 bp, Homo sapiens
acagacagaatgggaaaaccgaggcc

SEQ ID NO: 46542 - DNA, 26 bp, Homo sapiens
cagacagaatgggaaaaccgaggccc

SEQ ID NO: 46543 - DNA, 26 bp, Homo sapiens
agacagaatgggaaaaccgaggccca

SEQ ID NO: 46544 - DNA, 26 bp, Homo sapiens
gacagaatgggaaaaccgaggcccaa

SEQ ID NO: 46545 - DNA, 26 bp, Homo sapiens
acagaatgggaaaaccgaggcccaat

SEQ ID NO: 46546 - DNA, 26 bp, Homo sapiens
cagaatgggaaaaccgaggcccaata

SEQ ID NO: 46547 - DNA, 26 bp, Homo sapiens
agaatgggaaaaccgaggcccaatat

SEQ ID NO: 46548 - DNA, 26 bp, Homo sapiens
gaatgggaaaaccgaggcccaatatc

SEQ ID NO: 46549 - DNA, 26 bp, Homo sapiens
aatgggaaaaccgaggcccaatatcc

SEQ ID NO: 46550 - DNA, 26 bp, Homo sapiens
atgggaaaaccgaggcccaatatccc

SEQ ID NO: 46551 - DNA, 26 bp, Homo sapiens
tgggaaaaccgaggcccaatatccca

SEQ ID NO: 46552 - DNA, 26 bp, Homo sapiens
gggaaaaccgaggcccaatatcccat

SEQ ID NO: 46553 - DNA, 26 bp, Homo sapiens
ggaaaaccgaggcccaatatcccatc

SEQ ID NO: 46554 - DNA, 26 bp, Homo sapiens
gaaaaccgaggcccaatatcccatca

SEQ ID NO: 46555 - DNA, 26 bp, Homo sapiens
aaaaccgaggcccaatatcccatcaa

SEQ ID NO: 46556 - DNA, 26 bp, Homo sapiens
aaaccgaggcccaatatcccatcaaa

SEQ ID NO: 46557 - DNA, 26 bp, Homo sapiens
aaccgaggcccaatatcccatcaaaa

SEQ ID NO: 46558 - DNA, 26 bp, Homo sapiens
accgaggcccaatatcccatcaaaat

SEQ ID NO: 46559 - DNA, 26 bp, Homo sapiens
ccgaggcccaatatcccatcaaaatg

SEQ ID NO: 46560 - DNA, 26 bp, Homo sapiens
cgaggcccaatatcccatcaaaatgg

SEQ ID NO: 46561 - DNA, 26 bp, Homo sapiens
gaggcccaatatcccatcaaaatggg

SEQ ID NO: 46562 - DNA, 26 bp, Homo sapiens
aggcccaatatcccatcaaaatgggc

SEQ ID NO: 46563 - DNA, 26 bp, Homo sapiens
ggcccaatatcccatcaaaatgggca

SEQ ID NO: 46564 - DNA, 26 bp, Homo sapiens
gcccaatatcccatcaaaatgggcaa

SEQ ID NO: 46565 - DNA, 26 bp, Homo sapiens
cccaatatcccatcaaaatgggcaaa

SEQ ID NO: 46566 - DNA, 26 bp, Homo sapiens
ccaatatcccatcaaaatgggcaaaa

SEQ ID NO: 46567 - DNA, 26 bp, Homo sapiens
caatatcccatcaaaatgggcaaaag

SEQ ID NO: 46568 - DNA, 26 bp, Homo sapiens
aatatcccatcaaaatgggcaaaagc

SEQ ID NO: 46569 - DNA, 26 bp, Homo sapiens
atatcccatcaaaatgggcaaaagcg

SEQ ID NO: 46570 - DNA, 26 bp, Homo sapiens
tatcccatcaaaatgggcaaaagcga

SEQ ID NO: 46571 - DNA, 26 bp, Homo sapiens
atcccatcaaaatgggcaaaagcgaa

SEQ ID NO: 46572 - DNA, 26 bp, Homo sapiens
tcccatcaaaatgggcaaaagcgaag

SEQ ID NO: 46573 - DNA, 26 bp, Homo sapiens
cccatcaaaatgggcaaaagcgaaga

SEQ ID NO: 46574 - DNA, 26 bp, Homo sapiens
ccatcaaaatgggcaaaagcgaagac

SEQ ID NO: 46575 - DNA, 26 bp, Homo sapiens
catcaaaatgggcaaaagcgaagacc

SEQ ID NO: 46576 - DNA, 26 bp, Homo sapiens
atcaaaatgggcaaaagcgaagacca

SEQ ID NO: 46577 - DNA, 26 bp, Homo sapiens
tcaaaatgggcaaaagcgaagaccag

SEQ ID NO: 46578 - DNA, 26 bp, Homo sapiens
caaaatgggcaaaagcgaagaccagg

SEQ ID NO: 46579 - DNA, 26 bp, Homo sapiens
aaaatgggcaaaagcgaagaccaggc

SEQ ID NO: 46580 - DNA, 26 bp, Homo sapiens
aaatgggcaaaagcgaagaccaggct

SEQ ID NO: 46581 - DNA, 26 bp, Homo sapiens
aatgggcaaaagcgaagaccaggctg

SEQ ID NO: 46582 - DNA, 26 bp, Homo sapiens
atgggcaaaagcgaagaccaggctgg

SEQ ID NO: 46583 - DNA, 26 bp, Homo sapiens
tgggcaaaagcgaagaccaggctggg

SEQ ID NO: 46584 - DNA, 26 bp, Homo sapiens
gggcaaaagcgaagaccaggctgggc

SEQ ID NO: 46585 - DNA, 26 bp, Homo sapiens
ggcaaaagcgaagaccaggctgggct

SEQ ID NO: 46586 - DNA, 26 bp, Homo sapiens
gcaaaagcgaagaccaggctgggctc

SEQ ID NO: 46587 - DNA, 26 bp, Homo sapiens
caaaagcgaagaccaggctgggctcc

SEQ ID NO: 46588 - DNA, 26 bp, Homo sapiens
aaaagcgaagaccaggctgggctccc

SEQ ID NO: 46589 - DNA, 26 bp, Homo sapiens
aaagcgaagaccaggctgggctccca

SEQ ID NO: 46590 - DNA, 26 bp, Homo sapiens
aagcgaagaccaggctgggctcccag

SEQ ID NO: 46591 - DNA, 26 bp, Homo sapiens
agcgaagaccaggctgggctcccaga

SEQ ID NO: 46592 - DNA, 26 bp, Homo sapiens
gcgaagaccaggctgggctcccagag

SEQ ID NO: 46593 - DNA, 26 bp, Homo sapiens
cgaagaccaggctgggctcccagaga

SEQ ID NO: 46594 - DNA, 26 bp, Homo sapiens
gaagaccaggctgggctcccagagag

SEQ ID NO: 46595 - DNA, 26 bp, Homo sapiens
aagaccaggctgggctcccagagagc

SEQ ID NO: 46596 - DNA, 26 bp, Homo sapiens
agaccaggctgggctcccagagagcc

SEQ ID NO: 46597 - DNA, 26 bp, Homo sapiens
gaccaggctgggctcccagagagcct

SEQ ID NO: 46598 - DNA, 26 bp, Homo sapiens
accaggctgggctcccagagagcctc

SEQ ID NO: 46599 - DNA, 26 bp, Homo sapiens
ccaggctgggctcccagagagcctcc

SEQ ID NO: 46600 - DNA, 26 bp, Homo sapiens
caggctgggctcccagagagcctccc

SEQ ID NO: 46601 - DNA, 26 bp, Homo sapiens
aggctgggctcccagagagcctcccc

SEQ ID NO: 46602 - DNA, 26 bp, Homo sapiens
ggctgggctcccagagagcctccccg

SEQ ID NO: 46603 - DNA, 26 bp, Homo sapiens
gctgggctcccagagagcctccccga

SEQ ID NO: 46604 - DNA, 26 bp, Homo sapiens
ctgggctcccagagagcctccccgaa

SEQ ID NO: 46605 - DNA, 26 bp, Homo sapiens
tgggctcccagagagcctccccgaaa

SEQ ID NO: 46606 - DNA, 26 bp, Homo sapiens
gggctcccagagagcctccccgaaaa

SEQ ID NO: 46607 - DNA, 26 bp, Homo sapiens
ggctcccagagagcctccccgaaaat

SEQ ID NO: 46608 - DNA, 26 bp, Homo sapiens
gctcccagagagcctccccgaaaatc

SEQ ID NO: 46609 - DNA, 26 bp, Homo sapiens
ctcccagagagcctccccgaaaatca

SEQ ID NO: 46610 - DNA, 26 bp, Homo sapiens
tcccagagagcctccccgaaaatcac

SEQ ID NO: 46611 - DNA, 26 bp, Homo sapiens
cccagagagcctccccgaaaatcact

SEQ ID NO: 46612 - DNA, 26 bp, Homo sapiens
ccagagagcctccccgaaaatcactg

SEQ ID NO: 46613 - DNA, 26 bp, Homo sapiens
cagagagcctccccgaaaatcactga

SEQ ID NO: 46614 - DNA, 26 bp, Homo sapiens
agagagcctccccgaaaatcactgat

SEQ ID NO: 46615 - DNA, 26 bp, Homo sapiens
gagagcctccccgaaaatcactgatg

SEQ ID NO: 46616 - DNA, 26 bp, Homo sapiens
agagcctccccgaaaatcactgatgc

SEQ ID NO: 46617 - DNA, 26 bp, Homo sapiens
gagcctccccgaaaatcactgatgca

SEQ ID NO: 46618 - DNA, 26 bp, Homo sapiens
agcctccccgaaaatcactgatgcac

SEQ ID NO: 46619 - DNA, 26 bp, Homo sapiens
gcctccccgaaaatcactgatgcacc

SEQ ID NO: 46620 - DNA, 26 bp, Homo sapiens
cctccccgaaaatcactgatgcaccc

SEQ ID NO: 46621 - DNA, 26 bp, Homo sapiens
ctccccgaaaatcactgatgcaccct

SEQ ID NO: 46622 - DNA, 26 bp, Homo sapiens
tccccgaaaatcactgatgcaccctt

SEQ ID NO: 46623 - DNA, 26 bp, Homo sapiens
ccccgaaaatcactgatgcacccttg

SEQ ID NO: 46624 - DNA, 26 bp, Homo sapiens
cccgaaaatcactgatgcacccttga

SEQ ID NO: 46625 - DNA, 26 bp, Homo sapiens
ccgaaaatcactgatgcacccttgat

SEQ ID NO: 46626 - DNA, 26 bp, Homo sapiens
cgaaaatcactgatgcacccttgatt

SEQ ID NO: 46627 - DNA, 26 bp, Homo sapiens
gaaaatcactgatgcacccttgattc

SEQ ID NO: 46628 - DNA, 26 bp, Homo sapiens
aaaatcactgatgcacccttgattcc

SEQ ID NO: 46629 - DNA, 26 bp, Homo sapiens
aaatcactgatgcacccttgattcca

SEQ ID NO: 46630 - DNA, 26 bp, Homo sapiens
aatcactgatgcacccttgattccac

SEQ ID NO: 46631 - DNA, 26 bp, Homo sapiens
atcactgatgcacccttgattccacc

SEQ ID NO: 46632 - DNA, 26 bp, Homo sapiens
tcactgatgcacccttgattccacca

SEQ ID NO: 46633 - DNA, 26 bp, Homo sapiens
cactgatgcacccttgattccaccaa

SEQ ID NO: 46634 - DNA, 26 bp, Homo sapiens
actgatgcacccttgattccaccaat

SEQ ID NO: 46635 - DNA, 26 bp, Homo sapiens
ctgatgcacccttgattccaccaata

SEQ ID NO: 46636 - DNA, 26 bp, Homo sapiens
tgatgcacccttgattccaccaatag

SEQ ID NO: 46637 - DNA, 26 bp, Homo sapiens
gatgcacccttgattccaccaatagt

SEQ ID NO: 46638 - DNA, 26 bp, Homo sapiens
atgcacccttgattccaccaatagtc

SEQ ID NO: 46639 - DNA, 26 bp, Homo sapiens
tgcacccttgattccaccaatagtca

SEQ ID NO: 46640 - DNA, 26 bp, Homo sapiens
gcacccttgattccaccaatagtcag

SEQ ID NO: 46641 - DNA, 26 bp, Homo sapiens
cacccttgattccaccaatagtcagc

SEQ ID NO: 46642 - DNA, 26 bp, Homo sapiens
acccttgattccaccaatagtcagct

SEQ ID NO: 46643 - DNA, 26 bp, Homo sapiens
cccttgattccaccaatagtcagctt

SEQ ID NO: 46644 - DNA, 26 bp, Homo sapiens
ccttgattccaccaatagtcagcttg

SEQ ID NO: 46645 - DNA, 26 bp, Homo sapiens
cttgattccaccaatagtcagcttgt

SEQ ID NO: 46646 - DNA, 26 bp, Homo sapiens
ttgattccaccaatagtcagcttgtc

SEQ ID NO: 46647 - DNA, 26 bp, Homo sapiens
tgattccaccaatagtcagcttgtcc

SEQ ID NO: 46648 - DNA, 26 bp, Homo sapiens
gattccaccaatagtcagcttgtcct

SEQ ID NO: 46649 - DNA, 26 bp, Homo sapiens
attccaccaatagtcagcttgtcctc

SEQ ID NO: 46650 - DNA, 26 bp, Homo sapiens
ttccaccaatagtcagcttgtcctcg

SEQ ID NO: 46651 - DNA, 26 bp, Homo sapiens
tccaccaatagtcagcttgtcctcgc

SEQ ID NO: 46652 - DNA, 26 bp, Homo sapiens
ccaccaatagtcagcttgtcctcgct

SEQ ID NO: 46653 - DNA, 26 bp, Homo sapiens
caccaatagtcagcttgtcctcgctc

SEQ ID NO: 46654 - DNA, 26 bp, Homo sapiens
accaatagtcagcttgtcctcgctca

SEQ ID NO: 46655 - DNA, 26 bp, Homo sapiens
ccaatagtcagcttgtcctcgctcag

SEQ ID NO: 46656 - DNA, 26 bp, Homo sapiens
caatagtcagcttgtcctcgctcagg

SEQ ID NO: 46657 - DNA, 26 bp, Homo sapiens
aatagtcagcttgtcctcgctcagga

SEQ ID NO: 46658 - DNA, 26 bp, Homo sapiens
atagtcagcttgtcctcgctcaggat

SEQ ID NO: 46659 - DNA, 26 bp, Homo sapiens
tagtcagcttgtcctcgctcaggatt

SEQ ID NO: 46660 - DNA, 26 bp, Homo sapiens
agtcagcttgtcctcgctcaggattc

SEQ ID NO: 46661 - DNA, 26 bp, Homo sapiens
gtcagcttgtcctcgctcaggattcc

SEQ ID NO: 46662 - DNA, 26 bp, Homo sapiens
tcagcttgtcctcgctcaggattcca

SEQ ID NO: 46663 - DNA, 26 bp, Homo sapiens
cagcttgtcctcgctcaggattccat

SEQ ID NO: 46664 - DNA, 26 bp, Homo sapiens
agcttgtcctcgctcaggattccatc

SEQ ID NO: 46665 - DNA, 26 bp, Homo sapiens
gcttgtcctcgctcaggattccatct

SEQ ID NO: 46666 - DNA, 26 bp, Homo sapiens
cttgtcctcgctcaggattccatcta

SEQ ID NO: 46667 - DNA, 26 bp, Homo sapiens
ttgtcctcgctcaggattccatctac

SEQ ID NO: 46668 - DNA, 26 bp, Homo sapiens
tgtcctcgctcaggattccatctacc

SEQ ID NO: 46669 - DNA, 26 bp, Homo sapiens
gtcctcgctcaggattccatctaccc

SEQ ID NO: 46670 - DNA, 26 bp, Homo sapiens
tcctcgctcaggattccatctacccg

SEQ ID NO: 46671 - DNA, 26 bp, Homo sapiens
cctcgctcaggattccatctacccgc

SEQ ID NO: 46672 - DNA, 26 bp, Homo sapiens
ctcgctcaggattccatctacccgcc

SEQ ID NO: 46673 - DNA, 26 bp, Homo sapiens
tcgctcaggattccatctacccgccc

SEQ ID NO: 46674 - DNA, 26 bp, Homo sapiens
cgctcaggattccatctacccgccca

SEQ ID NO: 46675 - DNA, 26 bp, Homo sapiens
gctcaggattccatctacccgcccag

SEQ ID NO: 46676 - DNA, 26 bp, Homo sapiens
ctcaggattccatctacccgcccagt

SEQ ID NO: 46677 - DNA, 26 bp, Homo sapiens
tcaggattccatctacccgcccagtt

SEQ ID NO: 46678 - DNA, 26 bp, Homo sapiens
caggattccatctacccgcccagttc

SEQ ID NO: 46679 - DNA, 26 bp, Homo sapiens
aggattccatctacccgcccagttcc

SEQ ID NO: 46680 - DNA, 26 bp, Homo sapiens
ggattccatctacccgcccagttcca

SEQ ID NO: 46681 - DNA, 26 bp, Homo sapiens
gattccatctacccgcccagttccat

SEQ ID NO: 46682 - DNA, 26 bp, Homo sapiens
attccatctacccgcccagttccata

SEQ ID NO: 46683 - DNA, 26 bp, Homo sapiens
ttccatctacccgcccagttccatat

SEQ ID NO: 46684 - DNA, 26 bp, Homo sapiens
tccatctacccgcccagttccatatt

SEQ ID NO: 46685 - DNA, 26 bp, Homo sapiens
ccatctacccgcccagttccatattg

SEQ ID NO: 46686 - DNA, 26 bp, Homo sapiens
catctacccgcccagttccatattga

SEQ ID NO: 46687 - DNA, 26 bp, Homo sapiens
atctacccgcccagttccatattgaa

SEQ ID NO: 46688 - DNA, 26 bp, Homo sapiens
tctacccgcccagttccatattgaat

SEQ ID NO: 46689 - DNA, 26 bp, Homo sapiens
ctacccgcccagttccatattgaatg

SEQ ID NO: 46690 - DNA, 26 bp, Homo sapiens
tacccgcccagttccatattgaatgg

SEQ ID NO: 46691 - DNA, 26 bp, Homo sapiens
acccgcccagttccatattgaatggc

SEQ ID NO: 46692 - DNA, 26 bp, Homo sapiens
cccgcccagttccatattgaatggca

SEQ ID NO: 46693 - DNA, 26 bp, Homo sapiens
ccgcccagttccatattgaatggcaa

SEQ ID NO: 46694 - DNA, 26 bp, Homo sapiens
cgcccagttccatattgaatggcaaa

SEQ ID NO: 46695 - DNA, 26 bp, Homo sapiens
gcccagttccatattgaatggcaaac

SEQ ID NO: 46696 - DNA, 26 bp, Homo sapiens
cccagttccatattgaatggcaaact

SEQ ID NO: 46697 - DNA, 26 bp, Homo sapiens
ccagttccatattgaatggcaaactt

SEQ ID NO: 46698 - DNA, 26 bp, Homo sapiens
cagttccatattgaatggcaaacttg

SEQ ID NO: 46699 - DNA, 26 bp, Homo sapiens
agttccatattgaatggcaaacttgg

SEQ ID NO: 46700 - DNA, 26 bp, Homo sapiens
gttccatattgaatggcaaacttggt

SEQ ID NO: 46701 - DNA, 26 bp, Homo sapiens
ttccatattgaatggcaaacttggtc

SEQ ID NO: 46702 - DNA, 26 bp, Homo sapiens
tccatattgaatggcaaacttggtcc

SEQ ID NO: 46703 - DNA, 26 bp, Homo sapiens
ccatattgaatggcaaacttggtccc

SEQ ID NO: 46704 - DNA, 26 bp, Homo sapiens
catattgaatggcaaacttggtccca

SEQ ID NO: 46705 - DNA, 26 bp, Homo sapiens
atattgaatggcaaacttggtcccat

SEQ ID NO: 46706 - DNA, 26 bp, Homo sapiens
tattgaatggcaaacttggtcccatt

SEQ ID NO: 46707 - DNA, 26 bp, Homo sapiens
attgaatggcaaacttggtcccattg

SEQ ID NO: 46708 - DNA, 26 bp, Homo sapiens
ttgaatggcaaacttggtcccattgg

SEQ ID NO: 46709 - DNA, 26 bp, Homo sapiens
tgaatggcaaacttggtcccattggc

SEQ ID NO: 46710 - DNA, 26 bp, Homo sapiens
gaatggcaaacttggtcccattggcc

SEQ ID NO: 46711 - DNA, 26 bp, Homo sapiens
aatggcaaacttggtcccattggcct

SEQ ID NO: 46712 - DNA, 26 bp, Homo sapiens
atggcaaacttggtcccattggcctg

SEQ ID NO: 46713 - DNA, 26 bp, Homo sapiens
tggcaaacttggtcccattggcctgg

SEQ ID NO: 46714 - DNA, 26 bp, Homo sapiens
ggcaaacttggtcccattggcctgga

SEQ ID NO: 46715 - DNA, 26 bp, Homo sapiens
gcaaacttggtcccattggcctggaa

SEQ ID NO: 46716 - DNA, 26 bp, Homo sapiens
caaacttggtcccattggcctggaag

SEQ ID NO: 46717 - DNA, 26 bp, Homo sapiens
aaacttggtcccattggcctggaagg

SEQ ID NO: 46718 - DNA, 26 bp, Homo sapiens
aacttggtcccattggcctggaagga

SEQ ID NO: 46719 - DNA, 26 bp, Homo sapiens
acttggtcccattggcctggaaggag

SEQ ID NO: 46720 - DNA, 26 bp, Homo sapiens
cttggtcccattggcctggaaggagc

SEQ ID NO: 46721 - DNA, 26 bp, Homo sapiens
ttggtcccattggcctggaaggagct

SEQ ID NO: 46722 - DNA, 26 bp, Homo sapiens
tggtcccattggcctggaaggagcta

SEQ ID NO: 46723 - DNA, 26 bp, Homo sapiens
ggtcccattggcctggaaggagctag

SEQ ID NO: 46724 - DNA, 26 bp, Homo sapiens
gtcccattggcctggaaggagctaga

SEQ ID NO: 46725 - DNA, 26 bp, Homo sapiens
tcccattggcctggaaggagctagag

SEQ ID NO: 46726 - DNA, 26 bp, Homo sapiens
cccattggcctggaaggagctagagg

SEQ ID NO: 46727 - DNA, 26 bp, Homo sapiens
ccattggcctggaaggagctagaggc

SEQ ID NO: 46728 - DNA, 26 bp, Homo sapiens
cattggcctggaaggagctagaggct

SEQ ID NO: 46729 - DNA, 26 bp, Homo sapiens
attggcctggaaggagctagaggctt

SEQ ID NO: 46730 - DNA, 26 bp, Homo sapiens
ttggcctggaaggagctagaggcttt

SEQ ID NO: 46731 - DNA, 26 bp, Homo sapiens
tggcctggaaggagctagaggctttg

SEQ ID NO: 46732 - DNA, 26 bp, Homo sapiens
ggcctggaaggagctagaggctttgg

SEQ ID NO: 46733 - DNA, 26 bp, Homo sapiens
gcctggaaggagctagaggctttggg

SEQ ID NO: 46734 - DNA, 26 bp, Homo sapiens
cctggaaggagctagaggctttggga

SEQ ID NO: 46735 - DNA, 26 bp, Homo sapiens
ctggaaggagctagaggctttgggat

SEQ ID NO: 46736 - DNA, 26 bp, Homo sapiens
tggaaggagctagaggctttgggatc

SEQ ID NO: 46737 - DNA, 26 bp, Homo sapiens
ggaaggagctagaggctttgggatca

SEQ ID NO: 46738 - DNA, 26 bp, Homo sapiens
gaaggagctagaggctttgggatcaa

SEQ ID NO: 46739 - DNA, 26 bp, Homo sapiens
aaggagctagaggctttgggatcaaa

SEQ ID NO: 46740 - DNA, 26 bp, Homo sapiens
aggagctagaggctttgggatcaaat

SEQ ID NO: 46741 - DNA, 26 bp, Homo sapiens
ggagctagaggctttgggatcaaatc

SEQ ID NO: 46742 - DNA, 26 bp, Homo sapiens
gagctagaggctttgggatcaaatcg

SEQ ID NO: 46743 - DNA, 26 bp, Homo sapiens
agctagaggctttgggatcaaatcgg

SEQ ID NO: 46744 - DNA, 26 bp, Homo sapiens
gctagaggctttgggatcaaatcggt

SEQ ID NO: 46745 - DNA, 26 bp, Homo sapiens
ctagaggctttgggatcaaatcggtg

SEQ ID NO: 46746 - DNA, 26 bp, Homo sapiens
tagaggctttgggatcaaatcggtgg

SEQ ID NO: 46747 - DNA, 26 bp, Homo sapiens
agaggctttgggatcaaatcggtggt

SEQ ID NO: 46748 - DNA, 26 bp, Homo sapiens
gaggctttgggatcaaatcggtggtg

SEQ ID NO: 46749 - DNA, 26 bp, Homo sapiens
aggctttgggatcaaatcggtggtgt

SEQ ID NO: 46750 - DNA, 26 bp, Homo sapiens
ggctttgggatcaaatcggtggtgta

SEQ ID NO: 46751 - DNA, 26 bp, Homo sapiens
gctttgggatcaaatcggtggtgtaa

SEQ ID NO: 46752 - DNA, 26 bp, Homo sapiens
ctttgggatcaaatcggtggtgtaac

SEQ ID NO: 46753 - DNA, 26 bp, Homo sapiens
tttgggatcaaatcggtggtgtaacc

SEQ ID NO: 46754 - DNA, 26 bp, Homo sapiens
ttgggatcaaatcggtggtgtaacca

SEQ ID NO: 46755 - DNA, 26 bp, Homo sapiens
tgggatcaaatcggtggtgtaaccag

SEQ ID NO: 46756 - DNA, 26 bp, Homo sapiens
gggatcaaatcggtggtgtaaccagc

SEQ ID NO: 46757 - DNA, 26 bp, Homo sapiens
ggatcaaatcggtggtgtaaccagca

SEQ ID NO: 46758 - DNA, 26 bp, Homo sapiens
gatcaaatcggtggtgtaaccagcag

SEQ ID NO: 46759 - DNA, 26 bp, Homo sapiens
atcaaatcggtggtgtaaccagcagg

SEQ ID NO: 46760 - DNA, 26 bp, Homo sapiens
tcaaatcggtggtgtaaccagcaggg

SEQ ID NO: 46761 - DNA, 26 bp, Homo sapiens
caaatcggtggtgtaaccagcagggc

SEQ ID NO: 46762 - DNA, 26 bp, Homo sapiens
aaatcggtggtgtaaccagcagggca

SEQ ID NO: 46763 - DNA, 26 bp, Homo sapiens
aatcggtggtgtaaccagcagggcac

SEQ ID NO: 46764 - DNA, 26 bp, Homo sapiens
atcggtggtgtaaccagcagggcaca

SEQ ID NO: 46765 - DNA, 26 bp, Homo sapiens
tcggtggtgtaaccagcagggcacac

SEQ ID NO: 46766 - DNA, 26 bp, Homo sapiens
cggtggtgtaaccagcagggcacact

SEQ ID NO: 46767 - DNA, 26 bp, Homo sapiens
ggtggtgtaaccagcagggcacactg

SEQ ID NO: 46768 - DNA, 26 bp, Homo sapiens
gtggtgtaaccagcagggcacactga

SEQ ID NO: 46769 - DNA, 26 bp, Homo sapiens
tggtgtaaccagcagggcacactgaa

SEQ ID NO: 46770 - DNA, 26 bp, Homo sapiens
ggtgtaaccagcagggcacactgaag

SEQ ID NO: 46771 - DNA, 26 bp, Homo sapiens
gtgtaaccagcagggcacactgaaga

SEQ ID NO: 46772 - DNA, 26 bp, Homo sapiens
tgtaaccagcagggcacactgaagaa

SEQ ID NO: 46773 - DNA, 26 bp, Homo sapiens
gtaaccagcagggcacactgaagaag

SEQ ID NO: 46774 - DNA, 26 bp, Homo sapiens
taaccagcagggcacactgaagaagt

SEQ ID NO: 46775 - DNA, 26 bp, Homo sapiens
aaccagcagggcacactgaagaagtg

SEQ ID NO: 46776 - DNA, 26 bp, Homo sapiens
accagcagggcacactgaagaagtgg

SEQ ID NO: 46777 - DNA, 26 bp, Homo sapiens
ccagcagggcacactgaagaagtggc

SEQ ID NO: 46778 - DNA, 26 bp, Homo sapiens
cagcagggcacactgaagaagtggca

SEQ ID NO: 46779 - DNA, 26 bp, Homo sapiens
agcagggcacactgaagaagtggcat

SEQ ID NO: 46780 - DNA, 26 bp, Homo sapiens
gcagggcacactgaagaagtggcatc

SEQ ID NO: 46781 - DNA, 26 bp, Homo sapiens
cagggcacactgaagaagtggcatct

SEQ ID NO: 46782 - DNA, 26 bp, Homo sapiens
agggcacactgaagaagtggcatctc

SEQ ID NO: 46783 - DNA, 26 bp, Homo sapiens
gggcacactgaagaagtggcatctcc

SEQ ID NO: 46784 - DNA, 26 bp, Homo sapiens
ggcacactgaagaagtggcatctcct

SEQ ID NO: 46785 - DNA, 26 bp, Homo sapiens
gcacactgaagaagtggcatctcctg

SEQ ID NO: 46786 - DNA, 26 bp, Homo sapiens
cacactgaagaagtggcatctcctgg

SEQ ID NO: 46787 - DNA, 26 bp, Homo sapiens
acactgaagaagtggcatctcctgga

SEQ ID NO: 46788 - DNA, 26 bp, Homo sapiens
cactgaagaagtggcatctcctggac

SEQ ID NO: 46789 - DNA, 26 bp, Homo sapiens
actgaagaagtggcatctcctggacg

SEQ ID NO: 46790 - DNA, 26 bp, Homo sapiens
ctgaagaagtggcatctcctggacgg

SEQ ID NO: 46791 - DNA, 26 bp, Homo sapiens
tgaagaagtggcatctcctggacggg

SEQ ID NO: 46792 - DNA, 26 bp, Homo sapiens
gaagaagtggcatctcctggacggga

SEQ ID NO: 46793 - DNA, 26 bp, Homo sapiens
aagaagtggcatctcctggacgggac

SEQ ID NO: 46794 - DNA, 26 bp, Homo sapiens
agaagtggcatctcctggacgggacc

SEQ ID NO: 46795 - DNA, 26 bp, Homo sapiens
gaagtggcatctcctggacgggaccc

SEQ ID NO: 46796 - DNA, 26 bp, Homo sapiens
aagtggcatctcctggacgggaccca

SEQ ID NO: 46797 - DNA, 26 bp, Homo sapiens
agtggcatctcctggacgggacccag

SEQ ID NO: 46798 - DNA, 26 bp, Homo sapiens
gtggcatctcctggacgggacccaga

SEQ ID NO: 46799 - DNA, 26 bp, Homo sapiens
tggcatctcctggacgggacccagag

SEQ ID NO: 46800 - DNA, 26 bp, Homo sapiens
ggcatctcctggacgggacccagaga

SEQ ID NO: 46801 - DNA, 26 bp, Homo sapiens
gcatctcctggacgggacccagagat

SEQ ID NO: 46802 - DNA, 26 bp, Homo sapiens
catctcctggacgggacccagagatt

SEQ ID NO: 46803 - DNA, 26 bp, Homo sapiens
atctcctggacgggacccagagattg

SEQ ID NO: 46804 - DNA, 26 bp, Homo sapiens
tctcctggacgggacccagagattgg

SEQ ID NO: 46805 - DNA, 26 bp, Homo sapiens
ctcctggacgggacccagagattgga

SEQ ID NO: 46806 - DNA, 26 bp, Homo sapiens
tcctggacgggacccagagattggag

SEQ ID NO: 46807 - DNA, 26 bp, Homo sapiens
cctggacgggacccagagattggagg

SEQ ID NO: 46808 - DNA, 26 bp, Homo sapiens
ctggacgggacccagagattggagga

SEQ ID NO: 46809 - DNA, 26 bp, Homo sapiens
tggacgggacccagagattggaggag

SEQ ID NO: 46810 - DNA, 26 bp, Homo sapiens
ggacgggacccagagattggaggagc

SEQ ID NO: 46811 - DNA, 26 bp, Homo sapiens
gacgggacccagagattggaggagcc

SEQ ID NO: 46812 - DNA, 26 bp, Homo sapiens
acgggacccagagattggaggagcca

SEQ ID NO: 46813 - DNA, 26 bp, Homo sapiens
cgggacccagagattggaggagccag

SEQ ID NO: 46814 - DNA, 26 bp, Homo sapiens
gggacccagagattggaggagccagt

SEQ ID NO: 46815 - DNA, 26 bp, Homo sapiens
ggacccagagattggaggagccagtg

SEQ ID NO: 46816 - DNA, 26 bp, Homo sapiens
gacccagagattggaggagccagtgt

SEQ ID NO: 46817 - DNA, 26 bp, Homo sapiens
acccagagattggaggagccagtgtc

SEQ ID NO: 46818 - DNA, 26 bp, Homo sapiens
cccagagattggaggagccagtgtca

SEQ ID NO: 46819 - DNA, 26 bp, Homo sapiens
ccagagattggaggagccagtgtcaa

SEQ ID NO: 46820 - DNA, 26 bp, Homo sapiens
cagagattggaggagccagtgtcaaa

SEQ ID NO: 46821 - DNA, 26 bp, Homo sapiens
agagattggaggagccagtgtcaaag

SEQ ID NO: 46822 - DNA, 26 bp, Homo sapiens
gagattggaggagccagtgtcaaagg

SEQ ID NO: 46823 - DNA, 26 bp, Homo sapiens
agattggaggagccagtgtcaaaggc

SEQ ID NO: 46824 - DNA, 26 bp, Homo sapiens
gattggaggagccagtgtcaaaggca

SEQ ID NO: 46825 - DNA, 26 bp, Homo sapiens
attggaggagccagtgtcaaaggcaa

SEQ ID NO: 46826 - DNA, 26 bp, Homo sapiens
ttggaggagccagtgtcaaaggcaac

SEQ ID NO: 46827 - DNA, 26 bp, Homo sapiens
tggaggagccagtgtcaaaggcaaca

SEQ ID NO: 46828 - DNA, 26 bp, Homo sapiens
ggaggagccagtgtcaaaggcaacag

SEQ ID NO: 46829 - DNA, 26 bp, Homo sapiens
gaggagccagtgtcaaaggcaacagt

SEQ ID NO: 46830 - DNA, 26 bp, Homo sapiens
aggagccagtgtcaaaggcaacagtg

SEQ ID NO: 46831 - DNA, 26 bp, Homo sapiens
ggagccagtgtcaaaggcaacagtga

SEQ ID NO: 46832 - DNA, 26 bp, Homo sapiens
gagccagtgtcaaaggcaacagtgaa

SEQ ID NO: 46833 - DNA, 26 bp, Homo sapiens
agccagtgtcaaaggcaacagtgaag

SEQ ID NO: 46834 - DNA, 26 bp, Homo sapiens
gccagtgtcaaaggcaacagtgaagt

SEQ ID NO: 46835 - DNA, 26 bp, Homo sapiens
ccagtgtcaaaggcaacagtgaagtt

SEQ ID NO: 46836 - DNA, 26 bp, Homo sapiens
cagtgtcaaaggcaacagtgaagttt

SEQ ID NO: 46837 - DNA, 26 bp, Homo sapiens
agtgtcaaaggcaacagtgaagtttt

SEQ ID NO: 46838 - DNA, 26 bp, Homo sapiens
gtgtcaaaggcaacagtgaagttttg

SEQ ID NO: 46839 - DNA, 26 bp, Homo sapiens
tgtcaaaggcaacagtgaagttttgt

SEQ ID NO: 46840 - DNA, 26 bp, Homo sapiens
gtcaaaggcaacagtgaagttttgtg

SEQ ID NO: 46841 - DNA, 26 bp, Homo sapiens
tcaaaggcaacagtgaagttttgtgg

SEQ ID NO: 46842 - DNA, 26 bp, Homo sapiens
caaaggcaacagtgaagttttgtgga

SEQ ID NO: 46843 - DNA, 26 bp, Homo sapiens
aaaggcaacagtgaagttttgtggag

SEQ ID NO: 46844 - DNA, 26 bp, Homo sapiens
aaggcaacagtgaagttttgtggagg

SEQ ID NO: 46845 - DNA, 26 bp, Homo sapiens
aggcaacagtgaagttttgtggaggc

SEQ ID NO: 46846 - DNA, 26 bp, Homo sapiens
ggcaacagtgaagttttgtggaggcg

SEQ ID NO: 46847 - DNA, 26 bp, Homo sapiens
gcaacagtgaagttttgtggaggcgt

SEQ ID NO: 46848 - DNA, 26 bp, Homo sapiens
caacagtgaagttttgtggaggcgtt

SEQ ID NO: 46849 - DNA, 26 bp, Homo sapiens
aacagtgaagttttgtggaggcgttc

SEQ ID NO: 46850 - DNA, 26 bp, Homo sapiens
acagtgaagttttgtggaggcgttcc

SEQ ID NO: 46851 - DNA, 26 bp, Homo sapiens
cagtgaagttttgtggaggcgttccc

SEQ ID NO: 46852 - DNA, 26 bp, Homo sapiens
agtgaagttttgtggaggcgttccca

SEQ ID NO: 46853 - DNA, 26 bp, Homo sapiens
gtgaagttttgtggaggcgttcccag

SEQ ID NO: 46854 - DNA, 26 bp, Homo sapiens
tgaagttttgtggaggcgttcccagc

SEQ ID NO: 46855 - DNA, 26 bp, Homo sapiens
gaagttttgtggaggcgttcccagcc

SEQ ID NO: 46856 - DNA, 26 bp, Homo sapiens
aagttttgtggaggcgttcccagccc

SEQ ID NO: 46857 - DNA, 26 bp, Homo sapiens
agttttgtggaggcgttcccagccca

SEQ ID NO: 46858 - DNA, 26 bp, Homo sapiens
gttttgtggaggcgttcccagcccaa

SEQ ID NO: 46859 - DNA, 26 bp, Homo sapiens
ttttgtggaggcgttcccagcccaat

SEQ ID NO: 46860 - DNA, 26 bp, Homo sapiens
tttgtggaggcgttcccagcccaatt

SEQ ID NO: 46861 - DNA, 26 bp, Homo sapiens
ttgtggaggcgttcccagcccaattt

SEQ ID NO: 46862 - DNA, 26 bp, Homo sapiens
tgtggaggcgttcccagcccaatttc

SEQ ID NO: 46863 - DNA, 26 bp, Homo sapiens
gtggaggcgttcccagcccaatttcc

SEQ ID NO: 46864 - DNA, 26 bp, Homo sapiens
tggaggcgttcccagcccaatttccc

SEQ ID NO: 46865 - DNA, 26 bp, Homo sapiens
ggaggcgttcccagcccaatttcccc

SEQ ID NO: 46866 - DNA, 26 bp, Homo sapiens
gaggcgttcccagcccaatttcccca

SEQ ID NO: 46867 - DNA, 26 bp, Homo sapiens
aggcgttcccagcccaatttccccaa

SEQ ID NO: 46868 - DNA, 26 bp, Homo sapiens
ggcgttcccagcccaatttccccaaa

SEQ ID NO: 46869 - DNA, 26 bp, Homo sapiens
gcgttcccagcccaatttccccaaaa

SEQ ID NO: 46870 - DNA, 26 bp, Homo sapiens
cgttcccagcccaatttccccaaaat

SEQ ID NO: 46871 - DNA, 26 bp, Homo sapiens
gttcccagcccaatttccccaaaata

SEQ ID NO: 46872 - DNA, 26 bp, Homo sapiens
ttcccagcccaatttccccaaaatac

SEQ ID NO: 46873 - DNA, 26 bp, Homo sapiens
tcccagcccaatttccccaaaatact

SEQ ID NO: 46874 - DNA, 26 bp, Homo sapiens
cccagcccaatttccccaaaatactg

SEQ ID NO: 46875 - DNA, 26 bp, Homo sapiens
ccagcccaatttccccaaaatactgc

SEQ ID NO: 46876 - DNA, 26 bp, Homo sapiens
cagcccaatttccccaaaatactgca

SEQ ID NO: 46877 - DNA, 26 bp, Homo sapiens
agcccaatttccccaaaatactgcac

SEQ ID NO: 46878 - DNA, 26 bp, Homo sapiens
gcccaatttccccaaaatactgcaca

SEQ ID NO: 46879 - DNA, 26 bp, Homo sapiens
cccaatttccccaaaatactgcacat

SEQ ID NO: 46880 - DNA, 26 bp, Homo sapiens
ccaatttccccaaaatactgcacatc

SEQ ID NO: 46881 - DNA, 26 bp, Homo sapiens
caatttccccaaaatactgcacatcc

SEQ ID NO: 46882 - DNA, 26 bp, Homo sapiens
aatttccccaaaatactgcacatccc

SEQ ID NO: 46883 - DNA, 26 bp, Homo sapiens
atttccccaaaatactgcacatccct

SEQ ID NO: 46884 - DNA, 26 bp, Homo sapiens
tttccccaaaatactgcacatccctg

SEQ ID NO: 46885 - DNA, 26 bp, Homo sapiens
ttccccaaaatactgcacatccctgt

SEQ ID NO: 46886 - DNA, 26 bp, Homo sapiens
tccccaaaatactgcacatccctgta

SEQ ID NO: 46887 - DNA, 26 bp, Homo sapiens
ccccaaaatactgcacatccctgtag

SEQ ID NO: 46888 - DNA, 26 bp, Homo sapiens
cccaaaatactgcacatccctgtagt

SEQ ID NO: 46889 - DNA, 26 bp, Homo sapiens
ccaaaatactgcacatccctgtagtt

SEQ ID NO: 46890 - DNA, 26 bp, Homo sapiens
caaaatactgcacatccctgtagttc

SEQ ID NO: 46891 - DNA, 26 bp, Homo sapiens
aaaatactgcacatccctgtagttcg

SEQ ID NO: 46892 - DNA, 26 bp, Homo sapiens
aaatactgcacatccctgtagttcga

SEQ ID NO: 46893 - DNA, 26 bp, Homo sapiens
aatactgcacatccctgtagttcgag

SEQ ID NO: 46894 - DNA, 26 bp, Homo sapiens
atactgcacatccctgtagttcgaga

SEQ ID NO: 46895 - DNA, 26 bp, Homo sapiens
tactgcacatccctgtagttcgagag

SEQ ID NO: 46896 - DNA, 26 bp, Homo sapiens
actgcacatccctgtagttcgagaga

SEQ ID NO: 46897 - DNA, 26 bp, Homo sapiens
ctgcacatccctgtagttcgagagag

SEQ ID NO: 46898 - DNA, 26 bp, Homo sapiens
tgcacatccctgtagttcgagagagg

SEQ ID NO: 46899 - DNA, 26 bp, Homo sapiens
gcacatccctgtagttcgagagaggt

SEQ ID NO: 46900 - DNA, 26 bp, Homo sapiens
cacatccctgtagttcgagagaggta

SEQ ID NO: 46901 - DNA, 26 bp, Homo sapiens
acatccctgtagttcgagagaggtac

SEQ ID NO: 46902 - DNA, 26 bp, Homo sapiens
catccctgtagttcgagagaggtacg

SEQ ID NO: 46903 - DNA, 26 bp, Homo sapiens
atccctgtagttcgagagaggtacga

SEQ ID NO: 46904 - DNA, 26 bp, Homo sapiens
tccctgtagttcgagagaggtacgaa

SEQ ID NO: 46905 - DNA, 26 bp, Homo sapiens
ccctgtagttcgagagaggtacgaag

SEQ ID NO: 46906 - DNA, 26 bp, Homo sapiens
cctgtagttcgagagaggtacgaaga

SEQ ID NO: 46907 - DNA, 26 bp, Homo sapiens
ctgtagttcgagagaggtacgaagat

SEQ ID NO: 46908 - DNA, 26 bp, Homo sapiens
tgtagttcgagagaggtacgaagatg

SEQ ID NO: 46909 - DNA, 26 bp, Homo sapiens
gtagttcgagagaggtacgaagatgg

SEQ ID NO: 46910 - DNA, 26 bp, Homo sapiens
tagttcgagagaggtacgaagatggg

SEQ ID NO: 46911 - DNA, 26 bp, Homo sapiens
agttcgagagaggtacgaagatgggc

SEQ ID NO: 46912 - DNA, 26 bp, Homo sapiens
gttcgagagaggtacgaagatgggct

SEQ ID NO: 46913 - DNA, 26 bp, Homo sapiens
ttcgagagaggtacgaagatgggctt

SEQ ID NO: 46914 - DNA, 26 bp, Homo sapiens
tcgagagaggtacgaagatgggcttg

SEQ ID NO: 46915 - DNA, 26 bp, Homo sapiens
cgagagaggtacgaagatgggcttgt

SEQ ID NO: 46916 - DNA, 26 bp, Homo sapiens
gagagaggtacgaagatgggcttgtc

SEQ ID NO: 46917 - DNA, 26 bp, Homo sapiens
agagaggtacgaagatgggcttgtcc

SEQ ID NO: 46918 - DNA, 26 bp, Homo sapiens
gagaggtacgaagatgggcttgtccc

SEQ ID NO: 46919 - DNA, 26 bp, Homo sapiens
agaggtacgaagatgggcttgtcccc

SEQ ID NO: 46920 - DNA, 26 bp, Homo sapiens
gaggtacgaagatgggcttgtcccca

SEQ ID NO: 46921 - DNA, 26 bp, Homo sapiens
aggtacgaagatgggcttgtccccag

SEQ ID NO: 46922 - DNA, 26 bp, Homo sapiens
ggtacgaagatgggcttgtccccagg

SEQ ID NO: 46923 - DNA, 26 bp, Homo sapiens
gtacgaagatgggcttgtccccaggg

SEQ ID NO: 46924 - DNA, 26 bp, Homo sapiens
tacgaagatgggcttgtccccagggg

SEQ ID NO: 46925 - DNA, 26 bp, Homo sapiens
acgaagatgggcttgtccccagggga

SEQ ID NO: 46926 - DNA, 26 bp, Homo sapiens
cgaagatgggcttgtccccaggggat

SEQ ID NO: 46927 - DNA, 26 bp, Homo sapiens
gaagatgggcttgtccccaggggatg

SEQ ID NO: 46928 - DNA, 26 bp, Homo sapiens
aagatgggcttgtccccaggggatgg

SEQ ID NO: 46929 - DNA, 26 bp, Homo sapiens
agatgggcttgtccccaggggatggg

SEQ ID NO: 46930 - DNA, 26 bp, Homo sapiens
gatgggcttgtccccaggggatgggg

SEQ ID NO: 46931 - DNA, 26 bp, Homo sapiens
atgggcttgtccccaggggatggggc

SEQ ID NO: 46932 - DNA, 26 bp, Homo sapiens
tgggcttgtccccaggggatggggcc

SEQ ID NO: 46933 - DNA, 26 bp, Homo sapiens
gggcttgtccccaggggatggggccc

SEQ ID NO: 46934 - DNA, 26 bp, Homo sapiens
ggcttgtccccaggggatggggcccc

SEQ ID NO: 46935 - DNA, 26 bp, Homo sapiens
gcttgtccccaggggatggggccccc

SEQ ID NO: 46936 - DNA, 26 bp, Homo sapiens
cttgtccccaggggatggggccccca

SEQ ID NO: 46937 - DNA, 26 bp, Homo sapiens
ttgtccccaggggatggggcccccaa

SEQ ID NO: 46938 - DNA, 26 bp, Homo sapiens
tgtccccaggggatggggcccccaac

SEQ ID NO: 46939 - DNA, 26 bp, Homo sapiens
gtccccaggggatggggcccccaact

SEQ ID NO: 46940 - DNA, 26 bp, Homo sapiens
tccccaggggatggggcccccaactt

SEQ ID NO: 46941 - DNA, 26 bp, Homo sapiens
ccccaggggatggggcccccaacttg

SEQ ID NO: 46942 - DNA, 26 bp, Homo sapiens
cccaggggatggggcccccaacttgg

SEQ ID NO: 46943 - DNA, 26 bp, Homo sapiens
ccaggggatggggcccccaacttggg

SEQ ID NO: 46944 - DNA, 26 bp, Homo sapiens
caggggatggggcccccaacttgggg

SEQ ID NO: 46945 - DNA, 26 bp, Homo sapiens
aggggatggggcccccaacttgggga

SEQ ID NO: 46946 - DNA, 26 bp, Homo sapiens
ggggatggggcccccaacttggggag

SEQ ID NO: 46947 - DNA, 26 bp, Homo sapiens
gggatggggcccccaacttggggagc

SEQ ID NO: 46948 - DNA, 26 bp, Homo sapiens
ggatggggcccccaacttggggagct

SEQ ID NO: 46949 - DNA, 26 bp, Homo sapiens
gatggggcccccaacttggggagctc

SEQ ID NO: 46950 - DNA, 26 bp, Homo sapiens
atggggcccccaacttggggagctct

SEQ ID NO: 46951 - DNA, 26 bp, Homo sapiens
tggggcccccaacttggggagctctg

SEQ ID NO: 46952 - DNA, 26 bp, Homo sapiens
ggggcccccaacttggggagctctgc

SEQ ID NO: 46953 - DNA, 26 bp, Homo sapiens
gggcccccaacttggggagctctgct

SEQ ID NO: 46954 - DNA, 26 bp, Homo sapiens
ggcccccaacttggggagctctgctg

SEQ ID NO: 46955 - DNA, 26 bp, Homo sapiens
gcccccaacttggggagctctgctgg

SEQ ID NO: 46956 - DNA, 26 bp, Homo sapiens
cccccaacttggggagctctgctggt

SEQ ID NO: 46957 - DNA, 26 bp, Homo sapiens
ccccaacttggggagctctgctggtt

SEQ ID NO: 46958 - DNA, 26 bp, Homo sapiens
cccaacttggggagctctgctggttc

SEQ ID NO: 46959 - DNA, 26 bp, Homo sapiens
ccaacttggggagctctgctggttct

SEQ ID NO: 46960 - DNA, 26 bp, Homo sapiens
caacttggggagctctgctggttctc

SEQ ID NO: 46961 - DNA, 26 bp, Homo sapiens
aacttggggagctctgctggttctct

SEQ ID NO: 46962 - DNA, 26 bp, Homo sapiens
acttggggagctctgctggttctctc

SEQ ID NO: 46963 - DNA, 26 bp, Homo sapiens
cttggggagctctgctggttctctcc

SEQ ID NO: 46964 - DNA, 26 bp, Homo sapiens
ttggggagctctgctggttctctcca

SEQ ID NO: 46965 - DNA, 26 bp, Homo sapiens
tggggagctctgctggttctctccat

SEQ ID NO: 46966 - DNA, 26 bp, Homo sapiens
ggggagctctgctggttctctccatc

SEQ ID NO: 46967 - DNA, 26 bp, Homo sapiens
gggagctctgctggttctctccatcc

SEQ ID NO: 46968 - DNA, 26 bp, Homo sapiens
ggagctctgctggttctctccatccc

SEQ ID NO: 46969 - DNA, 26 bp, Homo sapiens
gagctctgctggttctctccatcccc

SEQ ID NO: 46970 - DNA, 26 bp, Homo sapiens
agctctgctggttctctccatcccct

SEQ ID NO: 46971 - DNA, 26 bp, Homo sapiens
gctctgctggttctctccatcccctc

SEQ ID NO: 46972 - DNA, 26 bp, Homo sapiens
ctctgctggttctctccatcccctca

SEQ ID NO: 46973 - DNA, 26 bp, Homo sapiens
tctgctggttctctccatcccctcag

SEQ ID NO: 46974 - DNA, 26 bp, Homo sapiens
ctgctggttctctccatcccctcagt

SEQ ID NO: 46975 - DNA, 26 bp, Homo sapiens
tgctggttctctccatcccctcagta

SEQ ID NO: 46976 - DNA, 26 bp, Homo sapiens
gctggttctctccatcccctcagtag

SEQ ID NO: 46977 - DNA, 26 bp, Homo sapiens
ctggttctctccatcccctcagtagg

SEQ ID NO: 46978 - DNA, 26 bp, Homo sapiens
tggttctctccatcccctcagtaggt

SEQ ID NO: 46979 - DNA, 26 bp, Homo sapiens
ggttctctccatcccctcagtaggtt

SEQ ID NO: 46980 - DNA, 26 bp, Homo sapiens
gttctctccatcccctcagtaggttc

SEQ ID NO: 46981 - DNA, 26 bp, Homo sapiens
ttctctccatcccctcagtaggttca

SEQ ID NO: 46982 - DNA, 26 bp, Homo sapiens
tctctccatcccctcagtaggttcag

SEQ ID NO: 46983 - DNA, 26 bp, Homo sapiens
ctctccatcccctcagtaggttcagg

SEQ ID NO: 46984 - DNA, 26 bp, Homo sapiens
tctccatcccctcagtaggttcagga

SEQ ID NO: 46985 - DNA, 26 bp, Homo sapiens
ctccatcccctcagtaggttcaggat

SEQ ID NO: 46986 - DNA, 26 bp, Homo sapiens
tccatcccctcagtaggttcaggatc

SEQ ID NO: 46987 - DNA, 26 bp, Homo sapiens
ccatcccctcagtaggttcaggatcc

SEQ ID NO: 46988 - DNA, 26 bp, Homo sapiens
catcccctcagtaggttcaggatcct

SEQ ID NO: 46989 - DNA, 26 bp, Homo sapiens
atcccctcagtaggttcaggatcctg

SEQ ID NO: 46990 - DNA, 26 bp, Homo sapiens
tcccctcagtaggttcaggatcctgc

SEQ ID NO: 46991 - DNA, 26 bp, Homo sapiens
cccctcagtaggttcaggatcctgcg

SEQ ID NO: 46992 - DNA, 26 bp, Homo sapiens
ccctcagtaggttcaggatcctgcgt

SEQ ID NO: 46993 - DNA, 26 bp, Homo sapiens
cctcagtaggttcaggatcctgcgtc

SEQ ID NO: 46994 - DNA, 26 bp, Homo sapiens
ctcagtaggttcaggatcctgcgtcc

SEQ ID NO: 46995 - DNA, 26 bp, Homo sapiens
tcagtaggttcaggatcctgcgtcca

SEQ ID NO: 46996 - DNA, 26 bp, Homo sapiens
cagtaggttcaggatcctgcgtccag

SEQ ID NO: 46997 - DNA, 26 bp, Homo sapiens
agtaggttcaggatcctgcgtccagg

SEQ ID NO: 46998 - DNA, 26 bp, Homo sapiens
gtaggttcaggatcctgcgtccaggt

SEQ ID NO: 46999 - DNA, 26 bp, Homo sapiens
taggttcaggatcctgcgtccaggtt

SEQ ID NO: 47000 - DNA, 26 bp, Homo sapiens
aggttcaggatcctgcgtccaggttg

SEQ ID NO: 47001 - DNA, 26 bp, Homo sapiens
ggttcaggatcctgcgtccaggttgg

SEQ ID NO: 47002 - DNA, 26 bp, Homo sapiens
gttcaggatcctgcgtccaggttgga

SEQ ID NO: 47003 - DNA, 26 bp, Homo sapiens
ttcaggatcctgcgtccaggttggac

SEQ ID NO: 47004 - DNA, 26 bp, Homo sapiens
tcaggatcctgcgtccaggttggact

SEQ ID NO: 47005 - DNA, 26 bp, Homo sapiens
caggatcctgcgtccaggttggactc

SEQ ID NO: 47006 - DNA, 26 bp, Homo sapiens
aggatcctgcgtccaggttggactcg

SEQ ID NO: 47007 - DNA, 26 bp, Homo sapiens
ggatcctgcgtccaggttggactcga

SEQ ID NO: 47008 - DNA, 26 bp, Homo sapiens
gatcctgcgtccaggttggactcgat

SEQ ID NO: 47009 - DNA, 26 bp, Homo sapiens
atcctgcgtccaggttggactcgatg

SEQ ID NO: 47010 - DNA, 26 bp, Homo sapiens
tcctgcgtccaggttggactcgatga

SEQ ID NO: 47011 - DNA, 26 bp, Homo sapiens
cctgcgtccaggttggactcgatgaa

SEQ ID NO: 47012 - DNA, 26 bp, Homo sapiens
ctgcgtccaggttggactcgatgaag

SEQ ID NO: 47013 - DNA, 26 bp, Homo sapiens
tgcgtccaggttggactcgatgaaga

SEQ ID NO: 47014 - DNA, 26 bp, Homo sapiens
gcgtccaggttggactcgatgaagag

SEQ ID NO: 47015 - DNA, 26 bp, Homo sapiens
cgtccaggttggactcgatgaagagg

SEQ ID NO: 47016 - DNA, 26 bp, Homo sapiens
gtccaggttggactcgatgaagaggg

SEQ ID NO: 47017 - DNA, 26 bp, Homo sapiens
tccaggttggactcgatgaagaggga

SEQ ID NO: 47018 - DNA, 26 bp, Homo sapiens
ccaggttggactcgatgaagagggat

SEQ ID NO: 47019 - DNA, 26 bp, Homo sapiens
caggttggactcgatgaagagggatg

SEQ ID NO: 47020 - DNA, 26 bp, Homo sapiens
aggttggactcgatgaagagggatgc

SEQ ID NO: 47021 - DNA, 26 bp, Homo sapiens
ggttggactcgatgaagagggatgcg

SEQ ID NO: 47022 - DNA, 26 bp, Homo sapiens
gttggactcgatgaagagggatgcgg

SEQ ID NO: 47023 - DNA, 26 bp, Homo sapiens
ttggactcgatgaagagggatgcgga

SEQ ID NO: 47024 - DNA, 26 bp, Homo sapiens
tggactcgatgaagagggatgcggat

SEQ ID NO: 47025 - DNA, 26 bp, Homo sapiens
ggactcgatgaagagggatgcggatc

SEQ ID NO: 47026 - DNA, 26 bp, Homo sapiens
gactcgatgaagagggatgcggatca

SEQ ID NO: 47027 - DNA, 26 bp, Homo sapiens
actcgatgaagagggatgcggatcag

SEQ ID NO: 47028 - DNA, 26 bp, Homo sapiens
ctcgatgaagagggatgcggatcagt

SEQ ID NO: 47029 - DNA, 26 bp, Homo sapiens
tcgatgaagagggatgcggatcagtg

SEQ ID NO: 47030 - DNA, 26 bp, Homo sapiens
cgatgaagagggatgcggatcagtgt

SEQ ID NO: 47031 - DNA, 26 bp, Homo sapiens
gatgaagagggatgcggatcagtgtg

SEQ ID NO: 47032 - DNA, 26 bp, Homo sapiens
atgaagagggatgcggatcagtgtgg

SEQ ID NO: 47033 - DNA, 26 bp, Homo sapiens
tgaagagggatgcggatcagtgtggc

SEQ ID NO: 47034 - DNA, 26 bp, Homo sapiens
gaagagggatgcggatcagtgtggcc

SEQ ID NO: 47035 - DNA, 26 bp, Homo sapiens
aagagggatgcggatcagtgtggccc

SEQ ID NO: 47036 - DNA, 26 bp, Homo sapiens
agagggatgcggatcagtgtggcccc

SEQ ID NO: 47037 - DNA, 26 bp, Homo sapiens
gagggatgcggatcagtgtggccccg

SEQ ID NO: 47038 - DNA, 26 bp, Homo sapiens
agggatgcggatcagtgtggccccgg

SEQ ID NO: 47039 - DNA, 26 bp, Homo sapiens
gggatgcggatcagtgtggccccgga

SEQ ID NO: 47040 - DNA, 26 bp, Homo sapiens
ggatgcggatcagtgtggccccggaa

SEQ ID NO: 47041 - DNA, 26 bp, Homo sapiens
gatgcggatcagtgtggccccggaag

SEQ ID NO: 47042 - DNA, 26 bp, Homo sapiens
atgcggatcagtgtggccccggaagg

SEQ ID NO: 47043 - DNA, 26 bp, Homo sapiens
tgcggatcagtgtggccccggaaggc

SEQ ID NO: 47044 - DNA, 26 bp, Homo sapiens
gcggatcagtgtggccccggaaggct

SEQ ID NO: 47045 - DNA, 26 bp, Homo sapiens
cggatcagtgtggccccggaaggctc

SEQ ID NO: 47046 - DNA, 26 bp, Homo sapiens
ggatcagtgtggccccggaaggctcc

SEQ ID NO: 47047 - DNA, 26 bp, Homo sapiens
gatcagtgtggccccggaaggctcca

SEQ ID NO: 47048 - DNA, 26 bp, Homo sapiens
atcagtgtggccccggaaggctccac

SEQ ID NO: 47049 - DNA, 26 bp, Homo sapiens
tcagtgtggccccggaaggctccaca

SEQ ID NO: 47050 - DNA, 26 bp, Homo sapiens
cagtgtggccccggaaggctccacat

SEQ ID NO: 47051 - DNA, 26 bp, Homo sapiens
agtgtggccccggaaggctccacatt

SEQ ID NO: 47052 - DNA, 26 bp, Homo sapiens
gtgtggccccggaaggctccacattc

SEQ ID NO: 47053 - DNA, 26 bp, Homo sapiens
tgtggccccggaaggctccacattca

SEQ ID NO: 47054 - DNA, 26 bp, Homo sapiens
gtggccccggaaggctccacattcag

SEQ ID NO: 47055 - DNA, 26 bp, Homo sapiens
tggccccggaaggctccacattcagc

SEQ ID NO: 47056 - DNA, 26 bp, Homo sapiens
ggccccggaaggctccacattcagca

SEQ ID NO: 47057 - DNA, 26 bp, Homo sapiens
gccccggaaggctccacattcagcag

SEQ ID NO: 47058 - DNA, 26 bp, Homo sapiens
ccccggaaggctccacattcagcaga

SEQ ID NO: 47059 - DNA, 26 bp, Homo sapiens
cccggaaggctccacattcagcagag

SEQ ID NO: 47060 - DNA, 26 bp, Homo sapiens
ccggaaggctccacattcagcagagg

SEQ ID NO: 47061 - DNA, 26 bp, Homo sapiens
cggaaggctccacattcagcagaggc

SEQ ID NO: 47062 - DNA, 26 bp, Homo sapiens
ggaaggctccacattcagcagaggca

SEQ ID NO: 47063 - DNA, 26 bp, Homo sapiens
gaaggctccacattcagcagaggcag

SEQ ID NO: 47064 - DNA, 26 bp, Homo sapiens
aaggctccacattcagcagaggcagc

SEQ ID NO: 47065 - DNA, 26 bp, Homo sapiens
aggctccacattcagcagaggcagca

SEQ ID NO: 47066 - DNA, 26 bp, Homo sapiens
ggctccacattcagcagaggcagcag

SEQ ID NO: 47067 - DNA, 26 bp, Homo sapiens
gctccacattcagcagaggcagcagc

SEQ ID NO: 47068 - DNA, 26 bp, Homo sapiens
ctccacattcagcagaggcagcagca

SEQ ID NO: 47069 - DNA, 26 bp, Homo sapiens
tccacattcagcagaggcagcagcag

SEQ ID NO: 47070 - DNA, 26 bp, Homo sapiens
ccacattcagcagaggcagcagcagc

SEQ ID NO: 47071 - DNA, 26 bp, Homo sapiens
cacattcagcagaggcagcagcagca

SEQ ID NO: 47072 - DNA, 26 bp, Homo sapiens
acattcagcagaggcagcagcagcag

SEQ ID NO: 47073 - DNA, 26 bp, Homo sapiens
cattcagcagaggcagcagcagcagc

SEQ ID NO: 47074 - DNA, 26 bp, Homo sapiens
attcagcagaggcagcagcagcagca

SEQ ID NO: 47075 - DNA, 26 bp, Homo sapiens
ttcagcagaggcagcagcagcagcag

SEQ ID NO: 47076 - DNA, 26 bp, Homo sapiens
tcagcagaggcagcagcagcagcagg

SEQ ID NO: 47077 - DNA, 26 bp, Homo sapiens
cagcagaggcagcagcagcagcaggg

SEQ ID NO: 47078 - DNA, 26 bp, Homo sapiens
agcagaggcagcagcagcagcagggg

SEQ ID NO: 47079 - DNA, 26 bp, Homo sapiens
gcagaggcagcagcagcagcaggggt

SEQ ID NO: 47080 - DNA, 26 bp, Homo sapiens
cagaggcagcagcagcagcaggggtt

SEQ ID NO: 47081 - DNA, 26 bp, Homo sapiens
agaggcagcagcagcagcaggggttg

SEQ ID NO: 47082 - DNA, 26 bp, Homo sapiens
gaggcagcagcagcagcaggggttgc

SEQ ID NO: 47083 - DNA, 26 bp, Homo sapiens
aggcagcagcagcagcaggggttgca

SEQ ID NO: 47084 - DNA, 26 bp, Homo sapiens
ggcagcagcagcagcaggggttgcag

SEQ ID NO: 47085 - DNA, 26 bp, Homo sapiens
gcagcagcagcagcaggggttgcagc

SEQ ID NO: 47086 - DNA, 26 bp, Homo sapiens
cagcagcagcagcaggggttgcagca

SEQ ID NO: 47087 - DNA, 26 bp, Homo sapiens
agcagcagcagcaggggttgcagcag

SEQ ID NO: 47088 - DNA, 26 bp, Homo sapiens
gcagcagcagcaggggttgcagcagc

SEQ ID NO: 47089 - DNA, 26 bp, Homo sapiens
cagcagcagcaggggttgcagcagcg

SEQ ID NO: 47090 - DNA, 26 bp, Homo sapiens
agcagcagcaggggttgcagcagcgg

SEQ ID NO: 47091 - DNA, 26 bp, Homo sapiens
gcagcagcaggggttgcagcagcggt

SEQ ID NO: 47092 - DNA, 26 bp, Homo sapiens
cagcagcaggggttgcagcagcggtg

SEQ ID NO: 47093 - DNA, 26 bp, Homo sapiens
agcagcaggggttgcagcagcggtgg

SEQ ID NO: 47094 - DNA, 26 bp, Homo sapiens
gcagcaggggttgcagcagcggtggt

SEQ ID NO: 47095 - DNA, 26 bp, Homo sapiens
cagcaggggttgcagcagcggtggtg

SEQ ID NO: 47096 - DNA, 26 bp, Homo sapiens
agcaggggttgcagcagcggtggtgg

SEQ ID NO: 47097 - DNA, 26 bp, Homo sapiens
gcaggggttgcagcagcggtggtgga

SEQ ID NO: 47098 - DNA, 26 bp, Homo sapiens
caggggttgcagcagcggtggtggag

SEQ ID NO: 47099 - DNA, 26 bp, Homo sapiens
aggggttgcagcagcggtggtggaga

SEQ ID NO: 47100 - DNA, 26 bp, Homo sapiens
ggggttgcagcagcggtggtggagac

SEQ ID NO: 47101 - DNA, 26 bp, Homo sapiens
gggttgcagcagcggtggtggagaca

SEQ ID NO: 47102 - DNA, 26 bp, Homo sapiens
ggttgcagcagcggtggtggagacat

SEQ ID NO: 47103 - DNA, 26 bp, Homo sapiens
gttgcagcagcggtggtggagacatc

SEQ ID NO: 47104 - DNA, 26 bp, Homo sapiens
ttgcagcagcggtggtggagacatcg

SEQ ID NO: 47105 - DNA, 26 bp, Homo sapiens
tgcagcagcggtggtggagacatcgc

SEQ ID NO: 47106 - DNA, 26 bp, Homo sapiens
gcagcagcggtggtggagacatcgct

SEQ ID NO: 47107 - DNA, 26 bp, Homo sapiens
cagcagcggtggtggagacatcgctg

SEQ ID NO: 47108 - DNA, 26 bp, Homo sapiens
agcagcggtggtggagacatcgctgg

SEQ ID NO: 47109 - DNA, 26 bp, Homo sapiens
gcagcggtggtggagacatcgctggg

SEQ ID NO: 47110 - DNA, 26 bp, Homo sapiens
cagcggtggtggagacatcgctgggg

SEQ ID NO: 47111 - DNA, 26 bp, Homo sapiens
agcggtggtggagacatcgctgggga

SEQ ID NO: 47112 - DNA, 26 bp, Homo sapiens
gcggtggtggagacatcgctggggac

SEQ ID NO: 47113 - DNA, 26 bp, Homo sapiens
cggtggtggagacatcgctggggacc

SEQ ID NO: 47114 - DNA, 26 bp, Homo sapiens
ggtggtggagacatcgctggggacct

SEQ ID NO: 47115 - DNA, 26 bp, Homo sapiens
gtggtggagacatcgctggggacctg

SEQ ID NO: 47116 - DNA, 26 bp, Homo sapiens
tggtggagacatcgctggggacctgg

SEQ ID NO: 47117 - DNA, 26 bp, Homo sapiens
ggtggagacatcgctggggacctggg

SEQ ID NO: 47118 - DNA, 26 bp, Homo sapiens
gtggagacatcgctggggacctgggt

SEQ ID NO: 47119 - DNA, 26 bp, Homo sapiens
tggagacatcgctggggacctgggtg

SEQ ID NO: 47120 - DNA, 26 bp, Homo sapiens
ggagacatcgctggggacctgggtgt

SEQ ID NO: 47121 - DNA, 26 bp, Homo sapiens
gagacatcgctggggacctgggtgtg

SEQ ID NO: 47122 - DNA, 26 bp, Homo sapiens
agacatcgctggggacctgggtgtga

SEQ ID NO: 47123 - DNA, 26 bp, Homo sapiens
gacatcgctggggacctgggtgtgaa

SEQ ID NO: 47124 - DNA, 26 bp, Homo sapiens
acatcgctggggacctgggtgtgaac

SEQ ID NO: 47125 - DNA, 26 bp, Homo sapiens
catcgctggggacctgggtgtgaacc

SEQ ID NO: 47126 - DNA, 26 bp, Homo sapiens
atcgctggggacctgggtgtgaaccc

SEQ ID NO: 47127 - DNA, 26 bp, Homo sapiens
tcgctggggacctgggtgtgaaccca

SEQ ID NO: 47128 - DNA, 26 bp, Homo sapiens
cgctggggacctgggtgtgaacccag

SEQ ID NO: 47129 - DNA, 26 bp, Homo sapiens
gctggggacctgggtgtgaacccagg

SEQ ID NO: 47130 - DNA, 26 bp, Homo sapiens
ctggggacctgggtgtgaacccaggt

SEQ ID NO: 47131 - DNA, 26 bp, Homo sapiens
tggggacctgggtgtgaacccaggtg

SEQ ID NO: 47132 - DNA, 26 bp, Homo sapiens
ggggacctgggtgtgaacccaggtgt

SEQ ID NO: 47133 - DNA, 26 bp, Homo sapiens
gggacctgggtgtgaacccaggtgtc

SEQ ID NO: 47134 - DNA, 26 bp, Homo sapiens
ggacctgggtgtgaacccaggtgtcc

SEQ ID NO: 47135 - DNA, 26 bp, Homo sapiens
gacctgggtgtgaacccaggtgtcct

SEQ ID NO: 47136 - DNA, 26 bp, Homo sapiens
acctgggtgtgaacccaggtgtcctg

SEQ ID NO: 47137 - DNA, 26 bp, Homo sapiens
cctgggtgtgaacccaggtgtcctgg

SEQ ID NO: 47138 - DNA, 26 bp, Homo sapiens
ctgggtgtgaacccaggtgtcctggg

SEQ ID NO: 47139 - DNA, 26 bp, Homo sapiens
tgggtgtgaacccaggtgtcctgggg

SEQ ID NO: 47140 - DNA, 26 bp, Homo sapiens
gggtgtgaacccaggtgtcctggggc

SEQ ID NO: 47141 - DNA, 26 bp, Homo sapiens
ggtgtgaacccaggtgtcctggggcc

SEQ ID NO: 47142 - DNA, 26 bp, Homo sapiens
gtgtgaacccaggtgtcctggggcct

SEQ ID NO: 47143 - DNA, 26 bp, Homo sapiens
tgtgaacccaggtgtcctggggcctc

SEQ ID NO: 47144 - DNA, 26 bp, Homo sapiens
gtgaacccaggtgtcctggggcctca

SEQ ID NO: 47145 - DNA, 26 bp, Homo sapiens
tgaacccaggtgtcctggggcctcat

SEQ ID NO: 47146 - DNA, 26 bp, Homo sapiens
gaacccaggtgtcctggggcctcatt

SEQ ID NO: 47147 - DNA, 26 bp, Homo sapiens
aacccaggtgtcctggggcctcattt

SEQ ID NO: 47148 - DNA, 26 bp, Homo sapiens
acccaggtgtcctggggcctcatttt

SEQ ID NO: 47149 - DNA, 26 bp, Homo sapiens
cccaggtgtcctggggcctcattttc

SEQ ID NO: 47150 - DNA, 26 bp, Homo sapiens
ccaggtgtcctggggcctcattttct

SEQ ID NO: 47151 - DNA, 26 bp, Homo sapiens
caggtgtcctggggcctcattttctt

SEQ ID NO: 47152 - DNA, 26 bp, Homo sapiens
aggtgtcctggggcctcattttcttt

SEQ ID NO: 47153 - DNA, 26 bp, Homo sapiens
ggtgtcctggggcctcattttctttc

SEQ ID NO: 47154 - DNA, 26 bp, Homo sapiens
gtgtcctggggcctcattttctttcc

SEQ ID NO: 47155 - DNA, 26 bp, Homo sapiens
tgtcctggggcctcattttctttccc

SEQ ID NO: 47156 - DNA, 26 bp, Homo sapiens
gtcctggggcctcattttctttcccc

SEQ ID NO: 47157 - DNA, 26 bp, Homo sapiens
tcctggggcctcattttctttcccct

SEQ ID NO: 47158 - DNA, 26 bp, Homo sapiens
cctggggcctcattttctttcccctg

SEQ ID NO: 47159 - DNA, 26 bp, Homo sapiens
ctggggcctcattttctttcccctgt

SEQ ID NO: 47160 - DNA, 26 bp, Homo sapiens
tggggcctcattttctttcccctgtg

SEQ ID NO: 47161 - DNA, 26 bp, Homo sapiens
ggggcctcattttctttcccctgtga

SEQ ID NO: 47162 - DNA, 26 bp, Homo sapiens
gggcctcattttctttcccctgtgac

SEQ ID NO: 47163 - DNA, 26 bp, Homo sapiens
ggcctcattttctttcccctgtgact

SEQ ID NO: 47164 - DNA, 26 bp, Homo sapiens
gcctcattttctttcccctgtgactc

SEQ ID NO: 47165 - DNA, 26 bp, Homo sapiens
cctcattttctttcccctgtgactcc

SEQ ID NO: 47166 - DNA, 26 bp, Homo sapiens
ctcattttctttcccctgtgactcca

SEQ ID NO: 47167 - DNA, 26 bp, Homo sapiens
tcattttctttcccctgtgactccac

SEQ ID NO: 47168 - DNA, 26 bp, Homo sapiens
cattttctttcccctgtgactccacc

SEQ ID NO: 47169 - DNA, 26 bp, Homo sapiens
attttctttcccctgtgactccaccc

SEQ ID NO: 47170 - DNA, 26 bp, Homo sapiens
ttttctttcccctgtgactccaccct

SEQ ID NO: 47171 - DNA, 26 bp, Homo sapiens
tttctttcccctgtgactccaccctg

SEQ ID NO: 47172 - DNA, 26 bp, Homo sapiens
ttctttcccctgtgactccaccctgt

SEQ ID NO: 47173 - DNA, 26 bp, Homo sapiens
tctttcccctgtgactccaccctgtt

SEQ ID NO: 47174 - DNA, 26 bp, Homo sapiens
ctttcccctgtgactccaccctgttc

SEQ ID NO: 47175 - DNA, 26 bp, Homo sapiens
tttcccctgtgactccaccctgttca

SEQ ID NO: 47176 - DNA, 26 bp, Homo sapiens
ttcccctgtgactccaccctgttcat

SEQ ID NO: 47177 - DNA, 26 bp, Homo sapiens
tcccctgtgactccaccctgttcatg

SEQ ID NO: 47178 - DNA, 26 bp, Homo sapiens
cccctgtgactccaccctgttcatgc

SEQ ID NO: 47179 - DNA, 26 bp, Homo sapiens
ccctgtgactccaccctgttcatgcc

SEQ ID NO: 47180 - DNA, 26 bp, Homo sapiens
cctgtgactccaccctgttcatgccc

SEQ ID NO: 47181 - DNA, 26 bp, Homo sapiens
ctgtgactccaccctgttcatgcccc

SEQ ID NO: 47182 - DNA, 26 bp, Homo sapiens
tgtgactccaccctgttcatgcccca

SEQ ID NO: 47183 - DNA, 26 bp, Homo sapiens
gtgactccaccctgttcatgccccac

SEQ ID NO: 47184 - DNA, 26 bp, Homo sapiens
tgactccaccctgttcatgccccacc

SEQ ID NO: 47185 - DNA, 26 bp, Homo sapiens
gactccaccctgttcatgccccacct

SEQ ID NO: 47186 - DNA, 26 bp, Homo sapiens
actccaccctgttcatgccccacctc

SEQ ID NO: 47187 - DNA, 26 bp, Homo sapiens
ctccaccctgttcatgccccacctcc

SEQ ID NO: 47188 - DNA, 26 bp, Homo sapiens
tccaccctgttcatgccccacctcca

SEQ ID NO: 47189 - DNA, 26 bp, Homo sapiens
ccaccctgttcatgccccacctccag

SEQ ID NO: 47190 - DNA, 26 bp, Homo sapiens
caccctgttcatgccccacctccagg

SEQ ID NO: 47191 - DNA, 26 bp, Homo sapiens
accctgttcatgccccacctccaggt

SEQ ID NO: 47192 - DNA, 26 bp, Homo sapiens
ccctgttcatgccccacctccaggtt

SEQ ID NO: 47193 - DNA, 26 bp, Homo sapiens
cctgttcatgccccacctccaggttt

SEQ ID NO: 47194 - DNA, 26 bp, Homo sapiens
ctgttcatgccccacctccaggttta

SEQ ID NO: 47195 - DNA, 26 bp, Homo sapiens
tgttcatgccccacctccaggtttag

SEQ ID NO: 47196 - DNA, 26 bp, Homo sapiens
gttcatgccccacctccaggtttaga

SEQ ID NO: 47197 - DNA, 26 bp, Homo sapiens
ttcatgccccacctccaggtttagaa

SEQ ID NO: 47198 - DNA, 26 bp, Homo sapiens
tcatgccccacctccaggtttagaag

SEQ ID NO: 47199 - DNA, 26 bp, Homo sapiens
catgccccacctccaggtttagaagg

SEQ ID NO: 47200 - DNA, 26 bp, Homo sapiens
atgccccacctccaggtttagaagga

SEQ ID NO: 47201 - DNA, 26 bp, Homo sapiens
tgccccacctccaggtttagaaggag

SEQ ID NO: 47202 - DNA, 26 bp, Homo sapiens
gccccacctccaggtttagaaggaga

SEQ ID NO: 47203 - DNA, 26 bp, Homo sapiens
ccccacctccaggtttagaaggagac

SEQ ID NO: 47204 - DNA, 26 bp, Homo sapiens
cccacctccaggtttagaaggagacc

SEQ ID NO: 47205 - DNA, 26 bp, Homo sapiens
ccacctccaggtttagaaggagacca

SEQ ID NO: 47206 - DNA, 26 bp, Homo sapiens
cacctccaggtttagaaggagaccag

SEQ ID NO: 47207 - DNA, 26 bp, Homo sapiens
acctccaggtttagaaggagaccagg

SEQ ID NO: 47208 - DNA, 26 bp, Homo sapiens
cctccaggtttagaaggagaccagga

SEQ ID NO: 47209 - DNA, 26 bp, Homo sapiens
ctccaggtttagaaggagaccaggac

SEQ ID NO: 47210 - DNA, 26 bp, Homo sapiens
tccaggtttagaaggagaccaggaca

SEQ ID NO: 47211 - DNA, 26 bp, Homo sapiens
ccaggtttagaaggagaccaggacat

SEQ ID NO: 47212 - DNA, 26 bp, Homo sapiens
caggtttagaaggagaccaggacatg

SEQ ID NO: 47213 - DNA, 26 bp, Homo sapiens
aggtttagaaggagaccaggacatga

SEQ ID NO: 47214 - DNA, 26 bp, Homo sapiens
ggtttagaaggagaccaggacatgaa

SEQ ID NO: 47215 - DNA, 26 bp, Homo sapiens
gtttagaaggagaccaggacatgaaa

SEQ ID NO: 47216 - DNA, 26 bp, Homo sapiens
tttagaaggagaccaggacatgaaat

SEQ ID NO: 47217 - DNA, 26 bp, Homo sapiens
ttagaaggagaccaggacatgaaatc

SEQ ID NO: 47218 - DNA, 26 bp, Homo sapiens
tagaaggagaccaggacatgaaatct

SEQ ID NO: 47219 - DNA, 26 bp, Homo sapiens
agaaggagaccaggacatgaaatctg

SEQ ID NO: 47220 - DNA, 26 bp, Homo sapiens
gaaggagaccaggacatgaaatctgt

SEQ ID NO: 47221 - DNA, 26 bp, Homo sapiens
aaggagaccaggacatgaaatctgtc

SEQ ID NO: 47222 - DNA, 26 bp, Homo sapiens
aggagaccaggacatgaaatctgtcc

SEQ ID NO: 47223 - DNA, 26 bp, Homo sapiens
ggagaccaggacatgaaatctgtccg

SEQ ID NO: 47224 - DNA, 26 bp, Homo sapiens
gagaccaggacatgaaatctgtccgc

SEQ ID NO: 47225 - DNA, 26 bp, Homo sapiens
agaccaggacatgaaatctgtccgca

SEQ ID NO: 47226 - DNA, 26 bp, Homo sapiens
gaccaggacatgaaatctgtccgcag

SEQ ID NO: 47227 - DNA, 26 bp, Homo sapiens
accaggacatgaaatctgtccgcagg

SEQ ID NO: 47228 - DNA, 26 bp, Homo sapiens
ccaggacatgaaatctgtccgcaggt

SEQ ID NO: 47229 - DNA, 26 bp, Homo sapiens
caggacatgaaatctgtccgcaggtg

SEQ ID NO: 47230 - DNA, 26 bp, Homo sapiens
aggacatgaaatctgtccgcaggtga

SEQ ID NO: 47231 - DNA, 26 bp, Homo sapiens
ggacatgaaatctgtccgcaggtgac

SEQ ID NO: 47232 - DNA, 26 bp, Homo sapiens
gacatgaaatctgtccgcaggtgacg

SEQ ID NO: 47233 - DNA, 26 bp, Homo sapiens
acatgaaatctgtccgcaggtgacgc

SEQ ID NO: 47234 - DNA, 26 bp, Homo sapiens
catgaaatctgtccgcaggtgacgca

SEQ ID NO: 47235 - DNA, 26 bp, Homo sapiens
atgaaatctgtccgcaggtgacgcag

SEQ ID NO: 47236 - DNA, 26 bp, Homo sapiens
tgaaatctgtccgcaggtgacgcagt

SEQ ID NO: 47237 - DNA, 26 bp, Homo sapiens
gaaatctgtccgcaggtgacgcagtg

SEQ ID NO: 47238 - DNA, 26 bp, Homo sapiens
aaatctgtccgcaggtgacgcagtgg

SEQ ID NO: 47239 - DNA, 26 bp, Homo sapiens
aatctgtccgcaggtgacgcagtggg

SEQ ID NO: 47240 - DNA, 26 bp, Homo sapiens
atctgtccgcaggtgacgcagtggga

SEQ ID NO: 47241 - DNA, 26 bp, Homo sapiens
tctgtccgcaggtgacgcagtgggac

SEQ ID NO: 47242 - DNA, 26 bp, Homo sapiens
ctgtccgcaggtgacgcagtgggaca

SEQ ID NO: 47243 - DNA, 26 bp, Homo sapiens
tgtccgcaggtgacgcagtgggacaa

SEQ ID NO: 47244 - DNA, 26 bp, Homo sapiens
gtccgcaggtgacgcagtgggacaag

SEQ ID NO: 47245 - DNA, 26 bp, Homo sapiens
tccgcaggtgacgcagtgggacaagg

SEQ ID NO: 47246 - DNA, 26 bp, Homo sapiens
ccgcaggtgacgcagtgggacaagga

SEQ ID NO: 47247 - DNA, 26 bp, Homo sapiens
cgcaggtgacgcagtgggacaaggat

SEQ ID NO: 47248 - DNA, 26 bp, Homo sapiens
gcaggtgacgcagtgggacaaggatg

SEQ ID NO: 47249 - DNA, 26 bp, Homo sapiens
caggtgacgcagtgggacaaggatgt

SEQ ID NO: 47250 - DNA, 26 bp, Homo sapiens
aggtgacgcagtgggacaaggatgtt

SEQ ID NO: 47251 - DNA, 26 bp, Homo sapiens
ggtgacgcagtgggacaaggatgttt

SEQ ID NO: 47252 - DNA, 26 bp, Homo sapiens
gtgacgcagtgggacaaggatgtttt

SEQ ID NO: 47253 - DNA, 26 bp, Homo sapiens
tgacgcagtgggacaaggatgttttt

SEQ ID NO: 47254 - DNA, 26 bp, Homo sapiens
gacgcagtgggacaaggatgtttttt

SEQ ID NO: 47255 - DNA, 26 bp, Homo sapiens
acgcagtgggacaaggatgttttttg

SEQ ID NO: 47256 - DNA, 26 bp, Homo sapiens
cgcagtgggacaaggatgttttttga

SEQ ID NO: 47257 - DNA, 26 bp, Homo sapiens
gcagtgggacaaggatgttttttgaa

SEQ ID NO: 47258 - DNA, 26 bp, Homo sapiens
cagtgggacaaggatgttttttgaag

SEQ ID NO: 47259 - DNA, 26 bp, Homo sapiens
agtgggacaaggatgttttttgaaga

SEQ ID NO: 47260 - DNA, 26 bp, Homo sapiens
gtgggacaaggatgttttttgaagat

SEQ ID NO: 47261 - DNA, 26 bp, Homo sapiens
tgggacaaggatgttttttgaagatt

SEQ ID NO: 47262 - DNA, 26 bp, Homo sapiens
gggacaaggatgttttttgaagattt

SEQ ID NO: 47263 - DNA, 26 bp, Homo sapiens
ggacaaggatgttttttgaagatttg

SEQ ID NO: 47264 - DNA, 26 bp, Homo sapiens
gacaaggatgttttttgaagatttgt

SEQ ID NO: 47265 - DNA, 26 bp, Homo sapiens
acaaggatgttttttgaagatttgtg

SEQ ID NO: 47266 - DNA, 26 bp, Homo sapiens
caaggatgttttttgaagatttgtgc

SEQ ID NO: 47267 - DNA, 26 bp, Homo sapiens
aaggatgttttttgaagatttgtgca

SEQ ID NO: 47268 - DNA, 26 bp, Homo sapiens
aggatgttttttgaagatttgtgcag

SEQ ID NO: 47269 - DNA, 26 bp, Homo sapiens
ggatgttttttgaagatttgtgcaga

SEQ ID NO: 47270 - DNA, 26 bp, Homo sapiens
gatgttttttgaagatttgtgcagag

SEQ ID NO: 47271 - DNA, 26 bp, Homo sapiens
atgttttttgaagatttgtgcagagt

SEQ ID NO: 47272 - DNA, 26 bp, Homo sapiens
tgttttttgaagatttgtgcagagta

SEQ ID NO: 47273 - DNA, 26 bp, Homo sapiens
gttttttgaagatttgtgcagagtat

SEQ ID NO: 47274 - DNA, 26 bp, Homo sapiens
ttttttgaagatttgtgcagagtatt

SEQ ID NO: 47275 - DNA, 26 bp, Homo sapiens
tttttgaagatttgtgcagagtattt

SEQ ID NO: 47276 - DNA, 26 bp, Homo sapiens
ttttgaagatttgtgcagagtatttt

SEQ ID NO: 47277 - DNA, 26 bp, Homo sapiens
tttgaagatttgtgcagagtattttt

SEQ ID NO: 47278 - DNA, 26 bp, Homo sapiens
ttgaagatttgtgcagagtatttttg

SEQ ID NO: 47279 - DNA, 26 bp, Homo sapiens
tgaagatttgtgcagagtatttttgt

SEQ ID NO: 47280 - DNA, 26 bp, Homo sapiens
gaagatttgtgcagagtatttttgta

SEQ ID NO: 47281 - DNA, 26 bp, Homo sapiens
aagatttgtgcagagtatttttgtag

SEQ ID NO: 47282 - DNA, 26 bp, Homo sapiens
agatttgtgcagagtatttttgtagg

SEQ ID NO: 47283 - DNA, 26 bp, Homo sapiens
gatttgtgcagagtatttttgtaggg

SEQ ID NO: 47284 - DNA, 26 bp, Homo sapiens
atttgtgcagagtatttttgtagggt

SEQ ID NO: 47285 - DNA, 26 bp, Homo sapiens
tttgtgcagagtatttttgtagggtt

SEQ ID NO: 47286 - DNA, 26 bp, Homo sapiens
ttgtgcagagtatttttgtagggttg

SEQ ID NO: 47287 - DNA, 26 bp, Homo sapiens
tgtgcagagtatttttgtagggttgg

SEQ ID NO: 47288 - DNA, 26 bp, Homo sapiens
gtgcagagtatttttgtagggttggc

SEQ ID NO: 47289 - DNA, 26 bp, Homo sapiens
tgcagagtatttttgtagggttggca

SEQ ID NO: 47290 - DNA, 26 bp, Homo sapiens
gcagagtatttttgtagggttggcag

SEQ ID NO: 47291 - DNA, 26 bp, Homo sapiens
cagagtatttttgtagggttggcaga

SEQ ID NO: 47292 - DNA, 26 bp, Homo sapiens
agagtatttttgtagggttggcagaa

SEQ ID NO: 47293 - DNA, 26 bp, Homo sapiens
gagtatttttgtagggttggcagaag

SEQ ID NO: 47294 - DNA, 26 bp, Homo sapiens
agtatttttgtagggttggcagaagt

SEQ ID NO: 47295 - DNA, 26 bp, Homo sapiens
gtatttttgtagggttggcagaagta

SEQ ID NO: 47296 - DNA, 26 bp, Homo sapiens
tatttttgtagggttggcagaagtag

SEQ ID NO: 47297 - DNA, 26 bp, Homo sapiens
atttttgtagggttggcagaagtagc

SEQ ID NO: 47298 - DNA, 26 bp, Homo sapiens
tttttgtagggttggcagaagtagca

SEQ ID NO: 47299 - DNA, 26 bp, Homo sapiens
ttttgtagggttggcagaagtagcat

SEQ ID NO: 47300 - DNA, 26 bp, Homo sapiens
tttgtagggttggcagaagtagcatc

SEQ ID NO: 47301 - DNA, 26 bp, Homo sapiens
ttgtagggttggcagaagtagcatcc

SEQ ID NO: 47302 - DNA, 26 bp, Homo sapiens
tgtagggttggcagaagtagcatcct

SEQ ID NO: 47303 - DNA, 26 bp, Homo sapiens
gtagggttggcagaagtagcatcctg

SEQ ID NO: 47304 - DNA, 26 bp, Homo sapiens
tagggttggcagaagtagcatcctgt

SEQ ID NO: 47305 - DNA, 26 bp, Homo sapiens
agggttggcagaagtagcatcctgtg

SEQ ID NO: 47306 - DNA, 26 bp, Homo sapiens
gggttggcagaagtagcatcctgtgc

SEQ ID NO: 47307 - DNA, 26 bp, Homo sapiens
ggttggcagaagtagcatcctgtgct

SEQ ID NO: 47308 - DNA, 26 bp, Homo sapiens
gttggcagaagtagcatcctgtgctc

SEQ ID NO: 47309 - DNA, 26 bp, Homo sapiens
ttggcagaagtagcatcctgtgctcc

SEQ ID NO: 47310 - DNA, 26 bp, Homo sapiens
tggcagaagtagcatcctgtgctcct

SEQ ID NO: 47311 - DNA, 26 bp, Homo sapiens
ggcagaagtagcatcctgtgctcctg

SEQ ID NO: 47312 - DNA, 26 bp, Homo sapiens
gcagaagtagcatcctgtgctcctgg

SEQ ID NO: 47313 - DNA, 26 bp, Homo sapiens
cagaagtagcatcctgtgctcctggt

SEQ ID NO: 47314 - DNA, 26 bp, Homo sapiens
agaagtagcatcctgtgctcctggtg

SEQ ID NO: 47315 - DNA, 26 bp, Homo sapiens
gaagtagcatcctgtgctcctggtgc

SEQ ID NO: 47316 - DNA, 26 bp, Homo sapiens
aagtagcatcctgtgctcctggtgct

SEQ ID NO: 47317 - DNA, 26 bp, Homo sapiens
agtagcatcctgtgctcctggtgctc

SEQ ID NO: 47318 - DNA, 26 bp, Homo sapiens
gtagcatcctgtgctcctggtgctcc

SEQ ID NO: 47319 - DNA, 26 bp, Homo sapiens
tagcatcctgtgctcctggtgctcct

SEQ ID NO: 47320 - DNA, 26 bp, Homo sapiens
agcatcctgtgctcctggtgctcctc

SEQ ID NO: 47321 - DNA, 26 bp, Homo sapiens
gcatcctgtgctcctggtgctcctca

SEQ ID NO: 47322 - DNA, 26 bp, Homo sapiens
catcctgtgctcctggtgctcctcac

SEQ ID NO: 47323 - DNA, 26 bp, Homo sapiens
atcctgtgctcctggtgctcctcact

SEQ ID NO: 47324 - DNA, 26 bp, Homo sapiens
tcctgtgctcctggtgctcctcactc

SEQ ID NO: 47325 - DNA, 26 bp, Homo sapiens
cctgtgctcctggtgctcctcactcc

SEQ ID NO: 47326 - DNA, 26 bp, Homo sapiens
ctgtgctcctggtgctcctcactccc

SEQ ID NO: 47327 - DNA, 26 bp, Homo sapiens
tgtgctcctggtgctcctcactccct

SEQ ID NO: 47328 - DNA, 26 bp, Homo sapiens
gtgctcctggtgctcctcactcccta

SEQ ID NO: 47329 - DNA, 26 bp, Homo sapiens
tgctcctggtgctcctcactccctac

SEQ ID NO: 47330 - DNA, 26 bp, Homo sapiens
gctcctggtgctcctcactccctact

SEQ ID NO: 47331 - DNA, 26 bp, Homo sapiens
ctcctggtgctcctcactccctactt

SEQ ID NO: 47332 - DNA, 26 bp, Homo sapiens
tcctggtgctcctcactccctacttg

SEQ ID NO: 47333 - DNA, 26 bp, Homo sapiens
cctggtgctcctcactccctacttgg

SEQ ID NO: 47334 - DNA, 26 bp, Homo sapiens
ctggtgctcctcactccctacttggg

SEQ ID NO: 47335 - DNA, 26 bp, Homo sapiens
tggtgctcctcactccctacttgggt

SEQ ID NO: 47336 - DNA, 26 bp, Homo sapiens
ggtgctcctcactccctacttgggtg

SEQ ID NO: 47337 - DNA, 26 bp, Homo sapiens
gtgctcctcactccctacttgggtgg

SEQ ID NO: 47338 - DNA, 26 bp, Homo sapiens
tgctcctcactccctacttgggtggc

SEQ ID NO: 47339 - DNA, 26 bp, Homo sapiens
gctcctcactccctacttgggtggca

SEQ ID NO: 47340 - DNA, 26 bp, Homo sapiens
ctcctcactccctacttgggtggcag

SEQ ID NO: 47341 - DNA, 26 bp, Homo sapiens
tcctcactccctacttgggtggcagt

SEQ ID NO: 47342 - DNA, 26 bp, Homo sapiens
cctcactccctacttgggtggcagtg

SEQ ID NO: 47343 - DNA, 26 bp, Homo sapiens
ctcactccctacttgggtggcagtgg

SEQ ID NO: 47344 - DNA, 26 bp, Homo sapiens
tcactccctacttgggtggcagtggt

SEQ ID NO: 47345 - DNA, 26 bp, Homo sapiens
cactccctacttgggtggcagtggtg

SEQ ID NO: 47346 - DNA, 26 bp, Homo sapiens
actccctacttgggtggcagtggtgg

SEQ ID NO: 47347 - DNA, 26 bp, Homo sapiens
ctccctacttgggtggcagtggtggt

SEQ ID NO: 47348 - DNA, 26 bp, Homo sapiens
tccctacttgggtggcagtggtggtg

SEQ ID NO: 47349 - DNA, 26 bp, Homo sapiens
ccctacttgggtggcagtggtggtgg

SEQ ID NO: 47350 - DNA, 26 bp, Homo sapiens
cctacttgggtggcagtggtggtggg

SEQ ID NO: 47351 - DNA, 26 bp, Homo sapiens
ctacttgggtggcagtggtggtgggg

SEQ ID NO: 47352 - DNA, 26 bp, Homo sapiens
tacttgggtggcagtggtggtggggt

SEQ ID NO: 47353 - DNA, 26 bp, Homo sapiens
acttgggtggcagtggtggtggggtc

SEQ ID NO: 47354 - DNA, 26 bp, Homo sapiens
cttgggtggcagtggtggtggggtct

SEQ ID NO: 47355 - DNA, 26 bp, Homo sapiens
ttgggtggcagtggtggtggggtctc

SEQ ID NO: 47356 - DNA, 26 bp, Homo sapiens
tgggtggcagtggtggtggggtctcc

SEQ ID NO: 47357 - DNA, 26 bp, Homo sapiens
gggtggcagtggtggtggggtctcct

SEQ ID NO: 47358 - DNA, 26 bp, Homo sapiens
ggtggcagtggtggtggggtctcctc

SEQ ID NO: 47359 - DNA, 26 bp, Homo sapiens
gtggcagtggtggtggggtctcctcc

SEQ ID NO: 47360 - DNA, 26 bp, Homo sapiens
tggcagtggtggtggggtctcctcca

SEQ ID NO: 47361 - DNA, 26 bp, Homo sapiens
ggcagtggtggtggggtctcctccac

SEQ ID NO: 47362 - DNA, 26 bp, Homo sapiens
gcagtggtggtggggtctcctccacc

SEQ ID NO: 47363 - DNA, 26 bp, Homo sapiens
cagtggtggtggggtctcctccaccg

SEQ ID NO: 47364 - DNA, 26 bp, Homo sapiens
agtggtggtggggtctcctccaccgt

SEQ ID NO: 47365 - DNA, 26 bp, Homo sapiens
gtggtggtggggtctcctccaccgtc

SEQ ID NO: 47366 - DNA, 26 bp, Homo sapiens
tggtggtggggtctcctccaccgtca

SEQ ID NO: 47367 - DNA, 26 bp, Homo sapiens
ggtggtggggtctcctccaccgtcac

SEQ ID NO: 47368 - DNA, 26 bp, Homo sapiens
gtggtggggtctcctccaccgtcacc

SEQ ID NO: 47369 - DNA, 26 bp, Homo sapiens
tggtggggtctcctccaccgtcacca

SEQ ID NO: 47370 - DNA, 26 bp, Homo sapiens
ggtggggtctcctccaccgtcaccac

SEQ ID NO: 47371 - DNA, 26 bp, Homo sapiens
gtggggtctcctccaccgtcaccacc

SEQ ID NO: 47372 - DNA, 26 bp, Homo sapiens
tggggtctcctccaccgtcaccacct

SEQ ID NO: 47373 - DNA, 26 bp, Homo sapiens
ggggtctcctccaccgtcaccacctc

SEQ ID NO: 47374 - DNA, 26 bp, Homo sapiens
gggtctcctccaccgtcaccacctcc

SEQ ID NO: 47375 - DNA, 26 bp, Homo sapiens
ggtctcctccaccgtcaccacctccc

SEQ ID NO: 47376 - DNA, 26 bp, Homo sapiens
gtctcctccaccgtcaccacctccca

SEQ ID NO: 47377 - DNA, 26 bp, Homo sapiens
tctcctccaccgtcaccacctcccac

SEQ ID NO: 47378 - DNA, 26 bp, Homo sapiens
ctcctccaccgtcaccacctcccacc

SEQ ID NO: 47379 - DNA, 26 bp, Homo sapiens
tcctccaccgtcaccacctcccaccc

SEQ ID NO: 47380 - DNA, 26 bp, Homo sapiens
cctccaccgtcaccacctcccacccc

SEQ ID NO: 47381 - DNA, 26 bp, Homo sapiens
ctccaccgtcaccacctcccaccccc

SEQ ID NO: 47382 - DNA, 26 bp, Homo sapiens
tccaccgtcaccacctcccacccccc

SEQ ID NO: 47383 - DNA, 26 bp, Homo sapiens
ccaccgtcaccacctcccaccccccc

SEQ ID NO: 47384 - DNA, 26 bp, Homo sapiens
caccgtcaccacctcccaccccccca

SEQ ID NO: 47385 - DNA, 26 bp, Homo sapiens
accgtcaccacctcccacccccccat

SEQ ID NO: 47386 - DNA, 26 bp, Homo sapiens
ccgtcaccacctcccacccccccatc

SEQ ID NO: 47387 - DNA, 26 bp, Homo sapiens
cgtcaccacctcccacccccccatcc

SEQ ID NO: 47388 - DNA, 26 bp, Homo sapiens
gtcaccacctcccacccccccatcct

SEQ ID NO: 47389 - DNA, 26 bp, Homo sapiens
tcaccacctcccacccccccatcctt

SEQ ID NO: 47390 - DNA, 26 bp, Homo sapiens
caccacctcccacccccccatccttc

SEQ ID NO: 47391 - DNA, 26 bp, Homo sapiens
accacctcccacccccccatccttca

SEQ ID NO: 47392 - DNA, 26 bp, Homo sapiens
ccacctcccacccccccatccttcag

SEQ ID NO: 47393 - DNA, 26 bp, Homo sapiens
cacctcccacccccccatccttcagc

SEQ ID NO: 47394 - DNA, 26 bp, Homo sapiens
acctcccacccccccatccttcagct

SEQ ID NO: 47395 - DNA, 26 bp, Homo sapiens
cctcccacccccccatccttcagctg

SEQ ID NO: 47396 - DNA, 26 bp, Homo sapiens
ctcccacccccccatccttcagctgc

SEQ ID NO: 47397 - DNA, 26 bp, Homo sapiens
tcccacccccccatccttcagctgct

SEQ ID NO: 47398 - DNA, 26 bp, Homo sapiens
cccacccccccatccttcagctgctg

SEQ ID NO: 47399 - DNA, 26 bp, Homo sapiens
ccacccccccatccttcagctgctgt

SEQ ID NO: 47400 - DNA, 26 bp, Homo sapiens
cacccccccatccttcagctgctgtc

SEQ ID NO: 47401 - DNA, 26 bp, Homo sapiens
acccccccatccttcagctgctgtca

SEQ ID NO: 47402 - DNA, 26 bp, Homo sapiens
cccccccatccttcagctgctgtcag

SEQ ID NO: 47403 - DNA, 26 bp, Homo sapiens
ccccccatccttcagctgctgtcagt

SEQ ID NO: 47404 - DNA, 26 bp, Homo sapiens
cccccatccttcagctgctgtcagtt

SEQ ID NO: 47405 - DNA, 26 bp, Homo sapiens
ccccatccttcagctgctgtcagttt

SEQ ID NO: 47406 - DNA, 26 bp, Homo sapiens
cccatccttcagctgctgtcagtttt

SEQ ID NO: 47407 - DNA, 26 bp, Homo sapiens
ccatccttcagctgctgtcagtttta

SEQ ID NO: 47408 - DNA, 26 bp, Homo sapiens
catccttcagctgctgtcagttttac

SEQ ID NO: 47409 - DNA, 26 bp, Homo sapiens
atccttcagctgctgtcagttttact

SEQ ID NO: 47410 - DNA, 26 bp, Homo sapiens
tccttcagctgctgtcagttttactt

SEQ ID NO: 47411 - DNA, 26 bp, Homo sapiens
ccttcagctgctgtcagttttacttt

SEQ ID NO: 47412 - DNA, 26 bp, Homo sapiens
cttcagctgctgtcagttttactttt

SEQ ID NO: 47413 - DNA, 26 bp, Homo sapiens
ttcagctgctgtcagttttactttta

SEQ ID NO: 47414 - DNA, 26 bp, Homo sapiens
tcagctgctgtcagttttacttttaa

SEQ ID NO: 47415 - DNA, 26 bp, Homo sapiens
cagctgctgtcagttttacttttaac

SEQ ID NO: 47416 - DNA, 26 bp, Homo sapiens
agctgctgtcagttttacttttaact

SEQ ID NO: 47417 - DNA, 26 bp, Homo sapiens
gctgctgtcagttttacttttaactt

SEQ ID NO: 47418 - DNA, 26 bp, Homo sapiens
ctgctgtcagttttacttttaacttt

SEQ ID NO: 47419 - DNA, 26 bp, Homo sapiens
tgctgtcagttttacttttaactttc

SEQ ID NO: 47420 - DNA, 26 bp, Homo sapiens
gctgtcagttttacttttaactttca

SEQ ID NO: 47421 - DNA, 26 bp, Homo sapiens
ctgtcagttttacttttaactttcac

SEQ ID NO: 47422 - DNA, 26 bp, Homo sapiens
tgtcagttttacttttaactttcaca

SEQ ID NO: 47423 - DNA, 26 bp, Homo sapiens
gtcagttttacttttaactttcacat

SEQ ID NO: 47424 - DNA, 26 bp, Homo sapiens
tcagttttacttttaactttcacata

SEQ ID NO: 47425 - DNA, 26 bp, Homo sapiens
cagttttacttttaactttcacataa

SEQ ID NO: 47426 - DNA, 26 bp, Homo sapiens
agttttacttttaactttcacataac

SEQ ID NO: 47427 - DNA, 26 bp, Homo sapiens
gttttacttttaactttcacataact

SEQ ID NO: 47428 - DNA, 26 bp, Homo sapiens
ttttacttttaactttcacataactt

SEQ ID NO: 47429 - DNA, 26 bp, Homo sapiens
tttacttttaactttcacataacttt

SEQ ID NO: 47430 - DNA, 26 bp, Homo sapiens
ttacttttaactttcacataactttt

SEQ ID NO: 47431 - DNA, 26 bp, Homo sapiens
tacttttaactttcacataacttttc

SEQ ID NO: 47432 - DNA, 26 bp, Homo sapiens
acttttaactttcacataacttttct

SEQ ID NO: 47433 - DNA, 26 bp, Homo sapiens
cttttaactttcacataacttttctg

SEQ ID NO: 47434 - DNA, 26 bp, Homo sapiens
ttttaactttcacataacttttctga

SEQ ID NO: 47435 - DNA, 26 bp, Homo sapiens
tttaactttcacataacttttctgag

SEQ ID NO: 47436 - DNA, 26 bp, Homo sapiens
ttaactttcacataacttttctgaga

SEQ ID NO: 47437 - DNA, 26 bp, Homo sapiens
taactttcacataacttttctgagac

SEQ ID NO: 47438 - DNA, 26 bp, Homo sapiens
aactttcacataacttttctgagact

SEQ ID NO: 47439 - DNA, 26 bp, Homo sapiens
actttcacataacttttctgagactt

SEQ ID NO: 47440 - DNA, 26 bp, Homo sapiens
ctttcacataacttttctgagactta

SEQ ID NO: 47441 - DNA, 26 bp, Homo sapiens
tttcacataacttttctgagacttat

SEQ ID NO: 47442 - DNA, 26 bp, Homo sapiens
ttcacataacttttctgagacttatt

SEQ ID NO: 47443 - DNA, 26 bp, Homo sapiens
tcacataacttttctgagacttatta

SEQ ID NO: 47444 - DNA, 26 bp, Homo sapiens
cacataacttttctgagacttattaa

SEQ ID NO: 47445 - DNA, 26 bp, Homo sapiens
acataacttttctgagacttattaac

SEQ ID NO: 47446 - DNA, 26 bp, Homo sapiens
cataacttttctgagacttattaacc

SEQ ID NO: 47447 - DNA, 26 bp, Homo sapiens
ataacttttctgagacttattaacca

SEQ ID NO: 47448 - DNA, 26 bp, Homo sapiens
taacttttctgagacttattaaccac

SEQ ID NO: 47449 - DNA, 26 bp, Homo sapiens
aacttttctgagacttattaaccaca

SEQ ID NO: 47450 - DNA, 26 bp, Homo sapiens
acttttctgagacttattaaccacaa

SEQ ID NO: 47451 - DNA, 26 bp, Homo sapiens
cttttctgagacttattaaccacaag

SEQ ID NO: 47452 - DNA, 26 bp, Homo sapiens
ttttctgagacttattaaccacaagt

SEQ ID NO: 47453 - DNA, 26 bp, Homo sapiens
tttctgagacttattaaccacaagtg

SEQ ID NO: 47454 - DNA, 26 bp, Homo sapiens
ttctgagacttattaaccacaagtgt

SEQ ID NO: 47455 - DNA, 26 bp, Homo sapiens
tctgagacttattaaccacaagtgtt

SEQ ID NO: 47456 - DNA, 26 bp, Homo sapiens
ctgagacttattaaccacaagtgttt

SEQ ID NO: 47457 - DNA, 26 bp, Homo sapiens
tgagacttattaaccacaagtgtttc

SEQ ID NO: 47458 - DNA, 26 bp, Homo sapiens
gagacttattaaccacaagtgtttcc

SEQ ID NO: 47459 - DNA, 26 bp, Homo sapiens
agacttattaaccacaagtgtttcct

SEQ ID NO: 47460 - DNA, 26 bp, Homo sapiens
gacttattaaccacaagtgtttcctt

SEQ ID NO: 47461 - DNA, 26 bp, Homo sapiens
acttattaaccacaagtgtttccttg

SEQ ID NO: 47462 - DNA, 26 bp, Homo sapiens
cttattaaccacaagtgtttccttgg

SEQ ID NO: 47463 - DNA, 26 bp, Homo sapiens
ttattaaccacaagtgtttccttggc

SEQ ID NO: 47464 - DNA, 26 bp, Homo sapiens
tattaaccacaagtgtttccttggcc

SEQ ID NO: 47465 - DNA, 26 bp, Homo sapiens
attaaccacaagtgtttccttggcca

SEQ ID NO: 47466 - DNA, 26 bp, Homo sapiens
ttaaccacaagtgtttccttggccaa

SEQ ID NO: 47467 - DNA, 26 bp, Homo sapiens
taaccacaagtgtttccttggccaag

SEQ ID NO: 47468 - DNA, 26 bp, Homo sapiens
aaccacaagtgtttccttggccaagt

SEQ ID NO: 47469 - DNA, 26 bp, Homo sapiens
accacaagtgtttccttggccaagtg

SEQ ID NO: 47470 - DNA, 26 bp, Homo sapiens
ccacaagtgtttccttggccaagtgg

SEQ ID NO: 47471 - DNA, 26 bp, Homo sapiens
cacaagtgtttccttggccaagtggg

SEQ ID NO: 47472 - DNA, 26 bp, Homo sapiens
acaagtgtttccttggccaagtggga

SEQ ID NO: 47473 - DNA, 26 bp, Homo sapiens
caagtgtttccttggccaagtgggag

SEQ ID NO: 47474 - DNA, 26 bp, Homo sapiens
aagtgtttccttggccaagtgggaga

SEQ ID NO: 47475 - DNA, 26 bp, Homo sapiens
agtgtttccttggccaagtgggagag

SEQ ID NO: 47476 - DNA, 26 bp, Homo sapiens
gtgtttccttggccaagtgggagaga

SEQ ID NO: 47477 - DNA, 26 bp, Homo sapiens
tgtttccttggccaagtgggagagac

SEQ ID NO: 47478 - DNA, 26 bp, Homo sapiens
gtttccttggccaagtgggagagacc

SEQ ID NO: 47479 - DNA, 26 bp, Homo sapiens
tttccttggccaagtgggagagacca

SEQ ID NO: 47480 - DNA, 26 bp, Homo sapiens
ttccttggccaagtgggagagaccag

SEQ ID NO: 47481 - DNA, 26 bp, Homo sapiens
tccttggccaagtgggagagaccagc

SEQ ID NO: 47482 - DNA, 26 bp, Homo sapiens
ccttggccaagtgggagagaccagca

SEQ ID NO: 47483 - DNA, 26 bp, Homo sapiens
cttggccaagtgggagagaccagcag

SEQ ID NO: 47484 - DNA, 26 bp, Homo sapiens
ttggccaagtgggagagaccagcagg

SEQ ID NO: 47485 - DNA, 26 bp, Homo sapiens
tggccaagtgggagagaccagcaggt

SEQ ID NO: 47486 - DNA, 26 bp, Homo sapiens
ggccaagtgggagagaccagcaggta

SEQ ID NO: 47487 - DNA, 26 bp, Homo sapiens
gccaagtgggagagaccagcaggtat

SEQ ID NO: 47488 - DNA, 26 bp, Homo sapiens
ccaagtgggagagaccagcaggtatc

SEQ ID NO: 47489 - DNA, 26 bp, Homo sapiens
caagtgggagagaccagcaggtatct

SEQ ID NO: 47490 - DNA, 26 bp, Homo sapiens
aagtgggagagaccagcaggtatctg

SEQ ID NO: 47491 - DNA, 26 bp, Homo sapiens
agtgggagagaccagcaggtatctgt

SEQ ID NO: 47492 - DNA, 26 bp, Homo sapiens
gtgggagagaccagcaggtatctgtg

SEQ ID NO: 47493 - DNA, 26 bp, Homo sapiens
tgggagagaccagcaggtatctgtga

SEQ ID NO: 47494 - DNA, 26 bp, Homo sapiens
gggagagaccagcaggtatctgtgaa

SEQ ID NO: 47495 - DNA, 26 bp, Homo sapiens
ggagagaccagcaggtatctgtgaag

SEQ ID NO: 47496 - DNA, 26 bp, Homo sapiens
gagagaccagcaggtatctgtgaagg

SEQ ID NO: 47497 - DNA, 26 bp, Homo sapiens
agagaccagcaggtatctgtgaaggg

SEQ ID NO: 47498 - DNA, 26 bp, Homo sapiens
gagaccagcaggtatctgtgaagggc

SEQ ID NO: 47499 - DNA, 26 bp, Homo sapiens
agaccagcaggtatctgtgaagggcc

SEQ ID NO: 47500 - DNA, 26 bp, Homo sapiens
gaccagcaggtatctgtgaagggcct

SEQ ID NO: 47501 - DNA, 26 bp, Homo sapiens
accagcaggtatctgtgaagggcctt

SEQ ID NO: 47502 - DNA, 26 bp, Homo sapiens
ccagcaggtatctgtgaagggccttg

SEQ ID NO: 47503 - DNA, 26 bp, Homo sapiens
cagcaggtatctgtgaagggccttgt

SEQ ID NO: 47504 - DNA, 26 bp, Homo sapiens
agcaggtatctgtgaagggccttgta

SEQ ID NO: 47505 - DNA, 26 bp, Homo sapiens
gcaggtatctgtgaagggccttgtaa

SEQ ID NO: 47506 - DNA, 26 bp, Homo sapiens
caggtatctgtgaagggccttgtaag

SEQ ID NO: 47507 - DNA, 26 bp, Homo sapiens
aggtatctgtgaagggccttgtaaga

SEQ ID NO: 47508 - DNA, 26 bp, Homo sapiens
ggtatctgtgaagggccttgtaagaa

SEQ ID NO: 47509 - DNA, 26 bp, Homo sapiens
gtatctgtgaagggccttgtaagaaa

SEQ ID NO: 47510 - DNA, 26 bp, Homo sapiens
tatctgtgaagggccttgtaagaaag

SEQ ID NO: 47511 - DNA, 26 bp, Homo sapiens
atctgtgaagggccttgtaagaaagg

SEQ ID NO: 47512 - DNA, 26 bp, Homo sapiens
tctgtgaagggccttgtaagaaagga

SEQ ID NO: 47513 - DNA, 26 bp, Homo sapiens
ctgtgaagggccttgtaagaaaggaa

SEQ ID NO: 47514 - DNA, 26 bp, Homo sapiens
tgtgaagggccttgtaagaaaggaat

SEQ ID NO: 47515 - DNA, 26 bp, Homo sapiens
gtgaagggccttgtaagaaaggaatt

SEQ ID NO: 47516 - DNA, 26 bp, Homo sapiens
tgaagggccttgtaagaaaggaatta

SEQ ID NO: 47517 - DNA, 26 bp, Homo sapiens
gaagggccttgtaagaaaggaattat

SEQ ID NO: 47518 - DNA, 26 bp, Homo sapiens
aagggccttgtaagaaaggaattatc

SEQ ID NO: 47519 - DNA, 26 bp, Homo sapiens
agggccttgtaagaaaggaattatcg

SEQ ID NO: 47520 - DNA, 26 bp, Homo sapiens
gggccttgtaagaaaggaattatcgc

SEQ ID NO: 47521 - DNA, 26 bp, Homo sapiens
ggccttgtaagaaaggaattatcgcc

SEQ ID NO: 47522 - DNA, 26 bp, Homo sapiens
gccttgtaagaaaggaattatcgccc

SEQ ID NO: 47523 - DNA, 26 bp, Homo sapiens
ccttgtaagaaaggaattatcgccca

SEQ ID NO: 47524 - DNA, 26 bp, Homo sapiens
cttgtaagaaaggaattatcgcccac

SEQ ID NO: 47525 - DNA, 26 bp, Homo sapiens
ttgtaagaaaggaattatcgcccaca

SEQ ID NO: 47526 - DNA, 26 bp, Homo sapiens
tgtaagaaaggaattatcgcccacat

SEQ ID NO: 47527 - DNA, 26 bp, Homo sapiens
gtaagaaaggaattatcgcccacatt

SEQ ID NO: 47528 - DNA, 26 bp, Homo sapiens
taagaaaggaattatcgcccacattt

SEQ ID NO: 47529 - DNA, 26 bp, Homo sapiens
aagaaaggaattatcgcccacatttt

SEQ ID NO: 47530 - DNA, 26 bp, Homo sapiens
agaaaggaattatcgcccacatttta

SEQ ID NO: 47531 - DNA, 26 bp, Homo sapiens
gaaaggaattatcgcccacattttac

SEQ ID NO: 47532 - DNA, 26 bp, Homo sapiens
aaaggaattatcgcccacattttacc

SEQ ID NO: 47533 - DNA, 26 bp, Homo sapiens
aaggaattatcgcccacattttaccg

SEQ ID NO: 47534 - DNA, 26 bp, Homo sapiens
aggaattatcgcccacattttaccgg

SEQ ID NO: 47535 - DNA, 26 bp, Homo sapiens
ggaattatcgcccacattttaccggg

SEQ ID NO: 47536 - DNA, 26 bp, Homo sapiens
gaattatcgcccacattttaccgggt

SEQ ID NO: 47537 - DNA, 26 bp, Homo sapiens
aattatcgcccacattttaccgggtt

SEQ ID NO: 47538 - DNA, 26 bp, Homo sapiens
attatcgcccacattttaccgggttg

SEQ ID NO: 47539 - DNA, 26 bp, Homo sapiens
ttatcgcccacattttaccgggttgg

SEQ ID NO: 47540 - DNA, 26 bp, Homo sapiens
tatcgcccacattttaccgggttggg

SEQ ID NO: 47541 - DNA, 26 bp, Homo sapiens
atcgcccacattttaccgggttgggg

SEQ ID NO: 47542 - DNA, 26 bp, Homo sapiens
tcgcccacattttaccgggttgggga

SEQ ID NO: 47543 - DNA, 26 bp, Homo sapiens
cgcccacattttaccgggttggggag

SEQ ID NO: 47544 - DNA, 26 bp, Homo sapiens
gcccacattttaccgggttggggagg

SEQ ID NO: 47545 - DNA, 26 bp, Homo sapiens
cccacattttaccgggttggggaggg

SEQ ID NO: 47546 - DNA, 26 bp, Homo sapiens
ccacattttaccgggttggggagggg

SEQ ID NO: 47547 - DNA, 26 bp, Homo sapiens
cacattttaccgggttggggaggggc

SEQ ID NO: 47548 - DNA, 26 bp, Homo sapiens
acattttaccgggttggggaggggct

SEQ ID NO: 47549 - DNA, 26 bp, Homo sapiens
cattttaccgggttggggaggggctg

SEQ ID NO: 47550 - DNA, 26 bp, Homo sapiens
attttaccgggttggggaggggctgc

SEQ ID NO: 47551 - DNA, 26 bp, Homo sapiens
ttttaccgggttggggaggggctgct

SEQ ID NO: 47552 - DNA, 26 bp, Homo sapiens
tttaccgggttggggaggggctgctg

SEQ ID NO: 47553 - DNA, 26 bp, Homo sapiens
ttaccgggttggggaggggctgctgc

SEQ ID NO: 47554 - DNA, 26 bp, Homo sapiens
taccgggttggggaggggctgctgcg

SEQ ID NO: 47555 - DNA, 26 bp, Homo sapiens
accgggttggggaggggctgctgcgg

SEQ ID NO: 47556 - DNA, 26 bp, Homo sapiens
ccgggttggggaggggctgctgcggt

SEQ ID NO: 47557 - DNA, 26 bp, Homo sapiens
cgggttggggaggggctgctgcggtg

SEQ ID NO: 47558 - DNA, 26 bp, Homo sapiens
gggttggggaggggctgctgcggtgc

SEQ ID NO: 47559 - DNA, 26 bp, Homo sapiens
ggttggggaggggctgctgcggtgca

SEQ ID NO: 47560 - DNA, 26 bp, Homo sapiens
gttggggaggggctgctgcggtgcag

SEQ ID NO: 47561 - DNA, 26 bp, Homo sapiens
ttggggaggggctgctgcggtgcagc

SEQ ID NO: 47562 - DNA, 26 bp, Homo sapiens
tggggaggggctgctgcggtgcagca

SEQ ID NO: 47563 - DNA, 26 bp, Homo sapiens
ggggaggggctgctgcggtgcagcaa

SEQ ID NO: 47564 - DNA, 26 bp, Homo sapiens
gggaggggctgctgcggtgcagcaag

SEQ ID NO: 47565 - DNA, 26 bp, Homo sapiens
ggaggggctgctgcggtgcagcaaga

SEQ ID NO: 47566 - DNA, 26 bp, Homo sapiens
gaggggctgctgcggtgcagcaagat

SEQ ID NO: 47567 - DNA, 26 bp, Homo sapiens
aggggctgctgcggtgcagcaagatt

SEQ ID NO: 47568 - DNA, 26 bp, Homo sapiens
ggggctgctgcggtgcagcaagatta

SEQ ID NO: 47569 - DNA, 26 bp, Homo sapiens
gggctgctgcggtgcagcaagattaa

SEQ ID NO: 47570 - DNA, 26 bp, Homo sapiens
ggctgctgcggtgcagcaagattaag

SEQ ID NO: 47571 - DNA, 26 bp, Homo sapiens
gctgctgcggtgcagcaagattaaga

SEQ ID NO: 47572 - DNA, 26 bp, Homo sapiens
ctgctgcggtgcagcaagattaagag

SEQ ID NO: 47573 - DNA, 26 bp, Homo sapiens
tgctgcggtgcagcaagattaagagg

SEQ ID NO: 47574 - DNA, 26 bp, Homo sapiens
gctgcggtgcagcaagattaagagga

SEQ ID NO: 47575 - DNA, 26 bp, Homo sapiens
ctgcggtgcagcaagattaagaggag

SEQ ID NO: 47576 - DNA, 26 bp, Homo sapiens
tgcggtgcagcaagattaagaggagg

SEQ ID NO: 47577 - DNA, 26 bp, Homo sapiens
gcggtgcagcaagattaagaggaggc

SEQ ID NO: 47578 - DNA, 26 bp, Homo sapiens
cggtgcagcaagattaagaggaggca

SEQ ID NO: 47579 - DNA, 26 bp, Homo sapiens
ggtgcagcaagattaagaggaggcag

SEQ ID NO: 47580 - DNA, 26 bp, Homo sapiens
gtgcagcaagattaagaggaggcagc

SEQ ID NO: 47581 - DNA, 26 bp, Homo sapiens
tgcagcaagattaagaggaggcagcc

SEQ ID NO: 47582 - DNA, 26 bp, Homo sapiens
gcagcaagattaagaggaggcagccc

SEQ ID NO: 47583 - DNA, 26 bp, Homo sapiens
cagcaagattaagaggaggcagccca

SEQ ID NO: 47584 - DNA, 26 bp, Homo sapiens
agcaagattaagaggaggcagcccag

SEQ ID NO: 47585 - DNA, 26 bp, Homo sapiens
gcaagattaagaggaggcagcccagg

SEQ ID NO: 47586 - DNA, 26 bp, Homo sapiens
caagattaagaggaggcagcccaggt

SEQ ID NO: 47587 - DNA, 26 bp, Homo sapiens
aagattaagaggaggcagcccaggtg

SEQ ID NO: 47588 - DNA, 26 bp, Homo sapiens
agattaagaggaggcagcccaggtgc

SEQ ID NO: 47589 - DNA, 26 bp, Homo sapiens
gattaagaggaggcagcccaggtgca

SEQ ID NO: 47590 - DNA, 26 bp, Homo sapiens
attaagaggaggcagcccaggtgcac

SEQ ID NO: 47591 - DNA, 26 bp, Homo sapiens
ttaagaggaggcagcccaggtgcact

SEQ ID NO: 47592 - DNA, 26 bp, Homo sapiens
taagaggaggcagcccaggtgcactt

SEQ ID NO: 47593 - DNA, 26 bp, Homo sapiens
aagaggaggcagcccaggtgcacttg

SEQ ID NO: 47594 - DNA, 26 bp, Homo sapiens
agaggaggcagcccaggtgcacttgg

SEQ ID NO: 47595 - DNA, 26 bp, Homo sapiens
gaggaggcagcccaggtgcacttgga

SEQ ID NO: 47596 - DNA, 26 bp, Homo sapiens
aggaggcagcccaggtgcacttggag

SEQ ID NO: 47597 - DNA, 26 bp, Homo sapiens
ggaggcagcccaggtgcacttggagg

SEQ ID NO: 47598 - DNA, 26 bp, Homo sapiens
gaggcagcccaggtgcacttggaggg

SEQ ID NO: 47599 - DNA, 26 bp, Homo sapiens
aggcagcccaggtgcacttggagggg

SEQ ID NO: 47600 - DNA, 26 bp, Homo sapiens
ggcagcccaggtgcacttggagggga

SEQ ID NO: 47601 - DNA, 26 bp, Homo sapiens
gcagcccaggtgcacttggaggggaa

SEQ ID NO: 47602 - DNA, 26 bp, Homo sapiens
cagcccaggtgcacttggaggggaat

SEQ ID NO: 47603 - DNA, 26 bp, Homo sapiens
agcccaggtgcacttggaggggaatt

SEQ ID NO: 47604 - DNA, 26 bp, Homo sapiens
gcccaggtgcacttggaggggaattg

SEQ ID NO: 47605 - DNA, 26 bp, Homo sapiens
cccaggtgcacttggaggggaattga

SEQ ID NO: 47606 - DNA, 26 bp, Homo sapiens
ccaggtgcacttggaggggaattgaa

SEQ ID NO: 47607 - DNA, 26 bp, Homo sapiens
caggtgcacttggaggggaattgaac

SEQ ID NO: 47608 - DNA, 26 bp, Homo sapiens
aggtgcacttggaggggaattgaacc

SEQ ID NO: 47609 - DNA, 26 bp, Homo sapiens
ggtgcacttggaggggaattgaacct

SEQ ID NO: 47610 - DNA, 26 bp, Homo sapiens
gtgcacttggaggggaattgaacctg

SEQ ID NO: 47611 - DNA, 26 bp, Homo sapiens
tgcacttggaggggaattgaacctgg

SEQ ID NO: 47612 - DNA, 26 bp, Homo sapiens
gcacttggaggggaattgaacctggt

SEQ ID NO: 47613 - DNA, 26 bp, Homo sapiens
cacttggaggggaattgaacctggtt

SEQ ID NO: 47614 - DNA, 26 bp, Homo sapiens
acttggaggggaattgaacctggttc

SEQ ID NO: 47615 - DNA, 26 bp, Homo sapiens
cttggaggggaattgaacctggttct

SEQ ID NO: 47616 - DNA, 26 bp, Homo sapiens
ttggaggggaattgaacctggttctt

SEQ ID NO: 47617 - DNA, 26 bp, Homo sapiens
tggaggggaattgaacctggttcttg

SEQ ID NO: 47618 - DNA, 26 bp, Homo sapiens
ggaggggaattgaacctggttcttga

SEQ ID NO: 47619 - DNA, 26 bp, Homo sapiens
gaggggaattgaacctggttcttgaa

SEQ ID NO: 47620 - DNA, 26 bp, Homo sapiens
aggggaattgaacctggttcttgaag

SEQ ID NO: 47621 - DNA, 26 bp, Homo sapiens
ggggaattgaacctggttcttgaagc

SEQ ID NO: 47622 - DNA, 26 bp, Homo sapiens
gggaattgaacctggttcttgaagct

SEQ ID NO: 47623 - DNA, 26 bp, Homo sapiens
ggaattgaacctggttcttgaagctg

SEQ ID NO: 47624 - DNA, 26 bp, Homo sapiens
gaattgaacctggttcttgaagctgc

SEQ ID NO: 47625 - DNA, 26 bp, Homo sapiens
aattgaacctggttcttgaagctgca

SEQ ID NO: 47626 - DNA, 26 bp, Homo sapiens
attgaacctggttcttgaagctgcag

SEQ ID NO: 47627 - DNA, 26 bp, Homo sapiens
ttgaacctggttcttgaagctgcaga

SEQ ID NO: 47628 - DNA, 26 bp, Homo sapiens
tgaacctggttcttgaagctgcagac

SEQ ID NO: 47629 - DNA, 26 bp, Homo sapiens
gaacctggttcttgaagctgcagaca

SEQ ID NO: 47630 - DNA, 26 bp, Homo sapiens
aacctggttcttgaagctgcagacac

SEQ ID NO: 47631 - DNA, 26 bp, Homo sapiens
acctggttcttgaagctgcagacacc

SEQ ID NO: 47632 - DNA, 26 bp, Homo sapiens
cctggttcttgaagctgcagacacca

SEQ ID NO: 47633 - DNA, 26 bp, Homo sapiens
ctggttcttgaagctgcagacaccaa

SEQ ID NO: 47634 - DNA, 26 bp, Homo sapiens
tggttcttgaagctgcagacaccaag

SEQ ID NO: 47635 - DNA, 26 bp, Homo sapiens
ggttcttgaagctgcagacaccaagt

SEQ ID NO: 47636 - DNA, 26 bp, Homo sapiens
gttcttgaagctgcagacaccaagta

SEQ ID NO: 47637 - DNA, 26 bp, Homo sapiens
ttcttgaagctgcagacaccaagtaa

SEQ ID NO: 47638 - DNA, 26 bp, Homo sapiens
tcttgaagctgcagacaccaagtaat

SEQ ID NO: 47639 - DNA, 26 bp, Homo sapiens
cttgaagctgcagacaccaagtaatc

SEQ ID NO: 47640 - DNA, 26 bp, Homo sapiens
ttgaagctgcagacaccaagtaatca

SEQ ID NO: 47641 - DNA, 26 bp, Homo sapiens
tgaagctgcagacaccaagtaatcag

SEQ ID NO: 47642 - DNA, 26 bp, Homo sapiens
gaagctgcagacaccaagtaatcagc

SEQ ID NO: 47643 - DNA, 26 bp, Homo sapiens
aagctgcagacaccaagtaatcagcc

SEQ ID NO: 47644 - DNA, 26 bp, Homo sapiens
agctgcagacaccaagtaatcagccc

SEQ ID NO: 47645 - DNA, 26 bp, Homo sapiens
gctgcagacaccaagtaatcagccca

SEQ ID NO: 47646 - DNA, 26 bp, Homo sapiens
ctgcagacaccaagtaatcagcccag

SEQ ID NO: 47647 - DNA, 26 bp, Homo sapiens
tgcagacaccaagtaatcagcccaga

SEQ ID NO: 47648 - DNA, 26 bp, Homo sapiens
gcagacaccaagtaatcagcccagat

SEQ ID NO: 47649 - DNA, 26 bp, Homo sapiens
cagacaccaagtaatcagcccagatg

SEQ ID NO: 47650 - DNA, 26 bp, Homo sapiens
agacaccaagtaatcagcccagatgc

SEQ ID NO: 47651 - DNA, 26 bp, Homo sapiens
gacaccaagtaatcagcccagatgcc

SEQ ID NO: 47652 - DNA, 26 bp, Homo sapiens
acaccaagtaatcagcccagatgcct

SEQ ID NO: 47653 - DNA, 26 bp, Homo sapiens
caccaagtaatcagcccagatgcctc

SEQ ID NO: 47654 - DNA, 26 bp, Homo sapiens
accaagtaatcagcccagatgcctcg

SEQ ID NO: 47655 - DNA, 26 bp, Homo sapiens
ccaagtaatcagcccagatgcctcgc

SEQ ID NO: 47656 - DNA, 26 bp, Homo sapiens
caagtaatcagcccagatgcctcgca

SEQ ID NO: 47657 - DNA, 26 bp, Homo sapiens
aagtaatcagcccagatgcctcgcat

SEQ ID NO: 47658 - DNA, 26 bp, Homo sapiens
agtaatcagcccagatgcctcgcatc

SEQ ID NO: 47659 - DNA, 26 bp, Homo sapiens
gtaatcagcccagatgcctcgcatcg

SEQ ID NO: 47660 - DNA, 26 bp, Homo sapiens
taatcagcccagatgcctcgcatcgt

SEQ ID NO: 47661 - DNA, 26 bp, Homo sapiens
aatcagcccagatgcctcgcatcgtc

SEQ ID NO: 47662 - DNA, 26 bp, Homo sapiens
atcagcccagatgcctcgcatcgtct

SEQ ID NO: 47663 - DNA, 26 bp, Homo sapiens
tcagcccagatgcctcgcatcgtctt

SEQ ID NO: 47664 - DNA, 26 bp, Homo sapiens
cagcccagatgcctcgcatcgtcttt

SEQ ID NO: 47665 - DNA, 26 bp, Homo sapiens
tttttttttttttttttttttttttt

SEQ ID NO: 47666 - DNA, 26 bp, Homo sapiens
tttttttttttttttttttttttttt

SEQ ID NO: 47667 - DNA, 26 bp, Homo sapiens
tttttttttttttttttttttttttt

SEQ ID NO: 47668 - DNA, 26 bp, Homo sapiens
tttttttttttttttttttttttttt

SEQ ID NO: 47669 - DNA, 26 bp, Homo sapiens
tttttttttttttttttttttttttt

SEQ ID NO: 47670 - DNA, 26 bp, Homo sapiens
ttttttttttttttttttttttttta

SEQ ID NO: 47671 - DNA, 26 bp, Homo sapiens
ttttttttttttttttttttttttaa

SEQ ID NO: 47672 - DNA, 26 bp, Homo sapiens
tttttttttttttttttttttttaac

SEQ ID NO: 47673 - DNA, 26 bp, Homo sapiens
ttttttttttttttttttttttaaca

SEQ ID NO: 47674 - DNA, 26 bp, Homo sapiens
tttttttttttttttttttttaacag

SEQ ID NO: 47675 - DNA, 26 bp, Homo sapiens
ttttttttttttttttttttaacagg

SEQ ID NO: 47676 - DNA, 26 bp, Homo sapiens
tttttttttttttttttttaacaggc

SEQ ID NO: 47677 - DNA, 26 bp, Homo sapiens
ttttttttttttttttttaacaggcc

SEQ ID NO: 47678 - DNA, 26 bp, Homo sapiens
tttttttttttttttttaacaggcca

SEQ ID NO: 47679 - DNA, 26 bp, Homo sapiens
ttttttttttttttttaacaggccat

SEQ ID NO: 47680 - DNA, 26 bp, Homo sapiens
tttttttttttttttaacaggccatg

SEQ ID NO: 47681 - DNA, 26 bp, Homo sapiens
ttttttttttttttaacaggccatga

SEQ ID NO: 47682 - DNA, 26 bp, Homo sapiens
tttttttttttttaacaggccatgaa

SEQ ID NO: 47683 - DNA, 26 bp, Homo sapiens
ttttttttttttaacaggccatgaaa

SEQ ID NO: 47684 - DNA, 26 bp, Homo sapiens
tttttttttttaacaggccatgaaaa

SEQ ID NO: 47685 - DNA, 26 bp, Homo sapiens
ttttttttttaacaggccatgaaaag

SEQ ID NO: 47686 - DNA, 26 bp, Homo sapiens
tttttttttaacaggccatgaaaaga

SEQ ID NO: 47687 - DNA, 26 bp, Homo sapiens
ttttttttaacaggccatgaaaagat

SEQ ID NO: 47688 - DNA, 26 bp, Homo sapiens
tttttttaacaggccatgaaaagatt

SEQ ID NO: 47689 - DNA, 26 bp, Homo sapiens
ttttttaacaggccatgaaaagattg

SEQ ID NO: 47690 - DNA, 26 bp, Homo sapiens
tttttaacaggccatgaaaagattgt

SEQ ID NO: 47691 - DNA, 26 bp, Homo sapiens
ttttaacaggccatgaaaagattgtt

SEQ ID NO: 47692 - DNA, 26 bp, Homo sapiens
tttaacaggccatgaaaagattgttt

SEQ ID NO: 47693 - DNA, 26 bp, Homo sapiens
ttaacaggccatgaaaagattgtttt

SEQ ID NO: 47694 - DNA, 26 bp, Homo sapiens
taacaggccatgaaaagattgtttta

SEQ ID NO: 47695 - DNA, 26 bp, Homo sapiens
aacaggccatgaaaagattgttttat

SEQ ID NO: 47696 - DNA, 26 bp, Homo sapiens
acaggccatgaaaagattgttttatt

SEQ ID NO: 47697 - DNA, 26 bp, Homo sapiens
caggccatgaaaagattgttttattc

SEQ ID NO: 47698 - DNA, 26 bp, Homo sapiens
aggccatgaaaagattgttttattcc

SEQ ID NO: 47699 - DNA, 26 bp, Homo sapiens
ggccatgaaaagattgttttattcca

SEQ ID NO: 47700 - DNA, 26 bp, Homo sapiens
gccatgaaaagattgttttattccat

SEQ ID NO: 47701 - DNA, 26 bp, Homo sapiens
ccatgaaaagattgttttattccatg

SEQ ID NO: 47702 - DNA, 26 bp, Homo sapiens
catgaaaagattgttttattccatgt

SEQ ID NO: 47703 - DNA, 26 bp, Homo sapiens
atgaaaagattgttttattccatgta

SEQ ID NO: 47704 - DNA, 26 bp, Homo sapiens
tgaaaagattgttttattccatgtaa

SEQ ID NO: 47705 - DNA, 26 bp, Homo sapiens
gaaaagattgttttattccatgtaaa

SEQ ID NO: 47706 - DNA, 26 bp, Homo sapiens
aaaagattgttttattccatgtaaat

SEQ ID NO: 47707 - DNA, 26 bp, Homo sapiens
aaagattgttttattccatgtaaata

SEQ ID NO: 47708 - DNA, 26 bp, Homo sapiens
aagattgttttattccatgtaaatat

SEQ ID NO: 47709 - DNA, 26 bp, Homo sapiens
agattgttttattccatgtaaatatt

SEQ ID NO: 47710 - DNA, 26 bp, Homo sapiens
gattgttttattccatgtaaatattc

SEQ ID NO: 47711 - DNA, 26 bp, Homo sapiens
attgttttattccatgtaaatattct

SEQ ID NO: 47712 - DNA, 26 bp, Homo sapiens
ttgttttattccatgtaaatattctc

SEQ ID NO: 47713 - DNA, 26 bp, Homo sapiens
tgttttattccatgtaaatattctca

SEQ ID NO: 47714 - DNA, 26 bp, Homo sapiens
gttttattccatgtaaatattctcaa

SEQ ID NO: 47715 - DNA, 26 bp, Homo sapiens
ttttattccatgtaaatattctcaac

SEQ ID NO: 47716 - DNA, 26 bp, Homo sapiens
tttattccatgtaaatattctcaaca

SEQ ID NO: 47717 - DNA, 26 bp, Homo sapiens
ttattccatgtaaatattctcaacag

SEQ ID NO: 47718 - DNA, 26 bp, Homo sapiens
tattccatgtaaatattctcaacaga

SEQ ID NO: 47719 - DNA, 26 bp, Homo sapiens
attccatgtaaatattctcaacagag

SEQ ID NO: 47720 - DNA, 26 bp, Homo sapiens
ttccatgtaaatattctcaacagaga

SEQ ID NO: 47721 - DNA, 26 bp, Homo sapiens
tccatgtaaatattctcaacagagaa

SEQ ID NO: 47722 - DNA, 26 bp, Homo sapiens
ccatgtaaatattctcaacagagaac

SEQ ID NO: 47723 - DNA, 26 bp, Homo sapiens
catgtaaatattctcaacagagaaca

SEQ ID NO: 47724 - DNA, 26 bp, Homo sapiens
atgtaaatattctcaacagagaacac

SEQ ID NO: 47725 - DNA, 26 bp, Homo sapiens
tgtaaatattctcaacagagaacact

SEQ ID NO: 47726 - DNA, 26 bp, Homo sapiens
gtaaatattctcaacagagaacacta

SEQ ID NO: 47727 - DNA, 26 bp, Homo sapiens
taaatattctcaacagagaacactat

SEQ ID NO: 47728 - DNA, 26 bp, Homo sapiens
aaatattctcaacagagaacactatc

SEQ ID NO: 47729 - DNA, 26 bp, Homo sapiens
aatattctcaacagagaacactatct

SEQ ID NO: 47730 - DNA, 26 bp, Homo sapiens
atattctcaacagagaacactatctt

SEQ ID NO: 47731 - DNA, 26 bp, Homo sapiens
tattctcaacagagaacactatcttt

SEQ ID NO: 47732 - DNA, 26 bp, Homo sapiens
attctcaacagagaacactatcttta

SEQ ID NO: 47733 - DNA, 26 bp, Homo sapiens
ttctcaacagagaacactatctttaa

SEQ ID NO: 47734 - DNA, 26 bp, Homo sapiens
tctcaacagagaacactatctttaaa

SEQ ID NO: 47735 - DNA, 26 bp, Homo sapiens
ctcaacagagaacactatctttaaat

SEQ ID NO: 47736 - DNA, 26 bp, Homo sapiens
tcaacagagaacactatctttaaatg

SEQ ID NO: 47737 - DNA, 26 bp, Homo sapiens
caacagagaacactatctttaaatga

SEQ ID NO: 47738 - DNA, 26 bp, Homo sapiens
aacagagaacactatctttaaatgaa

SEQ ID NO: 47739 - DNA, 26 bp, Homo sapiens
acagagaacactatctttaaatgaag

SEQ ID NO: 47740 - DNA, 26 bp, Homo sapiens
cagagaacactatctttaaatgaagg

SEQ ID NO: 47741 - DNA, 26 bp, Homo sapiens
agagaacactatctttaaatgaagga

SEQ ID NO: 47742 - DNA, 26 bp, Homo sapiens
gagaacactatctttaaatgaaggat

SEQ ID NO: 47743 - DNA, 26 bp, Homo sapiens
agaacactatctttaaatgaaggatt

SEQ ID NO: 47744 - DNA, 26 bp, Homo sapiens
gaacactatctttaaatgaaggattt

SEQ ID NO: 47745 - DNA, 26 bp, Homo sapiens
aacactatctttaaatgaaggattta

SEQ ID NO: 47746 - DNA, 26 bp, Homo sapiens
acactatctttaaatgaaggatttac

SEQ ID NO: 47747 - DNA, 26 bp, Homo sapiens
cactatctttaaatgaaggatttacc

SEQ ID NO: 47748 - DNA, 26 bp, Homo sapiens
actatctttaaatgaaggatttacca

SEQ ID NO: 47749 - DNA, 26 bp, Homo sapiens
ctatctttaaatgaaggatttaccat

SEQ ID NO: 47750 - DNA, 26 bp, Homo sapiens
tatctttaaatgaaggatttaccatt

SEQ ID NO: 47751 - DNA, 26 bp, Homo sapiens
atctttaaatgaaggatttaccatta

SEQ ID NO: 47752 - DNA, 26 bp, Homo sapiens
tctttaaatgaaggatttaccattaa

SEQ ID NO: 47753 - DNA, 26 bp, Homo sapiens
ctttaaatgaaggatttaccattaag

SEQ ID NO: 47754 - DNA, 26 bp, Homo sapiens
tttaaatgaaggatttaccattaaga

SEQ ID NO: 47755 - DNA, 26 bp, Homo sapiens
ttaaatgaaggatttaccattaagaa

SEQ ID NO: 47756 - DNA, 26 bp, Homo sapiens
taaatgaaggatttaccattaagaaa

SEQ ID NO: 47757 - DNA, 26 bp, Homo sapiens
aaatgaaggatttaccattaagaaat

SEQ ID NO: 47758 - DNA, 26 bp, Homo sapiens
aatgaaggatttaccattaagaaatc

SEQ ID NO: 47759 - DNA, 26 bp, Homo sapiens
atgaaggatttaccattaagaaatca

SEQ ID NO: 47760 - DNA, 26 bp, Homo sapiens
tgaaggatttaccattaagaaatcaa

SEQ ID NO: 47761 - DNA, 26 bp, Homo sapiens
gaaggatttaccattaagaaatcaac

SEQ ID NO: 47762 - DNA, 26 bp, Homo sapiens
aaggatttaccattaagaaatcaaca

SEQ ID NO: 47763 - DNA, 26 bp, Homo sapiens
aggatttaccattaagaaatcaacat

SEQ ID NO: 47764 - DNA, 26 bp, Homo sapiens
ggatttaccattaagaaatcaacatg

SEQ ID NO: 47765 - DNA, 26 bp, Homo sapiens
gatttaccattaagaaatcaacatgt

SEQ ID NO: 47766 - DNA, 26 bp, Homo sapiens
atttaccattaagaaatcaacatgtg

SEQ ID NO: 47767 - DNA, 26 bp, Homo sapiens
tttaccattaagaaatcaacatgtgc

SEQ ID NO: 47768 - DNA, 26 bp, Homo sapiens
ttaccattaagaaatcaacatgtgca

SEQ ID NO: 47769 - DNA, 26 bp, Homo sapiens
taccattaagaaatcaacatgtgcac

SEQ ID NO: 47770 - DNA, 26 bp, Homo sapiens
accattaagaaatcaacatgtgcaca

SEQ ID NO: 47771 - DNA, 26 bp, Homo sapiens
ccattaagaaatcaacatgtgcacaa

SEQ ID NO: 47772 - DNA, 26 bp, Homo sapiens
cattaagaaatcaacatgtgcacaaa

SEQ ID NO: 47773 - DNA, 26 bp, Homo sapiens
attaagaaatcaacatgtgcacaaaa

SEQ ID NO: 47774 - DNA, 26 bp, Homo sapiens
ttaagaaatcaacatgtgcacaaaaa

SEQ ID NO: 47775 - DNA, 26 bp, Homo sapiens
taagaaatcaacatgtgcacaaaaag

SEQ ID NO: 47776 - DNA, 26 bp, Homo sapiens
aagaaatcaacatgtgcacaaaaaga

SEQ ID NO: 47777 - DNA, 26 bp, Homo sapiens
agaaatcaacatgtgcacaaaaagag

SEQ ID NO: 47778 - DNA, 26 bp, Homo sapiens
gaaatcaacatgtgcacaaaaagagt

SEQ ID NO: 47779 - DNA, 26 bp, Homo sapiens
aaatcaacatgtgcacaaaaagagta

SEQ ID NO: 47780 - DNA, 26 bp, Homo sapiens
aatcaacatgtgcacaaaaagagtaa

SEQ ID NO: 47781 - DNA, 26 bp, Homo sapiens
atcaacatgtgcacaaaaagagtaaa

SEQ ID NO: 47782 - DNA, 26 bp, Homo sapiens
tcaacatgtgcacaaaaagagtaaaa

SEQ ID NO: 47783 - DNA, 26 bp, Homo sapiens
caacatgtgcacaaaaagagtaaaaa

SEQ ID NO: 47784 - DNA, 26 bp, Homo sapiens
aacatgtgcacaaaaagagtaaaaat

SEQ ID NO: 47785 - DNA, 26 bp, Homo sapiens
acatgtgcacaaaaagagtaaaaatt

SEQ ID NO: 47786 - DNA, 26 bp, Homo sapiens
catgtgcacaaaaagagtaaaaatta

SEQ ID NO: 47787 - DNA, 26 bp, Homo sapiens
atgtgcacaaaaagagtaaaaattac

SEQ ID NO: 47788 - DNA, 26 bp, Homo sapiens
tgtgcacaaaaagagtaaaaattacc

SEQ ID NO: 47789 - DNA, 26 bp, Homo sapiens
gtgcacaaaaagagtaaaaattacca

SEQ ID NO: 47790 - DNA, 26 bp, Homo sapiens
tgcacaaaaagagtaaaaattaccaa

SEQ ID NO: 47791 - DNA, 26 bp, Homo sapiens
gcacaaaaagagtaaaaattaccaaa

SEQ ID NO: 47792 - DNA, 26 bp, Homo sapiens
cacaaaaagagtaaaaattaccaaaa

SEQ ID NO: 47793 - DNA, 26 bp, Homo sapiens
acaaaaagagtaaaaattaccaaaaa

SEQ ID NO: 47794 - DNA, 26 bp, Homo sapiens
caaaaagagtaaaaattaccaaaaaa

SEQ ID NO: 47795 - DNA, 26 bp, Homo sapiens
aaaaagagtaaaaattaccaaaaaat

SEQ ID NO: 47796 - DNA, 26 bp, Homo sapiens
aaaagagtaaaaattaccaaaaaatt

SEQ ID NO: 47797 - DNA, 26 bp, Homo sapiens
aaagagtaaaaattaccaaaaaatta

SEQ ID NO: 47798 - DNA, 26 bp, Homo sapiens
aagagtaaaaattaccaaaaaattaa

SEQ ID NO: 47799 - DNA, 26 bp, Homo sapiens
agagtaaaaattaccaaaaaattaaa

SEQ ID NO: 47800 - DNA, 26 bp, Homo sapiens
gagtaaaaattaccaaaaaattaaag

SEQ ID NO: 47801 - DNA, 26 bp, Homo sapiens
agtaaaaattaccaaaaaattaaaga

SEQ ID NO: 47802 - DNA, 26 bp, Homo sapiens
gtaaaaattaccaaaaaattaaagat

SEQ ID NO: 47803 - DNA, 26 bp, Homo sapiens
taaaaattaccaaaaaattaaagatt

SEQ ID NO: 47804 - DNA, 26 bp, Homo sapiens
aaaaattaccaaaaaattaaagattt

SEQ ID NO: 47805 - DNA, 26 bp, Homo sapiens
aaaattaccaaaaaattaaagatttt

SEQ ID NO: 47806 - DNA, 26 bp, Homo sapiens
aaattaccaaaaaattaaagattttt

SEQ ID NO: 47807 - DNA, 26 bp, Homo sapiens
aattaccaaaaaattaaagatttttt

SEQ ID NO: 47808 - DNA, 26 bp, Homo sapiens
attaccaaaaaattaaagattttttg

SEQ ID NO: 47809 - DNA, 26 bp, Homo sapiens
ttaccaaaaaattaaagattttttgg

SEQ ID NO: 47810 - DNA, 26 bp, Homo sapiens
taccaaaaaattaaagattttttggg

SEQ ID NO: 47811 - DNA, 26 bp, Homo sapiens
accaaaaaattaaagattttttggga

SEQ ID NO: 47812 - DNA, 26 bp, Homo sapiens
ccaaaaaattaaagattttttgggac

SEQ ID NO: 47813 - DNA, 26 bp, Homo sapiens
caaaaaattaaagattttttgggaca

SEQ ID NO: 47814 - DNA, 26 bp, Homo sapiens
aaaaaattaaagattttttgggacaa

SEQ ID NO: 47815 - DNA, 26 bp, Homo sapiens
aaaaattaaagattttttgggacaat

SEQ ID NO: 47816 - DNA, 26 bp, Homo sapiens
aaaattaaagattttttgggacaatt

SEQ ID NO: 47817 - DNA, 26 bp, Homo sapiens
aaattaaagattttttgggacaattc

SEQ ID NO: 47818 - DNA, 26 bp, Homo sapiens
aattaaagattttttgggacaattca

SEQ ID NO: 47819 - DNA, 26 bp, Homo sapiens
attaaagattttttgggacaattcac

SEQ ID NO: 47820 - DNA, 26 bp, Homo sapiens
ttaaagattttttgggacaattcaca

SEQ ID NO: 47821 - DNA, 26 bp, Homo sapiens
taaagattttttgggacaattcacat

SEQ ID NO: 47822 - DNA, 26 bp, Homo sapiens
aaagattttttgggacaattcacatg

SEQ ID NO: 47823 - DNA, 26 bp, Homo sapiens
aagattttttgggacaattcacatgt

SEQ ID NO: 47824 - DNA, 26 bp, Homo sapiens
agattttttgggacaattcacatgtt

SEQ ID NO: 47825 - DNA, 26 bp, Homo sapiens
gattttttgggacaattcacatgttc

SEQ ID NO: 47826 - DNA, 26 bp, Homo sapiens
attttttgggacaattcacatgttca

SEQ ID NO: 47827 - DNA, 26 bp, Homo sapiens
ttttttgggacaattcacatgttcaa

SEQ ID NO: 47828 - DNA, 26 bp, Homo sapiens
tttttgggacaattcacatgttcaaa

SEQ ID NO: 47829 - DNA, 26 bp, Homo sapiens
ttttgggacaattcacatgttcaaaa

SEQ ID NO: 47830 - DNA, 26 bp, Homo sapiens
tttgggacaattcacatgttcaaaat

SEQ ID NO: 47831 - DNA, 26 bp, Homo sapiens
ttgggacaattcacatgttcaaaatt

SEQ ID NO: 47832 - DNA, 26 bp, Homo sapiens
tgggacaattcacatgttcaaaattt

SEQ ID NO: 47833 - DNA, 26 bp, Homo sapiens
gggacaattcacatgttcaaaattta

SEQ ID NO: 47834 - DNA, 26 bp, Homo sapiens
ggacaattcacatgttcaaaatttaa

SEQ ID NO: 47835 - DNA, 26 bp, Homo sapiens
gacaattcacatgttcaaaatttaag

SEQ ID NO: 47836 - DNA, 26 bp, Homo sapiens
acaattcacatgttcaaaatttaaga

SEQ ID NO: 47837 - DNA, 26 bp, Homo sapiens
caattcacatgttcaaaatttaagaa

SEQ ID NO: 47838 - DNA, 26 bp, Homo sapiens
aattcacatgttcaaaatttaagaat

SEQ ID NO: 47839 - DNA, 26 bp, Homo sapiens
attcacatgttcaaaatttaagaatg

SEQ ID NO: 47840 - DNA, 26 bp, Homo sapiens
ttcacatgttcaaaatttaagaatga

SEQ ID NO: 47841 - DNA, 26 bp, Homo sapiens
tcacatgttcaaaatttaagaatgat

SEQ ID NO: 47842 - DNA, 26 bp, Homo sapiens
cacatgttcaaaatttaagaatgatt

SEQ ID NO: 47843 - DNA, 26 bp, Homo sapiens
acatgttcaaaatttaagaatgattt

SEQ ID NO: 47844 - DNA, 26 bp, Homo sapiens
catgttcaaaatttaagaatgattta

SEQ ID NO: 47845 - DNA, 26 bp, Homo sapiens
atgttcaaaatttaagaatgatttaa

SEQ ID NO: 47846 - DNA, 26 bp, Homo sapiens
tgttcaaaatttaagaatgatttaaa

SEQ ID NO: 47847 - DNA, 26 bp, Homo sapiens
gttcaaaatttaagaatgatttaaac

SEQ ID NO: 47848 - DNA, 26 bp, Homo sapiens
ttcaaaatttaagaatgatttaaact

SEQ ID NO: 47849 - DNA, 26 bp, Homo sapiens
tcaaaatttaagaatgatttaaactg

SEQ ID NO: 47850 - DNA, 26 bp, Homo sapiens
caaaatttaagaatgatttaaactgt

SEQ ID NO: 47851 - DNA, 26 bp, Homo sapiens
aaaatttaagaatgatttaaactgtg

SEQ ID NO: 47852 - DNA, 26 bp, Homo sapiens
aaatttaagaatgatttaaactgtgc

SEQ ID NO: 47853 - DNA, 26 bp, Homo sapiens
aatttaagaatgatttaaactgtgca

SEQ ID NO: 47854 - DNA, 26 bp, Homo sapiens
atttaagaatgatttaaactgtgcaa

SEQ ID NO: 47855 - DNA, 26 bp, Homo sapiens
tttaagaatgatttaaactgtgcaag

SEQ ID NO: 47856 - DNA, 26 bp, Homo sapiens
ttaagaatgatttaaactgtgcaagt

SEQ ID NO: 47857 - DNA, 26 bp, Homo sapiens
taagaatgatttaaactgtgcaagta

SEQ ID NO: 47858 - DNA, 26 bp, Homo sapiens
aagaatgatttaaactgtgcaagtac

SEQ ID NO: 47859 - DNA, 26 bp, Homo sapiens
agaatgatttaaactgtgcaagtaca

SEQ ID NO: 47860 - DNA, 26 bp, Homo sapiens
gaatgatttaaactgtgcaagtacaa

SEQ ID NO: 47861 - DNA, 26 bp, Homo sapiens
aatgatttaaactgtgcaagtacaaa

SEQ ID NO: 47862 - DNA, 26 bp, Homo sapiens
atgatttaaactgtgcaagtacaaat

SEQ ID NO: 47863 - DNA, 26 bp, Homo sapiens
tgatttaaactgtgcaagtacaaatg

SEQ ID NO: 47864 - DNA, 26 bp, Homo sapiens
gatttaaactgtgcaagtacaaatgt

SEQ ID NO: 47865 - DNA, 26 bp, Homo sapiens
atttaaactgtgcaagtacaaatgtc

SEQ ID NO: 47866 - DNA, 26 bp, Homo sapiens
tttaaactgtgcaagtacaaatgtct

SEQ ID NO: 47867 - DNA, 26 bp, Homo sapiens
ttaaactgtgcaagtacaaatgtctt

SEQ ID NO: 47868 - DNA, 26 bp, Homo sapiens
taaactgtgcaagtacaaatgtcttt

SEQ ID NO: 47869 - DNA, 26 bp, Homo sapiens
aaactgtgcaagtacaaatgtctttc

SEQ ID NO: 47870 - DNA, 26 bp, Homo sapiens
aactgtgcaagtacaaatgtctttcc

SEQ ID NO: 47871 - DNA, 26 bp, Homo sapiens
actgtgcaagtacaaatgtctttcct

SEQ ID NO: 47872 - DNA, 26 bp, Homo sapiens
ctgtgcaagtacaaatgtctttccta

SEQ ID NO: 47873 - DNA, 26 bp, Homo sapiens
tgtgcaagtacaaatgtctttcctat

SEQ ID NO: 47874 - DNA, 26 bp, Homo sapiens
gtgcaagtacaaatgtctttcctatt

SEQ ID NO: 47875 - DNA, 26 bp, Homo sapiens
tgcaagtacaaatgtctttcctatta

SEQ ID NO: 47876 - DNA, 26 bp, Homo sapiens
gcaagtacaaatgtctttcctattat

SEQ ID NO: 47877 - DNA, 26 bp, Homo sapiens
caagtacaaatgtctttcctattata

SEQ ID NO: 47878 - DNA, 26 bp, Homo sapiens
aagtacaaatgtctttcctattataa

SEQ ID NO: 47879 - DNA, 26 bp, Homo sapiens
agtacaaatgtctttcctattataat

SEQ ID NO: 47880 - DNA, 26 bp, Homo sapiens
gtacaaatgtctttcctattataata

SEQ ID NO: 47881 - DNA, 26 bp, Homo sapiens
tacaaatgtctttcctattataataa

SEQ ID NO: 47882 - DNA, 26 bp, Homo sapiens
acaaatgtctttcctattataataac

SEQ ID NO: 47883 - DNA, 26 bp, Homo sapiens
caaatgtctttcctattataataacc

SEQ ID NO: 47884 - DNA, 26 bp, Homo sapiens
aaatgtctttcctattataataaccc

SEQ ID NO: 47885 - DNA, 26 bp, Homo sapiens
aatgtctttcctattataataaccca

SEQ ID NO: 47886 - DNA, 26 bp, Homo sapiens
atgtctttcctattataataacccat

SEQ ID NO: 47887 - DNA, 26 bp, Homo sapiens
tgtctttcctattataataacccata

SEQ ID NO: 47888 - DNA, 26 bp, Homo sapiens
gtctttcctattataataacccatat

SEQ ID NO: 47889 - DNA, 26 bp, Homo sapiens
tctttcctattataataacccatata

SEQ ID NO: 47890 - DNA, 26 bp, Homo sapiens
ctttcctattataataacccatatac

SEQ ID NO: 47891 - DNA, 26 bp, Homo sapiens
tttcctattataataacccatataca

SEQ ID NO: 47892 - DNA, 26 bp, Homo sapiens
ttcctattataataacccatatacag

SEQ ID NO: 47893 - DNA, 26 bp, Homo sapiens
tcctattataataacccatatacagg

SEQ ID NO: 47894 - DNA, 26 bp, Homo sapiens
cctattataataacccatatacaggt

SEQ ID NO: 47895 - DNA, 26 bp, Homo sapiens
ctattataataacccatatacaggtt

SEQ ID NO: 47896 - DNA, 26 bp, Homo sapiens
tattataataacccatatacaggttg

SEQ ID NO: 47897 - DNA, 26 bp, Homo sapiens
attataataacccatatacaggttgc

SEQ ID NO: 47898 - DNA, 26 bp, Homo sapiens
ttataataacccatatacaggttgca

SEQ ID NO: 47899 - DNA, 26 bp, Homo sapiens
tataataacccatatacaggttgcac

SEQ ID NO: 47900 - DNA, 26 bp, Homo sapiens
ataataacccatatacaggttgcact

SEQ ID NO: 47901 - DNA, 26 bp, Homo sapiens
taataacccatatacaggttgcacta

SEQ ID NO: 47902 - DNA, 26 bp, Homo sapiens
aataacccatatacaggttgcactat

SEQ ID NO: 47903 - DNA, 26 bp, Homo sapiens
ataacccatatacaggttgcactatt

SEQ ID NO: 47904 - DNA, 26 bp, Homo sapiens
taacccatatacaggttgcactattc

SEQ ID NO: 47905 - DNA, 26 bp, Homo sapiens
aacccatatacaggttgcactattcc

SEQ ID NO: 47906 - DNA, 26 bp, Homo sapiens
acccatatacaggttgcactattcca

SEQ ID NO: 47907 - DNA, 26 bp, Homo sapiens
cccatatacaggttgcactattccac

SEQ ID NO: 47908 - DNA, 26 bp, Homo sapiens
ccatatacaggttgcactattccaca

SEQ ID NO: 47909 - DNA, 26 bp, Homo sapiens
catatacaggttgcactattccacat

SEQ ID NO: 47910 - DNA, 26 bp, Homo sapiens
atatacaggttgcactattccacatc

SEQ ID NO: 47911 - DNA, 26 bp, Homo sapiens
tatacaggttgcactattccacatca

SEQ ID NO: 47912 - DNA, 26 bp, Homo sapiens
atacaggttgcactattccacatcaa

SEQ ID NO: 47913 - DNA, 26 bp, Homo sapiens
tacaggttgcactattccacatcaag

SEQ ID NO: 47914 - DNA, 26 bp, Homo sapiens
acaggttgcactattccacatcaagg

SEQ ID NO: 47915 - DNA, 26 bp, Homo sapiens
caggttgcactattccacatcaagga

SEQ ID NO: 47916 - DNA, 26 bp, Homo sapiens
aggttgcactattccacatcaaggaa

SEQ ID NO: 47917 - DNA, 26 bp, Homo sapiens
ggttgcactattccacatcaaggaac

SEQ ID NO: 47918 - DNA, 26 bp, Homo sapiens
gttgcactattccacatcaaggaact

SEQ ID NO: 47919 - DNA, 26 bp, Homo sapiens
ttgcactattccacatcaaggaactt

SEQ ID NO: 47920 - DNA, 26 bp, Homo sapiens
tgcactattccacatcaaggaacttg

SEQ ID NO: 47921 - DNA, 26 bp, Homo sapiens
gcactattccacatcaaggaacttgc

SEQ ID NO: 47922 - DNA, 26 bp, Homo sapiens
cactattccacatcaaggaacttgcc

SEQ ID NO: 47923 - DNA, 26 bp, Homo sapiens
actattccacatcaaggaacttgcct

SEQ ID NO: 47924 - DNA, 26 bp, Homo sapiens
ctattccacatcaaggaacttgcctc

SEQ ID NO: 47925 - DNA, 26 bp, Homo sapiens
tattccacatcaaggaacttgcctcc

SEQ ID NO: 47926 - DNA, 26 bp, Homo sapiens
attccacatcaaggaacttgcctcct

SEQ ID NO: 47927 - DNA, 26 bp, Homo sapiens
ttccacatcaaggaacttgcctccta

SEQ ID NO: 47928 - DNA, 26 bp, Homo sapiens
tccacatcaaggaacttgcctcctac

SEQ ID NO: 47929 - DNA, 26 bp, Homo sapiens
ccacatcaaggaacttgcctcctacg

SEQ ID NO: 47930 - DNA, 26 bp, Homo sapiens
cacatcaaggaacttgcctcctacgg

SEQ ID NO: 47931 - DNA, 26 bp, Homo sapiens
acatcaaggaacttgcctcctacgga

SEQ ID NO: 47932 - DNA, 26 bp, Homo sapiens
catcaaggaacttgcctcctacggaa

SEQ ID NO: 47933 - DNA, 26 bp, Homo sapiens
atcaaggaacttgcctcctacggaag

SEQ ID NO: 47934 - DNA, 26 bp, Homo sapiens
tcaaggaacttgcctcctacggaagc

SEQ ID NO: 47935 - DNA, 26 bp, Homo sapiens
caaggaacttgcctcctacggaagca

SEQ ID NO: 47936 - DNA, 26 bp, Homo sapiens
aaggaacttgcctcctacggaagcaa

SEQ ID NO: 47937 - DNA, 26 bp, Homo sapiens
aggaacttgcctcctacggaagcaaa

SEQ ID NO: 47938 - DNA, 26 bp, Homo sapiens
ggaacttgcctcctacggaagcaaat

SEQ ID NO: 47939 - DNA, 26 bp, Homo sapiens
gaacttgcctcctacggaagcaaatc

SEQ ID NO: 47940 - DNA, 26 bp, Homo sapiens
aacttgcctcctacggaagcaaatcc

SEQ ID NO: 47941 - DNA, 26 bp, Homo sapiens
acttgcctcctacggaagcaaatcct

SEQ ID NO: 47942 - DNA, 26 bp, Homo sapiens
cttgcctcctacggaagcaaatcctg

SEQ ID NO: 47943 - DNA, 26 bp, Homo sapiens
ttgcctcctacggaagcaaatcctgc

SEQ ID NO: 47944 - DNA, 26 bp, Homo sapiens
tgcctcctacggaagcaaatcctgct

SEQ ID NO: 47945 - DNA, 26 bp, Homo sapiens
gcctcctacggaagcaaatcctgctt

SEQ ID NO: 47946 - DNA, 26 bp, Homo sapiens
cctcctacggaagcaaatcctgcttt

SEQ ID NO: 47947 - DNA, 26 bp, Homo sapiens
ctcctacggaagcaaatcctgctttt

SEQ ID NO: 47948 - DNA, 26 bp, Homo sapiens
tcctacggaagcaaatcctgctttta

SEQ ID NO: 47949 - DNA, 26 bp, Homo sapiens
cctacggaagcaaatcctgcttttag

SEQ ID NO: 47950 - DNA, 26 bp, Homo sapiens
ctacggaagcaaatcctgcttttaga

SEQ ID NO: 47951 - DNA, 26 bp, Homo sapiens
tacggaagcaaatcctgcttttagaa

SEQ ID NO: 47952 - DNA, 26 bp, Homo sapiens
acggaagcaaatcctgcttttagaaa

SEQ ID NO: 47953 - DNA, 26 bp, Homo sapiens
cggaagcaaatcctgcttttagaaaa

SEQ ID NO: 47954 - DNA, 26 bp, Homo sapiens
ggaagcaaatcctgcttttagaaaaa

SEQ ID NO: 47955 - DNA, 26 bp, Homo sapiens
gaagcaaatcctgcttttagaaaaac

SEQ ID NO: 47956 - DNA, 26 bp, Homo sapiens
aagcaaatcctgcttttagaaaaaca

SEQ ID NO: 47957 - DNA, 26 bp, Homo sapiens
agcaaatcctgcttttagaaaaacaa

SEQ ID NO: 47958 - DNA, 26 bp, Homo sapiens
gcaaatcctgcttttagaaaaacaaa

SEQ ID NO: 47959 - DNA, 26 bp, Homo sapiens
caaatcctgcttttagaaaaacaaac

SEQ ID NO: 47960 - DNA, 26 bp, Homo sapiens
aaatcctgcttttagaaaaacaaaca

SEQ ID NO: 47961 - DNA, 26 bp, Homo sapiens
aatcctgcttttagaaaaacaaacag

SEQ ID NO: 47962 - DNA, 26 bp, Homo sapiens
atcctgcttttagaaaaacaaacagt

SEQ ID NO: 47963 - DNA, 26 bp, Homo sapiens
tcctgcttttagaaaaacaaacagta

SEQ ID NO: 47964 - DNA, 26 bp, Homo sapiens
cctgcttttagaaaaacaaacagtag

SEQ ID NO: 47965 - DNA, 26 bp, Homo sapiens
ctgcttttagaaaaacaaacagtagc

SEQ ID NO: 47966 - DNA, 26 bp, Homo sapiens
tgcttttagaaaaacaaacagtagct

SEQ ID NO: 47967 - DNA, 26 bp, Homo sapiens
gcttttagaaaaacaaacagtagctt

SEQ ID NO: 47968 - DNA, 26 bp, Homo sapiens
cttttagaaaaacaaacagtagcttg

SEQ ID NO: 47969 - DNA, 26 bp, Homo sapiens
ttttagaaaaacaaacagtagcttga

SEQ ID NO: 47970 - DNA, 26 bp, Homo sapiens
tttagaaaaacaaacagtagcttgaa

SEQ ID NO: 47971 - DNA, 26 bp, Homo sapiens
ttagaaaaacaaacagtagcttgaaa

SEQ ID NO: 47972 - DNA, 26 bp, Homo sapiens
tagaaaaacaaacagtagcttgaaaa

SEQ ID NO: 47973 - DNA, 26 bp, Homo sapiens
agaaaaacaaacagtagcttgaaaag

SEQ ID NO: 47974 - DNA, 26 bp, Homo sapiens
gaaaaacaaacagtagcttgaaaaga

SEQ ID NO: 47975 - DNA, 26 bp, Homo sapiens
aaaaacaaacagtagcttgaaaagaa

SEQ ID NO: 47976 - DNA, 26 bp, Homo sapiens
aaaacaaacagtagcttgaaaagaac

SEQ ID NO: 47977 - DNA, 26 bp, Homo sapiens
aaacaaacagtagcttgaaaagaaca

SEQ ID NO: 47978 - DNA, 26 bp, Homo sapiens
aacaaacagtagcttgaaaagaacag

SEQ ID NO: 47979 - DNA, 26 bp, Homo sapiens
acaaacagtagcttgaaaagaacagt

SEQ ID NO: 47980 - DNA, 26 bp, Homo sapiens
caaacagtagcttgaaaagaacagtt

SEQ ID NO: 47981 - DNA, 26 bp, Homo sapiens
aaacagtagcttgaaaagaacagtta

SEQ ID NO: 47982 - DNA, 26 bp, Homo sapiens
aacagtagcttgaaaagaacagttag

SEQ ID NO: 47983 - DNA, 26 bp, Homo sapiens
acagtagcttgaaaagaacagttagt

SEQ ID NO: 47984 - DNA, 26 bp, Homo sapiens
cagtagcttgaaaagaacagttagtc

SEQ ID NO: 47985 - DNA, 26 bp, Homo sapiens
agtagcttgaaaagaacagttagtcc

SEQ ID NO: 47986 - DNA, 26 bp, Homo sapiens
gtagcttgaaaagaacagttagtcct

SEQ ID NO: 47987 - DNA, 26 bp, Homo sapiens
tagcttgaaaagaacagttagtcctt

SEQ ID NO: 47988 - DNA, 26 bp, Homo sapiens
agcttgaaaagaacagttagtcctta

SEQ ID NO: 47989 - DNA, 26 bp, Homo sapiens
gcttgaaaagaacagttagtccttac

SEQ ID NO: 47990 - DNA, 26 bp, Homo sapiens
cttgaaaagaacagttagtccttaca

SEQ ID NO: 47991 - DNA, 26 bp, Homo sapiens
ttgaaaagaacagttagtccttacaa

SEQ ID NO: 47992 - DNA, 26 bp, Homo sapiens
tgaaaagaacagttagtccttacaag

SEQ ID NO: 47993 - DNA, 26 bp, Homo sapiens
gaaaagaacagttagtccttacaaga

SEQ ID NO: 47994 - DNA, 26 bp, Homo sapiens
aaaagaacagttagtccttacaagaa

SEQ ID NO: 47995 - DNA, 26 bp, Homo sapiens
aaagaacagttagtccttacaagaaa

SEQ ID NO: 47996 - DNA, 26 bp, Homo sapiens
aagaacagttagtccttacaagaaag

SEQ ID NO: 47997 - DNA, 26 bp, Homo sapiens
agaacagttagtccttacaagaaagt

SEQ ID NO: 47998 - DNA, 26 bp, Homo sapiens
gaacagttagtccttacaagaaagtc

SEQ ID NO: 47999 - DNA, 26 bp, Homo sapiens
aacagttagtccttacaagaaagtct

SEQ ID NO: 48000 - DNA, 26 bp, Homo sapiens
acagttagtccttacaagaaagtctt

SEQ ID NO: 48001 - DNA, 26 bp, Homo sapiens
cagttagtccttacaagaaagtctta

SEQ ID NO: 48002 - DNA, 26 bp, Homo sapiens
agttagtccttacaagaaagtcttaa

SEQ ID NO: 48003 - DNA, 26 bp, Homo sapiens
gttagtccttacaagaaagtcttaaa

SEQ ID NO: 48004 - DNA, 26 bp, Homo sapiens
ttagtccttacaagaaagtcttaaac

SEQ ID NO: 48005 - DNA, 26 bp, Homo sapiens
tagtccttacaagaaagtcttaaact

SEQ ID NO: 48006 - DNA, 26 bp, Homo sapiens
agtccttacaagaaagtcttaaactt

SEQ ID NO: 48007 - DNA, 26 bp, Homo sapiens
gtccttacaagaaagtcttaaacttt

SEQ ID NO: 48008 - DNA, 26 bp, Homo sapiens
tccttacaagaaagtcttaaactttg

SEQ ID NO: 48009 - DNA, 26 bp, Homo sapiens
ccttacaagaaagtcttaaactttgc

SEQ ID NO: 48010 - DNA, 26 bp, Homo sapiens
cttacaagaaagtcttaaactttgcc

SEQ ID NO: 48011 - DNA, 26 bp, Homo sapiens
ttacaagaaagtcttaaactttgccc

SEQ ID NO: 48012 - DNA, 26 bp, Homo sapiens
tacaagaaagtcttaaactttgccct

SEQ ID NO: 48013 - DNA, 26 bp, Homo sapiens
acaagaaagtcttaaactttgccctc

SEQ ID NO: 48014 - DNA, 26 bp, Homo sapiens
caagaaagtcttaaactttgccctct

SEQ ID NO: 48015 - DNA, 26 bp, Homo sapiens
aagaaagtcttaaactttgccctctg

SEQ ID NO: 48016 - DNA, 26 bp, Homo sapiens
agaaagtcttaaactttgccctctgt

SEQ ID NO: 48017 - DNA, 26 bp, Homo sapiens
gaaagtcttaaactttgccctctgtg

SEQ ID NO: 48018 - DNA, 26 bp, Homo sapiens
aaagtcttaaactttgccctctgtgg

SEQ ID NO: 48019 - DNA, 26 bp, Homo sapiens
aagtcttaaactttgccctctgtggc

SEQ ID NO: 48020 - DNA, 26 bp, Homo sapiens
agtcttaaactttgccctctgtggct

SEQ ID NO: 48021 - DNA, 26 bp, Homo sapiens
gtcttaaactttgccctctgtggctg

SEQ ID NO: 48022 - DNA, 26 bp, Homo sapiens
tcttaaactttgccctctgtggctgt

SEQ ID NO: 48023 - DNA, 26 bp, Homo sapiens
cttaaactttgccctctgtggctgtt

SEQ ID NO: 48024 - DNA, 26 bp, Homo sapiens
ttaaactttgccctctgtggctgtta

SEQ ID NO: 48025 - DNA, 26 bp, Homo sapiens
taaactttgccctctgtggctgttag

SEQ ID NO: 48026 - DNA, 26 bp, Homo sapiens
aaactttgccctctgtggctgttagc

SEQ ID NO: 48027 - DNA, 26 bp, Homo sapiens
aactttgccctctgtggctgttagcc

SEQ ID NO: 48028 - DNA, 26 bp, Homo sapiens
actttgccctctgtggctgttagcca

SEQ ID NO: 48029 - DNA, 26 bp, Homo sapiens
ctttgccctctgtggctgttagccaa

SEQ ID NO: 48030 - DNA, 26 bp, Homo sapiens
tttgccctctgtggctgttagccaaa

SEQ ID NO: 48031 - DNA, 26 bp, Homo sapiens
ttgccctctgtggctgttagccaaaa

SEQ ID NO: 48032 - DNA, 26 bp, Homo sapiens
tgccctctgtggctgttagccaaaaa

SEQ ID NO: 48033 - DNA, 26 bp, Homo sapiens
gccctctgtggctgttagccaaaaaa

SEQ ID NO: 48034 - DNA, 26 bp, Homo sapiens
ccctctgtggctgttagccaaaaaac

SEQ ID NO: 48035 - DNA, 26 bp, Homo sapiens
cctctgtggctgttagccaaaaaacc

SEQ ID NO: 48036 - DNA, 26 bp, Homo sapiens
ctctgtggctgttagccaaaaaacca

SEQ ID NO: 48037 - DNA, 26 bp, Homo sapiens
tctgtggctgttagccaaaaaaccat

SEQ ID NO: 48038 - DNA, 26 bp, Homo sapiens
ctgtggctgttagccaaaaaaccata

SEQ ID NO: 48039 - DNA, 26 bp, Homo sapiens
tgtggctgttagccaaaaaaccataa

SEQ ID NO: 48040 - DNA, 26 bp, Homo sapiens
gtggctgttagccaaaaaaccataag

SEQ ID NO: 48041 - DNA, 26 bp, Homo sapiens
tggctgttagccaaaaaaccataagc

SEQ ID NO: 48042 - DNA, 26 bp, Homo sapiens
ggctgttagccaaaaaaccataagca

SEQ ID NO: 48043 - DNA, 26 bp, Homo sapiens
gctgttagccaaaaaaccataagcac

SEQ ID NO: 48044 - DNA, 26 bp, Homo sapiens
ctgttagccaaaaaaccataagcact

SEQ ID NO: 48045 - DNA, 26 bp, Homo sapiens
tgttagccaaaaaaccataagcactt

SEQ ID NO: 48046 - DNA, 26 bp, Homo sapiens
gttagccaaaaaaccataagcacttc

SEQ ID NO: 48047 - DNA, 26 bp, Homo sapiens
ttagccaaaaaaccataagcacttca

SEQ ID NO: 48048 - DNA, 26 bp, Homo sapiens
tagccaaaaaaccataagcacttcag

SEQ ID NO: 48049 - DNA, 26 bp, Homo sapiens
agccaaaaaaccataagcacttcagg

SEQ ID NO: 48050 - DNA, 26 bp, Homo sapiens
gccaaaaaaccataagcacttcaggc

SEQ ID NO: 48051 - DNA, 26 bp, Homo sapiens
ccaaaaaaccataagcacttcaggct

SEQ ID NO: 48052 - DNA, 26 bp, Homo sapiens
caaaaaaccataagcacttcaggctt

SEQ ID NO: 48053 - DNA, 26 bp, Homo sapiens
aaaaaaccataagcacttcaggcttt

SEQ ID NO: 48054 - DNA, 26 bp, Homo sapiens
aaaaaccataagcacttcaggctttg

SEQ ID NO: 48055 - DNA, 26 bp, Homo sapiens
aaaaccataagcacttcaggctttgt

SEQ ID NO: 48056 - DNA, 26 bp, Homo sapiens
aaaccataagcacttcaggctttgta

SEQ ID NO: 48057 - DNA, 26 bp, Homo sapiens
aaccataagcacttcaggctttgtac

SEQ ID NO: 48058 - DNA, 26 bp, Homo sapiens
accataagcacttcaggctttgtaca

SEQ ID NO: 48059 - DNA, 26 bp, Homo sapiens
ccataagcacttcaggctttgtacag

SEQ ID NO: 48060 - DNA, 26 bp, Homo sapiens
cataagcacttcaggctttgtacaga

SEQ ID NO: 48061 - DNA, 26 bp, Homo sapiens
ataagcacttcaggctttgtacagaa

SEQ ID NO: 48062 - DNA, 26 bp, Homo sapiens
taagcacttcaggctttgtacagaag

SEQ ID NO: 48063 - DNA, 26 bp, Homo sapiens
aagcacttcaggctttgtacagaaga

SEQ ID NO: 48064 - DNA, 26 bp, Homo sapiens
agcacttcaggctttgtacagaagac

SEQ ID NO: 48065 - DNA, 26 bp, Homo sapiens
gcacttcaggctttgtacagaagaca

SEQ ID NO: 48066 - DNA, 26 bp, Homo sapiens
cacttcaggctttgtacagaagacaa

SEQ ID NO: 48067 - DNA, 26 bp, Homo sapiens
acttcaggctttgtacagaagacaaa

SEQ ID NO: 48068 - DNA, 26 bp, Homo sapiens
cttcaggctttgtacagaagacaaac

SEQ ID NO: 48069 - DNA, 26 bp, Homo sapiens
ttcaggctttgtacagaagacaaaca

SEQ ID NO: 48070 - DNA, 26 bp, Homo sapiens
tcaggctttgtacagaagacaaacac

SEQ ID NO: 48071 - DNA, 26 bp, Homo sapiens
caggctttgtacagaagacaaacaca

SEQ ID NO: 48072 - DNA, 26 bp, Homo sapiens
aggctttgtacagaagacaaacacag

SEQ ID NO: 48073 - DNA, 26 bp, Homo sapiens
ggctttgtacagaagacaaacacagc

SEQ ID NO: 48074 - DNA, 26 bp, Homo sapiens
gctttgtacagaagacaaacacagcc

SEQ ID NO: 48075 - DNA, 26 bp, Homo sapiens
ctttgtacagaagacaaacacagcca

SEQ ID NO: 48076 - DNA, 26 bp, Homo sapiens
tttgtacagaagacaaacacagccag

SEQ ID NO: 48077 - DNA, 26 bp, Homo sapiens
ttgtacagaagacaaacacagccaga

SEQ ID NO: 48078 - DNA, 26 bp, Homo sapiens
tgtacagaagacaaacacagccagat

SEQ ID NO: 48079 - DNA, 26 bp, Homo sapiens
gtacagaagacaaacacagccagatc

SEQ ID NO: 48080 - DNA, 26 bp, Homo sapiens
tacagaagacaaacacagccagatca

SEQ ID NO: 48081 - DNA, 26 bp, Homo sapiens
acagaagacaaacacagccagatcac

SEQ ID NO: 48082 - DNA, 26 bp, Homo sapiens
cagaagacaaacacagccagatcaca

SEQ ID NO: 48083 - DNA, 26 bp, Homo sapiens
agaagacaaacacagccagatcacat

SEQ ID NO: 48084 - DNA, 26 bp, Homo sapiens
gaagacaaacacagccagatcacatt

SEQ ID NO: 48085 - DNA, 26 bp, Homo sapiens
aagacaaacacagccagatcacattt

SEQ ID NO: 48086 - DNA, 26 bp, Homo sapiens
agacaaacacagccagatcacatttc

SEQ ID NO: 48087 - DNA, 26 bp, Homo sapiens
gacaaacacagccagatcacatttcc

SEQ ID NO: 48088 - DNA, 26 bp, Homo sapiens
acaaacacagccagatcacatttcct

SEQ ID NO: 48089 - DNA, 26 bp, Homo sapiens
caaacacagccagatcacatttcctc

SEQ ID NO: 48090 - DNA, 26 bp, Homo sapiens
aaacacagccagatcacatttcctcc

SEQ ID NO: 48091 - DNA, 26 bp, Homo sapiens
aacacagccagatcacatttcctcct

SEQ ID NO: 48092 - DNA, 26 bp, Homo sapiens
acacagccagatcacatttcctcctc

SEQ ID NO: 48093 - DNA, 26 bp, Homo sapiens
cacagccagatcacatttcctcctca

SEQ ID NO: 48094 - DNA, 26 bp, Homo sapiens
acagccagatcacatttcctcctcat

SEQ ID NO: 48095 - DNA, 26 bp, Homo sapiens
cagccagatcacatttcctcctcatt

SEQ ID NO: 48096 - DNA, 26 bp, Homo sapiens
agccagatcacatttcctcctcattg

SEQ ID NO: 48097 - DNA, 26 bp, Homo sapiens
gccagatcacatttcctcctcattgc

SEQ ID NO: 48098 - DNA, 26 bp, Homo sapiens
ccagatcacatttcctcctcattgct

SEQ ID NO: 48099 - DNA, 26 bp, Homo sapiens
cagatcacatttcctcctcattgcta

SEQ ID NO: 48100 - DNA, 26 bp, Homo sapiens
agatcacatttcctcctcattgctaa

SEQ ID NO: 48101 - DNA, 26 bp, Homo sapiens
gatcacatttcctcctcattgctaac

SEQ ID NO: 48102 - DNA, 26 bp, Homo sapiens
atcacatttcctcctcattgctaacc

SEQ ID NO: 48103 - DNA, 26 bp, Homo sapiens
tcacatttcctcctcattgctaacct

SEQ ID NO: 48104 - DNA, 26 bp, Homo sapiens
cacatttcctcctcattgctaacctt

SEQ ID NO: 48105 - DNA, 26 bp, Homo sapiens
acatttcctcctcattgctaaccttt

SEQ ID NO: 48106 - DNA, 26 bp, Homo sapiens
catttcctcctcattgctaaccttta

SEQ ID NO: 48107 - DNA, 26 bp, Homo sapiens
atttcctcctcattgctaacctttaa

SEQ ID NO: 48108 - DNA, 26 bp, Homo sapiens
tttcctcctcattgctaacctttaaa

SEQ ID NO: 48109 - DNA, 26 bp, Homo sapiens
ttcctcctcattgctaacctttaaaa

SEQ ID NO: 48110 - DNA, 26 bp, Homo sapiens
tcctcctcattgctaacctttaaaat

SEQ ID NO: 48111 - DNA, 26 bp, Homo sapiens
cctcctcattgctaacctttaaaata

SEQ ID NO: 48112 - DNA, 26 bp, Homo sapiens
ctcctcattgctaacctttaaaataa

SEQ ID NO: 48113 - DNA, 26 bp, Homo sapiens
tcctcattgctaacctttaaaataaa

SEQ ID NO: 48114 - DNA, 26 bp, Homo sapiens
cctcattgctaacctttaaaataaaa

SEQ ID NO: 48115 - DNA, 26 bp, Homo sapiens
ctcattgctaacctttaaaataaaaa

SEQ ID NO: 48116 - DNA, 26 bp, Homo sapiens
tcattgctaacctttaaaataaaaat

SEQ ID NO: 48117 - DNA, 26 bp, Homo sapiens
cattgctaacctttaaaataaaaata

SEQ ID NO: 48118 - DNA, 26 bp, Homo sapiens
attgctaacctttaaaataaaaatag

SEQ ID NO: 48119 - DNA, 26 bp, Homo sapiens
ttgctaacctttaaaataaaaatagc

SEQ ID NO: 48120 - DNA, 26 bp, Homo sapiens
tgctaacctttaaaataaaaatagca

SEQ ID NO: 48121 - DNA, 26 bp, Homo sapiens
gctaacctttaaaataaaaatagcac

SEQ ID NO: 48122 - DNA, 26 bp, Homo sapiens
ctaacctttaaaataaaaatagcact

SEQ ID NO: 48123 - DNA, 26 bp, Homo sapiens
taacctttaaaataaaaatagcacta

SEQ ID NO: 48124 - DNA, 26 bp, Homo sapiens
aacctttaaaataaaaatagcactag

SEQ ID NO: 48125 - DNA, 26 bp, Homo sapiens
acctttaaaataaaaatagcactaga

SEQ ID NO: 48126 - DNA, 26 bp, Homo sapiens
cctttaaaataaaaatagcactagat

SEQ ID NO: 48127 - DNA, 26 bp, Homo sapiens
ctttaaaataaaaatagcactagatt

SEQ ID NO: 48128 - DNA, 26 bp, Homo sapiens
tttaaaataaaaatagcactagattt

SEQ ID NO: 48129 - DNA, 26 bp, Homo sapiens
ttaaaataaaaatagcactagatttt

SEQ ID NO: 48130 - DNA, 26 bp, Homo sapiens
taaaataaaaatagcactagatttta

SEQ ID NO: 48131 - DNA, 26 bp, Homo sapiens
aaaataaaaatagcactagattttaa

SEQ ID NO: 48132 - DNA, 26 bp, Homo sapiens
aaataaaaatagcactagattttaaa

SEQ ID NO: 48133 - DNA, 26 bp, Homo sapiens
aataaaaatagcactagattttaaaa

SEQ ID NO: 48134 - DNA, 26 bp, Homo sapiens
ataaaaatagcactagattttaaaac

SEQ ID NO: 48135 - DNA, 26 bp, Homo sapiens
taaaaatagcactagattttaaaact

SEQ ID NO: 48136 - DNA, 26 bp, Homo sapiens
aaaaatagcactagattttaaaacta

SEQ ID NO: 48137 - DNA, 26 bp, Homo sapiens
aaaatagcactagattttaaaactac

SEQ ID NO: 48138 - DNA, 26 bp, Homo sapiens
aaatagcactagattttaaaactact

SEQ ID NO: 48139 - DNA, 26 bp, Homo sapiens
aatagcactagattttaaaactactt

SEQ ID NO: 48140 - DNA, 26 bp, Homo sapiens
atagcactagattttaaaactacttc

SEQ ID NO: 48141 - DNA, 26 bp, Homo sapiens
tagcactagattttaaaactacttca

SEQ ID NO: 48142 - DNA, 26 bp, Homo sapiens
agcactagattttaaaactacttcat

SEQ ID NO: 48143 - DNA, 26 bp, Homo sapiens
gcactagattttaaaactacttcatg

SEQ ID NO: 48144 - DNA, 26 bp, Homo sapiens
cactagattttaaaactacttcatgt

SEQ ID NO: 48145 - DNA, 26 bp, Homo sapiens
actagattttaaaactacttcatgta

SEQ ID NO: 48146 - DNA, 26 bp, Homo sapiens
ctagattttaaaactacttcatgtag

SEQ ID NO: 48147 - DNA, 26 bp, Homo sapiens
tagattttaaaactacttcatgtagt

SEQ ID NO: 48148 - DNA, 26 bp, Homo sapiens
agattttaaaactacttcatgtagtc

SEQ ID NO: 48149 - DNA, 26 bp, Homo sapiens
gattttaaaactacttcatgtagtct

SEQ ID NO: 48150 - DNA, 26 bp, Homo sapiens
attttaaaactacttcatgtagtctg

SEQ ID NO: 48151 - DNA, 26 bp, Homo sapiens
ttttaaaactacttcatgtagtctgt

SEQ ID NO: 48152 - DNA, 26 bp, Homo sapiens
tttaaaactacttcatgtagtctgtc

SEQ ID NO: 48153 - DNA, 26 bp, Homo sapiens
ttaaaactacttcatgtagtctgtca

SEQ ID NO: 48154 - DNA, 26 bp, Homo sapiens
taaaactacttcatgtagtctgtcag

SEQ ID NO: 48155 - DNA, 26 bp, Homo sapiens
aaaactacttcatgtagtctgtcagt

SEQ ID NO: 48156 - DNA, 26 bp, Homo sapiens
aaactacttcatgtagtctgtcagta

SEQ ID NO: 48157 - DNA, 26 bp, Homo sapiens
aactacttcatgtagtctgtcagtac

SEQ ID NO: 48158 - DNA, 26 bp, Homo sapiens
actacttcatgtagtctgtcagtact

SEQ ID NO: 48159 - DNA, 26 bp, Homo sapiens
ctacttcatgtagtctgtcagtactg

SEQ ID NO: 48160 - DNA, 26 bp, Homo sapiens
tacttcatgtagtctgtcagtactga

SEQ ID NO: 48161 - DNA, 26 bp, Homo sapiens
acttcatgtagtctgtcagtactgaa

SEQ ID NO: 48162 - DNA, 26 bp, Homo sapiens
cttcatgtagtctgtcagtactgaat

SEQ ID NO: 48163 - DNA, 26 bp, Homo sapiens
ttcatgtagtctgtcagtactgaata

SEQ ID NO: 48164 - DNA, 26 bp, Homo sapiens
tcatgtagtctgtcagtactgaataa

SEQ ID NO: 48165 - DNA, 26 bp, Homo sapiens
catgtagtctgtcagtactgaataat

SEQ ID NO: 48166 - DNA, 26 bp, Homo sapiens
atgtagtctgtcagtactgaataatg

SEQ ID NO: 48167 - DNA, 26 bp, Homo sapiens
tgtagtctgtcagtactgaataatgt

SEQ ID NO: 48168 - DNA, 26 bp, Homo sapiens
gtagtctgtcagtactgaataatgtc

SEQ ID NO: 48169 - DNA, 26 bp, Homo sapiens
tagtctgtcagtactgaataatgtca

SEQ ID NO: 48170 - DNA, 26 bp, Homo sapiens
agtctgtcagtactgaataatgtcac

SEQ ID NO: 48171 - DNA, 26 bp, Homo sapiens
gtctgtcagtactgaataatgtcaca

SEQ ID NO: 48172 - DNA, 26 bp, Homo sapiens
tctgtcagtactgaataatgtcacat

SEQ ID NO: 48173 - DNA, 26 bp, Homo sapiens
ctgtcagtactgaataatgtcacatt

SEQ ID NO: 48174 - DNA, 26 bp, Homo sapiens
tgtcagtactgaataatgtcacatta

SEQ ID NO: 48175 - DNA, 26 bp, Homo sapiens
gtcagtactgaataatgtcacattat

SEQ ID NO: 48176 - DNA, 26 bp, Homo sapiens
tcagtactgaataatgtcacattata

SEQ ID NO: 48177 - DNA, 26 bp, Homo sapiens
cagtactgaataatgtcacattatat

SEQ ID NO: 48178 - DNA, 26 bp, Homo sapiens
agtactgaataatgtcacattatata

SEQ ID NO: 48179 - DNA, 26 bp, Homo sapiens
gtactgaataatgtcacattatataa

SEQ ID NO: 48180 - DNA, 26 bp, Homo sapiens
tactgaataatgtcacattatataaa

SEQ ID NO: 48181 - DNA, 26 bp, Homo sapiens
actgaataatgtcacattatataaat

SEQ ID NO: 48182 - DNA, 26 bp, Homo sapiens
ctgaataatgtcacattatataaata

SEQ ID NO: 48183 - DNA, 26 bp, Homo sapiens
tgaataatgtcacattatataaataa

SEQ ID NO: 48184 - DNA, 26 bp, Homo sapiens
gaataatgtcacattatataaataac

SEQ ID NO: 48185 - DNA, 26 bp, Homo sapiens
aataatgtcacattatataaataacc

SEQ ID NO: 48186 - DNA, 26 bp, Homo sapiens
ataatgtcacattatataaataaccc

SEQ ID NO: 48187 - DNA, 26 bp, Homo sapiens
taatgtcacattatataaataaccct

SEQ ID NO: 48188 - DNA, 26 bp, Homo sapiens
aatgtcacattatataaataaccctg

SEQ ID NO: 48189 - DNA, 26 bp, Homo sapiens
atgtcacattatataaataaccctgt

SEQ ID NO: 48190 - DNA, 26 bp, Homo sapiens
tgtcacattatataaataaccctgta

SEQ ID NO: 48191 - DNA, 26 bp, Homo sapiens
gtcacattatataaataaccctgtaa

SEQ ID NO: 48192 - DNA, 26 bp, Homo sapiens
tcacattatataaataaccctgtaac

SEQ ID NO: 48193 - DNA, 26 bp, Homo sapiens
cacattatataaataaccctgtaacg

SEQ ID NO: 48194 - DNA, 26 bp, Homo sapiens
acattatataaataaccctgtaacga

SEQ ID NO: 48195 - DNA, 26 bp, Homo sapiens
cattatataaataaccctgtaacgag

SEQ ID NO: 48196 - DNA, 26 bp, Homo sapiens
attatataaataaccctgtaacgaga

SEQ ID NO: 48197 - DNA, 26 bp, Homo sapiens
ttatataaataaccctgtaacgagat

SEQ ID NO: 48198 - DNA, 26 bp, Homo sapiens
tatataaataaccctgtaacgagatt

SEQ ID NO: 48199 - DNA, 26 bp, Homo sapiens
atataaataaccctgtaacgagattc

SEQ ID NO: 48200 - DNA, 26 bp, Homo sapiens
tataaataaccctgtaacgagattca

SEQ ID NO: 48201 - DNA, 26 bp, Homo sapiens
ataaataaccctgtaacgagattcaa

SEQ ID NO: 48202 - DNA, 26 bp, Homo sapiens
taaataaccctgtaacgagattcaat

SEQ ID NO: 48203 - DNA, 26 bp, Homo sapiens
aaataaccctgtaacgagattcaata

SEQ ID NO: 48204 - DNA, 26 bp, Homo sapiens
aataaccctgtaacgagattcaatat

SEQ ID NO: 48205 - DNA, 26 bp, Homo sapiens
ataaccctgtaacgagattcaatatc

SEQ ID NO: 48206 - DNA, 26 bp, Homo sapiens
taaccctgtaacgagattcaatatct

SEQ ID NO: 48207 - DNA, 26 bp, Homo sapiens
aaccctgtaacgagattcaatatcta

SEQ ID NO: 48208 - DNA, 26 bp, Homo sapiens
accctgtaacgagattcaatatctaa

SEQ ID NO: 48209 - DNA, 26 bp, Homo sapiens
ccctgtaacgagattcaatatctaaa

SEQ ID NO: 48210 - DNA, 26 bp, Homo sapiens
cctgtaacgagattcaatatctaaac

SEQ ID NO: 48211 - DNA, 26 bp, Homo sapiens
ctgtaacgagattcaatatctaaact

SEQ ID NO: 48212 - DNA, 26 bp, Homo sapiens
tgtaacgagattcaatatctaaactt

SEQ ID NO: 48213 - DNA, 26 bp, Homo sapiens
gtaacgagattcaatatctaaacttt

SEQ ID NO: 48214 - DNA, 26 bp, Homo sapiens
taacgagattcaatatctaaacttta

SEQ ID NO: 48215 - DNA, 26 bp, Homo sapiens
aacgagattcaatatctaaactttat

SEQ ID NO: 48216 - DNA, 26 bp, Homo sapiens
acgagattcaatatctaaactttata

SEQ ID NO: 48217 - DNA, 26 bp, Homo sapiens
cgagattcaatatctaaactttatag

SEQ ID NO: 48218 - DNA, 26 bp, Homo sapiens
gagattcaatatctaaactttatagt

SEQ ID NO: 48219 - DNA, 26 bp, Homo sapiens
agattcaatatctaaactttatagtt

SEQ ID NO: 48220 - DNA, 26 bp, Homo sapiens
gattcaatatctaaactttatagttt

SEQ ID NO: 48221 - DNA, 26 bp, Homo sapiens
attcaatatctaaactttatagttta

SEQ ID NO: 48222 - DNA, 26 bp, Homo sapiens
ttcaatatctaaactttatagtttac

SEQ ID NO: 48223 - DNA, 26 bp, Homo sapiens
tcaatatctaaactttatagtttact

SEQ ID NO: 48224 - DNA, 26 bp, Homo sapiens
caatatctaaactttatagtttacta

SEQ ID NO: 48225 - DNA, 26 bp, Homo sapiens
aatatctaaactttatagtttactag

SEQ ID NO: 48226 - DNA, 26 bp, Homo sapiens
atatctaaactttatagtttactagc

SEQ ID NO: 48227 - DNA, 26 bp, Homo sapiens
tatctaaactttatagtttactagct

SEQ ID NO: 48228 - DNA, 26 bp, Homo sapiens
atctaaactttatagtttactagctg

SEQ ID NO: 48229 - DNA, 26 bp, Homo sapiens
tctaaactttatagtttactagctgc

SEQ ID NO: 48230 - DNA, 26 bp, Homo sapiens
ctaaactttatagtttactagctgca

SEQ ID NO: 48231 - DNA, 26 bp, Homo sapiens
taaactttatagtttactagctgcaa

SEQ ID NO: 48232 - DNA, 26 bp, Homo sapiens
aaactttatagtttactagctgcaaa

SEQ ID NO: 48233 - DNA, 26 bp, Homo sapiens
aactttatagtttactagctgcaaag

SEQ ID NO: 48234 - DNA, 26 bp, Homo sapiens
actttatagtttactagctgcaaagg

SEQ ID NO: 48235 - DNA, 26 bp, Homo sapiens
ctttatagtttactagctgcaaaggt

SEQ ID NO: 48236 - DNA, 26 bp, Homo sapiens
tttatagtttactagctgcaaaggta

SEQ ID NO: 48237 - DNA, 26 bp, Homo sapiens
ttatagtttactagctgcaaaggtaa

SEQ ID NO: 48238 - DNA, 26 bp, Homo sapiens
tatagtttactagctgcaaaggtaat

SEQ ID NO: 48239 - DNA, 26 bp, Homo sapiens
atagtttactagctgcaaaggtaata

SEQ ID NO: 48240 - DNA, 26 bp, Homo sapiens
tagtttactagctgcaaaggtaatac

SEQ ID NO: 48241 - DNA, 26 bp, Homo sapiens
agtttactagctgcaaaggtaataca

SEQ ID NO: 48242 - DNA, 26 bp, Homo sapiens
gtttactagctgcaaaggtaatacac

SEQ ID NO: 48243 - DNA, 26 bp, Homo sapiens
tttactagctgcaaaggtaatacact

SEQ ID NO: 48244 - DNA, 26 bp, Homo sapiens
ttactagctgcaaaggtaatacacta

SEQ ID NO: 48245 - DNA, 26 bp, Homo sapiens
tactagctgcaaaggtaatacactat

SEQ ID NO: 48246 - DNA, 26 bp, Homo sapiens
actagctgcaaaggtaatacactata

SEQ ID NO: 48247 - DNA, 26 bp, Homo sapiens
ctagctgcaaaggtaatacactatat

SEQ ID NO: 48248 - DNA, 26 bp, Homo sapiens
tagctgcaaaggtaatacactatatg

SEQ ID NO: 48249 - DNA, 26 bp, Homo sapiens
agctgcaaaggtaatacactatatgt

SEQ ID NO: 48250 - DNA, 26 bp, Homo sapiens
gctgcaaaggtaatacactatatgtc

SEQ ID NO: 48251 - DNA, 26 bp, Homo sapiens
ctgcaaaggtaatacactatatgtca

SEQ ID NO: 48252 - DNA, 26 bp, Homo sapiens
tgcaaaggtaatacactatatgtcag

SEQ ID NO: 48253 - DNA, 26 bp, Homo sapiens
gcaaaggtaatacactatatgtcagc

SEQ ID NO: 48254 - DNA, 26 bp, Homo sapiens
caaaggtaatacactatatgtcagct

SEQ ID NO: 48255 - DNA, 26 bp, Homo sapiens
aaaggtaatacactatatgtcagctg

SEQ ID NO: 48256 - DNA, 26 bp, Homo sapiens
aaggtaatacactatatgtcagctgt

SEQ ID NO: 48257 - DNA, 26 bp, Homo sapiens
aggtaatacactatatgtcagctgtg

SEQ ID NO: 48258 - DNA, 26 bp, Homo sapiens
ggtaatacactatatgtcagctgtgt

SEQ ID NO: 48259 - DNA, 26 bp, Homo sapiens
gtaatacactatatgtcagctgtgta

SEQ ID NO: 48260 - DNA, 26 bp, Homo sapiens
taatacactatatgtcagctgtgtaa

SEQ ID NO: 48261 - DNA, 26 bp, Homo sapiens
aatacactatatgtcagctgtgtaac

SEQ ID NO: 48262 - DNA, 26 bp, Homo sapiens
atacactatatgtcagctgtgtaaca

SEQ ID NO: 48263 - DNA, 26 bp, Homo sapiens
tacactatatgtcagctgtgtaacag

SEQ ID NO: 48264 - DNA, 26 bp, Homo sapiens
acactatatgtcagctgtgtaacagt

SEQ ID NO: 48265 - DNA, 26 bp, Homo sapiens
cactatatgtcagctgtgtaacagtg

SEQ ID NO: 48266 - DNA, 26 bp, Homo sapiens
actatatgtcagctgtgtaacagtgg

SEQ ID NO: 48267 - DNA, 26 bp, Homo sapiens
ctatatgtcagctgtgtaacagtggt

SEQ ID NO: 48268 - DNA, 26 bp, Homo sapiens
tatatgtcagctgtgtaacagtggtg

SEQ ID NO: 48269 - DNA, 26 bp, Homo sapiens
atatgtcagctgtgtaacagtggtga

SEQ ID NO: 48270 - DNA, 26 bp, Homo sapiens
tatgtcagctgtgtaacagtggtgac

SEQ ID NO: 48271 - DNA, 26 bp, Homo sapiens
atgtcagctgtgtaacagtggtgact

SEQ ID NO: 48272 - DNA, 26 bp, Homo sapiens
tgtcagctgtgtaacagtggtgactt

SEQ ID NO: 48273 - DNA, 26 bp, Homo sapiens
gtcagctgtgtaacagtggtgacttg

SEQ ID NO: 48274 - DNA, 26 bp, Homo sapiens
tcagctgtgtaacagtggtgacttga

SEQ ID NO: 48275 - DNA, 26 bp, Homo sapiens
cagctgtgtaacagtggtgacttgat

SEQ ID NO: 48276 - DNA, 26 bp, Homo sapiens
agctgtgtaacagtggtgacttgatc

SEQ ID NO: 48277 - DNA, 26 bp, Homo sapiens
gctgtgtaacagtggtgacttgatct

SEQ ID NO: 48278 - DNA, 26 bp, Homo sapiens
ctgtgtaacagtggtgacttgatctt

SEQ ID NO: 48279 - DNA, 26 bp, Homo sapiens
tgtgtaacagtggtgacttgatctta

SEQ ID NO: 48280 - DNA, 26 bp, Homo sapiens
gtgtaacagtggtgacttgatcttat

SEQ ID NO: 48281 - DNA, 26 bp, Homo sapiens
tgtaacagtggtgacttgatcttatg

SEQ ID NO: 48282 - DNA, 26 bp, Homo sapiens
gtaacagtggtgacttgatcttatga

SEQ ID NO: 48283 - DNA, 26 bp, Homo sapiens
taacagtggtgacttgatcttatgaa

SEQ ID NO: 48284 - DNA, 26 bp, Homo sapiens
aacagtggtgacttgatcttatgaag

SEQ ID NO: 48285 - DNA, 26 bp, Homo sapiens
acagtggtgacttgatcttatgaagg

SEQ ID NO: 48286 - DNA, 26 bp, Homo sapiens
cagtggtgacttgatcttatgaaggc

SEQ ID NO: 48287 - DNA, 26 bp, Homo sapiens
agtggtgacttgatcttatgaaggca

SEQ ID NO: 48288 - DNA, 26 bp, Homo sapiens
gtggtgacttgatcttatgaaggcag

SEQ ID NO: 48289 - DNA, 26 bp, Homo sapiens
tggtgacttgatcttatgaaggcagt

SEQ ID NO: 48290 - DNA, 26 bp, Homo sapiens
ggtgacttgatcttatgaaggcagta

SEQ ID NO: 48291 - DNA, 26 bp, Homo sapiens
gtgacttgatcttatgaaggcagtaa

SEQ ID NO: 48292 - DNA, 26 bp, Homo sapiens
tgacttgatcttatgaaggcagtaac

SEQ ID NO: 48293 - DNA, 26 bp, Homo sapiens
gacttgatcttatgaaggcagtaact

SEQ ID NO: 48294 - DNA, 26 bp, Homo sapiens
acttgatcttatgaaggcagtaactt

SEQ ID NO: 48295 - DNA, 26 bp, Homo sapiens
cttgatcttatgaaggcagtaacttt

SEQ ID NO: 48296 - DNA, 26 bp, Homo sapiens
ttgatcttatgaaggcagtaactttc

SEQ ID NO: 48297 - DNA, 26 bp, Homo sapiens
tgatcttatgaaggcagtaactttca

SEQ ID NO: 48298 - DNA, 26 bp, Homo sapiens
gatcttatgaaggcagtaactttcac

SEQ ID NO: 48299 - DNA, 26 bp, Homo sapiens
atcttatgaaggcagtaactttcaca

SEQ ID NO: 48300 - DNA, 26 bp, Homo sapiens
tcttatgaaggcagtaactttcacac

SEQ ID NO: 48301 - DNA, 26 bp, Homo sapiens
cttatgaaggcagtaactttcacaca

SEQ ID NO: 48302 - DNA, 26 bp, Homo sapiens
ttatgaaggcagtaactttcacacaa

SEQ ID NO: 48303 - DNA, 26 bp, Homo sapiens
tatgaaggcagtaactttcacacaat

SEQ ID NO: 48304 - DNA, 26 bp, Homo sapiens
atgaaggcagtaactttcacacaatt

SEQ ID NO: 48305 - DNA, 26 bp, Homo sapiens
tgaaggcagtaactttcacacaattg

SEQ ID NO: 48306 - DNA, 26 bp, Homo sapiens
gaaggcagtaactttcacacaattgt

SEQ ID NO: 48307 - DNA, 26 bp, Homo sapiens
aaggcagtaactttcacacaattgtc

SEQ ID NO: 48308 - DNA, 26 bp, Homo sapiens
aggcagtaactttcacacaattgtca

SEQ ID NO: 48309 - DNA, 26 bp, Homo sapiens
ggcagtaactttcacacaattgtcat

SEQ ID NO: 48310 - DNA, 26 bp, Homo sapiens
gcagtaactttcacacaattgtcatt

SEQ ID NO: 48311 - DNA, 26 bp, Homo sapiens
cagtaactttcacacaattgtcattc

SEQ ID NO: 48312 - DNA, 26 bp, Homo sapiens
agtaactttcacacaattgtcattca

SEQ ID NO: 48313 - DNA, 26 bp, Homo sapiens
gtaactttcacacaattgtcattcag

SEQ ID NO: 48314 - DNA, 26 bp, Homo sapiens
taactttcacacaattgtcattcagc

SEQ ID NO: 48315 - DNA, 26 bp, Homo sapiens
aactttcacacaattgtcattcagct

SEQ ID NO: 48316 - DNA, 26 bp, Homo sapiens
actttcacacaattgtcattcagctt

SEQ ID NO: 48317 - DNA, 26 bp, Homo sapiens
ctttcacacaattgtcattcagcttt

SEQ ID NO: 48318 - DNA, 26 bp, Homo sapiens
tttcacacaattgtcattcagcttta

SEQ ID NO: 48319 - DNA, 26 bp, Homo sapiens
ttcacacaattgtcattcagctttag

SEQ ID NO: 48320 - DNA, 26 bp, Homo sapiens
tcacacaattgtcattcagctttagt

SEQ ID NO: 48321 - DNA, 26 bp, Homo sapiens
cacacaattgtcattcagctttagta

SEQ ID NO: 48322 - DNA, 26 bp, Homo sapiens
acacaattgtcattcagctttagtat

SEQ ID NO: 48323 - DNA, 26 bp, Homo sapiens
cacaattgtcattcagctttagtata

SEQ ID NO: 48324 - DNA, 26 bp, Homo sapiens
acaattgtcattcagctttagtataa

SEQ ID NO: 48325 - DNA, 26 bp, Homo sapiens
caattgtcattcagctttagtataac

SEQ ID NO: 48326 - DNA, 26 bp, Homo sapiens
aattgtcattcagctttagtataacg

SEQ ID NO: 48327 - DNA, 26 bp, Homo sapiens
attgtcattcagctttagtataacgg

SEQ ID NO: 48328 - DNA, 26 bp, Homo sapiens
ttgtcattcagctttagtataacggg

SEQ ID NO: 48329 - DNA, 26 bp, Homo sapiens
tgtcattcagctttagtataacgggt

SEQ ID NO: 48330 - DNA, 26 bp, Homo sapiens
gtcattcagctttagtataacgggta

SEQ ID NO: 48331 - DNA, 26 bp, Homo sapiens
tcattcagctttagtataacgggtag

SEQ ID NO: 48332 - DNA, 26 bp, Homo sapiens
cattcagctttagtataacgggtagt

SEQ ID NO: 48333 - DNA, 26 bp, Homo sapiens
attcagctttagtataacgggtagta

SEQ ID NO: 48334 - DNA, 26 bp, Homo sapiens
ttcagctttagtataacgggtagtat

SEQ ID NO: 48335 - DNA, 26 bp, Homo sapiens
tcagctttagtataacgggtagtatg

SEQ ID NO: 48336 - DNA, 26 bp, Homo sapiens
cagctttagtataacgggtagtatga

SEQ ID NO: 48337 - DNA, 26 bp, Homo sapiens
agctttagtataacgggtagtatgat

SEQ ID NO: 48338 - DNA, 26 bp, Homo sapiens
gctttagtataacgggtagtatgatt

SEQ ID NO: 48339 - DNA, 26 bp, Homo sapiens
ctttagtataacgggtagtatgattc

SEQ ID NO: 48340 - DNA, 26 bp, Homo sapiens
tttagtataacgggtagtatgattca

SEQ ID NO: 48341 - DNA, 26 bp, Homo sapiens
ttagtataacgggtagtatgattcaa

SEQ ID NO: 48342 - DNA, 26 bp, Homo sapiens
tagtataacgggtagtatgattcaaa

SEQ ID NO: 48343 - DNA, 26 bp, Homo sapiens
agtataacgggtagtatgattcaaat

SEQ ID NO: 48344 - DNA, 26 bp, Homo sapiens
gtataacgggtagtatgattcaaata

SEQ ID NO: 48345 - DNA, 26 bp, Homo sapiens
tataacgggtagtatgattcaaataa

SEQ ID NO: 48346 - DNA, 26 bp, Homo sapiens
ataacgggtagtatgattcaaataac

SEQ ID NO: 48347 - DNA, 26 bp, Homo sapiens
taacgggtagtatgattcaaataaca

SEQ ID NO: 48348 - DNA, 26 bp, Homo sapiens
aacgggtagtatgattcaaataacac

SEQ ID NO: 48349 - DNA, 26 bp, Homo sapiens
acgggtagtatgattcaaataacact

SEQ ID NO: 48350 - DNA, 26 bp, Homo sapiens
cgggtagtatgattcaaataacactg

SEQ ID NO: 48351 - DNA, 26 bp, Homo sapiens
gggtagtatgattcaaataacactgg

SEQ ID NO: 48352 - DNA, 26 bp, Homo sapiens
ggtagtatgattcaaataacactggg

SEQ ID NO: 48353 - DNA, 26 bp, Homo sapiens
gtagtatgattcaaataacactggga

SEQ ID NO: 48354 - DNA, 26 bp, Homo sapiens
tagtatgattcaaataacactgggaa

SEQ ID NO: 48355 - DNA, 26 bp, Homo sapiens
agtatgattcaaataacactgggaaa

SEQ ID NO: 48356 - DNA, 26 bp, Homo sapiens
gtatgattcaaataacactgggaaaa

SEQ ID NO: 48357 - DNA, 26 bp, Homo sapiens
tatgattcaaataacactgggaaaaa

SEQ ID NO: 48358 - DNA, 26 bp, Homo sapiens
atgattcaaataacactgggaaaaag

SEQ ID NO: 48359 - DNA, 26 bp, Homo sapiens
tgattcaaataacactgggaaaaagt

SEQ ID NO: 48360 - DNA, 26 bp, Homo sapiens
gattcaaataacactgggaaaaagtt

SEQ ID NO: 48361 - DNA, 26 bp, Homo sapiens
attcaaataacactgggaaaaagtta

SEQ ID NO: 48362 - DNA, 26 bp, Homo sapiens
ttcaaataacactgggaaaaagttat

SEQ ID NO: 48363 - DNA, 26 bp, Homo sapiens
tcaaataacactgggaaaaagttatt

SEQ ID NO: 48364 - DNA, 26 bp, Homo sapiens
caaataacactgggaaaaagttatta

SEQ ID NO: 48365 - DNA, 26 bp, Homo sapiens
aaataacactgggaaaaagttattaa

SEQ ID NO: 48366 - DNA, 26 bp, Homo sapiens
aataacactgggaaaaagttattaaa

SEQ ID NO: 48367 - DNA, 26 bp, Homo sapiens
ataacactgggaaaaagttattaaag

SEQ ID NO: 48368 - DNA, 26 bp, Homo sapiens
taacactgggaaaaagttattaaagc

SEQ ID NO: 48369 - DNA, 26 bp, Homo sapiens
aacactgggaaaaagttattaaagca

SEQ ID NO: 48370 - DNA, 26 bp, Homo sapiens
acactgggaaaaagttattaaagcag

SEQ ID NO: 48371 - DNA, 26 bp, Homo sapiens
cactgggaaaaagttattaaagcagt

SEQ ID NO: 48372 - DNA, 26 bp, Homo sapiens
actgggaaaaagttattaaagcagtc

SEQ ID NO: 48373 - DNA, 26 bp, Homo sapiens
ctgggaaaaagttattaaagcagtca

SEQ ID NO: 48374 - DNA, 26 bp, Homo sapiens
tgggaaaaagttattaaagcagtcac

SEQ ID NO: 48375 - DNA, 26 bp, Homo sapiens
gggaaaaagttattaaagcagtcaca

SEQ ID NO: 48376 - DNA, 26 bp, Homo sapiens
ggaaaaagttattaaagcagtcacac

SEQ ID NO: 48377 - DNA, 26 bp, Homo sapiens
gaaaaagttattaaagcagtcacaca

SEQ ID NO: 48378 - DNA, 26 bp, Homo sapiens
aaaaagttattaaagcagtcacacag

SEQ ID NO: 48379 - DNA, 26 bp, Homo sapiens
aaaagttattaaagcagtcacacagc

SEQ ID NO: 48380 - DNA, 26 bp, Homo sapiens
aaagttattaaagcagtcacacagct

SEQ ID NO: 48381 - DNA, 26 bp, Homo sapiens
aagttattaaagcagtcacacagctt

SEQ ID NO: 48382 - DNA, 26 bp, Homo sapiens
agttattaaagcagtcacacagcttc

SEQ ID NO: 48383 - DNA, 26 bp, Homo sapiens
gttattaaagcagtcacacagcttct

SEQ ID NO: 48384 - DNA, 26 bp, Homo sapiens
ttattaaagcagtcacacagcttcta

SEQ ID NO: 48385 - DNA, 26 bp, Homo sapiens
tattaaagcagtcacacagcttctaa

SEQ ID NO: 48386 - DNA, 26 bp, Homo sapiens
attaaagcagtcacacagcttctaaa

SEQ ID NO: 48387 - DNA, 26 bp, Homo sapiens
ttaaagcagtcacacagcttctaaaa

SEQ ID NO: 48388 - DNA, 26 bp, Homo sapiens
taaagcagtcacacagcttctaaaat

SEQ ID NO: 48389 - DNA, 26 bp, Homo sapiens
aaagcagtcacacagcttctaaaata

SEQ ID NO: 48390 - DNA, 26 bp, Homo sapiens
aagcagtcacacagcttctaaaatat

SEQ ID NO: 48391 - DNA, 26 bp, Homo sapiens
agcagtcacacagcttctaaaatatt

SEQ ID NO: 48392 - DNA, 26 bp, Homo sapiens
gcagtcacacagcttctaaaatattg

SEQ ID NO: 48393 - DNA, 26 bp, Homo sapiens
cagtcacacagcttctaaaatattgc

SEQ ID NO: 48394 - DNA, 26 bp, Homo sapiens
agtcacacagcttctaaaatattgct

SEQ ID NO: 48395 - DNA, 26 bp, Homo sapiens
gtcacacagcttctaaaatattgctt

SEQ ID NO: 48396 - DNA, 26 bp, Homo sapiens
tcacacagcttctaaaatattgctta

SEQ ID NO: 48397 - DNA, 26 bp, Homo sapiens
cacacagcttctaaaatattgcttaa

SEQ ID NO: 48398 - DNA, 26 bp, Homo sapiens
acacagcttctaaaatattgcttaaa

SEQ ID NO: 48399 - DNA, 26 bp, Homo sapiens
cacagcttctaaaatattgcttaaaa

SEQ ID NO: 48400 - DNA, 26 bp, Homo sapiens
acagcttctaaaatattgcttaaaat

SEQ ID NO: 48401 - DNA, 26 bp, Homo sapiens
cagcttctaaaatattgcttaaaatt

SEQ ID NO: 48402 - DNA, 26 bp, Homo sapiens
agcttctaaaatattgcttaaaattc

SEQ ID NO: 48403 - DNA, 26 bp, Homo sapiens
gcttctaaaatattgcttaaaattca

SEQ ID NO: 48404 - DNA, 26 bp, Homo sapiens
cttctaaaatattgcttaaaattcaa

SEQ ID NO: 48405 - DNA, 26 bp, Homo sapiens
ttctaaaatattgcttaaaattcaat

SEQ ID NO: 48406 - DNA, 26 bp, Homo sapiens
tctaaaatattgcttaaaattcaata

SEQ ID NO: 48407 - DNA, 26 bp, Homo sapiens
ctaaaatattgcttaaaattcaataa

SEQ ID NO: 48408 - DNA, 26 bp, Homo sapiens
taaaatattgcttaaaattcaataat

SEQ ID NO: 48409 - DNA, 26 bp, Homo sapiens
aaaatattgcttaaaattcaataata

SEQ ID NO: 48410 - DNA, 26 bp, Homo sapiens
aaatattgcttaaaattcaataatac

SEQ ID NO: 48411 - DNA, 26 bp, Homo sapiens
aatattgcttaaaattcaataataca

SEQ ID NO: 48412 - DNA, 26 bp, Homo sapiens
atattgcttaaaattcaataatacac

SEQ ID NO: 48413 - DNA, 26 bp, Homo sapiens
tattgcttaaaattcaataatacaca

SEQ ID NO: 48414 - DNA, 26 bp, Homo sapiens
attgcttaaaattcaataatacacaa

SEQ ID NO: 48415 - DNA, 26 bp, Homo sapiens
ttgcttaaaattcaataatacacaaa

SEQ ID NO: 48416 - DNA, 26 bp, Homo sapiens
tgcttaaaattcaataatacacaaac

SEQ ID NO: 48417 - DNA, 26 bp, Homo sapiens
gcttaaaattcaataatacacaaacc

SEQ ID NO: 48418 - DNA, 26 bp, Homo sapiens
cttaaaattcaataatacacaaacca

SEQ ID NO: 48419 - DNA, 26 bp, Homo sapiens
ttaaaattcaataatacacaaaccat

SEQ ID NO: 48420 - DNA, 26 bp, Homo sapiens
taaaattcaataatacacaaaccatt

SEQ ID NO: 48421 - DNA, 26 bp, Homo sapiens
aaaattcaataatacacaaaccattt

SEQ ID NO: 48422 - DNA, 26 bp, Homo sapiens
aaattcaataatacacaaaccatttc

SEQ ID NO: 48423 - DNA, 26 bp, Homo sapiens
aattcaataatacacaaaccatttca

SEQ ID NO: 48424 - DNA, 26 bp, Homo sapiens
attcaataatacacaaaccatttcac

SEQ ID NO: 48425 - DNA, 26 bp, Homo sapiens
ttcaataatacacaaaccatttcacg

SEQ ID NO: 48426 - DNA, 26 bp, Homo sapiens
tcaataatacacaaaccatttcacgt

SEQ ID NO: 48427 - DNA, 26 bp, Homo sapiens
caataatacacaaaccatttcacgtt

SEQ ID NO: 48428 - DNA, 26 bp, Homo sapiens
aataatacacaaaccatttcacgttc

SEQ ID NO: 48429 - DNA, 26 bp, Homo sapiens
ataatacacaaaccatttcacgttct

SEQ ID NO: 48430 - DNA, 26 bp, Homo sapiens
taatacacaaaccatttcacgttctt

SEQ ID NO: 48431 - DNA, 26 bp, Homo sapiens
aatacacaaaccatttcacgttcttt

SEQ ID NO: 48432 - DNA, 26 bp, Homo sapiens
atacacaaaccatttcacgttctttc

SEQ ID NO: 48433 - DNA, 26 bp, Homo sapiens
tacacaaaccatttcacgttctttct

SEQ ID NO: 48434 - DNA, 26 bp, Homo sapiens
acacaaaccatttcacgttctttctc

SEQ ID NO: 48435 - DNA, 26 bp, Homo sapiens
cacaaaccatttcacgttctttctcc

SEQ ID NO: 48436 - DNA, 26 bp, Homo sapiens
acaaaccatttcacgttctttctccc

SEQ ID NO: 48437 - DNA, 26 bp, Homo sapiens
caaaccatttcacgttctttctcccc

SEQ ID NO: 48438 - DNA, 26 bp, Homo sapiens
aaaccatttcacgttctttctcccct

SEQ ID NO: 48439 - DNA, 26 bp, Homo sapiens
aaccatttcacgttctttctcccctc

SEQ ID NO: 48440 - DNA, 26 bp, Homo sapiens
accatttcacgttctttctcccctca

SEQ ID NO: 48441 - DNA, 26 bp, Homo sapiens
ccatttcacgttctttctcccctcaa

SEQ ID NO: 48442 - DNA, 26 bp, Homo sapiens
catttcacgttctttctcccctcaaa

SEQ ID NO: 48443 - DNA, 26 bp, Homo sapiens
atttcacgttctttctcccctcaaaa

SEQ ID NO: 48444 - DNA, 26 bp, Homo sapiens
tttcacgttctttctcccctcaaaac

SEQ ID NO: 48445 - DNA, 26 bp, Homo sapiens
ttcacgttctttctcccctcaaaaca

SEQ ID NO: 48446 - DNA, 26 bp, Homo sapiens
tcacgttctttctcccctcaaaacag

SEQ ID NO: 48447 - DNA, 26 bp, Homo sapiens
cacgttctttctcccctcaaaacagt

SEQ ID NO: 48448 - DNA, 26 bp, Homo sapiens
acgttctttctcccctcaaaacagta

SEQ ID NO: 48449 - DNA, 26 bp, Homo sapiens
cgttctttctcccctcaaaacagtaa

SEQ ID NO: 48450 - DNA, 26 bp, Homo sapiens
gttctttctcccctcaaaacagtaaa

SEQ ID NO: 48451 - DNA, 26 bp, Homo sapiens
ttctttctcccctcaaaacagtaaag

SEQ ID NO: 48452 - DNA, 26 bp, Homo sapiens
tctttctcccctcaaaacagtaaaga

SEQ ID NO: 48453 - DNA, 26 bp, Homo sapiens
ctttctcccctcaaaacagtaaagaa

SEQ ID NO: 48454 - DNA, 26 bp, Homo sapiens
tttctcccctcaaaacagtaaagaac

SEQ ID NO: 48455 - DNA, 26 bp, Homo sapiens
ttctcccctcaaaacagtaaagaacc

SEQ ID NO: 48456 - DNA, 26 bp, Homo sapiens
tctcccctcaaaacagtaaagaacca

SEQ ID NO: 48457 - DNA, 26 bp, Homo sapiens
ctcccctcaaaacagtaaagaaccaa

SEQ ID NO: 48458 - DNA, 26 bp, Homo sapiens
tcccctcaaaacagtaaagaaccaaa

SEQ ID NO: 48459 - DNA, 26 bp, Homo sapiens
cccctcaaaacagtaaagaaccaaat

SEQ ID NO: 48460 - DNA, 26 bp, Homo sapiens
ccctcaaaacagtaaagaaccaaatt

SEQ ID NO: 48461 - DNA, 26 bp, Homo sapiens
cctcaaaacagtaaagaaccaaatta

SEQ ID NO: 48462 - DNA, 26 bp, Homo sapiens
ctcaaaacagtaaagaaccaaattaa

SEQ ID NO: 48463 - DNA, 26 bp, Homo sapiens
tcaaaacagtaaagaaccaaattaat

SEQ ID NO: 48464 - DNA, 26 bp, Homo sapiens
caaaacagtaaagaaccaaattaatg

SEQ ID NO: 48465 - DNA, 26 bp, Homo sapiens
aaaacagtaaagaaccaaattaatga

SEQ ID NO: 48466 - DNA, 26 bp, Homo sapiens
aaacagtaaagaaccaaattaatgaa

SEQ ID NO: 48467 - DNA, 26 bp, Homo sapiens
aacagtaaagaaccaaattaatgaag

SEQ ID NO: 48468 - DNA, 26 bp, Homo sapiens
acagtaaagaaccaaattaatgaaga

SEQ ID NO: 48469 - DNA, 26 bp, Homo sapiens
cagtaaagaaccaaattaatgaagat

SEQ ID NO: 48470 - DNA, 26 bp, Homo sapiens
agtaaagaaccaaattaatgaagatt

SEQ ID NO: 48471 - DNA, 26 bp, Homo sapiens
gtaaagaaccaaattaatgaagattc

SEQ ID NO: 48472 - DNA, 26 bp, Homo sapiens
taaagaaccaaattaatgaagattca

SEQ ID NO: 48473 - DNA, 26 bp, Homo sapiens
aaagaaccaaattaatgaagattcag

SEQ ID NO: 48474 - DNA, 26 bp, Homo sapiens
aagaaccaaattaatgaagattcagt

SEQ ID NO: 48475 - DNA, 26 bp, Homo sapiens
agaaccaaattaatgaagattcagtg

SEQ ID NO: 48476 - DNA, 26 bp, Homo sapiens
gaaccaaattaatgaagattcagtgg

SEQ ID NO: 48477 - DNA, 26 bp, Homo sapiens
aaccaaattaatgaagattcagtggt

SEQ ID NO: 48478 - DNA, 26 bp, Homo sapiens
accaaattaatgaagattcagtggta

SEQ ID NO: 48479 - DNA, 26 bp, Homo sapiens
ccaaattaatgaagattcagtggtac

SEQ ID NO: 48480 - DNA, 26 bp, Homo sapiens
caaattaatgaagattcagtggtaca

SEQ ID NO: 48481 - DNA, 26 bp, Homo sapiens
aaattaatgaagattcagtggtacaa

SEQ ID NO: 48482 - DNA, 26 bp, Homo sapiens
aattaatgaagattcagtggtacaaa

SEQ ID NO: 48483 - DNA, 26 bp, Homo sapiens
attaatgaagattcagtggtacaaat

SEQ ID NO: 48484 - DNA, 26 bp, Homo sapiens
ttaatgaagattcagtggtacaaata

SEQ ID NO: 48485 - DNA, 26 bp, Homo sapiens
taatgaagattcagtggtacaaataa

SEQ ID NO: 48486 - DNA, 26 bp, Homo sapiens
aatgaagattcagtggtacaaataac

SEQ ID NO: 48487 - DNA, 26 bp, Homo sapiens
atgaagattcagtggtacaaataacc

SEQ ID NO: 48488 - DNA, 26 bp, Homo sapiens
tgaagattcagtggtacaaataaccc

SEQ ID NO: 48489 - DNA, 26 bp, Homo sapiens
gaagattcagtggtacaaataacccc

SEQ ID NO: 48490 - DNA, 26 bp, Homo sapiens
aagattcagtggtacaaataaccccc

SEQ ID NO: 48491 - DNA, 26 bp, Homo sapiens
agattcagtggtacaaataacccccc

SEQ ID NO: 48492 - DNA, 26 bp, Homo sapiens
gattcagtggtacaaataacccccca

SEQ ID NO: 48493 - DNA, 26 bp, Homo sapiens
attcagtggtacaaataaccccccac

SEQ ID NO: 48494 - DNA, 26 bp, Homo sapiens
ttcagtggtacaaataaccccccacc

SEQ ID NO: 48495 - DNA, 26 bp, Homo sapiens
tcagtggtacaaataaccccccacct

SEQ ID NO: 48496 - DNA, 26 bp, Homo sapiens
cagtggtacaaataaccccccacctg

SEQ ID NO: 48497 - DNA, 26 bp, Homo sapiens
agtggtacaaataaccccccacctgc

SEQ ID NO: 48498 - DNA, 26 bp, Homo sapiens
gtggtacaaataaccccccacctgcc

SEQ ID NO: 48499 - DNA, 26 bp, Homo sapiens
tggtacaaataaccccccacctgccc

SEQ ID NO: 48500 - DNA, 26 bp, Homo sapiens
ggtacaaataaccccccacctgcccc

SEQ ID NO: 48501 - DNA, 26 bp, Homo sapiens
gtacaaataaccccccacctgcccca

SEQ ID NO: 48502 - DNA, 26 bp, Homo sapiens
tacaaataaccccccacctgccccat

SEQ ID NO: 48503 - DNA, 26 bp, Homo sapiens
acaaataaccccccacctgccccatc

SEQ ID NO: 48504 - DNA, 26 bp, Homo sapiens
caaataaccccccacctgccccatct

SEQ ID NO: 48505 - DNA, 26 bp, Homo sapiens
aaataaccccccacctgccccatctc

SEQ ID NO: 48506 - DNA, 26 bp, Homo sapiens
aataaccccccacctgccccatctcc

SEQ ID NO: 48507 - DNA, 26 bp, Homo sapiens
ataaccccccacctgccccatctccc

SEQ ID NO: 48508 - DNA, 26 bp, Homo sapiens
taaccccccacctgccccatctccct

SEQ ID NO: 48509 - DNA, 26 bp, Homo sapiens
aaccccccacctgccccatctcccta

SEQ ID NO: 48510 - DNA, 26 bp, Homo sapiens
accccccacctgccccatctccctat

SEQ ID NO: 48511 - DNA, 26 bp, Homo sapiens
ccccccacctgccccatctccctatt

SEQ ID NO: 48512 - DNA, 26 bp, Homo sapiens
cccccacctgccccatctccctatta

SEQ ID NO: 48513 - DNA, 26 bp, Homo sapiens
ccccacctgccccatctccctattac

SEQ ID NO: 48514 - DNA, 26 bp, Homo sapiens
cccacctgccccatctccctattaca

SEQ ID NO: 48515 - DNA, 26 bp, Homo sapiens
ccacctgccccatctccctattacaa

SEQ ID NO: 48516 - DNA, 26 bp, Homo sapiens
cacctgccccatctccctattacaac

SEQ ID NO: 48517 - DNA, 26 bp, Homo sapiens
acctgccccatctccctattacaaca

SEQ ID NO: 48518 - DNA, 26 bp, Homo sapiens
cctgccccatctccctattacaacac

SEQ ID NO: 48519 - DNA, 26 bp, Homo sapiens
ctgccccatctccctattacaacacc

SEQ ID NO: 48520 - DNA, 26 bp, Homo sapiens
tgccccatctccctattacaacacca

SEQ ID NO: 48521 - DNA, 26 bp, Homo sapiens
gccccatctccctattacaacaccac

SEQ ID NO: 48522 - DNA, 26 bp, Homo sapiens
ccccatctccctattacaacaccact

SEQ ID NO: 48523 - DNA, 26 bp, Homo sapiens
cccatctccctattacaacaccacta

SEQ ID NO: 48524 - DNA, 26 bp, Homo sapiens
ccatctccctattacaacaccactaa

SEQ ID NO: 48525 - DNA, 26 bp, Homo sapiens
catctccctattacaacaccactaag

SEQ ID NO: 48526 - DNA, 26 bp, Homo sapiens
atctccctattacaacaccactaaga

SEQ ID NO: 48527 - DNA, 26 bp, Homo sapiens
tctccctattacaacaccactaagaa

SEQ ID NO: 48528 - DNA, 26 bp, Homo sapiens
ctccctattacaacaccactaagaaa

SEQ ID NO: 48529 - DNA, 26 bp, Homo sapiens
tccctattacaacaccactaagaaat

SEQ ID NO: 48530 - DNA, 26 bp, Homo sapiens
ccctattacaacaccactaagaaatt

SEQ ID NO: 48531 - DNA, 26 bp, Homo sapiens
cctattacaacaccactaagaaatta

SEQ ID NO: 48532 - DNA, 26 bp, Homo sapiens
ctattacaacaccactaagaaattag

SEQ ID NO: 48533 - DNA, 26 bp, Homo sapiens
tattacaacaccactaagaaattagt

SEQ ID NO: 48534 - DNA, 26 bp, Homo sapiens
attacaacaccactaagaaattagtt

SEQ ID NO: 48535 - DNA, 26 bp, Homo sapiens
ttacaacaccactaagaaattagtta

SEQ ID NO: 48536 - DNA, 26 bp, Homo sapiens
tacaacaccactaagaaattagttaa

SEQ ID NO: 48537 - DNA, 26 bp, Homo sapiens
acaacaccactaagaaattagttaag

SEQ ID NO: 48538 - DNA, 26 bp, Homo sapiens
caacaccactaagaaattagttaaga

SEQ ID NO: 48539 - DNA, 26 bp, Homo sapiens
aacaccactaagaaattagttaagat

SEQ ID NO: 48540 - DNA, 26 bp, Homo sapiens
acaccactaagaaattagttaagata

SEQ ID NO: 48541 - DNA, 26 bp, Homo sapiens
caccactaagaaattagttaagatac

SEQ ID NO: 48542 - DNA, 26 bp, Homo sapiens
accactaagaaattagttaagataca

SEQ ID NO: 48543 - DNA, 26 bp, Homo sapiens
ccactaagaaattagttaagatacat

SEQ ID NO: 48544 - DNA, 26 bp, Homo sapiens
cactaagaaattagttaagatacatg

SEQ ID NO: 48545 - DNA, 26 bp, Homo sapiens
actaagaaattagttaagatacatgt

SEQ ID NO: 48546 - DNA, 26 bp, Homo sapiens
ctaagaaattagttaagatacatgtc

SEQ ID NO: 48547 - DNA, 26 bp, Homo sapiens
taagaaattagttaagatacatgtca

SEQ ID NO: 48548 - DNA, 26 bp, Homo sapiens
aagaaattagttaagatacatgtcat

SEQ ID NO: 48549 - DNA, 26 bp, Homo sapiens
agaaattagttaagatacatgtcatt

SEQ ID NO: 48550 - DNA, 26 bp, Homo sapiens
gaaattagttaagatacatgtcatta

SEQ ID NO: 48551 - DNA, 26 bp, Homo sapiens
aaattagttaagatacatgtcattaa

SEQ ID NO: 48552 - DNA, 26 bp, Homo sapiens
aattagttaagatacatgtcattaac

SEQ ID NO: 48553 - DNA, 26 bp, Homo sapiens
attagttaagatacatgtcattaaca

SEQ ID NO: 48554 - DNA, 26 bp, Homo sapiens
ttagttaagatacatgtcattaacag

SEQ ID NO: 48555 - DNA, 26 bp, Homo sapiens
tagttaagatacatgtcattaacaga

SEQ ID NO: 48556 - DNA, 26 bp, Homo sapiens
agttaagatacatgtcattaacagaa

SEQ ID NO: 48557 - DNA, 26 bp, Homo sapiens
gttaagatacatgtcattaacagaat

SEQ ID NO: 48558 - DNA, 26 bp, Homo sapiens
ttaagatacatgtcattaacagaatc

SEQ ID NO: 48559 - DNA, 26 bp, Homo sapiens
taagatacatgtcattaacagaatca

SEQ ID NO: 48560 - DNA, 26 bp, Homo sapiens
aagatacatgtcattaacagaatcac

SEQ ID NO: 48561 - DNA, 26 bp, Homo sapiens
agatacatgtcattaacagaatcaca

SEQ ID NO: 48562 - DNA, 26 bp, Homo sapiens
gatacatgtcattaacagaatcacaa

SEQ ID NO: 48563 - DNA, 26 bp, Homo sapiens
atacatgtcattaacagaatcacaaa

SEQ ID NO: 48564 - DNA, 26 bp, Homo sapiens
tacatgtcattaacagaatcacaaat

SEQ ID NO: 48565 - DNA, 26 bp, Homo sapiens
acatgtcattaacagaatcacaaatg

SEQ ID NO: 48566 - DNA, 26 bp, Homo sapiens
catgtcattaacagaatcacaaatgc

SEQ ID NO: 48567 - DNA, 26 bp, Homo sapiens
atgtcattaacagaatcacaaatgcg

SEQ ID NO: 48568 - DNA, 26 bp, Homo sapiens
tgtcattaacagaatcacaaatgcga

SEQ ID NO: 48569 - DNA, 26 bp, Homo sapiens
gtcattaacagaatcacaaatgcgag

SEQ ID NO: 48570 - DNA, 26 bp, Homo sapiens
tcattaacagaatcacaaatgcgagg

SEQ ID NO: 48571 - DNA, 26 bp, Homo sapiens
cattaacagaatcacaaatgcgaggc

SEQ ID NO: 48572 - DNA, 26 bp, Homo sapiens
attaacagaatcacaaatgcgaggca

SEQ ID NO: 48573 - DNA, 26 bp, Homo sapiens
ttaacagaatcacaaatgcgaggcag

SEQ ID NO: 48574 - DNA, 26 bp, Homo sapiens
taacagaatcacaaatgcgaggcagg

SEQ ID NO: 48575 - DNA, 26 bp, Homo sapiens
aacagaatcacaaatgcgaggcagga

SEQ ID NO: 48576 - DNA, 26 bp, Homo sapiens
acagaatcacaaatgcgaggcaggac

SEQ ID NO: 48577 - DNA, 26 bp, Homo sapiens
cagaatcacaaatgcgaggcaggaca

SEQ ID NO: 48578 - DNA, 26 bp, Homo sapiens
agaatcacaaatgcgaggcaggacac

SEQ ID NO: 48579 - DNA, 26 bp, Homo sapiens
gaatcacaaatgcgaggcaggacacc

SEQ ID NO: 48580 - DNA, 26 bp, Homo sapiens
aatcacaaatgcgaggcaggacacca

SEQ ID NO: 48581 - DNA, 26 bp, Homo sapiens
atcacaaatgcgaggcaggacaccat

SEQ ID NO: 48582 - DNA, 26 bp, Homo sapiens
tcacaaatgcgaggcaggacaccatg

SEQ ID NO: 48583 - DNA, 26 bp, Homo sapiens
cacaaatgcgaggcaggacaccatga

SEQ ID NO: 48584 - DNA, 26 bp, Homo sapiens
acaaatgcgaggcaggacaccatgag

SEQ ID NO: 48585 - DNA, 26 bp, Homo sapiens
caaatgcgaggcaggacaccatgagc

SEQ ID NO: 48586 - DNA, 26 bp, Homo sapiens
aaatgcgaggcaggacaccatgagca

SEQ ID NO: 48587 - DNA, 26 bp, Homo sapiens
aatgcgaggcaggacaccatgagcaa

SEQ ID NO: 48588 - DNA, 26 bp, Homo sapiens
atgcgaggcaggacaccatgagcaac

SEQ ID NO: 48589 - DNA, 26 bp, Homo sapiens
tgcgaggcaggacaccatgagcaaca

SEQ ID NO: 48590 - DNA, 26 bp, Homo sapiens
gcgaggcaggacaccatgagcaacag

SEQ ID NO: 48591 - DNA, 26 bp, Homo sapiens
cgaggcaggacaccatgagcaacagg

SEQ ID NO: 48592 - DNA, 26 bp, Homo sapiens
gaggcaggacaccatgagcaacagga

SEQ ID NO: 48593 - DNA, 26 bp, Homo sapiens
aggcaggacaccatgagcaacaggag

SEQ ID NO: 48594 - DNA, 26 bp, Homo sapiens
ggcaggacaccatgagcaacaggagc

SEQ ID NO: 48595 - DNA, 26 bp, Homo sapiens
gcaggacaccatgagcaacaggagca

SEQ ID NO: 48596 - DNA, 26 bp, Homo sapiens
caggacaccatgagcaacaggagcac

SEQ ID NO: 48597 - DNA, 26 bp, Homo sapiens
aggacaccatgagcaacaggagcact

SEQ ID NO: 48598 - DNA, 26 bp, Homo sapiens
ggacaccatgagcaacaggagcacta

SEQ ID NO: 48599 - DNA, 26 bp, Homo sapiens
gacaccatgagcaacaggagcactaa

SEQ ID NO: 48600 - DNA, 26 bp, Homo sapiens
acaccatgagcaacaggagcactaac

SEQ ID NO: 48601 - DNA, 26 bp, Homo sapiens
caccatgagcaacaggagcactaaca

SEQ ID NO: 48602 - DNA, 26 bp, Homo sapiens
accatgagcaacaggagcactaacaa

SEQ ID NO: 48603 - DNA, 26 bp, Homo sapiens
ccatgagcaacaggagcactaacaac

SEQ ID NO: 48604 - DNA, 26 bp, Homo sapiens
catgagcaacaggagcactaacaaca

SEQ ID NO: 48605 - DNA, 26 bp, Homo sapiens
atgagcaacaggagcactaacaacaa

SEQ ID NO: 48606 - DNA, 26 bp, Homo sapiens
tgagcaacaggagcactaacaacaat

SEQ ID NO: 48607 - DNA, 26 bp, Homo sapiens
gagcaacaggagcactaacaacaatc

SEQ ID NO: 48608 - DNA, 26 bp, Homo sapiens
agcaacaggagcactaacaacaatca

SEQ ID NO: 48609 - DNA, 26 bp, Homo sapiens
gcaacaggagcactaacaacaatcat

SEQ ID NO: 48610 - DNA, 26 bp, Homo sapiens
caacaggagcactaacaacaatcata

SEQ ID NO: 48611 - DNA, 26 bp, Homo sapiens
aacaggagcactaacaacaatcatat

SEQ ID NO: 48612 - DNA, 26 bp, Homo sapiens
acaggagcactaacaacaatcatatt

SEQ ID NO: 48613 - DNA, 26 bp, Homo sapiens
caggagcactaacaacaatcatattt

SEQ ID NO: 48614 - DNA, 26 bp, Homo sapiens
aggagcactaacaacaatcatattta

SEQ ID NO: 48615 - DNA, 26 bp, Homo sapiens
ggagcactaacaacaatcatatttac

SEQ ID NO: 48616 - DNA, 26 bp, Homo sapiens
gagcactaacaacaatcatatttaca

SEQ ID NO: 48617 - DNA, 26 bp, Homo sapiens
agcactaacaacaatcatatttacaa

SEQ ID NO: 48618 - DNA, 26 bp, Homo sapiens
gcactaacaacaatcatatttacaag

SEQ ID NO: 48619 - DNA, 26 bp, Homo sapiens
cactaacaacaatcatatttacaagt

SEQ ID NO: 48620 - DNA, 26 bp, Homo sapiens
actaacaacaatcatatttacaagta

SEQ ID NO: 48621 - DNA, 26 bp, Homo sapiens
ctaacaacaatcatatttacaagtat

SEQ ID NO: 48622 - DNA, 26 bp, Homo sapiens
taacaacaatcatatttacaagtata

SEQ ID NO: 48623 - DNA, 26 bp, Homo sapiens
aacaacaatcatatttacaagtataa

SEQ ID NO: 48624 - DNA, 26 bp, Homo sapiens
acaacaatcatatttacaagtataaa

SEQ ID NO: 48625 - DNA, 26 bp, Homo sapiens
caacaatcatatttacaagtataaac

SEQ ID NO: 48626 - DNA, 26 bp, Homo sapiens
aacaatcatatttacaagtataaaca

SEQ ID NO: 48627 - DNA, 26 bp, Homo sapiens
acaatcatatttacaagtataaacat

SEQ ID NO: 48628 - DNA, 26 bp, Homo sapiens
caatcatatttacaagtataaacata

SEQ ID NO: 48629 - DNA, 26 bp, Homo sapiens
aatcatatttacaagtataaacatac

SEQ ID NO: 48630 - DNA, 26 bp, Homo sapiens
atcatatttacaagtataaacataca

SEQ ID NO: 48631 - DNA, 26 bp, Homo sapiens
tcatatttacaagtataaacatacag

SEQ ID NO: 48632 - DNA, 26 bp, Homo sapiens
catatttacaagtataaacatacaga

SEQ ID NO: 48633 - DNA, 26 bp, Homo sapiens
atatttacaagtataaacatacagaa

SEQ ID NO: 48634 - DNA, 26 bp, Homo sapiens
tatttacaagtataaacatacagaaa

SEQ ID NO: 48635 - DNA, 26 bp, Homo sapiens
atttacaagtataaacatacagaaat

SEQ ID NO: 48636 - DNA, 26 bp, Homo sapiens
tttacaagtataaacatacagaaatt

SEQ ID NO: 48637 - DNA, 26 bp, Homo sapiens
ttacaagtataaacatacagaaattc

SEQ ID NO: 48638 - DNA, 26 bp, Homo sapiens
tacaagtataaacatacagaaattcc

SEQ ID NO: 48639 - DNA, 26 bp, Homo sapiens
acaagtataaacatacagaaattcca

SEQ ID NO: 48640 - DNA, 26 bp, Homo sapiens
caagtataaacatacagaaattccat

SEQ ID NO: 48641 - DNA, 26 bp, Homo sapiens
aagtataaacatacagaaattccatt

SEQ ID NO: 48642 - DNA, 26 bp, Homo sapiens
agtataaacatacagaaattccattt

SEQ ID NO: 48643 - DNA, 26 bp, Homo sapiens
gtataaacatacagaaattccatttt

SEQ ID NO: 48644 - DNA, 26 bp, Homo sapiens
tataaacatacagaaattccatttta

SEQ ID NO: 48645 - DNA, 26 bp, Homo sapiens
ataaacatacagaaattccattttac

SEQ ID NO: 48646 - DNA, 26 bp, Homo sapiens
taaacatacagaaattccattttaca

SEQ ID NO: 48647 - DNA, 26 bp, Homo sapiens
aaacatacagaaattccattttacaa

SEQ ID NO: 48648 - DNA, 26 bp, Homo sapiens
aacatacagaaattccattttacaag

SEQ ID NO: 48649 - DNA, 26 bp, Homo sapiens
acatacagaaattccattttacaagt

SEQ ID NO: 48650 - DNA, 26 bp, Homo sapiens
catacagaaattccattttacaagta

SEQ ID NO: 48651 - DNA, 26 bp, Homo sapiens
atacagaaattccattttacaagtaa

SEQ ID NO: 48652 - DNA, 26 bp, Homo sapiens
tacagaaattccattttacaagtaaa

SEQ ID NO: 48653 - DNA, 26 bp, Homo sapiens
acagaaattccattttacaagtaaaa

SEQ ID NO: 48654 - DNA, 26 bp, Homo sapiens
cagaaattccattttacaagtaaaag

SEQ ID NO: 48655 - DNA, 26 bp, Homo sapiens
agaaattccattttacaagtaaaagt

SEQ ID NO: 48656 - DNA, 26 bp, Homo sapiens
gaaattccattttacaagtaaaagtg

SEQ ID NO: 48657 - DNA, 26 bp, Homo sapiens
aaattccattttacaagtaaaagtgc

SEQ ID NO: 48658 - DNA, 26 bp, Homo sapiens
aattccattttacaagtaaaagtgca

SEQ ID NO: 48659 - DNA, 26 bp, Homo sapiens
attccattttacaagtaaaagtgcac

SEQ ID NO: 48660 - DNA, 26 bp, Homo sapiens
ttccattttacaagtaaaagtgcaca

SEQ ID NO: 48661 - DNA, 26 bp, Homo sapiens
tccattttacaagtaaaagtgcacat

SEQ ID NO: 48662 - DNA, 26 bp, Homo sapiens
ccattttacaagtaaaagtgcacata

SEQ ID NO: 48663 - DNA, 26 bp, Homo sapiens
cattttacaagtaaaagtgcacatag

SEQ ID NO: 48664 - DNA, 26 bp, Homo sapiens
attttacaagtaaaagtgcacataga

SEQ ID NO: 48665 - DNA, 26 bp, Homo sapiens
ttttacaagtaaaagtgcacatagat

SEQ ID NO: 48666 - DNA, 26 bp, Homo sapiens
tttacaagtaaaagtgcacatagatc

SEQ ID NO: 48667 - DNA, 26 bp, Homo sapiens
ttacaagtaaaagtgcacatagatca

SEQ ID NO: 48668 - DNA, 26 bp, Homo sapiens
tacaagtaaaagtgcacatagatcat

SEQ ID NO: 48669 - DNA, 26 bp, Homo sapiens
acaagtaaaagtgcacatagatcatt

SEQ ID NO: 48670 - DNA, 26 bp, Homo sapiens
caagtaaaagtgcacatagatcatta

SEQ ID NO: 48671 - DNA, 26 bp, Homo sapiens
aagtaaaagtgcacatagatcattac

SEQ ID NO: 48672 - DNA, 26 bp, Homo sapiens
agtaaaagtgcacatagatcattaca

SEQ ID NO: 48673 - DNA, 26 bp, Homo sapiens
gtaaaagtgcacatagatcattacaa

SEQ ID NO: 48674 - DNA, 26 bp, Homo sapiens
taaaagtgcacatagatcattacaaa

SEQ ID NO: 48675 - DNA, 26 bp, Homo sapiens
aaaagtgcacatagatcattacaaag

SEQ ID NO: 48676 - DNA, 26 bp, Homo sapiens
aaagtgcacatagatcattacaaagt

SEQ ID NO: 48677 - DNA, 26 bp, Homo sapiens
aagtgcacatagatcattacaaagtt

SEQ ID NO: 48678 - DNA, 26 bp, Homo sapiens
agtgcacatagatcattacaaagttt

SEQ ID NO: 48679 - DNA, 26 bp, Homo sapiens
gtgcacatagatcattacaaagtttc

SEQ ID NO: 48680 - DNA, 26 bp, Homo sapiens
tgcacatagatcattacaaagtttca

SEQ ID NO: 48681 - DNA, 26 bp, Homo sapiens
gcacatagatcattacaaagtttcac

SEQ ID NO: 48682 - DNA, 26 bp, Homo sapiens
cacatagatcattacaaagtttcact

SEQ ID NO: 48683 - DNA, 26 bp, Homo sapiens
acatagatcattacaaagtttcacta

SEQ ID NO: 48684 - DNA, 26 bp, Homo sapiens
catagatcattacaaagtttcactaa

SEQ ID NO: 48685 - DNA, 26 bp, Homo sapiens
atagatcattacaaagtttcactaaa

SEQ ID NO: 48686 - DNA, 26 bp, Homo sapiens
tagatcattacaaagtttcactaaat

SEQ ID NO: 48687 - DNA, 26 bp, Homo sapiens
agatcattacaaagtttcactaaatt

SEQ ID NO: 48688 - DNA, 26 bp, Homo sapiens
gatcattacaaagtttcactaaattt

SEQ ID NO: 48689 - DNA, 26 bp, Homo sapiens
atcattacaaagtttcactaaatttt

SEQ ID NO: 48690 - DNA, 26 bp, Homo sapiens
tcattacaaagtttcactaaatttta

SEQ ID NO: 48691 - DNA, 26 bp, Homo sapiens
cattacaaagtttcactaaattttat

SEQ ID NO: 48692 - DNA, 26 bp, Homo sapiens
attacaaagtttcactaaattttatc

SEQ ID NO: 48693 - DNA, 26 bp, Homo sapiens
ttacaaagtttcactaaattttatca

SEQ ID NO: 48694 - DNA, 26 bp, Homo sapiens
tacaaagtttcactaaattttatcag

SEQ ID NO: 48695 - DNA, 26 bp, Homo sapiens
acaaagtttcactaaattttatcagg

SEQ ID NO: 48696 - DNA, 26 bp, Homo sapiens
caaagtttcactaaattttatcaggt

SEQ ID NO: 48697 - DNA, 26 bp, Homo sapiens
aaagtttcactaaattttatcaggtt

SEQ ID NO: 48698 - DNA, 26 bp, Homo sapiens
aagtttcactaaattttatcaggttc

SEQ ID NO: 48699 - DNA, 26 bp, Homo sapiens
agtttcactaaattttatcaggttca

SEQ ID NO: 48700 - DNA, 26 bp, Homo sapiens
gtttcactaaattttatcaggttcaa

SEQ ID NO: 48701 - DNA, 26 bp, Homo sapiens
tttcactaaattttatcaggttcaaa

SEQ ID NO: 48702 - DNA, 26 bp, Homo sapiens
ttcactaaattttatcaggttcaaac

SEQ ID NO: 48703 - DNA, 26 bp, Homo sapiens
tcactaaattttatcaggttcaaaca

SEQ ID NO: 48704 - DNA, 26 bp, Homo sapiens
cactaaattttatcaggttcaaacaa

SEQ ID NO: 48705 - DNA, 26 bp, Homo sapiens
actaaattttatcaggttcaaacaaa

SEQ ID NO: 48706 - DNA, 26 bp, Homo sapiens
ctaaattttatcaggttcaaacaaaa

SEQ ID NO: 48707 - DNA, 26 bp, Homo sapiens
taaattttatcaggttcaaacaaaag

SEQ ID NO: 48708 - DNA, 26 bp, Homo sapiens
aaattttatcaggttcaaacaaaagc

SEQ ID NO: 48709 - DNA, 26 bp, Homo sapiens
aattttatcaggttcaaacaaaagca

SEQ ID NO: 48710 - DNA, 26 bp, Homo sapiens
attttatcaggttcaaacaaaagcat

SEQ ID NO: 48711 - DNA, 26 bp, Homo sapiens
ttttatcaggttcaaacaaaagcatc

SEQ ID NO: 48712 - DNA, 26 bp, Homo sapiens
tttatcaggttcaaacaaaagcatca

SEQ ID NO: 48713 - DNA, 26 bp, Homo sapiens
ttatcaggttcaaacaaaagcatcac

SEQ ID NO: 48714 - DNA, 26 bp, Homo sapiens
tatcaggttcaaacaaaagcatcacg

SEQ ID NO: 48715 - DNA, 26 bp, Homo sapiens
atcaggttcaaacaaaagcatcacgt

SEQ ID NO: 48716 - DNA, 26 bp, Homo sapiens
tcaggttcaaacaaaagcatcacgtg

SEQ ID NO: 48717 - DNA, 26 bp, Homo sapiens
caggttcaaacaaaagcatcacgtgg

SEQ ID NO: 48718 - DNA, 26 bp, Homo sapiens
aggttcaaacaaaagcatcacgtgga

SEQ ID NO: 48719 - DNA, 26 bp, Homo sapiens
ggttcaaacaaaagcatcacgtggaa

SEQ ID NO: 48720 - DNA, 26 bp, Homo sapiens
gttcaaacaaaagcatcacgtggaaa

SEQ ID NO: 48721 - DNA, 26 bp, Homo sapiens
ttcaaacaaaagcatcacgtggaaag

SEQ ID NO: 48722 - DNA, 26 bp, Homo sapiens
tcaaacaaaagcatcacgtggaaaga

SEQ ID NO: 48723 - DNA, 26 bp, Homo sapiens
caaacaaaagcatcacgtggaaagag

SEQ ID NO: 48724 - DNA, 26 bp, Homo sapiens
aaacaaaagcatcacgtggaaagaga

SEQ ID NO: 48725 - DNA, 26 bp, Homo sapiens
aacaaaagcatcacgtggaaagagac

SEQ ID NO: 48726 - DNA, 26 bp, Homo sapiens
acaaaagcatcacgtggaaagagact

SEQ ID NO: 48727 - DNA, 26 bp, Homo sapiens
caaaagcatcacgtggaaagagacta

SEQ ID NO: 48728 - DNA, 26 bp, Homo sapiens
aaaagcatcacgtggaaagagactat

SEQ ID NO: 48729 - DNA, 26 bp, Homo sapiens
aaagcatcacgtggaaagagactatc

SEQ ID NO: 48730 - DNA, 26 bp, Homo sapiens
aagcatcacgtggaaagagactatca

SEQ ID NO: 48731 - DNA, 26 bp, Homo sapiens
agcatcacgtggaaagagactatcat

SEQ ID NO: 48732 - DNA, 26 bp, Homo sapiens
gcatcacgtggaaagagactatcatt

SEQ ID NO: 48733 - DNA, 26 bp, Homo sapiens
catcacgtggaaagagactatcattg

SEQ ID NO: 48734 - DNA, 26 bp, Homo sapiens
atcacgtggaaagagactatcattgt

SEQ ID NO: 48735 - DNA, 26 bp, Homo sapiens
tcacgtggaaagagactatcattgta

SEQ ID NO: 48736 - DNA, 26 bp, Homo sapiens
cacgtggaaagagactatcattgtaa

SEQ ID NO: 48737 - DNA, 26 bp, Homo sapiens
acgtggaaagagactatcattgtaat

SEQ ID NO: 48738 - DNA, 26 bp, Homo sapiens
cgtggaaagagactatcattgtaatt

SEQ ID NO: 48739 - DNA, 26 bp, Homo sapiens
gtggaaagagactatcattgtaatta

SEQ ID NO: 48740 - DNA, 26 bp, Homo sapiens
tggaaagagactatcattgtaattat

SEQ ID NO: 48741 - DNA, 26 bp, Homo sapiens
ggaaagagactatcattgtaattatc

SEQ ID NO: 48742 - DNA, 26 bp, Homo sapiens
gaaagagactatcattgtaattatca

SEQ ID NO: 48743 - DNA, 26 bp, Homo sapiens
aaagagactatcattgtaattatcaa

SEQ ID NO: 48744 - DNA, 26 bp, Homo sapiens
aagagactatcattgtaattatcaaa

SEQ ID NO: 48745 - DNA, 26 bp, Homo sapiens
agagactatcattgtaattatcaaac

SEQ ID NO: 48746 - DNA, 26 bp, Homo sapiens
gagactatcattgtaattatcaaaca

SEQ ID NO: 48747 - DNA, 26 bp, Homo sapiens
agactatcattgtaattatcaaacat

SEQ ID NO: 48748 - DNA, 26 bp, Homo sapiens
gactatcattgtaattatcaaacatg

SEQ ID NO: 48749 - DNA, 26 bp, Homo sapiens
actatcattgtaattatcaaacatga

SEQ ID NO: 48750 - DNA, 26 bp, Homo sapiens
ctatcattgtaattatcaaacatgat

SEQ ID NO: 48751 - DNA, 26 bp, Homo sapiens
tatcattgtaattatcaaacatgatc

SEQ ID NO: 48752 - DNA, 26 bp, Homo sapiens
atcattgtaattatcaaacatgatcg

SEQ ID NO: 48753 - DNA, 26 bp, Homo sapiens
tcattgtaattatcaaacatgatcgt

SEQ ID NO: 48754 - DNA, 26 bp, Homo sapiens
cattgtaattatcaaacatgatcgtc

SEQ ID NO: 48755 - DNA, 26 bp, Homo sapiens
attgtaattatcaaacatgatcgtca

SEQ ID NO: 48756 - DNA, 26 bp, Homo sapiens
ttgtaattatcaaacatgatcgtcat

SEQ ID NO: 48757 - DNA, 26 bp, Homo sapiens
tgtaattatcaaacatgatcgtcata

SEQ ID NO: 48758 - DNA, 26 bp, Homo sapiens
gtaattatcaaacatgatcgtcataa

SEQ ID NO: 48759 - DNA, 26 bp, Homo sapiens
taattatcaaacatgatcgtcataac

SEQ ID NO: 48760 - DNA, 26 bp, Homo sapiens
aattatcaaacatgatcgtcataacc

SEQ ID NO: 48761 - DNA, 26 bp, Homo sapiens
attatcaaacatgatcgtcataaccc

SEQ ID NO: 48762 - DNA, 26 bp, Homo sapiens
ttatcaaacatgatcgtcataaccca

SEQ ID NO: 48763 - DNA, 26 bp, Homo sapiens
tatcaaacatgatcgtcataacccaa

SEQ ID NO: 48764 - DNA, 26 bp, Homo sapiens
atcaaacatgatcgtcataacccaaa

SEQ ID NO: 48765 - DNA, 26 bp, Homo sapiens
tcaaacatgatcgtcataacccaaaa

SEQ ID NO: 48766 - DNA, 26 bp, Homo sapiens
caaacatgatcgtcataacccaaaat

SEQ ID NO: 48767 - DNA, 26 bp, Homo sapiens
aaacatgatcgtcataacccaaaata

SEQ ID NO: 48768 - DNA, 26 bp, Homo sapiens
aacatgatcgtcataacccaaaataa

SEQ ID NO: 48769 - DNA, 26 bp, Homo sapiens
acatgatcgtcataacccaaaataaa

SEQ ID NO: 48770 - DNA, 26 bp, Homo sapiens
catgatcgtcataacccaaaataaaa

SEQ ID NO: 48771 - DNA, 26 bp, Homo sapiens
atgatcgtcataacccaaaataaaaa

SEQ ID NO: 48772 - DNA, 26 bp, Homo sapiens
tgatcgtcataacccaaaataaaaag

SEQ ID NO: 48773 - DNA, 26 bp, Homo sapiens
gatcgtcataacccaaaataaaaaga

SEQ ID NO: 48774 - DNA, 26 bp, Homo sapiens
atcgtcataacccaaaataaaaagac

SEQ ID NO: 48775 - DNA, 26 bp, Homo sapiens
tcgtcataacccaaaataaaaagaca

SEQ ID NO: 48776 - DNA, 26 bp, Homo sapiens
cgtcataacccaaaataaaaagacaa

SEQ ID NO: 48777 - DNA, 26 bp, Homo sapiens
gtcataacccaaaataaaaagacaat

SEQ ID NO: 48778 - DNA, 26 bp, Homo sapiens
tcataacccaaaataaaaagacaatt

SEQ ID NO: 48779 - DNA, 26 bp, Homo sapiens
cataacccaaaataaaaagacaattg

SEQ ID NO: 48780 - DNA, 26 bp, Homo sapiens
ataacccaaaataaaaagacaattgg

SEQ ID NO: 48781 - DNA, 26 bp, Homo sapiens
taacccaaaataaaaagacaattggg

SEQ ID NO: 48782 - DNA, 26 bp, Homo sapiens
aacccaaaataaaaagacaattgggg

SEQ ID NO: 48783 - DNA, 26 bp, Homo sapiens
acccaaaataaaaagacaattggggg

SEQ ID NO: 48784 - DNA, 26 bp, Homo sapiens
cccaaaataaaaagacaattggggga

SEQ ID NO: 48785 - DNA, 26 bp, Homo sapiens
ccaaaataaaaagacaattgggggag

SEQ ID NO: 48786 - DNA, 26 bp, Homo sapiens
caaaataaaaagacaattgggggagg

SEQ ID NO: 48787 - DNA, 26 bp, Homo sapiens
aaaataaaaagacaattgggggaggc

SEQ ID NO: 48788 - DNA, 26 bp, Homo sapiens
aaataaaaagacaattgggggaggcc

SEQ ID NO: 48789 - DNA, 26 bp, Homo sapiens
aataaaaagacaattgggggaggccc

SEQ ID NO: 48790 - DNA, 26 bp, Homo sapiens
ataaaaagacaattgggggaggccca

SEQ ID NO: 48791 - DNA, 26 bp, Homo sapiens
taaaaagacaattgggggaggcccat

SEQ ID NO: 48792 - DNA, 26 bp, Homo sapiens
aaaaagacaattgggggaggcccata

SEQ ID NO: 48793 - DNA, 26 bp, Homo sapiens
aaaagacaattgggggaggcccataa

SEQ ID NO: 48794 - DNA, 26 bp, Homo sapiens
aaagacaattgggggaggcccataaa

SEQ ID NO: 48795 - DNA, 26 bp, Homo sapiens
aagacaattgggggaggcccataaaa

SEQ ID NO: 48796 - DNA, 26 bp, Homo sapiens
agacaattgggggaggcccataaaac

SEQ ID NO: 48797 - DNA, 26 bp, Homo sapiens
gacaattgggggaggcccataaaact

SEQ ID NO: 48798 - DNA, 26 bp, Homo sapiens
acaattgggggaggcccataaaactt

SEQ ID NO: 48799 - DNA, 26 bp, Homo sapiens
caattgggggaggcccataaaacttc

SEQ ID NO: 48800 - DNA, 26 bp, Homo sapiens
aattgggggaggcccataaaacttct

SEQ ID NO: 48801 - DNA, 26 bp, Homo sapiens
attgggggaggcccataaaacttctc

SEQ ID NO: 48802 - DNA, 26 bp, Homo sapiens
ttgggggaggcccataaaacttctca

SEQ ID NO: 48803 - DNA, 26 bp, Homo sapiens
tgggggaggcccataaaacttctcat

SEQ ID NO: 48804 - DNA, 26 bp, Homo sapiens
gggggaggcccataaaacttctcata

SEQ ID NO: 48805 - DNA, 26 bp, Homo sapiens
ggggaggcccataaaacttctcataa

SEQ ID NO: 48806 - DNA, 26 bp, Homo sapiens
gggaggcccataaaacttctcataaa

SEQ ID NO: 48807 - DNA, 26 bp, Homo sapiens
ggaggcccataaaacttctcataaaa

SEQ ID NO: 48808 - DNA, 26 bp, Homo sapiens
gaggcccataaaacttctcataaaac

SEQ ID NO: 48809 - DNA, 26 bp, Homo sapiens
aggcccataaaacttctcataaaacc

SEQ ID NO: 48810 - DNA, 26 bp, Homo sapiens
ggcccataaaacttctcataaaacca

SEQ ID NO: 48811 - DNA, 26 bp, Homo sapiens
gcccataaaacttctcataaaaccac

SEQ ID NO: 48812 - DNA, 26 bp, Homo sapiens
cccataaaacttctcataaaaccact

SEQ ID NO: 48813 - DNA, 26 bp, Homo sapiens
ccataaaacttctcataaaaccactg

SEQ ID NO: 48814 - DNA, 26 bp, Homo sapiens
cataaaacttctcataaaaccactga

SEQ ID NO: 48815 - DNA, 26 bp, Homo sapiens
ataaaacttctcataaaaccactgag

SEQ ID NO: 48816 - DNA, 26 bp, Homo sapiens
taaaacttctcataaaaccactgagg

SEQ ID NO: 48817 - DNA, 26 bp, Homo sapiens
aaaacttctcataaaaccactgagga

SEQ ID NO: 48818 - DNA, 26 bp, Homo sapiens
aaacttctcataaaaccactgaggaa

SEQ ID NO: 48819 - DNA, 26 bp, Homo sapiens
aacttctcataaaaccactgaggaaa

SEQ ID NO: 48820 - DNA, 26 bp, Homo sapiens
acttctcataaaaccactgaggaaat

SEQ ID NO: 48821 - DNA, 26 bp, Homo sapiens
cttctcataaaaccactgaggaaatt

SEQ ID NO: 48822 - DNA, 26 bp, Homo sapiens
ttctcataaaaccactgaggaaatta

SEQ ID NO: 48823 - DNA, 26 bp, Homo sapiens
tctcataaaaccactgaggaaattaa

SEQ ID NO: 48824 - DNA, 26 bp, Homo sapiens
ctcataaaaccactgaggaaattaaa

SEQ ID NO: 48825 - DNA, 26 bp, Homo sapiens
tcataaaaccactgaggaaattaaaa

SEQ ID NO: 48826 - DNA, 26 bp, Homo sapiens
cataaaaccactgaggaaattaaaat

SEQ ID NO: 48827 - DNA, 26 bp, Homo sapiens
ataaaaccactgaggaaattaaaatg

SEQ ID NO: 48828 - DNA, 26 bp, Homo sapiens
taaaaccactgaggaaattaaaatgg

SEQ ID NO: 48829 - DNA, 26 bp, Homo sapiens
aaaaccactgaggaaattaaaatgga

SEQ ID NO: 48830 - DNA, 26 bp, Homo sapiens
aaaccactgaggaaattaaaatggac

SEQ ID NO: 48831 - DNA, 26 bp, Homo sapiens
aaccactgaggaaattaaaatggact

SEQ ID NO: 48832 - DNA, 26 bp, Homo sapiens
accactgaggaaattaaaatggactt

SEQ ID NO: 48833 - DNA, 26 bp, Homo sapiens
ccactgaggaaattaaaatggacttg

SEQ ID NO: 48834 - DNA, 26 bp, Homo sapiens
cactgaggaaattaaaatggacttgg

SEQ ID NO: 48835 - DNA, 26 bp, Homo sapiens
actgaggaaattaaaatggacttgga

SEQ ID NO: 48836 - DNA, 26 bp, Homo sapiens
ctgaggaaattaaaatggacttggac

SEQ ID NO: 48837 - DNA, 26 bp, Homo sapiens
tgaggaaattaaaatggacttggaca

SEQ ID NO: 48838 - DNA, 26 bp, Homo sapiens
gaggaaattaaaatggacttggacat

SEQ ID NO: 48839 - DNA, 26 bp, Homo sapiens
aggaaattaaaatggacttggacatg

SEQ ID NO: 48840 - DNA, 26 bp, Homo sapiens
ggaaattaaaatggacttggacatgt

SEQ ID NO: 48841 - DNA, 26 bp, Homo sapiens
gaaattaaaatggacttggacatgtc

SEQ ID NO: 48842 - DNA, 26 bp, Homo sapiens
aaattaaaatggacttggacatgtct

SEQ ID NO: 48843 - DNA, 26 bp, Homo sapiens
aattaaaatggacttggacatgtctt

SEQ ID NO: 48844 - DNA, 26 bp, Homo sapiens
attaaaatggacttggacatgtcttt

SEQ ID NO: 48845 - DNA, 26 bp, Homo sapiens
ttaaaatggacttggacatgtcttta

SEQ ID NO: 48846 - DNA, 26 bp, Homo sapiens
taaaatggacttggacatgtctttag

SEQ ID NO: 48847 - DNA, 26 bp, Homo sapiens
aaaatggacttggacatgtctttagt

SEQ ID NO: 48848 - DNA, 26 bp, Homo sapiens
aaatggacttggacatgtctttagtt

SEQ ID NO: 48849 - DNA, 26 bp, Homo sapiens
aatggacttggacatgtctttagttt

SEQ ID NO: 48850 - DNA, 26 bp, Homo sapiens
atggacttggacatgtctttagtttg

SEQ ID NO: 48851 - DNA, 26 bp, Homo sapiens
tggacttggacatgtctttagtttga

SEQ ID NO: 48852 - DNA, 26 bp, Homo sapiens
ggacttggacatgtctttagtttgat

SEQ ID NO: 48853 - DNA, 26 bp, Homo sapiens
gacttggacatgtctttagtttgatg

SEQ ID NO: 48854 - DNA, 26 bp, Homo sapiens
acttggacatgtctttagtttgatgc

SEQ ID NO: 48855 - DNA, 26 bp, Homo sapiens
cttggacatgtctttagtttgatgca

SEQ ID NO: 48856 - DNA, 26 bp, Homo sapiens
ttggacatgtctttagtttgatgcat

SEQ ID NO: 48857 - DNA, 26 bp, Homo sapiens
tggacatgtctttagtttgatgcata

SEQ ID NO: 48858 - DNA, 26 bp, Homo sapiens
ggacatgtctttagtttgatgcataa

SEQ ID NO: 48859 - DNA, 26 bp, Homo sapiens
gacatgtctttagtttgatgcataaa

SEQ ID NO: 48860 - DNA, 26 bp, Homo sapiens
acatgtctttagtttgatgcataaat

SEQ ID NO: 48861 - DNA, 26 bp, Homo sapiens
catgtctttagtttgatgcataaatt

SEQ ID NO: 48862 - DNA, 26 bp, Homo sapiens
atgtctttagtttgatgcataaattt

SEQ ID NO: 48863 - DNA, 26 bp, Homo sapiens
tgtctttagtttgatgcataaatttg

SEQ ID NO: 48864 - DNA, 26 bp, Homo sapiens
gtctttagtttgatgcataaatttga

SEQ ID NO: 48865 - DNA, 26 bp, Homo sapiens
tctttagtttgatgcataaatttgaa

SEQ ID NO: 48866 - DNA, 26 bp, Homo sapiens
ctttagtttgatgcataaatttgaag

SEQ ID NO: 48867 - DNA, 26 bp, Homo sapiens
tttagtttgatgcataaatttgaaga

SEQ ID NO: 48868 - DNA, 26 bp, Homo sapiens
ttagtttgatgcataaatttgaagat

SEQ ID NO: 48869 - DNA, 26 bp, Homo sapiens
tagtttgatgcataaatttgaagatg

SEQ ID NO: 48870 - DNA, 26 bp, Homo sapiens
agtttgatgcataaatttgaagatgc

SEQ ID NO: 48871 - DNA, 26 bp, Homo sapiens
gtttgatgcataaatttgaagatgca

SEQ ID NO: 48872 - DNA, 26 bp, Homo sapiens
tttgatgcataaatttgaagatgcac

SEQ ID NO: 48873 - DNA, 26 bp, Homo sapiens
ttgatgcataaatttgaagatgcacc

SEQ ID NO: 48874 - DNA, 26 bp, Homo sapiens
tgatgcataaatttgaagatgcacca

SEQ ID NO: 48875 - DNA, 26 bp, Homo sapiens
gatgcataaatttgaagatgcaccac

SEQ ID NO: 48876 - DNA, 26 bp, Homo sapiens
atgcataaatttgaagatgcaccact

SEQ ID NO: 48877 - DNA, 26 bp, Homo sapiens
tgcataaatttgaagatgcaccactg

SEQ ID NO: 48878 - DNA, 26 bp, Homo sapiens
gcataaatttgaagatgcaccactgt

SEQ ID NO: 48879 - DNA, 26 bp, Homo sapiens
cataaatttgaagatgcaccactgta

SEQ ID NO: 48880 - DNA, 26 bp, Homo sapiens
ataaatttgaagatgcaccactgtat

SEQ ID NO: 48881 - DNA, 26 bp, Homo sapiens
taaatttgaagatgcaccactgtata

SEQ ID NO: 48882 - DNA, 26 bp, Homo sapiens
aaatttgaagatgcaccactgtatat

SEQ ID NO: 48883 - DNA, 26 bp, Homo sapiens
aatttgaagatgcaccactgtatatg

SEQ ID NO: 48884 - DNA, 26 bp, Homo sapiens
atttgaagatgcaccactgtatatgg

SEQ ID NO: 48885 - DNA, 26 bp, Homo sapiens
tttgaagatgcaccactgtatatggt

SEQ ID NO: 48886 - DNA, 26 bp, Homo sapiens
ttgaagatgcaccactgtatatggta

SEQ ID NO: 48887 - DNA, 26 bp, Homo sapiens
tgaagatgcaccactgtatatggtag

SEQ ID NO: 48888 - DNA, 26 bp, Homo sapiens
gaagatgcaccactgtatatggtaga

SEQ ID NO: 48889 - DNA, 26 bp, Homo sapiens
aagatgcaccactgtatatggtagag

SEQ ID NO: 48890 - DNA, 26 bp, Homo sapiens
agatgcaccactgtatatggtagagc

SEQ ID NO: 48891 - DNA, 26 bp, Homo sapiens
gatgcaccactgtatatggtagagct

SEQ ID NO: 48892 - DNA, 26 bp, Homo sapiens
atgcaccactgtatatggtagagctc

SEQ ID NO: 48893 - DNA, 26 bp, Homo sapiens
tgcaccactgtatatggtagagctct

SEQ ID NO: 48894 - DNA, 26 bp, Homo sapiens
gcaccactgtatatggtagagctcta

SEQ ID NO: 48895 - DNA, 26 bp, Homo sapiens
caccactgtatatggtagagctctaa

SEQ ID NO: 48896 - DNA, 26 bp, Homo sapiens
accactgtatatggtagagctctaat

SEQ ID NO: 48897 - DNA, 26 bp, Homo sapiens
ccactgtatatggtagagctctaata

SEQ ID NO: 48898 - DNA, 26 bp, Homo sapiens
cactgtatatggtagagctctaatag

SEQ ID NO: 48899 - DNA, 26 bp, Homo sapiens
actgtatatggtagagctctaatagc

SEQ ID NO: 48900 - DNA, 26 bp, Homo sapiens
ctgtatatggtagagctctaatagcc

SEQ ID NO: 48901 - DNA, 26 bp, Homo sapiens
tgtatatggtagagctctaatagcca

SEQ ID NO: 48902 - DNA, 26 bp, Homo sapiens
gtatatggtagagctctaatagccac

SEQ ID NO: 48903 - DNA, 26 bp, Homo sapiens
tatatggtagagctctaatagccacc

SEQ ID NO: 48904 - DNA, 26 bp, Homo sapiens
atatggtagagctctaatagccacct

SEQ ID NO: 48905 - DNA, 26 bp, Homo sapiens
tatggtagagctctaatagccaccta

SEQ ID NO: 48906 - DNA, 26 bp, Homo sapiens
atggtagagctctaatagccacctac

SEQ ID NO: 48907 - DNA, 26 bp, Homo sapiens
tggtagagctctaatagccacctacc

SEQ ID NO: 48908 - DNA, 26 bp, Homo sapiens
ggtagagctctaatagccacctaccg

SEQ ID NO: 48909 - DNA, 26 bp, Homo sapiens
gtagagctctaatagccacctaccga

SEQ ID NO: 48910 - DNA, 26 bp, Homo sapiens
tagagctctaatagccacctaccgag

SEQ ID NO: 48911 - DNA, 26 bp, Homo sapiens
agagctctaatagccacctaccgagg

SEQ ID NO: 48912 - DNA, 26 bp, Homo sapiens
gagctctaatagccacctaccgaggc

SEQ ID NO: 48913 - DNA, 26 bp, Homo sapiens
agctctaatagccacctaccgaggct

SEQ ID NO: 48914 - DNA, 26 bp, Homo sapiens
gctctaatagccacctaccgaggcta

SEQ ID NO: 48915 - DNA, 26 bp, Homo sapiens
ctctaatagccacctaccgaggctac

SEQ ID NO: 48916 - DNA, 26 bp, Homo sapiens
tctaatagccacctaccgaggctaca

SEQ ID NO: 48917 - DNA, 26 bp, Homo sapiens
ctaatagccacctaccgaggctacat

SEQ ID NO: 48918 - DNA, 26 bp, Homo sapiens
taatagccacctaccgaggctacatc

SEQ ID NO: 48919 - DNA, 26 bp, Homo sapiens
aatagccacctaccgaggctacatcg

SEQ ID NO: 48920 - DNA, 26 bp, Homo sapiens
atagccacctaccgaggctacatcgg

SEQ ID NO: 48921 - DNA, 26 bp, Homo sapiens
tagccacctaccgaggctacatcggc

SEQ ID NO: 48922 - DNA, 26 bp, Homo sapiens
agccacctaccgaggctacatcggca

SEQ ID NO: 48923 - DNA, 26 bp, Homo sapiens
gccacctaccgaggctacatcggcag

SEQ ID NO: 48924 - DNA, 26 bp, Homo sapiens
ccacctaccgaggctacatcggcagc

SEQ ID NO: 48925 - DNA, 26 bp, Homo sapiens
cacctaccgaggctacatcggcagct

SEQ ID NO: 48926 - DNA, 26 bp, Homo sapiens
acctaccgaggctacatcggcagctg

SEQ ID NO: 48927 - DNA, 26 bp, Homo sapiens
cctaccgaggctacatcggcagctgc

SEQ ID NO: 48928 - DNA, 26 bp, Homo sapiens
ctaccgaggctacatcggcagctgca

SEQ ID NO: 48929 - DNA, 26 bp, Homo sapiens
taccgaggctacatcggcagctgcag

SEQ ID NO: 48930 - DNA, 26 bp, Homo sapiens
accgaggctacatcggcagctgcagc

SEQ ID NO: 48931 - DNA, 26 bp, Homo sapiens
ccgaggctacatcggcagctgcagcg

SEQ ID NO: 48932 - DNA, 26 bp, Homo sapiens
cgaggctacatcggcagctgcagcgg

SEQ ID NO: 48933 - DNA, 26 bp, Homo sapiens
gaggctacatcggcagctgcagcggt

SEQ ID NO: 48934 - DNA, 26 bp, Homo sapiens
aggctacatcggcagctgcagcggtg

SEQ ID NO: 48935 - DNA, 26 bp, Homo sapiens
ggctacatcggcagctgcagcggtgc

SEQ ID NO: 48936 - DNA, 26 bp, Homo sapiens
gctacatcggcagctgcagcggtgct

SEQ ID NO: 48937 - DNA, 26 bp, Homo sapiens
ctacatcggcagctgcagcggtgctg

SEQ ID NO: 48938 - DNA, 26 bp, Homo sapiens
tacatcggcagctgcagcggtgctgc

SEQ ID NO: 48939 - DNA, 26 bp, Homo sapiens
acatcggcagctgcagcggtgctgca

SEQ ID NO: 48940 - DNA, 26 bp, Homo sapiens
catcggcagctgcagcggtgctgcag

SEQ ID NO: 48941 - DNA, 26 bp, Homo sapiens
atcggcagctgcagcggtgctgcaga

SEQ ID NO: 48942 - DNA, 26 bp, Homo sapiens
tcggcagctgcagcggtgctgcagag

SEQ ID NO: 48943 - DNA, 26 bp, Homo sapiens
cggcagctgcagcggtgctgcagagt

SEQ ID NO: 48944 - DNA, 26 bp, Homo sapiens
ggcagctgcagcggtgctgcagagtt

SEQ ID NO: 48945 - DNA, 26 bp, Homo sapiens
gcagctgcagcggtgctgcagagtta

SEQ ID NO: 48946 - DNA, 26 bp, Homo sapiens
cagctgcagcggtgctgcagagttaa

SEQ ID NO: 48947 - DNA, 26 bp, Homo sapiens
agctgcagcggtgctgcagagttaaa

SEQ ID NO: 48948 - DNA, 26 bp, Homo sapiens
gctgcagcggtgctgcagagttaaag

SEQ ID NO: 48949 - DNA, 26 bp, Homo sapiens
ctgcagcggtgctgcagagttaaagc

SEQ ID NO: 48950 - DNA, 26 bp, Homo sapiens
tgcagcggtgctgcagagttaaagca

SEQ ID NO: 48951 - DNA, 26 bp, Homo sapiens
gcagcggtgctgcagagttaaagcag

SEQ ID NO: 48952 - DNA, 26 bp, Homo sapiens
cagcggtgctgcagagttaaagcagg

SEQ ID NO: 48953 - DNA, 26 bp, Homo sapiens
agcggtgctgcagagttaaagcaggt

SEQ ID NO: 48954 - DNA, 26 bp, Homo sapiens
gcggtgctgcagagttaaagcaggtc

SEQ ID NO: 48955 - DNA, 26 bp, Homo sapiens
cggtgctgcagagttaaagcaggtcg

SEQ ID NO: 48956 - DNA, 26 bp, Homo sapiens
ggtgctgcagagttaaagcaggtcgc

SEQ ID NO: 48957 - DNA, 26 bp, Homo sapiens
gtgctgcagagttaaagcaggtcgca

SEQ ID NO: 48958 - DNA, 26 bp, Homo sapiens
tgctgcagagttaaagcaggtcgcac

SEQ ID NO: 48959 - DNA, 26 bp, Homo sapiens
gctgcagagttaaagcaggtcgcact

SEQ ID NO: 48960 - DNA, 26 bp, Homo sapiens
ctgcagagttaaagcaggtcgcactg

SEQ ID NO: 48961 - DNA, 26 bp, Homo sapiens
tgcagagttaaagcaggtcgcactga

SEQ ID NO: 48962 - DNA, 26 bp, Homo sapiens
gcagagttaaagcaggtcgcactgag

SEQ ID NO: 48963 - DNA, 26 bp, Homo sapiens
cagagttaaagcaggtcgcactgagc

SEQ ID NO: 48964 - DNA, 26 bp, Homo sapiens
agagttaaagcaggtcgcactgagct

SEQ ID NO: 48965 - DNA, 26 bp, Homo sapiens
gagttaaagcaggtcgcactgagctg

SEQ ID NO: 48966 - DNA, 26 bp, Homo sapiens
agttaaagcaggtcgcactgagctga

SEQ ID NO: 48967 - DNA, 26 bp, Homo sapiens
gttaaagcaggtcgcactgagctgac

SEQ ID NO: 48968 - DNA, 26 bp, Homo sapiens
ttaaagcaggtcgcactgagctgaca

SEQ ID NO: 48969 - DNA, 26 bp, Homo sapiens
taaagcaggtcgcactgagctgacac

SEQ ID NO: 48970 - DNA, 26 bp, Homo sapiens
aaagcaggtcgcactgagctgacaca

SEQ ID NO: 48971 - DNA, 26 bp, Homo sapiens
aagcaggtcgcactgagctgacacat

SEQ ID NO: 48972 - DNA, 26 bp, Homo sapiens
agcaggtcgcactgagctgacacata

SEQ ID NO: 48973 - DNA, 26 bp, Homo sapiens
gcaggtcgcactgagctgacacataa

SEQ ID NO: 48974 - DNA, 26 bp, Homo sapiens
caggtcgcactgagctgacacataaa

SEQ ID NO: 48975 - DNA, 26 bp, Homo sapiens
aggtcgcactgagctgacacataaag

SEQ ID NO: 48976 - DNA, 26 bp, Homo sapiens
ggtcgcactgagctgacacataaagc

SEQ ID NO: 48977 - DNA, 26 bp, Homo sapiens
gtcgcactgagctgacacataaagcc

SEQ ID NO: 48978 - DNA, 26 bp, Homo sapiens
tcgcactgagctgacacataaagccc

SEQ ID NO: 48979 - DNA, 26 bp, Homo sapiens
cgcactgagctgacacataaagccct

SEQ ID NO: 48980 - DNA, 26 bp, Homo sapiens
gcactgagctgacacataaagccctt

SEQ ID NO: 48981 - DNA, 26 bp, Homo sapiens
cactgagctgacacataaagcccttt

SEQ ID NO: 48982 - DNA, 26 bp, Homo sapiens
actgagctgacacataaagccctttg

SEQ ID NO: 48983 - DNA, 26 bp, Homo sapiens
ctgagctgacacataaagccctttgt

SEQ ID NO: 48984 - DNA, 26 bp, Homo sapiens
tgagctgacacataaagccctttgtg

SEQ ID NO: 48985 - DNA, 26 bp, Homo sapiens
gagctgacacataaagccctttgtgg

SEQ ID NO: 48986 - DNA, 26 bp, Homo sapiens
agctgacacataaagccctttgtggg

SEQ ID NO: 48987 - DNA, 26 bp, Homo sapiens
gctgacacataaagccctttgtggga

SEQ ID NO: 48988 - DNA, 26 bp, Homo sapiens
ctgacacataaagccctttgtgggat

SEQ ID NO: 48989 - DNA, 26 bp, Homo sapiens
tgacacataaagccctttgtgggata

SEQ ID NO: 48990 - DNA, 26 bp, Homo sapiens
gacacataaagccctttgtgggatac

SEQ ID NO: 48991 - DNA, 26 bp, Homo sapiens
acacataaagccctttgtgggatact

SEQ ID NO: 48992 - DNA, 26 bp, Homo sapiens
cacataaagccctttgtgggatactg

SEQ ID NO: 48993 - DNA, 26 bp, Homo sapiens
acataaagccctttgtgggatactgt

SEQ ID NO: 48994 - DNA, 26 bp, Homo sapiens
cataaagccctttgtgggatactgta

SEQ ID NO: 48995 - DNA, 26 bp, Homo sapiens
ataaagccctttgtgggatactgtag

SEQ ID NO: 48996 - DNA, 26 bp, Homo sapiens
taaagccctttgtgggatactgtagt

SEQ ID NO: 48997 - DNA, 26 bp, Homo sapiens
aaagccctttgtgggatactgtagtg

SEQ ID NO: 48998 - DNA, 26 bp, Homo sapiens
aagccctttgtgggatactgtagtgg

SEQ ID NO: 48999 - DNA, 26 bp, Homo sapiens
agccctttgtgggatactgtagtggt

SEQ ID NO: 49000 - DNA, 26 bp, Homo sapiens
gccctttgtgggatactgtagtggta

SEQ ID NO: 49001 - DNA, 26 bp, Homo sapiens
ccctttgtgggatactgtagtggtag

SEQ ID NO: 49002 - DNA, 26 bp, Homo sapiens
cctttgtgggatactgtagtggtagt

SEQ ID NO: 49003 - DNA, 26 bp, Homo sapiens
ctttgtgggatactgtagtggtagtg

SEQ ID NO: 49004 - DNA, 26 bp, Homo sapiens
tttgtgggatactgtagtggtagtgt

SEQ ID NO: 49005 - DNA, 26 bp, Homo sapiens
ttgtgggatactgtagtggtagtgtt

SEQ ID NO: 49006 - DNA, 26 bp, Homo sapiens
tgtgggatactgtagtggtagtgttg

SEQ ID NO: 49007 - DNA, 26 bp, Homo sapiens
gtgggatactgtagtggtagtgttgg

SEQ ID NO: 49008 - DNA, 26 bp, Homo sapiens
tgggatactgtagtggtagtgttggc

SEQ ID NO: 49009 - DNA, 26 bp, Homo sapiens
gggatactgtagtggtagtgttggca

SEQ ID NO: 49010 - DNA, 26 bp, Homo sapiens
ggatactgtagtggtagtgttggcaa

SEQ ID NO: 49011 - DNA, 26 bp, Homo sapiens
gatactgtagtggtagtgttggcaat

SEQ ID NO: 49012 - DNA, 26 bp, Homo sapiens
atactgtagtggtagtgttggcaatc

SEQ ID NO: 49013 - DNA, 26 bp, Homo sapiens
tactgtagtggtagtgttggcaatca

SEQ ID NO: 49014 - DNA, 26 bp, Homo sapiens
actgtagtggtagtgttggcaatcaa

SEQ ID NO: 49015 - DNA, 26 bp, Homo sapiens
ctgtagtggtagtgttggcaatcaac

SEQ ID NO: 49016 - DNA, 26 bp, Homo sapiens
tgtagtggtagtgttggcaatcaaca

SEQ ID NO: 49017 - DNA, 26 bp, Homo sapiens
gtagtggtagtgttggcaatcaacag

SEQ ID NO: 49018 - DNA, 26 bp, Homo sapiens
tagtggtagtgttggcaatcaacaga

SEQ ID NO: 49019 - DNA, 26 bp, Homo sapiens
agtggtagtgttggcaatcaacagat

SEQ ID NO: 49020 - DNA, 26 bp, Homo sapiens
gtggtagtgttggcaatcaacagatt

SEQ ID NO: 49021 - DNA, 26 bp, Homo sapiens
tggtagtgttggcaatcaacagattt

SEQ ID NO: 49022 - DNA, 26 bp, Homo sapiens
ggtagtgttggcaatcaacagattta

SEQ ID NO: 49023 - DNA, 26 bp, Homo sapiens
gtagtgttggcaatcaacagatttag

SEQ ID NO: 49024 - DNA, 26 bp, Homo sapiens
tagtgttggcaatcaacagatttagg

SEQ ID NO: 49025 - DNA, 26 bp, Homo sapiens
agtgttggcaatcaacagatttaggc

SEQ ID NO: 49026 - DNA, 26 bp, Homo sapiens
gtgttggcaatcaacagatttaggca

SEQ ID NO: 49027 - DNA, 26 bp, Homo sapiens
tgttggcaatcaacagatttaggcac

SEQ ID NO: 49028 - DNA, 26 bp, Homo sapiens
gttggcaatcaacagatttaggcact

SEQ ID NO: 49029 - DNA, 26 bp, Homo sapiens
ttggcaatcaacagatttaggcactc

SEQ ID NO: 49030 - DNA, 26 bp, Homo sapiens
tggcaatcaacagatttaggcactca

SEQ ID NO: 49031 - DNA, 26 bp, Homo sapiens
ggcaatcaacagatttaggcactcaa

SEQ ID NO: 49032 - DNA, 26 bp, Homo sapiens
gcaatcaacagatttaggcactcaag

SEQ ID NO: 49033 - DNA, 26 bp, Homo sapiens
caatcaacagatttaggcactcaagt

SEQ ID NO: 49034 - DNA, 26 bp, Homo sapiens
aatcaacagatttaggcactcaagtt

SEQ ID NO: 49035 - DNA, 26 bp, Homo sapiens
atcaacagatttaggcactcaagttt

SEQ ID NO: 49036 - DNA, 26 bp, Homo sapiens
tcaacagatttaggcactcaagttta

SEQ ID NO: 49037 - DNA, 26 bp, Homo sapiens
caacagatttaggcactcaagtttaa

SEQ ID NO: 49038 - DNA, 26 bp, Homo sapiens
aacagatttaggcactcaagtttaag

SEQ ID NO: 49039 - DNA, 26 bp, Homo sapiens
acagatttaggcactcaagtttaagg

SEQ ID NO: 49040 - DNA, 26 bp, Homo sapiens
cagatttaggcactcaagtttaaggc

SEQ ID NO: 49041 - DNA, 26 bp, Homo sapiens
agatttaggcactcaagtttaaggca

SEQ ID NO: 49042 - DNA, 26 bp, Homo sapiens
gatttaggcactcaagtttaaggcag

SEQ ID NO: 49043 - DNA, 26 bp, Homo sapiens
atttaggcactcaagtttaaggcagc

SEQ ID NO: 49044 - DNA, 26 bp, Homo sapiens
tttaggcactcaagtttaaggcagca

SEQ ID NO: 49045 - DNA, 26 bp, Homo sapiens
ttaggcactcaagtttaaggcagcat

SEQ ID NO: 49046 - DNA, 26 bp, Homo sapiens
taggcactcaagtttaaggcagcatt

SEQ ID NO: 49047 - DNA, 26 bp, Homo sapiens
aggcactcaagtttaaggcagcattt

SEQ ID NO: 49048 - DNA, 26 bp, Homo sapiens
ggcactcaagtttaaggcagcatttg

SEQ ID NO: 49049 - DNA, 26 bp, Homo sapiens
gcactcaagtttaaggcagcatttga

SEQ ID NO: 49050 - DNA, 26 bp, Homo sapiens
cactcaagtttaaggcagcatttgaa

SEQ ID NO: 49051 - DNA, 26 bp, Homo sapiens
actcaagtttaaggcagcatttgaat

SEQ ID NO: 49052 - DNA, 26 bp, Homo sapiens
ctcaagtttaaggcagcatttgaatg

SEQ ID NO: 49053 - DNA, 26 bp, Homo sapiens
tcaagtttaaggcagcatttgaatgg

SEQ ID NO: 49054 - DNA, 26 bp, Homo sapiens
caagtttaaggcagcatttgaatgga

SEQ ID NO: 49055 - DNA, 26 bp, Homo sapiens
aagtttaaggcagcatttgaatggaa

SEQ ID NO: 49056 - DNA, 26 bp, Homo sapiens
agtttaaggcagcatttgaatggaag

SEQ ID NO: 49057 - DNA, 26 bp, Homo sapiens
gtttaaggcagcatttgaatggaagc

SEQ ID NO: 49058 - DNA, 26 bp, Homo sapiens
tttaaggcagcatttgaatggaagca

SEQ ID NO: 49059 - DNA, 26 bp, Homo sapiens
ttaaggcagcatttgaatggaagcag

SEQ ID NO: 49060 - DNA, 26 bp, Homo sapiens
taaggcagcatttgaatggaagcagc

SEQ ID NO: 49061 - DNA, 26 bp, Homo sapiens
aaggcagcatttgaatggaagcagct

SEQ ID NO: 49062 - DNA, 26 bp, Homo sapiens
aggcagcatttgaatggaagcagctg

SEQ ID NO: 49063 - DNA, 26 bp, Homo sapiens
ggcagcatttgaatggaagcagctga

SEQ ID NO: 49064 - DNA, 26 bp, Homo sapiens
gcagcatttgaatggaagcagctgac

SEQ ID NO: 49065 - DNA, 26 bp, Homo sapiens
cagcatttgaatggaagcagctgact

SEQ ID NO: 49066 - DNA, 26 bp, Homo sapiens
agcatttgaatggaagcagctgactt

SEQ ID NO: 49067 - DNA, 26 bp, Homo sapiens
gcatttgaatggaagcagctgacttt

SEQ ID NO: 49068 - DNA, 26 bp, Homo sapiens
catttgaatggaagcagctgactttt

SEQ ID NO: 49069 - DNA, 26 bp, Homo sapiens
atttgaatggaagcagctgacttttg

SEQ ID NO: 49070 - DNA, 26 bp, Homo sapiens
tttgaatggaagcagctgacttttga

SEQ ID NO: 49071 - DNA, 26 bp, Homo sapiens
ttgaatggaagcagctgacttttgac

SEQ ID NO: 49072 - DNA, 26 bp, Homo sapiens
tgaatggaagcagctgacttttgaca

SEQ ID NO: 49073 - DNA, 26 bp, Homo sapiens
gaatggaagcagctgacttttgacaa

SEQ ID NO: 49074 - DNA, 26 bp, Homo sapiens
aatggaagcagctgacttttgacaat

SEQ ID NO: 49075 - DNA, 26 bp, Homo sapiens
atggaagcagctgacttttgacaata

SEQ ID NO: 49076 - DNA, 26 bp, Homo sapiens
tggaagcagctgacttttgacaatag

SEQ ID NO: 49077 - DNA, 26 bp, Homo sapiens
ggaagcagctgacttttgacaatagt

SEQ ID NO: 49078 - DNA, 26 bp, Homo sapiens
gaagcagctgacttttgacaatagtc

SEQ ID NO: 49079 - DNA, 26 bp, Homo sapiens
aagcagctgacttttgacaatagtcc

SEQ ID NO: 49080 - DNA, 26 bp, Homo sapiens
agcagctgacttttgacaatagtcct

SEQ ID NO: 49081 - DNA, 26 bp, Homo sapiens
gcagctgacttttgacaatagtcctt

SEQ ID NO: 49082 - DNA, 26 bp, Homo sapiens
cagctgacttttgacaatagtccttt

SEQ ID NO: 49083 - DNA, 26 bp, Homo sapiens
agctgacttttgacaatagtcctttg

SEQ ID NO: 49084 - DNA, 26 bp, Homo sapiens
gctgacttttgacaatagtcctttgt

SEQ ID NO: 49085 - DNA, 26 bp, Homo sapiens
ctgacttttgacaatagtcctttgtc

SEQ ID NO: 49086 - DNA, 26 bp, Homo sapiens
tgacttttgacaatagtcctttgtct

SEQ ID NO: 49087 - DNA, 26 bp, Homo sapiens
gacttttgacaatagtcctttgtctt

SEQ ID NO: 49088 - DNA, 26 bp, Homo sapiens
acttttgacaatagtcctttgtcttg

SEQ ID NO: 49089 - DNA, 26 bp, Homo sapiens
cttttgacaatagtcctttgtcttga

SEQ ID NO: 49090 - DNA, 26 bp, Homo sapiens
ttttgacaatagtcctttgtcttgag

SEQ ID NO: 49091 - DNA, 26 bp, Homo sapiens
tttgacaatagtcctttgtcttgagg

SEQ ID NO: 49092 - DNA, 26 bp, Homo sapiens
ttgacaatagtcctttgtcttgaggt

SEQ ID NO: 49093 - DNA, 26 bp, Homo sapiens
tgacaatagtcctttgtcttgaggtg

SEQ ID NO: 49094 - DNA, 26 bp, Homo sapiens
gacaatagtcctttgtcttgaggtgg

SEQ ID NO: 49095 - DNA, 26 bp, Homo sapiens
acaatagtcctttgtcttgaggtggt

SEQ ID NO: 49096 - DNA, 26 bp, Homo sapiens
caatagtcctttgtcttgaggtggtg

SEQ ID NO: 49097 - DNA, 26 bp, Homo sapiens
aatagtcctttgtcttgaggtggtga

SEQ ID NO: 49098 - DNA, 26 bp, Homo sapiens
atagtcctttgtcttgaggtggtgaa

SEQ ID NO: 49099 - DNA, 26 bp, Homo sapiens
tagtcctttgtcttgaggtggtgaat

SEQ ID NO: 49100 - DNA, 26 bp, Homo sapiens
agtcctttgtcttgaggtggtgaata

SEQ ID NO: 49101 - DNA, 26 bp, Homo sapiens
gtcctttgtcttgaggtggtgaatat

SEQ ID NO: 49102 - DNA, 26 bp, Homo sapiens
tcctttgtcttgaggtggtgaatatc

SEQ ID NO: 49103 - DNA, 26 bp, Homo sapiens
cctttgtcttgaggtggtgaatatct

SEQ ID NO: 49104 - DNA, 26 bp, Homo sapiens
ctttgtcttgaggtggtgaatatctt

SEQ ID NO: 49105 - DNA, 26 bp, Homo sapiens
tttgtcttgaggtggtgaatatcttc

SEQ ID NO: 49106 - DNA, 26 bp, Homo sapiens
ttgtcttgaggtggtgaatatcttct

SEQ ID NO: 49107 - DNA, 26 bp, Homo sapiens
tgtcttgaggtggtgaatatcttctg

SEQ ID NO: 49108 - DNA, 26 bp, Homo sapiens
gtcttgaggtggtgaatatcttctgt

SEQ ID NO: 49109 - DNA, 26 bp, Homo sapiens
tcttgaggtggtgaatatcttctgtg

SEQ ID NO: 49110 - DNA, 26 bp, Homo sapiens
cttgaggtggtgaatatcttctgtgt

SEQ ID NO: 49111 - DNA, 26 bp, Homo sapiens
ttgaggtggtgaatatcttctgtgtt

SEQ ID NO: 49112 - DNA, 26 bp, Homo sapiens
tgaggtggtgaatatcttctgtgttt

SEQ ID NO: 49113 - DNA, 26 bp, Homo sapiens
gaggtggtgaatatcttctgtgttta

SEQ ID NO: 49114 - DNA, 26 bp, Homo sapiens
aggtggtgaatatcttctgtgtttat

SEQ ID NO: 49115 - DNA, 26 bp, Homo sapiens
ggtggtgaatatcttctgtgtttatt

SEQ ID NO: 49116 - DNA, 26 bp, Homo sapiens
gtggtgaatatcttctgtgtttatta

SEQ ID NO: 49117 - DNA, 26 bp, Homo sapiens
tggtgaatatcttctgtgtttattat

SEQ ID NO: 49118 - DNA, 26 bp, Homo sapiens
ggtgaatatcttctgtgtttattatg

SEQ ID NO: 49119 - DNA, 26 bp, Homo sapiens
gtgaatatcttctgtgtttattatgc

SEQ ID NO: 49120 - DNA, 26 bp, Homo sapiens
tgaatatcttctgtgtttattatgcc

SEQ ID NO: 49121 - DNA, 26 bp, Homo sapiens
gaatatcttctgtgtttattatgcca

SEQ ID NO: 49122 - DNA, 26 bp, Homo sapiens
aatatcttctgtgtttattatgccag

SEQ ID NO: 49123 - DNA, 26 bp, Homo sapiens
atatcttctgtgtttattatgccagg

SEQ ID NO: 49124 - DNA, 26 bp, Homo sapiens
tatcttctgtgtttattatgccagga

SEQ ID NO: 49125 - DNA, 26 bp, Homo sapiens
atcttctgtgtttattatgccaggat

SEQ ID NO: 49126 - DNA, 26 bp, Homo sapiens
tcttctgtgtttattatgccaggatt

SEQ ID NO: 49127 - DNA, 26 bp, Homo sapiens
cttctgtgtttattatgccaggattt

SEQ ID NO: 49128 - DNA, 26 bp, Homo sapiens
ttctgtgtttattatgccaggatttc

SEQ ID NO: 49129 - DNA, 26 bp, Homo sapiens
tctgtgtttattatgccaggatttca

SEQ ID NO: 49130 - DNA, 26 bp, Homo sapiens
ctgtgtttattatgccaggatttcag

SEQ ID NO: 49131 - DNA, 26 bp, Homo sapiens
tgtgtttattatgccaggatttcagt

SEQ ID NO: 49132 - DNA, 26 bp, Homo sapiens
gtgtttattatgccaggatttcagtg

SEQ ID NO: 49133 - DNA, 26 bp, Homo sapiens
tgtttattatgccaggatttcagtgc

SEQ ID NO: 49134 - DNA, 26 bp, Homo sapiens
gtttattatgccaggatttcagtgct

SEQ ID NO: 49135 - DNA, 26 bp, Homo sapiens
tttattatgccaggatttcagtgctg

SEQ ID NO: 49136 - DNA, 26 bp, Homo sapiens
ttattatgccaggatttcagtgctga

SEQ ID NO: 49137 - DNA, 26 bp, Homo sapiens
tattatgccaggatttcagtgctgac

SEQ ID NO: 49138 - DNA, 26 bp, Homo sapiens
attatgccaggatttcagtgctgact

SEQ ID NO: 49139 - DNA, 26 bp, Homo sapiens
ttatgccaggatttcagtgctgacta

SEQ ID NO: 49140 - DNA, 26 bp, Homo sapiens
tatgccaggatttcagtgctgactag

SEQ ID NO: 49141 - DNA, 26 bp, Homo sapiens
atgccaggatttcagtgctgactaga

SEQ ID NO: 49142 - DNA, 26 bp, Homo sapiens
tgccaggatttcagtgctgactagat

SEQ ID NO: 49143 - DNA, 26 bp, Homo sapiens
gccaggatttcagtgctgactagatt

SEQ ID NO: 49144 - DNA, 26 bp, Homo sapiens
ccaggatttcagtgctgactagattc

SEQ ID NO: 49145 - DNA, 26 bp, Homo sapiens
caggatttcagtgctgactagattct

SEQ ID NO: 49146 - DNA, 26 bp, Homo sapiens
aggatttcagtgctgactagattctt

SEQ ID NO: 49147 - DNA, 26 bp, Homo sapiens
ggatttcagtgctgactagattcttc

SEQ ID NO: 49148 - DNA, 26 bp, Homo sapiens
gatttcagtgctgactagattcttcc

SEQ ID NO: 49149 - DNA, 26 bp, Homo sapiens
atttcagtgctgactagattcttccc

SEQ ID NO: 49150 - DNA, 26 bp, Homo sapiens
tttcagtgctgactagattcttccca

SEQ ID NO: 49151 - DNA, 26 bp, Homo sapiens
ttcagtgctgactagattcttcccag

SEQ ID NO: 49152 - DNA, 26 bp, Homo sapiens
tcagtgctgactagattcttcccaga

SEQ ID NO: 49153 - DNA, 26 bp, Homo sapiens
cagtgctgactagattcttcccagac

SEQ ID NO: 49154 - DNA, 26 bp, Homo sapiens
agtgctgactagattcttcccagact

SEQ ID NO: 49155 - DNA, 26 bp, Homo sapiens
gtgctgactagattcttcccagactg

SEQ ID NO: 49156 - DNA, 26 bp, Homo sapiens
tgctgactagattcttcccagactga

SEQ ID NO: 49157 - DNA, 26 bp, Homo sapiens
gctgactagattcttcccagactgag

SEQ ID NO: 49158 - DNA, 26 bp, Homo sapiens
ctgactagattcttcccagactgagg

SEQ ID NO: 49159 - DNA, 26 bp, Homo sapiens
tgactagattcttcccagactgaggt

SEQ ID NO: 49160 - DNA, 26 bp, Homo sapiens
gactagattcttcccagactgaggtg

SEQ ID NO: 49161 - DNA, 26 bp, Homo sapiens
actagattcttcccagactgaggtgc

SEQ ID NO: 49162 - DNA, 26 bp, Homo sapiens
ctagattcttcccagactgaggtgct

SEQ ID NO: 49163 - DNA, 26 bp, Homo sapiens
tagattcttcccagactgaggtgctg

SEQ ID NO: 49164 - DNA, 26 bp, Homo sapiens
agattcttcccagactgaggtgctga

SEQ ID NO: 49165 - DNA, 26 bp, Homo sapiens
gattcttcccagactgaggtgctgaa

SEQ ID NO: 49166 - DNA, 26 bp, Homo sapiens
attcttcccagactgaggtgctgaag

SEQ ID NO: 49167 - DNA, 26 bp, Homo sapiens
ttcttcccagactgaggtgctgaaga

SEQ ID NO: 49168 - DNA, 26 bp, Homo sapiens
tcttcccagactgaggtgctgaagat

SEQ ID NO: 49169 - DNA, 26 bp, Homo sapiens
cttcccagactgaggtgctgaagatg

SEQ ID NO: 49170 - DNA, 26 bp, Homo sapiens
ttcccagactgaggtgctgaagatgt

SEQ ID NO: 49171 - DNA, 26 bp, Homo sapiens
tcccagactgaggtgctgaagatgta

SEQ ID NO: 49172 - DNA, 26 bp, Homo sapiens
cccagactgaggtgctgaagatgtat

SEQ ID NO: 49173 - DNA, 26 bp, Homo sapiens
ccagactgaggtgctgaagatgtatc

SEQ ID NO: 49174 - DNA, 26 bp, Homo sapiens
cagactgaggtgctgaagatgtatca

SEQ ID NO: 49175 - DNA, 26 bp, Homo sapiens
agactgaggtgctgaagatgtatcac

SEQ ID NO: 49176 - DNA, 26 bp, Homo sapiens
gactgaggtgctgaagatgtatcacg

SEQ ID NO: 49177 - DNA, 26 bp, Homo sapiens
actgaggtgctgaagatgtatcacgt

SEQ ID NO: 49178 - DNA, 26 bp, Homo sapiens
ctgaggtgctgaagatgtatcacgtt

SEQ ID NO: 49179 - DNA, 26 bp, Homo sapiens
tgaggtgctgaagatgtatcacgttt

SEQ ID NO: 49180 - DNA, 26 bp, Homo sapiens
gaggtgctgaagatgtatcacgtttc

SEQ ID NO: 49181 - DNA, 26 bp, Homo sapiens
aggtgctgaagatgtatcacgtttca

SEQ ID NO: 49182 - DNA, 26 bp, Homo sapiens
ggtgctgaagatgtatcacgtttcaa

SEQ ID NO: 49183 - DNA, 26 bp, Homo sapiens
gtgctgaagatgtatcacgtttcaaa

SEQ ID NO: 49184 - DNA, 26 bp, Homo sapiens
tgctgaagatgtatcacgtttcaaag

SEQ ID NO: 49185 - DNA, 26 bp, Homo sapiens
gctgaagatgtatcacgtttcaaaga

SEQ ID NO: 49186 - DNA, 26 bp, Homo sapiens
ctgaagatgtatcacgtttcaaagag

SEQ ID NO: 49187 - DNA, 26 bp, Homo sapiens
tgaagatgtatcacgtttcaaagagt

SEQ ID NO: 49188 - DNA, 26 bp, Homo sapiens
gaagatgtatcacgtttcaaagagtt

SEQ ID NO: 49189 - DNA, 26 bp, Homo sapiens
aagatgtatcacgtttcaaagagttc

SEQ ID NO: 49190 - DNA, 26 bp, Homo sapiens
agatgtatcacgtttcaaagagttct

SEQ ID NO: 49191 - DNA, 26 bp, Homo sapiens
gatgtatcacgtttcaaagagttctt

SEQ ID NO: 49192 - DNA, 26 bp, Homo sapiens
atgtatcacgtttcaaagagttcttt

SEQ ID NO: 49193 - DNA, 26 bp, Homo sapiens
tgtatcacgtttcaaagagttctttc

SEQ ID NO: 49194 - DNA, 26 bp, Homo sapiens
gtatcacgtttcaaagagttctttca

SEQ ID NO: 49195 - DNA, 26 bp, Homo sapiens
tatcacgtttcaaagagttctttcaa

SEQ ID NO: 49196 - DNA, 26 bp, Homo sapiens
atcacgtttcaaagagttctttcaac

SEQ ID NO: 49197 - DNA, 26 bp, Homo sapiens
tcacgtttcaaagagttctttcaact

SEQ ID NO: 49198 - DNA, 26 bp, Homo sapiens
cacgtttcaaagagttctttcaactg

SEQ ID NO: 49199 - DNA, 26 bp, Homo sapiens
acgtttcaaagagttctttcaactgg

SEQ ID NO: 49200 - DNA, 26 bp, Homo sapiens
cgtttcaaagagttctttcaactggg

SEQ ID NO: 49201 - DNA, 26 bp, Homo sapiens
gtttcaaagagttctttcaactgggc

SEQ ID NO: 49202 - DNA, 26 bp, Homo sapiens
tttcaaagagttctttcaactgggct

SEQ ID NO: 49203 - DNA, 26 bp, Homo sapiens
ttcaaagagttctttcaactgggctg

SEQ ID NO: 49204 - DNA, 26 bp, Homo sapiens
tcaaagagttctttcaactgggctgt

SEQ ID NO: 49205 - DNA, 26 bp, Homo sapiens
caaagagttctttcaactgggctgta

SEQ ID NO: 49206 - DNA, 26 bp, Homo sapiens
aaagagttctttcaactgggctgtag

SEQ ID NO: 49207 - DNA, 26 bp, Homo sapiens
aagagttctttcaactgggctgtagg

SEQ ID NO: 49208 - DNA, 26 bp, Homo sapiens
agagttctttcaactgggctgtaggc

SEQ ID NO: 49209 - DNA, 26 bp, Homo sapiens
gagttctttcaactgggctgtaggct

SEQ ID NO: 49210 - DNA, 26 bp, Homo sapiens
agttctttcaactgggctgtaggcta

SEQ ID NO: 49211 - DNA, 26 bp, Homo sapiens
gttctttcaactgggctgtaggctac

SEQ ID NO: 49212 - DNA, 26 bp, Homo sapiens
ttctttcaactgggctgtaggctaca

SEQ ID NO: 49213 - DNA, 26 bp, Homo sapiens
tctttcaactgggctgtaggctacag

SEQ ID NO: 49214 - DNA, 26 bp, Homo sapiens
ctttcaactgggctgtaggctacagc

SEQ ID NO: 49215 - DNA, 26 bp, Homo sapiens
tttcaactgggctgtaggctacagca

SEQ ID NO: 49216 - DNA, 26 bp, Homo sapiens
ttcaactgggctgtaggctacagcag

SEQ ID NO: 49217 - DNA, 26 bp, Homo sapiens
tcaactgggctgtaggctacagcaga

SEQ ID NO: 49218 - DNA, 26 bp, Homo sapiens
caactgggctgtaggctacagcagag

SEQ ID NO: 49219 - DNA, 26 bp, Homo sapiens
aactgggctgtaggctacagcagaga

SEQ ID NO: 49220 - DNA, 26 bp, Homo sapiens
actgggctgtaggctacagcagagat

SEQ ID NO: 49221 - DNA, 26 bp, Homo sapiens
ctgggctgtaggctacagcagagatg

SEQ ID NO: 49222 - DNA, 26 bp, Homo sapiens
tgggctgtaggctacagcagagatgt

SEQ ID NO: 49223 - DNA, 26 bp, Homo sapiens
gggctgtaggctacagcagagatgtt

SEQ ID NO: 49224 - DNA, 26 bp, Homo sapiens
ggctgtaggctacagcagagatgttt

SEQ ID NO: 49225 - DNA, 26 bp, Homo sapiens
gctgtaggctacagcagagatgtttt

SEQ ID NO: 49226 - DNA, 26 bp, Homo sapiens
ctgtaggctacagcagagatgttttc

SEQ ID NO: 49227 - DNA, 26 bp, Homo sapiens
tgtaggctacagcagagatgttttct

SEQ ID NO: 49228 - DNA, 26 bp, Homo sapiens
gtaggctacagcagagatgttttctt

SEQ ID NO: 49229 - DNA, 26 bp, Homo sapiens
taggctacagcagagatgttttcttt

SEQ ID NO: 49230 - DNA, 26 bp, Homo sapiens
aggctacagcagagatgttttctttt

SEQ ID NO: 49231 - DNA, 26 bp, Homo sapiens
ggctacagcagagatgttttcttttt

SEQ ID NO: 49232 - DNA, 26 bp, Homo sapiens
gctacagcagagatgttttctttttc

SEQ ID NO: 49233 - DNA, 26 bp, Homo sapiens
ctacagcagagatgttttctttttct

SEQ ID NO: 49234 - DNA, 26 bp, Homo sapiens
tacagcagagatgttttctttttctt

SEQ ID NO: 49235 - DNA, 26 bp, Homo sapiens
acagcagagatgttttctttttctta

SEQ ID NO: 49236 - DNA, 26 bp, Homo sapiens
cagcagagatgttttctttttcttat

SEQ ID NO: 49237 - DNA, 26 bp, Homo sapiens
agcagagatgttttctttttcttatc

SEQ ID NO: 49238 - DNA, 26 bp, Homo sapiens
gcagagatgttttctttttcttatca

SEQ ID NO: 49239 - DNA, 26 bp, Homo sapiens
cagagatgttttctttttcttatcat

SEQ ID NO: 49240 - DNA, 26 bp, Homo sapiens
agagatgttttctttttcttatcata

SEQ ID NO: 49241 - DNA, 26 bp, Homo sapiens
gagatgttttctttttcttatcataa

SEQ ID NO: 49242 - DNA, 26 bp, Homo sapiens
agatgttttctttttcttatcataaa

SEQ ID NO: 49243 - DNA, 26 bp, Homo sapiens
gatgttttctttttcttatcataaat

SEQ ID NO: 49244 - DNA, 26 bp, Homo sapiens
atgttttctttttcttatcataaata

SEQ ID NO: 49245 - DNA, 26 bp, Homo sapiens
tgttttctttttcttatcataaatac

SEQ ID NO: 49246 - DNA, 26 bp, Homo sapiens
gttttctttttcttatcataaatact

SEQ ID NO: 49247 - DNA, 26 bp, Homo sapiens
ttttctttttcttatcataaatactt

SEQ ID NO: 49248 - DNA, 26 bp, Homo sapiens
tttctttttcttatcataaatacttc

SEQ ID NO: 49249 - DNA, 26 bp, Homo sapiens
ttctttttcttatcataaatacttca

SEQ ID NO: 49250 - DNA, 26 bp, Homo sapiens
tctttttcttatcataaatacttcag

SEQ ID NO: 49251 - DNA, 26 bp, Homo sapiens
ctttttcttatcataaatacttcagg

SEQ ID NO: 49252 - DNA, 26 bp, Homo sapiens
tttttcttatcataaatacttcaggt

SEQ ID NO: 49253 - DNA, 26 bp, Homo sapiens
ttttcttatcataaatacttcaggtt

SEQ ID NO: 49254 - DNA, 26 bp, Homo sapiens
tttcttatcataaatacttcaggttc

SEQ ID NO: 49255 - DNA, 26 bp, Homo sapiens
ttcttatcataaatacttcaggttca

SEQ ID NO: 49256 - DNA, 26 bp, Homo sapiens
tcttatcataaatacttcaggttcac

SEQ ID NO: 49257 - DNA, 26 bp, Homo sapiens
cttatcataaatacttcaggttcaca

SEQ ID NO: 49258 - DNA, 26 bp, Homo sapiens
ttatcataaatacttcaggttcacag

SEQ ID NO: 49259 - DNA, 26 bp, Homo sapiens
tatcataaatacttcaggttcacagc

SEQ ID NO: 49260 - DNA, 26 bp, Homo sapiens
atcataaatacttcaggttcacagct

SEQ ID NO: 49261 - DNA, 26 bp, Homo sapiens
tcataaatacttcaggttcacagcta

SEQ ID NO: 49262 - DNA, 26 bp, Homo sapiens
cataaatacttcaggttcacagctac

SEQ ID NO: 49263 - DNA, 26 bp, Homo sapiens
ataaatacttcaggttcacagctact

SEQ ID NO: 49264 - DNA, 26 bp, Homo sapiens
taaatacttcaggttcacagctactt

SEQ ID NO: 49265 - DNA, 26 bp, Homo sapiens
aaatacttcaggttcacagctacttc

SEQ ID NO: 49266 - DNA, 26 bp, Homo sapiens
aatacttcaggttcacagctacttct

SEQ ID NO: 49267 - DNA, 26 bp, Homo sapiens
atacttcaggttcacagctacttctt

SEQ ID NO: 49268 - DNA, 26 bp, Homo sapiens
tacttcaggttcacagctacttcttc

SEQ ID NO: 49269 - DNA, 26 bp, Homo sapiens
acttcaggttcacagctacttcttcg

SEQ ID NO: 49270 - DNA, 26 bp, Homo sapiens
cttcaggttcacagctacttcttcgt

SEQ ID NO: 49271 - DNA, 26 bp, Homo sapiens
ttcaggttcacagctacttcttcgta

SEQ ID NO: 49272 - DNA, 26 bp, Homo sapiens
tcaggttcacagctacttcttcgtaa

SEQ ID NO: 49273 - DNA, 26 bp, Homo sapiens
caggttcacagctacttcttcgtaat

SEQ ID NO: 49274 - DNA, 26 bp, Homo sapiens
aggttcacagctacttcttcgtaatg

SEQ ID NO: 49275 - DNA, 26 bp, Homo sapiens
ggttcacagctacttcttcgtaatgc

SEQ ID NO: 49276 - DNA, 26 bp, Homo sapiens
gttcacagctacttcttcgtaatgcc

SEQ ID NO: 49277 - DNA, 26 bp, Homo sapiens
ttcacagctacttcttcgtaatgcca

SEQ ID NO: 49278 - DNA, 26 bp, Homo sapiens
tcacagctacttcttcgtaatgccaa

SEQ ID NO: 49279 - DNA, 26 bp, Homo sapiens
cacagctacttcttcgtaatgccaaa

SEQ ID NO: 49280 - DNA, 26 bp, Homo sapiens
acagctacttcttcgtaatgccaaaa

SEQ ID NO: 49281 - DNA, 26 bp, Homo sapiens
cagctacttcttcgtaatgccaaaac

SEQ ID NO: 49282 - DNA, 26 bp, Homo sapiens
agctacttcttcgtaatgccaaaact

SEQ ID NO: 49283 - DNA, 26 bp, Homo sapiens
gctacttcttcgtaatgccaaaactg

SEQ ID NO: 49284 - DNA, 26 bp, Homo sapiens
ctacttcttcgtaatgccaaaactgg

SEQ ID NO: 49285 - DNA, 26 bp, Homo sapiens
tacttcttcgtaatgccaaaactgga

SEQ ID NO: 49286 - DNA, 26 bp, Homo sapiens
acttcttcgtaatgccaaaactggaa

SEQ ID NO: 49287 - DNA, 26 bp, Homo sapiens
cttcttcgtaatgccaaaactggaat

SEQ ID NO: 49288 - DNA, 26 bp, Homo sapiens
ttcttcgtaatgccaaaactggaatg

SEQ ID NO: 49289 - DNA, 26 bp, Homo sapiens
tcttcgtaatgccaaaactggaatgt

SEQ ID NO: 49290 - DNA, 26 bp, Homo sapiens
cttcgtaatgccaaaactggaatgtt

SEQ ID NO: 49291 - DNA, 26 bp, Homo sapiens
ttcgtaatgccaaaactggaatgttt

SEQ ID NO: 49292 - DNA, 26 bp, Homo sapiens
tcgtaatgccaaaactggaatgtttg

SEQ ID NO: 49293 - DNA, 26 bp, Homo sapiens
cgtaatgccaaaactggaatgtttgc

SEQ ID NO: 49294 - DNA, 26 bp, Homo sapiens
gtaatgccaaaactggaatgtttgca

SEQ ID NO: 49295 - DNA, 26 bp, Homo sapiens
taatgccaaaactggaatgtttgcag

SEQ ID NO: 49296 - DNA, 26 bp, Homo sapiens
aatgccaaaactggaatgtttgcagt

SEQ ID NO: 49297 - DNA, 26 bp, Homo sapiens
atgccaaaactggaatgtttgcagtg

SEQ ID NO: 49298 - DNA, 26 bp, Homo sapiens
tgccaaaactggaatgtttgcagtgg

SEQ ID NO: 49299 - DNA, 26 bp, Homo sapiens
gccaaaactggaatgtttgcagtggg

SEQ ID NO: 49300 - DNA, 26 bp, Homo sapiens
ccaaaactggaatgtttgcagtgggg

SEQ ID NO: 49301 - DNA, 26 bp, Homo sapiens
caaaactggaatgtttgcagtgggga

SEQ ID NO: 49302 - DNA, 26 bp, Homo sapiens
aaaactggaatgtttgcagtggggaa

SEQ ID NO: 49303 - DNA, 26 bp, Homo sapiens
aaactggaatgtttgcagtggggaag

SEQ ID NO: 49304 - DNA, 26 bp, Homo sapiens
aactggaatgtttgcagtggggaagt

SEQ ID NO: 49305 - DNA, 26 bp, Homo sapiens
actggaatgtttgcagtggggaagtt

SEQ ID NO: 49306 - DNA, 26 bp, Homo sapiens
ctggaatgtttgcagtggggaagtta

SEQ ID NO: 49307 - DNA, 26 bp, Homo sapiens
tggaatgtttgcagtggggaagttat

SEQ ID NO: 49308 - DNA, 26 bp, Homo sapiens
ggaatgtttgcagtggggaagttata

SEQ ID NO: 49309 - DNA, 26 bp, Homo sapiens
gaatgtttgcagtggggaagttatag

SEQ ID NO: 49310 - DNA, 26 bp, Homo sapiens
aatgtttgcagtggggaagttatagc

SEQ ID NO: 49311 - DNA, 26 bp, Homo sapiens
atgtttgcagtggggaagttatagca

SEQ ID NO: 49312 - DNA, 26 bp, Homo sapiens
tgtttgcagtggggaagttatagcag

SEQ ID NO: 49313 - DNA, 26 bp, Homo sapiens
gtttgcagtggggaagttatagcagt

SEQ ID NO: 49314 - DNA, 26 bp, Homo sapiens
tttgcagtggggaagttatagcagtg

SEQ ID NO: 49315 - DNA, 26 bp, Homo sapiens
ttgcagtggggaagttatagcagtgt

SEQ ID NO: 49316 - DNA, 26 bp, Homo sapiens
tgcagtggggaagttatagcagtgtg

SEQ ID NO: 49317 - DNA, 26 bp, Homo sapiens
gcagtggggaagttatagcagtgtgc

SEQ ID NO: 49318 - DNA, 26 bp, Homo sapiens
cagtggggaagttatagcagtgtgca

SEQ ID NO: 49319 - DNA, 26 bp, Homo sapiens
agtggggaagttatagcagtgtgcac

SEQ ID NO: 49320 - DNA, 26 bp, Homo sapiens
gtggggaagttatagcagtgtgcaca

SEQ ID NO: 49321 - DNA, 26 bp, Homo sapiens
tggggaagttatagcagtgtgcacaa

SEQ ID NO: 49322 - DNA, 26 bp, Homo sapiens
ggggaagttatagcagtgtgcacaaa

SEQ ID NO: 49323 - DNA, 26 bp, Homo sapiens
gggaagttatagcagtgtgcacaaat

SEQ ID NO: 49324 - DNA, 26 bp, Homo sapiens
ggaagttatagcagtgtgcacaaata

SEQ ID NO: 49325 - DNA, 26 bp, Homo sapiens
gaagttatagcagtgtgcacaaatac

SEQ ID NO: 49326 - DNA, 26 bp, Homo sapiens
aagttatagcagtgtgcacaaatact

SEQ ID NO: 49327 - DNA, 26 bp, Homo sapiens
agttatagcagtgtgcacaaatacta

SEQ ID NO: 49328 - DNA, 26 bp, Homo sapiens
gttatagcagtgtgcacaaatactaa

SEQ ID NO: 49329 - DNA, 26 bp, Homo sapiens
ttatagcagtgtgcacaaatactaag

SEQ ID NO: 49330 - DNA, 26 bp, Homo sapiens
tatagcagtgtgcacaaatactaaga

SEQ ID NO: 49331 - DNA, 26 bp, Homo sapiens
atagcagtgtgcacaaatactaagat

SEQ ID NO: 49332 - DNA, 26 bp, Homo sapiens
tagcagtgtgcacaaatactaagatg

SEQ ID NO: 49333 - DNA, 26 bp, Homo sapiens
agcagtgtgcacaaatactaagatgg

SEQ ID NO: 49334 - DNA, 26 bp, Homo sapiens
gcagtgtgcacaaatactaagatgga

SEQ ID NO: 49335 - DNA, 26 bp, Homo sapiens
cagtgtgcacaaatactaagatggaa

SEQ ID NO: 49336 - DNA, 26 bp, Homo sapiens
agtgtgcacaaatactaagatggaaa

SEQ ID NO: 49337 - DNA, 26 bp, Homo sapiens
gtgtgcacaaatactaagatggaaac

SEQ ID NO: 49338 - DNA, 26 bp, Homo sapiens
tgtgcacaaatactaagatggaaaca

SEQ ID NO: 49339 - DNA, 26 bp, Homo sapiens
gtgcacaaatactaagatggaaacat

SEQ ID NO: 49340 - DNA, 26 bp, Homo sapiens
tgcacaaatactaagatggaaacatt

SEQ ID NO: 49341 - DNA, 26 bp, Homo sapiens
gcacaaatactaagatggaaacatta

SEQ ID NO: 49342 - DNA, 26 bp, Homo sapiens
cacaaatactaagatggaaacattag

SEQ ID NO: 49343 - DNA, 26 bp, Homo sapiens
acaaatactaagatggaaacattagt

SEQ ID NO: 49344 - DNA, 26 bp, Homo sapiens
caaatactaagatggaaacattagtg

SEQ ID NO: 49345 - DNA, 26 bp, Homo sapiens
aaatactaagatggaaacattagtgc

SEQ ID NO: 49346 - DNA, 26 bp, Homo sapiens
aatactaagatggaaacattagtgct

SEQ ID NO: 49347 - DNA, 26 bp, Homo sapiens
atactaagatggaaacattagtgctg

SEQ ID NO: 49348 - DNA, 26 bp, Homo sapiens
tactaagatggaaacattagtgctgg

SEQ ID NO: 49349 - DNA, 26 bp, Homo sapiens
actaagatggaaacattagtgctgga

SEQ ID NO: 49350 - DNA, 26 bp, Homo sapiens
ctaagatggaaacattagtgctggag

SEQ ID NO: 49351 - DNA, 26 bp, Homo sapiens
taagatggaaacattagtgctggaga

SEQ ID NO: 49352 - DNA, 26 bp, Homo sapiens
aagatggaaacattagtgctggagat

SEQ ID NO: 49353 - DNA, 26 bp, Homo sapiens
agatggaaacattagtgctggagatg

SEQ ID NO: 49354 - DNA, 26 bp, Homo sapiens
gatggaaacattagtgctggagatgt

SEQ ID NO: 49355 - DNA, 26 bp, Homo sapiens
atggaaacattagtgctggagatgtt

SEQ ID NO: 49356 - DNA, 26 bp, Homo sapiens
tggaaacattagtgctggagatgttt

SEQ ID NO: 49357 - DNA, 26 bp, Homo sapiens
ggaaacattagtgctggagatgtttg

SEQ ID NO: 49358 - DNA, 26 bp, Homo sapiens
gaaacattagtgctggagatgtttga

SEQ ID NO: 49359 - DNA, 26 bp, Homo sapiens
aaacattagtgctggagatgtttgac

SEQ ID NO: 49360 - DNA, 26 bp, Homo sapiens
aacattagtgctggagatgtttgaca

SEQ ID NO: 49361 - DNA, 26 bp, Homo sapiens
acattagtgctggagatgtttgacaa

SEQ ID NO: 49362 - DNA, 26 bp, Homo sapiens
cattagtgctggagatgtttgacaaa

SEQ ID NO: 49363 - DNA, 26 bp, Homo sapiens
attagtgctggagatgtttgacaaag

SEQ ID NO: 49364 - DNA, 26 bp, Homo sapiens
ttagtgctggagatgtttgacaaagt

SEQ ID NO: 49365 - DNA, 26 bp, Homo sapiens
tagtgctggagatgtttgacaaagtg

SEQ ID NO: 49366 - DNA, 26 bp, Homo sapiens
agtgctggagatgtttgacaaagtga

SEQ ID NO: 49367 - DNA, 26 bp, Homo sapiens
gtgctggagatgtttgacaaagtgat

SEQ ID NO: 49368 - DNA, 26 bp, Homo sapiens
tgctggagatgtttgacaaagtgatt

SEQ ID NO: 49369 - DNA, 26 bp, Homo sapiens
gctggagatgtttgacaaagtgattt

SEQ ID NO: 49370 - DNA, 26 bp, Homo sapiens
ctggagatgtttgacaaagtgatttg

SEQ ID NO: 49371 - DNA, 26 bp, Homo sapiens
tggagatgtttgacaaagtgatttgc

SEQ ID NO: 49372 - DNA, 26 bp, Homo sapiens
ggagatgtttgacaaagtgatttgca

SEQ ID NO: 49373 - DNA, 26 bp, Homo sapiens
gagatgtttgacaaagtgatttgcac

SEQ ID NO: 49374 - DNA, 26 bp, Homo sapiens
agatgtttgacaaagtgatttgcact

SEQ ID NO: 49375 - DNA, 26 bp, Homo sapiens
gatgtttgacaaagtgatttgcacta

SEQ ID NO: 49376 - DNA, 26 bp, Homo sapiens
atgtttgacaaagtgatttgcactac

SEQ ID NO: 49377 - DNA, 26 bp, Homo sapiens
tgtttgacaaagtgatttgcactaca

SEQ ID NO: 49378 - DNA, 26 bp, Homo sapiens
gtttgacaaagtgatttgcactacaa

SEQ ID NO: 49379 - DNA, 26 bp, Homo sapiens
tttgacaaagtgatttgcactacaaa

SEQ ID NO: 49380 - DNA, 26 bp, Homo sapiens
ttgacaaagtgatttgcactacaaat

SEQ ID NO: 49381 - DNA, 26 bp, Homo sapiens
tgacaaagtgatttgcactacaaatg

SEQ ID NO: 49382 - DNA, 26 bp, Homo sapiens
gacaaagtgatttgcactacaaatgt

SEQ ID NO: 49383 - DNA, 26 bp, Homo sapiens
acaaagtgatttgcactacaaatgta

SEQ ID NO: 49384 - DNA, 26 bp, Homo sapiens
caaagtgatttgcactacaaatgtaa

SEQ ID NO: 49385 - DNA, 26 bp, Homo sapiens
aaagtgatttgcactacaaatgtaaa

SEQ ID NO: 49386 - DNA, 26 bp, Homo sapiens
aagtgatttgcactacaaatgtaaaa

SEQ ID NO: 49387 - DNA, 26 bp, Homo sapiens
agtgatttgcactacaaatgtaaaac

SEQ ID NO: 49388 - DNA, 26 bp, Homo sapiens
gtgatttgcactacaaatgtaaaaca

SEQ ID NO: 49389 - DNA, 26 bp, Homo sapiens
tgatttgcactacaaatgtaaaacaa

SEQ ID NO: 49390 - DNA, 26 bp, Homo sapiens
gatttgcactacaaatgtaaaacaaa

SEQ ID NO: 49391 - DNA, 26 bp, Homo sapiens
atttgcactacaaatgtaaaacaaaa

SEQ ID NO: 49392 - DNA, 26 bp, Homo sapiens
tttgcactacaaatgtaaaacaaaac

SEQ ID NO: 49393 - DNA, 26 bp, Homo sapiens
ttgcactacaaatgtaaaacaaaaca

SEQ ID NO: 49394 - DNA, 26 bp, Homo sapiens
tgcactacaaatgtaaaacaaaacaa

SEQ ID NO: 49395 - DNA, 26 bp, Homo sapiens
gcactacaaatgtaaaacaaaacaag

SEQ ID NO: 49396 - DNA, 26 bp, Homo sapiens
cactacaaatgtaaaacaaaacaagg

SEQ ID NO: 49397 - DNA, 26 bp, Homo sapiens
actacaaatgtaaaacaaaacaaggc

SEQ ID NO: 49398 - DNA, 26 bp, Homo sapiens
ctacaaatgtaaaacaaaacaaggct

SEQ ID NO: 49399 - DNA, 26 bp, Homo sapiens
tacaaatgtaaaacaaaacaaggctt

SEQ ID NO: 49400 - DNA, 26 bp, Homo sapiens
acaaatgtaaaacaaaacaaggcttt

SEQ ID NO: 49401 - DNA, 26 bp, Homo sapiens
caaatgtaaaacaaaacaaggctttg

SEQ ID NO: 49402 - DNA, 26 bp, Homo sapiens
aaatgtaaaacaaaacaaggctttga

SEQ ID NO: 49403 - DNA, 26 bp, Homo sapiens
aatgtaaaacaaaacaaggctttgac

SEQ ID NO: 49404 - DNA, 26 bp, Homo sapiens
atgtaaaacaaaacaaggctttgaca

SEQ ID NO: 49405 - DNA, 26 bp, Homo sapiens
tgtaaaacaaaacaaggctttgacaa

SEQ ID NO: 49406 - DNA, 26 bp, Homo sapiens
gtaaaacaaaacaaggctttgacaag

SEQ ID NO: 49407 - DNA, 26 bp, Homo sapiens
taaaacaaaacaaggctttgacaaga

SEQ ID NO: 49408 - DNA, 26 bp, Homo sapiens
aaaacaaaacaaggctttgacaagaa

SEQ ID NO: 49409 - DNA, 26 bp, Homo sapiens
aaacaaaacaaggctttgacaagaac

SEQ ID NO: 49410 - DNA, 26 bp, Homo sapiens
aacaaaacaaggctttgacaagaaca

SEQ ID NO: 49411 - DNA, 26 bp, Homo sapiens
acaaaacaaggctttgacaagaacaa

SEQ ID NO: 49412 - DNA, 26 bp, Homo sapiens
caaaacaaggctttgacaagaacaag

SEQ ID NO: 49413 - DNA, 26 bp, Homo sapiens
aaaacaaggctttgacaagaacaagg

SEQ ID NO: 49414 - DNA, 26 bp, Homo sapiens
aaacaaggctttgacaagaacaaggg

SEQ ID NO: 49415 - DNA, 26 bp, Homo sapiens
aacaaggctttgacaagaacaaggga

SEQ ID NO: 49416 - DNA, 26 bp, Homo sapiens
acaaggctttgacaagaacaagggaa

SEQ ID NO: 49417 - DNA, 26 bp, Homo sapiens
caaggctttgacaagaacaagggaat

SEQ ID NO: 49418 - DNA, 26 bp, Homo sapiens
aaggctttgacaagaacaagggaatc

SEQ ID NO: 49419 - DNA, 26 bp, Homo sapiens
aggctttgacaagaacaagggaatct

SEQ ID NO: 49420 - DNA, 26 bp, Homo sapiens
ggctttgacaagaacaagggaatcta

SEQ ID NO: 49421 - DNA, 26 bp, Homo sapiens
gctttgacaagaacaagggaatctaa

SEQ ID NO: 49422 - DNA, 26 bp, Homo sapiens
ctttgacaagaacaagggaatctaaa

SEQ ID NO: 49423 - DNA, 26 bp, Homo sapiens
tttgacaagaacaagggaatctaaag

SEQ ID NO: 49424 - DNA, 26 bp, Homo sapiens
ttgacaagaacaagggaatctaaaga

SEQ ID NO: 49425 - DNA, 26 bp, Homo sapiens
tgacaagaacaagggaatctaaagac

SEQ ID NO: 49426 - DNA, 26 bp, Homo sapiens
gacaagaacaagggaatctaaagaca

SEQ ID NO: 49427 - DNA, 26 bp, Homo sapiens
acaagaacaagggaatctaaagacat

SEQ ID NO: 49428 - DNA, 26 bp, Homo sapiens
caagaacaagggaatctaaagacatg

SEQ ID NO: 49429 - DNA, 26 bp, Homo sapiens
aagaacaagggaatctaaagacatgc

SEQ ID NO: 49430 - DNA, 26 bp, Homo sapiens
agaacaagggaatctaaagacatgcc

SEQ ID NO: 49431 - DNA, 26 bp, Homo sapiens
gaacaagggaatctaaagacatgcct

SEQ ID NO: 49432 - DNA, 26 bp, Homo sapiens
aacaagggaatctaaagacatgcctg

SEQ ID NO: 49433 - DNA, 26 bp, Homo sapiens
acaagggaatctaaagacatgcctga

SEQ ID NO: 49434 - DNA, 26 bp, Homo sapiens
caagggaatctaaagacatgcctgaa

SEQ ID NO: 49435 - DNA, 26 bp, Homo sapiens
aagggaatctaaagacatgcctgaaa

SEQ ID NO: 49436 - DNA, 26 bp, Homo sapiens
agggaatctaaagacatgcctgaaaa

SEQ ID NO: 49437 - DNA, 26 bp, Homo sapiens
gggaatctaaagacatgcctgaaaaa

SEQ ID NO: 49438 - DNA, 26 bp, Homo sapiens
ggaatctaaagacatgcctgaaaaat

SEQ ID NO: 49439 - DNA, 26 bp, Homo sapiens
gaatctaaagacatgcctgaaaaatc

SEQ ID NO: 49440 - DNA, 26 bp, Homo sapiens
aatctaaagacatgcctgaaaaatct

SEQ ID NO: 49441 - DNA, 26 bp, Homo sapiens
atctaaagacatgcctgaaaaatcta

SEQ ID NO: 49442 - DNA, 26 bp, Homo sapiens
tctaaagacatgcctgaaaaatctag

SEQ ID NO: 49443 - DNA, 26 bp, Homo sapiens
ctaaagacatgcctgaaaaatctagc

SEQ ID NO: 49444 - DNA, 26 bp, Homo sapiens
taaagacatgcctgaaaaatctagct

SEQ ID NO: 49445 - DNA, 26 bp, Homo sapiens
aaagacatgcctgaaaaatctagctc

SEQ ID NO: 49446 - DNA, 26 bp, Homo sapiens
aagacatgcctgaaaaatctagctca

SEQ ID NO: 49447 - DNA, 26 bp, Homo sapiens
agacatgcctgaaaaatctagctcaa

SEQ ID NO: 49448 - DNA, 26 bp, Homo sapiens
gacatgcctgaaaaatctagctcaat

SEQ ID NO: 49449 - DNA, 26 bp, Homo sapiens
acatgcctgaaaaatctagctcaatc

SEQ ID NO: 49450 - DNA, 26 bp, Homo sapiens
catgcctgaaaaatctagctcaatca

SEQ ID NO: 49451 - DNA, 26 bp, Homo sapiens
atgcctgaaaaatctagctcaatcac

SEQ ID NO: 49452 - DNA, 26 bp, Homo sapiens
tgcctgaaaaatctagctcaatcacg

SEQ ID NO: 49453 - DNA, 26 bp, Homo sapiens
gcctgaaaaatctagctcaatcacgc

SEQ ID NO: 49454 - DNA, 26 bp, Homo sapiens
cctgaaaaatctagctcaatcacgct

SEQ ID NO: 49455 - DNA, 26 bp, Homo sapiens
ctgaaaaatctagctcaatcacgcta

SEQ ID NO: 49456 - DNA, 26 bp, Homo sapiens
tgaaaaatctagctcaatcacgctag

SEQ ID NO: 49457 - DNA, 26 bp, Homo sapiens
gaaaaatctagctcaatcacgctaga

SEQ ID NO: 49458 - DNA, 26 bp, Homo sapiens
aaaaatctagctcaatcacgctagac

SEQ ID NO: 49459 - DNA, 26 bp, Homo sapiens
aaaatctagctcaatcacgctagaca

SEQ ID NO: 49460 - DNA, 26 bp, Homo sapiens
aaatctagctcaatcacgctagacat

SEQ ID NO: 49461 - DNA, 26 bp, Homo sapiens
aatctagctcaatcacgctagacatg

SEQ ID NO: 49462 - DNA, 26 bp, Homo sapiens
atctagctcaatcacgctagacatgc

SEQ ID NO: 49463 - DNA, 26 bp, Homo sapiens
tctagctcaatcacgctagacatgca

SEQ ID NO: 49464 - DNA, 26 bp, Homo sapiens
ctagctcaatcacgctagacatgcaa

SEQ ID NO: 49465 - DNA, 26 bp, Homo sapiens
tagctcaatcacgctagacatgcaac

SEQ ID NO: 49466 - DNA, 26 bp, Homo sapiens
agctcaatcacgctagacatgcaaca

SEQ ID NO: 49467 - DNA, 26 bp, Homo sapiens
gctcaatcacgctagacatgcaacag

SEQ ID NO: 49468 - DNA, 26 bp, Homo sapiens
ctcaatcacgctagacatgcaacagg

SEQ ID NO: 49469 - DNA, 26 bp, Homo sapiens
tcaatcacgctagacatgcaacagga

SEQ ID NO: 49470 - DNA, 26 bp, Homo sapiens
caatcacgctagacatgcaacaggat

SEQ ID NO: 49471 - DNA, 26 bp, Homo sapiens
aatcacgctagacatgcaacaggatg

SEQ ID NO: 49472 - DNA, 26 bp, Homo sapiens
atcacgctagacatgcaacaggatgt

SEQ ID NO: 49473 - DNA, 26 bp, Homo sapiens
tcacgctagacatgcaacaggatgtt

SEQ ID NO: 49474 - DNA, 26 bp, Homo sapiens
cacgctagacatgcaacaggatgtta

SEQ ID NO: 49475 - DNA, 26 bp, Homo sapiens
acgctagacatgcaacaggatgttaa

SEQ ID NO: 49476 - DNA, 26 bp, Homo sapiens
cgctagacatgcaacaggatgttaag

SEQ ID NO: 49477 - DNA, 26 bp, Homo sapiens
gctagacatgcaacaggatgttaagc

SEQ ID NO: 49478 - DNA, 26 bp, Homo sapiens
ctagacatgcaacaggatgttaagca

SEQ ID NO: 49479 - DNA, 26 bp, Homo sapiens
tagacatgcaacaggatgttaagcaa

SEQ ID NO: 49480 - DNA, 26 bp, Homo sapiens
agacatgcaacaggatgttaagcaag

SEQ ID NO: 49481 - DNA, 26 bp, Homo sapiens
gacatgcaacaggatgttaagcaagc

SEQ ID NO: 49482 - DNA, 26 bp, Homo sapiens
acatgcaacaggatgttaagcaagca

SEQ ID NO: 49483 - DNA, 26 bp, Homo sapiens
catgcaacaggatgttaagcaagcac

SEQ ID NO: 49484 - DNA, 26 bp, Homo sapiens
atgcaacaggatgttaagcaagcacg

SEQ ID NO: 49485 - DNA, 26 bp, Homo sapiens
tgcaacaggatgttaagcaagcacgg

SEQ ID NO: 49486 - DNA, 26 bp, Homo sapiens
gcaacaggatgttaagcaagcacgga

SEQ ID NO: 49487 - DNA, 26 bp, Homo sapiens
caacaggatgttaagcaagcacggag

SEQ ID NO: 49488 - DNA, 26 bp, Homo sapiens
aacaggatgttaagcaagcacggagg

SEQ ID NO: 49489 - DNA, 26 bp, Homo sapiens
acaggatgttaagcaagcacggaggt

SEQ ID NO: 49490 - DNA, 26 bp, Homo sapiens
caggatgttaagcaagcacggaggtg

SEQ ID NO: 49491 - DNA, 26 bp, Homo sapiens
aggatgttaagcaagcacggaggtgg

SEQ ID NO: 49492 - DNA, 26 bp, Homo sapiens
ggatgttaagcaagcacggaggtggc

SEQ ID NO: 49493 - DNA, 26 bp, Homo sapiens
gatgttaagcaagcacggaggtggcg

SEQ ID NO: 49494 - DNA, 26 bp, Homo sapiens
atgttaagcaagcacggaggtggcgc

SEQ ID NO: 49495 - DNA, 26 bp, Homo sapiens
tgttaagcaagcacggaggtggcgca

SEQ ID NO: 49496 - DNA, 26 bp, Homo sapiens
gttaagcaagcacggaggtggcgcag

SEQ ID NO: 49497 - DNA, 26 bp, Homo sapiens
ttaagcaagcacggaggtggcgcagg

SEQ ID NO: 49498 - DNA, 26 bp, Homo sapiens
taagcaagcacggaggtggcgcaggc

SEQ ID NO: 49499 - DNA, 26 bp, Homo sapiens
aagcaagcacggaggtggcgcaggca

SEQ ID NO: 49500 - DNA, 26 bp, Homo sapiens
agcaagcacggaggtggcgcaggcag

SEQ ID NO: 49501 - DNA, 26 bp, Homo sapiens
gcaagcacggaggtggcgcaggcaga

SEQ ID NO: 49502 - DNA, 26 bp, Homo sapiens
caagcacggaggtggcgcaggcagac

SEQ ID NO: 49503 - DNA, 26 bp, Homo sapiens
aagcacggaggtggcgcaggcagaca

SEQ ID NO: 49504 - DNA, 26 bp, Homo sapiens
agcacggaggtggcgcaggcagacac

SEQ ID NO: 49505 - DNA, 26 bp, Homo sapiens
gcacggaggtggcgcaggcagacact

SEQ ID NO: 49506 - DNA, 26 bp, Homo sapiens
cacggaggtggcgcaggcagacactg

SEQ ID NO: 49507 - DNA, 26 bp, Homo sapiens
acggaggtggcgcaggcagacactga

SEQ ID NO: 49508 - DNA, 26 bp, Homo sapiens
cggaggtggcgcaggcagacactgac

SEQ ID NO: 49509 - DNA, 26 bp, Homo sapiens
ggaggtggcgcaggcagacactgaca

SEQ ID NO: 49510 - DNA, 26 bp, Homo sapiens
gaggtggcgcaggcagacactgacag

SEQ ID NO: 49511 - DNA, 26 bp, Homo sapiens
aggtggcgcaggcagacactgacaga

SEQ ID NO: 49512 - DNA, 26 bp, Homo sapiens
ggtggcgcaggcagacactgacagat

SEQ ID NO: 49513 - DNA, 26 bp, Homo sapiens
gtggcgcaggcagacactgacagatg

SEQ ID NO: 49514 - DNA, 26 bp, Homo sapiens
tggcgcaggcagacactgacagatgg

SEQ ID NO: 49515 - DNA, 26 bp, Homo sapiens
ggcgcaggcagacactgacagatggc

SEQ ID NO: 49516 - DNA, 26 bp, Homo sapiens
gcgcaggcagacactgacagatggca

SEQ ID NO: 49517 - DNA, 26 bp, Homo sapiens
cgcaggcagacactgacagatggcaa

SEQ ID NO: 49518 - DNA, 26 bp, Homo sapiens
gcaggcagacactgacagatggcaag

SEQ ID NO: 49519 - DNA, 26 bp, Homo sapiens
caggcagacactgacagatggcaagg

SEQ ID NO: 49520 - DNA, 26 bp, Homo sapiens
aggcagacactgacagatggcaagga

SEQ ID NO: 49521 - DNA, 26 bp, Homo sapiens
ggcagacactgacagatggcaaggat

SEQ ID NO: 49522 - DNA, 26 bp, Homo sapiens
gcagacactgacagatggcaaggatc

SEQ ID NO: 49523 - DNA, 26 bp, Homo sapiens
cagacactgacagatggcaaggatct

SEQ ID NO: 49524 - DNA, 26 bp, Homo sapiens
agacactgacagatggcaaggatctg

SEQ ID NO: 49525 - DNA, 26 bp, Homo sapiens
gacactgacagatggcaaggatctga

SEQ ID NO: 49526 - DNA, 26 bp, Homo sapiens
acactgacagatggcaaggatctgac

SEQ ID NO: 49527 - DNA, 26 bp, Homo sapiens
cactgacagatggcaaggatctgaca

SEQ ID NO: 49528 - DNA, 26 bp, Homo sapiens
actgacagatggcaaggatctgacag

SEQ ID NO: 49529 - DNA, 26 bp, Homo sapiens
ctgacagatggcaaggatctgacaga

SEQ ID NO: 49530 - DNA, 26 bp, Homo sapiens
tgacagatggcaaggatctgacagat

SEQ ID NO: 49531 - DNA, 26 bp, Homo sapiens
gacagatggcaaggatctgacagata

SEQ ID NO: 49532 - DNA, 26 bp, Homo sapiens
acagatggcaaggatctgacagatag

SEQ ID NO: 49533 - DNA, 26 bp, Homo sapiens
cagatggcaaggatctgacagatagt

SEQ ID NO: 49534 - DNA, 26 bp, Homo sapiens
agatggcaaggatctgacagatagtg

SEQ ID NO: 49535 - DNA, 26 bp, Homo sapiens
gatggcaaggatctgacagatagtgg

SEQ ID NO: 49536 - DNA, 26 bp, Homo sapiens
atggcaaggatctgacagatagtggg

SEQ ID NO: 49537 - DNA, 26 bp, Homo sapiens
tggcaaggatctgacagatagtgggt

SEQ ID NO: 49538 - DNA, 26 bp, Homo sapiens
ggcaaggatctgacagatagtgggtc

SEQ ID NO: 49539 - DNA, 26 bp, Homo sapiens
gcaaggatctgacagatagtgggtct

SEQ ID NO: 49540 - DNA, 26 bp, Homo sapiens
caaggatctgacagatagtgggtcta

SEQ ID NO: 49541 - DNA, 26 bp, Homo sapiens
aaggatctgacagatagtgggtctaa

SEQ ID NO: 49542 - DNA, 26 bp, Homo sapiens
aggatctgacagatagtgggtctaaa

SEQ ID NO: 49543 - DNA, 26 bp, Homo sapiens
ggatctgacagatagtgggtctaaaa

SEQ ID NO: 49544 - DNA, 26 bp, Homo sapiens
gatctgacagatagtgggtctaaaag

SEQ ID NO: 49545 - DNA, 26 bp, Homo sapiens
atctgacagatagtgggtctaaaagc

SEQ ID NO: 49546 - DNA, 26 bp, Homo sapiens
tctgacagatagtgggtctaaaagcc

SEQ ID NO: 49547 - DNA, 26 bp, Homo sapiens
ctgacagatagtgggtctaaaagcca

SEQ ID NO: 49548 - DNA, 26 bp, Homo sapiens
tgacagatagtgggtctaaaagccaa

SEQ ID NO: 49549 - DNA, 26 bp, Homo sapiens
gacagatagtgggtctaaaagccaat

SEQ ID NO: 49550 - DNA, 26 bp, Homo sapiens
acagatagtgggtctaaaagccaatt

SEQ ID NO: 49551 - DNA, 26 bp, Homo sapiens
cagatagtgggtctaaaagccaatta

SEQ ID NO: 49552 - DNA, 26 bp, Homo sapiens
agatagtgggtctaaaagccaattaa

SEQ ID NO: 49553 - DNA, 26 bp, Homo sapiens
gatagtgggtctaaaagccaattaaa

SEQ ID NO: 49554 - DNA, 26 bp, Homo sapiens
atagtgggtctaaaagccaattaaaa

SEQ ID NO: 49555 - DNA, 26 bp, Homo sapiens
tagtgggtctaaaagccaattaaaac

SEQ ID NO: 49556 - DNA, 26 bp, Homo sapiens
agtgggtctaaaagccaattaaaaca

SEQ ID NO: 49557 - DNA, 26 bp, Homo sapiens
gtgggtctaaaagccaattaaaacag

SEQ ID NO: 49558 - DNA, 26 bp, Homo sapiens
tgggtctaaaagccaattaaaacaga

SEQ ID NO: 49559 - DNA, 26 bp, Homo sapiens
gggtctaaaagccaattaaaacagag

SEQ ID NO: 49560 - DNA, 26 bp, Homo sapiens
ggtctaaaagccaattaaaacagagc

SEQ ID NO: 49561 - DNA, 26 bp, Homo sapiens
gtctaaaagccaattaaaacagagct

SEQ ID NO: 49562 - DNA, 26 bp, Homo sapiens
tctaaaagccaattaaaacagagctg

SEQ ID NO: 49563 - DNA, 26 bp, Homo sapiens
ctaaaagccaattaaaacagagctgg

SEQ ID NO: 49564 - DNA, 26 bp, Homo sapiens
taaaagccaattaaaacagagctggg

SEQ ID NO: 49565 - DNA, 26 bp, Homo sapiens
aaaagccaattaaaacagagctggga

SEQ ID NO: 49566 - DNA, 26 bp, Homo sapiens
aaagccaattaaaacagagctgggag

SEQ ID NO: 49567 - DNA, 26 bp, Homo sapiens
aagccaattaaaacagagctgggagg

SEQ ID NO: 49568 - DNA, 26 bp, Homo sapiens
agccaattaaaacagagctgggaggg

SEQ ID NO: 49569 - DNA, 26 bp, Homo sapiens
gccaattaaaacagagctgggaggga

SEQ ID NO: 49570 - DNA, 26 bp, Homo sapiens
ccaattaaaacagagctgggagggaa

SEQ ID NO: 49571 - DNA, 26 bp, Homo sapiens
caattaaaacagagctgggagggaag

SEQ ID NO: 49572 - DNA, 26 bp, Homo sapiens
aattaaaacagagctgggagggaaga

SEQ ID NO: 49573 - DNA, 26 bp, Homo sapiens
attaaaacagagctgggagggaagac

SEQ ID NO: 49574 - DNA, 26 bp, Homo sapiens
ttaaaacagagctgggagggaagaca

SEQ ID NO: 49575 - DNA, 26 bp, Homo sapiens
taaaacagagctgggagggaagacaa

SEQ ID NO: 49576 - DNA, 26 bp, Homo sapiens
aaaacagagctgggagggaagacaat

SEQ ID NO: 49577 - DNA, 26 bp, Homo sapiens
aaacagagctgggagggaagacaatc

SEQ ID NO: 49578 - DNA, 26 bp, Homo sapiens
aacagagctgggagggaagacaatcc

SEQ ID NO: 49579 - DNA, 26 bp, Homo sapiens
acagagctgggagggaagacaatcct

SEQ ID NO: 49580 - DNA, 26 bp, Homo sapiens
cagagctgggagggaagacaatcctg

SEQ ID NO: 49581 - DNA, 26 bp, Homo sapiens
agagctgggagggaagacaatcctgt

SEQ ID NO: 49582 - DNA, 26 bp, Homo sapiens
gagctgggagggaagacaatcctgtt

SEQ ID NO: 49583 - DNA, 26 bp, Homo sapiens
agctgggagggaagacaatcctgttg

SEQ ID NO: 49584 - DNA, 26 bp, Homo sapiens
gctgggagggaagacaatcctgttgg

SEQ ID NO: 49585 - DNA, 26 bp, Homo sapiens
ctgggagggaagacaatcctgttggg

SEQ ID NO: 49586 - DNA, 26 bp, Homo sapiens
tgggagggaagacaatcctgttggga

SEQ ID NO: 49587 - DNA, 26 bp, Homo sapiens
gggagggaagacaatcctgttgggac

SEQ ID NO: 49588 - DNA, 26 bp, Homo sapiens
ggagggaagacaatcctgttgggaca

SEQ ID NO: 49589 - DNA, 26 bp, Homo sapiens
gagggaagacaatcctgttgggacag

SEQ ID NO: 49590 - DNA, 26 bp, Homo sapiens
agggaagacaatcctgttgggacagc

SEQ ID NO: 49591 - DNA, 26 bp, Homo sapiens
gggaagacaatcctgttgggacagct

SEQ ID NO: 49592 - DNA, 26 bp, Homo sapiens
ggaagacaatcctgttgggacagcta

SEQ ID NO: 49593 - DNA, 26 bp, Homo sapiens
gaagacaatcctgttgggacagctaa

SEQ ID NO: 49594 - DNA, 26 bp, Homo sapiens
aagacaatcctgttgggacagctaat

SEQ ID NO: 49595 - DNA, 26 bp, Homo sapiens
agacaatcctgttgggacagctaatg

SEQ ID NO: 49596 - DNA, 26 bp, Homo sapiens
gacaatcctgttgggacagctaatgt

SEQ ID NO: 49597 - DNA, 26 bp, Homo sapiens
acaatcctgttgggacagctaatgta

SEQ ID NO: 49598 - DNA, 26 bp, Homo sapiens
caatcctgttgggacagctaatgtaa

SEQ ID NO: 49599 - DNA, 26 bp, Homo sapiens
aatcctgttgggacagctaatgtaag

SEQ ID NO: 49600 - DNA, 26 bp, Homo sapiens
atcctgttgggacagctaatgtaaga

SEQ ID NO: 49601 - DNA, 26 bp, Homo sapiens
tcctgttgggacagctaatgtaagac

SEQ ID NO: 49602 - DNA, 26 bp, Homo sapiens
cctgttgggacagctaatgtaagaca

SEQ ID NO: 49603 - DNA, 26 bp, Homo sapiens
ctgttgggacagctaatgtaagacac

SEQ ID NO: 49604 - DNA, 26 bp, Homo sapiens
tgttgggacagctaatgtaagacaca

SEQ ID NO: 49605 - DNA, 26 bp, Homo sapiens
gttgggacagctaatgtaagacacat

SEQ ID NO: 49606 - DNA, 26 bp, Homo sapiens
ttgggacagctaatgtaagacacatt

SEQ ID NO: 49607 - DNA, 26 bp, Homo sapiens
tgggacagctaatgtaagacacattt

SEQ ID NO: 49608 - DNA, 26 bp, Homo sapiens
gggacagctaatgtaagacacatttt

SEQ ID NO: 49609 - DNA, 26 bp, Homo sapiens
ggacagctaatgtaagacacattttt

SEQ ID NO: 49610 - DNA, 26 bp, Homo sapiens
gacagctaatgtaagacacatttttt

SEQ ID NO: 49611 - DNA, 26 bp, Homo sapiens
acagctaatgtaagacacattttttg

SEQ ID NO: 49612 - DNA, 26 bp, Homo sapiens
cagctaatgtaagacacattttttga

SEQ ID NO: 49613 - DNA, 26 bp, Homo sapiens
agctaatgtaagacacattttttgac

SEQ ID NO: 49614 - DNA, 26 bp, Homo sapiens
gctaatgtaagacacattttttgaca

SEQ ID NO: 49615 - DNA, 26 bp, Homo sapiens
ctaatgtaagacacattttttgacag

SEQ ID NO: 49616 - DNA, 26 bp, Homo sapiens
taatgtaagacacattttttgacagc

SEQ ID NO: 49617 - DNA, 26 bp, Homo sapiens
aatgtaagacacattttttgacagct

SEQ ID NO: 49618 - DNA, 26 bp, Homo sapiens
atgtaagacacattttttgacagctc

SEQ ID NO: 49619 - DNA, 26 bp, Homo sapiens
tgtaagacacattttttgacagctct

SEQ ID NO: 49620 - DNA, 26 bp, Homo sapiens
gtaagacacattttttgacagctctg

SEQ ID NO: 49621 - DNA, 26 bp, Homo sapiens
taagacacattttttgacagctctgc

SEQ ID NO: 49622 - DNA, 26 bp, Homo sapiens
aagacacattttttgacagctctgca

SEQ ID NO: 49623 - DNA, 26 bp, Homo sapiens
agacacattttttgacagctctgcat

SEQ ID NO: 49624 - DNA, 26 bp, Homo sapiens
gacacattttttgacagctctgcatt

SEQ ID NO: 49625 - DNA, 26 bp, Homo sapiens
acacattttttgacagctctgcattc

SEQ ID NO: 49626 - DNA, 26 bp, Homo sapiens
cacattttttgacagctctgcattct

SEQ ID NO: 49627 - DNA, 26 bp, Homo sapiens
acattttttgacagctctgcattctt

SEQ ID NO: 49628 - DNA, 26 bp, Homo sapiens
cattttttgacagctctgcattcttt

SEQ ID NO: 49629 - DNA, 26 bp, Homo sapiens
attttttgacagctctgcattcttta

SEQ ID NO: 49630 - DNA, 26 bp, Homo sapiens
ttttttgacagctctgcattctttat

SEQ ID NO: 49631 - DNA, 26 bp, Homo sapiens
tttttgacagctctgcattctttatt

SEQ ID NO: 49632 - DNA, 26 bp, Homo sapiens
ttttgacagctctgcattctttattg

SEQ ID NO: 49633 - DNA, 26 bp, Homo sapiens
tttgacagctctgcattctttattga

SEQ ID NO: 49634 - DNA, 26 bp, Homo sapiens
ttgacagctctgcattctttattgat

SEQ ID NO: 49635 - DNA, 26 bp, Homo sapiens
tgacagctctgcattctttattgatt

SEQ ID NO: 49636 - DNA, 26 bp, Homo sapiens
gacagctctgcattctttattgatta

SEQ ID NO: 49637 - DNA, 26 bp, Homo sapiens
acagctctgcattctttattgattag

SEQ ID NO: 49638 - DNA, 26 bp, Homo sapiens
cagctctgcattctttattgattaga

SEQ ID NO: 49639 - DNA, 26 bp, Homo sapiens
agctctgcattctttattgattagac

SEQ ID NO: 49640 - DNA, 26 bp, Homo sapiens
gctctgcattctttattgattagaca

SEQ ID NO: 49641 - DNA, 26 bp, Homo sapiens
ctctgcattctttattgattagacag

SEQ ID NO: 49642 - DNA, 26 bp, Homo sapiens
tctgcattctttattgattagacagc

SEQ ID NO: 49643 - DNA, 26 bp, Homo sapiens
ctgcattctttattgattagacagca

SEQ ID NO: 49644 - DNA, 26 bp, Homo sapiens
tgcattctttattgattagacagcaa

SEQ ID NO: 49645 - DNA, 26 bp, Homo sapiens
gcattctttattgattagacagcaat

SEQ ID NO: 49646 - DNA, 26 bp, Homo sapiens
cattctttattgattagacagcaata

SEQ ID NO: 49647 - DNA, 26 bp, Homo sapiens
attctttattgattagacagcaataa

SEQ ID NO: 49648 - DNA, 26 bp, Homo sapiens
ttctttattgattagacagcaataaa

SEQ ID NO: 49649 - DNA, 26 bp, Homo sapiens
tctttattgattagacagcaataaaa

SEQ ID NO: 49650 - DNA, 26 bp, Homo sapiens
ctttattgattagacagcaataaaat

SEQ ID NO: 49651 - DNA, 26 bp, Homo sapiens
tttattgattagacagcaataaaata

SEQ ID NO: 49652 - DNA, 26 bp, Homo sapiens
ttattgattagacagcaataaaataa

SEQ ID NO: 49653 - DNA, 26 bp, Homo sapiens
tattgattagacagcaataaaataaa

SEQ ID NO: 49654 - DNA, 26 bp, Homo sapiens
attgattagacagcaataaaataaat

SEQ ID NO: 49655 - DNA, 26 bp, Homo sapiens
ttgattagacagcaataaaataaata

SEQ ID NO: 49656 - DNA, 26 bp, Homo sapiens
tgattagacagcaataaaataaatag

SEQ ID NO: 49657 - DNA, 26 bp, Homo sapiens
gattagacagcaataaaataaataga

SEQ ID NO: 49658 - DNA, 26 bp, Homo sapiens
attagacagcaataaaataaatagaa

SEQ ID NO: 49659 - DNA, 26 bp, Homo sapiens
ttagacagcaataaaataaatagaaa

SEQ ID NO: 49660 - DNA, 26 bp, Homo sapiens
tagacagcaataaaataaatagaaaa

SEQ ID NO: 49661 - DNA, 26 bp, Homo sapiens
agacagcaataaaataaatagaaaaa

SEQ ID NO: 49662 - DNA, 26 bp, Homo sapiens
gacagcaataaaataaatagaaaaat

SEQ ID NO: 49663 - DNA, 26 bp, Homo sapiens
acagcaataaaataaatagaaaaatg

SEQ ID NO: 49664 - DNA, 26 bp, Homo sapiens
cagcaataaaataaatagaaaaatgg

SEQ ID NO: 49665 - DNA, 26 bp, Homo sapiens
agcaataaaataaatagaaaaatggt

SEQ ID NO: 49666 - DNA, 26 bp, Homo sapiens
gcaataaaataaatagaaaaatggta

SEQ ID NO: 49667 - DNA, 26 bp, Homo sapiens
caataaaataaatagaaaaatggtac

SEQ ID NO: 49668 - DNA, 26 bp, Homo sapiens
aataaaataaatagaaaaatggtaca

SEQ ID NO: 49669 - DNA, 26 bp, Homo sapiens
ataaaataaatagaaaaatggtacac

SEQ ID NO: 49670 - DNA, 26 bp, Homo sapiens
taaaataaatagaaaaatggtacact

SEQ ID NO: 49671 - DNA, 26 bp, Homo sapiens
aaaataaatagaaaaatggtacacta

SEQ ID NO: 49672 - DNA, 26 bp, Homo sapiens
aaataaatagaaaaatggtacactat

SEQ ID NO: 49673 - DNA, 26 bp, Homo sapiens
aataaatagaaaaatggtacactatt

SEQ ID NO: 49674 - DNA, 26 bp, Homo sapiens
ataaatagaaaaatggtacactattg

SEQ ID NO: 49675 - DNA, 26 bp, Homo sapiens
taaatagaaaaatggtacactattgt

SEQ ID NO: 49676 - DNA, 26 bp, Homo sapiens
aaatagaaaaatggtacactattgtt

SEQ ID NO: 49677 - DNA, 26 bp, Homo sapiens
aatagaaaaatggtacactattgttg

SEQ ID NO: 49678 - DNA, 26 bp, Homo sapiens
atagaaaaatggtacactattgttgg

SEQ ID NO: 49679 - DNA, 26 bp, Homo sapiens
tagaaaaatggtacactattgttggc

SEQ ID NO: 49680 - DNA, 26 bp, Homo sapiens
agaaaaatggtacactattgttggct

SEQ ID NO: 49681 - DNA, 26 bp, Homo sapiens
gaaaaatggtacactattgttggctt

SEQ ID NO: 49682 - DNA, 26 bp, Homo sapiens
aaaaatggtacactattgttggcttt

SEQ ID NO: 49683 - DNA, 26 bp, Homo sapiens
aaaatggtacactattgttggctttt

SEQ ID NO: 49684 - DNA, 26 bp, Homo sapiens
aaatggtacactattgttggcttttt

SEQ ID NO: 49685 - DNA, 26 bp, Homo sapiens
aatggtacactattgttggctttttc

SEQ ID NO: 49686 - DNA, 26 bp, Homo sapiens
atggtacactattgttggctttttct

SEQ ID NO: 49687 - DNA, 26 bp, Homo sapiens
tggtacactattgttggctttttctt

SEQ ID NO: 49688 - DNA, 26 bp, Homo sapiens
ggtacactattgttggctttttcttt

SEQ ID NO: 49689 - DNA, 26 bp, Homo sapiens
gtacactattgttggctttttctttt

SEQ ID NO: 49690 - DNA, 26 bp, Homo sapiens
tacactattgttggctttttcttttg

SEQ ID NO: 49691 - DNA, 26 bp, Homo sapiens
acactattgttggctttttcttttgt

SEQ ID NO: 49692 - DNA, 26 bp, Homo sapiens
cactattgttggctttttcttttgtg

SEQ ID NO: 49693 - DNA, 26 bp, Homo sapiens
actattgttggctttttcttttgtgg

SEQ ID NO: 49694 - DNA, 26 bp, Homo sapiens
ctattgttggctttttcttttgtggg

SEQ ID NO: 49695 - DNA, 26 bp, Homo sapiens
tattgttggctttttcttttgtggga

SEQ ID NO: 49696 - DNA, 26 bp, Homo sapiens
attgttggctttttcttttgtgggaa

SEQ ID NO: 49697 - DNA, 26 bp, Homo sapiens
ttgttggctttttcttttgtgggaat

SEQ ID NO: 49698 - DNA, 26 bp, Homo sapiens
tgttggctttttcttttgtgggaata

SEQ ID NO: 49699 - DNA, 26 bp, Homo sapiens
gttggctttttcttttgtgggaataa

SEQ ID NO: 49700 - DNA, 26 bp, Homo sapiens
ttggctttttcttttgtgggaataac

SEQ ID NO: 49701 - DNA, 26 bp, Homo sapiens
tggctttttcttttgtgggaataact

SEQ ID NO: 49702 - DNA, 26 bp, Homo sapiens
ggctttttcttttgtgggaataactg

SEQ ID NO: 49703 - DNA, 26 bp, Homo sapiens
gctttttcttttgtgggaataactgt

SEQ ID NO: 49704 - DNA, 26 bp, Homo sapiens
ctttttcttttgtgggaataactgtg

SEQ ID NO: 49705 - DNA, 26 bp, Homo sapiens
tttttcttttgtgggaataactgtga

SEQ ID NO: 49706 - DNA, 26 bp, Homo sapiens
ttttcttttgtgggaataactgtgaa

SEQ ID NO: 49707 - DNA, 26 bp, Homo sapiens
tttcttttgtgggaataactgtgaac

SEQ ID NO: 49708 - DNA, 26 bp, Homo sapiens
ttcttttgtgggaataactgtgaact

SEQ ID NO: 49709 - DNA, 26 bp, Homo sapiens
tcttttgtgggaataactgtgaacta

SEQ ID NO: 49710 - DNA, 26 bp, Homo sapiens
cttttgtgggaataactgtgaactag

SEQ ID NO: 49711 - DNA, 26 bp, Homo sapiens
ttttgtgggaataactgtgaactagg

SEQ ID NO: 49712 - DNA, 26 bp, Homo sapiens
tttgtgggaataactgtgaactagga

SEQ ID NO: 49713 - DNA, 26 bp, Homo sapiens
ttgtgggaataactgtgaactaggaa

SEQ ID NO: 49714 - DNA, 26 bp, Homo sapiens
tgtgggaataactgtgaactaggaac

SEQ ID NO: 49715 - DNA, 26 bp, Homo sapiens
gtgggaataactgtgaactaggaact

SEQ ID NO: 49716 - DNA, 26 bp, Homo sapiens
tgggaataactgtgaactaggaactt

SEQ ID NO: 49717 - DNA, 26 bp, Homo sapiens
gggaataactgtgaactaggaactta

SEQ ID NO: 49718 - DNA, 26 bp, Homo sapiens
ggaataactgtgaactaggaacttaa

SEQ ID NO: 49719 - DNA, 26 bp, Homo sapiens
gaataactgtgaactaggaacttaag

SEQ ID NO: 49720 - DNA, 26 bp, Homo sapiens
aataactgtgaactaggaacttaagg

SEQ ID NO: 49721 - DNA, 26 bp, Homo sapiens
ataactgtgaactaggaacttaaggg

SEQ ID NO: 49722 - DNA, 26 bp, Homo sapiens
taactgtgaactaggaacttaagggt

SEQ ID NO: 49723 - DNA, 26 bp, Homo sapiens
aactgtgaactaggaacttaagggtt

SEQ ID NO: 49724 - DNA, 26 bp, Homo sapiens
actgtgaactaggaacttaagggttg

SEQ ID NO: 49725 - DNA, 26 bp, Homo sapiens
ctgtgaactaggaacttaagggttgg

SEQ ID NO: 49726 - DNA, 26 bp, Homo sapiens
tgtgaactaggaacttaagggttggt

SEQ ID NO: 49727 - DNA, 26 bp, Homo sapiens
gtgaactaggaacttaagggttggta

SEQ ID NO: 49728 - DNA, 26 bp, Homo sapiens
tgaactaggaacttaagggttggtat

SEQ ID NO: 49729 - DNA, 26 bp, Homo sapiens
gaactaggaacttaagggttggtatt

SEQ ID NO: 49730 - DNA, 26 bp, Homo sapiens
aactaggaacttaagggttggtatta

SEQ ID NO: 49731 - DNA, 26 bp, Homo sapiens
actaggaacttaagggttggtattat

SEQ ID NO: 49732 - DNA, 26 bp, Homo sapiens
ctaggaacttaagggttggtattatg

SEQ ID NO: 49733 - DNA, 26 bp, Homo sapiens
taggaacttaagggttggtattatga

SEQ ID NO: 49734 - DNA, 26 bp, Homo sapiens
aggaacttaagggttggtattatgat

SEQ ID NO: 49735 - DNA, 26 bp, Homo sapiens
ggaacttaagggttggtattatgatt

SEQ ID NO: 49736 - DNA, 26 bp, Homo sapiens
gaacttaagggttggtattatgattt

SEQ ID NO: 49737 - DNA, 26 bp, Homo sapiens
aacttaagggttggtattatgatttt

SEQ ID NO: 49738 - DNA, 26 bp, Homo sapiens
acttaagggttggtattatgattttt

SEQ ID NO: 49739 - DNA, 26 bp, Homo sapiens
cttaagggttggtattatgattttta

SEQ ID NO: 49740 - DNA, 26 bp, Homo sapiens
ttaagggttggtattatgatttttaa

SEQ ID NO: 49741 - DNA, 26 bp, Homo sapiens
taagggttggtattatgatttttaaa

SEQ ID NO: 49742 - DNA, 26 bp, Homo sapiens
aagggttggtattatgatttttaaaa

SEQ ID NO: 49743 - DNA, 26 bp, Homo sapiens
agggttggtattatgatttttaaaaa

SEQ ID NO: 49744 - DNA, 26 bp, Homo sapiens
gggttggtattatgatttttaaaaac

SEQ ID NO: 49745 - DNA, 26 bp, Homo sapiens
ggttggtattatgatttttaaaaaca

SEQ ID NO: 49746 - DNA, 26 bp, Homo sapiens
gttggtattatgatttttaaaaacaa

SEQ ID NO: 49747 - DNA, 26 bp, Homo sapiens
ttggtattatgatttttaaaaacaat

SEQ ID NO: 49748 - DNA, 26 bp, Homo sapiens
tggtattatgatttttaaaaacaatg

SEQ ID NO: 49749 - DNA, 26 bp, Homo sapiens
ggtattatgatttttaaaaacaatgt

SEQ ID NO: 49750 - DNA, 26 bp, Homo sapiens
gtattatgatttttaaaaacaatgta

SEQ ID NO: 49751 - DNA, 26 bp, Homo sapiens
tattatgatttttaaaaacaatgtat

SEQ ID NO: 49752 - DNA, 26 bp, Homo sapiens
attatgatttttaaaaacaatgtatg

SEQ ID NO: 49753 - DNA, 26 bp, Homo sapiens
ttatgatttttaaaaacaatgtatgg

SEQ ID NO: 49754 - DNA, 26 bp, Homo sapiens
tatgatttttaaaaacaatgtatgga

SEQ ID NO: 49755 - DNA, 26 bp, Homo sapiens
atgatttttaaaaacaatgtatggaa

SEQ ID NO: 49756 - DNA, 26 bp, Homo sapiens
tgatttttaaaaacaatgtatggaaa

SEQ ID NO: 49757 - DNA, 26 bp, Homo sapiens
gatttttaaaaacaatgtatggaaat

SEQ ID NO: 49758 - DNA, 26 bp, Homo sapiens
atttttaaaaacaatgtatggaaatg

SEQ ID NO: 49759 - DNA, 26 bp, Homo sapiens
tttttaaaaacaatgtatggaaatgc

SEQ ID NO: 49760 - DNA, 26 bp, Homo sapiens
ttttaaaaacaatgtatggaaatgct

SEQ ID NO: 49761 - DNA, 26 bp, Homo sapiens
tttaaaaacaatgtatggaaatgcta

SEQ ID NO: 49762 - DNA, 26 bp, Homo sapiens
ttaaaaacaatgtatggaaatgctaa

SEQ ID NO: 49763 - DNA, 26 bp, Homo sapiens
taaaaacaatgtatggaaatgctaat

SEQ ID NO: 49764 - DNA, 26 bp, Homo sapiens
aaaaacaatgtatggaaatgctaatg

SEQ ID NO: 49765 - DNA, 26 bp, Homo sapiens
aaaacaatgtatggaaatgctaatga

SEQ ID NO: 49766 - DNA, 26 bp, Homo sapiens
aaacaatgtatggaaatgctaatgaa

SEQ ID NO: 49767 - DNA, 26 bp, Homo sapiens
aacaatgtatggaaatgctaatgaag

SEQ ID NO: 49768 - DNA, 26 bp, Homo sapiens
acaatgtatggaaatgctaatgaagt

SEQ ID NO: 49769 - DNA, 26 bp, Homo sapiens
caatgtatggaaatgctaatgaagtt

SEQ ID NO: 49770 - DNA, 26 bp, Homo sapiens
aatgtatggaaatgctaatgaagtta

SEQ ID NO: 49771 - DNA, 26 bp, Homo sapiens
atgtatggaaatgctaatgaagttag

SEQ ID NO: 49772 - DNA, 26 bp, Homo sapiens
tgtatggaaatgctaatgaagttagt

SEQ ID NO: 49773 - DNA, 26 bp, Homo sapiens
gtatggaaatgctaatgaagttagta

SEQ ID NO: 49774 - DNA, 26 bp, Homo sapiens
tatggaaatgctaatgaagttagtaa

SEQ ID NO: 49775 - DNA, 26 bp, Homo sapiens
atggaaatgctaatgaagttagtaaa

SEQ ID NO: 49776 - DNA, 26 bp, Homo sapiens
tggaaatgctaatgaagttagtaaaa

SEQ ID NO: 49777 - DNA, 26 bp, Homo sapiens
ggaaatgctaatgaagttagtaaaaa

SEQ ID NO: 49778 - DNA, 26 bp, Homo sapiens
gaaatgctaatgaagttagtaaaaaa

SEQ ID NO: 49779 - DNA, 26 bp, Homo sapiens
aaatgctaatgaagttagtaaaaaaa

SEQ ID NO: 49780 - DNA, 26 bp, Homo sapiens
aatgctaatgaagttagtaaaaaaaa

SEQ ID NO: 49781 - DNA, 26 bp, Homo sapiens
atgctaatgaagttagtaaaaaaaaa

SEQ ID NO: 49782 - DNA, 26 bp, Homo sapiens
tgctaatgaagttagtaaaaaaaaaa

SEQ ID NO: 49783 - DNA, 26 bp, Homo sapiens
gctaatgaagttagtaaaaaaaaaat

SEQ ID NO: 49784 - DNA, 26 bp, Homo sapiens
ctaatgaagttagtaaaaaaaaaatc

SEQ ID NO: 49785 - DNA, 26 bp, Homo sapiens
taatgaagttagtaaaaaaaaaatca

SEQ ID NO: 49786 - DNA, 26 bp, Homo sapiens
aatgaagttagtaaaaaaaaaatcat

SEQ ID NO: 49787 - DNA, 26 bp, Homo sapiens
atgaagttagtaaaaaaaaaatcatg

SEQ ID NO: 49788 - DNA, 26 bp, Homo sapiens
tgaagttagtaaaaaaaaaatcatgt

SEQ ID NO: 49789 - DNA, 26 bp, Homo sapiens
gaagttagtaaaaaaaaaatcatgtc

SEQ ID NO: 49790 - DNA, 26 bp, Homo sapiens
aagttagtaaaaaaaaaatcatgtct

SEQ ID NO: 49791 - DNA, 26 bp, Homo sapiens
agttagtaaaaaaaaaatcatgtctg

SEQ ID NO: 49792 - DNA, 26 bp, Homo sapiens
gttagtaaaaaaaaaatcatgtctgc

SEQ ID NO: 49793 - DNA, 26 bp, Homo sapiens
ttagtaaaaaaaaaatcatgtctgca

SEQ ID NO: 49794 - DNA, 26 bp, Homo sapiens
tagtaaaaaaaaaatcatgtctgcat

SEQ ID NO: 49795 - DNA, 26 bp, Homo sapiens
agtaaaaaaaaaatcatgtctgcatg

SEQ ID NO: 49796 - DNA, 26 bp, Homo sapiens
gtaaaaaaaaaatcatgtctgcatgc

SEQ ID NO: 49797 - DNA, 26 bp, Homo sapiens
taaaaaaaaaatcatgtctgcatgca

SEQ ID NO: 49798 - DNA, 26 bp, Homo sapiens
aaaaaaaaaatcatgtctgcatgcac

SEQ ID NO: 49799 - DNA, 26 bp, Homo sapiens
aaaaaaaaatcatgtctgcatgcact

SEQ ID NO: 49800 - DNA, 26 bp, Homo sapiens
aaaaaaaatcatgtctgcatgcactc

SEQ ID NO: 49801 - DNA, 26 bp, Homo sapiens
aaaaaaatcatgtctgcatgcactca

SEQ ID NO: 49802 - DNA, 26 bp, Homo sapiens
aaaaaatcatgtctgcatgcactcat

SEQ ID NO: 49803 - DNA, 26 bp, Homo sapiens
aaaaatcatgtctgcatgcactcatg

SEQ ID NO: 49804 - DNA, 26 bp, Homo sapiens
aaaatcatgtctgcatgcactcatgc

SEQ ID NO: 49805 - DNA, 26 bp, Homo sapiens
aaatcatgtctgcatgcactcatgca

SEQ ID NO: 49806 - DNA, 26 bp, Homo sapiens
aatcatgtctgcatgcactcatgcaa

SEQ ID NO: 49807 - DNA, 26 bp, Homo sapiens
atcatgtctgcatgcactcatgcaac

SEQ ID NO: 49808 - DNA, 26 bp, Homo sapiens
tcatgtctgcatgcactcatgcaact

SEQ ID NO: 49809 - DNA, 26 bp, Homo sapiens
catgtctgcatgcactcatgcaactt

SEQ ID NO: 49810 - DNA, 26 bp, Homo sapiens
atgtctgcatgcactcatgcaacttg

SEQ ID NO: 49811 - DNA, 26 bp, Homo sapiens
tgtctgcatgcactcatgcaacttgc

SEQ ID NO: 49812 - DNA, 26 bp, Homo sapiens
gtctgcatgcactcatgcaacttgct

SEQ ID NO: 49813 - DNA, 26 bp, Homo sapiens
tctgcatgcactcatgcaacttgctt

SEQ ID NO: 49814 - DNA, 26 bp, Homo sapiens
ctgcatgcactcatgcaacttgcttc

SEQ ID NO: 49815 - DNA, 26 bp, Homo sapiens
tgcatgcactcatgcaacttgcttct

SEQ ID NO: 49816 - DNA, 26 bp, Homo sapiens
gcatgcactcatgcaacttgcttctc

SEQ ID NO: 49817 - DNA, 26 bp, Homo sapiens
catgcactcatgcaacttgcttctct

SEQ ID NO: 49818 - DNA, 26 bp, Homo sapiens
atgcactcatgcaacttgcttctctc

SEQ ID NO: 49819 - DNA, 26 bp, Homo sapiens
tgcactcatgcaacttgcttctctca

SEQ ID NO: 49820 - DNA, 26 bp, Homo sapiens
gcactcatgcaacttgcttctctcac

SEQ ID NO: 49821 - DNA, 26 bp, Homo sapiens
cactcatgcaacttgcttctctcact

SEQ ID NO: 49822 - DNA, 26 bp, Homo sapiens
actcatgcaacttgcttctctcactc

SEQ ID NO: 49823 - DNA, 26 bp, Homo sapiens
ctcatgcaacttgcttctctcactct

SEQ ID NO: 49824 - DNA, 26 bp, Homo sapiens
tcatgcaacttgcttctctcactctc

SEQ ID NO: 49825 - DNA, 26 bp, Homo sapiens
catgcaacttgcttctctcactctct

SEQ ID NO: 49826 - DNA, 26 bp, Homo sapiens
atgcaacttgcttctctcactctctt

SEQ ID NO: 49827 - DNA, 26 bp, Homo sapiens
tgcaacttgcttctctcactctcttt

SEQ ID NO: 49828 - DNA, 26 bp, Homo sapiens
gcaacttgcttctctcactctctttg

SEQ ID NO: 49829 - DNA, 26 bp, Homo sapiens
caacttgcttctctcactctctttga

SEQ ID NO: 49830 - DNA, 26 bp, Homo sapiens
aacttgcttctctcactctctttgag

SEQ ID NO: 49831 - DNA, 26 bp, Homo sapiens
acttgcttctctcactctctttgagc

SEQ ID NO: 49832 - DNA, 26 bp, Homo sapiens
cttgcttctctcactctctttgagcc

SEQ ID NO: 49833 - DNA, 26 bp, Homo sapiens
ttgcttctctcactctctttgagcct

SEQ ID NO: 49834 - DNA, 26 bp, Homo sapiens
tgcttctctcactctctttgagcctg

SEQ ID NO: 49835 - DNA, 26 bp, Homo sapiens
gcttctctcactctctttgagcctga

SEQ ID NO: 49836 - DNA, 26 bp, Homo sapiens
cttctctcactctctttgagcctgac

SEQ ID NO: 49837 - DNA, 26 bp, Homo sapiens
ttctctcactctctttgagcctgaca

SEQ ID NO: 49838 - DNA, 26 bp, Homo sapiens
tctctcactctctttgagcctgacaa

SEQ ID NO: 49839 - DNA, 26 bp, Homo sapiens
ctctcactctctttgagcctgacaac

SEQ ID NO: 49840 - DNA, 26 bp, Homo sapiens
tctcactctctttgagcctgacaact

SEQ ID NO: 49841 - DNA, 26 bp, Homo sapiens
ctcactctctttgagcctgacaactc

SEQ ID NO: 49842 - DNA, 26 bp, Homo sapiens
tcactctctttgagcctgacaactct

SEQ ID NO: 49843 - DNA, 26 bp, Homo sapiens
cactctctttgagcctgacaactcta

SEQ ID NO: 49844 - DNA, 26 bp, Homo sapiens
actctctttgagcctgacaactctaa

SEQ ID NO: 49845 - DNA, 26 bp, Homo sapiens
ctctctttgagcctgacaactctaat

SEQ ID NO: 49846 - DNA, 26 bp, Homo sapiens
tctctttgagcctgacaactctaata

SEQ ID NO: 49847 - DNA, 26 bp, Homo sapiens
ctctttgagcctgacaactctaatac

SEQ ID NO: 49848 - DNA, 26 bp, Homo sapiens
tctttgagcctgacaactctaatacc

SEQ ID NO: 49849 - DNA, 26 bp, Homo sapiens
ctttgagcctgacaactctaataccc

SEQ ID NO: 49850 - DNA, 26 bp, Homo sapiens
tttgagcctgacaactctaataccct

SEQ ID NO: 49851 - DNA, 26 bp, Homo sapiens
ttgagcctgacaactctaataccctc

SEQ ID NO: 49852 - DNA, 26 bp, Homo sapiens
tgagcctgacaactctaataccctcc

SEQ ID NO: 49853 - DNA, 26 bp, Homo sapiens
gagcctgacaactctaataccctccc

SEQ ID NO: 49854 - DNA, 26 bp, Homo sapiens
agcctgacaactctaataccctcccc

SEQ ID NO: 49855 - DNA, 26 bp, Homo sapiens
gcctgacaactctaataccctccccc

SEQ ID NO: 49856 - DNA, 26 bp, Homo sapiens
cctgacaactctaataccctccccca

SEQ ID NO: 49857 - DNA, 26 bp, Homo sapiens
ctgacaactctaataccctcccccaa

SEQ ID NO: 49858 - DNA, 26 bp, Homo sapiens
tgacaactctaataccctcccccaaa

SEQ ID NO: 49859 - DNA, 26 bp, Homo sapiens
gacaactctaataccctcccccaaaa

SEQ ID NO: 49860 - DNA, 26 bp, Homo sapiens
acaactctaataccctcccccaaaag

SEQ ID NO: 49861 - DNA, 26 bp, Homo sapiens
caactctaataccctcccccaaaagc

SEQ ID NO: 49862 - DNA, 26 bp, Homo sapiens
aactctaataccctcccccaaaagca

SEQ ID NO: 49863 - DNA, 26 bp, Homo sapiens
actctaataccctcccccaaaagcag

SEQ ID NO: 49864 - DNA, 26 bp, Homo sapiens
ctctaataccctcccccaaaagcagc

SEQ ID NO: 49865 - DNA, 26 bp, Homo sapiens
tctaataccctcccccaaaagcagct

SEQ ID NO: 49866 - DNA, 26 bp, Homo sapiens
ctaataccctcccccaaaagcagctg

SEQ ID NO: 49867 - DNA, 26 bp, Homo sapiens
taataccctcccccaaaagcagctgc

SEQ ID NO: 49868 - DNA, 26 bp, Homo sapiens
aataccctcccccaaaagcagctgca

SEQ ID NO: 49869 - DNA, 26 bp, Homo sapiens
ataccctcccccaaaagcagctgcat

SEQ ID NO: 49870 - DNA, 26 bp, Homo sapiens
taccctcccccaaaagcagctgcatg

SEQ ID NO: 49871 - DNA, 26 bp, Homo sapiens
accctcccccaaaagcagctgcatgt

SEQ ID NO: 49872 - DNA, 26 bp, Homo sapiens
ccctcccccaaaagcagctgcatgta

SEQ ID NO: 49873 - DNA, 26 bp, Homo sapiens
cctcccccaaaagcagctgcatgtaa

SEQ ID NO: 49874 - DNA, 26 bp, Homo sapiens
ctcccccaaaagcagctgcatgtaac

SEQ ID NO: 49875 - DNA, 26 bp, Homo sapiens
tcccccaaaagcagctgcatgtaacc

SEQ ID NO: 49876 - DNA, 26 bp, Homo sapiens
cccccaaaagcagctgcatgtaacct

SEQ ID NO: 49877 - DNA, 26 bp, Homo sapiens
ccccaaaagcagctgcatgtaacctc

SEQ ID NO: 49878 - DNA, 26 bp, Homo sapiens
cccaaaagcagctgcatgtaacctcc

SEQ ID NO: 49879 - DNA, 26 bp, Homo sapiens
ccaaaagcagctgcatgtaacctcct

SEQ ID NO: 49880 - DNA, 26 bp, Homo sapiens
caaaagcagctgcatgtaacctcctt

SEQ ID NO: 49881 - DNA, 26 bp, Homo sapiens
aaaagcagctgcatgtaacctccttc

SEQ ID NO: 49882 - DNA, 26 bp, Homo sapiens
aaagcagctgcatgtaacctccttca

SEQ ID NO: 49883 - DNA, 26 bp, Homo sapiens
aagcagctgcatgtaacctccttcaa

SEQ ID NO: 49884 - DNA, 26 bp, Homo sapiens
agcagctgcatgtaacctccttcaac

SEQ ID NO: 49885 - DNA, 26 bp, Homo sapiens
gcagctgcatgtaacctccttcaaca

SEQ ID NO: 49886 - DNA, 26 bp, Homo sapiens
cagctgcatgtaacctccttcaacat

SEQ ID NO: 49887 - DNA, 26 bp, Homo sapiens
agctgcatgtaacctccttcaacatc

SEQ ID NO: 49888 - DNA, 26 bp, Homo sapiens
gctgcatgtaacctccttcaacatct

SEQ ID NO: 49889 - DNA, 26 bp, Homo sapiens
ctgcatgtaacctccttcaacatctt

SEQ ID NO: 49890 - DNA, 26 bp, Homo sapiens
tgcatgtaacctccttcaacatcttg

SEQ ID NO: 49891 - DNA, 26 bp, Homo sapiens
gcatgtaacctccttcaacatcttgc

SEQ ID NO: 49892 - DNA, 26 bp, Homo sapiens
catgtaacctccttcaacatcttgcc

SEQ ID NO: 49893 - DNA, 26 bp, Homo sapiens
atgtaacctccttcaacatcttgccc

SEQ ID NO: 49894 - DNA, 26 bp, Homo sapiens
tgtaacctccttcaacatcttgccca

SEQ ID NO: 49895 - DNA, 26 bp, Homo sapiens
gtaacctccttcaacatcttgcccat

SEQ ID NO: 49896 - DNA, 26 bp, Homo sapiens
taacctccttcaacatcttgcccatt

SEQ ID NO: 49897 - DNA, 26 bp, Homo sapiens
aacctccttcaacatcttgcccattt

SEQ ID NO: 49898 - DNA, 26 bp, Homo sapiens
acctccttcaacatcttgcccatttc

SEQ ID NO: 49899 - DNA, 26 bp, Homo sapiens
cctccttcaacatcttgcccatttcc

SEQ ID NO: 49900 - DNA, 26 bp, Homo sapiens
ctccttcaacatcttgcccatttcct

SEQ ID NO: 49901 - DNA, 26 bp, Homo sapiens
tccttcaacatcttgcccatttcctc

SEQ ID NO: 49902 - DNA, 26 bp, Homo sapiens
ccttcaacatcttgcccatttcctca

SEQ ID NO: 49903 - DNA, 26 bp, Homo sapiens
cttcaacatcttgcccatttcctcag

SEQ ID NO: 49904 - DNA, 26 bp, Homo sapiens
ttcaacatcttgcccatttcctcaga

SEQ ID NO: 49905 - DNA, 26 bp, Homo sapiens
tcaacatcttgcccatttcctcagaa

SEQ ID NO: 49906 - DNA, 26 bp, Homo sapiens
caacatcttgcccatttcctcagaaa

SEQ ID NO: 49907 - DNA, 26 bp, Homo sapiens
aacatcttgcccatttcctcagaaac

SEQ ID NO: 49908 - DNA, 26 bp, Homo sapiens
acatcttgcccatttcctcagaaacc

SEQ ID NO: 49909 - DNA, 26 bp, Homo sapiens
catcttgcccatttcctcagaaaccc

SEQ ID NO: 49910 - DNA, 26 bp, Homo sapiens
atcttgcccatttcctcagaaaccct

SEQ ID NO: 49911 - DNA, 26 bp, Homo sapiens
tcttgcccatttcctcagaaaccctc

SEQ ID NO: 49912 - DNA, 26 bp, Homo sapiens
cttgcccatttcctcagaaaccctct

SEQ ID NO: 49913 - DNA, 26 bp, Homo sapiens
ttgcccatttcctcagaaaccctctt

SEQ ID NO: 49914 - DNA, 26 bp, Homo sapiens
tgcccatttcctcagaaaccctcttc

SEQ ID NO: 49915 - DNA, 26 bp, Homo sapiens
gcccatttcctcagaaaccctcttca

SEQ ID NO: 49916 - DNA, 26 bp, Homo sapiens
cccatttcctcagaaaccctcttcag

SEQ ID NO: 49917 - DNA, 26 bp, Homo sapiens
ccatttcctcagaaaccctcttcagg

SEQ ID NO: 49918 - DNA, 26 bp, Homo sapiens
catttcctcagaaaccctcttcagga

SEQ ID NO: 49919 - DNA, 26 bp, Homo sapiens
atttcctcagaaaccctcttcaggaa

SEQ ID NO: 49920 - DNA, 26 bp, Homo sapiens
tttcctcagaaaccctcttcaggaac

SEQ ID NO: 49921 - DNA, 26 bp, Homo sapiens
ttcctcagaaaccctcttcaggaacc

SEQ ID NO: 49922 - DNA, 26 bp, Homo sapiens
tcctcagaaaccctcttcaggaacct

SEQ ID NO: 49923 - DNA, 26 bp, Homo sapiens
cctcagaaaccctcttcaggaacctg

SEQ ID NO: 49924 - DNA, 26 bp, Homo sapiens
ctcagaaaccctcttcaggaacctgc

SEQ ID NO: 49925 - DNA, 26 bp, Homo sapiens
tcagaaaccctcttcaggaacctgca

SEQ ID NO: 49926 - DNA, 26 bp, Homo sapiens
cagaaaccctcttcaggaacctgcag

SEQ ID NO: 49927 - DNA, 26 bp, Homo sapiens
agaaaccctcttcaggaacctgcagt

SEQ ID NO: 49928 - DNA, 26 bp, Homo sapiens
gaaaccctcttcaggaacctgcagtc

SEQ ID NO: 49929 - DNA, 26 bp, Homo sapiens
aaaccctcttcaggaacctgcagtcc

SEQ ID NO: 49930 - DNA, 26 bp, Homo sapiens
aaccctcttcaggaacctgcagtcca

SEQ ID NO: 49931 - DNA, 26 bp, Homo sapiens
accctcttcaggaacctgcagtccag

SEQ ID NO: 49932 - DNA, 26 bp, Homo sapiens
ccctcttcaggaacctgcagtccagg

SEQ ID NO: 49933 - DNA, 26 bp, Homo sapiens
cctcttcaggaacctgcagtccagga

SEQ ID NO: 49934 - DNA, 26 bp, Homo sapiens
ctcttcaggaacctgcagtccaggag

SEQ ID NO: 49935 - DNA, 26 bp, Homo sapiens
tcttcaggaacctgcagtccaggagg

SEQ ID NO: 49936 - DNA, 26 bp, Homo sapiens
cttcaggaacctgcagtccaggagga

SEQ ID NO: 49937 - DNA, 26 bp, Homo sapiens
ttcaggaacctgcagtccaggaggaa

SEQ ID NO: 49938 - DNA, 26 bp, Homo sapiens
tcaggaacctgcagtccaggaggaaa

SEQ ID NO: 49939 - DNA, 26 bp, Homo sapiens
caggaacctgcagtccaggaggaaaa

SEQ ID NO: 49940 - DNA, 26 bp, Homo sapiens
aggaacctgcagtccaggaggaaaaa

SEQ ID NO: 49941 - DNA, 26 bp, Homo sapiens
ggaacctgcagtccaggaggaaaaag

SEQ ID NO: 49942 - DNA, 26 bp, Homo sapiens
gaacctgcagtccaggaggaaaaaga

SEQ ID NO: 49943 - DNA, 26 bp, Homo sapiens
aacctgcagtccaggaggaaaaagaa

SEQ ID NO: 49944 - DNA, 26 bp, Homo sapiens
acctgcagtccaggaggaaaaagaaa

SEQ ID NO: 49945 - DNA, 26 bp, Homo sapiens
cctgcagtccaggaggaaaaagaaaa

SEQ ID NO: 49946 - DNA, 26 bp, Homo sapiens
ctgcagtccaggaggaaaaagaaaag

SEQ ID NO: 49947 - DNA, 26 bp, Homo sapiens
tgcagtccaggaggaaaaagaaaaga

SEQ ID NO: 49948 - DNA, 26 bp, Homo sapiens
gcagtccaggaggaaaaagaaaagaa

SEQ ID NO: 49949 - DNA, 26 bp, Homo sapiens
cagtccaggaggaaaaagaaaagaac

SEQ ID NO: 49950 - DNA, 26 bp, Homo sapiens
agtccaggaggaaaaagaaaagaaca

SEQ ID NO: 49951 - DNA, 26 bp, Homo sapiens
gtccaggaggaaaaagaaaagaacaa

SEQ ID NO: 49952 - DNA, 26 bp, Homo sapiens
tccaggaggaaaaagaaaagaacaat

SEQ ID NO: 49953 - DNA, 26 bp, Homo sapiens
ccaggaggaaaaagaaaagaacaatt

SEQ ID NO: 49954 - DNA, 26 bp, Homo sapiens
caggaggaaaaagaaaagaacaatta

SEQ ID NO: 49955 - DNA, 26 bp, Homo sapiens
aggaggaaaaagaaaagaacaattac

SEQ ID NO: 49956 - DNA, 26 bp, Homo sapiens
ggaggaaaaagaaaagaacaattact

SEQ ID NO: 49957 - DNA, 26 bp, Homo sapiens
gaggaaaaagaaaagaacaattactg

SEQ ID NO: 49958 - DNA, 26 bp, Homo sapiens
aggaaaaagaaaagaacaattactga

SEQ ID NO: 49959 - DNA, 26 bp, Homo sapiens
ggaaaaagaaaagaacaattactgaa

SEQ ID NO: 49960 - DNA, 26 bp, Homo sapiens
gaaaaagaaaagaacaattactgaag

SEQ ID NO: 49961 - DNA, 26 bp, Homo sapiens
aaaaagaaaagaacaattactgaaga

SEQ ID NO: 49962 - DNA, 26 bp, Homo sapiens
aaaagaaaagaacaattactgaagac

SEQ ID NO: 49963 - DNA, 26 bp, Homo sapiens
aaagaaaagaacaattactgaagacc

SEQ ID NO: 49964 - DNA, 26 bp, Homo sapiens
aagaaaagaacaattactgaagacct

SEQ ID NO: 49965 - DNA, 26 bp, Homo sapiens
agaaaagaacaattactgaagacctt

SEQ ID NO: 49966 - DNA, 26 bp, Homo sapiens
gaaaagaacaattactgaagaccttt

SEQ ID NO: 49967 - DNA, 26 bp, Homo sapiens
aaaagaacaattactgaagacctttg

SEQ ID NO: 49968 - DNA, 26 bp, Homo sapiens
aaagaacaattactgaagacctttgg

SEQ ID NO: 49969 - DNA, 26 bp, Homo sapiens
aagaacaattactgaagacctttggt

SEQ ID NO: 49970 - DNA, 26 bp, Homo sapiens
agaacaattactgaagacctttggta

SEQ ID NO: 49971 - DNA, 26 bp, Homo sapiens
gaacaattactgaagacctttggtaa

SEQ ID NO: 49972 - DNA, 26 bp, Homo sapiens
aacaattactgaagacctttggtaaa

SEQ ID NO: 49973 - DNA, 26 bp, Homo sapiens
acaattactgaagacctttggtaaaa

SEQ ID NO: 49974 - DNA, 26 bp, Homo sapiens
caattactgaagacctttggtaaaac

SEQ ID NO: 49975 - DNA, 26 bp, Homo sapiens
aattactgaagacctttggtaaaacc

SEQ ID NO: 49976 - DNA, 26 bp, Homo sapiens
attactgaagacctttggtaaaacca

SEQ ID NO: 49977 - DNA, 26 bp, Homo sapiens
ttactgaagacctttggtaaaaccaa

SEQ ID NO: 49978 - DNA, 26 bp, Homo sapiens
tactgaagacctttggtaaaaccaaa

SEQ ID NO: 49979 - DNA, 26 bp, Homo sapiens
actgaagacctttggtaaaaccaaaa

SEQ ID NO: 49980 - DNA, 26 bp, Homo sapiens
ctgaagacctttggtaaaaccaaaag

SEQ ID NO: 49981 - DNA, 26 bp, Homo sapiens
tgaagacctttggtaaaaccaaaagg

SEQ ID NO: 49982 - DNA, 26 bp, Homo sapiens
gaagacctttggtaaaaccaaaaggg

SEQ ID NO: 49983 - DNA, 26 bp, Homo sapiens
aagacctttggtaaaaccaaaagggg

SEQ ID NO: 49984 - DNA, 26 bp, Homo sapiens
agacctttggtaaaaccaaaaggggt

SEQ ID NO: 49985 - DNA, 26 bp, Homo sapiens
gacctttggtaaaaccaaaaggggtg

SEQ ID NO: 49986 - DNA, 26 bp, Homo sapiens
acctttggtaaaaccaaaaggggtgt

SEQ ID NO: 49987 - DNA, 26 bp, Homo sapiens
cctttggtaaaaccaaaaggggtgtt

SEQ ID NO: 49988 - DNA, 26 bp, Homo sapiens
ctttggtaaaaccaaaaggggtgttc

SEQ ID NO: 49989 - DNA, 26 bp, Homo sapiens
tttggtaaaaccaaaaggggtgttca

SEQ ID NO: 49990 - DNA, 26 bp, Homo sapiens
ttggtaaaaccaaaaggggtgttcag

SEQ ID NO: 49991 - DNA, 26 bp, Homo sapiens
tggtaaaaccaaaaggggtgttcagt

SEQ ID NO: 49992 - DNA, 26 bp, Homo sapiens
ggtaaaaccaaaaggggtgttcagtt

SEQ ID NO: 49993 - DNA, 26 bp, Homo sapiens
gtaaaaccaaaaggggtgttcagttt

SEQ ID NO: 49994 - DNA, 26 bp, Homo sapiens
taaaaccaaaaggggtgttcagttta

SEQ ID NO: 49995 - DNA, 26 bp, Homo sapiens
aaaaccaaaaggggtgttcagtttaa

SEQ ID NO: 49996 - DNA, 26 bp, Homo sapiens
aaaccaaaaggggtgttcagtttaaa

SEQ ID NO: 49997 - DNA, 26 bp, Homo sapiens
aaccaaaaggggtgttcagtttaaag

SEQ ID NO: 49998 - DNA, 26 bp, Homo sapiens
accaaaaggggtgttcagtttaaagt

SEQ ID NO: 49999 - DNA, 26 bp, Homo sapiens
ccaaaaggggtgttcagtttaaagtg

SEQ ID NO: 50000 - DNA, 26 bp, Homo sapiens
caaaaggggtgttcagtttaaagtgc

SEQ ID NO: 50001 - DNA, 26 bp, Homo sapiens
aaaaggggtgttcagtttaaagtgcc

SEQ ID NO: 50002 - DNA, 26 bp, Homo sapiens
aaaggggtgttcagtttaaagtgcct

SEQ ID NO: 50003 - DNA, 26 bp, Homo sapiens
aaggggtgttcagtttaaagtgcctg

SEQ ID NO: 50004 - DNA, 26 bp, Homo sapiens
aggggtgttcagtttaaagtgcctgt

SEQ ID NO: 50005 - DNA, 26 bp, Homo sapiens
ggggtgttcagtttaaagtgcctgtc

SEQ ID NO: 50006 - DNA, 26 bp, Homo sapiens
gggtgttcagtttaaagtgcctgtcc

SEQ ID NO: 50007 - DNA, 26 bp, Homo sapiens
ggtgttcagtttaaagtgcctgtccc

SEQ ID NO: 50008 - DNA, 26 bp, Homo sapiens
gtgttcagtttaaagtgcctgtccca

SEQ ID NO: 50009 - DNA, 26 bp, Homo sapiens
tgttcagtttaaagtgcctgtcccaa

SEQ ID NO: 50010 - DNA, 26 bp, Homo sapiens
gttcagtttaaagtgcctgtcccaaa

SEQ ID NO: 50011 - DNA, 26 bp, Homo sapiens
ttcagtttaaagtgcctgtcccaaat

SEQ ID NO: 50012 - DNA, 26 bp, Homo sapiens
tcagtttaaagtgcctgtcccaaatg

SEQ ID NO: 50013 - DNA, 26 bp, Homo sapiens
cagtttaaagtgcctgtcccaaatgt

SEQ ID NO: 50014 - DNA, 26 bp, Homo sapiens
agtttaaagtgcctgtcccaaatgtc

SEQ ID NO: 50015 - DNA, 26 bp, Homo sapiens
gtttaaagtgcctgtcccaaatgtct

SEQ ID NO: 50016 - DNA, 26 bp, Homo sapiens
tttaaagtgcctgtcccaaatgtctc

SEQ ID NO: 50017 - DNA, 26 bp, Homo sapiens
ttaaagtgcctgtcccaaatgtctct

SEQ ID NO: 50018 - DNA, 26 bp, Homo sapiens
taaagtgcctgtcccaaatgtctcta

SEQ ID NO: 50019 - DNA, 26 bp, Homo sapiens
aaagtgcctgtcccaaatgtctctat

SEQ ID NO: 50020 - DNA, 26 bp, Homo sapiens
aagtgcctgtcccaaatgtctctatc

SEQ ID NO: 50021 - DNA, 26 bp, Homo sapiens
agtgcctgtcccaaatgtctctatca

SEQ ID NO: 50022 - DNA, 26 bp, Homo sapiens
gtgcctgtcccaaatgtctctatcat

SEQ ID NO: 50023 - DNA, 26 bp, Homo sapiens
tgcctgtcccaaatgtctctatcatt

SEQ ID NO: 50024 - DNA, 26 bp, Homo sapiens
gcctgtcccaaatgtctctatcattt

SEQ ID NO: 50025 - DNA, 26 bp, Homo sapiens
cctgtcccaaatgtctctatcatttt

SEQ ID NO: 50026 - DNA, 26 bp, Homo sapiens
ctgtcccaaatgtctctatcatttta

SEQ ID NO: 50027 - DNA, 26 bp, Homo sapiens
tgtcccaaatgtctctatcattttat

SEQ ID NO: 50028 - DNA, 26 bp, Homo sapiens
gtcccaaatgtctctatcattttata

SEQ ID NO: 50029 - DNA, 26 bp, Homo sapiens
tcccaaatgtctctatcattttatag

SEQ ID NO: 50030 - DNA, 26 bp, Homo sapiens
cccaaatgtctctatcattttatagt

SEQ ID NO: 50031 - DNA, 26 bp, Homo sapiens
ccaaatgtctctatcattttatagtc

SEQ ID NO: 50032 - DNA, 26 bp, Homo sapiens
caaatgtctctatcattttatagtca

SEQ ID NO: 50033 - DNA, 26 bp, Homo sapiens
aaatgtctctatcattttatagtcag

SEQ ID NO: 50034 - DNA, 26 bp, Homo sapiens
aatgtctctatcattttatagtcagc

SEQ ID NO: 50035 - DNA, 26 bp, Homo sapiens
atgtctctatcattttatagtcagct

SEQ ID NO: 50036 - DNA, 26 bp, Homo sapiens
tgtctctatcattttatagtcagcta

SEQ ID NO: 50037 - DNA, 26 bp, Homo sapiens
gtctctatcattttatagtcagctac

SEQ ID NO: 50038 - DNA, 26 bp, Homo sapiens
tctctatcattttatagtcagctacc

SEQ ID NO: 50039 - DNA, 26 bp, Homo sapiens
ctctatcattttatagtcagctaccg

SEQ ID NO: 50040 - DNA, 26 bp, Homo sapiens
tctatcattttatagtcagctaccga

SEQ ID NO: 50041 - DNA, 26 bp, Homo sapiens
ctatcattttatagtcagctaccgaa

SEQ ID NO: 50042 - DNA, 26 bp, Homo sapiens
tatcattttatagtcagctaccgaaa

SEQ ID NO: 50043 - DNA, 26 bp, Homo sapiens
atcattttatagtcagctaccgaaaa

SEQ ID NO: 50044 - DNA, 26 bp, Homo sapiens
tcattttatagtcagctaccgaaaac

SEQ ID NO: 50045 - DNA, 26 bp, Homo sapiens
cattttatagtcagctaccgaaaaca

SEQ ID NO: 50046 - DNA, 26 bp, Homo sapiens
attttatagtcagctaccgaaaacac

SEQ ID NO: 50047 - DNA, 26 bp, Homo sapiens
ttttatagtcagctaccgaaaacacc

SEQ ID NO: 50048 - DNA, 26 bp, Homo sapiens
tttatagtcagctaccgaaaacacca

SEQ ID NO: 50049 - DNA, 26 bp, Homo sapiens
ttatagtcagctaccgaaaacaccag

SEQ ID NO: 50050 - DNA, 26 bp, Homo sapiens
tatagtcagctaccgaaaacaccagg

SEQ ID NO: 50051 - DNA, 26 bp, Homo sapiens
atagtcagctaccgaaaacaccagga

SEQ ID NO: 50052 - DNA, 26 bp, Homo sapiens
tagtcagctaccgaaaacaccaggaa

SEQ ID NO: 50053 - DNA, 26 bp, Homo sapiens
agtcagctaccgaaaacaccaggaaa

SEQ ID NO: 50054 - DNA, 26 bp, Homo sapiens
gtcagctaccgaaaacaccaggaaaa

SEQ ID NO: 50055 - DNA, 26 bp, Homo sapiens
tcagctaccgaaaacaccaggaaaat

SEQ ID NO: 50056 - DNA, 26 bp, Homo sapiens
cagctaccgaaaacaccaggaaaatt

SEQ ID NO: 50057 - DNA, 26 bp, Homo sapiens
agctaccgaaaacaccaggaaaattt

SEQ ID NO: 50058 - DNA, 26 bp, Homo sapiens
gctaccgaaaacaccaggaaaattta

SEQ ID NO: 50059 - DNA, 26 bp, Homo sapiens
ctaccgaaaacaccaggaaaatttaa

SEQ ID NO: 50060 - DNA, 26 bp, Homo sapiens
taccgaaaacaccaggaaaatttaaa

SEQ ID NO: 50061 - DNA, 26 bp, Homo sapiens
accgaaaacaccaggaaaatttaaaa

SEQ ID NO: 50062 - DNA, 26 bp, Homo sapiens
ccgaaaacaccaggaaaatttaaaac

SEQ ID NO: 50063 - DNA, 26 bp, Homo sapiens
cgaaaacaccaggaaaatttaaaaca

SEQ ID NO: 50064 - DNA, 26 bp, Homo sapiens
gaaaacaccaggaaaatttaaaacat

SEQ ID NO: 50065 - DNA, 26 bp, Homo sapiens
aaaacaccaggaaaatttaaaacatg

SEQ ID NO: 50066 - DNA, 26 bp, Homo sapiens
aaacaccaggaaaatttaaaacatgg

SEQ ID NO: 50067 - DNA, 26 bp, Homo sapiens
aacaccaggaaaatttaaaacatggg

SEQ ID NO: 50068 - DNA, 26 bp, Homo sapiens
acaccaggaaaatttaaaacatgggc

SEQ ID NO: 50069 - DNA, 26 bp, Homo sapiens
caccaggaaaatttaaaacatgggca

SEQ ID NO: 50070 - DNA, 26 bp, Homo sapiens
accaggaaaatttaaaacatgggcaa

SEQ ID NO: 50071 - DNA, 26 bp, Homo sapiens
ccaggaaaatttaaaacatgggcaaa

SEQ ID NO: 50072 - DNA, 26 bp, Homo sapiens
caggaaaatttaaaacatgggcaaaa

SEQ ID NO: 50073 - DNA, 26 bp, Homo sapiens
aggaaaatttaaaacatgggcaaaat

SEQ ID NO: 50074 - DNA, 26 bp, Homo sapiens
ggaaaatttaaaacatgggcaaaatt

SEQ ID NO: 50075 - DNA, 26 bp, Homo sapiens
gaaaatttaaaacatgggcaaaatta

SEQ ID NO: 50076 - DNA, 26 bp, Homo sapiens
aaaatttaaaacatgggcaaaattaa

SEQ ID NO: 50077 - DNA, 26 bp, Homo sapiens
aaatttaaaacatgggcaaaattaaa

SEQ ID NO: 50078 - DNA, 26 bp, Homo sapiens
aatttaaaacatgggcaaaattaaaa

SEQ ID NO: 50079 - DNA, 26 bp, Homo sapiens
atttaaaacatgggcaaaattaaaaa

SEQ ID NO: 50080 - DNA, 26 bp, Homo sapiens
tttaaaacatgggcaaaattaaaaac

SEQ ID NO: 50081 - DNA, 26 bp, Homo sapiens
ttaaaacatgggcaaaattaaaaacc

SEQ ID NO: 50082 - DNA, 26 bp, Homo sapiens
taaaacatgggcaaaattaaaaacca

SEQ ID NO: 50083 - DNA, 26 bp, Homo sapiens
aaaacatgggcaaaattaaaaaccaa

SEQ ID NO: 50084 - DNA, 26 bp, Homo sapiens
aaacatgggcaaaattaaaaaccaat

SEQ ID NO: 50085 - DNA, 26 bp, Homo sapiens
aacatgggcaaaattaaaaaccaatc

SEQ ID NO: 50086 - DNA, 26 bp, Homo sapiens
acatgggcaaaattaaaaaccaatct

SEQ ID NO: 50087 - DNA, 26 bp, Homo sapiens
catgggcaaaattaaaaaccaatctt

SEQ ID NO: 50088 - DNA, 26 bp, Homo sapiens
atgggcaaaattaaaaaccaatctta

SEQ ID NO: 50089 - DNA, 26 bp, Homo sapiens
tgggcaaaattaaaaaccaatcttac

SEQ ID NO: 50090 - DNA, 26 bp, Homo sapiens
gggcaaaattaaaaaccaatcttact

SEQ ID NO: 50091 - DNA, 26 bp, Homo sapiens
ggcaaaattaaaaaccaatcttactg

SEQ ID NO: 50092 - DNA, 26 bp, Homo sapiens
gcaaaattaaaaaccaatcttactgc

SEQ ID NO: 50093 - DNA, 26 bp, Homo sapiens
caaaattaaaaaccaatcttactgct

SEQ ID NO: 50094 - DNA, 26 bp, Homo sapiens
aaaattaaaaaccaatcttactgctt

SEQ ID NO: 50095 - DNA, 26 bp, Homo sapiens
aaattaaaaaccaatcttactgcttc

SEQ ID NO: 50096 - DNA, 26 bp, Homo sapiens
aattaaaaaccaatcttactgcttct

SEQ ID NO: 50097 - DNA, 26 bp, Homo sapiens
attaaaaaccaatcttactgcttctt

SEQ ID NO: 50098 - DNA, 26 bp, Homo sapiens
ttaaaaaccaatcttactgcttcttc

SEQ ID NO: 50099 - DNA, 26 bp, Homo sapiens
taaaaaccaatcttactgcttcttca

SEQ ID NO: 50100 - DNA, 26 bp, Homo sapiens
aaaaaccaatcttactgcttcttcac

SEQ ID NO: 50101 - DNA, 26 bp, Homo sapiens
aaaaccaatcttactgcttcttcaca

SEQ ID NO: 50102 - DNA, 26 bp, Homo sapiens
aaaccaatcttactgcttcttcacac

SEQ ID NO: 50103 - DNA, 26 bp, Homo sapiens
aaccaatcttactgcttcttcacact

SEQ ID NO: 50104 - DNA, 26 bp, Homo sapiens
accaatcttactgcttcttcacactt

SEQ ID NO: 50105 - DNA, 26 bp, Homo sapiens
ccaatcttactgcttcttcacacttt

SEQ ID NO: 50106 - DNA, 26 bp, Homo sapiens
caatcttactgcttcttcacacttta

SEQ ID NO: 50107 - DNA, 26 bp, Homo sapiens
aatcttactgcttcttcacactttac

SEQ ID NO: 50108 - DNA, 26 bp, Homo sapiens
atcttactgcttcttcacactttact

SEQ ID NO: 50109 - DNA, 26 bp, Homo sapiens
tcttactgcttcttcacactttactt

SEQ ID NO: 50110 - DNA, 26 bp, Homo sapiens
cttactgcttcttcacactttacttc

SEQ ID NO: 50111 - DNA, 26 bp, Homo sapiens
ttactgcttcttcacactttacttcc

SEQ ID NO: 50112 - DNA, 26 bp, Homo sapiens
tactgcttcttcacactttacttccc

SEQ ID NO: 50113 - DNA, 26 bp, Homo sapiens
actgcttcttcacactttacttcccc

SEQ ID NO: 50114 - DNA, 26 bp, Homo sapiens
ctgcttcttcacactttacttcccca

SEQ ID NO: 50115 - DNA, 26 bp, Homo sapiens
tgcttcttcacactttacttccccac

SEQ ID NO: 50116 - DNA, 26 bp, Homo sapiens
gcttcttcacactttacttccccaca

SEQ ID NO: 50117 - DNA, 26 bp, Homo sapiens
cttcttcacactttacttccccacac

SEQ ID NO: 50118 - DNA, 26 bp, Homo sapiens
ttcttcacactttacttccccacacc

SEQ ID NO: 50119 - DNA, 26 bp, Homo sapiens
tcttcacactttacttccccacacca

SEQ ID NO: 50120 - DNA, 26 bp, Homo sapiens
cttcacactttacttccccacaccac

SEQ ID NO: 50121 - DNA, 26 bp, Homo sapiens
ttcacactttacttccccacaccact

SEQ ID NO: 50122 - DNA, 26 bp, Homo sapiens
tcacactttacttccccacaccactg

SEQ ID NO: 50123 - DNA, 26 bp, Homo sapiens
cacactttacttccccacaccactga

SEQ ID NO: 50124 - DNA, 26 bp, Homo sapiens
acactttacttccccacaccactgac

SEQ ID NO: 50125 - DNA, 26 bp, Homo sapiens
cactttacttccccacaccactgact

SEQ ID NO: 50126 - DNA, 26 bp, Homo sapiens
actttacttccccacaccactgactc

SEQ ID NO: 50127 - DNA, 26 bp, Homo sapiens
ctttacttccccacaccactgactca

SEQ ID NO: 50128 - DNA, 26 bp, Homo sapiens
tttacttccccacaccactgactcag

SEQ ID NO: 50129 - DNA, 26 bp, Homo sapiens
ttacttccccacaccactgactcagg

SEQ ID NO: 50130 - DNA, 26 bp, Homo sapiens
tacttccccacaccactgactcaggg

SEQ ID NO: 50131 - DNA, 26 bp, Homo sapiens
acttccccacaccactgactcagggt

SEQ ID NO: 50132 - DNA, 26 bp, Homo sapiens
cttccccacaccactgactcagggtg

SEQ ID NO: 50133 - DNA, 26 bp, Homo sapiens
ttccccacaccactgactcagggtgt

SEQ ID NO: 50134 - DNA, 26 bp, Homo sapiens
tccccacaccactgactcagggtgtg

SEQ ID NO: 50135 - DNA, 26 bp, Homo sapiens
ccccacaccactgactcagggtgtgg

SEQ ID NO: 50136 - DNA, 26 bp, Homo sapiens
cccacaccactgactcagggtgtggt

SEQ ID NO: 50137 - DNA, 26 bp, Homo sapiens
ccacaccactgactcagggtgtggtc

SEQ ID NO: 50138 - DNA, 26 bp, Homo sapiens
cacaccactgactcagggtgtggtca

SEQ ID NO: 50139 - DNA, 26 bp, Homo sapiens
acaccactgactcagggtgtggtcac

SEQ ID NO: 50140 - DNA, 26 bp, Homo sapiens
caccactgactcagggtgtggtcaca

SEQ ID NO: 50141 - DNA, 26 bp, Homo sapiens
accactgactcagggtgtggtcacac

SEQ ID NO: 50142 - DNA, 26 bp, Homo sapiens
ccactgactcagggtgtggtcacaca

SEQ ID NO: 50143 - DNA, 26 bp, Homo sapiens
cactgactcagggtgtggtcacacaa

SEQ ID NO: 50144 - DNA, 26 bp, Homo sapiens
actgactcagggtgtggtcacacaac

SEQ ID NO: 50145 - DNA, 26 bp, Homo sapiens
ctgactcagggtgtggtcacacaacc

SEQ ID NO: 50146 - DNA, 26 bp, Homo sapiens
tgactcagggtgtggtcacacaacca

SEQ ID NO: 50147 - DNA, 26 bp, Homo sapiens
gactcagggtgtggtcacacaaccag

SEQ ID NO: 50148 - DNA, 26 bp, Homo sapiens
actcagggtgtggtcacacaaccagc

SEQ ID NO: 50149 - DNA, 26 bp, Homo sapiens
ctcagggtgtggtcacacaaccagca

SEQ ID NO: 50150 - DNA, 26 bp, Homo sapiens
tcagggtgtggtcacacaaccagcac

SEQ ID NO: 50151 - DNA, 26 bp, Homo sapiens
cagggtgtggtcacacaaccagcact

SEQ ID NO: 50152 - DNA, 26 bp, Homo sapiens
agggtgtggtcacacaaccagcactg

SEQ ID NO: 50153 - DNA, 26 bp, Homo sapiens
gggtgtggtcacacaaccagcactgc

SEQ ID NO: 50154 - DNA, 26 bp, Homo sapiens
ggtgtggtcacacaaccagcactgca

SEQ ID NO: 50155 - DNA, 26 bp, Homo sapiens
gtgtggtcacacaaccagcactgcac

SEQ ID NO: 50156 - DNA, 26 bp, Homo sapiens
tgtggtcacacaaccagcactgcaca

SEQ ID NO: 50157 - DNA, 26 bp, Homo sapiens
gtggtcacacaaccagcactgcacaa

SEQ ID NO: 50158 - DNA, 26 bp, Homo sapiens
tggtcacacaaccagcactgcacaat

SEQ ID NO: 50159 - DNA, 26 bp, Homo sapiens
ggtcacacaaccagcactgcacaatc

SEQ ID NO: 50160 - DNA, 26 bp, Homo sapiens
gtcacacaaccagcactgcacaatcc

SEQ ID NO: 50161 - DNA, 26 bp, Homo sapiens
tcacacaaccagcactgcacaatcct

SEQ ID NO: 50162 - DNA, 26 bp, Homo sapiens
cacacaaccagcactgcacaatcctt

SEQ ID NO: 50163 - DNA, 26 bp, Homo sapiens
acacaaccagcactgcacaatccttg

SEQ ID NO: 50164 - DNA, 26 bp, Homo sapiens
cacaaccagcactgcacaatccttga

SEQ ID NO: 50165 - DNA, 26 bp, Homo sapiens
acaaccagcactgcacaatccttgac

SEQ ID NO: 50166 - DNA, 26 bp, Homo sapiens
caaccagcactgcacaatccttgact

SEQ ID NO: 50167 - DNA, 26 bp, Homo sapiens
aaccagcactgcacaatccttgactg

SEQ ID NO: 50168 - DNA, 26 bp, Homo sapiens
accagcactgcacaatccttgactgc

SEQ ID NO: 50169 - DNA, 26 bp, Homo sapiens
ccagcactgcacaatccttgactgca

SEQ ID NO: 50170 - DNA, 26 bp, Homo sapiens
cagcactgcacaatccttgactgcac

SEQ ID NO: 50171 - DNA, 26 bp, Homo sapiens
agcactgcacaatccttgactgcaca

SEQ ID NO: 50172 - DNA, 26 bp, Homo sapiens
gcactgcacaatccttgactgcacag

SEQ ID NO: 50173 - DNA, 26 bp, Homo sapiens
cactgcacaatccttgactgcacagt

SEQ ID NO: 50174 - DNA, 26 bp, Homo sapiens
actgcacaatccttgactgcacagtg

SEQ ID NO: 50175 - DNA, 26 bp, Homo sapiens
ctgcacaatccttgactgcacagtgt

SEQ ID NO: 50176 - DNA, 26 bp, Homo sapiens
tgcacaatccttgactgcacagtgtt

SEQ ID NO: 50177 - DNA, 26 bp, Homo sapiens
gcacaatccttgactgcacagtgttt

SEQ ID NO: 50178 - DNA, 26 bp, Homo sapiens
cacaatccttgactgcacagtgtttc

SEQ ID NO: 50179 - DNA, 26 bp, Homo sapiens
acaatccttgactgcacagtgtttcc

SEQ ID NO: 50180 - DNA, 26 bp, Homo sapiens
caatccttgactgcacagtgtttcca

SEQ ID NO: 50181 - DNA, 26 bp, Homo sapiens
aatccttgactgcacagtgtttccaa

SEQ ID NO: 50182 - DNA, 26 bp, Homo sapiens
atccttgactgcacagtgtttccaac

SEQ ID NO: 50183 - DNA, 26 bp, Homo sapiens
tccttgactgcacagtgtttccaaca

SEQ ID NO: 50184 - DNA, 26 bp, Homo sapiens
ccttgactgcacagtgtttccaacaa

SEQ ID NO: 50185 - DNA, 26 bp, Homo sapiens
cttgactgcacagtgtttccaacaac

SEQ ID NO: 50186 - DNA, 26 bp, Homo sapiens
ttgactgcacagtgtttccaacaacg

SEQ ID NO: 50187 - DNA, 26 bp, Homo sapiens
tgactgcacagtgtttccaacaacgc

SEQ ID NO: 50188 - DNA, 26 bp, Homo sapiens
gactgcacagtgtttccaacaacgct

SEQ ID NO: 50189 - DNA, 26 bp, Homo sapiens
actgcacagtgtttccaacaacgctt

SEQ ID NO: 50190 - DNA, 26 bp, Homo sapiens
ctgcacagtgtttccaacaacgcttg

SEQ ID NO: 50191 - DNA, 26 bp, Homo sapiens
tgcacagtgtttccaacaacgcttgc

SEQ ID NO: 50192 - DNA, 26 bp, Homo sapiens
gcacagtgtttccaacaacgcttgct

SEQ ID NO: 50193 - DNA, 26 bp, Homo sapiens
cacagtgtttccaacaacgcttgctg

SEQ ID NO: 50194 - DNA, 26 bp, Homo sapiens
acagtgtttccaacaacgcttgctga

SEQ ID NO: 50195 - DNA, 26 bp, Homo sapiens
cagtgtttccaacaacgcttgctgaa

SEQ ID NO: 50196 - DNA, 26 bp, Homo sapiens
agtgtttccaacaacgcttgctgaaa

SEQ ID NO: 50197 - DNA, 26 bp, Homo sapiens
gtgtttccaacaacgcttgctgaaac

SEQ ID NO: 50198 - DNA, 26 bp, Homo sapiens
tgtttccaacaacgcttgctgaaact

SEQ ID NO: 50199 - DNA, 26 bp, Homo sapiens
gtttccaacaacgcttgctgaaacta

SEQ ID NO: 50200 - DNA, 26 bp, Homo sapiens
tttccaacaacgcttgctgaaactaa

SEQ ID NO: 50201 - DNA, 26 bp, Homo sapiens
ttccaacaacgcttgctgaaactaat

SEQ ID NO: 50202 - DNA, 26 bp, Homo sapiens
tccaacaacgcttgctgaaactaatt

SEQ ID NO: 50203 - DNA, 26 bp, Homo sapiens
ccaacaacgcttgctgaaactaattg

SEQ ID NO: 50204 - DNA, 26 bp, Homo sapiens
caacaacgcttgctgaaactaattgg

SEQ ID NO: 50205 - DNA, 26 bp, Homo sapiens
aacaacgcttgctgaaactaattgga

SEQ ID NO: 50206 - DNA, 26 bp, Homo sapiens
acaacgcttgctgaaactaattggaa

SEQ ID NO: 50207 - DNA, 26 bp, Homo sapiens
caacgcttgctgaaactaattggaaa

SEQ ID NO: 50208 - DNA, 26 bp, Homo sapiens
aacgcttgctgaaactaattggaaaa

SEQ ID NO: 50209 - DNA, 26 bp, Homo sapiens
acgcttgctgaaactaattggaaaaa

SEQ ID NO: 50210 - DNA, 26 bp, Homo sapiens
cgcttgctgaaactaattggaaaaat

SEQ ID NO: 50211 - DNA, 26 bp, Homo sapiens
gcttgctgaaactaattggaaaaatt

SEQ ID NO: 50212 - DNA, 26 bp, Homo sapiens
cttgctgaaactaattggaaaaattt

SEQ ID NO: 50213 - DNA, 26 bp, Homo sapiens
ttgctgaaactaattggaaaaattta

SEQ ID NO: 50214 - DNA, 26 bp, Homo sapiens
tgctgaaactaattggaaaaatttat

SEQ ID NO: 50215 - DNA, 26 bp, Homo sapiens
gctgaaactaattggaaaaatttatc

SEQ ID NO: 50216 - DNA, 26 bp, Homo sapiens
ctgaaactaattggaaaaatttatct

SEQ ID NO: 50217 - DNA, 26 bp, Homo sapiens
tgaaactaattggaaaaatttatcta

SEQ ID NO: 50218 - DNA, 26 bp, Homo sapiens
gaaactaattggaaaaatttatctat

SEQ ID NO: 50219 - DNA, 26 bp, Homo sapiens
aaactaattggaaaaatttatctatc

SEQ ID NO: 50220 - DNA, 26 bp, Homo sapiens
aactaattggaaaaatttatctatcc

SEQ ID NO: 50221 - DNA, 26 bp, Homo sapiens
actaattggaaaaatttatctatcct

SEQ ID NO: 50222 - DNA, 26 bp, Homo sapiens
ctaattggaaaaatttatctatccta

SEQ ID NO: 50223 - DNA, 26 bp, Homo sapiens
taattggaaaaatttatctatcctaa

SEQ ID NO: 50224 - DNA, 26 bp, Homo sapiens
aattggaaaaatttatctatcctaat

SEQ ID NO: 50225 - DNA, 26 bp, Homo sapiens
attggaaaaatttatctatcctaata

SEQ ID NO: 50226 - DNA, 26 bp, Homo sapiens
ttggaaaaatttatctatcctaataa

SEQ ID NO: 50227 - DNA, 26 bp, Homo sapiens
tggaaaaatttatctatcctaataac

SEQ ID NO: 50228 - DNA, 26 bp, Homo sapiens
ggaaaaatttatctatcctaataact

SEQ ID NO: 50229 - DNA, 26 bp, Homo sapiens
gaaaaatttatctatcctaataacta

SEQ ID NO: 50230 - DNA, 26 bp, Homo sapiens
aaaaatttatctatcctaataactaa

SEQ ID NO: 50231 - DNA, 26 bp, Homo sapiens
aaaatttatctatcctaataactaat

SEQ ID NO: 50232 - DNA, 26 bp, Homo sapiens
aaatttatctatcctaataactaatg

SEQ ID NO: 50233 - DNA, 26 bp, Homo sapiens
aatttatctatcctaataactaatga

SEQ ID NO: 50234 - DNA, 26 bp, Homo sapiens
atttatctatcctaataactaatgat

SEQ ID NO: 50235 - DNA, 26 bp, Homo sapiens
tttatctatcctaataactaatgatt

SEQ ID NO: 50236 - DNA, 26 bp, Homo sapiens
ttatctatcctaataactaatgattc

SEQ ID NO: 50237 - DNA, 26 bp, Homo sapiens
tatctatcctaataactaatgattca

SEQ ID NO: 50238 - DNA, 26 bp, Homo sapiens
atctatcctaataactaatgattcag

SEQ ID NO: 50239 - DNA, 26 bp, Homo sapiens
tctatcctaataactaatgattcagc

SEQ ID NO: 50240 - DNA, 26 bp, Homo sapiens
ctatcctaataactaatgattcagcg

SEQ ID NO: 50241 - DNA, 26 bp, Homo sapiens
tatcctaataactaatgattcagcgg

SEQ ID NO: 50242 - DNA, 26 bp, Homo sapiens
atcctaataactaatgattcagcgga

SEQ ID NO: 50243 - DNA, 26 bp, Homo sapiens
tcctaataactaatgattcagcggaa

SEQ ID NO: 50244 - DNA, 26 bp, Homo sapiens
cctaataactaatgattcagcggaaa

SEQ ID NO: 50245 - DNA, 26 bp, Homo sapiens
ctaataactaatgattcagcggaaat

SEQ ID NO: 50246 - DNA, 26 bp, Homo sapiens
taataactaatgattcagcggaaata

SEQ ID NO: 50247 - DNA, 26 bp, Homo sapiens
aataactaatgattcagcggaaataa

SEQ ID NO: 50248 - DNA, 26 bp, Homo sapiens
ataactaatgattcagcggaaataac

SEQ ID NO: 50249 - DNA, 26 bp, Homo sapiens
taactaatgattcagcggaaataaca

SEQ ID NO: 50250 - DNA, 26 bp, Homo sapiens
aactaatgattcagcggaaataacaa

SEQ ID NO: 50251 - DNA, 26 bp, Homo sapiens
actaatgattcagcggaaataacaaa

SEQ ID NO: 50252 - DNA, 26 bp, Homo sapiens
ctaatgattcagcggaaataacaaaa

SEQ ID NO: 50253 - DNA, 26 bp, Homo sapiens
taatgattcagcggaaataacaaaat

SEQ ID NO: 50254 - DNA, 26 bp, Homo sapiens
aatgattcagcggaaataacaaaatg

SEQ ID NO: 50255 - DNA, 26 bp, Homo sapiens
atgattcagcggaaataacaaaatgc

SEQ ID NO: 50256 - DNA, 26 bp, Homo sapiens
tgattcagcggaaataacaaaatgcc

SEQ ID NO: 50257 - DNA, 26 bp, Homo sapiens
gattcagcggaaataacaaaatgccc

SEQ ID NO: 50258 - DNA, 26 bp, Homo sapiens
attcagcggaaataacaaaatgccct

SEQ ID NO: 50259 - DNA, 26 bp, Homo sapiens
ttcagcggaaataacaaaatgcccta

SEQ ID NO: 50260 - DNA, 26 bp, Homo sapiens
tcagcggaaataacaaaatgccctaa

SEQ ID NO: 50261 - DNA, 26 bp, Homo sapiens
cagcggaaataacaaaatgccctaaa

SEQ ID NO: 50262 - DNA, 26 bp, Homo sapiens
agcggaaataacaaaatgccctaaag

SEQ ID NO: 50263 - DNA, 26 bp, Homo sapiens
gcggaaataacaaaatgccctaaagg

SEQ ID NO: 50264 - DNA, 26 bp, Homo sapiens
cggaaataacaaaatgccctaaaggc

SEQ ID NO: 50265 - DNA, 26 bp, Homo sapiens
ggaaataacaaaatgccctaaaggcg

SEQ ID NO: 50266 - DNA, 26 bp, Homo sapiens
gaaataacaaaatgccctaaaggcgg

SEQ ID NO: 50267 - DNA, 26 bp, Homo sapiens
aaataacaaaatgccctaaaggcggt

SEQ ID NO: 50268 - DNA, 26 bp, Homo sapiens
aataacaaaatgccctaaaggcggta

SEQ ID NO: 50269 - DNA, 26 bp, Homo sapiens
ataacaaaatgccctaaaggcggtac

SEQ ID NO: 50270 - DNA, 26 bp, Homo sapiens
taacaaaatgccctaaaggcggtaca

SEQ ID NO: 50271 - DNA, 26 bp, Homo sapiens
aacaaaatgccctaaaggcggtacac

SEQ ID NO: 50272 - DNA, 26 bp, Homo sapiens
acaaaatgccctaaaggcggtacaca

SEQ ID NO: 50273 - DNA, 26 bp, Homo sapiens
caaaatgccctaaaggcggtacacat

SEQ ID NO: 50274 - DNA, 26 bp, Homo sapiens
aaaatgccctaaaggcggtacacata

SEQ ID NO: 50275 - DNA, 26 bp, Homo sapiens
aaatgccctaaaggcggtacacatat

SEQ ID NO: 50276 - DNA, 26 bp, Homo sapiens
aatgccctaaaggcggtacacatatc

SEQ ID NO: 50277 - DNA, 26 bp, Homo sapiens
atgccctaaaggcggtacacatatct

SEQ ID NO: 50278 - DNA, 26 bp, Homo sapiens
tgccctaaaggcggtacacatatctt

SEQ ID NO: 50279 - DNA, 26 bp, Homo sapiens
gccctaaaggcggtacacatatcttc

SEQ ID NO: 50280 - DNA, 26 bp, Homo sapiens
ccctaaaggcggtacacatatcttcc

SEQ ID NO: 50281 - DNA, 26 bp, Homo sapiens
cctaaaggcggtacacatatcttcct

SEQ ID NO: 50282 - DNA, 26 bp, Homo sapiens
ctaaaggcggtacacatatcttcctc

SEQ ID NO: 50283 - DNA, 26 bp, Homo sapiens
taaaggcggtacacatatcttcctct

SEQ ID NO: 50284 - DNA, 26 bp, Homo sapiens
aaaggcggtacacatatcttcctcta

SEQ ID NO: 50285 - DNA, 26 bp, Homo sapiens
aaggcggtacacatatcttcctctaa

SEQ ID NO: 50286 - DNA, 26 bp, Homo sapiens
aggcggtacacatatcttcctctaac

SEQ ID NO: 50287 - DNA, 26 bp, Homo sapiens
ggcggtacacatatcttcctctaacc

SEQ ID NO: 50288 - DNA, 26 bp, Homo sapiens
gcggtacacatatcttcctctaaccc

SEQ ID NO: 50289 - DNA, 26 bp, Homo sapiens
cggtacacatatcttcctctaaccca

SEQ ID NO: 50290 - DNA, 26 bp, Homo sapiens
ggtacacatatcttcctctaacccag

SEQ ID NO: 50291 - DNA, 26 bp, Homo sapiens
gtacacatatcttcctctaacccaga

SEQ ID NO: 50292 - DNA, 26 bp, Homo sapiens
tacacatatcttcctctaacccagat

SEQ ID NO: 50293 - DNA, 26 bp, Homo sapiens
acacatatcttcctctaacccagata

SEQ ID NO: 50294 - DNA, 26 bp, Homo sapiens
cacatatcttcctctaacccagatag

SEQ ID NO: 50295 - DNA, 26 bp, Homo sapiens
acatatcttcctctaacccagatagt

SEQ ID NO: 50296 - DNA, 26 bp, Homo sapiens
catatcttcctctaacccagatagtc

SEQ ID NO: 50297 - DNA, 26 bp, Homo sapiens
atatcttcctctaacccagatagtca

SEQ ID NO: 50298 - DNA, 26 bp, Homo sapiens
tatcttcctctaacccagatagtcaa

SEQ ID NO: 50299 - DNA, 26 bp, Homo sapiens
atcttcctctaacccagatagtcaaa

SEQ ID NO: 50300 - DNA, 26 bp, Homo sapiens
tcttcctctaacccagatagtcaaaa

SEQ ID NO: 50301 - DNA, 26 bp, Homo sapiens
cttcctctaacccagatagtcaaaaa

SEQ ID NO: 50302 - DNA, 26 bp, Homo sapiens
ttcctctaacccagatagtcaaaaag

SEQ ID NO: 50303 - DNA, 26 bp, Homo sapiens
tcctctaacccagatagtcaaaaagt

SEQ ID NO: 50304 - DNA, 26 bp, Homo sapiens
cctctaacccagatagtcaaaaagtt

SEQ ID NO: 50305 - DNA, 26 bp, Homo sapiens
ctctaacccagatagtcaaaaagttt

SEQ ID NO: 50306 - DNA, 26 bp, Homo sapiens
tctaacccagatagtcaaaaagtttc

SEQ ID NO: 50307 - DNA, 26 bp, Homo sapiens
ctaacccagatagtcaaaaagtttct

SEQ ID NO: 50308 - DNA, 26 bp, Homo sapiens
taacccagatagtcaaaaagtttctc

SEQ ID NO: 50309 - DNA, 26 bp, Homo sapiens
aacccagatagtcaaaaagtttctcc

SEQ ID NO: 50310 - DNA, 26 bp, Homo sapiens
acccagatagtcaaaaagtttctcct

SEQ ID NO: 50311 - DNA, 26 bp, Homo sapiens
cccagatagtcaaaaagtttctcctt

SEQ ID NO: 50312 - DNA, 26 bp, Homo sapiens
ccagatagtcaaaaagtttctccttt

SEQ ID NO: 50313 - DNA, 26 bp, Homo sapiens
cagatagtcaaaaagtttctccttta

SEQ ID NO: 50314 - DNA, 26 bp, Homo sapiens
agatagtcaaaaagtttctcctttaa

SEQ ID NO: 50315 - DNA, 26 bp, Homo sapiens
gatagtcaaaaagtttctcctttaaa

SEQ ID NO: 50316 - DNA, 26 bp, Homo sapiens
atagtcaaaaagtttctcctttaaaa

SEQ ID NO: 50317 - DNA, 26 bp, Homo sapiens
tagtcaaaaagtttctcctttaaaaa

SEQ ID NO: 50318 - DNA, 26 bp, Homo sapiens
agtcaaaaagtttctcctttaaaaat

SEQ ID NO: 50319 - DNA, 26 bp, Homo sapiens
gtcaaaaagtttctcctttaaaaatt

SEQ ID NO: 50320 - DNA, 26 bp, Homo sapiens
tcaaaaagtttctcctttaaaaatta

SEQ ID NO: 50321 - DNA, 26 bp, Homo sapiens
caaaaagtttctcctttaaaaattaa

SEQ ID NO: 50322 - DNA, 26 bp, Homo sapiens
aaaaagtttctcctttaaaaattaaa

SEQ ID NO: 50323 - DNA, 26 bp, Homo sapiens
aaaagtttctcctttaaaaattaaaa

SEQ ID NO: 50324 - DNA, 26 bp, Homo sapiens
aaagtttctcctttaaaaattaaaat

SEQ ID NO: 50325 - DNA, 26 bp, Homo sapiens
aagtttctcctttaaaaattaaaatt

SEQ ID NO: 50326 - DNA, 26 bp, Homo sapiens
agtttctcctttaaaaattaaaattt

SEQ ID NO: 50327 - DNA, 26 bp, Homo sapiens
gtttctcctttaaaaattaaaatttg

SEQ ID NO: 50328 - DNA, 26 bp, Homo sapiens
tttctcctttaaaaattaaaatttgt

SEQ ID NO: 50329 - DNA, 26 bp, Homo sapiens
ttctcctttaaaaattaaaatttgtc

SEQ ID NO: 50330 - DNA, 26 bp, Homo sapiens
tctcctttaaaaattaaaatttgtca

SEQ ID NO: 50331 - DNA, 26 bp, Homo sapiens
ctcctttaaaaattaaaatttgtcaa

SEQ ID NO: 50332 - DNA, 26 bp, Homo sapiens
tcctttaaaaattaaaatttgtcaac

SEQ ID NO: 50333 - DNA, 26 bp, Homo sapiens
cctttaaaaattaaaatttgtcaaca

SEQ ID NO: 50334 - DNA, 26 bp, Homo sapiens
ctttaaaaattaaaatttgtcaacac

SEQ ID NO: 50335 - DNA, 26 bp, Homo sapiens
tttaaaaattaaaatttgtcaacact

SEQ ID NO: 50336 - DNA, 26 bp, Homo sapiens
ttaaaaattaaaatttgtcaacactt

SEQ ID NO: 50337 - DNA, 26 bp, Homo sapiens
taaaaattaaaatttgtcaacacttc

SEQ ID NO: 50338 - DNA, 26 bp, Homo sapiens
aaaaattaaaatttgtcaacacttcc

SEQ ID NO: 50339 - DNA, 26 bp, Homo sapiens
aaaattaaaatttgtcaacacttccc

SEQ ID NO: 50340 - DNA, 26 bp, Homo sapiens
aaattaaaatttgtcaacacttcccc

SEQ ID NO: 50341 - DNA, 26 bp, Homo sapiens
aattaaaatttgtcaacacttcccct

SEQ ID NO: 50342 - DNA, 26 bp, Homo sapiens
attaaaatttgtcaacacttcccctc

SEQ ID NO: 50343 - DNA, 26 bp, Homo sapiens
ttaaaatttgtcaacacttcccctcc

SEQ ID NO: 50344 - DNA, 26 bp, Homo sapiens
taaaatttgtcaacacttcccctcca

SEQ ID NO: 50345 - DNA, 26 bp, Homo sapiens
aaaatttgtcaacacttcccctccat

SEQ ID NO: 50346 - DNA, 26 bp, Homo sapiens
aaatttgtcaacacttcccctccatt

SEQ ID NO: 50347 - DNA, 26 bp, Homo sapiens
aatttgtcaacacttcccctccattc

SEQ ID NO: 50348 - DNA, 26 bp, Homo sapiens
atttgtcaacacttcccctccattca

SEQ ID NO: 50349 - DNA, 26 bp, Homo sapiens
tttgtcaacacttcccctccattcaa

SEQ ID NO: 50350 - DNA, 26 bp, Homo sapiens
ttgtcaacacttcccctccattcaag

SEQ ID NO: 50351 - DNA, 26 bp, Homo sapiens
tgtcaacacttcccctccattcaagg

SEQ ID NO: 50352 - DNA, 26 bp, Homo sapiens
gtcaacacttcccctccattcaaggt

SEQ ID NO: 50353 - DNA, 26 bp, Homo sapiens
tcaacacttcccctccattcaaggtt

SEQ ID NO: 50354 - DNA, 26 bp, Homo sapiens
caacacttcccctccattcaaggttt

SEQ ID NO: 50355 - DNA, 26 bp, Homo sapiens
aacacttcccctccattcaaggtttc

SEQ ID NO: 50356 - DNA, 26 bp, Homo sapiens
acacttcccctccattcaaggtttcc

SEQ ID NO: 50357 - DNA, 26 bp, Homo sapiens
cacttcccctccattcaaggtttcct

SEQ ID NO: 50358 - DNA, 26 bp, Homo sapiens
acttcccctccattcaaggtttcctc

SEQ ID NO: 50359 - DNA, 26 bp, Homo sapiens
cttcccctccattcaaggtttcctct

SEQ ID NO: 50360 - DNA, 26 bp, Homo sapiens
ttcccctccattcaaggtttcctcta

SEQ ID NO: 50361 - DNA, 26 bp, Homo sapiens
tcccctccattcaaggtttcctctat

SEQ ID NO: 50362 - DNA, 26 bp, Homo sapiens
cccctccattcaaggtttcctctatc

SEQ ID NO: 50363 - DNA, 26 bp, Homo sapiens
ccctccattcaaggtttcctctatct

SEQ ID NO: 50364 - DNA, 26 bp, Homo sapiens
cctccattcaaggtttcctctatctt

SEQ ID NO: 50365 - DNA, 26 bp, Homo sapiens
ctccattcaaggtttcctctatcttc

SEQ ID NO: 50366 - DNA, 26 bp, Homo sapiens
tccattcaaggtttcctctatcttca

SEQ ID NO: 50367 - DNA, 26 bp, Homo sapiens
ccattcaaggtttcctctatcttcaa

SEQ ID NO: 50368 - DNA, 26 bp, Homo sapiens
cattcaaggtttcctctatcttcaaa

SEQ ID NO: 50369 - DNA, 26 bp, Homo sapiens
attcaaggtttcctctatcttcaaat

SEQ ID NO: 50370 - DNA, 26 bp, Homo sapiens
ttcaaggtttcctctatcttcaaatg

SEQ ID NO: 50371 - DNA, 26 bp, Homo sapiens
tcaaggtttcctctatcttcaaatgt

SEQ ID NO: 50372 - DNA, 26 bp, Homo sapiens
caaggtttcctctatcttcaaatgtg

SEQ ID NO: 50373 - DNA, 26 bp, Homo sapiens
aaggtttcctctatcttcaaatgtgt

SEQ ID NO: 50374 - DNA, 26 bp, Homo sapiens
aggtttcctctatcttcaaatgtgta

SEQ ID NO: 50375 - DNA, 26 bp, Homo sapiens
ggtttcctctatcttcaaatgtgtat

SEQ ID NO: 50376 - DNA, 26 bp, Homo sapiens
gtttcctctatcttcaaatgtgtatt

SEQ ID NO: 50377 - DNA, 26 bp, Homo sapiens
tttcctctatcttcaaatgtgtattt

SEQ ID NO: 50378 - DNA, 26 bp, Homo sapiens
ttcctctatcttcaaatgtgtatttt

SEQ ID NO: 50379 - DNA, 26 bp, Homo sapiens
tcctctatcttcaaatgtgtattttt

SEQ ID NO: 50380 - DNA, 26 bp, Homo sapiens
cctctatcttcaaatgtgtatttttc

SEQ ID NO: 50381 - DNA, 26 bp, Homo sapiens
ctctatcttcaaatgtgtatttttct

SEQ ID NO: 50382 - DNA, 26 bp, Homo sapiens
tctatcttcaaatgtgtatttttcta

SEQ ID NO: 50383 - DNA, 26 bp, Homo sapiens
ctatcttcaaatgtgtatttttctat

SEQ ID NO: 50384 - DNA, 26 bp, Homo sapiens
tatcttcaaatgtgtatttttctatg

SEQ ID NO: 50385 - DNA, 26 bp, Homo sapiens
atcttcaaatgtgtatttttctatgt

SEQ ID NO: 50386 - DNA, 26 bp, Homo sapiens
tcttcaaatgtgtatttttctatgta

SEQ ID NO: 50387 - DNA, 26 bp, Homo sapiens
cttcaaatgtgtatttttctatgtaa

SEQ ID NO: 50388 - DNA, 26 bp, Homo sapiens
ttcaaatgtgtatttttctatgtaac

SEQ ID NO: 50389 - DNA, 26 bp, Homo sapiens
tcaaatgtgtatttttctatgtaact

SEQ ID NO: 50390 - DNA, 26 bp, Homo sapiens
caaatgtgtatttttctatgtaactg

SEQ ID NO: 50391 - DNA, 26 bp, Homo sapiens
aaatgtgtatttttctatgtaactgt

SEQ ID NO: 50392 - DNA, 26 bp, Homo sapiens
aatgtgtatttttctatgtaactgtg

SEQ ID NO: 50393 - DNA, 26 bp, Homo sapiens
atgtgtatttttctatgtaactgtgt

SEQ ID NO: 50394 - DNA, 26 bp, Homo sapiens
tgtgtatttttctatgtaactgtgta

SEQ ID NO: 50395 - DNA, 26 bp, Homo sapiens
gtgtatttttctatgtaactgtgtat

SEQ ID NO: 50396 - DNA, 26 bp, Homo sapiens
tgtatttttctatgtaactgtgtatt

SEQ ID NO: 50397 - DNA, 26 bp, Homo sapiens
gtatttttctatgtaactgtgtattt

SEQ ID NO: 50398 - DNA, 26 bp, Homo sapiens
tatttttctatgtaactgtgtatttt

SEQ ID NO: 50399 - DNA, 26 bp, Homo sapiens
atttttctatgtaactgtgtattttc

SEQ ID NO: 50400 - DNA, 26 bp, Homo sapiens
tttttctatgtaactgtgtattttcc

SEQ ID NO: 50401 - DNA, 26 bp, Homo sapiens
ttttctatgtaactgtgtattttcct

SEQ ID NO: 50402 - DNA, 26 bp, Homo sapiens
tttctatgtaactgtgtattttccta

SEQ ID NO: 50403 - DNA, 26 bp, Homo sapiens
ttctatgtaactgtgtattttcctat

SEQ ID NO: 50404 - DNA, 26 bp, Homo sapiens
tctatgtaactgtgtattttcctatg

SEQ ID NO: 50405 - DNA, 26 bp, Homo sapiens
ctatgtaactgtgtattttcctatgt

SEQ ID NO: 50406 - DNA, 26 bp, Homo sapiens
tatgtaactgtgtattttcctatgtg

SEQ ID NO: 50407 - DNA, 26 bp, Homo sapiens
atgtaactgtgtattttcctatgtgt

SEQ ID NO: 50408 - DNA, 26 bp, Homo sapiens
tgtaactgtgtattttcctatgtgta

SEQ ID NO: 50409 - DNA, 26 bp, Homo sapiens
gtaactgtgtattttcctatgtgtaa

SEQ ID NO: 50410 - DNA, 26 bp, Homo sapiens
taactgtgtattttcctatgtgtaac

SEQ ID NO: 50411 - DNA, 26 bp, Homo sapiens
aactgtgtattttcctatgtgtaact

SEQ ID NO: 50412 - DNA, 26 bp, Homo sapiens
actgtgtattttcctatgtgtaactg

SEQ ID NO: 50413 - DNA, 26 bp, Homo sapiens
ctgtgtattttcctatgtgtaactgc

SEQ ID NO: 50414 - DNA, 26 bp, Homo sapiens
tgtgtattttcctatgtgtaactgct

SEQ ID NO: 50415 - DNA, 26 bp, Homo sapiens
gtgtattttcctatgtgtaactgcta

SEQ ID NO: 50416 - DNA, 26 bp, Homo sapiens
tgtattttcctatgtgtaactgctaa

SEQ ID NO: 50417 - DNA, 26 bp, Homo sapiens
gtattttcctatgtgtaactgctaaa

SEQ ID NO: 50418 - DNA, 26 bp, Homo sapiens
tattttcctatgtgtaactgctaaat

SEQ ID NO: 50419 - DNA, 26 bp, Homo sapiens
attttcctatgtgtaactgctaaatg

SEQ ID NO: 50420 - DNA, 26 bp, Homo sapiens
ttttcctatgtgtaactgctaaatgc

SEQ ID NO: 50421 - DNA, 26 bp, Homo sapiens
tttcctatgtgtaactgctaaatgct

SEQ ID NO: 50422 - DNA, 26 bp, Homo sapiens
ttcctatgtgtaactgctaaatgcta

SEQ ID NO: 50423 - DNA, 26 bp, Homo sapiens
tcctatgtgtaactgctaaatgctaa

SEQ ID NO: 50424 - DNA, 26 bp, Homo sapiens
cctatgtgtaactgctaaatgctaaa

SEQ ID NO: 50425 - DNA, 26 bp, Homo sapiens
ctatgtgtaactgctaaatgctaaat

SEQ ID NO: 50426 - DNA, 26 bp, Homo sapiens
tatgtgtaactgctaaatgctaaata

SEQ ID NO: 50427 - DNA, 26 bp, Homo sapiens
atgtgtaactgctaaatgctaaataa

SEQ ID NO: 50428 - DNA, 26 bp, Homo sapiens
tgtgtaactgctaaatgctaaataat

SEQ ID NO: 50429 - DNA, 26 bp, Homo sapiens
gtgtaactgctaaatgctaaataatc

SEQ ID NO: 50430 - DNA, 26 bp, Homo sapiens
tgtaactgctaaatgctaaataatca

SEQ ID NO: 50431 - DNA, 26 bp, Homo sapiens
gtaactgctaaatgctaaataatcac

SEQ ID NO: 50432 - DNA, 26 bp, Homo sapiens
taactgctaaatgctaaataatcact

SEQ ID NO: 50433 - DNA, 26 bp, Homo sapiens
aactgctaaatgctaaataatcacta

SEQ ID NO: 50434 - DNA, 26 bp, Homo sapiens
actgctaaatgctaaataatcactaa

SEQ ID NO: 50435 - DNA, 26 bp, Homo sapiens
ctgctaaatgctaaataatcactaaa

SEQ ID NO: 50436 - DNA, 26 bp, Homo sapiens
tgctaaatgctaaataatcactaaag

SEQ ID NO: 50437 - DNA, 26 bp, Homo sapiens
gctaaatgctaaataatcactaaagt

SEQ ID NO: 50438 - DNA, 26 bp, Homo sapiens
ctaaatgctaaataatcactaaagtg

SEQ ID NO: 50439 - DNA, 26 bp, Homo sapiens
taaatgctaaataatcactaaagtgg

SEQ ID NO: 50440 - DNA, 26 bp, Homo sapiens
aaatgctaaataatcactaaagtggt

SEQ ID NO: 50441 - DNA, 26 bp, Homo sapiens
aatgctaaataatcactaaagtggta

SEQ ID NO: 50442 - DNA, 26 bp, Homo sapiens
atgctaaataatcactaaagtggtat

SEQ ID NO: 50443 - DNA, 26 bp, Homo sapiens
tgctaaataatcactaaagtggtatt

SEQ ID NO: 50444 - DNA, 26 bp, Homo sapiens
gctaaataatcactaaagtggtattt

SEQ ID NO: 50445 - DNA, 26 bp, Homo sapiens
ctaaataatcactaaagtggtatttc

SEQ ID NO: 50446 - DNA, 26 bp, Homo sapiens
taaataatcactaaagtggtatttcc

SEQ ID NO: 50447 - DNA, 26 bp, Homo sapiens
aaataatcactaaagtggtatttccc

SEQ ID NO: 50448 - DNA, 26 bp, Homo sapiens
aataatcactaaagtggtatttccca

SEQ ID NO: 50449 - DNA, 26 bp, Homo sapiens
ataatcactaaagtggtatttcccaa

SEQ ID NO: 50450 - DNA, 26 bp, Homo sapiens
taatcactaaagtggtatttcccaaa

SEQ ID NO: 50451 - DNA, 26 bp, Homo sapiens
aatcactaaagtggtatttcccaaaa

SEQ ID NO: 50452 - DNA, 26 bp, Homo sapiens
atcactaaagtggtatttcccaaaag

SEQ ID NO: 50453 - DNA, 26 bp, Homo sapiens
tcactaaagtggtatttcccaaaaga

SEQ ID NO: 50454 - DNA, 26 bp, Homo sapiens
cactaaagtggtatttcccaaaagat

SEQ ID NO: 50455 - DNA, 26 bp, Homo sapiens
actaaagtggtatttcccaaaagata

SEQ ID NO: 50456 - DNA, 26 bp, Homo sapiens
ctaaagtggtatttcccaaaagatat

SEQ ID NO: 50457 - DNA, 26 bp, Homo sapiens
taaagtggtatttcccaaaagatatt

SEQ ID NO: 50458 - DNA, 26 bp, Homo sapiens
aaagtggtatttcccaaaagatattt

SEQ ID NO: 50459 - DNA, 26 bp, Homo sapiens
aagtggtatttcccaaaagatatttt

SEQ ID NO: 50460 - DNA, 26 bp, Homo sapiens
agtggtatttcccaaaagatattttc

SEQ ID NO: 50461 - DNA, 26 bp, Homo sapiens
gtggtatttcccaaaagatattttca

SEQ ID NO: 50462 - DNA, 26 bp, Homo sapiens
tggtatttcccaaaagatattttcaa

SEQ ID NO: 50463 - DNA, 26 bp, Homo sapiens
ggtatttcccaaaagatattttcaag

SEQ ID NO: 50464 - DNA, 26 bp, Homo sapiens
gtatttcccaaaagatattttcaaga

SEQ ID NO: 50465 - DNA, 26 bp, Homo sapiens
tatttcccaaaagatattttcaagat

SEQ ID NO: 50466 - DNA, 26 bp, Homo sapiens
atttcccaaaagatattttcaagatg

SEQ ID NO: 50467 - DNA, 26 bp, Homo sapiens
tttcccaaaagatattttcaagatga

SEQ ID NO: 50468 - DNA, 26 bp, Homo sapiens
ttcccaaaagatattttcaagatgaa

SEQ ID NO: 50469 - DNA, 26 bp, Homo sapiens
tcccaaaagatattttcaagatgaaa

SEQ ID NO: 50470 - DNA, 26 bp, Homo sapiens
cccaaaagatattttcaagatgaaac

SEQ ID NO: 50471 - DNA, 26 bp, Homo sapiens
ccaaaagatattttcaagatgaaaca

SEQ ID NO: 50472 - DNA, 26 bp, Homo sapiens
caaaagatattttcaagatgaaacat

SEQ ID NO: 50473 - DNA, 26 bp, Homo sapiens
aaaagatattttcaagatgaaacata

SEQ ID NO: 50474 - DNA, 26 bp, Homo sapiens
aaagatattttcaagatgaaacatac

SEQ ID NO: 50475 - DNA, 26 bp, Homo sapiens
aagatattttcaagatgaaacataca

SEQ ID NO: 50476 - DNA, 26 bp, Homo sapiens
agatattttcaagatgaaacatacaa

SEQ ID NO: 50477 - DNA, 26 bp, Homo sapiens
gatattttcaagatgaaacatacaaa

SEQ ID NO: 50478 - DNA, 26 bp, Homo sapiens
atattttcaagatgaaacatacaaaa

SEQ ID NO: 50479 - DNA, 26 bp, Homo sapiens
tattttcaagatgaaacatacaaaag

SEQ ID NO: 50480 - DNA, 26 bp, Homo sapiens
attttcaagatgaaacatacaaaagt

SEQ ID NO: 50481 - DNA, 26 bp, Homo sapiens
ttttcaagatgaaacatacaaaagta

SEQ ID NO: 50482 - DNA, 26 bp, Homo sapiens
tttcaagatgaaacatacaaaagtat

SEQ ID NO: 50483 - DNA, 26 bp, Homo sapiens
ttcaagatgaaacatacaaaagtatg

SEQ ID NO: 50484 - DNA, 26 bp, Homo sapiens
tcaagatgaaacatacaaaagtatga

SEQ ID NO: 50485 - DNA, 26 bp, Homo sapiens
caagatgaaacatacaaaagtatgag

SEQ ID NO: 50486 - DNA, 26 bp, Homo sapiens
aagatgaaacatacaaaagtatgaga

SEQ ID NO: 50487 - DNA, 26 bp, Homo sapiens
agatgaaacatacaaaagtatgagat

SEQ ID NO: 50488 - DNA, 26 bp, Homo sapiens
gatgaaacatacaaaagtatgagatt

SEQ ID NO: 50489 - DNA, 26 bp, Homo sapiens
atgaaacatacaaaagtatgagatta

SEQ ID NO: 50490 - DNA, 26 bp, Homo sapiens
tgaaacatacaaaagtatgagattag

SEQ ID NO: 50491 - DNA, 26 bp, Homo sapiens
gaaacatacaaaagtatgagattagt

SEQ ID NO: 50492 - DNA, 26 bp, Homo sapiens
aaacatacaaaagtatgagattagtt

SEQ ID NO: 50493 - DNA, 26 bp, Homo sapiens
aacatacaaaagtatgagattagttt

SEQ ID NO: 50494 - DNA, 26 bp, Homo sapiens
acatacaaaagtatgagattagtttg

SEQ ID NO: 50495 - DNA, 26 bp, Homo sapiens
catacaaaagtatgagattagtttgg

SEQ ID NO: 50496 - DNA, 26 bp, Homo sapiens
atacaaaagtatgagattagtttgga

SEQ ID NO: 50497 - DNA, 26 bp, Homo sapiens
tacaaaagtatgagattagtttggaa

SEQ ID NO: 50498 - DNA, 26 bp, Homo sapiens
acaaaagtatgagattagtttggaag

SEQ ID NO: 50499 - DNA, 26 bp, Homo sapiens
caaaagtatgagattagtttggaagg

SEQ ID NO: 50500 - DNA, 26 bp, Homo sapiens
aaaagtatgagattagtttggaagga

SEQ ID NO: 50501 - DNA, 26 bp, Homo sapiens
aaagtatgagattagtttggaaggaa

SEQ ID NO: 50502 - DNA, 26 bp, Homo sapiens
aagtatgagattagtttggaaggaag

SEQ ID NO: 50503 - DNA, 26 bp, Homo sapiens
agtatgagattagtttggaaggaagc

SEQ ID NO: 50504 - DNA, 26 bp, Homo sapiens
gtatgagattagtttggaaggaagct

SEQ ID NO: 50505 - DNA, 26 bp, Homo sapiens
tatgagattagtttggaaggaagctt

SEQ ID NO: 50506 - DNA, 26 bp, Homo sapiens
atgagattagtttggaaggaagcttg

SEQ ID NO: 50507 - DNA, 26 bp, Homo sapiens
tgagattagtttggaaggaagcttgt

SEQ ID NO: 50508 - DNA, 26 bp, Homo sapiens
gagattagtttggaaggaagcttgta

SEQ ID NO: 50509 - DNA, 26 bp, Homo sapiens
agattagtttggaaggaagcttgtaa

SEQ ID NO: 50510 - DNA, 26 bp, Homo sapiens
gattagtttggaaggaagcttgtaaa

SEQ ID NO: 50511 - DNA, 26 bp, Homo sapiens
attagtttggaaggaagcttgtaaat

SEQ ID NO: 50512 - DNA, 26 bp, Homo sapiens
ttagtttggaaggaagcttgtaaatt

SEQ ID NO: 50513 - DNA, 26 bp, Homo sapiens
tagtttggaaggaagcttgtaaatta

SEQ ID NO: 50514 - DNA, 26 bp, Homo sapiens
agtttggaaggaagcttgtaaattat

SEQ ID NO: 50515 - DNA, 26 bp, Homo sapiens
gtttggaaggaagcttgtaaattatt

SEQ ID NO: 50516 - DNA, 26 bp, Homo sapiens
tttggaaggaagcttgtaaattattg

SEQ ID NO: 50517 - DNA, 26 bp, Homo sapiens
ttggaaggaagcttgtaaattattga

SEQ ID NO: 50518 - DNA, 26 bp, Homo sapiens
tggaaggaagcttgtaaattattgaa

SEQ ID NO: 50519 - DNA, 26 bp, Homo sapiens
ggaaggaagcttgtaaattattgaaa

SEQ ID NO: 50520 - DNA, 26 bp, Homo sapiens
gaaggaagcttgtaaattattgaaaa

SEQ ID NO: 50521 - DNA, 26 bp, Homo sapiens
aaggaagcttgtaaattattgaaaat

SEQ ID NO: 50522 - DNA, 26 bp, Homo sapiens
aggaagcttgtaaattattgaaaatt

SEQ ID NO: 50523 - DNA, 26 bp, Homo sapiens
ggaagcttgtaaattattgaaaatta

SEQ ID NO: 50524 - DNA, 26 bp, Homo sapiens
gaagcttgtaaattattgaaaattac

SEQ ID NO: 50525 - DNA, 26 bp, Homo sapiens
aagcttgtaaattattgaaaattacc

SEQ ID NO: 50526 - DNA, 26 bp, Homo sapiens
agcttgtaaattattgaaaattacca

SEQ ID NO: 50527 - DNA, 26 bp, Homo sapiens
gcttgtaaattattgaaaattaccag

SEQ ID NO: 50528 - DNA, 26 bp, Homo sapiens
cttgtaaattattgaaaattaccagc

SEQ ID NO: 50529 - DNA, 26 bp, Homo sapiens
ttgtaaattattgaaaattaccagct

SEQ ID NO: 50530 - DNA, 26 bp, Homo sapiens
tgtaaattattgaaaattaccagcta

SEQ ID NO: 50531 - DNA, 26 bp, Homo sapiens
gtaaattattgaaaattaccagctaa

SEQ ID NO: 50532 - DNA, 26 bp, Homo sapiens
taaattattgaaaattaccagctaac

SEQ ID NO: 50533 - DNA, 26 bp, Homo sapiens
aaattattgaaaattaccagctaacc

SEQ ID NO: 50534 - DNA, 26 bp, Homo sapiens
aattattgaaaattaccagctaacct

SEQ ID NO: 50535 - DNA, 26 bp, Homo sapiens
attattgaaaattaccagctaacctc

SEQ ID NO: 50536 - DNA, 26 bp, Homo sapiens
ttattgaaaattaccagctaacctca

SEQ ID NO: 50537 - DNA, 26 bp, Homo sapiens
tattgaaaattaccagctaacctcaa

SEQ ID NO: 50538 - DNA, 26 bp, Homo sapiens
attgaaaattaccagctaacctcaaa

SEQ ID NO: 50539 - DNA, 26 bp, Homo sapiens
ttgaaaattaccagctaacctcaaaa

SEQ ID NO: 50540 - DNA, 26 bp, Homo sapiens
tgaaaattaccagctaacctcaaaat

SEQ ID NO: 50541 - DNA, 26 bp, Homo sapiens
gaaaattaccagctaacctcaaaata

SEQ ID NO: 50542 - DNA, 26 bp, Homo sapiens
aaaattaccagctaacctcaaaatat

SEQ ID NO: 50543 - DNA, 26 bp, Homo sapiens
aaattaccagctaacctcaaaatatt

SEQ ID NO: 50544 - DNA, 26 bp, Homo sapiens
aattaccagctaacctcaaaatattt

SEQ ID NO: 50545 - DNA, 26 bp, Homo sapiens
attaccagctaacctcaaaatatttt

SEQ ID NO: 50546 - DNA, 26 bp, Homo sapiens
ttaccagctaacctcaaaatattttg

SEQ ID NO: 50547 - DNA, 26 bp, Homo sapiens
taccagctaacctcaaaatattttga

SEQ ID NO: 50548 - DNA, 26 bp, Homo sapiens
accagctaacctcaaaatattttgag

SEQ ID NO: 50549 - DNA, 26 bp, Homo sapiens
ccagctaacctcaaaatattttgagg

SEQ ID NO: 50550 - DNA, 26 bp, Homo sapiens
cagctaacctcaaaatattttgaggt

SEQ ID NO: 50551 - DNA, 26 bp, Homo sapiens
agctaacctcaaaatattttgaggtc

SEQ ID NO: 50552 - DNA, 26 bp, Homo sapiens
gctaacctcaaaatattttgaggtct

SEQ ID NO: 50553 - DNA, 26 bp, Homo sapiens
ctaacctcaaaatattttgaggtctc

SEQ ID NO: 50554 - DNA, 26 bp, Homo sapiens
taacctcaaaatattttgaggtctca

SEQ ID NO: 50555 - DNA, 26 bp, Homo sapiens
aacctcaaaatattttgaggtctcaa

SEQ ID NO: 50556 - DNA, 26 bp, Homo sapiens
acctcaaaatattttgaggtctcaaa

SEQ ID NO: 50557 - DNA, 26 bp, Homo sapiens
cctcaaaatattttgaggtctcaaac

SEQ ID NO: 50558 - DNA, 26 bp, Homo sapiens
ctcaaaatattttgaggtctcaaaca

SEQ ID NO: 50559 - DNA, 26 bp, Homo sapiens
tcaaaatattttgaggtctcaaacaa

SEQ ID NO: 50560 - DNA, 26 bp, Homo sapiens
caaaatattttgaggtctcaaacaaa

SEQ ID NO: 50561 - DNA, 26 bp, Homo sapiens
aaaatattttgaggtctcaaacaaaa

SEQ ID NO: 50562 - DNA, 26 bp, Homo sapiens
aaatattttgaggtctcaaacaaaat

SEQ ID NO: 50563 - DNA, 26 bp, Homo sapiens
aatattttgaggtctcaaacaaaatc

SEQ ID NO: 50564 - DNA, 26 bp, Homo sapiens
atattttgaggtctcaaacaaaatct

SEQ ID NO: 50565 - DNA, 26 bp, Homo sapiens
tattttgaggtctcaaacaaaatcta

SEQ ID NO: 50566 - DNA, 26 bp, Homo sapiens
attttgaggtctcaaacaaaatctat

SEQ ID NO: 50567 - DNA, 26 bp, Homo sapiens
ttttgaggtctcaaacaaaatctatt

SEQ ID NO: 50568 - DNA, 26 bp, Homo sapiens
tttgaggtctcaaacaaaatctattt

SEQ ID NO: 50569 - DNA, 26 bp, Homo sapiens
ttgaggtctcaaacaaaatctatttt

SEQ ID NO: 50570 - DNA, 26 bp, Homo sapiens
tgaggtctcaaacaaaatctatttta

SEQ ID NO: 50571 - DNA, 26 bp, Homo sapiens
gaggtctcaaacaaaatctattttat

SEQ ID NO: 50572 - DNA, 26 bp, Homo sapiens
aggtctcaaacaaaatctattttatt

SEQ ID NO: 50573 - DNA, 26 bp, Homo sapiens
ggtctcaaacaaaatctattttattc

SEQ ID NO: 50574 - DNA, 26 bp, Homo sapiens
gtctcaaacaaaatctattttattca

SEQ ID NO: 50575 - DNA, 26 bp, Homo sapiens
tctcaaacaaaatctattttattcac

SEQ ID NO: 50576 - DNA, 26 bp, Homo sapiens
ctcaaacaaaatctattttattcacc

SEQ ID NO: 50577 - DNA, 26 bp, Homo sapiens
tcaaacaaaatctattttattcacct

SEQ ID NO: 50578 - DNA, 26 bp, Homo sapiens
caaacaaaatctattttattcaccta

SEQ ID NO: 50579 - DNA, 26 bp, Homo sapiens
aaacaaaatctattttattcacctaa

SEQ ID NO: 50580 - DNA, 26 bp, Homo sapiens
aacaaaatctattttattcacctaag

SEQ ID NO: 50581 - DNA, 26 bp, Homo sapiens
acaaaatctattttattcacctaaga

SEQ ID NO: 50582 - DNA, 26 bp, Homo sapiens
caaaatctattttattcacctaagag

SEQ ID NO: 50583 - DNA, 26 bp, Homo sapiens
aaaatctattttattcacctaagagc

SEQ ID NO: 50584 - DNA, 26 bp, Homo sapiens
aaatctattttattcacctaagagct

SEQ ID NO: 50585 - DNA, 26 bp, Homo sapiens
aatctattttattcacctaagagcta

SEQ ID NO: 50586 - DNA, 26 bp, Homo sapiens
atctattttattcacctaagagctag

SEQ ID NO: 50587 - DNA, 26 bp, Homo sapiens
tctattttattcacctaagagctaga

SEQ ID NO: 50588 - DNA, 26 bp, Homo sapiens
ctattttattcacctaagagctagac

SEQ ID NO: 50589 - DNA, 26 bp, Homo sapiens
tattttattcacctaagagctagacc

SEQ ID NO: 50590 - DNA, 26 bp, Homo sapiens
attttattcacctaagagctagacca

SEQ ID NO: 50591 - DNA, 26 bp, Homo sapiens
ttttattcacctaagagctagaccag

SEQ ID NO: 50592 - DNA, 26 bp, Homo sapiens
tttattcacctaagagctagaccagg

SEQ ID NO: 50593 - DNA, 26 bp, Homo sapiens
ttattcacctaagagctagaccagga

SEQ ID NO: 50594 - DNA, 26 bp, Homo sapiens
tattcacctaagagctagaccaggag

SEQ ID NO: 50595 - DNA, 26 bp, Homo sapiens
attcacctaagagctagaccaggaga

SEQ ID NO: 50596 - DNA, 26 bp, Homo sapiens
ttcacctaagagctagaccaggagat

SEQ ID NO: 50597 - DNA, 26 bp, Homo sapiens
tcacctaagagctagaccaggagatt

SEQ ID NO: 50598 - DNA, 26 bp, Homo sapiens
cacctaagagctagaccaggagattt

SEQ ID NO: 50599 - DNA, 26 bp, Homo sapiens
acctaagagctagaccaggagattta

SEQ ID NO: 50600 - DNA, 26 bp, Homo sapiens
cctaagagctagaccaggagatttat

SEQ ID NO: 50601 - DNA, 26 bp, Homo sapiens
ctaagagctagaccaggagatttatt

SEQ ID NO: 50602 - DNA, 26 bp, Homo sapiens
taagagctagaccaggagatttattt

SEQ ID NO: 50603 - DNA, 26 bp, Homo sapiens
aagagctagaccaggagatttatttt

SEQ ID NO: 50604 - DNA, 26 bp, Homo sapiens
agagctagaccaggagatttattttg

SEQ ID NO: 50605 - DNA, 26 bp, Homo sapiens
gagctagaccaggagatttattttga

SEQ ID NO: 50606 - DNA, 26 bp, Homo sapiens
agctagaccaggagatttattttgaa

SEQ ID NO: 50607 - DNA, 26 bp, Homo sapiens
gctagaccaggagatttattttgaaa

SEQ ID NO: 50608 - DNA, 26 bp, Homo sapiens
ctagaccaggagatttattttgaaac

SEQ ID NO: 50609 - DNA, 26 bp, Homo sapiens
tagaccaggagatttattttgaaact

SEQ ID NO: 50610 - DNA, 26 bp, Homo sapiens
agaccaggagatttattttgaaactc

SEQ ID NO: 50611 - DNA, 26 bp, Homo sapiens
gaccaggagatttattttgaaactct

SEQ ID NO: 50612 - DNA, 26 bp, Homo sapiens
accaggagatttattttgaaactctc

SEQ ID NO: 50613 - DNA, 26 bp, Homo sapiens
ccaggagatttattttgaaactctct

SEQ ID NO: 50614 - DNA, 26 bp, Homo sapiens
caggagatttattttgaaactctctt

SEQ ID NO: 50615 - DNA, 26 bp, Homo sapiens
aggagatttattttgaaactctcttt

SEQ ID NO: 50616 - DNA, 26 bp, Homo sapiens
ggagatttattttgaaactctcttta

SEQ ID NO: 50617 - DNA, 26 bp, Homo sapiens
gagatttattttgaaactctctttaa

SEQ ID NO: 50618 - DNA, 26 bp, Homo sapiens
agatttattttgaaactctctttaaa

SEQ ID NO: 50619 - DNA, 26 bp, Homo sapiens
gatttattttgaaactctctttaaat

SEQ ID NO: 50620 - DNA, 26 bp, Homo sapiens
atttattttgaaactctctttaaatc

SEQ ID NO: 50621 - DNA, 26 bp, Homo sapiens
tttattttgaaactctctttaaatct

SEQ ID NO: 50622 - DNA, 26 bp, Homo sapiens
ttattttgaaactctctttaaatcta

SEQ ID NO: 50623 - DNA, 26 bp, Homo sapiens
tattttgaaactctctttaaatctac

SEQ ID NO: 50624 - DNA, 26 bp, Homo sapiens
attttgaaactctctttaaatctact

SEQ ID NO: 50625 - DNA, 26 bp, Homo sapiens
ttttgaaactctctttaaatctactt

SEQ ID NO: 50626 - DNA, 26 bp, Homo sapiens
tttgaaactctctttaaatctactta

SEQ ID NO: 50627 - DNA, 26 bp, Homo sapiens
ttgaaactctctttaaatctacttaa

SEQ ID NO: 50628 - DNA, 26 bp, Homo sapiens
tgaaactctctttaaatctacttaaa

SEQ ID NO: 50629 - DNA, 26 bp, Homo sapiens
gaaactctctttaaatctacttaaat

SEQ ID NO: 50630 - DNA, 26 bp, Homo sapiens
aaactctctttaaatctacttaaata

SEQ ID NO: 50631 - DNA, 26 bp, Homo sapiens
aactctctttaaatctacttaaatag

SEQ ID NO: 50632 - DNA, 26 bp, Homo sapiens
actctctttaaatctacttaaataga

SEQ ID NO: 50633 - DNA, 26 bp, Homo sapiens
ctctctttaaatctacttaaatagat

SEQ ID NO: 50634 - DNA, 26 bp, Homo sapiens
tctctttaaatctacttaaatagatt

SEQ ID NO: 50635 - DNA, 26 bp, Homo sapiens
ctctttaaatctacttaaatagatta

SEQ ID NO: 50636 - DNA, 26 bp, Homo sapiens
tctttaaatctacttaaatagattat

SEQ ID NO: 50637 - DNA, 26 bp, Homo sapiens
ctttaaatctacttaaatagattatg

SEQ ID NO: 50638 - DNA, 26 bp, Homo sapiens
tttaaatctacttaaatagattatgt

SEQ ID NO: 50639 - DNA, 26 bp, Homo sapiens
ttaaatctacttaaatagattatgtg

SEQ ID NO: 50640 - DNA, 26 bp, Homo sapiens
taaatctacttaaatagattatgtgc

SEQ ID NO: 50641 - DNA, 26 bp, Homo sapiens
aaatctacttaaatagattatgtgct

SEQ ID NO: 50642 - DNA, 26 bp, Homo sapiens
aatctacttaaatagattatgtgcta

SEQ ID NO: 50643 - DNA, 26 bp, Homo sapiens
atctacttaaatagattatgtgctac

SEQ ID NO: 50644 - DNA, 26 bp, Homo sapiens
tctacttaaatagattatgtgctacc

SEQ ID NO: 50645 - DNA, 26 bp, Homo sapiens
ctacttaaatagattatgtgctacct

SEQ ID NO: 50646 - DNA, 26 bp, Homo sapiens
tacttaaatagattatgtgctacctg

SEQ ID NO: 50647 - DNA, 26 bp, Homo sapiens
acttaaatagattatgtgctacctgc

SEQ ID NO: 50648 - DNA, 26 bp, Homo sapiens
cttaaatagattatgtgctacctgct

SEQ ID NO: 50649 - DNA, 26 bp, Homo sapiens
ttaaatagattatgtgctacctgctc

SEQ ID NO: 50650 - DNA, 26 bp, Homo sapiens
taaatagattatgtgctacctgctca

SEQ ID NO: 50651 - DNA, 26 bp, Homo sapiens
aaatagattatgtgctacctgctcat

SEQ ID NO: 50652 - DNA, 26 bp, Homo sapiens
aatagattatgtgctacctgctcatt

SEQ ID NO: 50653 - DNA, 26 bp, Homo sapiens
atagattatgtgctacctgctcattt

SEQ ID NO: 50654 - DNA, 26 bp, Homo sapiens
tagattatgtgctacctgctcatttt

SEQ ID NO: 50655 - DNA, 26 bp, Homo sapiens
agattatgtgctacctgctcattttc

SEQ ID NO: 50656 - DNA, 26 bp, Homo sapiens
gattatgtgctacctgctcattttct

SEQ ID NO: 50657 - DNA, 26 bp, Homo sapiens
attatgtgctacctgctcattttctt

SEQ ID NO: 50658 - DNA, 26 bp, Homo sapiens
ttatgtgctacctgctcattttcttc

SEQ ID NO: 50659 - DNA, 26 bp, Homo sapiens
tatgtgctacctgctcattttcttcc

SEQ ID NO: 50660 - DNA, 26 bp, Homo sapiens
atgtgctacctgctcattttcttcct

SEQ ID NO: 50661 - DNA, 26 bp, Homo sapiens
tgtgctacctgctcattttcttcctt

SEQ ID NO: 50662 - DNA, 26 bp, Homo sapiens
gtgctacctgctcattttcttccttt

SEQ ID NO: 50663 - DNA, 26 bp, Homo sapiens
tgctacctgctcattttcttccttta

SEQ ID NO: 50664 - DNA, 26 bp, Homo sapiens
gctacctgctcattttcttcctttag

SEQ ID NO: 50665 - DNA, 26 bp, Homo sapiens
ctacctgctcattttcttcctttagg

SEQ ID NO: 50666 - DNA, 26 bp, Homo sapiens
tacctgctcattttcttcctttagga

SEQ ID NO: 50667 - DNA, 26 bp, Homo sapiens
acctgctcattttcttcctttaggaa

SEQ ID NO: 50668 - DNA, 26 bp, Homo sapiens
cctgctcattttcttcctttaggaaa

SEQ ID NO: 50669 - DNA, 26 bp, Homo sapiens
ctgctcattttcttcctttaggaaac

SEQ ID NO: 50670 - DNA, 26 bp, Homo sapiens
tgctcattttcttcctttaggaaacc

SEQ ID NO: 50671 - DNA, 26 bp, Homo sapiens
gctcattttcttcctttaggaaacca

SEQ ID NO: 50672 - DNA, 26 bp, Homo sapiens
ctcattttcttcctttaggaaaccaa

SEQ ID NO: 50673 - DNA, 26 bp, Homo sapiens
tcattttcttcctttaggaaaccaaa

SEQ ID NO: 50674 - DNA, 26 bp, Homo sapiens
cattttcttcctttaggaaaccaaag

SEQ ID NO: 50675 - DNA, 26 bp, Homo sapiens
attttcttcctttaggaaaccaaagt

SEQ ID NO: 50676 - DNA, 26 bp, Homo sapiens
ttttcttcctttaggaaaccaaagtt

SEQ ID NO: 50677 - DNA, 26 bp, Homo sapiens
tttcttcctttaggaaaccaaagtta

SEQ ID NO: 50678 - DNA, 26 bp, Homo sapiens
ttcttcctttaggaaaccaaagttaa

SEQ ID NO: 50679 - DNA, 26 bp, Homo sapiens
tcttcctttaggaaaccaaagttaag

SEQ ID NO: 50680 - DNA, 26 bp, Homo sapiens
cttcctttaggaaaccaaagttaaga

SEQ ID NO: 50681 - DNA, 26 bp, Homo sapiens
ttcctttaggaaaccaaagttaagaa

SEQ ID NO: 50682 - DNA, 26 bp, Homo sapiens
tcctttaggaaaccaaagttaagaat

SEQ ID NO: 50683 - DNA, 26 bp, Homo sapiens
cctttaggaaaccaaagttaagaata

SEQ ID NO: 50684 - DNA, 26 bp, Homo sapiens
ctttaggaaaccaaagttaagaatag

SEQ ID NO: 50685 - DNA, 26 bp, Homo sapiens
tttaggaaaccaaagttaagaatagg

SEQ ID NO: 50686 - DNA, 26 bp, Homo sapiens
ttaggaaaccaaagttaagaataggt

SEQ ID NO: 50687 - DNA, 26 bp, Homo sapiens
taggaaaccaaagttaagaataggta

SEQ ID NO: 50688 - DNA, 26 bp, Homo sapiens
aggaaaccaaagttaagaataggtaa

SEQ ID NO: 50689 - DNA, 26 bp, Homo sapiens
ggaaaccaaagttaagaataggtaag

SEQ ID NO: 50690 - DNA, 26 bp, Homo sapiens
gaaaccaaagttaagaataggtaaga

SEQ ID NO: 50691 - DNA, 26 bp, Homo sapiens
aaaccaaagttaagaataggtaagaa

SEQ ID NO: 50692 - DNA, 26 bp, Homo sapiens
aaccaaagttaagaataggtaagaaa

SEQ ID NO: 50693 - DNA, 26 bp, Homo sapiens
accaaagttaagaataggtaagaaaa

SEQ ID NO: 50694 - DNA, 26 bp, Homo sapiens
ccaaagttaagaataggtaagaaaat

SEQ ID NO: 50695 - DNA, 26 bp, Homo sapiens
caaagttaagaataggtaagaaaatg

SEQ ID NO: 50696 - DNA, 26 bp, Homo sapiens
aaagttaagaataggtaagaaaatga

SEQ ID NO: 50697 - DNA, 26 bp, Homo sapiens
aagttaagaataggtaagaaaatgaa

SEQ ID NO: 50698 - DNA, 26 bp, Homo sapiens
agttaagaataggtaagaaaatgaaa

SEQ ID NO: 50699 - DNA, 26 bp, Homo sapiens
gttaagaataggtaagaaaatgaaaa

SEQ ID NO: 50700 - DNA, 26 bp, Homo sapiens
ttaagaataggtaagaaaatgaaaat

SEQ ID NO: 50701 - DNA, 26 bp, Homo sapiens
taagaataggtaagaaaatgaaaatg

SEQ ID NO: 50702 - DNA, 26 bp, Homo sapiens
aagaataggtaagaaaatgaaaatga

SEQ ID NO: 50703 - DNA, 26 bp, Homo sapiens
agaataggtaagaaaatgaaaatgat

SEQ ID NO: 50704 - DNA, 26 bp, Homo sapiens
gaataggtaagaaaatgaaaatgatg

SEQ ID NO: 50705 - DNA, 26 bp, Homo sapiens
aataggtaagaaaatgaaaatgatgt

SEQ ID NO: 50706 - DNA, 26 bp, Homo sapiens
ataggtaagaaaatgaaaatgatgtt

SEQ ID NO: 50707 - DNA, 26 bp, Homo sapiens
taggtaagaaaatgaaaatgatgtta

SEQ ID NO: 50708 - DNA, 26 bp, Homo sapiens
aggtaagaaaatgaaaatgatgttat

SEQ ID NO: 50709 - DNA, 26 bp, Homo sapiens
ggtaagaaaatgaaaatgatgttatt

SEQ ID NO: 50710 - DNA, 26 bp, Homo sapiens
gtaagaaaatgaaaatgatgttatta

SEQ ID NO: 50711 - DNA, 26 bp, Homo sapiens
taagaaaatgaaaatgatgttattat

SEQ ID NO: 50712 - DNA, 26 bp, Homo sapiens
aagaaaatgaaaatgatgttattatt

SEQ ID NO: 50713 - DNA, 26 bp, Homo sapiens
agaaaatgaaaatgatgttattattt

SEQ ID NO: 50714 - DNA, 26 bp, Homo sapiens
gaaaatgaaaatgatgttattatttt

SEQ ID NO: 50715 - DNA, 26 bp, Homo sapiens
aaaatgaaaatgatgttattatttta

SEQ ID NO: 50716 - DNA, 26 bp, Homo sapiens
aaatgaaaatgatgttattattttac

SEQ ID NO: 50717 - DNA, 26 bp, Homo sapiens
aatgaaaatgatgttattattttact

SEQ ID NO: 50718 - DNA, 26 bp, Homo sapiens
atgaaaatgatgttattattttacta

SEQ ID NO: 50719 - DNA, 26 bp, Homo sapiens
tgaaaatgatgttattattttactaa

SEQ ID NO: 50720 - DNA, 26 bp, Homo sapiens
gaaaatgatgttattattttactaaa

SEQ ID NO: 50721 - DNA, 26 bp, Homo sapiens
aaaatgatgttattattttactaaat

SEQ ID NO: 50722 - DNA, 26 bp, Homo sapiens
aaatgatgttattattttactaaatt

SEQ ID NO: 50723 - DNA, 26 bp, Homo sapiens
aatgatgttattattttactaaatta

SEQ ID NO: 50724 - DNA, 26 bp, Homo sapiens
atgatgttattattttactaaattat

SEQ ID NO: 50725 - DNA, 26 bp, Homo sapiens
tgatgttattattttactaaattatc

SEQ ID NO: 50726 - DNA, 26 bp, Homo sapiens
gatgttattattttactaaattatcc

SEQ ID NO: 50727 - DNA, 26 bp, Homo sapiens
atgttattattttactaaattatcca

SEQ ID NO: 50728 - DNA, 26 bp, Homo sapiens
tgttattattttactaaattatccaa

SEQ ID NO: 50729 - DNA, 26 bp, Homo sapiens
gttattattttactaaattatccaac

SEQ ID NO: 50730 - DNA, 26 bp, Homo sapiens
ttattattttactaaattatccaact

SEQ ID NO: 50731 - DNA, 26 bp, Homo sapiens
tattattttactaaattatccaacta

SEQ ID NO: 50732 - DNA, 26 bp, Homo sapiens
attattttactaaattatccaactac

SEQ ID NO: 50733 - DNA, 26 bp, Homo sapiens
ttattttactaaattatccaactact

SEQ ID NO: 50734 - DNA, 26 bp, Homo sapiens
tattttactaaattatccaactacta

SEQ ID NO: 50735 - DNA, 26 bp, Homo sapiens
attttactaaattatccaactactat

SEQ ID NO: 50736 - DNA, 26 bp, Homo sapiens
ttttactaaattatccaactactatt

SEQ ID NO: 50737 - DNA, 26 bp, Homo sapiens
tttactaaattatccaactactattt

SEQ ID NO: 50738 - DNA, 26 bp, Homo sapiens
ttactaaattatccaactactatttt

SEQ ID NO: 50739 - DNA, 26 bp, Homo sapiens
tactaaattatccaactactattttt

SEQ ID NO: 50740 - DNA, 26 bp, Homo sapiens
actaaattatccaactactatttttc

SEQ ID NO: 50741 - DNA, 26 bp, Homo sapiens
ctaaattatccaactactatttttct

SEQ ID NO: 50742 - DNA, 26 bp, Homo sapiens
taaattatccaactactatttttctt

SEQ ID NO: 50743 - DNA, 26 bp, Homo sapiens
aaattatccaactactatttttcttc

SEQ ID NO: 50744 - DNA, 26 bp, Homo sapiens
aattatccaactactatttttcttct

SEQ ID NO: 50745 - DNA, 26 bp, Homo sapiens
attatccaactactatttttcttctt

SEQ ID NO: 50746 - DNA, 26 bp, Homo sapiens
ttatccaactactatttttcttcttg

SEQ ID NO: 50747 - DNA, 26 bp, Homo sapiens
tatccaactactatttttcttcttgg

SEQ ID NO: 50748 - DNA, 26 bp, Homo sapiens
atccaactactatttttcttcttgga

SEQ ID NO: 50749 - DNA, 26 bp, Homo sapiens
tccaactactatttttcttcttggaa

SEQ ID NO: 50750 - DNA, 26 bp, Homo sapiens
ccaactactatttttcttcttggaaa

SEQ ID NO: 50751 - DNA, 26 bp, Homo sapiens
caactactatttttcttcttggaaac

SEQ ID NO: 50752 - DNA, 26 bp, Homo sapiens
aactactatttttcttcttggaaact

SEQ ID NO: 50753 - DNA, 26 bp, Homo sapiens
actactatttttcttcttggaaactg

SEQ ID NO: 50754 - DNA, 26 bp, Homo sapiens
ctactatttttcttcttggaaactgt

SEQ ID NO: 50755 - DNA, 26 bp, Homo sapiens
tactatttttcttcttggaaactgta

SEQ ID NO: 50756 - DNA, 26 bp, Homo sapiens
actatttttcttcttggaaactgtag

SEQ ID NO: 50757 - DNA, 26 bp, Homo sapiens
ctatttttcttcttggaaactgtagc

SEQ ID NO: 50758 - DNA, 26 bp, Homo sapiens
tatttttcttcttggaaactgtagct

SEQ ID NO: 50759 - DNA, 26 bp, Homo sapiens
atttttcttcttggaaactgtagcta

SEQ ID NO: 50760 - DNA, 26 bp, Homo sapiens
tttttcttcttggaaactgtagctac

SEQ ID NO: 50761 - DNA, 26 bp, Homo sapiens
ttttcttcttggaaactgtagctaca

SEQ ID NO: 50762 - DNA, 26 bp, Homo sapiens
tttcttcttggaaactgtagctacaa

SEQ ID NO: 50763 - DNA, 26 bp, Homo sapiens
ttcttcttggaaactgtagctacaaa

SEQ ID NO: 50764 - DNA, 26 bp, Homo sapiens
tcttcttggaaactgtagctacaaat

SEQ ID NO: 50765 - DNA, 26 bp, Homo sapiens
cttcttggaaactgtagctacaaatt

SEQ ID NO: 50766 - DNA, 26 bp, Homo sapiens
ttcttggaaactgtagctacaaattc

SEQ ID NO: 50767 - DNA, 26 bp, Homo sapiens
tcttggaaactgtagctacaaattca

SEQ ID NO: 50768 - DNA, 26 bp, Homo sapiens
cttggaaactgtagctacaaattcaa

SEQ ID NO: 50769 - DNA, 26 bp, Homo sapiens
ttggaaactgtagctacaaattcaaa

SEQ ID NO: 50770 - DNA, 26 bp, Homo sapiens
tggaaactgtagctacaaattcaaac

SEQ ID NO: 50771 - DNA, 26 bp, Homo sapiens
ggaaactgtagctacaaattcaaact

SEQ ID NO: 50772 - DNA, 26 bp, Homo sapiens
gaaactgtagctacaaattcaaactt

SEQ ID NO: 50773 - DNA, 26 bp, Homo sapiens
aaactgtagctacaaattcaaacttc

SEQ ID NO: 50774 - DNA, 26 bp, Homo sapiens
aactgtagctacaaattcaaacttct

SEQ ID NO: 50775 - DNA, 26 bp, Homo sapiens
actgtagctacaaattcaaacttcta

SEQ ID NO: 50776 - DNA, 26 bp, Homo sapiens
ctgtagctacaaattcaaacttctag

SEQ ID NO: 50777 - DNA, 26 bp, Homo sapiens
tgtagctacaaattcaaacttctaga

SEQ ID NO: 50778 - DNA, 26 bp, Homo sapiens
gtagctacaaattcaaacttctagaa

SEQ ID NO: 50779 - DNA, 26 bp, Homo sapiens
tagctacaaattcaaacttctagaag

SEQ ID NO: 50780 - DNA, 26 bp, Homo sapiens
agctacaaattcaaacttctagaaga

SEQ ID NO: 50781 - DNA, 26 bp, Homo sapiens
gctacaaattcaaacttctagaagaa

SEQ ID NO: 50782 - DNA, 26 bp, Homo sapiens
ctacaaattcaaacttctagaagaaa

SEQ ID NO: 50783 - DNA, 26 bp, Homo sapiens
tacaaattcaaacttctagaagaaac

SEQ ID NO: 50784 - DNA, 26 bp, Homo sapiens
acaaattcaaacttctagaagaaacc

SEQ ID NO: 50785 - DNA, 26 bp, Homo sapiens
caaattcaaacttctagaagaaacca

SEQ ID NO: 50786 - DNA, 26 bp, Homo sapiens
aaattcaaacttctagaagaaaccac

SEQ ID NO: 50787 - DNA, 26 bp, Homo sapiens
aattcaaacttctagaagaaaccact

SEQ ID NO: 50788 - DNA, 26 bp, Homo sapiens
attcaaacttctagaagaaaccactc

SEQ ID NO: 50789 - DNA, 26 bp, Homo sapiens
ttcaaacttctagaagaaaccactct

SEQ ID NO: 50790 - DNA, 26 bp, Homo sapiens
tcaaacttctagaagaaaccactctt

SEQ ID NO: 50791 - DNA, 26 bp, Homo sapiens
caaacttctagaagaaaccactcttt

SEQ ID NO: 50792 - DNA, 26 bp, Homo sapiens
aaacttctagaagaaaccactctttg

SEQ ID NO: 50793 - DNA, 26 bp, Homo sapiens
aacttctagaagaaaccactctttgg

SEQ ID NO: 50794 - DNA, 26 bp, Homo sapiens
acttctagaagaaaccactctttggg

SEQ ID NO: 50795 - DNA, 26 bp, Homo sapiens
cttctagaagaaaccactctttgggg

SEQ ID NO: 50796 - DNA, 26 bp, Homo sapiens
ttctagaagaaaccactctttgggga

SEQ ID NO: 50797 - DNA, 26 bp, Homo sapiens
tctagaagaaaccactctttggggag

SEQ ID NO: 50798 - DNA, 26 bp, Homo sapiens
ctagaagaaaccactctttggggagt

SEQ ID NO: 50799 - DNA, 26 bp, Homo sapiens
tagaagaaaccactctttggggagtc

SEQ ID NO: 50800 - DNA, 26 bp, Homo sapiens
agaagaaaccactctttggggagtcg

SEQ ID NO: 50801 - DNA, 26 bp, Homo sapiens
gaagaaaccactctttggggagtcgg

SEQ ID NO: 50802 - DNA, 26 bp, Homo sapiens
aagaaaccactctttggggagtcggc

SEQ ID NO: 50803 - DNA, 26 bp, Homo sapiens
agaaaccactctttggggagtcggct

SEQ ID NO: 50804 - DNA, 26 bp, Homo sapiens
gaaaccactctttggggagtcggctt

SEQ ID NO: 50805 - DNA, 26 bp, Homo sapiens
aaaccactctttggggagtcggcttt

SEQ ID NO: 50806 - DNA, 26 bp, Homo sapiens
aaccactctttggggagtcggctttc

SEQ ID NO: 50807 - DNA, 26 bp, Homo sapiens
accactctttggggagtcggctttcc

SEQ ID NO: 50808 - DNA, 26 bp, Homo sapiens
ccactctttggggagtcggctttcca

SEQ ID NO: 50809 - DNA, 26 bp, Homo sapiens
cactctttggggagtcggctttccat

SEQ ID NO: 50810 - DNA, 26 bp, Homo sapiens
actctttggggagtcggctttccata

SEQ ID NO: 50811 - DNA, 26 bp, Homo sapiens
ctctttggggagtcggctttccatag

SEQ ID NO: 50812 - DNA, 26 bp, Homo sapiens
tctttggggagtcggctttccatagc

SEQ ID NO: 50813 - DNA, 26 bp, Homo sapiens
ctttggggagtcggctttccatagca

SEQ ID NO: 50814 - DNA, 26 bp, Homo sapiens
tttggggagtcggctttccatagcat

SEQ ID NO: 50815 - DNA, 26 bp, Homo sapiens
ttggggagtcggctttccatagcatt

SEQ ID NO: 50816 - DNA, 26 bp, Homo sapiens
tggggagtcggctttccatagcattt

SEQ ID NO: 50817 - DNA, 26 bp, Homo sapiens
ggggagtcggctttccatagcatttc

SEQ ID NO: 50818 - DNA, 26 bp, Homo sapiens
gggagtcggctttccatagcatttca

SEQ ID NO: 50819 - DNA, 26 bp, Homo sapiens
ggagtcggctttccatagcatttcag

SEQ ID NO: 50820 - DNA, 26 bp, Homo sapiens
gagtcggctttccatagcatttcaga

SEQ ID NO: 50821 - DNA, 26 bp, Homo sapiens
agtcggctttccatagcatttcagag

SEQ ID NO: 50822 - DNA, 26 bp, Homo sapiens
gtcggctttccatagcatttcagagc

SEQ ID NO: 50823 - DNA, 26 bp, Homo sapiens
tcggctttccatagcatttcagagca

SEQ ID NO: 50824 - DNA, 26 bp, Homo sapiens
cggctttccatagcatttcagagcag

SEQ ID NO: 50825 - DNA, 26 bp, Homo sapiens
ggctttccatagcatttcagagcagt

SEQ ID NO: 50826 - DNA, 26 bp, Homo sapiens
gctttccatagcatttcagagcagtt

SEQ ID NO: 50827 - DNA, 26 bp, Homo sapiens
ctttccatagcatttcagagcagttt

SEQ ID NO: 50828 - DNA, 26 bp, Homo sapiens
tttccatagcatttcagagcagtttc

SEQ ID NO: 50829 - DNA, 26 bp, Homo sapiens
ttccatagcatttcagagcagtttca

SEQ ID NO: 50830 - DNA, 26 bp, Homo sapiens
tccatagcatttcagagcagtttcac

SEQ ID NO: 50831 - DNA, 26 bp, Homo sapiens
ccatagcatttcagagcagtttcact

SEQ ID NO: 50832 - DNA, 26 bp, Homo sapiens
catagcatttcagagcagtttcacta

SEQ ID NO: 50833 - DNA, 26 bp, Homo sapiens
atagcatttcagagcagtttcactat

SEQ ID NO: 50834 - DNA, 26 bp, Homo sapiens
tagcatttcagagcagtttcactatt

SEQ ID NO: 50835 - DNA, 26 bp, Homo sapiens
agcatttcagagcagtttcactattc

SEQ ID NO: 50836 - DNA, 26 bp, Homo sapiens
gcatttcagagcagtttcactattca

SEQ ID NO: 50837 - DNA, 26 bp, Homo sapiens
catttcagagcagtttcactattcaa

SEQ ID NO: 50838 - DNA, 26 bp, Homo sapiens
atttcagagcagtttcactattcaaa

SEQ ID NO: 50839 - DNA, 26 bp, Homo sapiens
tttcagagcagtttcactattcaaat

SEQ ID NO: 50840 - DNA, 26 bp, Homo sapiens
ttcagagcagtttcactattcaaatt

SEQ ID NO: 50841 - DNA, 26 bp, Homo sapiens
tcagagcagtttcactattcaaattc

SEQ ID NO: 50842 - DNA, 26 bp, Homo sapiens
cagagcagtttcactattcaaattca

SEQ ID NO: 50843 - DNA, 26 bp, Homo sapiens
agagcagtttcactattcaaattcac

SEQ ID NO: 50844 - DNA, 26 bp, Homo sapiens
gagcagtttcactattcaaattcact

SEQ ID NO: 50845 - DNA, 26 bp, Homo sapiens
agcagtttcactattcaaattcacta

SEQ ID NO: 50846 - DNA, 26 bp, Homo sapiens
gcagtttcactattcaaattcactaa

SEQ ID NO: 50847 - DNA, 26 bp, Homo sapiens
cagtttcactattcaaattcactaaa

SEQ ID NO: 50848 - DNA, 26 bp, Homo sapiens
agtttcactattcaaattcactaaag

SEQ ID NO: 50849 - DNA, 26 bp, Homo sapiens
gtttcactattcaaattcactaaagt

SEQ ID NO: 50850 - DNA, 26 bp, Homo sapiens
tttcactattcaaattcactaaagtc

SEQ ID NO: 50851 - DNA, 26 bp, Homo sapiens
ttcactattcaaattcactaaagtca

SEQ ID NO: 50852 - DNA, 26 bp, Homo sapiens
tcactattcaaattcactaaagtcac

SEQ ID NO: 50853 - DNA, 26 bp, Homo sapiens
cactattcaaattcactaaagtcact

SEQ ID NO: 50854 - DNA, 26 bp, Homo sapiens
actattcaaattcactaaagtcactg

SEQ ID NO: 50855 - DNA, 26 bp, Homo sapiens
ctattcaaattcactaaagtcactgt

SEQ ID NO: 50856 - DNA, 26 bp, Homo sapiens
tattcaaattcactaaagtcactgtg

SEQ ID NO: 50857 - DNA, 26 bp, Homo sapiens
attcaaattcactaaagtcactgtgt

SEQ ID NO: 50858 - DNA, 26 bp, Homo sapiens
ttcaaattcactaaagtcactgtgtt

SEQ ID NO: 50859 - DNA, 26 bp, Homo sapiens
tcaaattcactaaagtcactgtgttt

SEQ ID NO: 50860 - DNA, 26 bp, Homo sapiens
caaattcactaaagtcactgtgtttt

SEQ ID NO: 50861 - DNA, 26 bp, Homo sapiens
aaattcactaaagtcactgtgttttc

SEQ ID NO: 50862 - DNA, 26 bp, Homo sapiens
aattcactaaagtcactgtgttttct

SEQ ID NO: 50863 - DNA, 26 bp, Homo sapiens
attcactaaagtcactgtgttttctg

SEQ ID NO: 50864 - DNA, 26 bp, Homo sapiens
ttcactaaagtcactgtgttttctga

SEQ ID NO: 50865 - DNA, 26 bp, Homo sapiens
tcactaaagtcactgtgttttctgaa

SEQ ID NO: 50866 - DNA, 26 bp, Homo sapiens
cactaaagtcactgtgttttctgaag

SEQ ID NO: 50867 - DNA, 26 bp, Homo sapiens
actaaagtcactgtgttttctgaagt

SEQ ID NO: 50868 - DNA, 26 bp, Homo sapiens
ctaaagtcactgtgttttctgaagta

SEQ ID NO: 50869 - DNA, 26 bp, Homo sapiens
taaagtcactgtgttttctgaagtaa

SEQ ID NO: 50870 - DNA, 26 bp, Homo sapiens
aaagtcactgtgttttctgaagtaaa

SEQ ID NO: 50871 - DNA, 26 bp, Homo sapiens
aagtcactgtgttttctgaagtaaag

SEQ ID NO: 50872 - DNA, 26 bp, Homo sapiens
agtcactgtgttttctgaagtaaagg

SEQ ID NO: 50873 - DNA, 26 bp, Homo sapiens
gtcactgtgttttctgaagtaaaggg

SEQ ID NO: 50874 - DNA, 26 bp, Homo sapiens
tcactgtgttttctgaagtaaagggg

SEQ ID NO: 50875 - DNA, 26 bp, Homo sapiens
cactgtgttttctgaagtaaaggggg

SEQ ID NO: 50876 - DNA, 26 bp, Homo sapiens
actgtgttttctgaagtaaagggggc

SEQ ID NO: 50877 - DNA, 26 bp, Homo sapiens
ctgtgttttctgaagtaaagggggca

SEQ ID NO: 50878 - DNA, 26 bp, Homo sapiens
tgtgttttctgaagtaaagggggcag

SEQ ID NO: 50879 - DNA, 26 bp, Homo sapiens
gtgttttctgaagtaaagggggcaga

SEQ ID NO: 50880 - DNA, 26 bp, Homo sapiens
tgttttctgaagtaaagggggcagag

SEQ ID NO: 50881 - DNA, 26 bp, Homo sapiens
gttttctgaagtaaagggggcagaga

SEQ ID NO: 50882 - DNA, 26 bp, Homo sapiens
ttttctgaagtaaagggggcagagag

SEQ ID NO: 50883 - DNA, 26 bp, Homo sapiens
tttctgaagtaaagggggcagagagc

SEQ ID NO: 50884 - DNA, 26 bp, Homo sapiens
ttctgaagtaaagggggcagagagca

SEQ ID NO: 50885 - DNA, 26 bp, Homo sapiens
tctgaagtaaagggggcagagagcat

SEQ ID NO: 50886 - DNA, 26 bp, Homo sapiens
ctgaagtaaagggggcagagagcatt

SEQ ID NO: 50887 - DNA, 26 bp, Homo sapiens
tgaagtaaagggggcagagagcatta

SEQ ID NO: 50888 - DNA, 26 bp, Homo sapiens
gaagtaaagggggcagagagcattac

SEQ ID NO: 50889 - DNA, 26 bp, Homo sapiens
aagtaaagggggcagagagcattact

SEQ ID NO: 50890 - DNA, 26 bp, Homo sapiens
agtaaagggggcagagagcattacta

SEQ ID NO: 50891 - DNA, 26 bp, Homo sapiens
gtaaagggggcagagagcattactat

SEQ ID NO: 50892 - DNA, 26 bp, Homo sapiens
taaagggggcagagagcattactatc

SEQ ID NO: 50893 - DNA, 26 bp, Homo sapiens
aaagggggcagagagcattactatcc

SEQ ID NO: 50894 - DNA, 26 bp, Homo sapiens
aagggggcagagagcattactatcca

SEQ ID NO: 50895 - DNA, 26 bp, Homo sapiens
agggggcagagagcattactatccat

SEQ ID NO: 50896 - DNA, 26 bp, Homo sapiens
gggggcagagagcattactatccatg

SEQ ID NO: 50897 - DNA, 26 bp, Homo sapiens
ggggcagagagcattactatccatga

SEQ ID NO: 50898 - DNA, 26 bp, Homo sapiens
gggcagagagcattactatccatgaa

SEQ ID NO: 50899 - DNA, 26 bp, Homo sapiens
ggcagagagcattactatccatgaat

SEQ ID NO: 50900 - DNA, 26 bp, Homo sapiens
gcagagagcattactatccatgaatt

SEQ ID NO: 50901 - DNA, 26 bp, Homo sapiens
cagagagcattactatccatgaattc

SEQ ID NO: 50902 - DNA, 26 bp, Homo sapiens
agagagcattactatccatgaattcc

SEQ ID NO: 50903 - DNA, 26 bp, Homo sapiens
gagagcattactatccatgaattcct

SEQ ID NO: 50904 - DNA, 26 bp, Homo sapiens
agagcattactatccatgaattcctg

SEQ ID NO: 50905 - DNA, 26 bp, Homo sapiens
gagcattactatccatgaattcctgc

SEQ ID NO: 50906 - DNA, 26 bp, Homo sapiens
agcattactatccatgaattcctgcc

SEQ ID NO: 50907 - DNA, 26 bp, Homo sapiens
gcattactatccatgaattcctgccc

SEQ ID NO: 50908 - DNA, 26 bp, Homo sapiens
cattactatccatgaattcctgccca

SEQ ID NO: 50909 - DNA, 26 bp, Homo sapiens
attactatccatgaattcctgcccaa

SEQ ID NO: 50910 - DNA, 26 bp, Homo sapiens
ttactatccatgaattcctgcccaat

SEQ ID NO: 50911 - DNA, 26 bp, Homo sapiens
tactatccatgaattcctgcccaata

SEQ ID NO: 50912 - DNA, 26 bp, Homo sapiens
actatccatgaattcctgcccaataa

SEQ ID NO: 50913 - DNA, 26 bp, Homo sapiens
ctatccatgaattcctgcccaataaa

SEQ ID NO: 50914 - DNA, 26 bp, Homo sapiens
tatccatgaattcctgcccaataaat

SEQ ID NO: 50915 - DNA, 26 bp, Homo sapiens
atccatgaattcctgcccaataaatc

SEQ ID NO: 50916 - DNA, 26 bp, Homo sapiens
tccatgaattcctgcccaataaatca

SEQ ID NO: 50917 - DNA, 26 bp, Homo sapiens
ccatgaattcctgcccaataaatcaa

SEQ ID NO: 50918 - DNA, 26 bp, Homo sapiens
catgaattcctgcccaataaatcaaa

SEQ ID NO: 50919 - DNA, 26 bp, Homo sapiens
atgaattcctgcccaataaatcaaat

SEQ ID NO: 50920 - DNA, 26 bp, Homo sapiens
tgaattcctgcccaataaatcaaatt

SEQ ID NO: 50921 - DNA, 26 bp, Homo sapiens
gaattcctgcccaataaatcaaattc

SEQ ID NO: 50922 - DNA, 26 bp, Homo sapiens
aattcctgcccaataaatcaaattct

SEQ ID NO: 50923 - DNA, 26 bp, Homo sapiens
attcctgcccaataaatcaaattcta

SEQ ID NO: 50924 - DNA, 26 bp, Homo sapiens
ttcctgcccaataaatcaaattctat

SEQ ID NO: 50925 - DNA, 26 bp, Homo sapiens
tcctgcccaataaatcaaattctatt

SEQ ID NO: 50926 - DNA, 26 bp, Homo sapiens
cctgcccaataaatcaaattctattt

SEQ ID NO: 50927 - DNA, 26 bp, Homo sapiens
ctgcccaataaatcaaattctatttg

SEQ ID NO: 50928 - DNA, 26 bp, Homo sapiens
tgcccaataaatcaaattctatttgt

SEQ ID NO: 50929 - DNA, 26 bp, Homo sapiens
gcccaataaatcaaattctatttgta

SEQ ID NO: 50930 - DNA, 26 bp, Homo sapiens
cccaataaatcaaattctatttgtaa

SEQ ID NO: 50931 - DNA, 26 bp, Homo sapiens
ccaataaatcaaattctatttgtaag

SEQ ID NO: 50932 - DNA, 26 bp, Homo sapiens
caataaatcaaattctatttgtaagg

SEQ ID NO: 50933 - DNA, 26 bp, Homo sapiens
aataaatcaaattctatttgtaaggc

SEQ ID NO: 50934 - DNA, 26 bp, Homo sapiens
ataaatcaaattctatttgtaaggca

SEQ ID NO: 50935 - DNA, 26 bp, Homo sapiens
taaatcaaattctatttgtaaggcag

SEQ ID NO: 50936 - DNA, 26 bp, Homo sapiens
aaatcaaattctatttgtaaggcaga

SEQ ID NO: 50937 - DNA, 26 bp, Homo sapiens
aatcaaattctatttgtaaggcagaa

SEQ ID NO: 50938 - DNA, 26 bp, Homo sapiens
atcaaattctatttgtaaggcagaaa

SEQ ID NO: 50939 - DNA, 26 bp, Homo sapiens
tcaaattctatttgtaaggcagaaaa

SEQ ID NO: 50940 - DNA, 26 bp, Homo sapiens
caaattctatttgtaaggcagaaaaa

SEQ ID NO: 50941 - DNA, 26 bp, Homo sapiens
aaattctatttgtaaggcagaaaaac

SEQ ID NO: 50942 - DNA, 26 bp, Homo sapiens
aattctatttgtaaggcagaaaaaca

SEQ ID NO: 50943 - DNA, 26 bp, Homo sapiens
attctatttgtaaggcagaaaaacac

SEQ ID NO: 50944 - DNA, 26 bp, Homo sapiens
ttctatttgtaaggcagaaaaacaca

SEQ ID NO: 50945 - DNA, 26 bp, Homo sapiens
tctatttgtaaggcagaaaaacacaa

SEQ ID NO: 50946 - DNA, 26 bp, Homo sapiens
ctatttgtaaggcagaaaaacacaaa

SEQ ID NO: 50947 - DNA, 26 bp, Homo sapiens
tatttgtaaggcagaaaaacacaaat

SEQ ID NO: 50948 - DNA, 26 bp, Homo sapiens
atttgtaaggcagaaaaacacaaatc

SEQ ID NO: 50949 - DNA, 26 bp, Homo sapiens
tttgtaaggcagaaaaacacaaatcc

SEQ ID NO: 50950 - DNA, 26 bp, Homo sapiens
ttgtaaggcagaaaaacacaaatcct

SEQ ID NO: 50951 - DNA, 26 bp, Homo sapiens
tgtaaggcagaaaaacacaaatcctt

SEQ ID NO: 50952 - DNA, 26 bp, Homo sapiens
gtaaggcagaaaaacacaaatccttc

SEQ ID NO: 50953 - DNA, 26 bp, Homo sapiens
taaggcagaaaaacacaaatccttca

SEQ ID NO: 50954 - DNA, 26 bp, Homo sapiens
aaggcagaaaaacacaaatccttcac

SEQ ID NO: 50955 - DNA, 26 bp, Homo sapiens
aggcagaaaaacacaaatccttcaca

SEQ ID NO: 50956 - DNA, 26 bp, Homo sapiens
ggcagaaaaacacaaatccttcacac

SEQ ID NO: 50957 - DNA, 26 bp, Homo sapiens
gcagaaaaacacaaatccttcacaca

SEQ ID NO: 50958 - DNA, 26 bp, Homo sapiens
cagaaaaacacaaatccttcacacag

SEQ ID NO: 50959 - DNA, 26 bp, Homo sapiens
agaaaaacacaaatccttcacacaga

SEQ ID NO: 50960 - DNA, 26 bp, Homo sapiens
gaaaaacacaaatccttcacacagac

SEQ ID NO: 50961 - DNA, 26 bp, Homo sapiens
aaaaacacaaatccttcacacagact

SEQ ID NO: 50962 - DNA, 26 bp, Homo sapiens
aaaacacaaatccttcacacagactt

SEQ ID NO: 50963 - DNA, 26 bp, Homo sapiens
aaacacaaatccttcacacagactta

SEQ ID NO: 50964 - DNA, 26 bp, Homo sapiens
aacacaaatccttcacacagacttaa

SEQ ID NO: 50965 - DNA, 26 bp, Homo sapiens
acacaaatccttcacacagacttaag

SEQ ID NO: 50966 - DNA, 26 bp, Homo sapiens
cacaaatccttcacacagacttaagc

SEQ ID NO: 50967 - DNA, 26 bp, Homo sapiens
acaaatccttcacacagacttaagcg

SEQ ID NO: 50968 - DNA, 26 bp, Homo sapiens
caaatccttcacacagacttaagcgg

SEQ ID NO: 50969 - DNA, 26 bp, Homo sapiens
aaatccttcacacagacttaagcggg

SEQ ID NO: 50970 - DNA, 26 bp, Homo sapiens
aatccttcacacagacttaagcggga

SEQ ID NO: 50971 - DNA, 26 bp, Homo sapiens
atccttcacacagacttaagcgggac

SEQ ID NO: 50972 - DNA, 26 bp, Homo sapiens
tccttcacacagacttaagcgggaca

SEQ ID NO: 50973 - DNA, 26 bp, Homo sapiens
ccttcacacagacttaagcgggacat

SEQ ID NO: 50974 - DNA, 26 bp, Homo sapiens
cttcacacagacttaagcgggacata

SEQ ID NO: 50975 - DNA, 26 bp, Homo sapiens
ttcacacagacttaagcgggacataa

SEQ ID NO: 50976 - DNA, 26 bp, Homo sapiens
tcacacagacttaagcgggacataaa

SEQ ID NO: 50977 - DNA, 26 bp, Homo sapiens
cacacagacttaagcgggacataaag

SEQ ID NO: 50978 - DNA, 26 bp, Homo sapiens
acacagacttaagcgggacataaagc

SEQ ID NO: 50979 - DNA, 26 bp, Homo sapiens
cacagacttaagcgggacataaagca

SEQ ID NO: 50980 - DNA, 26 bp, Homo sapiens
acagacttaagcgggacataaagcaa

SEQ ID NO: 50981 - DNA, 26 bp, Homo sapiens
cagacttaagcgggacataaagcaaa

SEQ ID NO: 50982 - DNA, 26 bp, Homo sapiens
agacttaagcgggacataaagcaaaa

SEQ ID NO: 50983 - DNA, 26 bp, Homo sapiens
gacttaagcgggacataaagcaaaag

SEQ ID NO: 50984 - DNA, 26 bp, Homo sapiens
acttaagcgggacataaagcaaaagg

SEQ ID NO: 50985 - DNA, 26 bp, Homo sapiens
cttaagcgggacataaagcaaaaggc

SEQ ID NO: 50986 - DNA, 26 bp, Homo sapiens
ttaagcgggacataaagcaaaaggca

SEQ ID NO: 50987 - DNA, 26 bp, Homo sapiens
taagcgggacataaagcaaaaggcat

SEQ ID NO: 50988 - DNA, 26 bp, Homo sapiens
aagcgggacataaagcaaaaggcatc

SEQ ID NO: 50989 - DNA, 26 bp, Homo sapiens
agcgggacataaagcaaaaggcatca

SEQ ID NO: 50990 - DNA, 26 bp, Homo sapiens
gcgggacataaagcaaaaggcatcaa

SEQ ID NO: 50991 - DNA, 26 bp, Homo sapiens
cgggacataaagcaaaaggcatcaat

SEQ ID NO: 50992 - DNA, 26 bp, Homo sapiens
gggacataaagcaaaaggcatcaatt

SEQ ID NO: 50993 - DNA, 26 bp, Homo sapiens
ggacataaagcaaaaggcatcaatta

SEQ ID NO: 50994 - DNA, 26 bp, Homo sapiens
gacataaagcaaaaggcatcaattaa

SEQ ID NO: 50995 - DNA, 26 bp, Homo sapiens
acataaagcaaaaggcatcaattaag

SEQ ID NO: 50996 - DNA, 26 bp, Homo sapiens
cataaagcaaaaggcatcaattaagc

SEQ ID NO: 50997 - DNA, 26 bp, Homo sapiens
ataaagcaaaaggcatcaattaagct

SEQ ID NO: 50998 - DNA, 26 bp, Homo sapiens
taaagcaaaaggcatcaattaagctt

SEQ ID NO: 50999 - DNA, 26 bp, Homo sapiens
aaagcaaaaggcatcaattaagcttc

SEQ ID NO: 51000 - DNA, 26 bp, Homo sapiens
aagcaaaaggcatcaattaagcttca

SEQ ID NO: 51001 - DNA, 26 bp, Homo sapiens
agcaaaaggcatcaattaagcttcac

SEQ ID NO: 51002 - DNA, 26 bp, Homo sapiens
gcaaaaggcatcaattaagcttcaca

SEQ ID NO: 51003 - DNA, 26 bp, Homo sapiens
caaaaggcatcaattaagcttcacac

SEQ ID NO: 51004 - DNA, 26 bp, Homo sapiens
aaaaggcatcaattaagcttcacacc

SEQ ID NO: 51005 - DNA, 26 bp, Homo sapiens
aaaggcatcaattaagcttcacacca

SEQ ID NO: 51006 - DNA, 26 bp, Homo sapiens
aaggcatcaattaagcttcacaccaa

SEQ ID NO: 51007 - DNA, 26 bp, Homo sapiens
aggcatcaattaagcttcacaccaac

SEQ ID NO: 51008 - DNA, 26 bp, Homo sapiens
ggcatcaattaagcttcacaccaacg

SEQ ID NO: 51009 - DNA, 26 bp, Homo sapiens
gcatcaattaagcttcacaccaacgt

SEQ ID NO: 51010 - DNA, 26 bp, Homo sapiens
catcaattaagcttcacaccaacgtt

SEQ ID NO: 51011 - DNA, 26 bp, Homo sapiens
atcaattaagcttcacaccaacgtta

SEQ ID NO: 51012 - DNA, 26 bp, Homo sapiens
tcaattaagcttcacaccaacgttac

SEQ ID NO: 51013 - DNA, 26 bp, Homo sapiens
caattaagcttcacaccaacgttact

SEQ ID NO: 51014 - DNA, 26 bp, Homo sapiens
aattaagcttcacaccaacgttactc

SEQ ID NO: 51015 - DNA, 26 bp, Homo sapiens
attaagcttcacaccaacgttactca

SEQ ID NO: 51016 - DNA, 26 bp, Homo sapiens
ttaagcttcacaccaacgttactcaa

SEQ ID NO: 51017 - DNA, 26 bp, Homo sapiens
taagcttcacaccaacgttactcaaa

SEQ ID NO: 51018 - DNA, 26 bp, Homo sapiens
aagcttcacaccaacgttactcaaac

SEQ ID NO: 51019 - DNA, 26 bp, Homo sapiens
agcttcacaccaacgttactcaaaca

SEQ ID NO: 51020 - DNA, 26 bp, Homo sapiens
gcttcacaccaacgttactcaaacag

SEQ ID NO: 51021 - DNA, 26 bp, Homo sapiens
cttcacaccaacgttactcaaacagt

SEQ ID NO: 51022 - DNA, 26 bp, Homo sapiens
ttcacaccaacgttactcaaacagta

SEQ ID NO: 51023 - DNA, 26 bp, Homo sapiens
tcacaccaacgttactcaaacagtaa

SEQ ID NO: 51024 - DNA, 26 bp, Homo sapiens
cacaccaacgttactcaaacagtaaa

SEQ ID NO: 51025 - DNA, 26 bp, Homo sapiens
acaccaacgttactcaaacagtaaag

SEQ ID NO: 51026 - DNA, 26 bp, Homo sapiens
caccaacgttactcaaacagtaaagt

SEQ ID NO: 51027 - DNA, 26 bp, Homo sapiens
accaacgttactcaaacagtaaagtg

SEQ ID NO: 51028 - DNA, 26 bp, Homo sapiens
ccaacgttactcaaacagtaaagtgc

SEQ ID NO: 51029 - DNA, 26 bp, Homo sapiens
caacgttactcaaacagtaaagtgcc

SEQ ID NO: 51030 - DNA, 26 bp, Homo sapiens
aacgttactcaaacagtaaagtgcca

SEQ ID NO: 51031 - DNA, 26 bp, Homo sapiens
acgttactcaaacagtaaagtgccac

SEQ ID NO: 51032 - DNA, 26 bp, Homo sapiens
cgttactcaaacagtaaagtgccaca

SEQ ID NO: 51033 - DNA, 26 bp, Homo sapiens
gttactcaaacagtaaagtgccacaa

SEQ ID NO: 51034 - DNA, 26 bp, Homo sapiens
ttactcaaacagtaaagtgccacaaa

SEQ ID NO: 51035 - DNA, 26 bp, Homo sapiens
tactcaaacagtaaagtgccacaaaa

SEQ ID NO: 51036 - DNA, 26 bp, Homo sapiens
actcaaacagtaaagtgccacaaaat

SEQ ID NO: 51037 - DNA, 26 bp, Homo sapiens
ctcaaacagtaaagtgccacaaaatg

SEQ ID NO: 51038 - DNA, 26 bp, Homo sapiens
tcaaacagtaaagtgccacaaaatgt

SEQ ID NO: 51039 - DNA, 26 bp, Homo sapiens
caaacagtaaagtgccacaaaatgtt

SEQ ID NO: 51040 - DNA, 26 bp, Homo sapiens
aaacagtaaagtgccacaaaatgttt

SEQ ID NO: 51041 - DNA, 26 bp, Homo sapiens
aacagtaaagtgccacaaaatgtttc

SEQ ID NO: 51042 - DNA, 26 bp, Homo sapiens
acagtaaagtgccacaaaatgtttct

SEQ ID NO: 51043 - DNA, 26 bp, Homo sapiens
cagtaaagtgccacaaaatgtttctt

SEQ ID NO: 51044 - DNA, 26 bp, Homo sapiens
agtaaagtgccacaaaatgtttcttg

SEQ ID NO: 51045 - DNA, 26 bp, Homo sapiens
gtaaagtgccacaaaatgtttcttgt

SEQ ID NO: 51046 - DNA, 26 bp, Homo sapiens
taaagtgccacaaaatgtttcttgtg

SEQ ID NO: 51047 - DNA, 26 bp, Homo sapiens
aaagtgccacaaaatgtttcttgtgg

SEQ ID NO: 51048 - DNA, 26 bp, Homo sapiens
aagtgccacaaaatgtttcttgtggt

SEQ ID NO: 51049 - DNA, 26 bp, Homo sapiens
agtgccacaaaatgtttcttgtggta

SEQ ID NO: 51050 - DNA, 26 bp, Homo sapiens
gtgccacaaaatgtttcttgtggtaa

SEQ ID NO: 51051 - DNA, 26 bp, Homo sapiens
tgccacaaaatgtttcttgtggtaat

SEQ ID NO: 51052 - DNA, 26 bp, Homo sapiens
gccacaaaatgtttcttgtggtaata

SEQ ID NO: 51053 - DNA, 26 bp, Homo sapiens
ccacaaaatgtttcttgtggtaatat

SEQ ID NO: 51054 - DNA, 26 bp, Homo sapiens
cacaaaatgtttcttgtggtaatatt

SEQ ID NO: 51055 - DNA, 26 bp, Homo sapiens
acaaaatgtttcttgtggtaatattc

SEQ ID NO: 51056 - DNA, 26 bp, Homo sapiens
caaaatgtttcttgtggtaatattca

SEQ ID NO: 51057 - DNA, 26 bp, Homo sapiens
aaaatgtttcttgtggtaatattcac

SEQ ID NO: 51058 - DNA, 26 bp, Homo sapiens
aaatgtttcttgtggtaatattcaca

SEQ ID NO: 51059 - DNA, 26 bp, Homo sapiens
aatgtttcttgtggtaatattcacaa

SEQ ID NO: 51060 - DNA, 26 bp, Homo sapiens
atgtttcttgtggtaatattcacaag

SEQ ID NO: 51061 - DNA, 26 bp, Homo sapiens
tgtttcttgtggtaatattcacaaga

SEQ ID NO: 51062 - DNA, 26 bp, Homo sapiens
gtttcttgtggtaatattcacaagat

SEQ ID NO: 51063 - DNA, 26 bp, Homo sapiens
tttcttgtggtaatattcacaagatc

SEQ ID NO: 51064 - DNA, 26 bp, Homo sapiens
ttcttgtggtaatattcacaagatca

SEQ ID NO: 51065 - DNA, 26 bp, Homo sapiens
tcttgtggtaatattcacaagatcaa

SEQ ID NO: 51066 - DNA, 26 bp, Homo sapiens
cttgtggtaatattcacaagatcaag

SEQ ID NO: 51067 - DNA, 26 bp, Homo sapiens
ttgtggtaatattcacaagatcaagc

SEQ ID NO: 51068 - DNA, 26 bp, Homo sapiens
tgtggtaatattcacaagatcaagcc

SEQ ID NO: 51069 - DNA, 26 bp, Homo sapiens
gtggtaatattcacaagatcaagcct

SEQ ID NO: 51070 - DNA, 26 bp, Homo sapiens
tggtaatattcacaagatcaagccta

SEQ ID NO: 51071 - DNA, 26 bp, Homo sapiens
ggtaatattcacaagatcaagcctac

SEQ ID NO: 51072 - DNA, 26 bp, Homo sapiens
gtaatattcacaagatcaagcctaca

SEQ ID NO: 51073 - DNA, 26 bp, Homo sapiens
taatattcacaagatcaagcctacac

SEQ ID NO: 51074 - DNA, 26 bp, Homo sapiens
aatattcacaagatcaagcctacact

SEQ ID NO: 51075 - DNA, 26 bp, Homo sapiens
atattcacaagatcaagcctacactc

SEQ ID NO: 51076 - DNA, 26 bp, Homo sapiens
tattcacaagatcaagcctacactca

SEQ ID NO: 51077 - DNA, 26 bp, Homo sapiens
attcacaagatcaagcctacactcag

SEQ ID NO: 51078 - DNA, 26 bp, Homo sapiens
ttcacaagatcaagcctacactcagc

SEQ ID NO: 51079 - DNA, 26 bp, Homo sapiens
tcacaagatcaagcctacactcagct

SEQ ID NO: 51080 - DNA, 26 bp, Homo sapiens
cacaagatcaagcctacactcagctc

SEQ ID NO: 51081 - DNA, 26 bp, Homo sapiens
acaagatcaagcctacactcagctca

SEQ ID NO: 51082 - DNA, 26 bp, Homo sapiens
caagatcaagcctacactcagctcac

SEQ ID NO: 51083 - DNA, 26 bp, Homo sapiens
aagatcaagcctacactcagctcaca

SEQ ID NO: 51084 - DNA, 26 bp, Homo sapiens
agatcaagcctacactcagctcacat

SEQ ID NO: 51085 - DNA, 26 bp, Homo sapiens
gatcaagcctacactcagctcacata

SEQ ID NO: 51086 - DNA, 26 bp, Homo sapiens
atcaagcctacactcagctcacatag

SEQ ID NO: 51087 - DNA, 26 bp, Homo sapiens
tcaagcctacactcagctcacatagt

SEQ ID NO: 51088 - DNA, 26 bp, Homo sapiens
caagcctacactcagctcacatagtg

SEQ ID NO: 51089 - DNA, 26 bp, Homo sapiens
aagcctacactcagctcacatagtga

SEQ ID NO: 51090 - DNA, 26 bp, Homo sapiens
agcctacactcagctcacatagtgaa

SEQ ID NO: 51091 - DNA, 26 bp, Homo sapiens
gcctacactcagctcacatagtgaac

SEQ ID NO: 51092 - DNA, 26 bp, Homo sapiens
cctacactcagctcacatagtgaaca

SEQ ID NO: 51093 - DNA, 26 bp, Homo sapiens
ctacactcagctcacatagtgaacaa

SEQ ID NO: 51094 - DNA, 26 bp, Homo sapiens
tacactcagctcacatagtgaacaat

SEQ ID NO: 51095 - DNA, 26 bp, Homo sapiens
acactcagctcacatagtgaacaatt

SEQ ID NO: 51096 - DNA, 26 bp, Homo sapiens
cactcagctcacatagtgaacaatta

SEQ ID NO: 51097 - DNA, 26 bp, Homo sapiens
actcagctcacatagtgaacaattaa

SEQ ID NO: 51098 - DNA, 26 bp, Homo sapiens
ctcagctcacatagtgaacaattaat

SEQ ID NO: 51099 - DNA, 26 bp, Homo sapiens
tcagctcacatagtgaacaattaatc

SEQ ID NO: 51100 - DNA, 26 bp, Homo sapiens
cagctcacatagtgaacaattaatct

SEQ ID NO: 51101 - DNA, 26 bp, Homo sapiens
agctcacatagtgaacaattaatctt

SEQ ID NO: 51102 - DNA, 26 bp, Homo sapiens
gctcacatagtgaacaattaatcttg

SEQ ID NO: 51103 - DNA, 26 bp, Homo sapiens
ctcacatagtgaacaattaatcttgg

SEQ ID NO: 51104 - DNA, 26 bp, Homo sapiens
tcacatagtgaacaattaatcttgga

SEQ ID NO: 51105 - DNA, 26 bp, Homo sapiens
cacatagtgaacaattaatcttggat

SEQ ID NO: 51106 - DNA, 26 bp, Homo sapiens
acatagtgaacaattaatcttggatg

SEQ ID NO: 51107 - DNA, 26 bp, Homo sapiens
catagtgaacaattaatcttggatgc

SEQ ID NO: 51108 - DNA, 26 bp, Homo sapiens
atagtgaacaattaatcttggatgcc

SEQ ID NO: 51109 - DNA, 26 bp, Homo sapiens
tagtgaacaattaatcttggatgccc

SEQ ID NO: 51110 - DNA, 26 bp, Homo sapiens
agtgaacaattaatcttggatgccct

SEQ ID NO: 51111 - DNA, 26 bp, Homo sapiens
gtgaacaattaatcttggatgccctt

SEQ ID NO: 51112 - DNA, 26 bp, Homo sapiens
tgaacaattaatcttggatgcccttt

SEQ ID NO: 51113 - DNA, 26 bp, Homo sapiens
gaacaattaatcttggatgcccttta

SEQ ID NO: 51114 - DNA, 26 bp, Homo sapiens
aacaattaatcttggatgccctttaa

SEQ ID NO: 51115 - DNA, 26 bp, Homo sapiens
acaattaatcttggatgccctttaag

SEQ ID NO: 51116 - DNA, 26 bp, Homo sapiens
caattaatcttggatgccctttaagt

SEQ ID NO: 51117 - DNA, 26 bp, Homo sapiens
aattaatcttggatgccctttaagtt

SEQ ID NO: 51118 - DNA, 26 bp, Homo sapiens
attaatcttggatgccctttaagttt

SEQ ID NO: 51119 - DNA, 26 bp, Homo sapiens
ttaatcttggatgccctttaagtttc

SEQ ID NO: 51120 - DNA, 26 bp, Homo sapiens
taatcttggatgccctttaagtttcc

SEQ ID NO: 51121 - DNA, 26 bp, Homo sapiens
aatcttggatgccctttaagtttcct

SEQ ID NO: 51122 - DNA, 26 bp, Homo sapiens
atcttggatgccctttaagtttcctt

SEQ ID NO: 51123 - DNA, 26 bp, Homo sapiens
tcttggatgccctttaagtttcctta

SEQ ID NO: 51124 - DNA, 26 bp, Homo sapiens
cttggatgccctttaagtttccttat

SEQ ID NO: 51125 - DNA, 26 bp, Homo sapiens
ttggatgccctttaagtttccttatt

SEQ ID NO: 51126 - DNA, 26 bp, Homo sapiens
tggatgccctttaagtttccttattt

SEQ ID NO: 51127 - DNA, 26 bp, Homo sapiens
ggatgccctttaagtttccttatttt

SEQ ID NO: 51128 - DNA, 26 bp, Homo sapiens
gatgccctttaagtttccttattttt

SEQ ID NO: 51129 - DNA, 26 bp, Homo sapiens
atgccctttaagtttccttatttttt

SEQ ID NO: 51130 - DNA, 26 bp, Homo sapiens
tgccctttaagtttccttattttttt

SEQ ID NO: 51131 - DNA, 26 bp, Homo sapiens
gccctttaagtttccttatttttttc

SEQ ID NO: 51132 - DNA, 26 bp, Homo sapiens
ccctttaagtttccttatttttttca

SEQ ID NO: 51133 - DNA, 26 bp, Homo sapiens
cctttaagtttccttatttttttcaa

SEQ ID NO: 51134 - DNA, 26 bp, Homo sapiens
ctttaagtttccttatttttttcaac

SEQ ID NO: 51135 - DNA, 26 bp, Homo sapiens
tttaagtttccttatttttttcaacc

SEQ ID NO: 51136 - DNA, 26 bp, Homo sapiens
ttaagtttccttatttttttcaacct

SEQ ID NO: 51137 - DNA, 26 bp, Homo sapiens
taagtttccttatttttttcaacctg

SEQ ID NO: 51138 - DNA, 26 bp, Homo sapiens
aagtttccttatttttttcaacctgt

SEQ ID NO: 51139 - DNA, 26 bp, Homo sapiens
agtttccttatttttttcaacctgtt

SEQ ID NO: 51140 - DNA, 26 bp, Homo sapiens
gtttccttatttttttcaacctgttg

SEQ ID NO: 51141 - DNA, 26 bp, Homo sapiens
tttccttatttttttcaacctgttga

SEQ ID NO: 51142 - DNA, 26 bp, Homo sapiens
ttccttatttttttcaacctgttgaa

SEQ ID NO: 51143 - DNA, 26 bp, Homo sapiens
tccttatttttttcaacctgttgaat

SEQ ID NO: 51144 - DNA, 26 bp, Homo sapiens
ccttatttttttcaacctgttgaatg

SEQ ID NO: 51145 - DNA, 26 bp, Homo sapiens
cttatttttttcaacctgttgaatgt

SEQ ID NO: 51146 - DNA, 26 bp, Homo sapiens
ttatttttttcaacctgttgaatgtg

SEQ ID NO: 51147 - DNA, 26 bp, Homo sapiens
tatttttttcaacctgttgaatgtgt

SEQ ID NO: 51148 - DNA, 26 bp, Homo sapiens
atttttttcaacctgttgaatgtgtt

SEQ ID NO: 51149 - DNA, 26 bp, Homo sapiens
tttttttcaacctgttgaatgtgttt

SEQ ID NO: 51150 - DNA, 26 bp, Homo sapiens
ttttttcaacctgttgaatgtgtttt

SEQ ID NO: 51151 - DNA, 26 bp, Homo sapiens
tttttcaacctgttgaatgtgttttc

SEQ ID NO: 51152 - DNA, 26 bp, Homo sapiens
ttttcaacctgttgaatgtgttttca

SEQ ID NO: 51153 - DNA, 26 bp, Homo sapiens
tttcaacctgttgaatgtgttttcat

SEQ ID NO: 51154 - DNA, 26 bp, Homo sapiens
ttcaacctgttgaatgtgttttcatt

SEQ ID NO: 51155 - DNA, 26 bp, Homo sapiens
tcaacctgttgaatgtgttttcattt

SEQ ID NO: 51156 - DNA, 26 bp, Homo sapiens
caacctgttgaatgtgttttcatttt

SEQ ID NO: 51157 - DNA, 26 bp, Homo sapiens
aacctgttgaatgtgttttcatttta

SEQ ID NO: 51158 - DNA, 26 bp, Homo sapiens
acctgttgaatgtgttttcattttat

SEQ ID NO: 51159 - DNA, 26 bp, Homo sapiens
cctgttgaatgtgttttcattttatg

SEQ ID NO: 51160 - DNA, 26 bp, Homo sapiens
ctgttgaatgtgttttcattttatgt

SEQ ID NO: 51161 - DNA, 26 bp, Homo sapiens
tgttgaatgtgttttcattttatgtt

SEQ ID NO: 51162 - DNA, 26 bp, Homo sapiens
gttgaatgtgttttcattttatgtta

SEQ ID NO: 51163 - DNA, 26 bp, Homo sapiens
ttgaatgtgttttcattttatgttac

SEQ ID NO: 51164 - DNA, 26 bp, Homo sapiens
tgaatgtgttttcattttatgttact

SEQ ID NO: 51165 - DNA, 26 bp, Homo sapiens
gaatgtgttttcattttatgttactc

SEQ ID NO: 51166 - DNA, 26 bp, Homo sapiens
aatgtgttttcattttatgttactct

SEQ ID NO: 51167 - DNA, 26 bp, Homo sapiens
atgtgttttcattttatgttactctt

SEQ ID NO: 51168 - DNA, 26 bp, Homo sapiens
tgtgttttcattttatgttactcttc

SEQ ID NO: 51169 - DNA, 26 bp, Homo sapiens
gtgttttcattttatgttactcttcc

SEQ ID NO: 51170 - DNA, 26 bp, Homo sapiens
tgttttcattttatgttactcttcct

SEQ ID NO: 51171 - DNA, 26 bp, Homo sapiens
gttttcattttatgttactcttccta

SEQ ID NO: 51172 - DNA, 26 bp, Homo sapiens
ttttcattttatgttactcttcctat

SEQ ID NO: 51173 - DNA, 26 bp, Homo sapiens
tttcattttatgttactcttcctatg

SEQ ID NO: 51174 - DNA, 26 bp, Homo sapiens
ttcattttatgttactcttcctatgt

SEQ ID NO: 51175 - DNA, 26 bp, Homo sapiens
tcattttatgttactcttcctatgtc

SEQ ID NO: 51176 - DNA, 26 bp, Homo sapiens
cattttatgttactcttcctatgtca

SEQ ID NO: 51177 - DNA, 26 bp, Homo sapiens
attttatgttactcttcctatgtcac

SEQ ID NO: 51178 - DNA, 26 bp, Homo sapiens
ttttatgttactcttcctatgtcaca

SEQ ID NO: 51179 - DNA, 26 bp, Homo sapiens
tttatgttactcttcctatgtcacac

SEQ ID NO: 51180 - DNA, 26 bp, Homo sapiens
ttatgttactcttcctatgtcacaca

SEQ ID NO: 51181 - DNA, 26 bp, Homo sapiens
tatgttactcttcctatgtcacacat

SEQ ID NO: 51182 - DNA, 26 bp, Homo sapiens
atgttactcttcctatgtcacacatg

SEQ ID NO: 51183 - DNA, 26 bp, Homo sapiens
tgttactcttcctatgtcacacatgg

SEQ ID NO: 51184 - DNA, 26 bp, Homo sapiens
gttactcttcctatgtcacacatggc

SEQ ID NO: 51185 - DNA, 26 bp, Homo sapiens
ttactcttcctatgtcacacatggca

SEQ ID NO: 51186 - DNA, 26 bp, Homo sapiens
tactcttcctatgtcacacatggcac

SEQ ID NO: 51187 - DNA, 26 bp, Homo sapiens
actcttcctatgtcacacatggcaca

SEQ ID NO: 51188 - DNA, 26 bp, Homo sapiens
ctcttcctatgtcacacatggcacaa

SEQ ID NO: 51189 - DNA, 26 bp, Homo sapiens
tcttcctatgtcacacatggcacaaa

SEQ ID NO: 51190 - DNA, 26 bp, Homo sapiens
cttcctatgtcacacatggcacaaag

SEQ ID NO: 51191 - DNA, 26 bp, Homo sapiens
ttcctatgtcacacatggcacaaagg

SEQ ID NO: 51192 - DNA, 26 bp, Homo sapiens
tcctatgtcacacatggcacaaaggt

SEQ ID NO: 51193 - DNA, 26 bp, Homo sapiens
cctatgtcacacatggcacaaaggtg

SEQ ID NO: 51194 - DNA, 26 bp, Homo sapiens
ctatgtcacacatggcacaaaggtgc

SEQ ID NO: 51195 - DNA, 26 bp, Homo sapiens
tatgtcacacatggcacaaaggtgcc

SEQ ID NO: 51196 - DNA, 26 bp, Homo sapiens
atgtcacacatggcacaaaggtgcct

SEQ ID NO: 51197 - DNA, 26 bp, Homo sapiens
tgtcacacatggcacaaaggtgcctg

SEQ ID NO: 51198 - DNA, 26 bp, Homo sapiens
gtcacacatggcacaaaggtgcctgg

SEQ ID NO: 51199 - DNA, 26 bp, Homo sapiens
tcacacatggcacaaaggtgcctggt

SEQ ID NO: 51200 - DNA, 26 bp, Homo sapiens
cacacatggcacaaaggtgcctggtt

SEQ ID NO: 51201 - DNA, 26 bp, Homo sapiens
acacatggcacaaaggtgcctggtta

SEQ ID NO: 51202 - DNA, 26 bp, Homo sapiens
cacatggcacaaaggtgcctggttag

SEQ ID NO: 51203 - DNA, 26 bp, Homo sapiens
acatggcacaaaggtgcctggttagt

SEQ ID NO: 51204 - DNA, 26 bp, Homo sapiens
catggcacaaaggtgcctggttagtt

SEQ ID NO: 51205 - DNA, 26 bp, Homo sapiens
atggcacaaaggtgcctggttagttt

SEQ ID NO: 51206 - DNA, 26 bp, Homo sapiens
tggcacaaaggtgcctggttagttta

SEQ ID NO: 51207 - DNA, 26 bp, Homo sapiens
ggcacaaaggtgcctggttagtttag

SEQ ID NO: 51208 - DNA, 26 bp, Homo sapiens
gcacaaaggtgcctggttagtttaga

SEQ ID NO: 51209 - DNA, 26 bp, Homo sapiens
cacaaaggtgcctggttagtttagat

SEQ ID NO: 51210 - DNA, 26 bp, Homo sapiens
acaaaggtgcctggttagtttagata

SEQ ID NO: 51211 - DNA, 26 bp, Homo sapiens
caaaggtgcctggttagtttagatat

SEQ ID NO: 51212 - DNA, 26 bp, Homo sapiens
aaaggtgcctggttagtttagatata

SEQ ID NO: 51213 - DNA, 26 bp, Homo sapiens
aaggtgcctggttagtttagatataa

SEQ ID NO: 51214 - DNA, 26 bp, Homo sapiens
aggtgcctggttagtttagatataag

SEQ ID NO: 51215 - DNA, 26 bp, Homo sapiens
ggtgcctggttagtttagatataagt

SEQ ID NO: 51216 - DNA, 26 bp, Homo sapiens
gtgcctggttagtttagatataagtt

SEQ ID NO: 51217 - DNA, 26 bp, Homo sapiens
tgcctggttagtttagatataagtta

SEQ ID NO: 51218 - DNA, 26 bp, Homo sapiens
gcctggttagtttagatataagttac

SEQ ID NO: 51219 - DNA, 26 bp, Homo sapiens
cctggttagtttagatataagttact

SEQ ID NO: 51220 - DNA, 26 bp, Homo sapiens
ctggttagtttagatataagttactg

SEQ ID NO: 51221 - DNA, 26 bp, Homo sapiens
tggttagtttagatataagttactgc

SEQ ID NO: 51222 - DNA, 26 bp, Homo sapiens
ggttagtttagatataagttactgca

SEQ ID NO: 51223 - DNA, 26 bp, Homo sapiens
gttagtttagatataagttactgcac

SEQ ID NO: 51224 - DNA, 26 bp, Homo sapiens
ttagtttagatataagttactgcacc

SEQ ID NO: 51225 - DNA, 26 bp, Homo sapiens
tagtttagatataagttactgcacct

SEQ ID NO: 51226 - DNA, 26 bp, Homo sapiens
agtttagatataagttactgcacctt

SEQ ID NO: 51227 - DNA, 26 bp, Homo sapiens
gtttagatataagttactgcaccttt

SEQ ID NO: 51228 - DNA, 26 bp, Homo sapiens
tttagatataagttactgcaccttta

SEQ ID NO: 51229 - DNA, 26 bp, Homo sapiens
ttagatataagttactgcacctttac

SEQ ID NO: 51230 - DNA, 26 bp, Homo sapiens
tagatataagttactgcacctttact

SEQ ID NO: 51231 - DNA, 26 bp, Homo sapiens
agatataagttactgcacctttactg

SEQ ID NO: 51232 - DNA, 26 bp, Homo sapiens
gatataagttactgcacctttactgt

SEQ ID NO: 51233 - DNA, 26 bp, Homo sapiens
atataagttactgcacctttactgtt

SEQ ID NO: 51234 - DNA, 26 bp, Homo sapiens
tataagttactgcacctttactgttt

SEQ ID NO: 51235 - DNA, 26 bp, Homo sapiens
ataagttactgcacctttactgtttt

SEQ ID NO: 51236 - DNA, 26 bp, Homo sapiens
taagttactgcacctttactgttttt

SEQ ID NO: 51237 - DNA, 26 bp, Homo sapiens
aagttactgcacctttactgtttttc

SEQ ID NO: 51238 - DNA, 26 bp, Homo sapiens
agttactgcacctttactgtttttct

SEQ ID NO: 51239 - DNA, 26 bp, Homo sapiens
gttactgcacctttactgtttttctc

SEQ ID NO: 51240 - DNA, 26 bp, Homo sapiens
ttactgcacctttactgtttttctct

SEQ ID NO: 51241 - DNA, 26 bp, Homo sapiens
tactgcacctttactgtttttctcta

SEQ ID NO: 51242 - DNA, 26 bp, Homo sapiens
actgcacctttactgtttttctctag

SEQ ID NO: 51243 - DNA, 26 bp, Homo sapiens
ctgcacctttactgtttttctctaga

SEQ ID NO: 51244 - DNA, 26 bp, Homo sapiens
tgcacctttactgtttttctctagag

SEQ ID NO: 51245 - DNA, 26 bp, Homo sapiens
gcacctttactgtttttctctagagt

SEQ ID NO: 51246 - DNA, 26 bp, Homo sapiens
cacctttactgtttttctctagagtt

SEQ ID NO: 51247 - DNA, 26 bp, Homo sapiens
acctttactgtttttctctagagtta

SEQ ID NO: 51248 - DNA, 26 bp, Homo sapiens
cctttactgtttttctctagagttac

SEQ ID NO: 51249 - DNA, 26 bp, Homo sapiens
ctttactgtttttctctagagttaca

SEQ ID NO: 51250 - DNA, 26 bp, Homo sapiens
tttactgtttttctctagagttacat

SEQ ID NO: 51251 - DNA, 26 bp, Homo sapiens
ttactgtttttctctagagttacatc

SEQ ID NO: 51252 - DNA, 26 bp, Homo sapiens
tactgtttttctctagagttacatct

SEQ ID NO: 51253 - DNA, 26 bp, Homo sapiens
actgtttttctctagagttacatcta

SEQ ID NO: 51254 - DNA, 26 bp, Homo sapiens
ctgtttttctctagagttacatctat

SEQ ID NO: 51255 - DNA, 26 bp, Homo sapiens
tgtttttctctagagttacatctatg

SEQ ID NO: 51256 - DNA, 26 bp, Homo sapiens
gtttttctctagagttacatctatgt

SEQ ID NO: 51257 - DNA, 26 bp, Homo sapiens
tttttctctagagttacatctatgta

SEQ ID NO: 51258 - DNA, 26 bp, Homo sapiens
ttttctctagagttacatctatgtat

SEQ ID NO: 51259 - DNA, 26 bp, Homo sapiens
tttctctagagttacatctatgtatg

SEQ ID NO: 51260 - DNA, 26 bp, Homo sapiens
ttctctagagttacatctatgtatga

SEQ ID NO: 51261 - DNA, 26 bp, Homo sapiens
tctctagagttacatctatgtatgac

SEQ ID NO: 51262 - DNA, 26 bp, Homo sapiens
ctctagagttacatctatgtatgacg

SEQ ID NO: 51263 - DNA, 26 bp, Homo sapiens
tctagagttacatctatgtatgacgt

SEQ ID NO: 51264 - DNA, 26 bp, Homo sapiens
ctagagttacatctatgtatgacgtg

SEQ ID NO: 51265 - DNA, 26 bp, Homo sapiens
tagagttacatctatgtatgacgtgg

SEQ ID NO: 51266 - DNA, 26 bp, Homo sapiens
agagttacatctatgtatgacgtggg

SEQ ID NO: 51267 - DNA, 26 bp, Homo sapiens
gagttacatctatgtatgacgtggga

SEQ ID NO: 51268 - DNA, 26 bp, Homo sapiens
agttacatctatgtatgacgtgggaa

SEQ ID NO: 51269 - DNA, 26 bp, Homo sapiens
gttacatctatgtatgacgtgggaac

SEQ ID NO: 51270 - DNA, 26 bp, Homo sapiens
ttacatctatgtatgacgtgggaacg

SEQ ID NO: 51271 - DNA, 26 bp, Homo sapiens
tacatctatgtatgacgtgggaacgt

SEQ ID NO: 51272 - DNA, 26 bp, Homo sapiens
acatctatgtatgacgtgggaacgta

SEQ ID NO: 51273 - DNA, 26 bp, Homo sapiens
catctatgtatgacgtgggaacgtag

SEQ ID NO: 51274 - DNA, 26 bp, Homo sapiens
atctatgtatgacgtgggaacgtagc

SEQ ID NO: 51275 - DNA, 26 bp, Homo sapiens
tctatgtatgacgtgggaacgtagcc

SEQ ID NO: 51276 - DNA, 26 bp, Homo sapiens
ctatgtatgacgtgggaacgtagcct

SEQ ID NO: 51277 - DNA, 26 bp, Homo sapiens
tatgtatgacgtgggaacgtagcctt

SEQ ID NO: 51278 - DNA, 26 bp, Homo sapiens
atgtatgacgtgggaacgtagccttc

SEQ ID NO: 51279 - DNA, 26 bp, Homo sapiens
tgtatgacgtgggaacgtagccttct

SEQ ID NO: 51280 - DNA, 26 bp, Homo sapiens
gtatgacgtgggaacgtagccttctt

SEQ ID NO: 51281 - DNA, 26 bp, Homo sapiens
tatgacgtgggaacgtagccttcttc

SEQ ID NO: 51282 - DNA, 26 bp, Homo sapiens
atgacgtgggaacgtagccttcttca

SEQ ID NO: 51283 - DNA, 26 bp, Homo sapiens
tgacgtgggaacgtagccttcttcac

SEQ ID NO: 51284 - DNA, 26 bp, Homo sapiens
gacgtgggaacgtagccttcttcacc

SEQ ID NO: 51285 - DNA, 26 bp, Homo sapiens
acgtgggaacgtagccttcttcaccg

SEQ ID NO: 51286 - DNA, 26 bp, Homo sapiens
cgtgggaacgtagccttcttcaccgt

SEQ ID NO: 51287 - DNA, 26 bp, Homo sapiens
gtgggaacgtagccttcttcaccgtt

SEQ ID NO: 51288 - DNA, 26 bp, Homo sapiens
tgggaacgtagccttcttcaccgttc

SEQ ID NO: 51289 - DNA, 26 bp, Homo sapiens
gggaacgtagccttcttcaccgttct

SEQ ID NO: 51290 - DNA, 26 bp, Homo sapiens
ggaacgtagccttcttcaccgttctg

SEQ ID NO: 51291 - DNA, 26 bp, Homo sapiens
gaacgtagccttcttcaccgttctgt

SEQ ID NO: 51292 - DNA, 26 bp, Homo sapiens
aacgtagccttcttcaccgttctgtc

SEQ ID NO: 51293 - DNA, 26 bp, Homo sapiens
acgtagccttcttcaccgttctgtct

SEQ ID NO: 51294 - DNA, 26 bp, Homo sapiens
cgtagccttcttcaccgttctgtctc

SEQ ID NO: 51295 - DNA, 26 bp, Homo sapiens
gtagccttcttcaccgttctgtctcc

SEQ ID NO: 51296 - DNA, 26 bp, Homo sapiens
tagccttcttcaccgttctgtctccg

SEQ ID NO: 51297 - DNA, 26 bp, Homo sapiens
agccttcttcaccgttctgtctccga

SEQ ID NO: 51298 - DNA, 26 bp, Homo sapiens
gccttcttcaccgttctgtctccgag

SEQ ID NO: 51299 - DNA, 26 bp, Homo sapiens
ccttcttcaccgttctgtctccgagc

SEQ ID NO: 51300 - DNA, 26 bp, Homo sapiens
cttcttcaccgttctgtctccgagct

SEQ ID NO: 51301 - DNA, 26 bp, Homo sapiens
ttcttcaccgttctgtctccgagctc

SEQ ID NO: 51302 - DNA, 26 bp, Homo sapiens
tcttcaccgttctgtctccgagctct

SEQ ID NO: 51303 - DNA, 26 bp, Homo sapiens
cttcaccgttctgtctccgagctctt

SEQ ID NO: 51304 - DNA, 26 bp, Homo sapiens
ttcaccgttctgtctccgagctcttg

SEQ ID NO: 51305 - DNA, 26 bp, Homo sapiens
tcaccgttctgtctccgagctcttgt

SEQ ID NO: 51306 - DNA, 26 bp, Homo sapiens
caccgttctgtctccgagctcttgtc

SEQ ID NO: 51307 - DNA, 26 bp, Homo sapiens
accgttctgtctccgagctcttgtcc

SEQ ID NO: 51308 - DNA, 26 bp, Homo sapiens
ccgttctgtctccgagctcttgtcca

SEQ ID NO: 51309 - DNA, 26 bp, Homo sapiens
cgttctgtctccgagctcttgtccat

SEQ ID NO: 51310 - DNA, 26 bp, Homo sapiens
gttctgtctccgagctcttgtccatc

SEQ ID NO: 51311 - DNA, 26 bp, Homo sapiens
ttctgtctccgagctcttgtccatcc

SEQ ID NO: 51312 - DNA, 26 bp, Homo sapiens
tctgtctccgagctcttgtccatccg

SEQ ID NO: 51313 - DNA, 26 bp, Homo sapiens
ctgtctccgagctcttgtccatccgt

SEQ ID NO: 51314 - DNA, 26 bp, Homo sapiens
tgtctccgagctcttgtccatccgtc

SEQ ID NO: 51315 - DNA, 26 bp, Homo sapiens
gtctccgagctcttgtccatccgtca

SEQ ID NO: 51316 - DNA, 26 bp, Homo sapiens
tctccgagctcttgtccatccgtcac

SEQ ID NO: 51317 - DNA, 26 bp, Homo sapiens
ctccgagctcttgtccatccgtcacc

SEQ ID NO: 51318 - DNA, 26 bp, Homo sapiens
tccgagctcttgtccatccgtcacct

SEQ ID NO: 51319 - DNA, 26 bp, Homo sapiens
ccgagctcttgtccatccgtcacctt

SEQ ID NO: 51320 - DNA, 26 bp, Homo sapiens
cgagctcttgtccatccgtcaccttt

SEQ ID NO: 51321 - DNA, 26 bp, Homo sapiens
gagctcttgtccatccgtcacctttg

SEQ ID NO: 51322 - DNA, 26 bp, Homo sapiens
agctcttgtccatccgtcacctttgt

SEQ ID NO: 51323 - DNA, 26 bp, Homo sapiens
gctcttgtccatccgtcacctttgtc

SEQ ID NO: 51324 - DNA, 26 bp, Homo sapiens
ctcttgtccatccgtcacctttgtcc

SEQ ID NO: 51325 - DNA, 26 bp, Homo sapiens
tcttgtccatccgtcacctttgtcct

SEQ ID NO: 51326 - DNA, 26 bp, Homo sapiens
cttgtccatccgtcacctttgtcctc

SEQ ID NO: 51327 - DNA, 26 bp, Homo sapiens
ttgtccatccgtcacctttgtcctcc

SEQ ID NO: 51328 - DNA, 26 bp, Homo sapiens
tgtccatccgtcacctttgtcctcct

SEQ ID NO: 51329 - DNA, 26 bp, Homo sapiens
gtccatccgtcacctttgtcctcctc

SEQ ID NO: 51330 - DNA, 26 bp, Homo sapiens
tccatccgtcacctttgtcctcctct

SEQ ID NO: 51331 - DNA, 26 bp, Homo sapiens
ccatccgtcacctttgtcctcctcta

SEQ ID NO: 51332 - DNA, 26 bp, Homo sapiens
catccgtcacctttgtcctcctctat

SEQ ID NO: 51333 - DNA, 26 bp, Homo sapiens
atccgtcacctttgtcctcctctata

SEQ ID NO: 51334 - DNA, 26 bp, Homo sapiens
tccgtcacctttgtcctcctctataa

SEQ ID NO: 51335 - DNA, 26 bp, Homo sapiens
ccgtcacctttgtcctcctctataat

SEQ ID NO: 51336 - DNA, 26 bp, Homo sapiens
cgtcacctttgtcctcctctataatg

SEQ ID NO: 51337 - DNA, 26 bp, Homo sapiens
gtcacctttgtcctcctctataatgt

SEQ ID NO: 51338 - DNA, 26 bp, Homo sapiens
tcacctttgtcctcctctataatgta

SEQ ID NO: 51339 - DNA, 26 bp, Homo sapiens
cacctttgtcctcctctataatgtag

SEQ ID NO: 51340 - DNA, 26 bp, Homo sapiens
acctttgtcctcctctataatgtaga

SEQ ID NO: 51341 - DNA, 26 bp, Homo sapiens
cctttgtcctcctctataatgtagag

SEQ ID NO: 51342 - DNA, 26 bp, Homo sapiens
ctttgtcctcctctataatgtagaga

SEQ ID NO: 51343 - DNA, 26 bp, Homo sapiens
tttgtcctcctctataatgtagagaa

SEQ ID NO: 51344 - DNA, 26 bp, Homo sapiens
ttgtcctcctctataatgtagagaac

SEQ ID NO: 51345 - DNA, 26 bp, Homo sapiens
tgtcctcctctataatgtagagaact

SEQ ID NO: 51346 - DNA, 26 bp, Homo sapiens
gtcctcctctataatgtagagaactt

SEQ ID NO: 51347 - DNA, 26 bp, Homo sapiens
tcctcctctataatgtagagaacttc

SEQ ID NO: 51348 - DNA, 26 bp, Homo sapiens
cctcctctataatgtagagaacttca

SEQ ID NO: 51349 - DNA, 26 bp, Homo sapiens
ctcctctataatgtagagaacttcac

SEQ ID NO: 51350 - DNA, 26 bp, Homo sapiens
tcctctataatgtagagaacttcacc

SEQ ID NO: 51351 - DNA, 26 bp, Homo sapiens
cctctataatgtagagaacttcacct

SEQ ID NO: 51352 - DNA, 26 bp, Homo sapiens
ctctataatgtagagaacttcacctt

SEQ ID NO: 51353 - DNA, 26 bp, Homo sapiens
tctataatgtagagaacttcaccttc

SEQ ID NO: 51354 - DNA, 26 bp, Homo sapiens
ctataatgtagagaacttcaccttct

SEQ ID NO: 51355 - DNA, 26 bp, Homo sapiens
tataatgtagagaacttcaccttctt

SEQ ID NO: 51356 - DNA, 26 bp, Homo sapiens
ataatgtagagaacttcaccttcttt

SEQ ID NO: 51357 - DNA, 26 bp, Homo sapiens
taatgtagagaacttcaccttctttc

SEQ ID NO: 51358 - DNA, 26 bp, Homo sapiens
aatgtagagaacttcaccttctttca

SEQ ID NO: 51359 - DNA, 26 bp, Homo sapiens
atgtagagaacttcaccttctttcat

SEQ ID NO: 51360 - DNA, 26 bp, Homo sapiens
tgtagagaacttcaccttctttcatt

SEQ ID NO: 51361 - DNA, 26 bp, Homo sapiens
gtagagaacttcaccttctttcattg

SEQ ID NO: 51362 - DNA, 26 bp, Homo sapiens
tagagaacttcaccttctttcattgc

SEQ ID NO: 51363 - DNA, 26 bp, Homo sapiens
agagaacttcaccttctttcattgct

SEQ ID NO: 51364 - DNA, 26 bp, Homo sapiens
gagaacttcaccttctttcattgcta

SEQ ID NO: 51365 - DNA, 26 bp, Homo sapiens
agaacttcaccttctttcattgctag

SEQ ID NO: 51366 - DNA, 26 bp, Homo sapiens
gaacttcaccttctttcattgctaga

SEQ ID NO: 51367 - DNA, 26 bp, Homo sapiens
aacttcaccttctttcattgctagag

SEQ ID NO: 51368 - DNA, 26 bp, Homo sapiens
acttcaccttctttcattgctagagt

SEQ ID NO: 51369 - DNA, 26 bp, Homo sapiens
cttcaccttctttcattgctagagta

SEQ ID NO: 51370 - DNA, 26 bp, Homo sapiens
ttcaccttctttcattgctagagtac

SEQ ID NO: 51371 - DNA, 26 bp, Homo sapiens
tcaccttctttcattgctagagtacc

SEQ ID NO: 51372 - DNA, 26 bp, Homo sapiens
caccttctttcattgctagagtacct

SEQ ID NO: 51373 - DNA, 26 bp, Homo sapiens
accttctttcattgctagagtacctt

SEQ ID NO: 51374 - DNA, 26 bp, Homo sapiens
ccttctttcattgctagagtaccttc

SEQ ID NO: 51375 - DNA, 26 bp, Homo sapiens
cttctttcattgctagagtaccttca

SEQ ID NO: 51376 - DNA, 26 bp, Homo sapiens
ttctttcattgctagagtaccttcat

SEQ ID NO: 51377 - DNA, 26 bp, Homo sapiens
tctttcattgctagagtaccttcatt

SEQ ID NO: 51378 - DNA, 26 bp, Homo sapiens
ctttcattgctagagtaccttcatta

SEQ ID NO: 51379 - DNA, 26 bp, Homo sapiens
tttcattgctagagtaccttcattat

SEQ ID NO: 51380 - DNA, 26 bp, Homo sapiens
ttcattgctagagtaccttcattatg

SEQ ID NO: 51381 - DNA, 26 bp, Homo sapiens
tcattgctagagtaccttcattatgt

SEQ ID NO: 51382 - DNA, 26 bp, Homo sapiens
cattgctagagtaccttcattatgtc

SEQ ID NO: 51383 - DNA, 26 bp, Homo sapiens
attgctagagtaccttcattatgtcc

SEQ ID NO: 51384 - DNA, 26 bp, Homo sapiens
ttgctagagtaccttcattatgtcca

SEQ ID NO: 51385 - DNA, 26 bp, Homo sapiens
tgctagagtaccttcattatgtccat

SEQ ID NO: 51386 - DNA, 26 bp, Homo sapiens
gctagagtaccttcattatgtccatc

SEQ ID NO: 51387 - DNA, 26 bp, Homo sapiens
ctagagtaccttcattatgtccatca

SEQ ID NO: 51388 - DNA, 26 bp, Homo sapiens
tagagtaccttcattatgtccatcaa

SEQ ID NO: 51389 - DNA, 26 bp, Homo sapiens
agagtaccttcattatgtccatcaaa

SEQ ID NO: 51390 - DNA, 26 bp, Homo sapiens
gagtaccttcattatgtccatcaaaa

SEQ ID NO: 51391 - DNA, 26 bp, Homo sapiens
agtaccttcattatgtccatcaaaag

SEQ ID NO: 51392 - DNA, 26 bp, Homo sapiens
gtaccttcattatgtccatcaaaagg

SEQ ID NO: 51393 - DNA, 26 bp, Homo sapiens
taccttcattatgtccatcaaaaggg

SEQ ID NO: 51394 - DNA, 26 bp, Homo sapiens
accttcattatgtccatcaaaagggt

SEQ ID NO: 51395 - DNA, 26 bp, Homo sapiens
ccttcattatgtccatcaaaagggta

SEQ ID NO: 51396 - DNA, 26 bp, Homo sapiens
cttcattatgtccatcaaaagggtag

SEQ ID NO: 51397 - DNA, 26 bp, Homo sapiens
ttcattatgtccatcaaaagggtaga

SEQ ID NO: 51398 - DNA, 26 bp, Homo sapiens
tcattatgtccatcaaaagggtagat

SEQ ID NO: 51399 - DNA, 26 bp, Homo sapiens
cattatgtccatcaaaagggtagata

SEQ ID NO: 51400 - DNA, 26 bp, Homo sapiens
attatgtccatcaaaagggtagatag

SEQ ID NO: 51401 - DNA, 26 bp, Homo sapiens
ttatgtccatcaaaagggtagatagc

SEQ ID NO: 51402 - DNA, 26 bp, Homo sapiens
tatgtccatcaaaagggtagatagct

SEQ ID NO: 51403 - DNA, 26 bp, Homo sapiens
atgtccatcaaaagggtagatagctt

SEQ ID NO: 51404 - DNA, 26 bp, Homo sapiens
tgtccatcaaaagggtagatagcttt

SEQ ID NO: 51405 - DNA, 26 bp, Homo sapiens
gtccatcaaaagggtagatagctttg

SEQ ID NO: 51406 - DNA, 26 bp, Homo sapiens
tccatcaaaagggtagatagctttgc

SEQ ID NO: 51407 - DNA, 26 bp, Homo sapiens
ccatcaaaagggtagatagctttgca

SEQ ID NO: 51408 - DNA, 26 bp, Homo sapiens
catcaaaagggtagatagctttgcag

SEQ ID NO: 51409 - DNA, 26 bp, Homo sapiens
atcaaaagggtagatagctttgcagt

SEQ ID NO: 51410 - DNA, 26 bp, Homo sapiens
tcaaaagggtagatagctttgcagtg

SEQ ID NO: 51411 - DNA, 26 bp, Homo sapiens
caaaagggtagatagctttgcagtgt

SEQ ID NO: 51412 - DNA, 26 bp, Homo sapiens
aaaagggtagatagctttgcagtgtc

SEQ ID NO: 51413 - DNA, 26 bp, Homo sapiens
aaagggtagatagctttgcagtgtcc

SEQ ID NO: 51414 - DNA, 26 bp, Homo sapiens
aagggtagatagctttgcagtgtcca

SEQ ID NO: 51415 - DNA, 26 bp, Homo sapiens
agggtagatagctttgcagtgtccaa

SEQ ID NO: 51416 - DNA, 26 bp, Homo sapiens
gggtagatagctttgcagtgtccaat

SEQ ID NO: 51417 - DNA, 26 bp, Homo sapiens
ggtagatagctttgcagtgtccaata

SEQ ID NO: 51418 - DNA, 26 bp, Homo sapiens
gtagatagctttgcagtgtccaatag

SEQ ID NO: 51419 - DNA, 26 bp, Homo sapiens
tagatagctttgcagtgtccaatagc

SEQ ID NO: 51420 - DNA, 26 bp, Homo sapiens
agatagctttgcagtgtccaatagca

SEQ ID NO: 51421 - DNA, 26 bp, Homo sapiens
gatagctttgcagtgtccaatagcag

SEQ ID NO: 51422 - DNA, 26 bp, Homo sapiens
atagctttgcagtgtccaatagcagg

SEQ ID NO: 51423 - DNA, 26 bp, Homo sapiens
tagctttgcagtgtccaatagcaggc

SEQ ID NO: 51424 - DNA, 26 bp, Homo sapiens
agctttgcagtgtccaatagcaggca

SEQ ID NO: 51425 - DNA, 26 bp, Homo sapiens
gctttgcagtgtccaatagcaggcaa

SEQ ID NO: 51426 - DNA, 26 bp, Homo sapiens
ctttgcagtgtccaatagcaggcaag

SEQ ID NO: 51427 - DNA, 26 bp, Homo sapiens
tttgcagtgtccaatagcaggcaagg

SEQ ID NO: 51428 - DNA, 26 bp, Homo sapiens
ttgcagtgtccaatagcaggcaaggg

SEQ ID NO: 51429 - DNA, 26 bp, Homo sapiens
tgcagtgtccaatagcaggcaaggga

SEQ ID NO: 51430 - DNA, 26 bp, Homo sapiens
gcagtgtccaatagcaggcaagggat

SEQ ID NO: 51431 - DNA, 26 bp, Homo sapiens
cagtgtccaatagcaggcaagggatc

SEQ ID NO: 51432 - DNA, 26 bp, Homo sapiens
agtgtccaatagcaggcaagggatca

SEQ ID NO: 51433 - DNA, 26 bp, Homo sapiens
gtgtccaatagcaggcaagggatcat

SEQ ID NO: 51434 - DNA, 26 bp, Homo sapiens
tgtccaatagcaggcaagggatcatc

SEQ ID NO: 51435 - DNA, 26 bp, Homo sapiens
gtccaatagcaggcaagggatcatca

SEQ ID NO: 51436 - DNA, 26 bp, Homo sapiens
tccaatagcaggcaagggatcatcat

SEQ ID NO: 51437 - DNA, 26 bp, Homo sapiens
ccaatagcaggcaagggatcatcatc

SEQ ID NO: 51438 - DNA, 26 bp, Homo sapiens
caatagcaggcaagggatcatcatcc

SEQ ID NO: 51439 - DNA, 26 bp, Homo sapiens
aatagcaggcaagggatcatcatcct

SEQ ID NO: 51440 - DNA, 26 bp, Homo sapiens
atagcaggcaagggatcatcatcctc

SEQ ID NO: 51441 - DNA, 26 bp, Homo sapiens
tagcaggcaagggatcatcatcctca

SEQ ID NO: 51442 - DNA, 26 bp, Homo sapiens
agcaggcaagggatcatcatcctcaa

SEQ ID NO: 51443 - DNA, 26 bp, Homo sapiens
gcaggcaagggatcatcatcctcaaa

SEQ ID NO: 51444 - DNA, 26 bp, Homo sapiens
caggcaagggatcatcatcctcaaat

SEQ ID NO: 51445 - DNA, 26 bp, Homo sapiens
aggcaagggatcatcatcctcaaatt

SEQ ID NO: 51446 - DNA, 26 bp, Homo sapiens
ggcaagggatcatcatcctcaaattc

SEQ ID NO: 51447 - DNA, 26 bp, Homo sapiens
gcaagggatcatcatcctcaaattca

SEQ ID NO: 51448 - DNA, 26 bp, Homo sapiens
caagggatcatcatcctcaaattcat

SEQ ID NO: 51449 - DNA, 26 bp, Homo sapiens
aagggatcatcatcctcaaattcatc

SEQ ID NO: 51450 - DNA, 26 bp, Homo sapiens
agggatcatcatcctcaaattcatca

SEQ ID NO: 51451 - DNA, 26 bp, Homo sapiens
gggatcatcatcctcaaattcatcat

SEQ ID NO: 51452 - DNA, 26 bp, Homo sapiens
ggatcatcatcctcaaattcatcatc

SEQ ID NO: 51453 - DNA, 26 bp, Homo sapiens
gatcatcatcctcaaattcatcatca

SEQ ID NO: 51454 - DNA, 26 bp, Homo sapiens
atcatcatcctcaaattcatcatcaa

SEQ ID NO: 51455 - DNA, 26 bp, Homo sapiens
tcatcatcctcaaattcatcatcaaa

SEQ ID NO: 51456 - DNA, 26 bp, Homo sapiens
catcatcctcaaattcatcatcaaac

SEQ ID NO: 51457 - DNA, 26 bp, Homo sapiens
atcatcctcaaattcatcatcaaact

SEQ ID NO: 51458 - DNA, 26 bp, Homo sapiens
tcatcctcaaattcatcatcaaactc

SEQ ID NO: 51459 - DNA, 26 bp, Homo sapiens
catcctcaaattcatcatcaaactca

SEQ ID NO: 51460 - DNA, 26 bp, Homo sapiens
atcctcaaattcatcatcaaactcat

SEQ ID NO: 51461 - DNA, 26 bp, Homo sapiens
tcctcaaattcatcatcaaactcatt

SEQ ID NO: 51462 - DNA, 26 bp, Homo sapiens
cctcaaattcatcatcaaactcattg

SEQ ID NO: 51463 - DNA, 26 bp, Homo sapiens
ctcaaattcatcatcaaactcattgt

SEQ ID NO: 51464 - DNA, 26 bp, Homo sapiens
tcaaattcatcatcaaactcattgtg

SEQ ID NO: 51465 - DNA, 26 bp, Homo sapiens
caaattcatcatcaaactcattgtgg

SEQ ID NO: 51466 - DNA, 26 bp, Homo sapiens
aaattcatcatcaaactcattgtggt

SEQ ID NO: 51467 - DNA, 26 bp, Homo sapiens
aattcatcatcaaactcattgtggtg

SEQ ID NO: 51468 - DNA, 26 bp, Homo sapiens
attcatcatcaaactcattgtggtga

SEQ ID NO: 51469 - DNA, 26 bp, Homo sapiens
ttcatcatcaaactcattgtggtgac

SEQ ID NO: 51470 - DNA, 26 bp, Homo sapiens
tcatcatcaaactcattgtggtgacc

SEQ ID NO: 51471 - DNA, 26 bp, Homo sapiens
catcatcaaactcattgtggtgacca

SEQ ID NO: 51472 - DNA, 26 bp, Homo sapiens
atcatcaaactcattgtggtgaccat

SEQ ID NO: 51473 - DNA, 26 bp, Homo sapiens
tcatcaaactcattgtggtgaccatg

SEQ ID NO: 51474 - DNA, 26 bp, Homo sapiens
catcaaactcattgtggtgaccatgc

SEQ ID NO: 51475 - DNA, 26 bp, Homo sapiens
atcaaactcattgtggtgaccatgct

SEQ ID NO: 51476 - DNA, 26 bp, Homo sapiens
tcaaactcattgtggtgaccatgctg

SEQ ID NO: 51477 - DNA, 26 bp, Homo sapiens
caaactcattgtggtgaccatgctgc

SEQ ID NO: 51478 - DNA, 26 bp, Homo sapiens
aaactcattgtggtgaccatgctgct

SEQ ID NO: 51479 - DNA, 26 bp, Homo sapiens
aactcattgtggtgaccatgctgctg

SEQ ID NO: 51480 - DNA, 26 bp, Homo sapiens
actcattgtggtgaccatgctgctgg

SEQ ID NO: 51481 - DNA, 26 bp, Homo sapiens
ctcattgtggtgaccatgctgctggg

SEQ ID NO: 51482 - DNA, 26 bp, Homo sapiens
tcattgtggtgaccatgctgctgggg

SEQ ID NO: 51483 - DNA, 26 bp, Homo sapiens
cattgtggtgaccatgctgctggggt

SEQ ID NO: 51484 - DNA, 26 bp, Homo sapiens
attgtggtgaccatgctgctggggtg

SEQ ID NO: 51485 - DNA, 26 bp, Homo sapiens
ttgtggtgaccatgctgctggggtgg

SEQ ID NO: 51486 - DNA, 26 bp, Homo sapiens
tgtggtgaccatgctgctggggtggc

SEQ ID NO: 51487 - DNA, 26 bp, Homo sapiens
gtggtgaccatgctgctggggtggcc

SEQ ID NO: 51488 - DNA, 26 bp, Homo sapiens
tggtgaccatgctgctggggtggccc

SEQ ID NO: 51489 - DNA, 26 bp, Homo sapiens
ggtgaccatgctgctggggtggccca

SEQ ID NO: 51490 - DNA, 26 bp, Homo sapiens
gtgaccatgctgctggggtggcccac

SEQ ID NO: 51491 - DNA, 26 bp, Homo sapiens
tgaccatgctgctggggtggcccacg

SEQ ID NO: 51492 - DNA, 26 bp, Homo sapiens
gaccatgctgctggggtggcccacgg

SEQ ID NO: 51493 - DNA, 26 bp, Homo sapiens
accatgctgctggggtggcccacgga

SEQ ID NO: 51494 - DNA, 26 bp, Homo sapiens
ccatgctgctggggtggcccacggac

SEQ ID NO: 51495 - DNA, 26 bp, Homo sapiens
catgctgctggggtggcccacggact

SEQ ID NO: 51496 - DNA, 26 bp, Homo sapiens
atgctgctggggtggcccacggactt

SEQ ID NO: 51497 - DNA, 26 bp, Homo sapiens
tgctgctggggtggcccacggacttc

SEQ ID NO: 51498 - DNA, 26 bp, Homo sapiens
gctgctggggtggcccacggacttcc

SEQ ID NO: 51499 - DNA, 26 bp, Homo sapiens
ctgctggggtggcccacggacttcct

SEQ ID NO: 51500 - DNA, 26 bp, Homo sapiens
tgctggggtggcccacggacttcctg

SEQ ID NO: 51501 - DNA, 26 bp, Homo sapiens
gctggggtggcccacggacttcctgg

SEQ ID NO: 51502 - DNA, 26 bp, Homo sapiens
ctggggtggcccacggacttcctggt

SEQ ID NO: 51503 - DNA, 26 bp, Homo sapiens
tggggtggcccacggacttcctggtt

SEQ ID NO: 51504 - DNA, 26 bp, Homo sapiens
ggggtggcccacggacttcctggttt

SEQ ID NO: 51505 - DNA, 26 bp, Homo sapiens
gggtggcccacggacttcctggtttg

SEQ ID NO: 51506 - DNA, 26 bp, Homo sapiens
ggtggcccacggacttcctggtttgc

SEQ ID NO: 51507 - DNA, 26 bp, Homo sapiens
gtggcccacggacttcctggtttgca

SEQ ID NO: 51508 - DNA, 26 bp, Homo sapiens
tggcccacggacttcctggtttgcat

SEQ ID NO: 51509 - DNA, 26 bp, Homo sapiens
ggcccacggacttcctggtttgcatc

SEQ ID NO: 51510 - DNA, 26 bp, Homo sapiens
gcccacggacttcctggtttgcatca

SEQ ID NO: 51511 - DNA, 26 bp, Homo sapiens
cccacggacttcctggtttgcatcat

SEQ ID NO: 51512 - DNA, 26 bp, Homo sapiens
ccacggacttcctggtttgcatcatc

SEQ ID NO: 51513 - DNA, 26 bp, Homo sapiens
cacggacttcctggtttgcatcatca

SEQ ID NO: 51514 - DNA, 26 bp, Homo sapiens
acggacttcctggtttgcatcatcag

SEQ ID NO: 51515 - DNA, 26 bp, Homo sapiens
cggacttcctggtttgcatcatcagt

SEQ ID NO: 51516 - DNA, 26 bp, Homo sapiens
ggacttcctggtttgcatcatcagtg

SEQ ID NO: 51517 - DNA, 26 bp, Homo sapiens
gacttcctggtttgcatcatcagtgt

SEQ ID NO: 51518 - DNA, 26 bp, Homo sapiens
acttcctggtttgcatcatcagtgta

SEQ ID NO: 51519 - DNA, 26 bp, Homo sapiens
cttcctggtttgcatcatcagtgtaa

SEQ ID NO: 51520 - DNA, 26 bp, Homo sapiens
ttcctggtttgcatcatcagtgtaac

SEQ ID NO: 51521 - DNA, 26 bp, Homo sapiens
tcctggtttgcatcatcagtgtaact

SEQ ID NO: 51522 - DNA, 26 bp, Homo sapiens
cctggtttgcatcatcagtgtaactt

SEQ ID NO: 51523 - DNA, 26 bp, Homo sapiens
ctggtttgcatcatcagtgtaacttc

SEQ ID NO: 51524 - DNA, 26 bp, Homo sapiens
tggtttgcatcatcagtgtaacttcc

SEQ ID NO: 51525 - DNA, 26 bp, Homo sapiens
ggtttgcatcatcagtgtaacttccc

SEQ ID NO: 51526 - DNA, 26 bp, Homo sapiens
gtttgcatcatcagtgtaacttccct

SEQ ID NO: 51527 - DNA, 26 bp, Homo sapiens
tttgcatcatcagtgtaacttccctc

SEQ ID NO: 51528 - DNA, 26 bp, Homo sapiens
ttgcatcatcagtgtaacttccctca

SEQ ID NO: 51529 - DNA, 26 bp, Homo sapiens
tgcatcatcagtgtaacttccctcag

SEQ ID NO: 51530 - DNA, 26 bp, Homo sapiens
gcatcatcagtgtaacttccctcagg

SEQ ID NO: 51531 - DNA, 26 bp, Homo sapiens
catcatcagtgtaacttccctcagga

SEQ ID NO: 51532 - DNA, 26 bp, Homo sapiens
atcatcagtgtaacttccctcaggac

SEQ ID NO: 51533 - DNA, 26 bp, Homo sapiens
tcatcagtgtaacttccctcaggact

SEQ ID NO: 51534 - DNA, 26 bp, Homo sapiens
catcagtgtaacttccctcaggactt

SEQ ID NO: 51535 - DNA, 26 bp, Homo sapiens
atcagtgtaacttccctcaggacttt

SEQ ID NO: 51536 - DNA, 26 bp, Homo sapiens
tcagtgtaacttccctcaggactttc

SEQ ID NO: 51537 - DNA, 26 bp, Homo sapiens
cagtgtaacttccctcaggactttct

SEQ ID NO: 51538 - DNA, 26 bp, Homo sapiens
agtgtaacttccctcaggactttctc

SEQ ID NO: 51539 - DNA, 26 bp, Homo sapiens
gtgtaacttccctcaggactttctcg

SEQ ID NO: 51540 - DNA, 26 bp, Homo sapiens
tgtaacttccctcaggactttctcgt

SEQ ID NO: 51541 - DNA, 26 bp, Homo sapiens
gtaacttccctcaggactttctcgtc

SEQ ID NO: 51542 - DNA, 26 bp, Homo sapiens
taacttccctcaggactttctcgtcc

SEQ ID NO: 51543 - DNA, 26 bp, Homo sapiens
aacttccctcaggactttctcgtccc

SEQ ID NO: 51544 - DNA, 26 bp, Homo sapiens
acttccctcaggactttctcgtccct

SEQ ID NO: 51545 - DNA, 26 bp, Homo sapiens
cttccctcaggactttctcgtccctg

SEQ ID NO: 51546 - DNA, 26 bp, Homo sapiens
ttccctcaggactttctcgtccctgt

SEQ ID NO: 51547 - DNA, 26 bp, Homo sapiens
tccctcaggactttctcgtccctgtg

SEQ ID NO: 51548 - DNA, 26 bp, Homo sapiens
ccctcaggactttctcgtccctgtgt

SEQ ID NO: 51549 - DNA, 26 bp, Homo sapiens
cctcaggactttctcgtccctgtgtt

SEQ ID NO: 51550 - DNA, 26 bp, Homo sapiens
ctcaggactttctcgtccctgtgtta

SEQ ID NO: 51551 - DNA, 26 bp, Homo sapiens
tcaggactttctcgtccctgtgttac

SEQ ID NO: 51552 - DNA, 26 bp, Homo sapiens
caggactttctcgtccctgtgttaca

SEQ ID NO: 51553 - DNA, 26 bp, Homo sapiens
aggactttctcgtccctgtgttacaa

SEQ ID NO: 51554 - DNA, 26 bp, Homo sapiens
ggactttctcgtccctgtgttacaag

SEQ ID NO: 51555 - DNA, 26 bp, Homo sapiens
gactttctcgtccctgtgttacaaga

SEQ ID NO: 51556 - DNA, 26 bp, Homo sapiens
actttctcgtccctgtgttacaagat

SEQ ID NO: 51557 - DNA, 26 bp, Homo sapiens
ctttctcgtccctgtgttacaagatg

SEQ ID NO: 51558 - DNA, 26 bp, Homo sapiens
tttctcgtccctgtgttacaagatga

SEQ ID NO: 51559 - DNA, 26 bp, Homo sapiens
ttctcgtccctgtgttacaagatgat

SEQ ID NO: 51560 - DNA, 26 bp, Homo sapiens
tctcgtccctgtgttacaagatgatt

SEQ ID NO: 51561 - DNA, 26 bp, Homo sapiens
ctcgtccctgtgttacaagatgattt

SEQ ID NO: 51562 - DNA, 26 bp, Homo sapiens
tcgtccctgtgttacaagatgattta

SEQ ID NO: 51563 - DNA, 26 bp, Homo sapiens
cgtccctgtgttacaagatgatttat

SEQ ID NO: 51564 - DNA, 26 bp, Homo sapiens
gtccctgtgttacaagatgatttatg

SEQ ID NO: 51565 - DNA, 26 bp, Homo sapiens
tccctgtgttacaagatgatttatgt

SEQ ID NO: 51566 - DNA, 26 bp, Homo sapiens
ccctgtgttacaagatgatttatgtc

SEQ ID NO: 51567 - DNA, 26 bp, Homo sapiens
cctgtgttacaagatgatttatgtca

SEQ ID NO: 51568 - DNA, 26 bp, Homo sapiens
ctgtgttacaagatgatttatgtcac

SEQ ID NO: 51569 - DNA, 26 bp, Homo sapiens
tgtgttacaagatgatttatgtcact

SEQ ID NO: 51570 - DNA, 26 bp, Homo sapiens
gtgttacaagatgatttatgtcactg

SEQ ID NO: 51571 - DNA, 26 bp, Homo sapiens
tgttacaagatgatttatgtcactgc

SEQ ID NO: 51572 - DNA, 26 bp, Homo sapiens
gttacaagatgatttatgtcactgct

SEQ ID NO: 51573 - DNA, 26 bp, Homo sapiens
ttacaagatgatttatgtcactgcta

SEQ ID NO: 51574 - DNA, 26 bp, Homo sapiens
tacaagatgatttatgtcactgctat

SEQ ID NO: 51575 - DNA, 26 bp, Homo sapiens
acaagatgatttatgtcactgctatg

SEQ ID NO: 51576 - DNA, 26 bp, Homo sapiens
caagatgatttatgtcactgctatgt

SEQ ID NO: 51577 - DNA, 26 bp, Homo sapiens
aagatgatttatgtcactgctatgtc

SEQ ID NO: 51578 - DNA, 26 bp, Homo sapiens
agatgatttatgtcactgctatgtct

SEQ ID NO: 51579 - DNA, 26 bp, Homo sapiens
gatgatttatgtcactgctatgtctt

SEQ ID NO: 51580 - DNA, 26 bp, Homo sapiens
atgatttatgtcactgctatgtcttc

SEQ ID NO: 51581 - DNA, 26 bp, Homo sapiens
tgatttatgtcactgctatgtcttct

SEQ ID NO: 51582 - DNA, 26 bp, Homo sapiens
gatttatgtcactgctatgtcttctg

SEQ ID NO: 51583 - DNA, 26 bp, Homo sapiens
atttatgtcactgctatgtcttctgt

SEQ ID NO: 51584 - DNA, 26 bp, Homo sapiens
tttatgtcactgctatgtcttctgtc

SEQ ID NO: 51585 - DNA, 26 bp, Homo sapiens
ttatgtcactgctatgtcttctgtct

SEQ ID NO: 51586 - DNA, 26 bp, Homo sapiens
tatgtcactgctatgtcttctgtctc

SEQ ID NO: 51587 - DNA, 26 bp, Homo sapiens
atgtcactgctatgtcttctgtctcc

SEQ ID NO: 51588 - DNA, 26 bp, Homo sapiens
tgtcactgctatgtcttctgtctcct

SEQ ID NO: 51589 - DNA, 26 bp, Homo sapiens
gtcactgctatgtcttctgtctcctc

SEQ ID NO: 51590 - DNA, 26 bp, Homo sapiens
tcactgctatgtcttctgtctcctct

SEQ ID NO: 51591 - DNA, 26 bp, Homo sapiens
cactgctatgtcttctgtctcctctc

SEQ ID NO: 51592 - DNA, 26 bp, Homo sapiens
actgctatgtcttctgtctcctctcc

SEQ ID NO: 51593 - DNA, 26 bp, Homo sapiens
ctgctatgtcttctgtctcctctccc

SEQ ID NO: 51594 - DNA, 26 bp, Homo sapiens
tgctatgtcttctgtctcctctccca

SEQ ID NO: 51595 - DNA, 26 bp, Homo sapiens
gctatgtcttctgtctcctctcccac

SEQ ID NO: 51596 - DNA, 26 bp, Homo sapiens
ctatgtcttctgtctcctctcccacc

SEQ ID NO: 51597 - DNA, 26 bp, Homo sapiens
tatgtcttctgtctcctctcccacct

SEQ ID NO: 51598 - DNA, 26 bp, Homo sapiens
atgtcttctgtctcctctcccacctg

SEQ ID NO: 51599 - DNA, 26 bp, Homo sapiens
tgtcttctgtctcctctcccacctgt

SEQ ID NO: 51600 - DNA, 26 bp, Homo sapiens
gtcttctgtctcctctcccacctgtt

SEQ ID NO: 51601 - DNA, 26 bp, Homo sapiens
tcttctgtctcctctcccacctgttt

SEQ ID NO: 51602 - DNA, 26 bp, Homo sapiens
cttctgtctcctctcccacctgtttt

SEQ ID NO: 51603 - DNA, 26 bp, Homo sapiens
ttctgtctcctctcccacctgttttg

SEQ ID NO: 51604 - DNA, 26 bp, Homo sapiens
tctgtctcctctcccacctgttttgc

SEQ ID NO: 51605 - DNA, 26 bp, Homo sapiens
ctgtctcctctcccacctgttttgcc

SEQ ID NO: 51606 - DNA, 26 bp, Homo sapiens
tgtctcctctcccacctgttttgcct

SEQ ID NO: 51607 - DNA, 26 bp, Homo sapiens
gtctcctctcccacctgttttgcctt

SEQ ID NO: 51608 - DNA, 26 bp, Homo sapiens
tctcctctcccacctgttttgccttc

SEQ ID NO: 51609 - DNA, 26 bp, Homo sapiens
ctcctctcccacctgttttgccttcg

SEQ ID NO: 51610 - DNA, 26 bp, Homo sapiens
tcctctcccacctgttttgccttcga

SEQ ID NO: 51611 - DNA, 26 bp, Homo sapiens
cctctcccacctgttttgccttcgac

SEQ ID NO: 51612 - DNA, 26 bp, Homo sapiens
ctctcccacctgttttgccttcgact

SEQ ID NO: 51613 - DNA, 26 bp, Homo sapiens
tctcccacctgttttgccttcgactt

SEQ ID NO: 51614 - DNA, 26 bp, Homo sapiens
ctcccacctgttttgccttcgacttc

SEQ ID NO: 51615 - DNA, 26 bp, Homo sapiens
tcccacctgttttgccttcgacttca

SEQ ID NO: 51616 - DNA, 26 bp, Homo sapiens
cccacctgttttgccttcgacttcag

SEQ ID NO: 51617 - DNA, 26 bp, Homo sapiens
ccacctgttttgccttcgacttcaga

SEQ ID NO: 51618 - DNA, 26 bp, Homo sapiens
cacctgttttgccttcgacttcagag

SEQ ID NO: 51619 - DNA, 26 bp, Homo sapiens
acctgttttgccttcgacttcagaga

SEQ ID NO: 51620 - DNA, 26 bp, Homo sapiens
cctgttttgccttcgacttcagagag

SEQ ID NO: 51621 - DNA, 26 bp, Homo sapiens
ctgttttgccttcgacttcagagagc

SEQ ID NO: 51622 - DNA, 26 bp, Homo sapiens
tgttttgccttcgacttcagagagcc

SEQ ID NO: 51623 - DNA, 26 bp, Homo sapiens
gttttgccttcgacttcagagagcca

SEQ ID NO: 51624 - DNA, 26 bp, Homo sapiens
ttttgccttcgacttcagagagccaa

SEQ ID NO: 51625 - DNA, 26 bp, Homo sapiens
tttgccttcgacttcagagagccaag

SEQ ID NO: 51626 - DNA, 26 bp, Homo sapiens
ttgccttcgacttcagagagccaagc

SEQ ID NO: 51627 - DNA, 26 bp, Homo sapiens
tgccttcgacttcagagagccaagcc

SEQ ID NO: 51628 - DNA, 26 bp, Homo sapiens
gccttcgacttcagagagccaagcct

SEQ ID NO: 51629 - DNA, 26 bp, Homo sapiens
ccttcgacttcagagagccaagcctc

SEQ ID NO: 51630 - DNA, 26 bp, Homo sapiens
cttcgacttcagagagccaagcctca

SEQ ID NO: 51631 - DNA, 26 bp, Homo sapiens
ttcgacttcagagagccaagcctcat

SEQ ID NO: 51632 - DNA, 26 bp, Homo sapiens
tcgacttcagagagccaagcctcatt

SEQ ID NO: 51633 - DNA, 26 bp, Homo sapiens
cgacttcagagagccaagcctcattc

SEQ ID NO: 51634 - DNA, 26 bp, Homo sapiens
gacttcagagagccaagcctcattct

SEQ ID NO: 51635 - DNA, 26 bp, Homo sapiens
acttcagagagccaagcctcattctt

SEQ ID NO: 51636 - DNA, 26 bp, Homo sapiens
cttcagagagccaagcctcattctta

SEQ ID NO: 51637 - DNA, 26 bp, Homo sapiens
ttcagagagccaagcctcattcttat

SEQ ID NO: 51638 - DNA, 26 bp, Homo sapiens
tcagagagccaagcctcattcttatg

SEQ ID NO: 51639 - DNA, 26 bp, Homo sapiens
cagagagccaagcctcattcttatgg

SEQ ID NO: 51640 - DNA, 26 bp, Homo sapiens
agagagccaagcctcattcttatgga

SEQ ID NO: 51641 - DNA, 26 bp, Homo sapiens
gagagccaagcctcattcttatggat

SEQ ID NO: 51642 - DNA, 26 bp, Homo sapiens
agagccaagcctcattcttatggatt

SEQ ID NO: 51643 - DNA, 26 bp, Homo sapiens
gagccaagcctcattcttatggattt

SEQ ID NO: 51644 - DNA, 26 bp, Homo sapiens
agccaagcctcattcttatggatttc

SEQ ID NO: 51645 - DNA, 26 bp, Homo sapiens
gccaagcctcattcttatggatttcc

SEQ ID NO: 51646 - DNA, 26 bp, Homo sapiens
ccaagcctcattcttatggatttcca

SEQ ID NO: 51647 - DNA, 26 bp, Homo sapiens
caagcctcattcttatggatttccat

SEQ ID NO: 51648 - DNA, 26 bp, Homo sapiens
aagcctcattcttatggatttccatt

SEQ ID NO: 51649 - DNA, 26 bp, Homo sapiens
agcctcattcttatggatttccattc

SEQ ID NO: 51650 - DNA, 26 bp, Homo sapiens
gcctcattcttatggatttccattcg

SEQ ID NO: 51651 - DNA, 26 bp, Homo sapiens
cctcattcttatggatttccattcgt

SEQ ID NO: 51652 - DNA, 26 bp, Homo sapiens
ctcattcttatggatttccattcgta

SEQ ID NO: 51653 - DNA, 26 bp, Homo sapiens
tcattcttatggatttccattcgtag

SEQ ID NO: 51654 - DNA, 26 bp, Homo sapiens
cattcttatggatttccattcgtagg

SEQ ID NO: 51655 - DNA, 26 bp, Homo sapiens
attcttatggatttccattcgtaggc

SEQ ID NO: 51656 - DNA, 26 bp, Homo sapiens
ttcttatggatttccattcgtaggcg

SEQ ID NO: 51657 - DNA, 26 bp, Homo sapiens
tcttatggatttccattcgtaggcgg

SEQ ID NO: 51658 - DNA, 26 bp, Homo sapiens
cttatggatttccattcgtaggcggt

SEQ ID NO: 51659 - DNA, 26 bp, Homo sapiens
ttatggatttccattcgtaggcggtc

SEQ ID NO: 51660 - DNA, 26 bp, Homo sapiens
tatggatttccattcgtaggcggtca

SEQ ID NO: 51661 - DNA, 26 bp, Homo sapiens
atggatttccattcgtaggcggtcaa

SEQ ID NO: 51662 - DNA, 26 bp, Homo sapiens
tggatttccattcgtaggcggtcaat

SEQ ID NO: 51663 - DNA, 26 bp, Homo sapiens
ggatttccattcgtaggcggtcaatg

SEQ ID NO: 51664 - DNA, 26 bp, Homo sapiens
gatttccattcgtaggcggtcaatgt

SEQ ID NO: 51665 - DNA, 26 bp, Homo sapiens
atttccattcgtaggcggtcaatgtt

SEQ ID NO: 51666 - DNA, 26 bp, Homo sapiens
tttccattcgtaggcggtcaatgtta

SEQ ID NO: 51667 - DNA, 26 bp, Homo sapiens
ttccattcgtaggcggtcaatgttat

SEQ ID NO: 51668 - DNA, 26 bp, Homo sapiens
tccattcgtaggcggtcaatgttatt

SEQ ID NO: 51669 - DNA, 26 bp, Homo sapiens
ccattcgtaggcggtcaatgttattc

SEQ ID NO: 51670 - DNA, 26 bp, Homo sapiens
cattcgtaggcggtcaatgttattca

SEQ ID NO: 51671 - DNA, 26 bp, Homo sapiens
attcgtaggcggtcaatgttattcat

SEQ ID NO: 51672 - DNA, 26 bp, Homo sapiens
ttcgtaggcggtcaatgttattcatg

SEQ ID NO: 51673 - DNA, 26 bp, Homo sapiens
tcgtaggcggtcaatgttattcatgg

SEQ ID NO: 51674 - DNA, 26 bp, Homo sapiens
cgtaggcggtcaatgttattcatggt

SEQ ID NO: 51675 - DNA, 26 bp, Homo sapiens
gtaggcggtcaatgttattcatggtc

SEQ ID NO: 51676 - DNA, 26 bp, Homo sapiens
taggcggtcaatgttattcatggtct

SEQ ID NO: 51677 - DNA, 26 bp, Homo sapiens
aggcggtcaatgttattcatggtctc

SEQ ID NO: 51678 - DNA, 26 bp, Homo sapiens
ggcggtcaatgttattcatggtctct

SEQ ID NO: 51679 - DNA, 26 bp, Homo sapiens
gcggtcaatgttattcatggtctctg

SEQ ID NO: 51680 - DNA, 26 bp, Homo sapiens
cggtcaatgttattcatggtctctgc

SEQ ID NO: 51681 - DNA, 26 bp, Homo sapiens
ggtcaatgttattcatggtctctgct

SEQ ID NO: 51682 - DNA, 26 bp, Homo sapiens
gtcaatgttattcatggtctctgcta

SEQ ID NO: 51683 - DNA, 26 bp, Homo sapiens
tcaatgttattcatggtctctgctaa

SEQ ID NO: 51684 - DNA, 26 bp, Homo sapiens
caatgttattcatggtctctgctaat

SEQ ID NO: 51685 - DNA, 26 bp, Homo sapiens
aatgttattcatggtctctgctaatt

SEQ ID NO: 51686 - DNA, 26 bp, Homo sapiens
atgttattcatggtctctgctaattt

SEQ ID NO: 51687 - DNA, 26 bp, Homo sapiens
tgttattcatggtctctgctaattta

SEQ ID NO: 51688 - DNA, 26 bp, Homo sapiens
gttattcatggtctctgctaatttag

SEQ ID NO: 51689 - DNA, 26 bp, Homo sapiens
ttattcatggtctctgctaatttagg

SEQ ID NO: 51690 - DNA, 26 bp, Homo sapiens
tattcatggtctctgctaatttaggc

SEQ ID NO: 51691 - DNA, 26 bp, Homo sapiens
attcatggtctctgctaatttaggct

SEQ ID NO: 51692 - DNA, 26 bp, Homo sapiens
ttcatggtctctgctaatttaggctg

SEQ ID NO: 51693 - DNA, 26 bp, Homo sapiens
tcatggtctctgctaatttaggctgc

SEQ ID NO: 51694 - DNA, 26 bp, Homo sapiens
catggtctctgctaatttaggctgca

SEQ ID NO: 51695 - DNA, 26 bp, Homo sapiens
atggtctctgctaatttaggctgcaa

SEQ ID NO: 51696 - DNA, 26 bp, Homo sapiens
tggtctctgctaatttaggctgcaaa

SEQ ID NO: 51697 - DNA, 26 bp, Homo sapiens
ggtctctgctaatttaggctgcaaac

SEQ ID NO: 51698 - DNA, 26 bp, Homo sapiens
gtctctgctaatttaggctgcaaact

SEQ ID NO: 51699 - DNA, 26 bp, Homo sapiens
tctctgctaatttaggctgcaaactc

SEQ ID NO: 51700 - DNA, 26 bp, Homo sapiens
ctctgctaatttaggctgcaaactcc

SEQ ID NO: 51701 - DNA, 26 bp, Homo sapiens
tctgctaatttaggctgcaaactccc

SEQ ID NO: 51702 - DNA, 26 bp, Homo sapiens
ctgctaatttaggctgcaaactccct

SEQ ID NO: 51703 - DNA, 26 bp, Homo sapiens
tgctaatttaggctgcaaactccctg

SEQ ID NO: 51704 - DNA, 26 bp, Homo sapiens
gctaatttaggctgcaaactccctgg

SEQ ID NO: 51705 - DNA, 26 bp, Homo sapiens
ctaatttaggctgcaaactccctgga

SEQ ID NO: 51706 - DNA, 26 bp, Homo sapiens
taatttaggctgcaaactccctggat

SEQ ID NO: 51707 - DNA, 26 bp, Homo sapiens
aatttaggctgcaaactccctggatc

SEQ ID NO: 51708 - DNA, 26 bp, Homo sapiens
atttaggctgcaaactccctggatcc

SEQ ID NO: 51709 - DNA, 26 bp, Homo sapiens
tttaggctgcaaactccctggatccc

SEQ ID NO: 51710 - DNA, 26 bp, Homo sapiens
ttaggctgcaaactccctggatcccc

SEQ ID NO: 51711 - DNA, 26 bp, Homo sapiens
taggctgcaaactccctggatccccc

SEQ ID NO: 51712 - DNA, 26 bp, Homo sapiens
aggctgcaaactccctggatccccca

SEQ ID NO: 51713 - DNA, 26 bp, Homo sapiens
ggctgcaaactccctggatcccccat

SEQ ID NO: 51714 - DNA, 26 bp, Homo sapiens
gctgcaaactccctggatcccccatt

SEQ ID NO: 51715 - DNA, 26 bp, Homo sapiens
ctgcaaactccctggatcccccattt

SEQ ID NO: 51716 - DNA, 26 bp, Homo sapiens
tgcaaactccctggatcccccatttg

SEQ ID NO: 51717 - DNA, 26 bp, Homo sapiens
gcaaactccctggatcccccatttgt

SEQ ID NO: 51718 - DNA, 26 bp, Homo sapiens
caaactccctggatcccccatttgtg

SEQ ID NO: 51719 - DNA, 26 bp, Homo sapiens
aaactccctggatcccccatttgtgg

SEQ ID NO: 51720 - DNA, 26 bp, Homo sapiens
aactccctggatcccccatttgtgga

SEQ ID NO: 51721 - DNA, 26 bp, Homo sapiens
actccctggatcccccatttgtggat

SEQ ID NO: 51722 - DNA, 26 bp, Homo sapiens
ctccctggatcccccatttgtggatt

SEQ ID NO: 51723 - DNA, 26 bp, Homo sapiens
tccctggatcccccatttgtggattc

SEQ ID NO: 51724 - DNA, 26 bp, Homo sapiens
ccctggatcccccatttgtggattct

SEQ ID NO: 51725 - DNA, 26 bp, Homo sapiens
cctggatcccccatttgtggattctt

SEQ ID NO: 51726 - DNA, 26 bp, Homo sapiens
ctggatcccccatttgtggattcttc

SEQ ID NO: 51727 - DNA, 26 bp, Homo sapiens
tggatcccccatttgtggattcttct

SEQ ID NO: 51728 - DNA, 26 bp, Homo sapiens
ggatcccccatttgtggattcttctc

SEQ ID NO: 51729 - DNA, 26 bp, Homo sapiens
gatcccccatttgtggattcttctca

SEQ ID NO: 51730 - DNA, 26 bp, Homo sapiens
atcccccatttgtggattcttctcat

SEQ ID NO: 51731 - DNA, 26 bp, Homo sapiens
tcccccatttgtggattcttctcata

SEQ ID NO: 51732 - DNA, 26 bp, Homo sapiens
cccccatttgtggattcttctcatat

SEQ ID NO: 51733 - DNA, 26 bp, Homo sapiens
ccccatttgtggattcttctcatata

SEQ ID NO: 51734 - DNA, 26 bp, Homo sapiens
cccatttgtggattcttctcatatac

SEQ ID NO: 51735 - DNA, 26 bp, Homo sapiens
ccatttgtggattcttctcatataca

SEQ ID NO: 51736 - DNA, 26 bp, Homo sapiens
catttgtggattcttctcatatacat

SEQ ID NO: 51737 - DNA, 26 bp, Homo sapiens
atttgtggattcttctcatatacatc

SEQ ID NO: 51738 - DNA, 26 bp, Homo sapiens
tttgtggattcttctcatatacatct

SEQ ID NO: 51739 - DNA, 26 bp, Homo sapiens
ttgtggattcttctcatatacatctt

SEQ ID NO: 51740 - DNA, 26 bp, Homo sapiens
tgtggattcttctcatatacatcttt

SEQ ID NO: 51741 - DNA, 26 bp, Homo sapiens
gtggattcttctcatatacatctttc

SEQ ID NO: 51742 - DNA, 26 bp, Homo sapiens
tggattcttctcatatacatctttca

SEQ ID NO: 51743 - DNA, 26 bp, Homo sapiens
ggattcttctcatatacatctttcat

SEQ ID NO: 51744 - DNA, 26 bp, Homo sapiens
gattcttctcatatacatctttcatt

SEQ ID NO: 51745 - DNA, 26 bp, Homo sapiens
attcttctcatatacatctttcattt

SEQ ID NO: 51746 - DNA, 26 bp, Homo sapiens
ttcttctcatatacatctttcatttt

SEQ ID NO: 51747 - DNA, 26 bp, Homo sapiens
tcttctcatatacatctttcattttg

SEQ ID NO: 51748 - DNA, 26 bp, Homo sapiens
cttctcatatacatctttcattttgt

SEQ ID NO: 51749 - DNA, 26 bp, Homo sapiens
ttctcatatacatctttcattttgtt

SEQ ID NO: 51750 - DNA, 26 bp, Homo sapiens
tctcatatacatctttcattttgttg

SEQ ID NO: 51751 - DNA, 26 bp, Homo sapiens
ctcatatacatctttcattttgttga

SEQ ID NO: 51752 - DNA, 26 bp, Homo sapiens
tcatatacatctttcattttgttgag

SEQ ID NO: 51753 - DNA, 26 bp, Homo sapiens
catatacatctttcattttgttgagt

SEQ ID NO: 51754 - DNA, 26 bp, Homo sapiens
atatacatctttcattttgttgagtg

SEQ ID NO: 51755 - DNA, 26 bp, Homo sapiens
tatacatctttcattttgttgagtgc

SEQ ID NO: 51756 - DNA, 26 bp, Homo sapiens
atacatctttcattttgttgagtgca

SEQ ID NO: 51757 - DNA, 26 bp, Homo sapiens
tacatctttcattttgttgagtgcat

SEQ ID NO: 51758 - DNA, 26 bp, Homo sapiens
acatctttcattttgttgagtgcatc

SEQ ID NO: 51759 - DNA, 26 bp, Homo sapiens
catctttcattttgttgagtgcatct

SEQ ID NO: 51760 - DNA, 26 bp, Homo sapiens
atctttcattttgttgagtgcatctt

SEQ ID NO: 51761 - DNA, 26 bp, Homo sapiens
tctttcattttgttgagtgcatcttt

SEQ ID NO: 51762 - DNA, 26 bp, Homo sapiens
ctttcattttgttgagtgcatctttt

SEQ ID NO: 51763 - DNA, 26 bp, Homo sapiens
tttcattttgttgagtgcatcttttt

SEQ ID NO: 51764 - DNA, 26 bp, Homo sapiens
ttcattttgttgagtgcatctttttg

SEQ ID NO: 51765 - DNA, 26 bp, Homo sapiens
tcattttgttgagtgcatctttttgg

SEQ ID NO: 51766 - DNA, 26 bp, Homo sapiens
cattttgttgagtgcatctttttggt

SEQ ID NO: 51767 - DNA, 26 bp, Homo sapiens
attttgttgagtgcatctttttggtc

SEQ ID NO: 51768 - DNA, 26 bp, Homo sapiens
ttttgttgagtgcatctttttggtct

SEQ ID NO: 51769 - DNA, 26 bp, Homo sapiens
tttgttgagtgcatctttttggtctg

SEQ ID NO: 51770 - DNA, 26 bp, Homo sapiens
ttgttgagtgcatctttttggtctga

SEQ ID NO: 51771 - DNA, 26 bp, Homo sapiens
tgttgagtgcatctttttggtctgat

SEQ ID NO: 51772 - DNA, 26 bp, Homo sapiens
gttgagtgcatctttttggtctgatt

SEQ ID NO: 51773 - DNA, 26 bp, Homo sapiens
ttgagtgcatctttttggtctgattc

SEQ ID NO: 51774 - DNA, 26 bp, Homo sapiens
tgagtgcatctttttggtctgattct

SEQ ID NO: 51775 - DNA, 26 bp, Homo sapiens
gagtgcatctttttggtctgattctt

SEQ ID NO: 51776 - DNA, 26 bp, Homo sapiens
agtgcatctttttggtctgattcttt

SEQ ID NO: 51777 - DNA, 26 bp, Homo sapiens
gtgcatctttttggtctgattctttc

SEQ ID NO: 51778 - DNA, 26 bp, Homo sapiens
tgcatctttttggtctgattctttct

SEQ ID NO: 51779 - DNA, 26 bp, Homo sapiens
gcatctttttggtctgattctttctg

SEQ ID NO: 51780 - DNA, 26 bp, Homo sapiens
catctttttggtctgattctttctgt

SEQ ID NO: 51781 - DNA, 26 bp, Homo sapiens
atctttttggtctgattctttctgta

SEQ ID NO: 51782 - DNA, 26 bp, Homo sapiens
tctttttggtctgattctttctgtag

SEQ ID NO: 51783 - DNA, 26 bp, Homo sapiens
ctttttggtctgattctttctgtagt

SEQ ID NO: 51784 - DNA, 26 bp, Homo sapiens
tttttggtctgattctttctgtagtt

SEQ ID NO: 51785 - DNA, 26 bp, Homo sapiens
ttttggtctgattctttctgtagttc

SEQ ID NO: 51786 - DNA, 26 bp, Homo sapiens
tttggtctgattctttctgtagttct

SEQ ID NO: 51787 - DNA, 26 bp, Homo sapiens
ttggtctgattctttctgtagttctc

SEQ ID NO: 51788 - DNA, 26 bp, Homo sapiens
tggtctgattctttctgtagttctct

SEQ ID NO: 51789 - DNA, 26 bp, Homo sapiens
ggtctgattctttctgtagttctctg

SEQ ID NO: 51790 - DNA, 26 bp, Homo sapiens
gtctgattctttctgtagttctctgt

SEQ ID NO: 51791 - DNA, 26 bp, Homo sapiens
tctgattctttctgtagttctctgtt

SEQ ID NO: 51792 - DNA, 26 bp, Homo sapiens
ctgattctttctgtagttctctgtta

SEQ ID NO: 51793 - DNA, 26 bp, Homo sapiens
tgattctttctgtagttctctgttaa

SEQ ID NO: 51794 - DNA, 26 bp, Homo sapiens
gattctttctgtagttctctgttaag

SEQ ID NO: 51795 - DNA, 26 bp, Homo sapiens
attctttctgtagttctctgttaagt

SEQ ID NO: 51796 - DNA, 26 bp, Homo sapiens
ttctttctgtagttctctgttaagtt

SEQ ID NO: 51797 - DNA, 26 bp, Homo sapiens
tctttctgtagttctctgttaagttc

SEQ ID NO: 51798 - DNA, 26 bp, Homo sapiens
ctttctgtagttctctgttaagttca

SEQ ID NO: 51799 - DNA, 26 bp, Homo sapiens
tttctgtagttctctgttaagttcat

SEQ ID NO: 51800 - DNA, 26 bp, Homo sapiens
ttctgtagttctctgttaagttcatc

SEQ ID NO: 51801 - DNA, 26 bp, Homo sapiens
tctgtagttctctgttaagttcatca

SEQ ID NO: 51802 - DNA, 26 bp, Homo sapiens
ctgtagttctctgttaagttcatcaa

SEQ ID NO: 51803 - DNA, 26 bp, Homo sapiens
tgtagttctctgttaagttcatcaat

SEQ ID NO: 51804 - DNA, 26 bp, Homo sapiens
gtagttctctgttaagttcatcaatg

SEQ ID NO: 51805 - DNA, 26 bp, Homo sapiens
tagttctctgttaagttcatcaatgc

SEQ ID NO: 51806 - DNA, 26 bp, Homo sapiens
agttctctgttaagttcatcaatgcg

SEQ ID NO: 51807 - DNA, 26 bp, Homo sapiens
gttctctgttaagttcatcaatgcgc

SEQ ID NO: 51808 - DNA, 26 bp, Homo sapiens
ttctctgttaagttcatcaatgcgct

SEQ ID NO: 51809 - DNA, 26 bp, Homo sapiens
tctctgttaagttcatcaatgcgctg

SEQ ID NO: 51810 - DNA, 26 bp, Homo sapiens
ctctgttaagttcatcaatgcgctgc

SEQ ID NO: 51811 - DNA, 26 bp, Homo sapiens
tctgttaagttcatcaatgcgctgct

SEQ ID NO: 51812 - DNA, 26 bp, Homo sapiens
ctgttaagttcatcaatgcgctgctg

SEQ ID NO: 51813 - DNA, 26 bp, Homo sapiens
tgttaagttcatcaatgcgctgctgt

SEQ ID NO: 51814 - DNA, 26 bp, Homo sapiens
gttaagttcatcaatgcgctgctgta

SEQ ID NO: 51815 - DNA, 26 bp, Homo sapiens
ttaagttcatcaatgcgctgctgtag

SEQ ID NO: 51816 - DNA, 26 bp, Homo sapiens
taagttcatcaatgcgctgctgtagt

SEQ ID NO: 51817 - DNA, 26 bp, Homo sapiens
aagttcatcaatgcgctgctgtagtt

SEQ ID NO: 51818 - DNA, 26 bp, Homo sapiens
agttcatcaatgcgctgctgtagttt

SEQ ID NO: 51819 - DNA, 26 bp, Homo sapiens
gttcatcaatgcgctgctgtagtttt

SEQ ID NO: 51820 - DNA, 26 bp, Homo sapiens
ttcatcaatgcgctgctgtagttttt

SEQ ID NO: 51821 - DNA, 26 bp, Homo sapiens
tcatcaatgcgctgctgtagtttttt

SEQ ID NO: 51822 - DNA, 26 bp, Homo sapiens
catcaatgcgctgctgtagtttttta

SEQ ID NO: 51823 - DNA, 26 bp, Homo sapiens
atcaatgcgctgctgtagttttttac

SEQ ID NO: 51824 - DNA, 26 bp, Homo sapiens
tcaatgcgctgctgtagttttttacg

SEQ ID NO: 51825 - DNA, 26 bp, Homo sapiens
caatgcgctgctgtagttttttacgt

SEQ ID NO: 51826 - DNA, 26 bp, Homo sapiens
aatgcgctgctgtagttttttacgtc

SEQ ID NO: 51827 - DNA, 26 bp, Homo sapiens
atgcgctgctgtagttttttacgtct

SEQ ID NO: 51828 - DNA, 26 bp, Homo sapiens
tgcgctgctgtagttttttacgtctc

SEQ ID NO: 51829 - DNA, 26 bp, Homo sapiens
gcgctgctgtagttttttacgtctct

SEQ ID NO: 51830 - DNA, 26 bp, Homo sapiens
cgctgctgtagttttttacgtctctg

SEQ ID NO: 51831 - DNA, 26 bp, Homo sapiens
gctgctgtagttttttacgtctctgt

SEQ ID NO: 51832 - DNA, 26 bp, Homo sapiens
ctgctgtagttttttacgtctctgtt

SEQ ID NO: 51833 - DNA, 26 bp, Homo sapiens
tgctgtagttttttacgtctctgttc

SEQ ID NO: 51834 - DNA, 26 bp, Homo sapiens
gctgtagttttttacgtctctgttct

SEQ ID NO: 51835 - DNA, 26 bp, Homo sapiens
ctgtagttttttacgtctctgttctg

SEQ ID NO: 51836 - DNA, 26 bp, Homo sapiens
tgtagttttttacgtctctgttctgg

SEQ ID NO: 51837 - DNA, 26 bp, Homo sapiens
gtagttttttacgtctctgttctggt

SEQ ID NO: 51838 - DNA, 26 bp, Homo sapiens
tagttttttacgtctctgttctggtg

SEQ ID NO: 51839 - DNA, 26 bp, Homo sapiens
agttttttacgtctctgttctggtgg

SEQ ID NO: 51840 - DNA, 26 bp, Homo sapiens
gttttttacgtctctgttctggtggc

SEQ ID NO: 51841 - DNA, 26 bp, Homo sapiens
ttttttacgtctctgttctggtggca

SEQ ID NO: 51842 - DNA, 26 bp, Homo sapiens
tttttacgtctctgttctggtggcag

SEQ ID NO: 51843 - DNA, 26 bp, Homo sapiens
ttttacgtctctgttctggtggcaga

SEQ ID NO: 51844 - DNA, 26 bp, Homo sapiens
tttacgtctctgttctggtggcagat

SEQ ID NO: 51845 - DNA, 26 bp, Homo sapiens
ttacgtctctgttctggtggcagatg

SEQ ID NO: 51846 - DNA, 26 bp, Homo sapiens
tacgtctctgttctggtggcagatga

SEQ ID NO: 51847 - DNA, 26 bp, Homo sapiens
acgtctctgttctggtggcagatgac

SEQ ID NO: 51848 - DNA, 26 bp, Homo sapiens
cgtctctgttctggtggcagatgact

SEQ ID NO: 51849 - DNA, 26 bp, Homo sapiens
gtctctgttctggtggcagatgactg

SEQ ID NO: 51850 - DNA, 26 bp, Homo sapiens
tctctgttctggtggcagatgactga

SEQ ID NO: 51851 - DNA, 26 bp, Homo sapiens
ctctgttctggtggcagatgactgaa

SEQ ID NO: 51852 - DNA, 26 bp, Homo sapiens
tctgttctggtggcagatgactgaaa

SEQ ID NO: 51853 - DNA, 26 bp, Homo sapiens
ctgttctggtggcagatgactgaaat

SEQ ID NO: 51854 - DNA, 26 bp, Homo sapiens
tgttctggtggcagatgactgaaatc

SEQ ID NO: 51855 - DNA, 26 bp, Homo sapiens
gttctggtggcagatgactgaaatct

SEQ ID NO: 51856 - DNA, 26 bp, Homo sapiens
ttctggtggcagatgactgaaatctt

SEQ ID NO: 51857 - DNA, 26 bp, Homo sapiens
tctggtggcagatgactgaaatcttc

SEQ ID NO: 51858 - DNA, 26 bp, Homo sapiens
ctggtggcagatgactgaaatcttct

SEQ ID NO: 51859 - DNA, 26 bp, Homo sapiens
tggtggcagatgactgaaatcttcta

SEQ ID NO: 51860 - DNA, 26 bp, Homo sapiens
ggtggcagatgactgaaatcttctag

SEQ ID NO: 51861 - DNA, 26 bp, Homo sapiens
gtggcagatgactgaaatcttctagt

SEQ ID NO: 51862 - DNA, 26 bp, Homo sapiens
tggcagatgactgaaatcttctagtg

SEQ ID NO: 51863 - DNA, 26 bp, Homo sapiens
ggcagatgactgaaatcttctagtgc

SEQ ID NO: 51864 - DNA, 26 bp, Homo sapiens
gcagatgactgaaatcttctagtgct

SEQ ID NO: 51865 - DNA, 26 bp, Homo sapiens
cagatgactgaaatcttctagtgctg

SEQ ID NO: 51866 - DNA, 26 bp, Homo sapiens
agatgactgaaatcttctagtgctgg

SEQ ID NO: 51867 - DNA, 26 bp, Homo sapiens
gatgactgaaatcttctagtgctggg

SEQ ID NO: 51868 - DNA, 26 bp, Homo sapiens
atgactgaaatcttctagtgctgggc

SEQ ID NO: 51869 - DNA, 26 bp, Homo sapiens
tgactgaaatcttctagtgctgggcc

SEQ ID NO: 51870 - DNA, 26 bp, Homo sapiens
gactgaaatcttctagtgctgggccc

SEQ ID NO: 51871 - DNA, 26 bp, Homo sapiens
actgaaatcttctagtgctgggccct

SEQ ID NO: 51872 - DNA, 26 bp, Homo sapiens
ctgaaatcttctagtgctgggccctt

SEQ ID NO: 51873 - DNA, 26 bp, Homo sapiens
tgaaatcttctagtgctgggcccttt

SEQ ID NO: 51874 - DNA, 26 bp, Homo sapiens
gaaatcttctagtgctgggccctttg

SEQ ID NO: 51875 - DNA, 26 bp, Homo sapiens
aaatcttctagtgctgggccctttgg

SEQ ID NO: 51876 - DNA, 26 bp, Homo sapiens
aatcttctagtgctgggccctttggc

SEQ ID NO: 51877 - DNA, 26 bp, Homo sapiens
atcttctagtgctgggccctttggct

SEQ ID NO: 51878 - DNA, 26 bp, Homo sapiens
tcttctagtgctgggccctttggctt

SEQ ID NO: 51879 - DNA, 26 bp, Homo sapiens
cttctagtgctgggccctttggcttc

SEQ ID NO: 51880 - DNA, 26 bp, Homo sapiens
ttctagtgctgggccctttggcttct

SEQ ID NO: 51881 - DNA, 26 bp, Homo sapiens
tctagtgctgggccctttggcttctt

SEQ ID NO: 51882 - DNA, 26 bp, Homo sapiens
ctagtgctgggccctttggcttcttt

SEQ ID NO: 51883 - DNA, 26 bp, Homo sapiens
tagtgctgggccctttggcttctttc

SEQ ID NO: 51884 - DNA, 26 bp, Homo sapiens
agtgctgggccctttggcttctttcc

SEQ ID NO: 51885 - DNA, 26 bp, Homo sapiens
gtgctgggccctttggcttctttcca

SEQ ID NO: 51886 - DNA, 26 bp, Homo sapiens
tgctgggccctttggcttctttccaa

SEQ ID NO: 51887 - DNA, 26 bp, Homo sapiens
gctgggccctttggcttctttccaaa

SEQ ID NO: 51888 - DNA, 26 bp, Homo sapiens
ctgggccctttggcttctttccaaag

SEQ ID NO: 51889 - DNA, 26 bp, Homo sapiens
tgggccctttggcttctttccaaaga

SEQ ID NO: 51890 - DNA, 26 bp, Homo sapiens
gggccctttggcttctttccaaagag

SEQ ID NO: 51891 - DNA, 26 bp, Homo sapiens
ggccctttggcttctttccaaagagc

SEQ ID NO: 51892 - DNA, 26 bp, Homo sapiens
gccctttggcttctttccaaagagcc

SEQ ID NO: 51893 - DNA, 26 bp, Homo sapiens
ccctttggcttctttccaaagagcca

SEQ ID NO: 51894 - DNA, 26 bp, Homo sapiens
cctttggcttctttccaaagagccac

SEQ ID NO: 51895 - DNA, 26 bp, Homo sapiens
ctttggcttctttccaaagagccaca

SEQ ID NO: 51896 - DNA, 26 bp, Homo sapiens
tttggcttctttccaaagagccacaa

SEQ ID NO: 51897 - DNA, 26 bp, Homo sapiens
ttggcttctttccaaagagccacaat

SEQ ID NO: 51898 - DNA, 26 bp, Homo sapiens
tggcttctttccaaagagccacaatt

SEQ ID NO: 51899 - DNA, 26 bp, Homo sapiens
ggcttctttccaaagagccacaattt

SEQ ID NO: 51900 - DNA, 26 bp, Homo sapiens
gcttctttccaaagagccacaatttg

SEQ ID NO: 51901 - DNA, 26 bp, Homo sapiens
cttctttccaaagagccacaatttgc

SEQ ID NO: 51902 - DNA, 26 bp, Homo sapiens
ttctttccaaagagccacaatttgcc

SEQ ID NO: 51903 - DNA, 26 bp, Homo sapiens
tctttccaaagagccacaatttgccc

SEQ ID NO: 51904 - DNA, 26 bp, Homo sapiens
ctttccaaagagccacaatttgccct

SEQ ID NO: 51905 - DNA, 26 bp, Homo sapiens
tttccaaagagccacaatttgccctt

SEQ ID NO: 51906 - DNA, 26 bp, Homo sapiens
ttccaaagagccacaatttgcccttg

SEQ ID NO: 51907 - DNA, 26 bp, Homo sapiens
tccaaagagccacaatttgcccttgg

SEQ ID NO: 51908 - DNA, 26 bp, Homo sapiens
ccaaagagccacaatttgcccttggc

SEQ ID NO: 51909 - DNA, 26 bp, Homo sapiens
caaagagccacaatttgcccttggcc

SEQ ID NO: 51910 - DNA, 26 bp, Homo sapiens
aaagagccacaatttgcccttggcct

SEQ ID NO: 51911 - DNA, 26 bp, Homo sapiens
aagagccacaatttgcccttggcctt

SEQ ID NO: 51912 - DNA, 26 bp, Homo sapiens
agagccacaatttgcccttggccttt

SEQ ID NO: 51913 - DNA, 26 bp, Homo sapiens
gagccacaatttgcccttggcctttc

SEQ ID NO: 51914 - DNA, 26 bp, Homo sapiens
agccacaatttgcccttggcctttcc

SEQ ID NO: 51915 - DNA, 26 bp, Homo sapiens
gccacaatttgcccttggcctttcct

SEQ ID NO: 51916 - DNA, 26 bp, Homo sapiens
ccacaatttgcccttggcctttccta

SEQ ID NO: 51917 - DNA, 26 bp, Homo sapiens
cacaatttgcccttggcctttcctac

SEQ ID NO: 51918 - DNA, 26 bp, Homo sapiens
acaatttgcccttggcctttcctact

SEQ ID NO: 51919 - DNA, 26 bp, Homo sapiens
caatttgcccttggcctttcctactg

SEQ ID NO: 51920 - DNA, 26 bp, Homo sapiens
aatttgcccttggcctttcctactgt

SEQ ID NO: 51921 - DNA, 26 bp, Homo sapiens
atttgcccttggcctttcctactgtg

SEQ ID NO: 51922 - DNA, 26 bp, Homo sapiens
tttgcccttggcctttcctactgtgg

SEQ ID NO: 51923 - DNA, 26 bp, Homo sapiens
ttgcccttggcctttcctactgtggt

SEQ ID NO: 51924 - DNA, 26 bp, Homo sapiens
tgcccttggcctttcctactgtggtt

SEQ ID NO: 51925 - DNA, 26 bp, Homo sapiens
gcccttggcctttcctactgtggttt

SEQ ID NO: 51926 - DNA, 26 bp, Homo sapiens
cccttggcctttcctactgtggtttt

SEQ ID NO: 51927 - DNA, 26 bp, Homo sapiens
ccttggcctttcctactgtggttttg

SEQ ID NO: 51928 - DNA, 26 bp, Homo sapiens
cttggcctttcctactgtggttttgg

SEQ ID NO: 51929 - DNA, 26 bp, Homo sapiens
ttggcctttcctactgtggttttggc

SEQ ID NO: 51930 - DNA, 26 bp, Homo sapiens
tggcctttcctactgtggttttggca

SEQ ID NO: 51931 - DNA, 26 bp, Homo sapiens
ggcctttcctactgtggttttggcat

SEQ ID NO: 51932 - DNA, 26 bp, Homo sapiens
gcctttcctactgtggttttggcatc

SEQ ID NO: 51933 - DNA, 26 bp, Homo sapiens
cctttcctactgtggttttggcatcc

SEQ ID NO: 51934 - DNA, 26 bp, Homo sapiens
ctttcctactgtggttttggcatcca

SEQ ID NO: 51935 - DNA, 26 bp, Homo sapiens
tttcctactgtggttttggcatccat

SEQ ID NO: 51936 - DNA, 26 bp, Homo sapiens
ttcctactgtggttttggcatccatc

SEQ ID NO: 51937 - DNA, 26 bp, Homo sapiens
tcctactgtggttttggcatccatct

SEQ ID NO: 51938 - DNA, 26 bp, Homo sapiens
cctactgtggttttggcatccatctt

SEQ ID NO: 51939 - DNA, 26 bp, Homo sapiens
ctactgtggttttggcatccatcttc

SEQ ID NO: 51940 - DNA, 26 bp, Homo sapiens
tactgtggttttggcatccatcttcc

SEQ ID NO: 51941 - DNA, 26 bp, Homo sapiens
actgtggttttggcatccatcttccc

SEQ ID NO: 51942 - DNA, 26 bp, Homo sapiens
ctgtggttttggcatccatcttccca

SEQ ID NO: 51943 - DNA, 26 bp, Homo sapiens
tgtggttttggcatccatcttcccac

SEQ ID NO: 51944 - DNA, 26 bp, Homo sapiens
gtggttttggcatccatcttcccact

SEQ ID NO: 51945 - DNA, 26 bp, Homo sapiens
tggttttggcatccatcttcccactc

SEQ ID NO: 51946 - DNA, 26 bp, Homo sapiens
ggttttggcatccatcttcccactct

SEQ ID NO: 51947 - DNA, 26 bp, Homo sapiens
gttttggcatccatcttcccactctc

SEQ ID NO: 51948 - DNA, 26 bp, Homo sapiens
ttttggcatccatcttcccactctcc

SEQ ID NO: 51949 - DNA, 26 bp, Homo sapiens
tttggcatccatcttcccactctcct

SEQ ID NO: 51950 - DNA, 26 bp, Homo sapiens
ttggcatccatcttcccactctcctg

SEQ ID NO: 51951 - DNA, 26 bp, Homo sapiens
tggcatccatcttcccactctcctgt

SEQ ID NO: 51952 - DNA, 26 bp, Homo sapiens
ggcatccatcttcccactctcctgtt

SEQ ID NO: 51953 - DNA, 26 bp, Homo sapiens
gcatccatcttcccactctcctgttt

SEQ ID NO: 51954 - DNA, 26 bp, Homo sapiens
catccatcttcccactctcctgtttg

SEQ ID NO: 51955 - DNA, 26 bp, Homo sapiens
atccatcttcccactctcctgtttgg

SEQ ID NO: 51956 - DNA, 26 bp, Homo sapiens
tccatcttcccactctcctgtttgga

SEQ ID NO: 51957 - DNA, 26 bp, Homo sapiens
ccatcttcccactctcctgtttggat

SEQ ID NO: 51958 - DNA, 26 bp, Homo sapiens
catcttcccactctcctgtttggatg

SEQ ID NO: 51959 - DNA, 26 bp, Homo sapiens
atcttcccactctcctgtttggatgc

SEQ ID NO: 51960 - DNA, 26 bp, Homo sapiens
tcttcccactctcctgtttggatgca

SEQ ID NO: 51961 - DNA, 26 bp, Homo sapiens
cttcccactctcctgtttggatgcac

SEQ ID NO: 51962 - DNA, 26 bp, Homo sapiens
ttcccactctcctgtttggatgcact

SEQ ID NO: 51963 - DNA, 26 bp, Homo sapiens
tcccactctcctgtttggatgcactg

SEQ ID NO: 51964 - DNA, 26 bp, Homo sapiens
cccactctcctgtttggatgcactga

SEQ ID NO: 51965 - DNA, 26 bp, Homo sapiens
ccactctcctgtttggatgcactgat

SEQ ID NO: 51966 - DNA, 26 bp, Homo sapiens
cactctcctgtttggatgcactgata

SEQ ID NO: 51967 - DNA, 26 bp, Homo sapiens
actctcctgtttggatgcactgatag

SEQ ID NO: 51968 - DNA, 26 bp, Homo sapiens
ctctcctgtttggatgcactgatagt

SEQ ID NO: 51969 - DNA, 26 bp, Homo sapiens
tctcctgtttggatgcactgatagtc

SEQ ID NO: 51970 - DNA, 26 bp, Homo sapiens
ctcctgtttggatgcactgatagtcc

SEQ ID NO: 51971 - DNA, 26 bp, Homo sapiens
tcctgtttggatgcactgatagtccc

SEQ ID NO: 51972 - DNA, 26 bp, Homo sapiens
cctgtttggatgcactgatagtccca

SEQ ID NO: 51973 - DNA, 26 bp, Homo sapiens
ctgtttggatgcactgatagtcccat

SEQ ID NO: 51974 - DNA, 26 bp, Homo sapiens
tgtttggatgcactgatagtcccatc

SEQ ID NO: 51975 - DNA, 26 bp, Homo sapiens
gtttggatgcactgatagtcccatca

SEQ ID NO: 51976 - DNA, 26 bp, Homo sapiens
tttggatgcactgatagtcccatcag

SEQ ID NO: 51977 - DNA, 26 bp, Homo sapiens
ttggatgcactgatagtcccatcaga

SEQ ID NO: 51978 - DNA, 26 bp, Homo sapiens
tggatgcactgatagtcccatcagaa

SEQ ID NO: 51979 - DNA, 26 bp, Homo sapiens
ggatgcactgatagtcccatcagaaa

SEQ ID NO: 51980 - DNA, 26 bp, Homo sapiens
gatgcactgatagtcccatcagaaat

SEQ ID NO: 51981 - DNA, 26 bp, Homo sapiens
atgcactgatagtcccatcagaaatg

SEQ ID NO: 51982 - DNA, 26 bp, Homo sapiens
tgcactgatagtcccatcagaaatgg

SEQ ID NO: 51983 - DNA, 26 bp, Homo sapiens
gcactgatagtcccatcagaaatggt

SEQ ID NO: 51984 - DNA, 26 bp, Homo sapiens
cactgatagtcccatcagaaatggtt

SEQ ID NO: 51985 - DNA, 26 bp, Homo sapiens
actgatagtcccatcagaaatggttc

SEQ ID NO: 51986 - DNA, 26 bp, Homo sapiens
ctgatagtcccatcagaaatggttct

SEQ ID NO: 51987 - DNA, 26 bp, Homo sapiens
tgatagtcccatcagaaatggttcta

SEQ ID NO: 51988 - DNA, 26 bp, Homo sapiens
gatagtcccatcagaaatggttctat

SEQ ID NO: 51989 - DNA, 26 bp, Homo sapiens
atagtcccatcagaaatggttctata

SEQ ID NO: 51990 - DNA, 26 bp, Homo sapiens
tagtcccatcagaaatggttctatat

SEQ ID NO: 51991 - DNA, 26 bp, Homo sapiens
agtcccatcagaaatggttctatata

SEQ ID NO: 51992 - DNA, 26 bp, Homo sapiens
gtcccatcagaaatggttctatatat

SEQ ID NO: 51993 - DNA, 26 bp, Homo sapiens
tcccatcagaaatggttctatatata

SEQ ID NO: 51994 - DNA, 26 bp, Homo sapiens
cccatcagaaatggttctatatatat

SEQ ID NO: 51995 - DNA, 26 bp, Homo sapiens
ccatcagaaatggttctatatatatg

SEQ ID NO: 51996 - DNA, 26 bp, Homo sapiens
catcagaaatggttctatatatatgt

SEQ ID NO: 51997 - DNA, 26 bp, Homo sapiens
atcagaaatggttctatatatatgtt

SEQ ID NO: 51998 - DNA, 26 bp, Homo sapiens
tcagaaatggttctatatatatgttg

SEQ ID NO: 51999 - DNA, 26 bp, Homo sapiens
cagaaatggttctatatatatgttga

SEQ ID NO: 52000 - DNA, 26 bp, Homo sapiens
agaaatggttctatatatatgttgac

SEQ ID NO: 52001 - DNA, 26 bp, Homo sapiens
gaaatggttctatatatatgttgact

SEQ ID NO: 52002 - DNA, 26 bp, Homo sapiens
aaatggttctatatatatgttgactg

SEQ ID NO: 52003 - DNA, 26 bp, Homo sapiens
aatggttctatatatatgttgactgt

SEQ ID NO: 52004 - DNA, 26 bp, Homo sapiens
atggttctatatatatgttgactgta

SEQ ID NO: 52005 - DNA, 26 bp, Homo sapiens
tggttctatatatatgttgactgtaa

SEQ ID NO: 52006 - DNA, 26 bp, Homo sapiens
ggttctatatatatgttgactgtaat

SEQ ID NO: 52007 - DNA, 26 bp, Homo sapiens
gttctatatatatgttgactgtaatc

SEQ ID NO: 52008 - DNA, 26 bp, Homo sapiens
ttctatatatatgttgactgtaatct

SEQ ID NO: 52009 - DNA, 26 bp, Homo sapiens
tctatatatatgttgactgtaatctt

SEQ ID NO: 52010 - DNA, 26 bp, Homo sapiens
ctatatatatgttgactgtaatcttc

SEQ ID NO: 52011 - DNA, 26 bp, Homo sapiens
tatatatatgttgactgtaatcttca

SEQ ID NO: 52012 - DNA, 26 bp, Homo sapiens
atatatatgttgactgtaatcttcaa

SEQ ID NO: 52013 - DNA, 26 bp, Homo sapiens
tatatatgttgactgtaatcttcaaa

SEQ ID NO: 52014 - DNA, 26 bp, Homo sapiens
atatatgttgactgtaatcttcaaat

SEQ ID NO: 52015 - DNA, 26 bp, Homo sapiens
tatatgttgactgtaatcttcaaatg

SEQ ID NO: 52016 - DNA, 26 bp, Homo sapiens
atatgttgactgtaatcttcaaatgg

SEQ ID NO: 52017 - DNA, 26 bp, Homo sapiens
tatgttgactgtaatcttcaaatgga

SEQ ID NO: 52018 - DNA, 26 bp, Homo sapiens
atgttgactgtaatcttcaaatggaa

SEQ ID NO: 52019 - DNA, 26 bp, Homo sapiens
tgttgactgtaatcttcaaatggaaa

SEQ ID NO: 52020 - DNA, 26 bp, Homo sapiens
gttgactgtaatcttcaaatggaaag

SEQ ID NO: 52021 - DNA, 26 bp, Homo sapiens
ttgactgtaatcttcaaatggaaagt

SEQ ID NO: 52022 - DNA, 26 bp, Homo sapiens
tgactgtaatcttcaaatggaaagtc

SEQ ID NO: 52023 - DNA, 26 bp, Homo sapiens
gactgtaatcttcaaatggaaagtct

SEQ ID NO: 52024 - DNA, 26 bp, Homo sapiens
actgtaatcttcaaatggaaagtctc

SEQ ID NO: 52025 - DNA, 26 bp, Homo sapiens
ctgtaatcttcaaatggaaagtctcc

SEQ ID NO: 52026 - DNA, 26 bp, Homo sapiens
tgtaatcttcaaatggaaagtctcct

SEQ ID NO: 52027 - DNA, 26 bp, Homo sapiens
gtaatcttcaaatggaaagtctcctg

SEQ ID NO: 52028 - DNA, 26 bp, Homo sapiens
taatcttcaaatggaaagtctcctgg

SEQ ID NO: 52029 - DNA, 26 bp, Homo sapiens
aatcttcaaatggaaagtctcctgga

SEQ ID NO: 52030 - DNA, 26 bp, Homo sapiens
atcttcaaatggaaagtctcctggag

SEQ ID NO: 52031 - DNA, 26 bp, Homo sapiens
tcttcaaatggaaagtctcctggagg

SEQ ID NO: 52032 - DNA, 26 bp, Homo sapiens
cttcaaatggaaagtctcctggaggt

SEQ ID NO: 52033 - DNA, 26 bp, Homo sapiens
ttcaaatggaaagtctcctggaggtt

SEQ ID NO: 52034 - DNA, 26 bp, Homo sapiens
tcaaatggaaagtctcctggaggttc

SEQ ID NO: 52035 - DNA, 26 bp, Homo sapiens
caaatggaaagtctcctggaggttca

SEQ ID NO: 52036 - DNA, 26 bp, Homo sapiens
aaatggaaagtctcctggaggttcaa

SEQ ID NO: 52037 - DNA, 26 bp, Homo sapiens
aatggaaagtctcctggaggttcaaa

SEQ ID NO: 52038 - DNA, 26 bp, Homo sapiens
atggaaagtctcctggaggttcaaaa

SEQ ID NO: 52039 - DNA, 26 bp, Homo sapiens
tggaaagtctcctggaggttcaaaac

SEQ ID NO: 52040 - DNA, 26 bp, Homo sapiens
ggaaagtctcctggaggttcaaaacc

SEQ ID NO: 52041 - DNA, 26 bp, Homo sapiens
gaaagtctcctggaggttcaaaacca

SEQ ID NO: 52042 - DNA, 26 bp, Homo sapiens
aaagtctcctggaggttcaaaaccag

SEQ ID NO: 52043 - DNA, 26 bp, Homo sapiens
aagtctcctggaggttcaaaaccaga

SEQ ID NO: 52044 - DNA, 26 bp, Homo sapiens
agtctcctggaggttcaaaaccagat

SEQ ID NO: 52045 - DNA, 26 bp, Homo sapiens
gtctcctggaggttcaaaaccagatt

SEQ ID NO: 52046 - DNA, 26 bp, Homo sapiens
tctcctggaggttcaaaaccagattt

SEQ ID NO: 52047 - DNA, 26 bp, Homo sapiens
ctcctggaggttcaaaaccagatttg

SEQ ID NO: 52048 - DNA, 26 bp, Homo sapiens
tcctggaggttcaaaaccagatttga

SEQ ID NO: 52049 - DNA, 26 bp, Homo sapiens
cctggaggttcaaaaccagatttgaa

SEQ ID NO: 52050 - DNA, 26 bp, Homo sapiens
ctggaggttcaaaaccagatttgaag

SEQ ID NO: 52051 - DNA, 26 bp, Homo sapiens
tggaggttcaaaaccagatttgaagg

SEQ ID NO: 52052 - DNA, 26 bp, Homo sapiens
ggaggttcaaaaccagatttgaagga

SEQ ID NO: 52053 - DNA, 26 bp, Homo sapiens
gaggttcaaaaccagatttgaaggag

SEQ ID NO: 52054 - DNA, 26 bp, Homo sapiens
aggttcaaaaccagatttgaaggagt

SEQ ID NO: 52055 - DNA, 26 bp, Homo sapiens
ggttcaaaaccagatttgaaggagtc

SEQ ID NO: 52056 - DNA, 26 bp, Homo sapiens
gttcaaaaccagatttgaaggagtct

SEQ ID NO: 52057 - DNA, 26 bp, Homo sapiens
ttcaaaaccagatttgaaggagtcta

SEQ ID NO: 52058 - DNA, 26 bp, Homo sapiens
tcaaaaccagatttgaaggagtctac

SEQ ID NO: 52059 - DNA, 26 bp, Homo sapiens
caaaaccagatttgaaggagtctacc

SEQ ID NO: 52060 - DNA, 26 bp, Homo sapiens
aaaaccagatttgaaggagtctacca

SEQ ID NO: 52061 - DNA, 26 bp, Homo sapiens
aaaccagatttgaaggagtctaccac

SEQ ID NO: 52062 - DNA, 26 bp, Homo sapiens
aaccagatttgaaggagtctaccacc

SEQ ID NO: 52063 - DNA, 26 bp, Homo sapiens
accagatttgaaggagtctaccacca

SEQ ID NO: 52064 - DNA, 26 bp, Homo sapiens
ccagatttgaaggagtctaccaccat

SEQ ID NO: 52065 - DNA, 26 bp, Homo sapiens
cagatttgaaggagtctaccaccatt

SEQ ID NO: 52066 - DNA, 26 bp, Homo sapiens
agatttgaaggagtctaccaccattt

SEQ ID NO: 52067 - DNA, 26 bp, Homo sapiens
gatttgaaggagtctaccaccatttg

SEQ ID NO: 52068 - DNA, 26 bp, Homo sapiens
atttgaaggagtctaccaccatttga

SEQ ID NO: 52069 - DNA, 26 bp, Homo sapiens
tttgaaggagtctaccaccatttgag

SEQ ID NO: 52070 - DNA, 26 bp, Homo sapiens
ttgaaggagtctaccaccatttgaga

SEQ ID NO: 52071 - DNA, 26 bp, Homo sapiens
tgaaggagtctaccaccatttgagag

SEQ ID NO: 52072 - DNA, 26 bp, Homo sapiens
gaaggagtctaccaccatttgagagt

SEQ ID NO: 52073 - DNA, 26 bp, Homo sapiens
aaggagtctaccaccatttgagagtc

SEQ ID NO: 52074 - DNA, 26 bp, Homo sapiens
aggagtctaccaccatttgagagtct

SEQ ID NO: 52075 - DNA, 26 bp, Homo sapiens
ggagtctaccaccatttgagagtctc

SEQ ID NO: 52076 - DNA, 26 bp, Homo sapiens
gagtctaccaccatttgagagtctct

SEQ ID NO: 52077 - DNA, 26 bp, Homo sapiens
agtctaccaccatttgagagtctctt

SEQ ID NO: 52078 - DNA, 26 bp, Homo sapiens
gtctaccaccatttgagagtctcttc

SEQ ID NO: 52079 - DNA, 26 bp, Homo sapiens
tctaccaccatttgagagtctcttct

SEQ ID NO: 52080 - DNA, 26 bp, Homo sapiens
ctaccaccatttgagagtctcttctt

SEQ ID NO: 52081 - DNA, 26 bp, Homo sapiens
taccaccatttgagagtctcttcttt

SEQ ID NO: 52082 - DNA, 26 bp, Homo sapiens
accaccatttgagagtctcttctttc

SEQ ID NO: 52083 - DNA, 26 bp, Homo sapiens
ccaccatttgagagtctcttctttca

SEQ ID NO: 52084 - DNA, 26 bp, Homo sapiens
caccatttgagagtctcttctttcat

SEQ ID NO: 52085 - DNA, 26 bp, Homo sapiens
accatttgagagtctcttctttcatc

SEQ ID NO: 52086 - DNA, 26 bp, Homo sapiens
ccatttgagagtctcttctttcatca

SEQ ID NO: 52087 - DNA, 26 bp, Homo sapiens
catttgagagtctcttctttcatcaa

SEQ ID NO: 52088 - DNA, 26 bp, Homo sapiens
atttgagagtctcttctttcatcaac

SEQ ID NO: 52089 - DNA, 26 bp, Homo sapiens
tttgagagtctcttctttcatcaact

SEQ ID NO: 52090 - DNA, 26 bp, Homo sapiens
ttgagagtctcttctttcatcaactg

SEQ ID NO: 52091 - DNA, 26 bp, Homo sapiens
tgagagtctcttctttcatcaactga

SEQ ID NO: 52092 - DNA, 26 bp, Homo sapiens
gagagtctcttctttcatcaactgat

SEQ ID NO: 52093 - DNA, 26 bp, Homo sapiens
agagtctcttctttcatcaactgatt

SEQ ID NO: 52094 - DNA, 26 bp, Homo sapiens
gagtctcttctttcatcaactgattt

SEQ ID NO: 52095 - DNA, 26 bp, Homo sapiens
agtctcttctttcatcaactgatttt

SEQ ID NO: 52096 - DNA, 26 bp, Homo sapiens
gtctcttctttcatcaactgattttg

SEQ ID NO: 52097 - DNA, 26 bp, Homo sapiens
tctcttctttcatcaactgattttgc

SEQ ID NO: 52098 - DNA, 26 bp, Homo sapiens
ctcttctttcatcaactgattttgct

SEQ ID NO: 52099 - DNA, 26 bp, Homo sapiens
tcttctttcatcaactgattttgctg

SEQ ID NO: 52100 - DNA, 26 bp, Homo sapiens
cttctttcatcaactgattttgctgc

SEQ ID NO: 52101 - DNA, 26 bp, Homo sapiens
ttctttcatcaactgattttgctgca

SEQ ID NO: 52102 - DNA, 26 bp, Homo sapiens
tctttcatcaactgattttgctgcaa

SEQ ID NO: 52103 - DNA, 26 bp, Homo sapiens
ctttcatcaactgattttgctgcaag

SEQ ID NO: 52104 - DNA, 26 bp, Homo sapiens
tttcatcaactgattttgctgcaaga

SEQ ID NO: 52105 - DNA, 26 bp, Homo sapiens
ttcatcaactgattttgctgcaagaa

SEQ ID NO: 52106 - DNA, 26 bp, Homo sapiens
tcatcaactgattttgctgcaagaat

SEQ ID NO: 52107 - DNA, 26 bp, Homo sapiens
catcaactgattttgctgcaagaatc

SEQ ID NO: 52108 - DNA, 26 bp, Homo sapiens
atcaactgattttgctgcaagaatca

SEQ ID NO: 52109 - DNA, 26 bp, Homo sapiens
tcaactgattttgctgcaagaatcat

SEQ ID NO: 52110 - DNA, 26 bp, Homo sapiens
caactgattttgctgcaagaatcatt

SEQ ID NO: 52111 - DNA, 26 bp, Homo sapiens
aactgattttgctgcaagaatcattc

SEQ ID NO: 52112 - DNA, 26 bp, Homo sapiens
actgattttgctgcaagaatcattcc

SEQ ID NO: 52113 - DNA, 26 bp, Homo sapiens
ctgattttgctgcaagaatcattcct

SEQ ID NO: 52114 - DNA, 26 bp, Homo sapiens
tgattttgctgcaagaatcattcctt

SEQ ID NO: 52115 - DNA, 26 bp, Homo sapiens
gattttgctgcaagaatcattccttc

SEQ ID NO: 52116 - DNA, 26 bp, Homo sapiens
attttgctgcaagaatcattccttcc

SEQ ID NO: 52117 - DNA, 26 bp, Homo sapiens
ttttgctgcaagaatcattccttcca

SEQ ID NO: 52118 - DNA, 26 bp, Homo sapiens
tttgctgcaagaatcattccttccaa

SEQ ID NO: 52119 - DNA, 26 bp, Homo sapiens
ttgctgcaagaatcattccttccaaa

SEQ ID NO: 52120 - DNA, 26 bp, Homo sapiens
tgctgcaagaatcattccttccaaac

SEQ ID NO: 52121 - DNA, 26 bp, Homo sapiens
gctgcaagaatcattccttccaaaca

SEQ ID NO: 52122 - DNA, 26 bp, Homo sapiens
ctgcaagaatcattccttccaaacat

SEQ ID NO: 52123 - DNA, 26 bp, Homo sapiens
tgcaagaatcattccttccaaacatt

SEQ ID NO: 52124 - DNA, 26 bp, Homo sapiens
gcaagaatcattccttccaaacattt

SEQ ID NO: 52125 - DNA, 26 bp, Homo sapiens
caagaatcattccttccaaacatttt

SEQ ID NO: 52126 - DNA, 26 bp, Homo sapiens
aagaatcattccttccaaacattttg

SEQ ID NO: 52127 - DNA, 26 bp, Homo sapiens
agaatcattccttccaaacattttga

SEQ ID NO: 52128 - DNA, 26 bp, Homo sapiens
gaatcattccttccaaacattttgaa

SEQ ID NO: 52129 - DNA, 26 bp, Homo sapiens
aatcattccttccaaacattttgaaa

SEQ ID NO: 52130 - DNA, 26 bp, Homo sapiens
atcattccttccaaacattttgaaat

SEQ ID NO: 52131 - DNA, 26 bp, Homo sapiens
tcattccttccaaacattttgaaatg

SEQ ID NO: 52132 - DNA, 26 bp, Homo sapiens
cattccttccaaacattttgaaatga

SEQ ID NO: 52133 - DNA, 26 bp, Homo sapiens
attccttccaaacattttgaaatgat

SEQ ID NO: 52134 - DNA, 26 bp, Homo sapiens
ttccttccaaacattttgaaatgatg

SEQ ID NO: 52135 - DNA, 26 bp, Homo sapiens
tccttccaaacattttgaaatgatgg

SEQ ID NO: 52136 - DNA, 26 bp, Homo sapiens
ccttccaaacattttgaaatgatggg

SEQ ID NO: 52137 - DNA, 26 bp, Homo sapiens
cttccaaacattttgaaatgatggga

SEQ ID NO: 52138 - DNA, 26 bp, Homo sapiens
ttccaaacattttgaaatgatgggaa

SEQ ID NO: 52139 - DNA, 26 bp, Homo sapiens
tccaaacattttgaaatgatgggaat

SEQ ID NO: 52140 - DNA, 26 bp, Homo sapiens
ccaaacattttgaaatgatgggaata

SEQ ID NO: 52141 - DNA, 26 bp, Homo sapiens
caaacattttgaaatgatgggaataa

SEQ ID NO: 52142 - DNA, 26 bp, Homo sapiens
aaacattttgaaatgatgggaataac

SEQ ID NO: 52143 - DNA, 26 bp, Homo sapiens
aacattttgaaatgatgggaataact

SEQ ID NO: 52144 - DNA, 26 bp, Homo sapiens
acattttgaaatgatgggaataactt

SEQ ID NO: 52145 - DNA, 26 bp, Homo sapiens
cattttgaaatgatgggaataacttt

SEQ ID NO: 52146 - DNA, 26 bp, Homo sapiens
attttgaaatgatgggaataactttg

SEQ ID NO: 52147 - DNA, 26 bp, Homo sapiens
ttttgaaatgatgggaataactttgc

SEQ ID NO: 52148 - DNA, 26 bp, Homo sapiens
tttgaaatgatgggaataactttgcg

SEQ ID NO: 52149 - DNA, 26 bp, Homo sapiens
ttgaaatgatgggaataactttgcgt

SEQ ID NO: 52150 - DNA, 26 bp, Homo sapiens
tgaaatgatgggaataactttgcgtt

SEQ ID NO: 52151 - DNA, 26 bp, Homo sapiens
gaaatgatgggaataactttgcgttc

SEQ ID NO: 52152 - DNA, 26 bp, Homo sapiens
aaatgatgggaataactttgcgttct

SEQ ID NO: 52153 - DNA, 26 bp, Homo sapiens
aatgatgggaataactttgcgttctg

SEQ ID NO: 52154 - DNA, 26 bp, Homo sapiens
atgatgggaataactttgcgttctga

SEQ ID NO: 52155 - DNA, 26 bp, Homo sapiens
tgatgggaataactttgcgttctgag

SEQ ID NO: 52156 - DNA, 26 bp, Homo sapiens
gatgggaataactttgcgttctgagt

SEQ ID NO: 52157 - DNA, 26 bp, Homo sapiens
atgggaataactttgcgttctgagtc

SEQ ID NO: 52158 - DNA, 26 bp, Homo sapiens
tgggaataactttgcgttctgagtca

SEQ ID NO: 52159 - DNA, 26 bp, Homo sapiens
gggaataactttgcgttctgagtcag

SEQ ID NO: 52160 - DNA, 26 bp, Homo sapiens
ggaataactttgcgttctgagtcagc

SEQ ID NO: 52161 - DNA, 26 bp, Homo sapiens
gaataactttgcgttctgagtcagca

SEQ ID NO: 52162 - DNA, 26 bp, Homo sapiens
aataactttgcgttctgagtcagcaa

SEQ ID NO: 52163 - DNA, 26 bp, Homo sapiens
ataactttgcgttctgagtcagcaaa

SEQ ID NO: 52164 - DNA, 26 bp, Homo sapiens
taactttgcgttctgagtcagcaaat

SEQ ID NO: 52165 - DNA, 26 bp, Homo sapiens
aactttgcgttctgagtcagcaaatc

SEQ ID NO: 52166 - DNA, 26 bp, Homo sapiens
actttgcgttctgagtcagcaaatcc

SEQ ID NO: 52167 - DNA, 26 bp, Homo sapiens
ctttgcgttctgagtcagcaaatcct

SEQ ID NO: 52168 - DNA, 26 bp, Homo sapiens
tttgcgttctgagtcagcaaatcctc

SEQ ID NO: 52169 - DNA, 26 bp, Homo sapiens
ttgcgttctgagtcagcaaatcctct

SEQ ID NO: 52170 - DNA, 26 bp, Homo sapiens
tgcgttctgagtcagcaaatcctctg

SEQ ID NO: 52171 - DNA, 26 bp, Homo sapiens
gcgttctgagtcagcaaatcctctgt

SEQ ID NO: 52172 - DNA, 26 bp, Homo sapiens
cgttctgagtcagcaaatcctctgta

SEQ ID NO: 52173 - DNA, 26 bp, Homo sapiens
gttctgagtcagcaaatcctctgtaa

SEQ ID NO: 52174 - DNA, 26 bp, Homo sapiens
ttctgagtcagcaaatcctctgtaac

SEQ ID NO: 52175 - DNA, 26 bp, Homo sapiens
tctgagtcagcaaatcctctgtaaca

SEQ ID NO: 52176 - DNA, 26 bp, Homo sapiens
ctgagtcagcaaatcctctgtaacac

SEQ ID NO: 52177 - DNA, 26 bp, Homo sapiens
tgagtcagcaaatcctctgtaacact

SEQ ID NO: 52178 - DNA, 26 bp, Homo sapiens
gagtcagcaaatcctctgtaacactc

SEQ ID NO: 52179 - DNA, 26 bp, Homo sapiens
agtcagcaaatcctctgtaacactca

SEQ ID NO: 52180 - DNA, 26 bp, Homo sapiens
gtcagcaaatcctctgtaacactcac

SEQ ID NO: 52181 - DNA, 26 bp, Homo sapiens
tcagcaaatcctctgtaacactcact

SEQ ID NO: 52182 - DNA, 26 bp, Homo sapiens
cagcaaatcctctgtaacactcactg

SEQ ID NO: 52183 - DNA, 26 bp, Homo sapiens
agcaaatcctctgtaacactcactga

SEQ ID NO: 52184 - DNA, 26 bp, Homo sapiens
gcaaatcctctgtaacactcactgag

SEQ ID NO: 52185 - DNA, 26 bp, Homo sapiens
caaatcctctgtaacactcactgagt

SEQ ID NO: 52186 - DNA, 26 bp, Homo sapiens
aaatcctctgtaacactcactgagtt

SEQ ID NO: 52187 - DNA, 26 bp, Homo sapiens
aatcctctgtaacactcactgagttt

SEQ ID NO: 52188 - DNA, 26 bp, Homo sapiens
atcctctgtaacactcactgagttta

SEQ ID NO: 52189 - DNA, 26 bp, Homo sapiens
tcctctgtaacactcactgagtttaa

SEQ ID NO: 52190 - DNA, 26 bp, Homo sapiens
cctctgtaacactcactgagtttaat

SEQ ID NO: 52191 - DNA, 26 bp, Homo sapiens
ctctgtaacactcactgagtttaata

SEQ ID NO: 52192 - DNA, 26 bp, Homo sapiens
tctgtaacactcactgagtttaatag

SEQ ID NO: 52193 - DNA, 26 bp, Homo sapiens
ctgtaacactcactgagtttaatagt

SEQ ID NO: 52194 - DNA, 26 bp, Homo sapiens
tgtaacactcactgagtttaatagtc

SEQ ID NO: 52195 - DNA, 26 bp, Homo sapiens
gtaacactcactgagtttaatagtcc

SEQ ID NO: 52196 - DNA, 26 bp, Homo sapiens
taacactcactgagtttaatagtcct

SEQ ID NO: 52197 - DNA, 26 bp, Homo sapiens
aacactcactgagtttaatagtcctt

SEQ ID NO: 52198 - DNA, 26 bp, Homo sapiens
acactcactgagtttaatagtccttc

SEQ ID NO: 52199 - DNA, 26 bp, Homo sapiens
cactcactgagtttaatagtccttcg

SEQ ID NO: 52200 - DNA, 26 bp, Homo sapiens
actcactgagtttaatagtccttcgt

SEQ ID NO: 52201 - DNA, 26 bp, Homo sapiens
ctcactgagtttaatagtccttcgtt

SEQ ID NO: 52202 - DNA, 26 bp, Homo sapiens
tcactgagtttaatagtccttcgttc

SEQ ID NO: 52203 - DNA, 26 bp, Homo sapiens
cactgagtttaatagtccttcgttcg

SEQ ID NO: 52204 - DNA, 26 bp, Homo sapiens
actgagtttaatagtccttcgttcgt

SEQ ID NO: 52205 - DNA, 26 bp, Homo sapiens
ctgagtttaatagtccttcgttcgtc

SEQ ID NO: 52206 - DNA, 26 bp, Homo sapiens
tgagtttaatagtccttcgttcgtcc

SEQ ID NO: 52207 - DNA, 26 bp, Homo sapiens
gagtttaatagtccttcgttcgtcca

SEQ ID NO: 52208 - DNA, 26 bp, Homo sapiens
agtttaatagtccttcgttcgtccat

SEQ ID NO: 52209 - DNA, 26 bp, Homo sapiens
gtttaatagtccttcgttcgtccatt

SEQ ID NO: 52210 - DNA, 26 bp, Homo sapiens
tttaatagtccttcgttcgtccattt

SEQ ID NO: 52211 - DNA, 26 bp, Homo sapiens
ttaatagtccttcgttcgtccatttc

SEQ ID NO: 52212 - DNA, 26 bp, Homo sapiens
taatagtccttcgttcgtccatttct

SEQ ID NO: 52213 - DNA, 26 bp, Homo sapiens
aatagtccttcgttcgtccatttctt

SEQ ID NO: 52214 - DNA, 26 bp, Homo sapiens
atagtccttcgttcgtccatttcttg

SEQ ID NO: 52215 - DNA, 26 bp, Homo sapiens
tagtccttcgttcgtccatttcttgt

SEQ ID NO: 52216 - DNA, 26 bp, Homo sapiens
agtccttcgttcgtccatttcttgta

SEQ ID NO: 52217 - DNA, 26 bp, Homo sapiens
gtccttcgttcgtccatttcttgtag

SEQ ID NO: 52218 - DNA, 26 bp, Homo sapiens
tccttcgttcgtccatttcttgtagt

SEQ ID NO: 52219 - DNA, 26 bp, Homo sapiens
ccttcgttcgtccatttcttgtagtt

SEQ ID NO: 52220 - DNA, 26 bp, Homo sapiens
cttcgttcgtccatttcttgtagttg

SEQ ID NO: 52221 - DNA, 26 bp, Homo sapiens
ttcgttcgtccatttcttgtagttgc

SEQ ID NO: 52222 - DNA, 26 bp, Homo sapiens
tcgttcgtccatttcttgtagttgct

SEQ ID NO: 52223 - DNA, 26 bp, Homo sapiens
cgttcgtccatttcttgtagttgctt

SEQ ID NO: 52224 - DNA, 26 bp, Homo sapiens
gttcgtccatttcttgtagttgcttg

SEQ ID NO: 52225 - DNA, 26 bp, Homo sapiens
ttcgtccatttcttgtagttgcttgt

SEQ ID NO: 52226 - DNA, 26 bp, Homo sapiens
tcgtccatttcttgtagttgcttgta

SEQ ID NO: 52227 - DNA, 26 bp, Homo sapiens
cgtccatttcttgtagttgcttgtaa

SEQ ID NO: 52228 - DNA, 26 bp, Homo sapiens
gtccatttcttgtagttgcttgtaaa

SEQ ID NO: 52229 - DNA, 26 bp, Homo sapiens
tccatttcttgtagttgcttgtaaat

SEQ ID NO: 52230 - DNA, 26 bp, Homo sapiens
ccatttcttgtagttgcttgtaaatc

SEQ ID NO: 52231 - DNA, 26 bp, Homo sapiens
catttcttgtagttgcttgtaaatct

SEQ ID NO: 52232 - DNA, 26 bp, Homo sapiens
atttcttgtagttgcttgtaaatctg

SEQ ID NO: 52233 - DNA, 26 bp, Homo sapiens
tttcttgtagttgcttgtaaatctga

SEQ ID NO: 52234 - DNA, 26 bp, Homo sapiens
ttcttgtagttgcttgtaaatctgag

SEQ ID NO: 52235 - DNA, 26 bp, Homo sapiens
tcttgtagttgcttgtaaatctgagg

SEQ ID NO: 52236 - DNA, 26 bp, Homo sapiens
cttgtagttgcttgtaaatctgagga

SEQ ID NO: 52237 - DNA, 26 bp, Homo sapiens
ttgtagttgcttgtaaatctgaggaa

SEQ ID NO: 52238 - DNA, 26 bp, Homo sapiens
tgtagttgcttgtaaatctgaggaat

SEQ ID NO: 52239 - DNA, 26 bp, Homo sapiens
gtagttgcttgtaaatctgaggaatc

SEQ ID NO: 52240 - DNA, 26 bp, Homo sapiens
tagttgcttgtaaatctgaggaatca

SEQ ID NO: 52241 - DNA, 26 bp, Homo sapiens
agttgcttgtaaatctgaggaatcac

SEQ ID NO: 52242 - DNA, 26 bp, Homo sapiens
gttgcttgtaaatctgaggaatcact

SEQ ID NO: 52243 - DNA, 26 bp, Homo sapiens
ttgcttgtaaatctgaggaatcacta

SEQ ID NO: 52244 - DNA, 26 bp, Homo sapiens
tgcttgtaaatctgaggaatcactac

SEQ ID NO: 52245 - DNA, 26 bp, Homo sapiens
gcttgtaaatctgaggaatcactaca

SEQ ID NO: 52246 - DNA, 26 bp, Homo sapiens
cttgtaaatctgaggaatcactacat

SEQ ID NO: 52247 - DNA, 26 bp, Homo sapiens
ttgtaaatctgaggaatcactacata

SEQ ID NO: 52248 - DNA, 26 bp, Homo sapiens
tgtaaatctgaggaatcactacataa

SEQ ID NO: 52249 - DNA, 26 bp, Homo sapiens
gtaaatctgaggaatcactacataaa

SEQ ID NO: 52250 - DNA, 26 bp, Homo sapiens
taaatctgaggaatcactacataaaa

SEQ ID NO: 52251 - DNA, 26 bp, Homo sapiens
aaatctgaggaatcactacataaaaa

SEQ ID NO: 52252 - DNA, 26 bp, Homo sapiens
aatctgaggaatcactacataaaaat

SEQ ID NO: 52253 - DNA, 26 bp, Homo sapiens
atctgaggaatcactacataaaaatg

SEQ ID NO: 52254 - DNA, 26 bp, Homo sapiens
tctgaggaatcactacataaaaatgt

SEQ ID NO: 52255 - DNA, 26 bp, Homo sapiens
ctgaggaatcactacataaaaatgtt

SEQ ID NO: 52256 - DNA, 26 bp, Homo sapiens
tgaggaatcactacataaaaatgttt

SEQ ID NO: 52257 - DNA, 26 bp, Homo sapiens
gaggaatcactacataaaaatgttta

SEQ ID NO: 52258 - DNA, 26 bp, Homo sapiens
aggaatcactacataaaaatgtttat

SEQ ID NO: 52259 - DNA, 26 bp, Homo sapiens
ggaatcactacataaaaatgtttatg

SEQ ID NO: 52260 - DNA, 26 bp, Homo sapiens
gaatcactacataaaaatgtttatgt

SEQ ID NO: 52261 - DNA, 26 bp, Homo sapiens
aatcactacataaaaatgtttatgtt

SEQ ID NO: 52262 - DNA, 26 bp, Homo sapiens
atcactacataaaaatgtttatgttg

SEQ ID NO: 52263 - DNA, 26 bp, Homo sapiens
tcactacataaaaatgtttatgttgt

SEQ ID NO: 52264 - DNA, 26 bp, Homo sapiens
cactacataaaaatgtttatgttgtt

SEQ ID NO: 52265 - DNA, 26 bp, Homo sapiens
actacataaaaatgtttatgttgttc

SEQ ID NO: 52266 - DNA, 26 bp, Homo sapiens
ctacataaaaatgtttatgttgttct

SEQ ID NO: 52267 - DNA, 26 bp, Homo sapiens
tacataaaaatgtttatgttgttctc

SEQ ID NO: 52268 - DNA, 26 bp, Homo sapiens
acataaaaatgtttatgttgttctcc

SEQ ID NO: 52269 - DNA, 26 bp, Homo sapiens
cataaaaatgtttatgttgttctcca

SEQ ID NO: 52270 - DNA, 26 bp, Homo sapiens
ataaaaatgtttatgttgttctccat

SEQ ID NO: 52271 - DNA, 26 bp, Homo sapiens
taaaaatgtttatgttgttctccatt

SEQ ID NO: 52272 - DNA, 26 bp, Homo sapiens
aaaaatgtttatgttgttctccatta

SEQ ID NO: 52273 - DNA, 26 bp, Homo sapiens
aaaatgtttatgttgttctccattaa

SEQ ID NO: 52274 - DNA, 26 bp, Homo sapiens
aaatgtttatgttgttctccattaaa

SEQ ID NO: 52275 - DNA, 26 bp, Homo sapiens
aatgtttatgttgttctccattaaag

SEQ ID NO: 52276 - DNA, 26 bp, Homo sapiens
atgtttatgttgttctccattaaagt

SEQ ID NO: 52277 - DNA, 26 bp, Homo sapiens
tgtttatgttgttctccattaaagtt

SEQ ID NO: 52278 - DNA, 26 bp, Homo sapiens
gtttatgttgttctccattaaagttt

SEQ ID NO: 52279 - DNA, 26 bp, Homo sapiens
tttatgttgttctccattaaagtttt

SEQ ID NO: 52280 - DNA, 26 bp, Homo sapiens
ttatgttgttctccattaaagttttg

SEQ ID NO: 52281 - DNA, 26 bp, Homo sapiens
tatgttgttctccattaaagttttgt

SEQ ID NO: 52282 - DNA, 26 bp, Homo sapiens
atgttgttctccattaaagttttgta

SEQ ID NO: 52283 - DNA, 26 bp, Homo sapiens
tgttgttctccattaaagttttgtaa

SEQ ID NO: 52284 - DNA, 26 bp, Homo sapiens
gttgttctccattaaagttttgtaat

SEQ ID NO: 52285 - DNA, 26 bp, Homo sapiens
ttgttctccattaaagttttgtaatt

SEQ ID NO: 52286 - DNA, 26 bp, Homo sapiens
tgttctccattaaagttttgtaattg

SEQ ID NO: 52287 - DNA, 26 bp, Homo sapiens
gttctccattaaagttttgtaattgt

SEQ ID NO: 52288 - DNA, 26 bp, Homo sapiens
ttctccattaaagttttgtaattgtg

SEQ ID NO: 52289 - DNA, 26 bp, Homo sapiens
tctccattaaagttttgtaattgtgc

SEQ ID NO: 52290 - DNA, 26 bp, Homo sapiens
ctccattaaagttttgtaattgtgca

SEQ ID NO: 52291 - DNA, 26 bp, Homo sapiens
tccattaaagttttgtaattgtgcag

SEQ ID NO: 52292 - DNA, 26 bp, Homo sapiens
ccattaaagttttgtaattgtgcagc

SEQ ID NO: 52293 - DNA, 26 bp, Homo sapiens
cattaaagttttgtaattgtgcagca

SEQ ID NO: 52294 - DNA, 26 bp, Homo sapiens
attaaagttttgtaattgtgcagcat

SEQ ID NO: 52295 - DNA, 26 bp, Homo sapiens
ttaaagttttgtaattgtgcagcata

SEQ ID NO: 52296 - DNA, 26 bp, Homo sapiens
taaagttttgtaattgtgcagcatat

SEQ ID NO: 52297 - DNA, 26 bp, Homo sapiens
aaagttttgtaattgtgcagcatatt

SEQ ID NO: 52298 - DNA, 26 bp, Homo sapiens
aagttttgtaattgtgcagcatattc

SEQ ID NO: 52299 - DNA, 26 bp, Homo sapiens
agttttgtaattgtgcagcatattca

SEQ ID NO: 52300 - DNA, 26 bp, Homo sapiens
gttttgtaattgtgcagcatattcat

SEQ ID NO: 52301 - DNA, 26 bp, Homo sapiens
ttttgtaattgtgcagcatattcatt

SEQ ID NO: 52302 - DNA, 26 bp, Homo sapiens
tttgtaattgtgcagcatattcattt

SEQ ID NO: 52303 - DNA, 26 bp, Homo sapiens
ttgtaattgtgcagcatattcatttt

SEQ ID NO: 52304 - DNA, 26 bp, Homo sapiens
tgtaattgtgcagcatattcattttt

SEQ ID NO: 52305 - DNA, 26 bp, Homo sapiens
gtaattgtgcagcatattcattttta

SEQ ID NO: 52306 - DNA, 26 bp, Homo sapiens
taattgtgcagcatattcatttttat

SEQ ID NO: 52307 - DNA, 26 bp, Homo sapiens
aattgtgcagcatattcatttttatt

SEQ ID NO: 52308 - DNA, 26 bp, Homo sapiens
attgtgcagcatattcatttttattt

SEQ ID NO: 52309 - DNA, 26 bp, Homo sapiens
ttgtgcagcatattcatttttatttt

SEQ ID NO: 52310 - DNA, 26 bp, Homo sapiens
tgtgcagcatattcatttttattttc

SEQ ID NO: 52311 - DNA, 26 bp, Homo sapiens
gtgcagcatattcatttttattttca

SEQ ID NO: 52312 - DNA, 26 bp, Homo sapiens
tgcagcatattcatttttattttcat

SEQ ID NO: 52313 - DNA, 26 bp, Homo sapiens
gcagcatattcatttttattttcatc

SEQ ID NO: 52314 - DNA, 26 bp, Homo sapiens
cagcatattcatttttattttcatcg

SEQ ID NO: 52315 - DNA, 26 bp, Homo sapiens
agcatattcatttttattttcatcgg

SEQ ID NO: 52316 - DNA, 26 bp, Homo sapiens
gcatattcatttttattttcatcggc

SEQ ID NO: 52317 - DNA, 26 bp, Homo sapiens
catattcatttttattttcatcggcc

SEQ ID NO: 52318 - DNA, 26 bp, Homo sapiens
atattcatttttattttcatcggcca

SEQ ID NO: 52319 - DNA, 26 bp, Homo sapiens
tattcatttttattttcatcggccat

SEQ ID NO: 52320 - DNA, 26 bp, Homo sapiens
attcatttttattttcatcggccata

SEQ ID NO: 52321 - DNA, 26 bp, Homo sapiens
ttcatttttattttcatcggccatat

SEQ ID NO: 52322 - DNA, 26 bp, Homo sapiens
tcatttttattttcatcggccatatg

SEQ ID NO: 52323 - DNA, 26 bp, Homo sapiens
catttttattttcatcggccatatgc

SEQ ID NO: 52324 - DNA, 26 bp, Homo sapiens
atttttattttcatcggccatatgcg

SEQ ID NO: 52325 - DNA, 26 bp, Homo sapiens
tttttattttcatcggccatatgcgt

SEQ ID NO: 52326 - DNA, 26 bp, Homo sapiens
ttttattttcatcggccatatgcgta

SEQ ID NO: 52327 - DNA, 26 bp, Homo sapiens
tttattttcatcggccatatgcgtac

SEQ ID NO: 52328 - DNA, 26 bp, Homo sapiens
ttattttcatcggccatatgcgtacg

SEQ ID NO: 52329 - DNA, 26 bp, Homo sapiens
tattttcatcggccatatgcgtacgc

SEQ ID NO: 52330 - DNA, 26 bp, Homo sapiens
attttcatcggccatatgcgtacgca

SEQ ID NO: 52331 - DNA, 26 bp, Homo sapiens
ttttcatcggccatatgcgtacgcag

SEQ ID NO: 52332 - DNA, 26 bp, Homo sapiens
tttcatcggccatatgcgtacgcaga

SEQ ID NO: 52333 - DNA, 26 bp, Homo sapiens
ttcatcggccatatgcgtacgcagat

SEQ ID NO: 52334 - DNA, 26 bp, Homo sapiens
tcatcggccatatgcgtacgcagatt

SEQ ID NO: 52335 - DNA, 26 bp, Homo sapiens
catcggccatatgcgtacgcagattc

SEQ ID NO: 52336 - DNA, 26 bp, Homo sapiens
atcggccatatgcgtacgcagattca

SEQ ID NO: 52337 - DNA, 26 bp, Homo sapiens
tcggccatatgcgtacgcagattcaa

SEQ ID NO: 52338 - DNA, 26 bp, Homo sapiens
cggccatatgcgtacgcagattcaac

SEQ ID NO: 52339 - DNA, 26 bp, Homo sapiens
ggccatatgcgtacgcagattcaact

SEQ ID NO: 52340 - DNA, 26 bp, Homo sapiens
gccatatgcgtacgcagattcaactg

SEQ ID NO: 52341 - DNA, 26 bp, Homo sapiens
ccatatgcgtacgcagattcaactgc

SEQ ID NO: 52342 - DNA, 26 bp, Homo sapiens
catatgcgtacgcagattcaactgct

SEQ ID NO: 52343 - DNA, 26 bp, Homo sapiens
atatgcgtacgcagattcaactgctg

SEQ ID NO: 52344 - DNA, 26 bp, Homo sapiens
tatgcgtacgcagattcaactgctgt

SEQ ID NO: 52345 - DNA, 26 bp, Homo sapiens
atgcgtacgcagattcaactgctgtt

SEQ ID NO: 52346 - DNA, 26 bp, Homo sapiens
tgcgtacgcagattcaactgctgttt

SEQ ID NO: 52347 - DNA, 26 bp, Homo sapiens
gcgtacgcagattcaactgctgtttg

SEQ ID NO: 52348 - DNA, 26 bp, Homo sapiens
cgtacgcagattcaactgctgtttgg

SEQ ID NO: 52349 - DNA, 26 bp, Homo sapiens
gtacgcagattcaactgctgtttggc

SEQ ID NO: 52350 - DNA, 26 bp, Homo sapiens
tacgcagattcaactgctgtttggcc

SEQ ID NO: 52351 - DNA, 26 bp, Homo sapiens
acgcagattcaactgctgtttggcct

SEQ ID NO: 52352 - DNA, 26 bp, Homo sapiens
cgcagattcaactgctgtttggcctt

SEQ ID NO: 52353 - DNA, 26 bp, Homo sapiens
gcagattcaactgctgtttggccttt

SEQ ID NO: 52354 - DNA, 26 bp, Homo sapiens
cagattcaactgctgtttggcctttt

SEQ ID NO: 52355 - DNA, 26 bp, Homo sapiens
agattcaactgctgtttggccttttc

SEQ ID NO: 52356 - DNA, 26 bp, Homo sapiens
gattcaactgctgtttggccttttca

SEQ ID NO: 52357 - DNA, 26 bp, Homo sapiens
attcaactgctgtttggccttttcaa

SEQ ID NO: 52358 - DNA, 26 bp, Homo sapiens
ttcaactgctgtttggccttttcaac

SEQ ID NO: 52359 - DNA, 26 bp, Homo sapiens
tcaactgctgtttggccttttcaaca

SEQ ID NO: 52360 - DNA, 26 bp, Homo sapiens
caactgctgtttggccttttcaacat

SEQ ID NO: 52361 - DNA, 26 bp, Homo sapiens
aactgctgtttggccttttcaacatc

SEQ ID NO: 52362 - DNA, 26 bp, Homo sapiens
actgctgtttggccttttcaacatct

SEQ ID NO: 52363 - DNA, 26 bp, Homo sapiens
ctgctgtttggccttttcaacatctg

SEQ ID NO: 52364 - DNA, 26 bp, Homo sapiens
tgctgtttggccttttcaacatctgc

SEQ ID NO: 52365 - DNA, 26 bp, Homo sapiens
gctgtttggccttttcaacatctgcc

SEQ ID NO: 52366 - DNA, 26 bp, Homo sapiens
ctgtttggccttttcaacatctgcct

SEQ ID NO: 52367 - DNA, 26 bp, Homo sapiens
tgtttggccttttcaacatctgcctt

SEQ ID NO: 52368 - DNA, 26 bp, Homo sapiens
gtttggccttttcaacatctgccttg

SEQ ID NO: 52369 - DNA, 26 bp, Homo sapiens
tttggccttttcaacatctgccttgg

SEQ ID NO: 52370 - DNA, 26 bp, Homo sapiens
ttggccttttcaacatctgccttggt

SEQ ID NO: 52371 - DNA, 26 bp, Homo sapiens
tggccttttcaacatctgccttggtt

SEQ ID NO: 52372 - DNA, 26 bp, Homo sapiens
ggccttttcaacatctgccttggttg

SEQ ID NO: 52373 - DNA, 26 bp, Homo sapiens
gccttttcaacatctgccttggttgc

SEQ ID NO: 52374 - DNA, 26 bp, Homo sapiens
ccttttcaacatctgccttggttgca

SEQ ID NO: 52375 - DNA, 26 bp, Homo sapiens
cttttcaacatctgccttggttgcat

SEQ ID NO: 52376 - DNA, 26 bp, Homo sapiens
ttttcaacatctgccttggttgcatt

SEQ ID NO: 52377 - DNA, 26 bp, Homo sapiens
tttcaacatctgccttggttgcatta

SEQ ID NO: 52378 - DNA, 26 bp, Homo sapiens
ttcaacatctgccttggttgcattag

SEQ ID NO: 52379 - DNA, 26 bp, Homo sapiens
tcaacatctgccttggttgcattagt

SEQ ID NO: 52380 - DNA, 26 bp, Homo sapiens
caacatctgccttggttgcattagta

SEQ ID NO: 52381 - DNA, 26 bp, Homo sapiens
aacatctgccttggttgcattagtat

SEQ ID NO: 52382 - DNA, 26 bp, Homo sapiens
acatctgccttggttgcattagtatc

SEQ ID NO: 52383 - DNA, 26 bp, Homo sapiens
catctgccttggttgcattagtatca

SEQ ID NO: 52384 - DNA, 26 bp, Homo sapiens
atctgccttggttgcattagtatcat

SEQ ID NO: 52385 - DNA, 26 bp, Homo sapiens
tctgccttggttgcattagtatcatt

SEQ ID NO: 52386 - DNA, 26 bp, Homo sapiens
ctgccttggttgcattagtatcatta

SEQ ID NO: 52387 - DNA, 26 bp, Homo sapiens
tgccttggttgcattagtatcattat

SEQ ID NO: 52388 - DNA, 26 bp, Homo sapiens
gccttggttgcattagtatcattatc

SEQ ID NO: 52389 - DNA, 26 bp, Homo sapiens
ccttggttgcattagtatcattatcc

SEQ ID NO: 52390 - DNA, 26 bp, Homo sapiens
cttggttgcattagtatcattatcca

SEQ ID NO: 52391 - DNA, 26 bp, Homo sapiens
ttggttgcattagtatcattatccaa

SEQ ID NO: 52392 - DNA, 26 bp, Homo sapiens
tggttgcattagtatcattatccaat

SEQ ID NO: 52393 - DNA, 26 bp, Homo sapiens
ggttgcattagtatcattatccaatc

SEQ ID NO: 52394 - DNA, 26 bp, Homo sapiens
gttgcattagtatcattatccaatct

SEQ ID NO: 52395 - DNA, 26 bp, Homo sapiens
ttgcattagtatcattatccaatctt

SEQ ID NO: 52396 - DNA, 26 bp, Homo sapiens
tgcattagtatcattatccaatcttt

SEQ ID NO: 52397 - DNA, 26 bp, Homo sapiens
gcattagtatcattatccaatctttc

SEQ ID NO: 52398 - DNA, 26 bp, Homo sapiens
cattagtatcattatccaatctttca

SEQ ID NO: 52399 - DNA, 26 bp, Homo sapiens
attagtatcattatccaatctttcat

SEQ ID NO: 52400 - DNA, 26 bp, Homo sapiens
ttagtatcattatccaatctttcata

SEQ ID NO: 52401 - DNA, 26 bp, Homo sapiens
tagtatcattatccaatctttcataa

SEQ ID NO: 52402 - DNA, 26 bp, Homo sapiens
agtatcattatccaatctttcataac

SEQ ID NO: 52403 - DNA, 26 bp, Homo sapiens
gtatcattatccaatctttcataact

SEQ ID NO: 52404 - DNA, 26 bp, Homo sapiens
tatcattatccaatctttcataactc

SEQ ID NO: 52405 - DNA, 26 bp, Homo sapiens
atcattatccaatctttcataactct

SEQ ID NO: 52406 - DNA, 26 bp, Homo sapiens
tcattatccaatctttcataactctg

SEQ ID NO: 52407 - DNA, 26 bp, Homo sapiens
cattatccaatctttcataactctgt

SEQ ID NO: 52408 - DNA, 26 bp, Homo sapiens
attatccaatctttcataactctgtt

SEQ ID NO: 52409 - DNA, 26 bp, Homo sapiens
ttatccaatctttcataactctgttg

SEQ ID NO: 52410 - DNA, 26 bp, Homo sapiens
tatccaatctttcataactctgttgt

SEQ ID NO: 52411 - DNA, 26 bp, Homo sapiens
atccaatctttcataactctgttgtg

SEQ ID NO: 52412 - DNA, 26 bp, Homo sapiens
tccaatctttcataactctgttgtgc

SEQ ID NO: 52413 - DNA, 26 bp, Homo sapiens
ccaatctttcataactctgttgtgcc

SEQ ID NO: 52414 - DNA, 26 bp, Homo sapiens
caatctttcataactctgttgtgcct

SEQ ID NO: 52415 - DNA, 26 bp, Homo sapiens
aatctttcataactctgttgtgcctt

SEQ ID NO: 52416 - DNA, 26 bp, Homo sapiens
atctttcataactctgttgtgccttt

SEQ ID NO: 52417 - DNA, 26 bp, Homo sapiens
tctttcataactctgttgtgcctttt

SEQ ID NO: 52418 - DNA, 26 bp, Homo sapiens
ctttcataactctgttgtgccttttc

SEQ ID NO: 52419 - DNA, 26 bp, Homo sapiens
tttcataactctgttgtgccttttct

SEQ ID NO: 52420 - DNA, 26 bp, Homo sapiens
ttcataactctgttgtgccttttctg

SEQ ID NO: 52421 - DNA, 26 bp, Homo sapiens
tcataactctgttgtgccttttctgc

SEQ ID NO: 52422 - DNA, 26 bp, Homo sapiens
cataactctgttgtgccttttctgcc

SEQ ID NO: 52423 - DNA, 26 bp, Homo sapiens
ataactctgttgtgccttttctgcct

SEQ ID NO: 52424 - DNA, 26 bp, Homo sapiens
taactctgttgtgccttttctgcctc

SEQ ID NO: 52425 - DNA, 26 bp, Homo sapiens
aactctgttgtgccttttctgcctct

SEQ ID NO: 52426 - DNA, 26 bp, Homo sapiens
actctgttgtgccttttctgcctctc

SEQ ID NO: 52427 - DNA, 26 bp, Homo sapiens
ctctgttgtgccttttctgcctctct

SEQ ID NO: 52428 - DNA, 26 bp, Homo sapiens
tctgttgtgccttttctgcctctcta

SEQ ID NO: 52429 - DNA, 26 bp, Homo sapiens
ctgttgtgccttttctgcctctctac

SEQ ID NO: 52430 - DNA, 26 bp, Homo sapiens
tgttgtgccttttctgcctctctaca

SEQ ID NO: 52431 - DNA, 26 bp, Homo sapiens
gttgtgccttttctgcctctctacat

SEQ ID NO: 52432 - DNA, 26 bp, Homo sapiens
ttgtgccttttctgcctctctacatt

SEQ ID NO: 52433 - DNA, 26 bp, Homo sapiens
tgtgccttttctgcctctctacattc

SEQ ID NO: 52434 - DNA, 26 bp, Homo sapiens
gtgccttttctgcctctctacattct

SEQ ID NO: 52435 - DNA, 26 bp, Homo sapiens
tgccttttctgcctctctacattctc

SEQ ID NO: 52436 - DNA, 26 bp, Homo sapiens
gccttttctgcctctctacattctct

SEQ ID NO: 52437 - DNA, 26 bp, Homo sapiens
ccttttctgcctctctacattctctt

SEQ ID NO: 52438 - DNA, 26 bp, Homo sapiens
cttttctgcctctctacattctcttt

SEQ ID NO: 52439 - DNA, 26 bp, Homo sapiens
ttttctgcctctctacattctctttc

SEQ ID NO: 52440 - DNA, 26 bp, Homo sapiens
tttctgcctctctacattctctttca

SEQ ID NO: 52441 - DNA, 26 bp, Homo sapiens
ttctgcctctctacattctctttcaa

SEQ ID NO: 52442 - DNA, 26 bp, Homo sapiens
tctgcctctctacattctctttcaaa

SEQ ID NO: 52443 - DNA, 26 bp, Homo sapiens
ctgcctctctacattctctttcaaac

SEQ ID NO: 52444 - DNA, 26 bp, Homo sapiens
tgcctctctacattctctttcaaact

SEQ ID NO: 52445 - DNA, 26 bp, Homo sapiens
gcctctctacattctctttcaaactt

SEQ ID NO: 52446 - DNA, 26 bp, Homo sapiens
cctctctacattctctttcaaacttc

SEQ ID NO: 52447 - DNA, 26 bp, Homo sapiens
ctctctacattctctttcaaacttct

SEQ ID NO: 52448 - DNA, 26 bp, Homo sapiens
tctctacattctctttcaaacttctt

SEQ ID NO: 52449 - DNA, 26 bp, Homo sapiens
ctctacattctctttcaaacttcttt

SEQ ID NO: 52450 - DNA, 26 bp, Homo sapiens
tctacattctctttcaaacttctttt

SEQ ID NO: 52451 - DNA, 26 bp, Homo sapiens
ctacattctctttcaaacttcttttt

SEQ ID NO: 52452 - DNA, 26 bp, Homo sapiens
tacattctctttcaaacttcttttta

SEQ ID NO: 52453 - DNA, 26 bp, Homo sapiens
acattctctttcaaacttctttttac

SEQ ID NO: 52454 - DNA, 26 bp, Homo sapiens
cattctctttcaaacttctttttact

SEQ ID NO: 52455 - DNA, 26 bp, Homo sapiens
attctctttcaaacttctttttacta

SEQ ID NO: 52456 - DNA, 26 bp, Homo sapiens
ttctctttcaaacttctttttactat

SEQ ID NO: 52457 - DNA, 26 bp, Homo sapiens
tctctttcaaacttctttttactatt

SEQ ID NO: 52458 - DNA, 26 bp, Homo sapiens
ctctttcaaacttctttttactatta

SEQ ID NO: 52459 - DNA, 26 bp, Homo sapiens
tctttcaaacttctttttactattat

SEQ ID NO: 52460 - DNA, 26 bp, Homo sapiens
ctttcaaacttctttttactattatc

SEQ ID NO: 52461 - DNA, 26 bp, Homo sapiens
tttcaaacttctttttactattatcc

SEQ ID NO: 52462 - DNA, 26 bp, Homo sapiens
ttcaaacttctttttactattatcca

SEQ ID NO: 52463 - DNA, 26 bp, Homo sapiens
tcaaacttctttttactattatccat

SEQ ID NO: 52464 - DNA, 26 bp, Homo sapiens
caaacttctttttactattatccatc

SEQ ID NO: 52465 - DNA, 26 bp, Homo sapiens
aaacttctttttactattatccatct

SEQ ID NO: 52466 - DNA, 26 bp, Homo sapiens
aacttctttttactattatccatctg

SEQ ID NO: 52467 - DNA, 26 bp, Homo sapiens
acttctttttactattatccatctgt

SEQ ID NO: 52468 - DNA, 26 bp, Homo sapiens
cttctttttactattatccatctgtt

SEQ ID NO: 52469 - DNA, 26 bp, Homo sapiens
ttctttttactattatccatctgttt

SEQ ID NO: 52470 - DNA, 26 bp, Homo sapiens
tctttttactattatccatctgtttc

SEQ ID NO: 52471 - DNA, 26 bp, Homo sapiens
ctttttactattatccatctgtttcc

SEQ ID NO: 52472 - DNA, 26 bp, Homo sapiens
tttttactattatccatctgtttcca

SEQ ID NO: 52473 - DNA, 26 bp, Homo sapiens
ttttactattatccatctgtttccag

SEQ ID NO: 52474 - DNA, 26 bp, Homo sapiens
tttactattatccatctgtttccagc

SEQ ID NO: 52475 - DNA, 26 bp, Homo sapiens
ttactattatccatctgtttccagca

SEQ ID NO: 52476 - DNA, 26 bp, Homo sapiens
tactattatccatctgtttccagcac

SEQ ID NO: 52477 - DNA, 26 bp, Homo sapiens
actattatccatctgtttccagcaca

SEQ ID NO: 52478 - DNA, 26 bp, Homo sapiens
ctattatccatctgtttccagcacat

SEQ ID NO: 52479 - DNA, 26 bp, Homo sapiens
tattatccatctgtttccagcacatg

SEQ ID NO: 52480 - DNA, 26 bp, Homo sapiens
attatccatctgtttccagcacatgt

SEQ ID NO: 52481 - DNA, 26 bp, Homo sapiens
ttatccatctgtttccagcacatgtc

SEQ ID NO: 52482 - DNA, 26 bp, Homo sapiens
tatccatctgtttccagcacatgtca

SEQ ID NO: 52483 - DNA, 26 bp, Homo sapiens
atccatctgtttccagcacatgtcaa

SEQ ID NO: 52484 - DNA, 26 bp, Homo sapiens
tccatctgtttccagcacatgtcaag

SEQ ID NO: 52485 - DNA, 26 bp, Homo sapiens
ccatctgtttccagcacatgtcaaga

SEQ ID NO: 52486 - DNA, 26 bp, Homo sapiens
catctgtttccagcacatgtcaagat

SEQ ID NO: 52487 - DNA, 26 bp, Homo sapiens
atctgtttccagcacatgtcaagata

SEQ ID NO: 52488 - DNA, 26 bp, Homo sapiens
tctgtttccagcacatgtcaagatat

SEQ ID NO: 52489 - DNA, 26 bp, Homo sapiens
ctgtttccagcacatgtcaagatatt

SEQ ID NO: 52490 - DNA, 26 bp, Homo sapiens
tgtttccagcacatgtcaagatattg

SEQ ID NO: 52491 - DNA, 26 bp, Homo sapiens
gtttccagcacatgtcaagatattgt

SEQ ID NO: 52492 - DNA, 26 bp, Homo sapiens
tttccagcacatgtcaagatattgtt

SEQ ID NO: 52493 - DNA, 26 bp, Homo sapiens
ttccagcacatgtcaagatattgttg

SEQ ID NO: 52494 - DNA, 26 bp, Homo sapiens
tccagcacatgtcaagatattgttga

SEQ ID NO: 52495 - DNA, 26 bp, Homo sapiens
ccagcacatgtcaagatattgttgag

SEQ ID NO: 52496 - DNA, 26 bp, Homo sapiens
cagcacatgtcaagatattgttgagc

SEQ ID NO: 52497 - DNA, 26 bp, Homo sapiens
agcacatgtcaagatattgttgagct

SEQ ID NO: 52498 - DNA, 26 bp, Homo sapiens
gcacatgtcaagatattgttgagctt

SEQ ID NO: 52499 - DNA, 26 bp, Homo sapiens
cacatgtcaagatattgttgagcttt

SEQ ID NO: 52500 - DNA, 26 bp, Homo sapiens
acatgtcaagatattgttgagctttt

SEQ ID NO: 52501 - DNA, 26 bp, Homo sapiens
catgtcaagatattgttgagcttttc

SEQ ID NO: 52502 - DNA, 26 bp, Homo sapiens
atgtcaagatattgttgagcttttcg

SEQ ID NO: 52503 - DNA, 26 bp, Homo sapiens
tgtcaagatattgttgagcttttcgt

SEQ ID NO: 52504 - DNA, 26 bp, Homo sapiens
gtcaagatattgttgagcttttcgtc

SEQ ID NO: 52505 - DNA, 26 bp, Homo sapiens
tcaagatattgttgagcttttcgtcc

SEQ ID NO: 52506 - DNA, 26 bp, Homo sapiens
caagatattgttgagcttttcgtcct

SEQ ID NO: 52507 - DNA, 26 bp, Homo sapiens
aagatattgttgagcttttcgtcctt

SEQ ID NO: 52508 - DNA, 26 bp, Homo sapiens
agatattgttgagcttttcgtccttc

SEQ ID NO: 52509 - DNA, 26 bp, Homo sapiens
gatattgttgagcttttcgtccttct

SEQ ID NO: 52510 - DNA, 26 bp, Homo sapiens
atattgttgagcttttcgtccttctt

SEQ ID NO: 52511 - DNA, 26 bp, Homo sapiens
tattgttgagcttttcgtccttcttg

SEQ ID NO: 52512 - DNA, 26 bp, Homo sapiens
attgttgagcttttcgtccttcttgc

SEQ ID NO: 52513 - DNA, 26 bp, Homo sapiens
ttgttgagcttttcgtccttcttgca

SEQ ID NO: 52514 - DNA, 26 bp, Homo sapiens
tgttgagcttttcgtccttcttgcag

SEQ ID NO: 52515 - DNA, 26 bp, Homo sapiens
gttgagcttttcgtccttcttgcaga

SEQ ID NO: 52516 - DNA, 26 bp, Homo sapiens
ttgagcttttcgtccttcttgcagat

SEQ ID NO: 52517 - DNA, 26 bp, Homo sapiens
tgagcttttcgtccttcttgcagatg

SEQ ID NO: 52518 - DNA, 26 bp, Homo sapiens
gagcttttcgtccttcttgcagatgc

SEQ ID NO: 52519 - DNA, 26 bp, Homo sapiens
agcttttcgtccttcttgcagatgca

SEQ ID NO: 52520 - DNA, 26 bp, Homo sapiens
gcttttcgtccttcttgcagatgcat

SEQ ID NO: 52521 - DNA, 26 bp, Homo sapiens
cttttcgtccttcttgcagatgcatt

SEQ ID NO: 52522 - DNA, 26 bp, Homo sapiens
ttttcgtccttcttgcagatgcattt

SEQ ID NO: 52523 - DNA, 26 bp, Homo sapiens
tttcgtccttcttgcagatgcatttt

SEQ ID NO: 52524 - DNA, 26 bp, Homo sapiens
ttcgtccttcttgcagatgcattttt

SEQ ID NO: 52525 - DNA, 26 bp, Homo sapiens
tcgtccttcttgcagatgcatttttc

SEQ ID NO: 52526 - DNA, 26 bp, Homo sapiens
cgtccttcttgcagatgcatttttct

SEQ ID NO: 52527 - DNA, 26 bp, Homo sapiens
gtccttcttgcagatgcatttttctt

SEQ ID NO: 52528 - DNA, 26 bp, Homo sapiens
tccttcttgcagatgcatttttcttt

SEQ ID NO: 52529 - DNA, 26 bp, Homo sapiens
ccttcttgcagatgcatttttctttc

SEQ ID NO: 52530 - DNA, 26 bp, Homo sapiens
cttcttgcagatgcatttttctttca

SEQ ID NO: 52531 - DNA, 26 bp, Homo sapiens
ttcttgcagatgcatttttctttcag

SEQ ID NO: 52532 - DNA, 26 bp, Homo sapiens
tcttgcagatgcatttttctttcagt

SEQ ID NO: 52533 - DNA, 26 bp, Homo sapiens
cttgcagatgcatttttctttcagtt

SEQ ID NO: 52534 - DNA, 26 bp, Homo sapiens
ttgcagatgcatttttctttcagttt

SEQ ID NO: 52535 - DNA, 26 bp, Homo sapiens
tgcagatgcatttttctttcagtttt

SEQ ID NO: 52536 - DNA, 26 bp, Homo sapiens
gcagatgcatttttctttcagttttc

SEQ ID NO: 52537 - DNA, 26 bp, Homo sapiens
cagatgcatttttctttcagttttca

SEQ ID NO: 52538 - DNA, 26 bp, Homo sapiens
agatgcatttttctttcagttttcag

SEQ ID NO: 52539 - DNA, 26 bp, Homo sapiens
gatgcatttttctttcagttttcaga

SEQ ID NO: 52540 - DNA, 26 bp, Homo sapiens
atgcatttttctttcagttttcagat

SEQ ID NO: 52541 - DNA, 26 bp, Homo sapiens
tgcatttttctttcagttttcagatc

SEQ ID NO: 52542 - DNA, 26 bp, Homo sapiens
gcatttttctttcagttttcagatca

SEQ ID NO: 52543 - DNA, 26 bp, Homo sapiens
catttttctttcagttttcagatcat

SEQ ID NO: 52544 - DNA, 26 bp, Homo sapiens
atttttctttcagttttcagatcatg

SEQ ID NO: 52545 - DNA, 26 bp, Homo sapiens
tttttctttcagttttcagatcatga

SEQ ID NO: 52546 - DNA, 26 bp, Homo sapiens
ttttctttcagttttcagatcatgag

SEQ ID NO: 52547 - DNA, 26 bp, Homo sapiens
tttctttcagttttcagatcatgagc

SEQ ID NO: 52548 - DNA, 26 bp, Homo sapiens
ttctttcagttttcagatcatgagca

SEQ ID NO: 52549 - DNA, 26 bp, Homo sapiens
tctttcagttttcagatcatgagcat

SEQ ID NO: 52550 - DNA, 26 bp, Homo sapiens
ctttcagttttcagatcatgagcata

SEQ ID NO: 52551 - DNA, 26 bp, Homo sapiens
tttcagttttcagatcatgagcatat

SEQ ID NO: 52552 - DNA, 26 bp, Homo sapiens
ttcagttttcagatcatgagcatatc

SEQ ID NO: 52553 - DNA, 26 bp, Homo sapiens
tcagttttcagatcatgagcatatct

SEQ ID NO: 52554 - DNA, 26 bp, Homo sapiens
cagttttcagatcatgagcatatctc

SEQ ID NO: 52555 - DNA, 26 bp, Homo sapiens
agttttcagatcatgagcatatctca

SEQ ID NO: 52556 - DNA, 26 bp, Homo sapiens
gttttcagatcatgagcatatctcat

SEQ ID NO: 52557 - DNA, 26 bp, Homo sapiens
ttttcagatcatgagcatatctcatt

SEQ ID NO: 52558 - DNA, 26 bp, Homo sapiens
tttcagatcatgagcatatctcatta

SEQ ID NO: 52559 - DNA, 26 bp, Homo sapiens
ttcagatcatgagcatatctcattaa

SEQ ID NO: 52560 - DNA, 26 bp, Homo sapiens
tcagatcatgagcatatctcattaat

SEQ ID NO: 52561 - DNA, 26 bp, Homo sapiens
cagatcatgagcatatctcattaatt

SEQ ID NO: 52562 - DNA, 26 bp, Homo sapiens
agatcatgagcatatctcattaattc

SEQ ID NO: 52563 - DNA, 26 bp, Homo sapiens
gatcatgagcatatctcattaattca

SEQ ID NO: 52564 - DNA, 26 bp, Homo sapiens
atcatgagcatatctcattaattcac

SEQ ID NO: 52565 - DNA, 26 bp, Homo sapiens
tcatgagcatatctcattaattcacc

SEQ ID NO: 52566 - DNA, 26 bp, Homo sapiens
catgagcatatctcattaattcacca

SEQ ID NO: 52567 - DNA, 26 bp, Homo sapiens
atgagcatatctcattaattcaccat

SEQ ID NO: 52568 - DNA, 26 bp, Homo sapiens
tgagcatatctcattaattcaccata

SEQ ID NO: 52569 - DNA, 26 bp, Homo sapiens
gagcatatctcattaattcaccatac

SEQ ID NO: 52570 - DNA, 26 bp, Homo sapiens
agcatatctcattaattcaccataca

SEQ ID NO: 52571 - DNA, 26 bp, Homo sapiens
gcatatctcattaattcaccatacac

SEQ ID NO: 52572 - DNA, 26 bp, Homo sapiens
catatctcattaattcaccatacact

SEQ ID NO: 52573 - DNA, 26 bp, Homo sapiens
atatctcattaattcaccatacactc

SEQ ID NO: 52574 - DNA, 26 bp, Homo sapiens
tatctcattaattcaccatacactct

SEQ ID NO: 52575 - DNA, 26 bp, Homo sapiens
atctcattaattcaccatacactctg

SEQ ID NO: 52576 - DNA, 26 bp, Homo sapiens
tctcattaattcaccatacactctgt

SEQ ID NO: 52577 - DNA, 26 bp, Homo sapiens
ctcattaattcaccatacactctgtg

SEQ ID NO: 52578 - DNA, 26 bp, Homo sapiens
tcattaattcaccatacactctgtgc

SEQ ID NO: 52579 - DNA, 26 bp, Homo sapiens
cattaattcaccatacactctgtgcg

SEQ ID NO: 52580 - DNA, 26 bp, Homo sapiens
attaattcaccatacactctgtgcgc

SEQ ID NO: 52581 - DNA, 26 bp, Homo sapiens
ttaattcaccatacactctgtgcgcc

SEQ ID NO: 52582 - DNA, 26 bp, Homo sapiens
taattcaccatacactctgtgcgcca

SEQ ID NO: 52583 - DNA, 26 bp, Homo sapiens
aattcaccatacactctgtgcgccat

SEQ ID NO: 52584 - DNA, 26 bp, Homo sapiens
attcaccatacactctgtgcgccatt

SEQ ID NO: 52585 - DNA, 26 bp, Homo sapiens
ttcaccatacactctgtgcgccattt

SEQ ID NO: 52586 - DNA, 26 bp, Homo sapiens
tcaccatacactctgtgcgccatttc

SEQ ID NO: 52587 - DNA, 26 bp, Homo sapiens
caccatacactctgtgcgccatttct

SEQ ID NO: 52588 - DNA, 26 bp, Homo sapiens
accatacactctgtgcgccatttctt

SEQ ID NO: 52589 - DNA, 26 bp, Homo sapiens
ccatacactctgtgcgccatttcttc

SEQ ID NO: 52590 - DNA, 26 bp, Homo sapiens
catacactctgtgcgccatttcttct

SEQ ID NO: 52591 - DNA, 26 bp, Homo sapiens
atacactctgtgcgccatttcttctg

SEQ ID NO: 52592 - DNA, 26 bp, Homo sapiens
tacactctgtgcgccatttcttctgc

SEQ ID NO: 52593 - DNA, 26 bp, Homo sapiens
acactctgtgcgccatttcttctgct

SEQ ID NO: 52594 - DNA, 26 bp, Homo sapiens
cactctgtgcgccatttcttctgcta

SEQ ID NO: 52595 - DNA, 26 bp, Homo sapiens
actctgtgcgccatttcttctgctac

SEQ ID NO: 52596 - DNA, 26 bp, Homo sapiens
ctctgtgcgccatttcttctgctaca

SEQ ID NO: 52597 - DNA, 26 bp, Homo sapiens
tctgtgcgccatttcttctgctacaa

SEQ ID NO: 52598 - DNA, 26 bp, Homo sapiens
ctgtgcgccatttcttctgctacaac

SEQ ID NO: 52599 - DNA, 26 bp, Homo sapiens
tgtgcgccatttcttctgctacaact

SEQ ID NO: 52600 - DNA, 26 bp, Homo sapiens
gtgcgccatttcttctgctacaactt

SEQ ID NO: 52601 - DNA, 26 bp, Homo sapiens
tgcgccatttcttctgctacaacttc

SEQ ID NO: 52602 - DNA, 26 bp, Homo sapiens
gcgccatttcttctgctacaacttct

SEQ ID NO: 52603 - DNA, 26 bp, Homo sapiens
cgccatttcttctgctacaacttctc

SEQ ID NO: 52604 - DNA, 26 bp, Homo sapiens
gccatttcttctgctacaacttctcg

SEQ ID NO: 52605 - DNA, 26 bp, Homo sapiens
ccatttcttctgctacaacttctcgc

SEQ ID NO: 52606 - DNA, 26 bp, Homo sapiens
catttcttctgctacaacttctcgct

SEQ ID NO: 52607 - DNA, 26 bp, Homo sapiens
atttcttctgctacaacttctcgctg

SEQ ID NO: 52608 - DNA, 26 bp, Homo sapiens
tttcttctgctacaacttctcgctgt

SEQ ID NO: 52609 - DNA, 26 bp, Homo sapiens
ttcttctgctacaacttctcgctgtc

SEQ ID NO: 52610 - DNA, 26 bp, Homo sapiens
tcttctgctacaacttctcgctgtcc

SEQ ID NO: 52611 - DNA, 26 bp, Homo sapiens
cttctgctacaacttctcgctgtcct

SEQ ID NO: 52612 - DNA, 26 bp, Homo sapiens
ttctgctacaacttctcgctgtcctg

SEQ ID NO: 52613 - DNA, 26 bp, Homo sapiens
tctgctacaacttctcgctgtcctgc

SEQ ID NO: 52614 - DNA, 26 bp, Homo sapiens
ctgctacaacttctcgctgtcctgca

SEQ ID NO: 52615 - DNA, 26 bp, Homo sapiens
tgctacaacttctcgctgtcctgcat

SEQ ID NO: 52616 - DNA, 26 bp, Homo sapiens
gctacaacttctcgctgtcctgcata

SEQ ID NO: 52617 - DNA, 26 bp, Homo sapiens
ctacaacttctcgctgtcctgcatag

SEQ ID NO: 52618 - DNA, 26 bp, Homo sapiens
tacaacttctcgctgtcctgcatagt

SEQ ID NO: 52619 - DNA, 26 bp, Homo sapiens
acaacttctcgctgtcctgcatagtc

SEQ ID NO: 52620 - DNA, 26 bp, Homo sapiens
caacttctcgctgtcctgcatagtca

SEQ ID NO: 52621 - DNA, 26 bp, Homo sapiens
aacttctcgctgtcctgcatagtcat

SEQ ID NO: 52622 - DNA, 26 bp, Homo sapiens
acttctcgctgtcctgcatagtcatt

SEQ ID NO: 52623 - DNA, 26 bp, Homo sapiens
cttctcgctgtcctgcatagtcattt

SEQ ID NO: 52624 - DNA, 26 bp, Homo sapiens
ttctcgctgtcctgcatagtcattta

SEQ ID NO: 52625 - DNA, 26 bp, Homo sapiens
tctcgctgtcctgcatagtcatttaa

SEQ ID NO: 52626 - DNA, 26 bp, Homo sapiens
ctcgctgtcctgcatagtcatttaac

SEQ ID NO: 52627 - DNA, 26 bp, Homo sapiens
tcgctgtcctgcatagtcatttaact

SEQ ID NO: 52628 - DNA, 26 bp, Homo sapiens
cgctgtcctgcatagtcatttaactc

SEQ ID NO: 52629 - DNA, 26 bp, Homo sapiens
gctgtcctgcatagtcatttaactca

SEQ ID NO: 52630 - DNA, 26 bp, Homo sapiens
ctgtcctgcatagtcatttaactcat

SEQ ID NO: 52631 - DNA, 26 bp, Homo sapiens
tgtcctgcatagtcatttaactcatt

SEQ ID NO: 52632 - DNA, 26 bp, Homo sapiens
gtcctgcatagtcatttaactcatta

SEQ ID NO: 52633 - DNA, 26 bp, Homo sapiens
tcctgcatagtcatttaactcattaa

SEQ ID NO: 52634 - DNA, 26 bp, Homo sapiens
cctgcatagtcatttaactcattaag

SEQ ID NO: 52635 - DNA, 26 bp, Homo sapiens
ctgcatagtcatttaactcattaagg

SEQ ID NO: 52636 - DNA, 26 bp, Homo sapiens
tgcatagtcatttaactcattaagga

SEQ ID NO: 52637 - DNA, 26 bp, Homo sapiens
gcatagtcatttaactcattaaggat

SEQ ID NO: 52638 - DNA, 26 bp, Homo sapiens
catagtcatttaactcattaaggata

SEQ ID NO: 52639 - DNA, 26 bp, Homo sapiens
atagtcatttaactcattaaggatat

SEQ ID NO: 52640 - DNA, 26 bp, Homo sapiens
tagtcatttaactcattaaggatatt

SEQ ID NO: 52641 - DNA, 26 bp, Homo sapiens
agtcatttaactcattaaggatatta

SEQ ID NO: 52642 - DNA, 26 bp, Homo sapiens
gtcatttaactcattaaggatattaa

SEQ ID NO: 52643 - DNA, 26 bp, Homo sapiens
tcatttaactcattaaggatattaaa

SEQ ID NO: 52644 - DNA, 26 bp, Homo sapiens
catttaactcattaaggatattaaaa

SEQ ID NO: 52645 - DNA, 26 bp, Homo sapiens
atttaactcattaaggatattaaaaa

SEQ ID NO: 52646 - DNA, 26 bp, Homo sapiens
tttaactcattaaggatattaaaaaa

SEQ ID NO: 52647 - DNA, 26 bp, Homo sapiens
ttaactcattaaggatattaaaaaag

SEQ ID NO: 52648 - DNA, 26 bp, Homo sapiens
taactcattaaggatattaaaaaagg

SEQ ID NO: 52649 - DNA, 26 bp, Homo sapiens
aactcattaaggatattaaaaaaggc

SEQ ID NO: 52650 - DNA, 26 bp, Homo sapiens
actcattaaggatattaaaaaaggct

SEQ ID NO: 52651 - DNA, 26 bp, Homo sapiens
ctcattaaggatattaaaaaaggcta

SEQ ID NO: 52652 - DNA, 26 bp, Homo sapiens
tcattaaggatattaaaaaaggctac

SEQ ID NO: 52653 - DNA, 26 bp, Homo sapiens
cattaaggatattaaaaaaggctaca

SEQ ID NO: 52654 - DNA, 26 bp, Homo sapiens
attaaggatattaaaaaaggctacac

SEQ ID NO: 52655 - DNA, 26 bp, Homo sapiens
ttaaggatattaaaaaaggctacaca

SEQ ID NO: 52656 - DNA, 26 bp, Homo sapiens
taaggatattaaaaaaggctacacac

SEQ ID NO: 52657 - DNA, 26 bp, Homo sapiens
aaggatattaaaaaaggctacacacg

SEQ ID NO: 52658 - DNA, 26 bp, Homo sapiens
aggatattaaaaaaggctacacacga

SEQ ID NO: 52659 - DNA, 26 bp, Homo sapiens
ggatattaaaaaaggctacacacgag

SEQ ID NO: 52660 - DNA, 26 bp, Homo sapiens
gatattaaaaaaggctacacacgagg

SEQ ID NO: 52661 - DNA, 26 bp, Homo sapiens
atattaaaaaaggctacacacgaggt

SEQ ID NO: 52662 - DNA, 26 bp, Homo sapiens
tattaaaaaaggctacacacgaggta

SEQ ID NO: 52663 - DNA, 26 bp, Homo sapiens
attaaaaaaggctacacacgaggtaa

SEQ ID NO: 52664 - DNA, 26 bp, Homo sapiens
ttaaaaaaggctacacacgaggtaaa

SEQ ID NO: 52665 - DNA, 26 bp, Homo sapiens
taaaaaaggctacacacgaggtaaac

SEQ ID NO: 52666 - DNA, 26 bp, Homo sapiens
aaaaaaggctacacacgaggtaaacc

SEQ ID NO: 52667 - DNA, 26 bp, Homo sapiens
aaaaaggctacacacgaggtaaaccg

SEQ ID NO: 52668 - DNA, 26 bp, Homo sapiens
aaaaggctacacacgaggtaaaccgt

SEQ ID NO: 52669 - DNA, 26 bp, Homo sapiens
aaaggctacacacgaggtaaaccgtg

SEQ ID NO: 52670 - DNA, 26 bp, Homo sapiens
aaggctacacacgaggtaaaccgtgg

SEQ ID NO: 52671 - DNA, 26 bp, Homo sapiens
aggctacacacgaggtaaaccgtggc

SEQ ID NO: 52672 - DNA, 26 bp, Homo sapiens
ggctacacacgaggtaaaccgtggct

SEQ ID NO: 52673 - DNA, 26 bp, Homo sapiens
gctacacacgaggtaaaccgtggctc

SEQ ID NO: 52674 - DNA, 26 bp, Homo sapiens
ctacacacgaggtaaaccgtggctct

SEQ ID NO: 52675 - DNA, 26 bp, Homo sapiens
tacacacgaggtaaaccgtggctctt

SEQ ID NO: 52676 - DNA, 26 bp, Homo sapiens
acacacgaggtaaaccgtggctcttc

SEQ ID NO: 52677 - DNA, 26 bp, Homo sapiens
cacacgaggtaaaccgtggctcttca

SEQ ID NO: 52678 - DNA, 26 bp, Homo sapiens
acacgaggtaaaccgtggctcttcat

SEQ ID NO: 52679 - DNA, 26 bp, Homo sapiens
cacgaggtaaaccgtggctcttcatc

SEQ ID NO: 52680 - DNA, 26 bp, Homo sapiens
acgaggtaaaccgtggctcttcatct

SEQ ID NO: 52681 - DNA, 26 bp, Homo sapiens
cgaggtaaaccgtggctcttcatctt

SEQ ID NO: 52682 - DNA, 26 bp, Homo sapiens
gaggtaaaccgtggctcttcatcttt

SEQ ID NO: 52683 - DNA, 26 bp, Homo sapiens
aggtaaaccgtggctcttcatctttg

SEQ ID NO: 52684 - DNA, 26 bp, Homo sapiens
ggtaaaccgtggctcttcatctttgg

SEQ ID NO: 52685 - DNA, 26 bp, Homo sapiens
gtaaaccgtggctcttcatctttgga

SEQ ID NO: 52686 - DNA, 26 bp, Homo sapiens
taaaccgtggctcttcatctttggat

SEQ ID NO: 52687 - DNA, 26 bp, Homo sapiens
aaaccgtggctcttcatctttggatg

SEQ ID NO: 52688 - DNA, 26 bp, Homo sapiens
aaccgtggctcttcatctttggatga

SEQ ID NO: 52689 - DNA, 26 bp, Homo sapiens
accgtggctcttcatctttggatgaa

SEQ ID NO: 52690 - DNA, 26 bp, Homo sapiens
ccgtggctcttcatctttggatgaac

SEQ ID NO: 52691 - DNA, 26 bp, Homo sapiens
cgtggctcttcatctttggatgaacg

SEQ ID NO: 52692 - DNA, 26 bp, Homo sapiens
gtggctcttcatctttggatgaacgt

SEQ ID NO: 52693 - DNA, 26 bp, Homo sapiens
tggctcttcatctttggatgaacgtt

SEQ ID NO: 52694 - DNA, 26 bp, Homo sapiens
ggctcttcatctttggatgaacgttt

SEQ ID NO: 52695 - DNA, 26 bp, Homo sapiens
gctcttcatctttggatgaacgtttg

SEQ ID NO: 52696 - DNA, 26 bp, Homo sapiens
ctcttcatctttggatgaacgtttgg

SEQ ID NO: 52697 - DNA, 26 bp, Homo sapiens
tcttcatctttggatgaacgtttggg

SEQ ID NO: 52698 - DNA, 26 bp, Homo sapiens
cttcatctttggatgaacgtttgggg

SEQ ID NO: 52699 - DNA, 26 bp, Homo sapiens
ttcatctttggatgaacgtttggggc

SEQ ID NO: 52700 - DNA, 26 bp, Homo sapiens
tcatctttggatgaacgtttggggca

SEQ ID NO: 52701 - DNA, 26 bp, Homo sapiens
catctttggatgaacgtttggggcag

SEQ ID NO: 52702 - DNA, 26 bp, Homo sapiens
atctttggatgaacgtttggggcagt

SEQ ID NO: 52703 - DNA, 26 bp, Homo sapiens
tctttggatgaacgtttggggcagta

SEQ ID NO: 52704 - DNA, 26 bp, Homo sapiens
ctttggatgaacgtttggggcagtac

SEQ ID NO: 52705 - DNA, 26 bp, Homo sapiens
tttggatgaacgtttggggcagtact

SEQ ID NO: 52706 - DNA, 26 bp, Homo sapiens
ttggatgaacgtttggggcagtactt

SEQ ID NO: 52707 - DNA, 26 bp, Homo sapiens
tggatgaacgtttggggcagtacttc

SEQ ID NO: 52708 - DNA, 26 bp, Homo sapiens
ggatgaacgtttggggcagtacttct

SEQ ID NO: 52709 - DNA, 26 bp, Homo sapiens
gatgaacgtttggggcagtacttctt

SEQ ID NO: 52710 - DNA, 26 bp, Homo sapiens
atgaacgtttggggcagtacttctta

SEQ ID NO: 52711 - DNA, 26 bp, Homo sapiens
tgaacgtttggggcagtacttcttaa

SEQ ID NO: 52712 - DNA, 26 bp, Homo sapiens
gaacgtttggggcagtacttcttaac

SEQ ID NO: 52713 - DNA, 26 bp, Homo sapiens
aacgtttggggcagtacttcttaacc

SEQ ID NO: 52714 - DNA, 26 bp, Homo sapiens
acgtttggggcagtacttcttaacca

SEQ ID NO: 52715 - DNA, 26 bp, Homo sapiens
cgtttggggcagtacttcttaaccag

SEQ ID NO: 52716 - DNA, 26 bp, Homo sapiens
gtttggggcagtacttcttaaccaga

SEQ ID NO: 52717 - DNA, 26 bp, Homo sapiens
tttggggcagtacttcttaaccagat

SEQ ID NO: 52718 - DNA, 26 bp, Homo sapiens
ttggggcagtacttcttaaccagatt

SEQ ID NO: 52719 - DNA, 26 bp, Homo sapiens
tggggcagtacttcttaaccagattt

SEQ ID NO: 52720 - DNA, 26 bp, Homo sapiens
ggggcagtacttcttaaccagatttc

SEQ ID NO: 52721 - DNA, 26 bp, Homo sapiens
gggcagtacttcttaaccagatttct

SEQ ID NO: 52722 - DNA, 26 bp, Homo sapiens
ggcagtacttcttaaccagatttctc

SEQ ID NO: 52723 - DNA, 26 bp, Homo sapiens
gcagtacttcttaaccagatttctca

SEQ ID NO: 52724 - DNA, 26 bp, Homo sapiens
cagtacttcttaaccagatttctcaa

SEQ ID NO: 52725 - DNA, 26 bp, Homo sapiens
agtacttcttaaccagatttctcaat

SEQ ID NO: 52726 - DNA, 26 bp, Homo sapiens
gtacttcttaaccagatttctcaatt

SEQ ID NO: 52727 - DNA, 26 bp, Homo sapiens
tacttcttaaccagatttctcaattg

SEQ ID NO: 52728 - DNA, 26 bp, Homo sapiens
acttcttaaccagatttctcaattgt

SEQ ID NO: 52729 - DNA, 26 bp, Homo sapiens
cttcttaaccagatttctcaattgtt

SEQ ID NO: 52730 - DNA, 26 bp, Homo sapiens
ttcttaaccagatttctcaattgttt

SEQ ID NO: 52731 - DNA, 26 bp, Homo sapiens
tcttaaccagatttctcaattgtttc

SEQ ID NO: 52732 - DNA, 26 bp, Homo sapiens
cttaaccagatttctcaattgtttcg

SEQ ID NO: 52733 - DNA, 26 bp, Homo sapiens
ttaaccagatttctcaattgtttcgc

SEQ ID NO: 52734 - DNA, 26 bp, Homo sapiens
taaccagatttctcaattgtttcgca

SEQ ID NO: 52735 - DNA, 26 bp, Homo sapiens
aaccagatttctcaattgtttcgcat

SEQ ID NO: 52736 - DNA, 26 bp, Homo sapiens
accagatttctcaattgtttcgcata

SEQ ID NO: 52737 - DNA, 26 bp, Homo sapiens
ccagatttctcaattgtttcgcatag

SEQ ID NO: 52738 - DNA, 26 bp, Homo sapiens
cagatttctcaattgtttcgcatagt

SEQ ID NO: 52739 - DNA, 26 bp, Homo sapiens
agatttctcaattgtttcgcatagtt

SEQ ID NO: 52740 - DNA, 26 bp, Homo sapiens
gatttctcaattgtttcgcatagttc

SEQ ID NO: 52741 - DNA, 26 bp, Homo sapiens
atttctcaattgtttcgcatagttct

SEQ ID NO: 52742 - DNA, 26 bp, Homo sapiens
tttctcaattgtttcgcatagttctg

SEQ ID NO: 52743 - DNA, 26 bp, Homo sapiens
ttctcaattgtttcgcatagttctgt

SEQ ID NO: 52744 - DNA, 26 bp, Homo sapiens
tctcaattgtttcgcatagttctgtt

SEQ ID NO: 52745 - DNA, 26 bp, Homo sapiens
ctcaattgtttcgcatagttctgttc

SEQ ID NO: 52746 - DNA, 26 bp, Homo sapiens
tcaattgtttcgcatagttctgttca

SEQ ID NO: 52747 - DNA, 26 bp, Homo sapiens
caattgtttcgcatagttctgttcaa

SEQ ID NO: 52748 - DNA, 26 bp, Homo sapiens
aattgtttcgcatagttctgttcaat

SEQ ID NO: 52749 - DNA, 26 bp, Homo sapiens
attgtttcgcatagttctgttcaatt

SEQ ID NO: 52750 - DNA, 26 bp, Homo sapiens
ttgtttcgcatagttctgttcaattt

SEQ ID NO: 52751 - DNA, 26 bp, Homo sapiens
tgtttcgcatagttctgttcaatttc

SEQ ID NO: 52752 - DNA, 26 bp, Homo sapiens
gtttcgcatagttctgttcaatttct

SEQ ID NO: 52753 - DNA, 26 bp, Homo sapiens
tttcgcatagttctgttcaatttcta

SEQ ID NO: 52754 - DNA, 26 bp, Homo sapiens
ttcgcatagttctgttcaatttctat

SEQ ID NO: 52755 - DNA, 26 bp, Homo sapiens
tcgcatagttctgttcaatttctatc

SEQ ID NO: 52756 - DNA, 26 bp, Homo sapiens
cgcatagttctgttcaatttctatcc

SEQ ID NO: 52757 - DNA, 26 bp, Homo sapiens
gcatagttctgttcaatttctatcct

SEQ ID NO: 52758 - DNA, 26 bp, Homo sapiens
catagttctgttcaatttctatcctc

SEQ ID NO: 52759 - DNA, 26 bp, Homo sapiens
atagttctgttcaatttctatcctct

SEQ ID NO: 52760 - DNA, 26 bp, Homo sapiens
tagttctgttcaatttctatcctctc

SEQ ID NO: 52761 - DNA, 26 bp, Homo sapiens
agttctgttcaatttctatcctctct

SEQ ID NO: 52762 - DNA, 26 bp, Homo sapiens
gttctgttcaatttctatcctctctt

SEQ ID NO: 52763 - DNA, 26 bp, Homo sapiens
ttctgttcaatttctatcctctcttt

SEQ ID NO: 52764 - DNA, 26 bp, Homo sapiens
tctgttcaatttctatcctctcttta

SEQ ID NO: 52765 - DNA, 26 bp, Homo sapiens
ctgttcaatttctatcctctctttaa

SEQ ID NO: 52766 - DNA, 26 bp, Homo sapiens
tgttcaatttctatcctctctttaac

SEQ ID NO: 52767 - DNA, 26 bp, Homo sapiens
gttcaatttctatcctctctttaaca

SEQ ID NO: 52768 - DNA, 26 bp, Homo sapiens
ttcaatttctatcctctctttaacaa

SEQ ID NO: 52769 - DNA, 26 bp, Homo sapiens
tcaatttctatcctctctttaacaaa

SEQ ID NO: 52770 - DNA, 26 bp, Homo sapiens
caatttctatcctctctttaacaaat

SEQ ID NO: 52771 - DNA, 26 bp, Homo sapiens
aatttctatcctctctttaacaaatt

SEQ ID NO: 52772 - DNA, 26 bp, Homo sapiens
atttctatcctctctttaacaaattt

SEQ ID NO: 52773 - DNA, 26 bp, Homo sapiens
tttctatcctctctttaacaaatttg

SEQ ID NO: 52774 - DNA, 26 bp, Homo sapiens
ttctatcctctctttaacaaatttgg

SEQ ID NO: 52775 - DNA, 26 bp, Homo sapiens
tctatcctctctttaacaaatttggc

SEQ ID NO: 52776 - DNA, 26 bp, Homo sapiens
ctatcctctctttaacaaatttggca

SEQ ID NO: 52777 - DNA, 26 bp, Homo sapiens
tatcctctctttaacaaatttggcat

SEQ ID NO: 52778 - DNA, 26 bp, Homo sapiens
atcctctctttaacaaatttggcata

SEQ ID NO: 52779 - DNA, 26 bp, Homo sapiens
tcctctctttaacaaatttggcatat

SEQ ID NO: 52780 - DNA, 26 bp, Homo sapiens
cctctctttaacaaatttggcatatc

SEQ ID NO: 52781 - DNA, 26 bp, Homo sapiens
ctctctttaacaaatttggcatatct

SEQ ID NO: 52782 - DNA, 26 bp, Homo sapiens
tctctttaacaaatttggcatatctt

SEQ ID NO: 52783 - DNA, 26 bp, Homo sapiens
ctctttaacaaatttggcatatcttt

SEQ ID NO: 52784 - DNA, 26 bp, Homo sapiens
tctttaacaaatttggcatatctttc

SEQ ID NO: 52785 - DNA, 26 bp, Homo sapiens
ctttaacaaatttggcatatctttcc

SEQ ID NO: 52786 - DNA, 26 bp, Homo sapiens
tttaacaaatttggcatatctttcca

SEQ ID NO: 52787 - DNA, 26 bp, Homo sapiens
ttaacaaatttggcatatctttccaa

SEQ ID NO: 52788 - DNA, 26 bp, Homo sapiens
taacaaatttggcatatctttccaag

SEQ ID NO: 52789 - DNA, 26 bp, Homo sapiens
aacaaatttggcatatctttccaaga

SEQ ID NO: 52790 - DNA, 26 bp, Homo sapiens
acaaatttggcatatctttccaagaa

SEQ ID NO: 52791 - DNA, 26 bp, Homo sapiens
caaatttggcatatctttccaagaag

SEQ ID NO: 52792 - DNA, 26 bp, Homo sapiens
aaatttggcatatctttccaagaagt

SEQ ID NO: 52793 - DNA, 26 bp, Homo sapiens
aatttggcatatctttccaagaagtc

SEQ ID NO: 52794 - DNA, 26 bp, Homo sapiens
atttggcatatctttccaagaagtca

SEQ ID NO: 52795 - DNA, 26 bp, Homo sapiens
tttggcatatctttccaagaagtcaa

SEQ ID NO: 52796 - DNA, 26 bp, Homo sapiens
ttggcatatctttccaagaagtcaat

SEQ ID NO: 52797 - DNA, 26 bp, Homo sapiens
tggcatatctttccaagaagtcaatt

SEQ ID NO: 52798 - DNA, 26 bp, Homo sapiens
ggcatatctttccaagaagtcaattc

SEQ ID NO: 52799 - DNA, 26 bp, Homo sapiens
gcatatctttccaagaagtcaattcc

SEQ ID NO: 52800 - DNA, 26 bp, Homo sapiens
catatctttccaagaagtcaattccc

SEQ ID NO: 52801 - DNA, 26 bp, Homo sapiens
atatctttccaagaagtcaattcccc

SEQ ID NO: 52802 - DNA, 26 bp, Homo sapiens
tatctttccaagaagtcaattcccca

SEQ ID NO: 52803 - DNA, 26 bp, Homo sapiens
atctttccaagaagtcaattccccat

SEQ ID NO: 52804 - DNA, 26 bp, Homo sapiens
tctttccaagaagtcaattccccatt

SEQ ID NO: 52805 - DNA, 26 bp, Homo sapiens
ctttccaagaagtcaattccccattg

SEQ ID NO: 52806 - DNA, 26 bp, Homo sapiens
tttccaagaagtcaattccccattgt

SEQ ID NO: 52807 - DNA, 26 bp, Homo sapiens
ttccaagaagtcaattccccattgtg

SEQ ID NO: 52808 - DNA, 26 bp, Homo sapiens
tccaagaagtcaattccccattgtgt

SEQ ID NO: 52809 - DNA, 26 bp, Homo sapiens
ccaagaagtcaattccccattgtgta

SEQ ID NO: 52810 - DNA, 26 bp, Homo sapiens
caagaagtcaattccccattgtgtat

SEQ ID NO: 52811 - DNA, 26 bp, Homo sapiens
aagaagtcaattccccattgtgtatg

SEQ ID NO: 52812 - DNA, 26 bp, Homo sapiens
agaagtcaattccccattgtgtatgc

SEQ ID NO: 52813 - DNA, 26 bp, Homo sapiens
gaagtcaattccccattgtgtatgct

SEQ ID NO: 52814 - DNA, 26 bp, Homo sapiens
aagtcaattccccattgtgtatgctt

SEQ ID NO: 52815 - DNA, 26 bp, Homo sapiens
agtcaattccccattgtgtatgcttg

SEQ ID NO: 52816 - DNA, 26 bp, Homo sapiens
gtcaattccccattgtgtatgcttgt

SEQ ID NO: 52817 - DNA, 26 bp, Homo sapiens
tcaattccccattgtgtatgcttgtc

SEQ ID NO: 52818 - DNA, 26 bp, Homo sapiens
caattccccattgtgtatgcttgtct

SEQ ID NO: 52819 - DNA, 26 bp, Homo sapiens
aattccccattgtgtatgcttgtcta

SEQ ID NO: 52820 - DNA, 26 bp, Homo sapiens
attccccattgtgtatgcttgtctaa

SEQ ID NO: 52821 - DNA, 26 bp, Homo sapiens
ttccccattgtgtatgcttgtctaag

SEQ ID NO: 52822 - DNA, 26 bp, Homo sapiens
tccccattgtgtatgcttgtctaagc

SEQ ID NO: 52823 - DNA, 26 bp, Homo sapiens
ccccattgtgtatgcttgtctaagct

SEQ ID NO: 52824 - DNA, 26 bp, Homo sapiens
cccattgtgtatgcttgtctaagctg

SEQ ID NO: 52825 - DNA, 26 bp, Homo sapiens
ccattgtgtatgcttgtctaagctgt

SEQ ID NO: 52826 - DNA, 26 bp, Homo sapiens
cattgtgtatgcttgtctaagctgtc

SEQ ID NO: 52827 - DNA, 26 bp, Homo sapiens
attgtgtatgcttgtctaagctgtcg

SEQ ID NO: 52828 - DNA, 26 bp, Homo sapiens
ttgtgtatgcttgtctaagctgtcga

SEQ ID NO: 52829 - DNA, 26 bp, Homo sapiens
tgtgtatgcttgtctaagctgtcgaa

SEQ ID NO: 52830 - DNA, 26 bp, Homo sapiens
gtgtatgcttgtctaagctgtcgaac

SEQ ID NO: 52831 - DNA, 26 bp, Homo sapiens
tgtatgcttgtctaagctgtcgaact

SEQ ID NO: 52832 - DNA, 26 bp, Homo sapiens
gtatgcttgtctaagctgtcgaactg

SEQ ID NO: 52833 - DNA, 26 bp, Homo sapiens
tatgcttgtctaagctgtcgaactga

SEQ ID NO: 52834 - DNA, 26 bp, Homo sapiens
atgcttgtctaagctgtcgaactgat

SEQ ID NO: 52835 - DNA, 26 bp, Homo sapiens
tgcttgtctaagctgtcgaactgatc

SEQ ID NO: 52836 - DNA, 26 bp, Homo sapiens
gcttgtctaagctgtcgaactgatcc

SEQ ID NO: 52837 - DNA, 26 bp, Homo sapiens
cttgtctaagctgtcgaactgatccc

SEQ ID NO: 52838 - DNA, 26 bp, Homo sapiens
ttgtctaagctgtcgaactgatccca

SEQ ID NO: 52839 - DNA, 26 bp, Homo sapiens
tgtctaagctgtcgaactgatcccac

SEQ ID NO: 52840 - DNA, 26 bp, Homo sapiens
gtctaagctgtcgaactgatcccaca

SEQ ID NO: 52841 - DNA, 26 bp, Homo sapiens
tctaagctgtcgaactgatcccacag

SEQ ID NO: 52842 - DNA, 26 bp, Homo sapiens
ctaagctgtcgaactgatcccacagc

SEQ ID NO: 52843 - DNA, 26 bp, Homo sapiens
taagctgtcgaactgatcccacagct

SEQ ID NO: 52844 - DNA, 26 bp, Homo sapiens
aagctgtcgaactgatcccacagctc

SEQ ID NO: 52845 - DNA, 26 bp, Homo sapiens
agctgtcgaactgatcccacagctcc

SEQ ID NO: 52846 - DNA, 26 bp, Homo sapiens
gctgtcgaactgatcccacagctccg

SEQ ID NO: 52847 - DNA, 26 bp, Homo sapiens
ctgtcgaactgatcccacagctccgt

SEQ ID NO: 52848 - DNA, 26 bp, Homo sapiens
tgtcgaactgatcccacagctccgtg

SEQ ID NO: 52849 - DNA, 26 bp, Homo sapiens
gtcgaactgatcccacagctccgtgc

SEQ ID NO: 52850 - DNA, 26 bp, Homo sapiens
tcgaactgatcccacagctccgtgcc

SEQ ID NO: 52851 - DNA, 26 bp, Homo sapiens
cgaactgatcccacagctccgtgccc

SEQ ID NO: 52852 - DNA, 26 bp, Homo sapiens
gaactgatcccacagctccgtgcccc

SEQ ID NO: 52853 - DNA, 26 bp, Homo sapiens
aactgatcccacagctccgtgcccca

SEQ ID NO: 52854 - DNA, 26 bp, Homo sapiens
actgatcccacagctccgtgccccag

SEQ ID NO: 52855 - DNA, 26 bp, Homo sapiens
ctgatcccacagctccgtgccccagc

SEQ ID NO: 52856 - DNA, 26 bp, Homo sapiens
tgatcccacagctccgtgccccagct

SEQ ID NO: 52857 - DNA, 26 bp, Homo sapiens
gatcccacagctccgtgccccagctc

SEQ ID NO: 52858 - DNA, 26 bp, Homo sapiens
atcccacagctccgtgccccagctca

SEQ ID NO: 52859 - DNA, 26 bp, Homo sapiens
tcccacagctccgtgccccagctcat

SEQ ID NO: 52860 - DNA, 26 bp, Homo sapiens
cccacagctccgtgccccagctcatg

SEQ ID NO: 52861 - DNA, 26 bp, Homo sapiens
ccacagctccgtgccccagctcatgg

SEQ ID NO: 52862 - DNA, 26 bp, Homo sapiens
cacagctccgtgccccagctcatggc

SEQ ID NO: 52863 - DNA, 26 bp, Homo sapiens
acagctccgtgccccagctcatggcg

SEQ ID NO: 52864 - DNA, 26 bp, Homo sapiens
cagctccgtgccccagctcatggcgg

SEQ ID NO: 52865 - DNA, 26 bp, Homo sapiens
agctccgtgccccagctcatggcgga

SEQ ID NO: 52866 - DNA, 26 bp, Homo sapiens
gctccgtgccccagctcatggcggaa

SEQ ID NO: 52867 - DNA, 26 bp, Homo sapiens
ctccgtgccccagctcatggcggaac

SEQ ID NO: 52868 - DNA, 26 bp, Homo sapiens
tccgtgccccagctcatggcggaact

SEQ ID NO: 52869 - DNA, 26 bp, Homo sapiens
ccgtgccccagctcatggcggaactt

SEQ ID NO: 52870 - DNA, 26 bp, Homo sapiens
cgtgccccagctcatggcggaacttt

SEQ ID NO: 52871 - DNA, 26 bp, Homo sapiens
gtgccccagctcatggcggaactttc

SEQ ID NO: 52872 - DNA, 26 bp, Homo sapiens
tgccccagctcatggcggaactttct

SEQ ID NO: 52873 - DNA, 26 bp, Homo sapiens
gccccagctcatggcggaactttctg

SEQ ID NO: 52874 - DNA, 26 bp, Homo sapiens
ccccagctcatggcggaactttctgg

SEQ ID NO: 52875 - DNA, 26 bp, Homo sapiens
cccagctcatggcggaactttctggc

SEQ ID NO: 52876 - DNA, 26 bp, Homo sapiens
ccagctcatggcggaactttctggcc

SEQ ID NO: 52877 - DNA, 26 bp, Homo sapiens
cagctcatggcggaactttctggccg

SEQ ID NO: 52878 - DNA, 26 bp, Homo sapiens
agctcatggcggaactttctggccgt

SEQ ID NO: 52879 - DNA, 26 bp, Homo sapiens
gctcatggcggaactttctggccgtc

SEQ ID NO: 52880 - DNA, 26 bp, Homo sapiens
ctcatggcggaactttctggccgtct

SEQ ID NO: 52881 - DNA, 26 bp, Homo sapiens
tcatggcggaactttctggccgtctg

SEQ ID NO: 52882 - DNA, 26 bp, Homo sapiens
catggcggaactttctggccgtctgg

SEQ ID NO: 52883 - DNA, 26 bp, Homo sapiens
atggcggaactttctggccgtctggc

SEQ ID NO: 52884 - DNA, 26 bp, Homo sapiens
tggcggaactttctggccgtctggcg

SEQ ID NO: 52885 - DNA, 26 bp, Homo sapiens
ggcggaactttctggccgtctggcgg

SEQ ID NO: 52886 - DNA, 26 bp, Homo sapiens
gcggaactttctggccgtctggcggt

SEQ ID NO: 52887 - DNA, 26 bp, Homo sapiens
cggaactttctggccgtctggcggtg

SEQ ID NO: 52888 - DNA, 26 bp, Homo sapiens
ggaactttctggccgtctggcggtgc

SEQ ID NO: 52889 - DNA, 26 bp, Homo sapiens
gaactttctggccgtctggcggtgcc

SEQ ID NO: 52890 - DNA, 26 bp, Homo sapiens
aactttctggccgtctggcggtgccg

SEQ ID NO: 52891 - DNA, 26 bp, Homo sapiens
actttctggccgtctggcggtgccgc

SEQ ID NO: 52892 - DNA, 26 bp, Homo sapiens
ctttctggccgtctggcggtgccgct

SEQ ID NO: 52893 - DNA, 26 bp, Homo sapiens
tttctggccgtctggcggtgccgctg

SEQ ID NO: 52894 - DNA, 26 bp, Homo sapiens
ttctggccgtctggcggtgccgctgt

SEQ ID NO: 52895 - DNA, 26 bp, Homo sapiens
tctggccgtctggcggtgccgctgtc

SEQ ID NO: 52896 - DNA, 26 bp, Homo sapiens
ctggccgtctggcggtgccgctgtcc

SEQ ID NO: 52897 - DNA, 26 bp, Homo sapiens
tggccgtctggcggtgccgctgtcct

SEQ ID NO: 52898 - DNA, 26 bp, Homo sapiens
ggccgtctggcggtgccgctgtcctt

SEQ ID NO: 52899 - DNA, 26 bp, Homo sapiens
gccgtctggcggtgccgctgtccttc

SEQ ID NO: 52900 - DNA, 26 bp, Homo sapiens
ccgtctggcggtgccgctgtccttca

SEQ ID NO: 52901 - DNA, 26 bp, Homo sapiens
cgtctggcggtgccgctgtccttcag

SEQ ID NO: 52902 - DNA, 26 bp, Homo sapiens
gtctggcggtgccgctgtccttcagt

SEQ ID NO: 52903 - DNA, 26 bp, Homo sapiens
tctggcggtgccgctgtccttcagtc

SEQ ID NO: 52904 - DNA, 26 bp, Homo sapiens
ctggcggtgccgctgtccttcagtct

SEQ ID NO: 52905 - DNA, 26 bp, Homo sapiens
tggcggtgccgctgtccttcagtctg

SEQ ID NO: 52906 - DNA, 26 bp, Homo sapiens
ggcggtgccgctgtccttcagtctgt

SEQ ID NO: 52907 - DNA, 26 bp, Homo sapiens
gcggtgccgctgtccttcagtctgtc

SEQ ID NO: 52908 - DNA, 26 bp, Homo sapiens
cggtgccgctgtccttcagtctgtcg

SEQ ID NO: 52909 - DNA, 26 bp, Homo sapiens
ggtgccgctgtccttcagtctgtcgg

SEQ ID NO: 52910 - DNA, 26 bp, Homo sapiens
gtgccgctgtccttcagtctgtcggc

SEQ ID NO: 52911 - DNA, 26 bp, Homo sapiens
tgccgctgtccttcagtctgtcggct

SEQ ID NO: 52912 - DNA, 26 bp, Homo sapiens
gccgctgtccttcagtctgtcggctc

SEQ ID NO: 52913 - DNA, 26 bp, Homo sapiens
ccgctgtccttcagtctgtcggctcc

SEQ ID NO: 52914 - DNA, 26 bp, Homo sapiens
cgctgtccttcagtctgtcggctcca

SEQ ID NO: 52915 - DNA, 26 bp, Homo sapiens
gctgtccttcagtctgtcggctccac

SEQ ID NO: 52916 - DNA, 26 bp, Homo sapiens
ctgtccttcagtctgtcggctccaca

SEQ ID NO: 52917 - DNA, 26 bp, Homo sapiens
tgtccttcagtctgtcggctccacag

SEQ ID NO: 52918 - DNA, 26 bp, Homo sapiens
gtccttcagtctgtcggctccacagt

SEQ ID NO: 52919 - DNA, 26 bp, Homo sapiens
tccttcagtctgtcggctccacagtc

SEQ ID NO: 52920 - DNA, 26 bp, Homo sapiens
ccttcagtctgtcggctccacagtct

SEQ ID NO: 52921 - DNA, 26 bp, Homo sapiens
cttcagtctgtcggctccacagtctg

SEQ ID NO: 52922 - DNA, 26 bp, Homo sapiens
ttcagtctgtcggctccacagtctgt

SEQ ID NO: 52923 - DNA, 26 bp, Homo sapiens
tcagtctgtcggctccacagtctgtc

SEQ ID NO: 52924 - DNA, 26 bp, Homo sapiens
cagtctgtcggctccacagtctgtcc

SEQ ID NO: 52925 - DNA, 26 bp, Homo sapiens
agtctgtcggctccacagtctgtccg

SEQ ID NO: 52926 - DNA, 26 bp, Homo sapiens
gtctgtcggctccacagtctgtccga

SEQ ID NO: 52927 - DNA, 26 bp, Homo sapiens
tctgtcggctccacagtctgtccgac

SEQ ID NO: 52928 - DNA, 26 bp, Homo sapiens
ctgtcggctccacagtctgtccgacc

SEQ ID NO: 52929 - DNA, 26 bp, Homo sapiens
tgtcggctccacagtctgtccgacct

SEQ ID NO: 52930 - DNA, 26 bp, Homo sapiens
gtcggctccacagtctgtccgacctc

SEQ ID NO: 52931 - DNA, 26 bp, Homo sapiens
tcggctccacagtctgtccgacctct

SEQ ID NO: 52932 - DNA, 26 bp, Homo sapiens
cggctccacagtctgtccgacctctc

SEQ ID NO: 52933 - DNA, 26 bp, Homo sapiens
ggctccacagtctgtccgacctctca

SEQ ID NO: 52934 - DNA, 26 bp, Homo sapiens
gctccacagtctgtccgacctctcac

SEQ ID NO: 52935 - DNA, 26 bp, Homo sapiens
ctccacagtctgtccgacctctcact

SEQ ID NO: 52936 - DNA, 26 bp, Homo sapiens
tccacagtctgtccgacctctcactc

SEQ ID NO: 52937 - DNA, 26 bp, Homo sapiens
ccacagtctgtccgacctctcactcg

SEQ ID NO: 52938 - DNA, 26 bp, Homo sapiens
cacagtctgtccgacctctcactcgc

SEQ ID NO: 52939 - DNA, 26 bp, Homo sapiens
acagtctgtccgacctctcactcgct

SEQ ID NO: 52940 - DNA, 26 bp, Homo sapiens
cagtctgtccgacctctcactcgctg

SEQ ID NO: 52941 - DNA, 26 bp, Homo sapiens
agtctgtccgacctctcactcgctgg

SEQ ID NO: 52942 - DNA, 26 bp, Homo sapiens
gtctgtccgacctctcactcgctggc

SEQ ID NO: 52943 - DNA, 26 bp, Homo sapiens
tctgtccgacctctcactcgctggcc

SEQ ID NO: 52944 - DNA, 26 bp, Homo sapiens
ctgtccgacctctcactcgctggccg

SEQ ID NO: 52945 - DNA, 26 bp, Homo sapiens
tgtccgacctctcactcgctggccgg

SEQ ID NO: 52946 - DNA, 26 bp, Homo sapiens
gtccgacctctcactcgctggccggc

SEQ ID NO: 52947 - DNA, 26 bp, Homo sapiens
tccgacctctcactcgctggccggcg

SEQ ID NO: 52948 - DNA, 26 bp, Homo sapiens
ccgacctctcactcgctggccggcgg

SEQ ID NO: 52949 - DNA, 26 bp, Homo sapiens
cgacctctcactcgctggccggcggg

SEQ ID NO: 52950 - DNA, 26 bp, Homo sapiens
gacctctcactcgctggccggcgggc

SEQ ID NO: 52951 - DNA, 26 bp, Homo sapiens
acctctcactcgctggccggcgggct

SEQ ID NO: 52952 - DNA, 26 bp, Homo sapiens
cctctcactcgctggccggcgggcta

SEQ ID NO: 52953 - DNA, 26 bp, Homo sapiens
ctctcactcgctggccggcgggctag

SEQ ID NO: 52954 - DNA, 26 bp, Homo sapiens
tctcactcgctggccggcgggctagc

SEQ ID NO: 52955 - DNA, 26 bp, Homo sapiens
ctcactcgctggccggcgggctagca

SEQ ID NO: 52956 - DNA, 26 bp, Homo sapiens
tcactcgctggccggcgggctagcag

SEQ ID NO: 52957 - DNA, 26 bp, Homo sapiens
cactcgctggccggcgggctagcagc

SEQ ID NO: 52958 - DNA, 26 bp, Homo sapiens
actcgctggccggcgggctagcagct

SEQ ID NO: 52959 - DNA, 26 bp, Homo sapiens
ctcgctggccggcgggctagcagctc

SEQ ID NO: 52960 - DNA, 26 bp, Homo sapiens
tcgctggccggcgggctagcagctca

SEQ ID NO: 52961 - DNA, 26 bp, Homo sapiens
cgctggccggcgggctagcagctcag

SEQ ID NO: 52962 - DNA, 26 bp, Homo sapiens
gctggccggcgggctagcagctcagc

SEQ ID NO: 52963 - DNA, 26 bp, Homo sapiens
ctggccggcgggctagcagctcagcg

SEQ ID NO: 52964 - DNA, 26 bp, Homo sapiens
tggccggcgggctagcagctcagcgg

SEQ ID NO: 52965 - DNA, 26 bp, Homo sapiens
ggccggcgggctagcagctcagcggg

SEQ ID NO: 52966 - DNA, 26 bp, Homo sapiens
gccggcgggctagcagctcagcgggt

SEQ ID NO: 52967 - DNA, 26 bp, Homo sapiens
ccggcgggctagcagctcagcgggtc

SEQ ID NO: 52968 - DNA, 26 bp, Homo sapiens
cggcgggctagcagctcagcgggtct

SEQ ID NO: 52969 - DNA, 26 bp, Homo sapiens
ggcgggctagcagctcagcgggtcta

SEQ ID NO: 52970 - DNA, 26 bp, Homo sapiens
gcgggctagcagctcagcgggtctac

SEQ ID NO: 52971 - DNA, 26 bp, Homo sapiens
cgggctagcagctcagcgggtctacc

SEQ ID NO: 52972 - DNA, 26 bp, Homo sapiens
gggctagcagctcagcgggtctacct

SEQ ID NO: 52973 - DNA, 26 bp, Homo sapiens
ggctagcagctcagcgggtctacctc

SEQ ID NO: 52974 - DNA, 26 bp, Homo sapiens
gctagcagctcagcgggtctacctcg

SEQ ID NO: 52975 - DNA, 26 bp, Homo sapiens
ctagcagctcagcgggtctacctcga

SEQ ID NO: 52976 - DNA, 26 bp, Homo sapiens
tagcagctcagcgggtctacctcgaa

SEQ ID NO: 52977 - DNA, 26 bp, Homo sapiens
agcagctcagcgggtctacctcgaaa

SEQ ID NO: 52978 - DNA, 26 bp, Homo sapiens
gcagctcagcgggtctacctcgaaag

SEQ ID NO: 52979 - DNA, 26 bp, Homo sapiens
cagctcagcgggtctacctcgaaagg

SEQ ID NO: 52980 - DNA, 26 bp, Homo sapiens
agctcagcgggtctacctcgaaaggt

SEQ ID NO: 52981 - DNA, 26 bp, Homo sapiens
gctcagcgggtctacctcgaaaggtg

SEQ ID NO: 52982 - DNA, 26 bp, Homo sapiens
ctcagcgggtctacctcgaaaggtgc

SEQ ID NO: 52983 - DNA, 26 bp, Homo sapiens
tcagcgggtctacctcgaaaggtgcc

SEQ ID NO: 52984 - DNA, 26 bp, Homo sapiens
cagcgggtctacctcgaaaggtgccg

SEQ ID NO: 52985 - DNA, 26 bp, Homo sapiens
agcgggtctacctcgaaaggtgccgc

SEQ ID NO: 52986 - DNA, 26 bp, Homo sapiens
gcgggtctacctcgaaaggtgccgcc

SEQ ID NO: 52987 - DNA, 26 bp, Homo sapiens
cgggtctacctcgaaaggtgccgcca

SEQ ID NO: 52988 - DNA, 26 bp, Homo sapiens
gggtctacctcgaaaggtgccgccac

SEQ ID NO: 52989 - DNA, 26 bp, Homo sapiens
ggtctacctcgaaaggtgccgccacc

SEQ ID NO: 52990 - DNA, 26 bp, Homo sapiens
gtctacctcgaaaggtgccgccaccg

SEQ ID NO: 52991 - DNA, 26 bp, Homo sapiens
tctacctcgaaaggtgccgccaccgc

SEQ ID NO: 52992 - DNA, 26 bp, Homo sapiens
ctacctcgaaaggtgccgccaccgcc

SEQ ID NO: 52993 - DNA, 26 bp, Homo sapiens
tacctcgaaaggtgccgccaccgccg

SEQ ID NO: 52994 - DNA, 26 bp, Homo sapiens
acctcgaaaggtgccgccaccgccgg

SEQ ID NO: 52995 - DNA, 26 bp, Homo sapiens
cctcgaaaggtgccgccaccgccggg

SEQ ID NO: 52996 - DNA, 26 bp, Homo sapiens
ctcgaaaggtgccgccaccgccgggc

SEQ ID NO: 52997 - DNA, 26 bp, Homo sapiens
tcgaaaggtgccgccaccgccgggct

SEQ ID NO: 52998 - DNA, 26 bp, Homo sapiens
cgaaaggtgccgccaccgccgggctc

SEQ ID NO: 52999 - DNA, 26 bp, Homo sapiens
gaaaggtgccgccaccgccgggctcc

SEQ ID NO: 53000 - DNA, 26 bp, Homo sapiens
aaaggtgccgccaccgccgggctccc

SEQ ID NO: 53001 - DNA, 26 bp, Homo sapiens
aaggtgccgccaccgccgggctcccc

SEQ ID NO: 53002 - DNA, 26 bp, Homo sapiens
aggtgccgccaccgccgggctcccca

SEQ ID NO: 53003 - DNA, 26 bp, Homo sapiens
ggtgccgccaccgccgggctccccag

SEQ ID NO: 53004 - DNA, 26 bp, Homo sapiens
gtgccgccaccgccgggctccccagt

SEQ ID NO: 53005 - DNA, 26 bp, Homo sapiens
tgccgccaccgccgggctccccagtg

SEQ ID NO: 53006 - DNA, 26 bp, Homo sapiens
gccgccaccgccgggctccccagtga

SEQ ID NO: 53007 - DNA, 26 bp, Homo sapiens
ccgccaccgccgggctccccagtgag

SEQ ID NO: 53008 - DNA, 26 bp, Homo sapiens
cgccaccgccgggctccccagtgagt

SEQ ID NO: 53009 - DNA, 26 bp, Homo sapiens
gccaccgccgggctccccagtgagtg

SEQ ID NO: 53010 - DNA, 26 bp, Homo sapiens
ccaccgccgggctccccagtgagtga

SEQ ID NO: 53011 - DNA, 26 bp, Homo sapiens
tagtaagcactcaaaaatatttatta

SEQ ID NO: 53012 - DNA, 26 bp, Homo sapiens
agtaagcactcaaaaatatttattat

SEQ ID NO: 53013 - DNA, 26 bp, Homo sapiens
gtaagcactcaaaaatatttattatt

SEQ ID NO: 53014 - DNA, 26 bp, Homo sapiens
taagcactcaaaaatatttattatta

SEQ ID NO: 53015 - DNA, 26 bp, Homo sapiens
aagcactcaaaaatatttattattat

SEQ ID NO: 53016 - DNA, 26 bp, Homo sapiens
agcactcaaaaatatttattattatc

SEQ ID NO: 53017 - DNA, 26 bp, Homo sapiens
gcactcaaaaatatttattattatca

SEQ ID NO: 53018 - DNA, 26 bp, Homo sapiens
cactcaaaaatatttattattatcat

SEQ ID NO: 53019 - DNA, 26 bp, Homo sapiens
actcaaaaatatttattattatcatc

SEQ ID NO: 53020 - DNA, 26 bp, Homo sapiens
ctcaaaaatatttattattatcatca

SEQ ID NO: 53021 - DNA, 26 bp, Homo sapiens
tcaaaaatatttattattatcatcat

SEQ ID NO: 53022 - DNA, 26 bp, Homo sapiens
caaaaatatttattattatcatcatc

SEQ ID NO: 53023 - DNA, 26 bp, Homo sapiens
aaaaatatttattattatcatcatca

SEQ ID NO: 53024 - DNA, 26 bp, Homo sapiens
aaaatatttattattatcatcatcat

SEQ ID NO: 53025 - DNA, 26 bp, Homo sapiens
aaatatttattattatcatcatcatc

SEQ ID NO: 53026 - DNA, 26 bp, Homo sapiens
aatatttattattatcatcatcatca

SEQ ID NO: 53027 - DNA, 26 bp, Homo sapiens
atatttattattatcatcatcatcat

SEQ ID NO: 53028 - DNA, 26 bp, Homo sapiens
tatttattattatcatcatcatcatc

SEQ ID NO: 53029 - DNA, 26 bp, Homo sapiens
atttattattatcatcatcatcatca

SEQ ID NO: 53030 - DNA, 26 bp, Homo sapiens
tttattattatcatcatcatcatcat

SEQ ID NO: 53031 - DNA, 26 bp, Homo sapiens
ttattattatcatcatcatcatcatt

SEQ ID NO: 53032 - DNA, 26 bp, Homo sapiens
tattattatcatcatcatcatcatta

SEQ ID NO: 53033 - DNA, 26 bp, Homo sapiens
attattatcatcatcatcatcattat

SEQ ID NO: 53034 - DNA, 26 bp, Homo sapiens
ttattatcatcatcatcatcattatt

SEQ ID NO: 53035 - DNA, 26 bp, Homo sapiens
tattatcatcatcatcatcattatta

SEQ ID NO: 53036 - DNA, 26 bp, Homo sapiens
attatcatcatcatcatcattattat

SEQ ID NO: 53037 - DNA, 26 bp, Homo sapiens
ttatcatcatcatcatcattattatt

SEQ ID NO: 53038 - DNA, 26 bp, Homo sapiens
tatcatcatcatcatcattattatta

SEQ ID NO: 53039 - DNA, 26 bp, Homo sapiens
atcatcatcatcatcattattattac

SEQ ID NO: 53040 - DNA, 26 bp, Homo sapiens
tcatcatcatcatcattattattaca

SEQ ID NO: 53041 - DNA, 26 bp, Homo sapiens
catcatcatcatcattattattacat

SEQ ID NO: 53042 - DNA, 26 bp, Homo sapiens
atcatcatcatcattattattacata

SEQ ID NO: 53043 - DNA, 26 bp, Homo sapiens
tcatcatcatcattattattacataa

SEQ ID NO: 53044 - DNA, 26 bp, Homo sapiens
catcatcatcattattattacataag

SEQ ID NO: 53045 - DNA, 26 bp, Homo sapiens
atcatcatcattattattacataaga

SEQ ID NO: 53046 - DNA, 26 bp, Homo sapiens
tcatcatcattattattacataagaa

SEQ ID NO: 53047 - DNA, 26 bp, Homo sapiens
catcatcattattattacataagaaa

SEQ ID NO: 53048 - DNA, 26 bp, Homo sapiens
atcatcattattattacataagaaaa

SEQ ID NO: 53049 - DNA, 26 bp, Homo sapiens
tcatcattattattacataagaaaac

SEQ ID NO: 53050 - DNA, 26 bp, Homo sapiens
catcattattattacataagaaaaca

SEQ ID NO: 53051 - DNA, 26 bp, Homo sapiens
atcattattattacataagaaaacaa

SEQ ID NO: 53052 - DNA, 26 bp, Homo sapiens
tcattattattacataagaaaacaag

SEQ ID NO: 53053 - DNA, 26 bp, Homo sapiens
cattattattacataagaaaacaagt

SEQ ID NO: 53054 - DNA, 26 bp, Homo sapiens
attattattacataagaaaacaagtt

SEQ ID NO: 53055 - DNA, 26 bp, Homo sapiens
ttattattacataagaaaacaagttg

SEQ ID NO: 53056 - DNA, 26 bp, Homo sapiens
tattattacataagaaaacaagttgt

SEQ ID NO: 53057 - DNA, 26 bp, Homo sapiens
attattacataagaaaacaagttgta

SEQ ID NO: 53058 - DNA, 26 bp, Homo sapiens
ttattacataagaaaacaagttgtaa

SEQ ID NO: 53059 - DNA, 26 bp, Homo sapiens
tattacataagaaaacaagttgtaat

SEQ ID NO: 53060 - DNA, 26 bp, Homo sapiens
attacataagaaaacaagttgtaatg

SEQ ID NO: 53061 - DNA, 26 bp, Homo sapiens
ttacataagaaaacaagttgtaatgc

SEQ ID NO: 53062 - DNA, 26 bp, Homo sapiens
tacataagaaaacaagttgtaatgca

SEQ ID NO: 53063 - DNA, 26 bp, Homo sapiens
acataagaaaacaagttgtaatgcat

SEQ ID NO: 53064 - DNA, 26 bp, Homo sapiens
cataagaaaacaagttgtaatgcatc

SEQ ID NO: 53065 - DNA, 26 bp, Homo sapiens
ataagaaaacaagttgtaatgcatca

SEQ ID NO: 53066 - DNA, 26 bp, Homo sapiens
taagaaaacaagttgtaatgcatcac

SEQ ID NO: 53067 - DNA, 26 bp, Homo sapiens
aagaaaacaagttgtaatgcatcacc

SEQ ID NO: 53068 - DNA, 26 bp, Homo sapiens
agaaaacaagttgtaatgcatcacca

SEQ ID NO: 53069 - DNA, 26 bp, Homo sapiens
gaaaacaagttgtaatgcatcaccaa

SEQ ID NO: 53070 - DNA, 26 bp, Homo sapiens
aaaacaagttgtaatgcatcaccaag

SEQ ID NO: 53071 - DNA, 26 bp, Homo sapiens
aaacaagttgtaatgcatcaccaagg

SEQ ID NO: 53072 - DNA, 26 bp, Homo sapiens
aacaagttgtaatgcatcaccaaggt

SEQ ID NO: 53073 - DNA, 26 bp, Homo sapiens
acaagttgtaatgcatcaccaaggtt

SEQ ID NO: 53074 - DNA, 26 bp, Homo sapiens
caagttgtaatgcatcaccaaggttt

SEQ ID NO: 53075 - DNA, 26 bp, Homo sapiens
aagttgtaatgcatcaccaaggtttt

SEQ ID NO: 53076 - DNA, 26 bp, Homo sapiens
agttgtaatgcatcaccaaggttttg

SEQ ID NO: 53077 - DNA, 26 bp, Homo sapiens
gttgtaatgcatcaccaaggttttga

SEQ ID NO: 53078 - DNA, 26 bp, Homo sapiens
ttgtaatgcatcaccaaggttttgaa

SEQ ID NO: 53079 - DNA, 26 bp, Homo sapiens
tgtaatgcatcaccaaggttttgaaa

SEQ ID NO: 53080 - DNA, 26 bp, Homo sapiens
gtaatgcatcaccaaggttttgaaac

SEQ ID NO: 53081 - DNA, 26 bp, Homo sapiens
taatgcatcaccaaggttttgaaaca

SEQ ID NO: 53082 - DNA, 26 bp, Homo sapiens
aatgcatcaccaaggttttgaaacaa

SEQ ID NO: 53083 - DNA, 26 bp, Homo sapiens
atgcatcaccaaggttttgaaacaaa

SEQ ID NO: 53084 - DNA, 26 bp, Homo sapiens
tgcatcaccaaggttttgaaacaaat

SEQ ID NO: 53085 - DNA, 26 bp, Homo sapiens
gcatcaccaaggttttgaaacaaatg

SEQ ID NO: 53086 - DNA, 26 bp, Homo sapiens
catcaccaaggttttgaaacaaatgt

SEQ ID NO: 53087 - DNA, 26 bp, Homo sapiens
atcaccaaggttttgaaacaaatgta

SEQ ID NO: 53088 - DNA, 26 bp, Homo sapiens
tcaccaaggttttgaaacaaatgtac

SEQ ID NO: 53089 - DNA, 26 bp, Homo sapiens
caccaaggttttgaaacaaatgtacc

SEQ ID NO: 53090 - DNA, 26 bp, Homo sapiens
accaaggttttgaaacaaatgtaccc

SEQ ID NO: 53091 - DNA, 26 bp, Homo sapiens
ccaaggttttgaaacaaatgtaccca

SEQ ID NO: 53092 - DNA, 26 bp, Homo sapiens
caaggttttgaaacaaatgtacccaa

SEQ ID NO: 53093 - DNA, 26 bp, Homo sapiens
aaggttttgaaacaaatgtacccaaa

SEQ ID NO: 53094 - DNA, 26 bp, Homo sapiens
aggttttgaaacaaatgtacccaaaa

SEQ ID NO: 53095 - DNA, 26 bp, Homo sapiens
ggttttgaaacaaatgtacccaaaat

SEQ ID NO: 53096 - DNA, 26 bp, Homo sapiens
gttttgaaacaaatgtacccaaaata

SEQ ID NO: 53097 - DNA, 26 bp, Homo sapiens
ttttgaaacaaatgtacccaaaatat

SEQ ID NO: 53098 - DNA, 26 bp, Homo sapiens
tttgaaacaaatgtacccaaaatatg

SEQ ID NO: 53099 - DNA, 26 bp, Homo sapiens
ttgaaacaaatgtacccaaaatatgc

SEQ ID NO: 53100 - DNA, 26 bp, Homo sapiens
tgaaacaaatgtacccaaaatatgct

SEQ ID NO: 53101 - DNA, 26 bp, Homo sapiens
gaaacaaatgtacccaaaatatgctt

SEQ ID NO: 53102 - DNA, 26 bp, Homo sapiens
aaacaaatgtacccaaaatatgcttt

SEQ ID NO: 53103 - DNA, 26 bp, Homo sapiens
aacaaatgtacccaaaatatgctttt

SEQ ID NO: 53104 - DNA, 26 bp, Homo sapiens
acaaatgtacccaaaatatgctttta

SEQ ID NO: 53105 - DNA, 26 bp, Homo sapiens
caaatgtacccaaaatatgcttttaa

SEQ ID NO: 53106 - DNA, 26 bp, Homo sapiens
aaatgtacccaaaatatgcttttaat

SEQ ID NO: 53107 - DNA, 26 bp, Homo sapiens
aatgtacccaaaatatgcttttaatc

SEQ ID NO: 53108 - DNA, 26 bp, Homo sapiens
atgtacccaaaatatgcttttaatct

SEQ ID NO: 53109 - DNA, 26 bp, Homo sapiens
tgtacccaaaatatgcttttaatctt

SEQ ID NO: 53110 - DNA, 26 bp, Homo sapiens
gtacccaaaatatgcttttaatcttg

SEQ ID NO: 53111 - DNA, 26 bp, Homo sapiens
tacccaaaatatgcttttaatcttga

SEQ ID NO: 53112 - DNA, 26 bp, Homo sapiens
acccaaaatatgcttttaatcttgat

SEQ ID NO: 53113 - DNA, 26 bp, Homo sapiens
cccaaaatatgcttttaatcttgatg

SEQ ID NO: 53114 - DNA, 26 bp, Homo sapiens
ccaaaatatgcttttaatcttgatga

SEQ ID NO: 53115 - DNA, 26 bp, Homo sapiens
caaaatatgcttttaatcttgatgaa

SEQ ID NO: 53116 - DNA, 26 bp, Homo sapiens
aaaatatgcttttaatcttgatgaag

SEQ ID NO: 53117 - DNA, 26 bp, Homo sapiens
aaatatgcttttaatcttgatgaagt

SEQ ID NO: 53118 - DNA, 26 bp, Homo sapiens
aatatgcttttaatcttgatgaagtt

SEQ ID NO: 53119 - DNA, 26 bp, Homo sapiens
atatgcttttaatcttgatgaagttc

SEQ ID NO: 53120 - DNA, 26 bp, Homo sapiens
tatgcttttaatcttgatgaagttca

SEQ ID NO: 53121 - DNA, 26 bp, Homo sapiens
atgcttttaatcttgatgaagttcac

SEQ ID NO: 53122 - DNA, 26 bp, Homo sapiens
tgcttttaatcttgatgaagttcaca

SEQ ID NO: 53123 - DNA, 26 bp, Homo sapiens
gcttttaatcttgatgaagttcacaa

SEQ ID NO: 53124 - DNA, 26 bp, Homo sapiens
cttttaatcttgatgaagttcacaaa

SEQ ID NO: 53125 - DNA, 26 bp, Homo sapiens
ttttaatcttgatgaagttcacaaat

SEQ ID NO: 53126 - DNA, 26 bp, Homo sapiens
tttaatcttgatgaagttcacaaatg

SEQ ID NO: 53127 - DNA, 26 bp, Homo sapiens
ttaatcttgatgaagttcacaaatgg

SEQ ID NO: 53128 - DNA, 26 bp, Homo sapiens
taatcttgatgaagttcacaaatggc

SEQ ID NO: 53129 - DNA, 26 bp, Homo sapiens
aatcttgatgaagttcacaaatggca

SEQ ID NO: 53130 - DNA, 26 bp, Homo sapiens
atcttgatgaagttcacaaatggcac

SEQ ID NO: 53131 - DNA, 26 bp, Homo sapiens
tcttgatgaagttcacaaatggcaca

SEQ ID NO: 53132 - DNA, 26 bp, Homo sapiens
cttgatgaagttcacaaatggcacaa

SEQ ID NO: 53133 - DNA, 26 bp, Homo sapiens
ttgatgaagttcacaaatggcacaat

SEQ ID NO: 53134 - DNA, 26 bp, Homo sapiens
tgatgaagttcacaaatggcacaata

SEQ ID NO: 53135 - DNA, 26 bp, Homo sapiens
gatgaagttcacaaatggcacaatat

SEQ ID NO: 53136 - DNA, 26 bp, Homo sapiens
atgaagttcacaaatggcacaatatt

SEQ ID NO: 53137 - DNA, 26 bp, Homo sapiens
tgaagttcacaaatggcacaatattg

SEQ ID NO: 53138 - DNA, 26 bp, Homo sapiens
gaagttcacaaatggcacaatattga

SEQ ID NO: 53139 - DNA, 26 bp, Homo sapiens
aagttcacaaatggcacaatattgac

SEQ ID NO: 53140 - DNA, 26 bp, Homo sapiens
agttcacaaatggcacaatattgaca

SEQ ID NO: 53141 - DNA, 26 bp, Homo sapiens
gttcacaaatggcacaatattgacat

SEQ ID NO: 53142 - DNA, 26 bp, Homo sapiens
ttcacaaatggcacaatattgacatt

SEQ ID NO: 53143 - DNA, 26 bp, Homo sapiens
tcacaaatggcacaatattgacattt

SEQ ID NO: 53144 - DNA, 26 bp, Homo sapiens
cacaaatggcacaatattgacatttt

SEQ ID NO: 53145 - DNA, 26 bp, Homo sapiens
acaaatggcacaatattgacattttc

SEQ ID NO: 53146 - DNA, 26 bp, Homo sapiens
caaatggcacaatattgacattttct

SEQ ID NO: 53147 - DNA, 26 bp, Homo sapiens
aaatggcacaatattgacattttctt

SEQ ID NO: 53148 - DNA, 26 bp, Homo sapiens
aatggcacaatattgacattttctta

SEQ ID NO: 53149 - DNA, 26 bp, Homo sapiens
atggcacaatattgacattttcttaa

SEQ ID NO: 53150 - DNA, 26 bp, Homo sapiens
tggcacaatattgacattttcttaaa

SEQ ID NO: 53151 - DNA, 26 bp, Homo sapiens
ggcacaatattgacattttcttaaac

SEQ ID NO: 53152 - DNA, 26 bp, Homo sapiens
gcacaatattgacattttcttaaaca

SEQ ID NO: 53153 - DNA, 26 bp, Homo sapiens
cacaatattgacattttcttaaacaa

SEQ ID NO: 53154 - DNA, 26 bp, Homo sapiens
acaatattgacattttcttaaacaaa

SEQ ID NO: 53155 - DNA, 26 bp, Homo sapiens
caatattgacattttcttaaacaaat

SEQ ID NO: 53156 - DNA, 26 bp, Homo sapiens
aatattgacattttcttaaacaaatt

SEQ ID NO: 53157 - DNA, 26 bp, Homo sapiens
atattgacattttcttaaacaaatta

SEQ ID NO: 53158 - DNA, 26 bp, Homo sapiens
tattgacattttcttaaacaaattat

SEQ ID NO: 53159 - DNA, 26 bp, Homo sapiens
attgacattttcttaaacaaattata

SEQ ID NO: 53160 - DNA, 26 bp, Homo sapiens
ttgacattttcttaaacaaattatac

SEQ ID NO: 53161 - DNA, 26 bp, Homo sapiens
tgacattttcttaaacaaattataca

SEQ ID NO: 53162 - DNA, 26 bp, Homo sapiens
gacattttcttaaacaaattatacaa

SEQ ID NO: 53163 - DNA, 26 bp, Homo sapiens
acattttcttaaacaaattatacaat

SEQ ID NO: 53164 - DNA, 26 bp, Homo sapiens
cattttcttaaacaaattatacaatc

SEQ ID NO: 53165 - DNA, 26 bp, Homo sapiens
attttcttaaacaaattatacaatca

SEQ ID NO: 53166 - DNA, 26 bp, Homo sapiens
ttttcttaaacaaattatacaatcat

SEQ ID NO: 53167 - DNA, 26 bp, Homo sapiens
tttcttaaacaaattatacaatcatg

SEQ ID NO: 53168 - DNA, 26 bp, Homo sapiens
ttcttaaacaaattatacaatcatgt

SEQ ID NO: 53169 - DNA, 26 bp, Homo sapiens
tcttaaacaaattatacaatcatgtt

SEQ ID NO: 53170 - DNA, 26 bp, Homo sapiens
cttaaacaaattatacaatcatgttc

SEQ ID NO: 53171 - DNA, 26 bp, Homo sapiens
ttaaacaaattatacaatcatgttct

SEQ ID NO: 53172 - DNA, 26 bp, Homo sapiens
taaacaaattatacaatcatgttctt

SEQ ID NO: 53173 - DNA, 26 bp, Homo sapiens
aaacaaattatacaatcatgttctta

SEQ ID NO: 53174 - DNA, 26 bp, Homo sapiens
aacaaattatacaatcatgttcttag

SEQ ID NO: 53175 - DNA, 26 bp, Homo sapiens
acaaattatacaatcatgttcttaga

SEQ ID NO: 53176 - DNA, 26 bp, Homo sapiens
caaattatacaatcatgttcttagat

SEQ ID NO: 53177 - DNA, 26 bp, Homo sapiens
aaattatacaatcatgttcttagata

SEQ ID NO: 53178 - DNA, 26 bp, Homo sapiens
aattatacaatcatgttcttagataa

SEQ ID NO: 53179 - DNA, 26 bp, Homo sapiens
attatacaatcatgttcttagataac

SEQ ID NO: 53180 - DNA, 26 bp, Homo sapiens
ttatacaatcatgttcttagataaca

SEQ ID NO: 53181 - DNA, 26 bp, Homo sapiens
tatacaatcatgttcttagataacaa

SEQ ID NO: 53182 - DNA, 26 bp, Homo sapiens
atacaatcatgttcttagataacaag

SEQ ID NO: 53183 - DNA, 26 bp, Homo sapiens
tacaatcatgttcttagataacaagg

SEQ ID NO: 53184 - DNA, 26 bp, Homo sapiens
acaatcatgttcttagataacaaggc

SEQ ID NO: 53185 - DNA, 26 bp, Homo sapiens
caatcatgttcttagataacaaggca

SEQ ID NO: 53186 - DNA, 26 bp, Homo sapiens
aatcatgttcttagataacaaggcac

SEQ ID NO: 53187 - DNA, 26 bp, Homo sapiens
atcatgttcttagataacaaggcaca

SEQ ID NO: 53188 - DNA, 26 bp, Homo sapiens
tcatgttcttagataacaaggcacag

SEQ ID NO: 53189 - DNA, 26 bp, Homo sapiens
catgttcttagataacaaggcacagc

SEQ ID NO: 53190 - DNA, 26 bp, Homo sapiens
atgttcttagataacaaggcacagca

SEQ ID NO: 53191 - DNA, 26 bp, Homo sapiens
tgttcttagataacaaggcacagcat

SEQ ID NO: 53192 - DNA, 26 bp, Homo sapiens
gttcttagataacaaggcacagcatc

SEQ ID NO: 53193 - DNA, 26 bp, Homo sapiens
ttcttagataacaaggcacagcatca

SEQ ID NO: 53194 - DNA, 26 bp, Homo sapiens
tcttagataacaaggcacagcatcac

SEQ ID NO: 53195 - DNA, 26 bp, Homo sapiens
cttagataacaaggcacagcatcacc

SEQ ID NO: 53196 - DNA, 26 bp, Homo sapiens
ttagataacaaggcacagcatcacca

SEQ ID NO: 53197 - DNA, 26 bp, Homo sapiens
tagataacaaggcacagcatcaccat

SEQ ID NO: 53198 - DNA, 26 bp, Homo sapiens
agataacaaggcacagcatcaccatt

SEQ ID NO: 53199 - DNA, 26 bp, Homo sapiens
gataacaaggcacagcatcaccatta

SEQ ID NO: 53200 - DNA, 26 bp, Homo sapiens
ataacaaggcacagcatcaccattac

SEQ ID NO: 53201 - DNA, 26 bp, Homo sapiens
taacaaggcacagcatcaccattacc

SEQ ID NO: 53202 - DNA, 26 bp, Homo sapiens
aacaaggcacagcatcaccattacca

SEQ ID NO: 53203 - DNA, 26 bp, Homo sapiens
acaaggcacagcatcaccattaccat

SEQ ID NO: 53204 - DNA, 26 bp, Homo sapiens
caaggcacagcatcaccattaccatg

SEQ ID NO: 53205 - DNA, 26 bp, Homo sapiens
aaggcacagcatcaccattaccatgt

SEQ ID NO: 53206 - DNA, 26 bp, Homo sapiens
aggcacagcatcaccattaccatgtg

SEQ ID NO: 53207 - DNA, 26 bp, Homo sapiens
ggcacagcatcaccattaccatgtgt

SEQ ID NO: 53208 - DNA, 26 bp, Homo sapiens
gcacagcatcaccattaccatgtgtc

SEQ ID NO: 53209 - DNA, 26 bp, Homo sapiens
cacagcatcaccattaccatgtgtcc

SEQ ID NO: 53210 - DNA, 26 bp, Homo sapiens
acagcatcaccattaccatgtgtcct

SEQ ID NO: 53211 - DNA, 26 bp, Homo sapiens
cagcatcaccattaccatgtgtcctc

SEQ ID NO: 53212 - DNA, 26 bp, Homo sapiens
agcatcaccattaccatgtgtcctcg

SEQ ID NO: 53213 - DNA, 26 bp, Homo sapiens
gcatcaccattaccatgtgtcctcgg

SEQ ID NO: 53214 - DNA, 26 bp, Homo sapiens
catcaccattaccatgtgtcctcgga

SEQ ID NO: 53215 - DNA, 26 bp, Homo sapiens
atcaccattaccatgtgtcctcggag

SEQ ID NO: 53216 - DNA, 26 bp, Homo sapiens
tcaccattaccatgtgtcctcggaga

SEQ ID NO: 53217 - DNA, 26 bp, Homo sapiens
caccattaccatgtgtcctcggagac

SEQ ID NO: 53218 - DNA, 26 bp, Homo sapiens
accattaccatgtgtcctcggagacc

SEQ ID NO: 53219 - DNA, 26 bp, Homo sapiens
ccattaccatgtgtcctcggagacca

SEQ ID NO: 53220 - DNA, 26 bp, Homo sapiens
cattaccatgtgtcctcggagaccac

SEQ ID NO: 53221 - DNA, 26 bp, Homo sapiens
attaccatgtgtcctcggagaccaca

SEQ ID NO: 53222 - DNA, 26 bp, Homo sapiens
ttaccatgtgtcctcggagaccacaa

SEQ ID NO: 53223 - DNA, 26 bp, Homo sapiens
taccatgtgtcctcggagaccacaac

SEQ ID NO: 53224 - DNA, 26 bp, Homo sapiens
accatgtgtcctcggagaccacaaca

SEQ ID NO: 53225 - DNA, 26 bp, Homo sapiens
ccatgtgtcctcggagaccacaacag

SEQ ID NO: 53226 - DNA, 26 bp, Homo sapiens
catgtgtcctcggagaccacaacagg

SEQ ID NO: 53227 - DNA, 26 bp, Homo sapiens
atgtgtcctcggagaccacaacaggc

SEQ ID NO: 53228 - DNA, 26 bp, Homo sapiens
tgtgtcctcggagaccacaacaggca

SEQ ID NO: 53229 - DNA, 26 bp, Homo sapiens
gtgtcctcggagaccacaacaggcag

SEQ ID NO: 53230 - DNA, 26 bp, Homo sapiens
tgtcctcggagaccacaacaggcagt

SEQ ID NO: 53231 - DNA, 26 bp, Homo sapiens
gtcctcggagaccacaacaggcagtg

SEQ ID NO: 53232 - DNA, 26 bp, Homo sapiens
tcctcggagaccacaacaggcagtga

SEQ ID NO: 53233 - DNA, 26 bp, Homo sapiens
cctcggagaccacaacaggcagtgat

SEQ ID NO: 53234 - DNA, 26 bp, Homo sapiens
ctcggagaccacaacaggcagtgatt

SEQ ID NO: 53235 - DNA, 26 bp, Homo sapiens
tcggagaccacaacaggcagtgattt

SEQ ID NO: 53236 - DNA, 26 bp, Homo sapiens
cggagaccacaacaggcagtgatttc

SEQ ID NO: 53237 - DNA, 26 bp, Homo sapiens
ggagaccacaacaggcagtgatttca

SEQ ID NO: 53238 - DNA, 26 bp, Homo sapiens
gagaccacaacaggcagtgatttcac

SEQ ID NO: 53239 - DNA, 26 bp, Homo sapiens
agaccacaacaggcagtgatttcacg

SEQ ID NO: 53240 - DNA, 26 bp, Homo sapiens
gaccacaacaggcagtgatttcacgt

SEQ ID NO: 53241 - DNA, 26 bp, Homo sapiens
accacaacaggcagtgatttcacgtc

SEQ ID NO: 53242 - DNA, 26 bp, Homo sapiens
ccacaacaggcagtgatttcacgtcc

SEQ ID NO: 53243 - DNA, 26 bp, Homo sapiens
cacaacaggcagtgatttcacgtccc

SEQ ID NO: 53244 - DNA, 26 bp, Homo sapiens
acaacaggcagtgatttcacgtcccc

SEQ ID NO: 53245 - DNA, 26 bp, Homo sapiens
caacaggcagtgatttcacgtccccc

SEQ ID NO: 53246 - DNA, 26 bp, Homo sapiens
aacaggcagtgatttcacgtccccct

SEQ ID NO: 53247 - DNA, 26 bp, Homo sapiens
acaggcagtgatttcacgtcccccta

SEQ ID NO: 53248 - DNA, 26 bp, Homo sapiens
caggcagtgatttcacgtccccctaa

SEQ ID NO: 53249 - DNA, 26 bp, Homo sapiens
aggcagtgatttcacgtccccctaag

SEQ ID NO: 53250 - DNA, 26 bp, Homo sapiens
ggcagtgatttcacgtccccctaagg

SEQ ID NO: 53251 - DNA, 26 bp, Homo sapiens
gcagtgatttcacgtccccctaaggt

SEQ ID NO: 53252 - DNA, 26 bp, Homo sapiens
cagtgatttcacgtccccctaaggtt

SEQ ID NO: 53253 - DNA, 26 bp, Homo sapiens
agtgatttcacgtccccctaaggttt

SEQ ID NO: 53254 - DNA, 26 bp, Homo sapiens
gtgatttcacgtccccctaaggtttg

SEQ ID NO: 53255 - DNA, 26 bp, Homo sapiens
tgatttcacgtccccctaaggtttgg

SEQ ID NO: 53256 - DNA, 26 bp, Homo sapiens
gatttcacgtccccctaaggtttggt

SEQ ID NO: 53257 - DNA, 26 bp, Homo sapiens
atttcacgtccccctaaggtttggtg

SEQ ID NO: 53258 - DNA, 26 bp, Homo sapiens
tttcacgtccccctaaggtttggtgg

SEQ ID NO: 53259 - DNA, 26 bp, Homo sapiens
ttcacgtccccctaaggtttggtgga

SEQ ID NO: 53260 - DNA, 26 bp, Homo sapiens
tcacgtccccctaaggtttggtggag

SEQ ID NO: 53261 - DNA, 26 bp, Homo sapiens
cacgtccccctaaggtttggtggagc

SEQ ID NO: 53262 - DNA, 26 bp, Homo sapiens
acgtccccctaaggtttggtggagct

SEQ ID NO: 53263 - DNA, 26 bp, Homo sapiens
cgtccccctaaggtttggtggagctg

SEQ ID NO: 53264 - DNA, 26 bp, Homo sapiens
gtccccctaaggtttggtggagctgc

SEQ ID NO: 53265 - DNA, 26 bp, Homo sapiens
tccccctaaggtttggtggagctgca

SEQ ID NO: 53266 - DNA, 26 bp, Homo sapiens
ccccctaaggtttggtggagctgcat

SEQ ID NO: 53267 - DNA, 26 bp, Homo sapiens
cccctaaggtttggtggagctgcatg

SEQ ID NO: 53268 - DNA, 26 bp, Homo sapiens
ccctaaggtttggtggagctgcatga

SEQ ID NO: 53269 - DNA, 26 bp, Homo sapiens
cctaaggtttggtggagctgcatgat

SEQ ID NO: 53270 - DNA, 26 bp, Homo sapiens
ctaaggtttggtggagctgcatgatc

SEQ ID NO: 53271 - DNA, 26 bp, Homo sapiens
taaggtttggtggagctgcatgatca

SEQ ID NO: 53272 - DNA, 26 bp, Homo sapiens
aaggtttggtggagctgcatgatcaa

SEQ ID NO: 53273 - DNA, 26 bp, Homo sapiens
aggtttggtggagctgcatgatcaac

SEQ ID NO: 53274 - DNA, 26 bp, Homo sapiens
ggtttggtggagctgcatgatcaaca

SEQ ID NO: 53275 - DNA, 26 bp, Homo sapiens
gtttggtggagctgcatgatcaacag

SEQ ID NO: 53276 - DNA, 26 bp, Homo sapiens
tttggtggagctgcatgatcaacagg

SEQ ID NO: 53277 - DNA, 26 bp, Homo sapiens
ttggtggagctgcatgatcaacagga

SEQ ID NO: 53278 - DNA, 26 bp, Homo sapiens
tggtggagctgcatgatcaacaggat

SEQ ID NO: 53279 - DNA, 26 bp, Homo sapiens
ggtggagctgcatgatcaacaggatg

SEQ ID NO: 53280 - DNA, 26 bp, Homo sapiens
gtggagctgcatgatcaacaggatgg

SEQ ID NO: 53281 - DNA, 26 bp, Homo sapiens
tggagctgcatgatcaacaggatggc

SEQ ID NO: 53282 - DNA, 26 bp, Homo sapiens
ggagctgcatgatcaacaggatggct

SEQ ID NO: 53283 - DNA, 26 bp, Homo sapiens
gagctgcatgatcaacaggatggctc

SEQ ID NO: 53284 - DNA, 26 bp, Homo sapiens
agctgcatgatcaacaggatggctcc

SEQ ID NO: 53285 - DNA, 26 bp, Homo sapiens
gctgcatgatcaacaggatggctccg

SEQ ID NO: 53286 - DNA, 26 bp, Homo sapiens
ctgcatgatcaacaggatggctccga

SEQ ID NO: 53287 - DNA, 26 bp, Homo sapiens
tgcatgatcaacaggatggctccgaa

SEQ ID NO: 53288 - DNA, 26 bp, Homo sapiens
gcatgatcaacaggatggctccgaaa

SEQ ID NO: 53289 - DNA, 26 bp, Homo sapiens
catgatcaacaggatggctccgaaag

SEQ ID NO: 53290 - DNA, 26 bp, Homo sapiens
atgatcaacaggatggctccgaaaga

SEQ ID NO: 53291 - DNA, 26 bp, Homo sapiens
tgatcaacaggatggctccgaaagaa

SEQ ID NO: 53292 - DNA, 26 bp, Homo sapiens
gatcaacaggatggctccgaaagaac

SEQ ID NO: 53293 - DNA, 26 bp, Homo sapiens
atcaacaggatggctccgaaagaacc

SEQ ID NO: 53294 - DNA, 26 bp, Homo sapiens
tcaacaggatggctccgaaagaacca

SEQ ID NO: 53295 - DNA, 26 bp, Homo sapiens
caacaggatggctccgaaagaaccag

SEQ ID NO: 53296 - DNA, 26 bp, Homo sapiens
aacaggatggctccgaaagaaccagt

SEQ ID NO: 53297 - DNA, 26 bp, Homo sapiens
acaggatggctccgaaagaaccagtt

SEQ ID NO: 53298 - DNA, 26 bp, Homo sapiens
caggatggctccgaaagaaccagttt

SEQ ID NO: 53299 - DNA, 26 bp, Homo sapiens
aggatggctccgaaagaaccagtttg

SEQ ID NO: 53300 - DNA, 26 bp, Homo sapiens
ggatggctccgaaagaaccagtttgc

SEQ ID NO: 53301 - DNA, 26 bp, Homo sapiens
gatggctccgaaagaaccagtttgct

SEQ ID NO: 53302 - DNA, 26 bp, Homo sapiens
atggctccgaaagaaccagtttgcta

SEQ ID NO: 53303 - DNA, 26 bp, Homo sapiens
tggctccgaaagaaccagtttgctac

SEQ ID NO: 53304 - DNA, 26 bp, Homo sapiens
ggctccgaaagaaccagtttgctacc

SEQ ID NO: 53305 - DNA, 26 bp, Homo sapiens
gctccgaaagaaccagtttgctacca

SEQ ID NO: 53306 - DNA, 26 bp, Homo sapiens
ctccgaaagaaccagtttgctaccag

SEQ ID NO: 53307 - DNA, 26 bp, Homo sapiens
tccgaaagaaccagtttgctaccaga

SEQ ID NO: 53308 - DNA, 26 bp, Homo sapiens
ccgaaagaaccagtttgctaccagat

SEQ ID NO: 53309 - DNA, 26 bp, Homo sapiens
cgaaagaaccagtttgctaccagata

SEQ ID NO: 53310 - DNA, 26 bp, Homo sapiens
gaaagaaccagtttgctaccagataa

SEQ ID NO: 53311 - DNA, 26 bp, Homo sapiens
aaagaaccagtttgctaccagataag

SEQ ID NO: 53312 - DNA, 26 bp, Homo sapiens
aagaaccagtttgctaccagataagt

SEQ ID NO: 53313 - DNA, 26 bp, Homo sapiens
agaaccagtttgctaccagataagtc

SEQ ID NO: 53314 - DNA, 26 bp, Homo sapiens
gaaccagtttgctaccagataagtca

SEQ ID NO: 53315 - DNA, 26 bp, Homo sapiens
aaccagtttgctaccagataagtcaa

SEQ ID NO: 53316 - DNA, 26 bp, Homo sapiens
accagtttgctaccagataagtcaat

SEQ ID NO: 53317 - DNA, 26 bp, Homo sapiens
ccagtttgctaccagataagtcaatg

SEQ ID NO: 53318 - DNA, 26 bp, Homo sapiens
cagtttgctaccagataagtcaatga

SEQ ID NO: 53319 - DNA, 26 bp, Homo sapiens
agtttgctaccagataagtcaatgag

SEQ ID NO: 53320 - DNA, 26 bp, Homo sapiens
gtttgctaccagataagtcaatgaga

SEQ ID NO: 53321 - DNA, 26 bp, Homo sapiens
tttgctaccagataagtcaatgagag

SEQ ID NO: 53322 - DNA, 26 bp, Homo sapiens
ttgctaccagataagtcaatgagaga

SEQ ID NO: 53323 - DNA, 26 bp, Homo sapiens
tgctaccagataagtcaatgagagat

SEQ ID NO: 53324 - DNA, 26 bp, Homo sapiens
gctaccagataagtcaatgagagatg

SEQ ID NO: 53325 - DNA, 26 bp, Homo sapiens
ctaccagataagtcaatgagagatgc

SEQ ID NO: 53326 - DNA, 26 bp, Homo sapiens
taccagataagtcaatgagagatgcc

SEQ ID NO: 53327 - DNA, 26 bp, Homo sapiens
accagataagtcaatgagagatgcca

SEQ ID NO: 53328 - DNA, 26 bp, Homo sapiens
ccagataagtcaatgagagatgccat

SEQ ID NO: 53329 - DNA, 26 bp, Homo sapiens
cagataagtcaatgagagatgccatc

SEQ ID NO: 53330 - DNA, 26 bp, Homo sapiens
agataagtcaatgagagatgccatca

SEQ ID NO: 53331 - DNA, 26 bp, Homo sapiens
gataagtcaatgagagatgccatcac

SEQ ID NO: 53332 - DNA, 26 bp, Homo sapiens
ataagtcaatgagagatgccatcact

SEQ ID NO: 53333 - DNA, 26 bp, Homo sapiens
taagtcaatgagagatgccatcactt

SEQ ID NO: 53334 - DNA, 26 bp, Homo sapiens
aagtcaatgagagatgccatcacttt

SEQ ID NO: 53335 - DNA, 26 bp, Homo sapiens
agtcaatgagagatgccatcactttt

SEQ ID NO: 53336 - DNA, 26 bp, Homo sapiens
gtcaatgagagatgccatcactttta

SEQ ID NO: 53337 - DNA, 26 bp, Homo sapiens
tcaatgagagatgccatcacttttac

SEQ ID NO: 53338 - DNA, 26 bp, Homo sapiens
caatgagagatgccatcacttttact

SEQ ID NO: 53339 - DNA, 26 bp, Homo sapiens
aatgagagatgccatcacttttactg

SEQ ID NO: 53340 - DNA, 26 bp, Homo sapiens
atgagagatgccatcacttttactgg

SEQ ID NO: 53341 - DNA, 26 bp, Homo sapiens
tgagagatgccatcacttttactgga

SEQ ID NO: 53342 - DNA, 26 bp, Homo sapiens
gagagatgccatcacttttactggac

SEQ ID NO: 53343 - DNA, 26 bp, Homo sapiens
agagatgccatcacttttactggaca

SEQ ID NO: 53344 - DNA, 26 bp, Homo sapiens
gagatgccatcacttttactggacat

SEQ ID NO: 53345 - DNA, 26 bp, Homo sapiens
agatgccatcacttttactggacata

SEQ ID NO: 53346 - DNA, 26 bp, Homo sapiens
gatgccatcacttttactggacatag

SEQ ID NO: 53347 - DNA, 26 bp, Homo sapiens
atgccatcacttttactggacataga

SEQ ID NO: 53348 - DNA, 26 bp, Homo sapiens
tgccatcacttttactggacatagaa

SEQ ID NO: 53349 - DNA, 26 bp, Homo sapiens
gccatcacttttactggacatagaat

SEQ ID NO: 53350 - DNA, 26 bp, Homo sapiens
ccatcacttttactggacatagaatt

SEQ ID NO: 53351 - DNA, 26 bp, Homo sapiens
catcacttttactggacatagaatta

SEQ ID NO: 53352 - DNA, 26 bp, Homo sapiens
atcacttttactggacatagaattaa

SEQ ID NO: 53353 - DNA, 26 bp, Homo sapiens
tcacttttactggacatagaattaaa

SEQ ID NO: 53354 - DNA, 26 bp, Homo sapiens
cacttttactggacatagaattaaat

SEQ ID NO: 53355 - DNA, 26 bp, Homo sapiens
acttttactggacatagaattaaata

SEQ ID NO: 53356 - DNA, 26 bp, Homo sapiens
cttttactggacatagaattaaatat

SEQ ID NO: 53357 - DNA, 26 bp, Homo sapiens
ttttactggacatagaattaaatata

SEQ ID NO: 53358 - DNA, 26 bp, Homo sapiens
tttactggacatagaattaaatataa

SEQ ID NO: 53359 - DNA, 26 bp, Homo sapiens
ttactggacatagaattaaatataaa

SEQ ID NO: 53360 - DNA, 26 bp, Homo sapiens
tactggacatagaattaaatataaaa

SEQ ID NO: 53361 - DNA, 26 bp, Homo sapiens
actggacatagaattaaatataaaaa

SEQ ID NO: 53362 - DNA, 26 bp, Homo sapiens
ctggacatagaattaaatataaaaat

SEQ ID NO: 53363 - DNA, 26 bp, Homo sapiens
tggacatagaattaaatataaaaatg

SEQ ID NO: 53364 - DNA, 26 bp, Homo sapiens
ggacatagaattaaatataaaaatga

SEQ ID NO: 53365 - DNA, 26 bp, Homo sapiens
gacatagaattaaatataaaaatgat

SEQ ID NO: 53366 - DNA, 26 bp, Homo sapiens
acatagaattaaatataaaaatgatg

SEQ ID NO: 53367 - DNA, 26 bp, Homo sapiens
catagaattaaatataaaaatgatgc

SEQ ID NO: 53368 - DNA, 26 bp, Homo sapiens
atagaattaaatataaaaatgatgca

SEQ ID NO: 53369 - DNA, 26 bp, Homo sapiens
tagaattaaatataaaaatgatgcac

SEQ ID NO: 53370 - DNA, 26 bp, Homo sapiens
agaattaaatataaaaatgatgcaca

SEQ ID NO: 53371 - DNA, 26 bp, Homo sapiens
gaattaaatataaaaatgatgcacag

SEQ ID NO: 53372 - DNA, 26 bp, Homo sapiens
aattaaatataaaaatgatgcacagc

SEQ ID NO: 53373 - DNA, 26 bp, Homo sapiens
attaaatataaaaatgatgcacagca

SEQ ID NO: 53374 - DNA, 26 bp, Homo sapiens
ttaaatataaaaatgatgcacagcaa

SEQ ID NO: 53375 - DNA, 26 bp, Homo sapiens
taaatataaaaatgatgcacagcaaa

SEQ ID NO: 53376 - DNA, 26 bp, Homo sapiens
aaatataaaaatgatgcacagcaaat

SEQ ID NO: 53377 - DNA, 26 bp, Homo sapiens
aatataaaaatgatgcacagcaaata

SEQ ID NO: 53378 - DNA, 26 bp, Homo sapiens
atataaaaatgatgcacagcaaatat

SEQ ID NO: 53379 - DNA, 26 bp, Homo sapiens
tataaaaatgatgcacagcaaatatg

SEQ ID NO: 53380 - DNA, 26 bp, Homo sapiens
ataaaaatgatgcacagcaaatatgg

SEQ ID NO: 53381 - DNA, 26 bp, Homo sapiens
taaaaatgatgcacagcaaatatgga

SEQ ID NO: 53382 - DNA, 26 bp, Homo sapiens
aaaaatgatgcacagcaaatatggaa

SEQ ID NO: 53383 - DNA, 26 bp, Homo sapiens
aaaatgatgcacagcaaatatggaat

SEQ ID NO: 53384 - DNA, 26 bp, Homo sapiens
aaatgatgcacagcaaatatggaatt

SEQ ID NO: 53385 - DNA, 26 bp, Homo sapiens
aatgatgcacagcaaatatggaatta

SEQ ID NO: 53386 - DNA, 26 bp, Homo sapiens
atgatgcacagcaaatatggaattag

SEQ ID NO: 53387 - DNA, 26 bp, Homo sapiens
tgatgcacagcaaatatggaattagc

SEQ ID NO: 53388 - DNA, 26 bp, Homo sapiens
gatgcacagcaaatatggaattagct

SEQ ID NO: 53389 - DNA, 26 bp, Homo sapiens
atgcacagcaaatatggaattagctt

SEQ ID NO: 53390 - DNA, 26 bp, Homo sapiens
tgcacagcaaatatggaattagctta

SEQ ID NO: 53391 - DNA, 26 bp, Homo sapiens
gcacagcaaatatggaattagcttat

SEQ ID NO: 53392 - DNA, 26 bp, Homo sapiens
cacagcaaatatggaattagcttatt

SEQ ID NO: 53393 - DNA, 26 bp, Homo sapiens
acagcaaatatggaattagcttattt

SEQ ID NO: 53394 - DNA, 26 bp, Homo sapiens
cagcaaatatggaattagcttatttt

SEQ ID NO: 53395 - DNA, 26 bp, Homo sapiens
agcaaatatggaattagcttattttg

SEQ ID NO: 53396 - DNA, 26 bp, Homo sapiens
gcaaatatggaattagcttattttgc

SEQ ID NO: 53397 - DNA, 26 bp, Homo sapiens
caaatatggaattagcttattttgca

SEQ ID NO: 53398 - DNA, 26 bp, Homo sapiens
aaatatggaattagcttattttgcat

SEQ ID NO: 53399 - DNA, 26 bp, Homo sapiens
aatatggaattagcttattttgcatt

SEQ ID NO: 53400 - DNA, 26 bp, Homo sapiens
atatggaattagcttattttgcattc

SEQ ID NO: 53401 - DNA, 26 bp, Homo sapiens
tatggaattagcttattttgcattca

SEQ ID NO: 53402 - DNA, 26 bp, Homo sapiens
atggaattagcttattttgcattcag

SEQ ID NO: 53403 - DNA, 26 bp, Homo sapiens
tggaattagcttattttgcattcagt

SEQ ID NO: 53404 - DNA, 26 bp, Homo sapiens
ggaattagcttattttgcattcagtt

SEQ ID NO: 53405 - DNA, 26 bp, Homo sapiens
gaattagcttattttgcattcagttt

SEQ ID NO: 53406 - DNA, 26 bp, Homo sapiens
aattagcttattttgcattcagtttc

SEQ ID NO: 53407 - DNA, 26 bp, Homo sapiens
attagcttattttgcattcagtttca

SEQ ID NO: 53408 - DNA, 26 bp, Homo sapiens
ttagcttattttgcattcagtttcat

SEQ ID NO: 53409 - DNA, 26 bp, Homo sapiens
tagcttattttgcattcagtttcatt

SEQ ID NO: 53410 - DNA, 26 bp, Homo sapiens
agcttattttgcattcagtttcattc

SEQ ID NO: 53411 - DNA, 26 bp, Homo sapiens
gcttattttgcattcagtttcattcc

SEQ ID NO: 53412 - DNA, 26 bp, Homo sapiens
cttattttgcattcagtttcattcct

SEQ ID NO: 53413 - DNA, 26 bp, Homo sapiens
ttattttgcattcagtttcattcctt

SEQ ID NO: 53414 - DNA, 26 bp, Homo sapiens
tattttgcattcagtttcattccttt

SEQ ID NO: 53415 - DNA, 26 bp, Homo sapiens
attttgcattcagtttcattcctttc

SEQ ID NO: 53416 - DNA, 26 bp, Homo sapiens
ttttgcattcagtttcattcctttca

SEQ ID NO: 53417 - DNA, 26 bp, Homo sapiens
tttgcattcagtttcattcctttcaa

SEQ ID NO: 53418 - DNA, 26 bp, Homo sapiens
ttgcattcagtttcattcctttcaag

SEQ ID NO: 53419 - DNA, 26 bp, Homo sapiens
tgcattcagtttcattcctttcaagt

SEQ ID NO: 53420 - DNA, 26 bp, Homo sapiens
gcattcagtttcattcctttcaagtg

SEQ ID NO: 53421 - DNA, 26 bp, Homo sapiens
cattcagtttcattcctttcaagtga

SEQ ID NO: 53422 - DNA, 26 bp, Homo sapiens
attcagtttcattcctttcaagtgac

SEQ ID NO: 53423 - DNA, 26 bp, Homo sapiens
ttcagtttcattcctttcaagtgaca

SEQ ID NO: 53424 - DNA, 26 bp, Homo sapiens
tcagtttcattcctttcaagtgacaa

SEQ ID NO: 53425 - DNA, 26 bp, Homo sapiens
cagtttcattcctttcaagtgacaaa

SEQ ID NO: 53426 - DNA, 26 bp, Homo sapiens
agtttcattcctttcaagtgacaaag

SEQ ID NO: 53427 - DNA, 26 bp, Homo sapiens
gtttcattcctttcaagtgacaaagg

SEQ ID NO: 53428 - DNA, 26 bp, Homo sapiens
tttcattcctttcaagtgacaaaggt

SEQ ID NO: 53429 - DNA, 26 bp, Homo sapiens
ttcattcctttcaagtgacaaaggtg

SEQ ID NO: 53430 - DNA, 26 bp, Homo sapiens
tcattcctttcaagtgacaaaggtgc

SEQ ID NO: 53431 - DNA, 26 bp, Homo sapiens
cattcctttcaagtgacaaaggtgcc

SEQ ID NO: 53432 - DNA, 26 bp, Homo sapiens
attcctttcaagtgacaaaggtgccc

SEQ ID NO: 53433 - DNA, 26 bp, Homo sapiens
ttcctttcaagtgacaaaggtgccct

SEQ ID NO: 53434 - DNA, 26 bp, Homo sapiens
tcctttcaagtgacaaaggtgccctt

SEQ ID NO: 53435 - DNA, 26 bp, Homo sapiens
cctttcaagtgacaaaggtgcccttt

SEQ ID NO: 53436 - DNA, 26 bp, Homo sapiens
ctttcaagtgacaaaggtgccctttt

SEQ ID NO: 53437 - DNA, 26 bp, Homo sapiens
tttcaagtgacaaaggtgcccttttt

SEQ ID NO: 53438 - DNA, 26 bp, Homo sapiens
ttcaagtgacaaaggtgccctttttt

SEQ ID NO: 53439 - DNA, 26 bp, Homo sapiens
tcaagtgacaaaggtgcccttttttc

SEQ ID NO: 53440 - DNA, 26 bp, Homo sapiens
caagtgacaaaggtgcccttttttca

SEQ ID NO: 53441 - DNA, 26 bp, Homo sapiens
aagtgacaaaggtgcccttttttcag

SEQ ID NO: 53442 - DNA, 26 bp, Homo sapiens
agtgacaaaggtgcccttttttcagt

SEQ ID NO: 53443 - DNA, 26 bp, Homo sapiens
gtgacaaaggtgcccttttttcagta

SEQ ID NO: 53444 - DNA, 26 bp, Homo sapiens
tgacaaaggtgcccttttttcagtat

SEQ ID NO: 53445 - DNA, 26 bp, Homo sapiens
gacaaaggtgcccttttttcagtatc

SEQ ID NO: 53446 - DNA, 26 bp, Homo sapiens
acaaaggtgcccttttttcagtatct

SEQ ID NO: 53447 - DNA, 26 bp, Homo sapiens
caaaggtgcccttttttcagtatctt

SEQ ID NO: 53448 - DNA, 26 bp, Homo sapiens
aaaggtgcccttttttcagtatctta

SEQ ID NO: 53449 - DNA, 26 bp, Homo sapiens
aaggtgcccttttttcagtatcttag

SEQ ID NO: 53450 - DNA, 26 bp, Homo sapiens
aggtgcccttttttcagtatcttagg

SEQ ID NO: 53451 - DNA, 26 bp, Homo sapiens
ggtgcccttttttcagtatcttagga

SEQ ID NO: 53452 - DNA, 26 bp, Homo sapiens
gtgcccttttttcagtatcttaggat

SEQ ID NO: 53453 - DNA, 26 bp, Homo sapiens
tgcccttttttcagtatcttaggatg

SEQ ID NO: 53454 - DNA, 26 bp, Homo sapiens
gcccttttttcagtatcttaggatgc

SEQ ID NO: 53455 - DNA, 26 bp, Homo sapiens
cccttttttcagtatcttaggatgca

SEQ ID NO: 53456 - DNA, 26 bp, Homo sapiens
ccttttttcagtatcttaggatgcaa

SEQ ID NO: 53457 - DNA, 26 bp, Homo sapiens
cttttttcagtatcttaggatgcaaa

SEQ ID NO: 53458 - DNA, 26 bp, Homo sapiens
ttttttcagtatcttaggatgcaaac

SEQ ID NO: 53459 - DNA, 26 bp, Homo sapiens
tttttcagtatcttaggatgcaaaca

SEQ ID NO: 53460 - DNA, 26 bp, Homo sapiens
ttttcagtatcttaggatgcaaacat

SEQ ID NO: 53461 - DNA, 26 bp, Homo sapiens
tttcagtatcttaggatgcaaacatg

SEQ ID NO: 53462 - DNA, 26 bp, Homo sapiens
ttcagtatcttaggatgcaaacatgt

SEQ ID NO: 53463 - DNA, 26 bp, Homo sapiens
tcagtatcttaggatgcaaacatgtg

SEQ ID NO: 53464 - DNA, 26 bp, Homo sapiens
cagtatcttaggatgcaaacatgtgt

SEQ ID NO: 53465 - DNA, 26 bp, Homo sapiens
agtatcttaggatgcaaacatgtgta

SEQ ID NO: 53466 - DNA, 26 bp, Homo sapiens
gtatcttaggatgcaaacatgtgtat

SEQ ID NO: 53467 - DNA, 26 bp, Homo sapiens
tatcttaggatgcaaacatgtgtatc

SEQ ID NO: 53468 - DNA, 26 bp, Homo sapiens
atcttaggatgcaaacatgtgtatct

SEQ ID NO: 53469 - DNA, 26 bp, Homo sapiens
tcttaggatgcaaacatgtgtatctt

SEQ ID NO: 53470 - DNA, 26 bp, Homo sapiens
cttaggatgcaaacatgtgtatcttc

SEQ ID NO: 53471 - DNA, 26 bp, Homo sapiens
ttaggatgcaaacatgtgtatcttcc

SEQ ID NO: 53472 - DNA, 26 bp, Homo sapiens
taggatgcaaacatgtgtatcttcca

SEQ ID NO: 53473 - DNA, 26 bp, Homo sapiens
aggatgcaaacatgtgtatcttccac

SEQ ID NO: 53474 - DNA, 26 bp, Homo sapiens
ggatgcaaacatgtgtatcttccacg

SEQ ID NO: 53475 - DNA, 26 bp, Homo sapiens
gatgcaaacatgtgtatcttccacgg

SEQ ID NO: 53476 - DNA, 26 bp, Homo sapiens
atgcaaacatgtgtatcttccacggg

SEQ ID NO: 53477 - DNA, 26 bp, Homo sapiens
tgcaaacatgtgtatcttccacgggg

SEQ ID NO: 53478 - DNA, 26 bp, Homo sapiens
gcaaacatgtgtatcttccacggggc

SEQ ID NO: 53479 - DNA, 26 bp, Homo sapiens
caaacatgtgtatcttccacggggca

SEQ ID NO: 53480 - DNA, 26 bp, Homo sapiens
aaacatgtgtatcttccacggggcat

SEQ ID NO: 53481 - DNA, 26 bp, Homo sapiens
aacatgtgtatcttccacggggcatt

SEQ ID NO: 53482 - DNA, 26 bp, Homo sapiens
acatgtgtatcttccacggggcattc

SEQ ID NO: 53483 - DNA, 26 bp, Homo sapiens
catgtgtatcttccacggggcattct

SEQ ID NO: 53484 - DNA, 26 bp, Homo sapiens
atgtgtatcttccacggggcattctc

SEQ ID NO: 53485 - DNA, 26 bp, Homo sapiens
tgtgtatcttccacggggcattctca

SEQ ID NO: 53486 - DNA, 26 bp, Homo sapiens
gtgtatcttccacggggcattctcac

SEQ ID NO: 53487 - DNA, 26 bp, Homo sapiens
tgtatcttccacggggcattctcacc

SEQ ID NO: 53488 - DNA, 26 bp, Homo sapiens
gtatcttccacggggcattctcacca

SEQ ID NO: 53489 - DNA, 26 bp, Homo sapiens
tatcttccacggggcattctcaccaa

SEQ ID NO: 53490 - DNA, 26 bp, Homo sapiens
atcttccacggggcattctcaccaag

SEQ ID NO: 53491 - DNA, 26 bp, Homo sapiens
tcttccacggggcattctcaccaagt

SEQ ID NO: 53492 - DNA, 26 bp, Homo sapiens
cttccacggggcattctcaccaagtt

SEQ ID NO: 53493 - DNA, 26 bp, Homo sapiens
ttccacggggcattctcaccaagttc

SEQ ID NO: 53494 - DNA, 26 bp, Homo sapiens
tccacggggcattctcaccaagttct

SEQ ID NO: 53495 - DNA, 26 bp, Homo sapiens
ccacggggcattctcaccaagttctt

SEQ ID NO: 53496 - DNA, 26 bp, Homo sapiens
cacggggcattctcaccaagttctta

SEQ ID NO: 53497 - DNA, 26 bp, Homo sapiens
acggggcattctcaccaagttcttac

SEQ ID NO: 53498 - DNA, 26 bp, Homo sapiens
cggggcattctcaccaagttcttacc

SEQ ID NO: 53499 - DNA, 26 bp, Homo sapiens
ggggcattctcaccaagttcttacca

SEQ ID NO: 53500 - DNA, 26 bp, Homo sapiens
gggcattctcaccaagttcttaccaa

SEQ ID NO: 53501 - DNA, 26 bp, Homo sapiens
ggcattctcaccaagttcttaccaac

SEQ ID NO: 53502 - DNA, 26 bp, Homo sapiens
gcattctcaccaagttcttaccaaca

SEQ ID NO: 53503 - DNA, 26 bp, Homo sapiens
cattctcaccaagttcttaccaacag

SEQ ID NO: 53504 - DNA, 26 bp, Homo sapiens
attctcaccaagttcttaccaacaga

SEQ ID NO: 53505 - DNA, 26 bp, Homo sapiens
ttctcaccaagttcttaccaacagaa

SEQ ID NO: 53506 - DNA, 26 bp, Homo sapiens
tctcaccaagttcttaccaacagaaa

SEQ ID NO: 53507 - DNA, 26 bp, Homo sapiens
ctcaccaagttcttaccaacagaaat

SEQ ID NO: 53508 - DNA, 26 bp, Homo sapiens
tcaccaagttcttaccaacagaaatt

SEQ ID NO: 53509 - DNA, 26 bp, Homo sapiens
caccaagttcttaccaacagaaatta

SEQ ID NO: 53510 - DNA, 26 bp, Homo sapiens
accaagttcttaccaacagaaattaa

SEQ ID NO: 53511 - DNA, 26 bp, Homo sapiens
ccaagttcttaccaacagaaattaat

SEQ ID NO: 53512 - DNA, 26 bp, Homo sapiens
caagttcttaccaacagaaattaata

SEQ ID NO: 53513 - DNA, 26 bp, Homo sapiens
aagttcttaccaacagaaattaatag

SEQ ID NO: 53514 - DNA, 26 bp, Homo sapiens
agttcttaccaacagaaattaataga

SEQ ID NO: 53515 - DNA, 26 bp, Homo sapiens
gttcttaccaacagaaattaatagaa

SEQ ID NO: 53516 - DNA, 26 bp, Homo sapiens
ttcttaccaacagaaattaatagaaa

SEQ ID NO: 53517 - DNA, 26 bp, Homo sapiens
tcttaccaacagaaattaatagaaat

SEQ ID NO: 53518 - DNA, 26 bp, Homo sapiens
cttaccaacagaaattaatagaaatg

SEQ ID NO: 53519 - DNA, 26 bp, Homo sapiens
ttaccaacagaaattaatagaaatgg

SEQ ID NO: 53520 - DNA, 26 bp, Homo sapiens
taccaacagaaattaatagaaatggt

SEQ ID NO: 53521 - DNA, 26 bp, Homo sapiens
accaacagaaattaatagaaatggtg

SEQ ID NO: 53522 - DNA, 26 bp, Homo sapiens
ccaacagaaattaatagaaatggtga

SEQ ID NO: 53523 - DNA, 26 bp, Homo sapiens
caacagaaattaatagaaatggtgag

SEQ ID NO: 53524 - DNA, 26 bp, Homo sapiens
aacagaaattaatagaaatggtgagt

SEQ ID NO: 53525 - DNA, 26 bp, Homo sapiens
acagaaattaatagaaatggtgagtt

SEQ ID NO: 53526 - DNA, 26 bp, Homo sapiens
cagaaattaatagaaatggtgagttc

SEQ ID NO: 53527 - DNA, 26 bp, Homo sapiens
agaaattaatagaaatggtgagttca

SEQ ID NO: 53528 - DNA, 26 bp, Homo sapiens
gaaattaatagaaatggtgagttcag

SEQ ID NO: 53529 - DNA, 26 bp, Homo sapiens
aaattaatagaaatggtgagttcagt

SEQ ID NO: 53530 - DNA, 26 bp, Homo sapiens
aattaatagaaatggtgagttcagtt

SEQ ID NO: 53531 - DNA, 26 bp, Homo sapiens
attaatagaaatggtgagttcagttt

SEQ ID NO: 53532 - DNA, 26 bp, Homo sapiens
ttaatagaaatggtgagttcagtttc

SEQ ID NO: 53533 - DNA, 26 bp, Homo sapiens
taatagaaatggtgagttcagtttca

SEQ ID NO: 53534 - DNA, 26 bp, Homo sapiens
aatagaaatggtgagttcagtttcat

SEQ ID NO: 53535 - DNA, 26 bp, Homo sapiens
atagaaatggtgagttcagtttcatg

SEQ ID NO: 53536 - DNA, 26 bp, Homo sapiens
tagaaatggtgagttcagtttcatga

SEQ ID NO: 53537 - DNA, 26 bp, Homo sapiens
agaaatggtgagttcagtttcatgat

SEQ ID NO: 53538 - DNA, 26 bp, Homo sapiens
gaaatggtgagttcagtttcatgata

SEQ ID NO: 53539 - DNA, 26 bp, Homo sapiens
aaatggtgagttcagtttcatgataa

SEQ ID NO: 53540 - DNA, 26 bp, Homo sapiens
aatggtgagttcagtttcatgataac

SEQ ID NO: 53541 - DNA, 26 bp, Homo sapiens
atggtgagttcagtttcatgataacc

SEQ ID NO: 53542 - DNA, 26 bp, Homo sapiens
tggtgagttcagtttcatgataacct

SEQ ID NO: 53543 - DNA, 26 bp, Homo sapiens
ggtgagttcagtttcatgataacctt

SEQ ID NO: 53544 - DNA, 26 bp, Homo sapiens
gtgagttcagtttcatgataaccttc

SEQ ID NO: 53545 - DNA, 26 bp, Homo sapiens
tgagttcagtttcatgataaccttct

SEQ ID NO: 53546 - DNA, 26 bp, Homo sapiens
gagttcagtttcatgataaccttctt

SEQ ID NO: 53547 - DNA, 26 bp, Homo sapiens
agttcagtttcatgataaccttcttc

SEQ ID NO: 53548 - DNA, 26 bp, Homo sapiens
gttcagtttcatgataaccttcttcc

SEQ ID NO: 53549 - DNA, 26 bp, Homo sapiens
ttcagtttcatgataaccttcttcct

SEQ ID NO: 53550 - DNA, 26 bp, Homo sapiens
tcagtttcatgataaccttcttcctg

SEQ ID NO: 53551 - DNA, 26 bp, Homo sapiens
cagtttcatgataaccttcttcctgg

SEQ ID NO: 53552 - DNA, 26 bp, Homo sapiens
agtttcatgataaccttcttcctgga

SEQ ID NO: 53553 - DNA, 26 bp, Homo sapiens
gtttcatgataaccttcttcctggag

SEQ ID NO: 53554 - DNA, 26 bp, Homo sapiens
tttcatgataaccttcttcctggagt

SEQ ID NO: 53555 - DNA, 26 bp, Homo sapiens
ttcatgataaccttcttcctggagtc

SEQ ID NO: 53556 - DNA, 26 bp, Homo sapiens
tcatgataaccttcttcctggagtca

SEQ ID NO: 53557 - DNA, 26 bp, Homo sapiens
catgataaccttcttcctggagtcat

SEQ ID NO: 53558 - DNA, 26 bp, Homo sapiens
atgataaccttcttcctggagtcatt

SEQ ID NO: 53559 - DNA, 26 bp, Homo sapiens
tgataaccttcttcctggagtcattc

SEQ ID NO: 53560 - DNA, 26 bp, Homo sapiens
gataaccttcttcctggagtcattca

SEQ ID NO: 53561 - DNA, 26 bp, Homo sapiens
ataaccttcttcctggagtcattcat

SEQ ID NO: 53562 - DNA, 26 bp, Homo sapiens
taaccttcttcctggagtcattcatc

SEQ ID NO: 53563 - DNA, 26 bp, Homo sapiens
aaccttcttcctggagtcattcatct

SEQ ID NO: 53564 - DNA, 26 bp, Homo sapiens
accttcttcctggagtcattcatctg

SEQ ID NO: 53565 - DNA, 26 bp, Homo sapiens
ccttcttcctggagtcattcatctgc

SEQ ID NO: 53566 - DNA, 26 bp, Homo sapiens
cttcttcctggagtcattcatctgct

SEQ ID NO: 53567 - DNA, 26 bp, Homo sapiens
ttcttcctggagtcattcatctgctc

SEQ ID NO: 53568 - DNA, 26 bp, Homo sapiens
tcttcctggagtcattcatctgctca

SEQ ID NO: 53569 - DNA, 26 bp, Homo sapiens
cttcctggagtcattcatctgctcag

SEQ ID NO: 53570 - DNA, 26 bp, Homo sapiens
ttcctggagtcattcatctgctcagg

SEQ ID NO: 53571 - DNA, 26 bp, Homo sapiens
tcctggagtcattcatctgctcaggc

SEQ ID NO: 53572 - DNA, 26 bp, Homo sapiens
cctggagtcattcatctgctcaggct

SEQ ID NO: 53573 - DNA, 26 bp, Homo sapiens
ctggagtcattcatctgctcaggctt

SEQ ID NO: 53574 - DNA, 26 bp, Homo sapiens
tggagtcattcatctgctcaggcttg

SEQ ID NO: 53575 - DNA, 26 bp, Homo sapiens
ggagtcattcatctgctcaggcttga

SEQ ID NO: 53576 - DNA, 26 bp, Homo sapiens
gagtcattcatctgctcaggcttgaa

SEQ ID NO: 53577 - DNA, 26 bp, Homo sapiens
agtcattcatctgctcaggcttgaag

SEQ ID NO: 53578 - DNA, 26 bp, Homo sapiens
gtcattcatctgctcaggcttgaagg

SEQ ID NO: 53579 - DNA, 26 bp, Homo sapiens
tcattcatctgctcaggcttgaaggt

SEQ ID NO: 53580 - DNA, 26 bp, Homo sapiens
cattcatctgctcaggcttgaaggtc

SEQ ID NO: 53581 - DNA, 26 bp, Homo sapiens
attcatctgctcaggcttgaaggtcc

SEQ ID NO: 53582 - DNA, 26 bp, Homo sapiens
ttcatctgctcaggcttgaaggtccc

SEQ ID NO: 53583 - DNA, 26 bp, Homo sapiens
tcatctgctcaggcttgaaggtccct

SEQ ID NO: 53584 - DNA, 26 bp, Homo sapiens
catctgctcaggcttgaaggtccctg

SEQ ID NO: 53585 - DNA, 26 bp, Homo sapiens
atctgctcaggcttgaaggtccctgc

SEQ ID NO: 53586 - DNA, 26 bp, Homo sapiens
tctgctcaggcttgaaggtccctgcg

SEQ ID NO: 53587 - DNA, 26 bp, Homo sapiens
ctgctcaggcttgaaggtccctgcgg

SEQ ID NO: 53588 - DNA, 26 bp, Homo sapiens
tgctcaggcttgaaggtccctgcggc

SEQ ID NO: 53589 - DNA, 26 bp, Homo sapiens
gctcaggcttgaaggtccctgcggcg

SEQ ID NO: 53590 - DNA, 26 bp, Homo sapiens
ctcaggcttgaaggtccctgcggcgc

SEQ ID NO: 53591 - DNA, 26 bp, Homo sapiens
tcaggcttgaaggtccctgcggcgcc

SEQ ID NO: 53592 - DNA, 26 bp, Homo sapiens
caggcttgaaggtccctgcggcgcct

SEQ ID NO: 53593 - DNA, 26 bp, Homo sapiens
aggcttgaaggtccctgcggcgcctg

SEQ ID NO: 53594 - DNA, 26 bp, Homo sapiens
ggcttgaaggtccctgcggcgcctgc

SEQ ID NO: 53595 - DNA, 26 bp, Homo sapiens
gcttgaaggtccctgcggcgcctgcc

SEQ ID NO: 53596 - DNA, 26 bp, Homo sapiens
cttgaaggtccctgcggcgcctgcca

SEQ ID NO: 53597 - DNA, 26 bp, Homo sapiens
ttgaaggtccctgcggcgcctgccaa

SEQ ID NO: 53598 - DNA, 26 bp, Homo sapiens
tgaaggtccctgcggcgcctgccaaa

SEQ ID NO: 53599 - DNA, 26 bp, Homo sapiens
gaaggtccctgcggcgcctgccaaag

SEQ ID NO: 53600 - DNA, 26 bp, Homo sapiens
aaggtccctgcggcgcctgccaaagg

SEQ ID NO: 53601 - DNA, 26 bp, Homo sapiens
aggtccctgcggcgcctgccaaaggc

SEQ ID NO: 53602 - DNA, 26 bp, Homo sapiens
ggtccctgcggcgcctgccaaaggct

SEQ ID NO: 53603 - DNA, 26 bp, Homo sapiens
gtccctgcggcgcctgccaaaggctt

SEQ ID NO: 53604 - DNA, 26 bp, Homo sapiens
tccctgcggcgcctgccaaaggcttt

SEQ ID NO: 53605 - DNA, 26 bp, Homo sapiens
ccctgcggcgcctgccaaaggctttg

SEQ ID NO: 53606 - DNA, 26 bp, Homo sapiens
cctgcggcgcctgccaaaggctttgg

SEQ ID NO: 53607 - DNA, 26 bp, Homo sapiens
ctgcggcgcctgccaaaggctttgga

SEQ ID NO: 53608 - DNA, 26 bp, Homo sapiens
tgcggcgcctgccaaaggctttggaa

SEQ ID NO: 53609 - DNA, 26 bp, Homo sapiens
gcggcgcctgccaaaggctttggaac

SEQ ID NO: 53610 - DNA, 26 bp, Homo sapiens
cggcgcctgccaaaggctttggaacc

SEQ ID NO: 53611 - DNA, 26 bp, Homo sapiens
ggcgcctgccaaaggctttggaaccc

SEQ ID NO: 53612 - DNA, 26 bp, Homo sapiens
gcgcctgccaaaggctttggaaccca

SEQ ID NO: 53613 - DNA, 26 bp, Homo sapiens
cgcctgccaaaggctttggaacccac

SEQ ID NO: 53614 - DNA, 26 bp, Homo sapiens
gcctgccaaaggctttggaacccaca

SEQ ID NO: 53615 - DNA, 26 bp, Homo sapiens
cctgccaaaggctttggaacccacat

SEQ ID NO: 53616 - DNA, 26 bp, Homo sapiens
ctgccaaaggctttggaacccacatt

SEQ ID NO: 53617 - DNA, 26 bp, Homo sapiens
tgccaaaggctttggaacccacattg

SEQ ID NO: 53618 - DNA, 26 bp, Homo sapiens
gccaaaggctttggaacccacattgg

SEQ ID NO: 53619 - DNA, 26 bp, Homo sapiens
ccaaaggctttggaacccacattggt

SEQ ID NO: 53620 - DNA, 26 bp, Homo sapiens
caaaggctttggaacccacattggtg

SEQ ID NO: 53621 - DNA, 26 bp, Homo sapiens
aaaggctttggaacccacattggtgg

SEQ ID NO: 53622 - DNA, 26 bp, Homo sapiens
aaggctttggaacccacattggtggg

SEQ ID NO: 53623 - DNA, 26 bp, Homo sapiens
aggctttggaacccacattggtgggc

SEQ ID NO: 53624 - DNA, 26 bp, Homo sapiens
ggctttggaacccacattggtgggca

SEQ ID NO: 53625 - DNA, 26 bp, Homo sapiens
gctttggaacccacattggtgggcac

SEQ ID NO: 53626 - DNA, 26 bp, Homo sapiens
ctttggaacccacattggtgggcacg

SEQ ID NO: 53627 - DNA, 26 bp, Homo sapiens
tttggaacccacattggtgggcacga

SEQ ID NO: 53628 - DNA, 26 bp, Homo sapiens
ttggaacccacattggtgggcacgaa

SEQ ID NO: 53629 - DNA, 26 bp, Homo sapiens
tggaacccacattggtgggcacgaag

SEQ ID NO: 53630 - DNA, 26 bp, Homo sapiens
ggaacccacattggtgggcacgaagt

SEQ ID NO: 53631 - DNA, 26 bp, Homo sapiens
gaacccacattggtgggcacgaagtt

SEQ ID NO: 53632 - DNA, 26 bp, Homo sapiens
aacccacattggtgggcacgaagttg

SEQ ID NO: 53633 - DNA, 26 bp, Homo sapiens
acccacattggtgggcacgaagttgc

SEQ ID NO: 53634 - DNA, 26 bp, Homo sapiens
cccacattggtgggcacgaagttgct

SEQ ID NO: 53635 - DNA, 26 bp, Homo sapiens
ccacattggtgggcacgaagttgctc

SEQ ID NO: 53636 - DNA, 26 bp, Homo sapiens
cacattggtgggcacgaagttgctct

SEQ ID NO: 53637 - DNA, 26 bp, Homo sapiens
acattggtgggcacgaagttgctctt

SEQ ID NO: 53638 - DNA, 26 bp, Homo sapiens
cattggtgggcacgaagttgctcttc

SEQ ID NO: 53639 - DNA, 26 bp, Homo sapiens
attggtgggcacgaagttgctcttca

SEQ ID NO: 53640 - DNA, 26 bp, Homo sapiens
ttggtgggcacgaagttgctcttcac

SEQ ID NO: 53641 - DNA, 26 bp, Homo sapiens
tggtgggcacgaagttgctcttcacc

SEQ ID NO: 53642 - DNA, 26 bp, Homo sapiens
ggtgggcacgaagttgctcttcacca

SEQ ID NO: 53643 - DNA, 26 bp, Homo sapiens
gtgggcacgaagttgctcttcaccat

SEQ ID NO: 53644 - DNA, 26 bp, Homo sapiens
tgggcacgaagttgctcttcaccatg

SEQ ID NO: 53645 - DNA, 26 bp, Homo sapiens
gggcacgaagttgctcttcaccatgc

SEQ ID NO: 53646 - DNA, 26 bp, Homo sapiens
ggcacgaagttgctcttcaccatgcc

SEQ ID NO: 53647 - DNA, 26 bp, Homo sapiens
gcacgaagttgctcttcaccatgccc

SEQ ID NO: 53648 - DNA, 26 bp, Homo sapiens
cacgaagttgctcttcaccatgcccc

SEQ ID NO: 53649 - DNA, 26 bp, Homo sapiens
acgaagttgctcttcaccatgccccc

SEQ ID NO: 53650 - DNA, 26 bp, Homo sapiens
cgaagttgctcttcaccatgccccct

SEQ ID NO: 53651 - DNA, 26 bp, Homo sapiens
gaagttgctcttcaccatgccccctg

SEQ ID NO: 53652 - DNA, 26 bp, Homo sapiens
aagttgctcttcaccatgccccctga

SEQ ID NO: 53653 - DNA, 26 bp, Homo sapiens
agttgctcttcaccatgccccctgat

SEQ ID NO: 53654 - DNA, 26 bp, Homo sapiens
gttgctcttcaccatgccccctgatc

SEQ ID NO: 53655 - DNA, 26 bp, Homo sapiens
ttgctcttcaccatgccccctgatct

SEQ ID NO: 53656 - DNA, 26 bp, Homo sapiens
tgctcttcaccatgccccctgatctg

SEQ ID NO: 53657 - DNA, 26 bp, Homo sapiens
gctcttcaccatgccccctgatctgc

SEQ ID NO: 53658 - DNA, 26 bp, Homo sapiens
ctcttcaccatgccccctgatctgct

SEQ ID NO: 53659 - DNA, 26 bp, Homo sapiens
tcttcaccatgccccctgatctgctc

SEQ ID NO: 53660 - DNA, 26 bp, Homo sapiens
cttcaccatgccccctgatctgctca

SEQ ID NO: 53661 - DNA, 26 bp, Homo sapiens
ttcaccatgccccctgatctgctcag

SEQ ID NO: 53662 - DNA, 26 bp, Homo sapiens
tcaccatgccccctgatctgctcagc

SEQ ID NO: 53663 - DNA, 26 bp, Homo sapiens
caccatgccccctgatctgctcagca

SEQ ID NO: 53664 - DNA, 26 bp, Homo sapiens
accatgccccctgatctgctcagcaa

SEQ ID NO: 53665 - DNA, 26 bp, Homo sapiens
ccatgccccctgatctgctcagcaag

SEQ ID NO: 53666 - DNA, 26 bp, Homo sapiens
catgccccctgatctgctcagcaagc

SEQ ID NO: 53667 - DNA, 26 bp, Homo sapiens
atgccccctgatctgctcagcaagcc

SEQ ID NO: 53668 - DNA, 26 bp, Homo sapiens
tgccccctgatctgctcagcaagcct

SEQ ID NO: 53669 - DNA, 26 bp, Homo sapiens
gccccctgatctgctcagcaagcctg

SEQ ID NO: 53670 - DNA, 26 bp, Homo sapiens
ccccctgatctgctcagcaagcctgc

SEQ ID NO: 53671 - DNA, 26 bp, Homo sapiens
cccctgatctgctcagcaagcctgcc

SEQ ID NO: 53672 - DNA, 26 bp, Homo sapiens
ccctgatctgctcagcaagcctgcca

SEQ ID NO: 53673 - DNA, 26 bp, Homo sapiens
cctgatctgctcagcaagcctgccag

SEQ ID NO: 53674 - DNA, 26 bp, Homo sapiens
ctgatctgctcagcaagcctgccagc

SEQ ID NO: 53675 - DNA, 26 bp, Homo sapiens
tgatctgctcagcaagcctgccagcc

SEQ ID NO: 53676 - DNA, 26 bp, Homo sapiens
gatctgctcagcaagcctgccagccg

SEQ ID NO: 53677 - DNA, 26 bp, Homo sapiens
atctgctcagcaagcctgccagccga

SEQ ID NO: 53678 - DNA, 26 bp, Homo sapiens
tctgctcagcaagcctgccagccgat

SEQ ID NO: 53679 - DNA, 26 bp, Homo sapiens
ctgctcagcaagcctgccagccgatg

SEQ ID NO: 53680 - DNA, 26 bp, Homo sapiens
tgctcagcaagcctgccagccgatga

SEQ ID NO: 53681 - DNA, 26 bp, Homo sapiens
gctcagcaagcctgccagccgatgag

SEQ ID NO: 53682 - DNA, 26 bp, Homo sapiens
ctcagcaagcctgccagccgatgagt

SEQ ID NO: 53683 - DNA, 26 bp, Homo sapiens
tcagcaagcctgccagccgatgagtc

SEQ ID NO: 53684 - DNA, 26 bp, Homo sapiens
cagcaagcctgccagccgatgagtca

SEQ ID NO: 53685 - DNA, 26 bp, Homo sapiens
agcaagcctgccagccgatgagtcac

SEQ ID NO: 53686 - DNA, 26 bp, Homo sapiens
gcaagcctgccagccgatgagtcaca

SEQ ID NO: 53687 - DNA, 26 bp, Homo sapiens
caagcctgccagccgatgagtcacac

SEQ ID NO: 53688 - DNA, 26 bp, Homo sapiens
aagcctgccagccgatgagtcacaca

SEQ ID NO: 53689 - DNA, 26 bp, Homo sapiens
agcctgccagccgatgagtcacacag

SEQ ID NO: 53690 - DNA, 26 bp, Homo sapiens
gcctgccagccgatgagtcacacagg

SEQ ID NO: 53691 - DNA, 26 bp, Homo sapiens
cctgccagccgatgagtcacacaggt

SEQ ID NO: 53692 - DNA, 26 bp, Homo sapiens
ctgccagccgatgagtcacacaggtg

SEQ ID NO: 53693 - DNA, 26 bp, Homo sapiens
tgccagccgatgagtcacacaggtgg

SEQ ID NO: 53694 - DNA, 26 bp, Homo sapiens
gccagccgatgagtcacacaggtggc

SEQ ID NO: 53695 - DNA, 26 bp, Homo sapiens
ccagccgatgagtcacacaggtggca

SEQ ID NO: 53696 - DNA, 26 bp, Homo sapiens
cagccgatgagtcacacaggtggcag

SEQ ID NO: 53697 - DNA, 26 bp, Homo sapiens
agccgatgagtcacacaggtggcagt

SEQ ID NO: 53698 - DNA, 26 bp, Homo sapiens
gccgatgagtcacacaggtggcagtg

SEQ ID NO: 53699 - DNA, 26 bp, Homo sapiens
ccgatgagtcacacaggtggcagtgt

SEQ ID NO: 53700 - DNA, 26 bp, Homo sapiens
cgatgagtcacacaggtggcagtgtt

SEQ ID NO: 53701 - DNA, 26 bp, Homo sapiens
gatgagtcacacaggtggcagtgttg

SEQ ID NO: 53702 - DNA, 26 bp, Homo sapiens
atgagtcacacaggtggcagtgttgc

SEQ ID NO: 53703 - DNA, 26 bp, Homo sapiens
tgagtcacacaggtggcagtgttgca

SEQ ID NO: 53704 - DNA, 26 bp, Homo sapiens
gagtcacacaggtggcagtgttgcag

SEQ ID NO: 53705 - DNA, 26 bp, Homo sapiens
agtcacacaggtggcagtgttgcagg

SEQ ID NO: 53706 - DNA, 26 bp, Homo sapiens
gtcacacaggtggcagtgttgcaggc

SEQ ID NO: 53707 - DNA, 26 bp, Homo sapiens
tcacacaggtggcagtgttgcaggct

SEQ ID NO: 53708 - DNA, 26 bp, Homo sapiens
cacacaggtggcagtgttgcaggctc

SEQ ID NO: 53709 - DNA, 26 bp, Homo sapiens
acacaggtggcagtgttgcaggctct

SEQ ID NO: 53710 - DNA, 26 bp, Homo sapiens
cacaggtggcagtgttgcaggctctc

SEQ ID NO: 53711 - DNA, 26 bp, Homo sapiens
acaggtggcagtgttgcaggctctct

SEQ ID NO: 53712 - DNA, 26 bp, Homo sapiens
caggtggcagtgttgcaggctctctt

SEQ ID NO: 53713 - DNA, 26 bp, Homo sapiens
aggtggcagtgttgcaggctctcttc

SEQ ID NO: 53714 - DNA, 26 bp, Homo sapiens
ggtggcagtgttgcaggctctcttct

SEQ ID NO: 53715 - DNA, 26 bp, Homo sapiens
gtggcagtgttgcaggctctcttctg

SEQ ID NO: 53716 - DNA, 26 bp, Homo sapiens
tggcagtgttgcaggctctcttctgg

SEQ ID NO: 53717 - DNA, 26 bp, Homo sapiens
ggcagtgttgcaggctctcttctggg

SEQ ID NO: 53718 - DNA, 26 bp, Homo sapiens
gcagtgttgcaggctctcttctgggc

SEQ ID NO: 53719 - DNA, 26 bp, Homo sapiens
cagtgttgcaggctctcttctgggca

SEQ ID NO: 53720 - DNA, 26 bp, Homo sapiens
agtgttgcaggctctcttctgggcag

SEQ ID NO: 53721 - DNA, 26 bp, Homo sapiens
gtgttgcaggctctcttctgggcagc

SEQ ID NO: 53722 - DNA, 26 bp, Homo sapiens
tgttgcaggctctcttctgggcagcg

SEQ ID NO: 53723 - DNA, 26 bp, Homo sapiens
gttgcaggctctcttctgggcagcgg

SEQ ID NO: 53724 - DNA, 26 bp, Homo sapiens
ttgcaggctctcttctgggcagcgga

SEQ ID NO: 53725 - DNA, 26 bp, Homo sapiens
tgcaggctctcttctgggcagcggag

SEQ ID NO: 53726 - DNA, 26 bp, Homo sapiens
gcaggctctcttctgggcagcggagc

SEQ ID NO: 53727 - DNA, 26 bp, Homo sapiens
caggctctcttctgggcagcggagct

SEQ ID NO: 53728 - DNA, 26 bp, Homo sapiens
aggctctcttctgggcagcggagctg

SEQ ID NO: 53729 - DNA, 26 bp, Homo sapiens
ggctctcttctgggcagcggagctgg

SEQ ID NO: 53730 - DNA, 26 bp, Homo sapiens
gctctcttctgggcagcggagctgga

SEQ ID NO: 53731 - DNA, 26 bp, Homo sapiens
ctctcttctgggcagcggagctggag

SEQ ID NO: 53732 - DNA, 26 bp, Homo sapiens
tctcttctgggcagcggagctggagc

SEQ ID NO: 53733 - DNA, 26 bp, Homo sapiens
ctcttctgggcagcggagctggagcc

SEQ ID NO: 53734 - DNA, 26 bp, Homo sapiens
tcttctgggcagcggagctggagccc

SEQ ID NO: 53735 - DNA, 26 bp, Homo sapiens
cttctgggcagcggagctggagccct

SEQ ID NO: 53736 - DNA, 26 bp, Homo sapiens
ttctgggcagcggagctggagccctg

SEQ ID NO: 53737 - DNA, 26 bp, Homo sapiens
tctgggcagcggagctggagccctgt

SEQ ID NO: 53738 - DNA, 26 bp, Homo sapiens
ctgggcagcggagctggagccctgtg

SEQ ID NO: 53739 - DNA, 26 bp, Homo sapiens
tgggcagcggagctggagccctgtgt

SEQ ID NO: 53740 - DNA, 26 bp, Homo sapiens
gggcagcggagctggagccctgtgtc

SEQ ID NO: 53741 - DNA, 26 bp, Homo sapiens
ggcagcggagctggagccctgtgtct

SEQ ID NO: 53742 - DNA, 26 bp, Homo sapiens
gcagcggagctggagccctgtgtctc

SEQ ID NO: 53743 - DNA, 26 bp, Homo sapiens
cagcggagctggagccctgtgtctcc

SEQ ID NO: 53744 - DNA, 26 bp, Homo sapiens
agcggagctggagccctgtgtctcct

SEQ ID NO: 53745 - DNA, 26 bp, Homo sapiens
gcggagctggagccctgtgtctcctg

SEQ ID NO: 53746 - DNA, 26 bp, Homo sapiens
cggagctggagccctgtgtctcctgc

SEQ ID NO: 53747 - DNA, 26 bp, Homo sapiens
ggagctggagccctgtgtctcctgct

SEQ ID NO: 53748 - DNA, 26 bp, Homo sapiens
gagctggagccctgtgtctcctgctc

SEQ ID NO: 53749 - DNA, 26 bp, Homo sapiens
agctggagccctgtgtctcctgctcc

SEQ ID NO: 53750 - DNA, 26 bp, Homo sapiens
gctggagccctgtgtctcctgctcct

SEQ ID NO: 53751 - DNA, 26 bp, Homo sapiens
ctggagccctgtgtctcctgctcctg

SEQ ID NO: 53752 - DNA, 26 bp, Homo sapiens
tggagccctgtgtctcctgctcctgc

SEQ ID NO: 53753 - DNA, 26 bp, Homo sapiens
ggagccctgtgtctcctgctcctgct

SEQ ID NO: 53754 - DNA, 26 bp, Homo sapiens
gagccctgtgtctcctgctcctgctt

SEQ ID NO: 53755 - DNA, 26 bp, Homo sapiens
agccctgtgtctcctgctcctgcttc

SEQ ID NO: 53756 - DNA, 26 bp, Homo sapiens
gccctgtgtctcctgctcctgcttca

SEQ ID NO: 53757 - DNA, 26 bp, Homo sapiens
ccctgtgtctcctgctcctgcttcag

SEQ ID NO: 53758 - DNA, 26 bp, Homo sapiens
cctgtgtctcctgctcctgcttcagc

SEQ ID NO: 53759 - DNA, 26 bp, Homo sapiens
ctgtgtctcctgctcctgcttcagct

SEQ ID NO: 53760 - DNA, 26 bp, Homo sapiens
tgtgtctcctgctcctgcttcagctc

SEQ ID NO: 53761 - DNA, 26 bp, Homo sapiens
gtgtctcctgctcctgcttcagctca

SEQ ID NO: 53762 - DNA, 26 bp, Homo sapiens
tgtctcctgctcctgcttcagctcac

SEQ ID NO: 53763 - DNA, 26 bp, Homo sapiens
gtctcctgctcctgcttcagctcact

SEQ ID NO: 53764 - DNA, 26 bp, Homo sapiens
tctcctgctcctgcttcagctcactg

SEQ ID NO: 53765 - DNA, 26 bp, Homo sapiens
ctcctgctcctgcttcagctcactgg

SEQ ID NO: 53766 - DNA, 26 bp, Homo sapiens
tcctgctcctgcttcagctcactggc

SEQ ID NO: 53767 - DNA, 26 bp, Homo sapiens
cctgctcctgcttcagctcactggcc

SEQ ID NO: 53768 - DNA, 26 bp, Homo sapiens
ctgctcctgcttcagctcactggcct

SEQ ID NO: 53769 - DNA, 26 bp, Homo sapiens
tgctcctgcttcagctcactggcctt

SEQ ID NO: 53770 - DNA, 26 bp, Homo sapiens
gctcctgcttcagctcactggccttc

SEQ ID NO: 53771 - DNA, 26 bp, Homo sapiens
ctcctgcttcagctcactggccttca

SEQ ID NO: 53772 - DNA, 26 bp, Homo sapiens
tcctgcttcagctcactggccttcat

SEQ ID NO: 53773 - DNA, 26 bp, Homo sapiens
cctgcttcagctcactggccttcatc

SEQ ID NO: 53774 - DNA, 26 bp, Homo sapiens
ctgcttcagctcactggccttcatct

SEQ ID NO: 53775 - DNA, 26 bp, Homo sapiens
tgcttcagctcactggccttcatctg

SEQ ID NO: 53776 - DNA, 26 bp, Homo sapiens
gcttcagctcactggccttcatctgc

SEQ ID NO: 53777 - DNA, 26 bp, Homo sapiens
cttcagctcactggccttcatctgca

SEQ ID NO: 53778 - DNA, 26 bp, Homo sapiens
ttcagctcactggccttcatctgcac

SEQ ID NO: 53779 - DNA, 26 bp, Homo sapiens
tcagctcactggccttcatctgcaca

SEQ ID NO: 53780 - DNA, 26 bp, Homo sapiens
cagctcactggccttcatctgcacat

SEQ ID NO: 53781 - DNA, 26 bp, Homo sapiens
agctcactggccttcatctgcacata

SEQ ID NO: 53782 - DNA, 26 bp, Homo sapiens
gctcactggccttcatctgcacatag

SEQ ID NO: 53783 - DNA, 26 bp, Homo sapiens
ctcactggccttcatctgcacatagt

SEQ ID NO: 53784 - DNA, 26 bp, Homo sapiens
tcactggccttcatctgcacatagtc

SEQ ID NO: 53785 - DNA, 26 bp, Homo sapiens
cactggccttcatctgcacatagtcc

SEQ ID NO: 53786 - DNA, 26 bp, Homo sapiens
actggccttcatctgcacatagtcct

SEQ ID NO: 53787 - DNA, 26 bp, Homo sapiens
ctggccttcatctgcacatagtcctg

SEQ ID NO: 53788 - DNA, 26 bp, Homo sapiens
tggccttcatctgcacatagtcctgc

SEQ ID NO: 53789 - DNA, 26 bp, Homo sapiens
ggccttcatctgcacatagtcctgca

SEQ ID NO: 53790 - DNA, 26 bp, Homo sapiens
gccttcatctgcacatagtcctgcac

SEQ ID NO: 53791 - DNA, 26 bp, Homo sapiens
ccttcatctgcacatagtcctgcacc

SEQ ID NO: 53792 - DNA, 26 bp, Homo sapiens
cttcatctgcacatagtcctgcacca

SEQ ID NO: 53793 - DNA, 26 bp, Homo sapiens
ttcatctgcacatagtcctgcaccag

SEQ ID NO: 53794 - DNA, 26 bp, Homo sapiens
tcatctgcacatagtcctgcaccagt

SEQ ID NO: 53795 - DNA, 26 bp, Homo sapiens
catctgcacatagtcctgcaccagtg

SEQ ID NO: 53796 - DNA, 26 bp, Homo sapiens
atctgcacatagtcctgcaccagtgc

SEQ ID NO: 53797 - DNA, 26 bp, Homo sapiens
tctgcacatagtcctgcaccagtgca

SEQ ID NO: 53798 - DNA, 26 bp, Homo sapiens
ctgcacatagtcctgcaccagtgcag

SEQ ID NO: 53799 - DNA, 26 bp, Homo sapiens
tgcacatagtcctgcaccagtgcagc

SEQ ID NO: 53800 - DNA, 26 bp, Homo sapiens
gcacatagtcctgcaccagtgcagcc

SEQ ID NO: 53801 - DNA, 26 bp, Homo sapiens
cacatagtcctgcaccagtgcagcca

SEQ ID NO: 53802 - DNA, 26 bp, Homo sapiens
acatagtcctgcaccagtgcagccag

SEQ ID NO: 53803 - DNA, 26 bp, Homo sapiens
catagtcctgcaccagtgcagccagc

SEQ ID NO: 53804 - DNA, 26 bp, Homo sapiens
atagtcctgcaccagtgcagccagca

SEQ ID NO: 53805 - DNA, 26 bp, Homo sapiens
tagtcctgcaccagtgcagccagcag

SEQ ID NO: 53806 - DNA, 26 bp, Homo sapiens
agtcctgcaccagtgcagccagcagg

SEQ ID NO: 53807 - DNA, 26 bp, Homo sapiens
gtcctgcaccagtgcagccagcagga

SEQ ID NO: 53808 - DNA, 26 bp, Homo sapiens
tcctgcaccagtgcagccagcaggag

SEQ ID NO: 53809 - DNA, 26 bp, Homo sapiens
cctgcaccagtgcagccagcaggagg

SEQ ID NO: 53810 - DNA, 26 bp, Homo sapiens
ctgcaccagtgcagccagcaggaggc

SEQ ID NO: 53811 - DNA, 26 bp, Homo sapiens
tgcaccagtgcagccagcaggaggcg

SEQ ID NO: 53812 - DNA, 26 bp, Homo sapiens
gcaccagtgcagccagcaggaggcgc

SEQ ID NO: 53813 - DNA, 26 bp, Homo sapiens
caccagtgcagccagcaggaggcgcg

SEQ ID NO: 53814 - DNA, 26 bp, Homo sapiens
accagtgcagccagcaggaggcgcgc

SEQ ID NO: 53815 - DNA, 26 bp, Homo sapiens
ccagtgcagccagcaggaggcgcgcg

SEQ ID NO: 53816 - DNA, 26 bp, Homo sapiens
cagtgcagccagcaggaggcgcgcgt

SEQ ID NO: 53817 - DNA, 26 bp, Homo sapiens
agtgcagccagcaggaggcgcgcgtc

SEQ ID NO: 53818 - DNA, 26 bp, Homo sapiens
gtgcagccagcaggaggcgcgcgtcc

SEQ ID NO: 53819 - DNA, 26 bp, Homo sapiens
tgcagccagcaggaggcgcgcgtcct

SEQ ID NO: 53820 - DNA, 26 bp, Homo sapiens
gcagccagcaggaggcgcgcgtcctc

SEQ ID NO: 53821 - DNA, 26 bp, Homo sapiens
cagccagcaggaggcgcgcgtcctct

SEQ ID NO: 53822 - DNA, 26 bp, Homo sapiens
agccagcaggaggcgcgcgtcctctt

SEQ ID NO: 53823 - DNA, 26 bp, Homo sapiens
gccagcaggaggcgcgcgtcctcttt

SEQ ID NO: 53824 - DNA, 26 bp, Homo sapiens
ccagcaggaggcgcgcgtcctcttta

SEQ ID NO: 53825 - DNA, 26 bp, Homo sapiens
cagcaggaggcgcgcgtcctctttac

SEQ ID NO: 53826 - DNA, 26 bp, Homo sapiens
agcaggaggcgcgcgtcctctttact

SEQ ID NO: 53827 - DNA, 26 bp, Homo sapiens
gcaggaggcgcgcgtcctctttactg

SEQ ID NO: 53828 - DNA, 26 bp, Homo sapiens
caggaggcgcgcgtcctctttactga

SEQ ID NO: 53829 - DNA, 26 bp, Homo sapiens
aggaggcgcgcgtcctctttactgag

SEQ ID NO: 53830 - DNA, 26 bp, Homo sapiens
ggaggcgcgcgtcctctttactgagt

SEQ ID NO: 53831 - DNA, 26 bp, Homo sapiens
gaggcgcgcgtcctctttactgagtg

SEQ ID NO: 53832 - DNA, 26 bp, Homo sapiens
aggcgcgcgtcctctttactgagtgt

SEQ ID NO: 53833 - DNA, 26 bp, Homo sapiens
ggcgcgcgtcctctttactgagtgtg

SEQ ID NO: 53834 - DNA, 26 bp, Homo sapiens
gcgcgcgtcctctttactgagtgtgg

SEQ ID NO: 53835 - DNA, 26 bp, Homo sapiens
cgcgcgtcctctttactgagtgtggc

SEQ ID NO: 53836 - DNA, 26 bp, Homo sapiens
gcgcgtcctctttactgagtgtggcc

SEQ ID NO: 53837 - DNA, 26 bp, Homo sapiens
cgcgtcctctttactgagtgtggccg

SEQ ID NO: 53838 - DNA, 26 bp, Homo sapiens
gcgtcctctttactgagtgtggccgg

SEQ ID NO: 53839 - DNA, 26 bp, Homo sapiens
cgtcctctttactgagtgtggccggg

SEQ ID NO: 53840 - DNA, 26 bp, Homo sapiens
gtcctctttactgagtgtggccgggt

SEQ ID NO: 53841 - DNA, 26 bp, Homo sapiens
tcctctttactgagtgtggccgggtc

SEQ ID NO: 53842 - DNA, 26 bp, Homo sapiens
cctctttactgagtgtggccgggtct

SEQ ID NO: 53843 - DNA, 26 bp, Homo sapiens
ctctttactgagtgtggccgggtctg

SEQ ID NO: 53844 - DNA, 26 bp, Homo sapiens
tctttactgagtgtggccgggtctgg

SEQ ID NO: 53845 - DNA, 26 bp, Homo sapiens
ctttactgagtgtggccgggtctggg

SEQ ID NO: 53846 - DNA, 26 bp, Homo sapiens
tttactgagtgtggccgggtctgggc

SEQ ID NO: 53847 - DNA, 26 bp, Homo sapiens
ttactgagtgtggccgggtctgggct

SEQ ID NO: 53848 - DNA, 26 bp, Homo sapiens
tactgagtgtggccgggtctgggctg

SEQ ID NO: 53849 - DNA, 26 bp, Homo sapiens
actgagtgtggccgggtctgggctgc

SEQ ID NO: 53850 - DNA, 26 bp, Homo sapiens
ctgagtgtggccgggtctgggctgct

SEQ ID NO: 53851 - DNA, 26 bp, Homo sapiens
tgagtgtggccgggtctgggctgctc

SEQ ID NO: 53852 - DNA, 26 bp, Homo sapiens
gagtgtggccgggtctgggctgctct

SEQ ID NO: 53853 - DNA, 26 bp, Homo sapiens
agtgtggccgggtctgggctgctctc

SEQ ID NO: 53854 - DNA, 26 bp, Homo sapiens
gtgtggccgggtctgggctgctctcc

SEQ ID NO: 53855 - DNA, 26 bp, Homo sapiens
tgtggccgggtctgggctgctctcca

SEQ ID NO: 53856 - DNA, 26 bp, Homo sapiens
gtggccgggtctgggctgctctccag

SEQ ID NO: 53857 - DNA, 26 bp, Homo sapiens
tggccgggtctgggctgctctccagg

SEQ ID NO: 53858 - DNA, 26 bp, Homo sapiens
ggccgggtctgggctgctctccaggg

SEQ ID NO: 53859 - DNA, 26 bp, Homo sapiens
gccgggtctgggctgctctccagggc

SEQ ID NO: 53860 - DNA, 26 bp, Homo sapiens
ccgggtctgggctgctctccagggca

SEQ ID NO: 53861 - DNA, 26 bp, Homo sapiens
cgggtctgggctgctctccagggcag

SEQ ID NO: 53862 - DNA, 26 bp, Homo sapiens
gggtctgggctgctctccagggcaga

SEQ ID NO: 53863 - DNA, 26 bp, Homo sapiens
ggtctgggctgctctccagggcagac

SEQ ID NO: 53864 - DNA, 26 bp, Homo sapiens
gtctgggctgctctccagggcagacc

SEQ ID NO: 53865 - DNA, 26 bp, Homo sapiens
tctgggctgctctccagggcagacct

SEQ ID NO: 53866 - DNA, 26 bp, Homo sapiens
ctgggctgctctccagggcagacctg

SEQ ID NO: 53867 - DNA, 26 bp, Homo sapiens
tgggctgctctccagggcagacctga

SEQ ID NO: 53868 - DNA, 26 bp, Homo sapiens
gggctgctctccagggcagacctgaa

SEQ ID NO: 53869 - DNA, 26 bp, Homo sapiens
ggctgctctccagggcagacctgaat

SEQ ID NO: 53870 - DNA, 26 bp, Homo sapiens
gctgctctccagggcagacctgaatg

SEQ ID NO: 53871 - DNA, 26 bp, Homo sapiens
ctgctctccagggcagacctgaatgg

SEQ ID NO: 53872 - DNA, 26 bp, Homo sapiens
tgctctccagggcagacctgaatggc

SEQ ID NO: 53873 - DNA, 26 bp, Homo sapiens
gctctccagggcagacctgaatggcg

SEQ ID NO: 53874 - DNA, 26 bp, Homo sapiens
ctctccagggcagacctgaatggcgc

SEQ ID NO: 53875 - DNA, 26 bp, Homo sapiens
tctccagggcagacctgaatggcgcc

SEQ ID NO: 53876 - DNA, 26 bp, Homo sapiens
ctccagggcagacctgaatggcgccg

SEQ ID NO: 53877 - DNA, 26 bp, Homo sapiens
tccagggcagacctgaatggcgccgc

SEQ ID NO: 53878 - DNA, 26 bp, Homo sapiens
ccagggcagacctgaatggcgccgcc

SEQ ID NO: 53879 - DNA, 26 bp, Homo sapiens
cagggcagacctgaatggcgccgcct

SEQ ID NO: 53880 - DNA, 26 bp, Homo sapiens
agggcagacctgaatggcgccgcctg

SEQ ID NO: 53881 - DNA, 26 bp, Homo sapiens
gggcagacctgaatggcgccgcctgg

SEQ ID NO: 53882 - DNA, 26 bp, Homo sapiens
ggcagacctgaatggcgccgcctgga

SEQ ID NO: 53883 - DNA, 26 bp, Homo sapiens
gcagacctgaatggcgccgcctggag

SEQ ID NO: 53884 - DNA, 26 bp, Homo sapiens
cagacctgaatggcgccgcctggagg

SEQ ID NO: 53885 - DNA, 26 bp, Homo sapiens
agacctgaatggcgccgcctggaggc

SEQ ID NO: 53886 - DNA, 26 bp, Homo sapiens
gacctgaatggcgccgcctggaggct

SEQ ID NO: 53887 - DNA, 26 bp, Homo sapiens
acctgaatggcgccgcctggaggctg

SEQ ID NO: 53888 - DNA, 26 bp, Homo sapiens
cctgaatggcgccgcctggaggctgc

SEQ ID NO: 53889 - DNA, 26 bp, Homo sapiens
ctgaatggcgccgcctggaggctgcc

SEQ ID NO: 53890 - DNA, 26 bp, Homo sapiens
tgaatggcgccgcctggaggctgccc

SEQ ID NO: 53891 - DNA, 26 bp, Homo sapiens
gaatggcgccgcctggaggctgcccg

SEQ ID NO: 53892 - DNA, 26 bp, Homo sapiens
aatggcgccgcctggaggctgcccgc

SEQ ID NO: 53893 - DNA, 26 bp, Homo sapiens
atggcgccgcctggaggctgcccgcc

SEQ ID NO: 53894 - DNA, 26 bp, Homo sapiens
tggcgccgcctggaggctgcccgcct

SEQ ID NO: 53895 - DNA, 26 bp, Homo sapiens
ggcgccgcctggaggctgcccgcctg

SEQ ID NO: 53896 - DNA, 26 bp, Homo sapiens
gcgccgcctggaggctgcccgcctgg

SEQ ID NO: 53897 - DNA, 26 bp, Homo sapiens
cgccgcctggaggctgcccgcctggt

SEQ ID NO: 53898 - DNA, 26 bp, Homo sapiens
gccgcctggaggctgcccgcctggta

SEQ ID NO: 53899 - DNA, 26 bp, Homo sapiens
ccgcctggaggctgcccgcctggtac

SEQ ID NO: 53900 - DNA, 26 bp, Homo sapiens
cgcctggaggctgcccgcctggtaca

SEQ ID NO: 53901 - DNA, 26 bp, Homo sapiens
gcctggaggctgcccgcctggtacag

SEQ ID NO: 53902 - DNA, 26 bp, Homo sapiens
cctggaggctgcccgcctggtacagg

SEQ ID NO: 53903 - DNA, 26 bp, Homo sapiens
ctggaggctgcccgcctggtacagga

SEQ ID NO: 53904 - DNA, 26 bp, Homo sapiens
tggaggctgcccgcctggtacaggac

SEQ ID NO: 53905 - DNA, 26 bp, Homo sapiens
ggaggctgcccgcctggtacaggacc

SEQ ID NO: 53906 - DNA, 26 bp, Homo sapiens
gaggctgcccgcctggtacaggacca

SEQ ID NO: 53907 - DNA, 26 bp, Homo sapiens
aggctgcccgcctggtacaggaccaa

SEQ ID NO: 53908 - DNA, 26 bp, Homo sapiens
ggctgcccgcctggtacaggaccaag

SEQ ID NO: 53909 - DNA, 26 bp, Homo sapiens
gctgcccgcctggtacaggaccaaga

SEQ ID NO: 53910 - DNA, 26 bp, Homo sapiens
ctgcccgcctggtacaggaccaagat

SEQ ID NO: 53911 - DNA, 26 bp, Homo sapiens
tgcccgcctggtacaggaccaagata

SEQ ID NO: 53912 - DNA, 26 bp, Homo sapiens
gcccgcctggtacaggaccaagatac

SEQ ID NO: 53913 - DNA, 26 bp, Homo sapiens
cccgcctggtacaggaccaagatact

SEQ ID NO: 53914 - DNA, 26 bp, Homo sapiens
ccgcctggtacaggaccaagatactg

SEQ ID NO: 53915 - DNA, 26 bp, Homo sapiens
cgcctggtacaggaccaagatactga

SEQ ID NO: 53916 - DNA, 26 bp, Homo sapiens
gcctggtacaggaccaagatactgag

SEQ ID NO: 53917 - DNA, 26 bp, Homo sapiens
cctggtacaggaccaagatactgaga

SEQ ID NO: 53918 - DNA, 26 bp, Homo sapiens
ctggtacaggaccaagatactgagag

SEQ ID NO: 53919 - DNA, 26 bp, Homo sapiens
tggtacaggaccaagatactgagagc

SEQ ID NO: 53920 - DNA, 26 bp, Homo sapiens
ggtacaggaccaagatactgagagcc

SEQ ID NO: 53921 - DNA, 26 bp, Homo sapiens
gtacaggaccaagatactgagagcca

SEQ ID NO: 53922 - DNA, 26 bp, Homo sapiens
tacaggaccaagatactgagagccag

SEQ ID NO: 53923 - DNA, 26 bp, Homo sapiens
acaggaccaagatactgagagccagg

SEQ ID NO: 53924 - DNA, 26 bp, Homo sapiens
caggaccaagatactgagagccagga

SEQ ID NO: 53925 - DNA, 26 bp, Homo sapiens
aggaccaagatactgagagccaggaa

SEQ ID NO: 53926 - DNA, 26 bp, Homo sapiens
ggaccaagatactgagagccaggaag

SEQ ID NO: 53927 - DNA, 26 bp, Homo sapiens
gaccaagatactgagagccaggaagg

SEQ ID NO: 53928 - DNA, 26 bp, Homo sapiens
accaagatactgagagccaggaaggg

SEQ ID NO: 53929 - DNA, 26 bp, Homo sapiens
ccaagatactgagagccaggaagggg

SEQ ID NO: 53930 - DNA, 26 bp, Homo sapiens
caagatactgagagccaggaaggggg

SEQ ID NO: 53931 - DNA, 26 bp, Homo sapiens
aagatactgagagccaggaaggggga

SEQ ID NO: 53932 - DNA, 26 bp, Homo sapiens
agatactgagagccaggaagggggag

SEQ ID NO: 53933 - DNA, 26 bp, Homo sapiens
gatactgagagccaggaagggggaga

SEQ ID NO: 53934 - DNA, 26 bp, Homo sapiens
atactgagagccaggaagggggagaa

SEQ ID NO: 53935 - DNA, 26 bp, Homo sapiens
tactgagagccaggaagggggagaac

SEQ ID NO: 53936 - DNA, 26 bp, Homo sapiens
actgagagccaggaagggggagaact

SEQ ID NO: 53937 - DNA, 26 bp, Homo sapiens
ctgagagccaggaagggggagaactt

SEQ ID NO: 53938 - DNA, 26 bp, Homo sapiens
tgagagccaggaagggggagaacttc

SEQ ID NO: 53939 - DNA, 26 bp, Homo sapiens
gagagccaggaagggggagaacttcc

SEQ ID NO: 53940 - DNA, 26 bp, Homo sapiens
agagccaggaagggggagaacttccg

SEQ ID NO: 53941 - DNA, 26 bp, Homo sapiens
gagccaggaagggggagaacttccgg

SEQ ID NO: 53942 - DNA, 26 bp, Homo sapiens
agccaggaagggggagaacttccgga

SEQ ID NO: 53943 - DNA, 26 bp, Homo sapiens
gccaggaagggggagaacttccggaa

SEQ ID NO: 53944 - DNA, 26 bp, Homo sapiens
ccaggaagggggagaacttccggaaa

SEQ ID NO: 53945 - DNA, 26 bp, Homo sapiens
caggaagggggagaacttccggaaac

SEQ ID NO: 53946 - DNA, 26 bp, Homo sapiens
aggaagggggagaacttccggaaacc

SEQ ID NO: 53947 - DNA, 26 bp, Homo sapiens
ggaagggggagaacttccggaaaccc

SEQ ID NO: 53948 - DNA, 26 bp, Homo sapiens
gaagggggagaacttccggaaaccca

SEQ ID NO: 53949 - DNA, 26 bp, Homo sapiens
aagggggagaacttccggaaacccat

SEQ ID NO: 53950 - DNA, 26 bp, Homo sapiens
agggggagaacttccggaaacccatg

SEQ ID NO: 53951 - DNA, 26 bp, Homo sapiens
gggggagaacttccggaaacccatgc

SEQ ID NO: 53952 - DNA, 26 bp, Homo sapiens
ggggagaacttccggaaacccatgcc

SEQ ID NO: 53953 - DNA, 26 bp, Homo sapiens
gggagaacttccggaaacccatgccg

SEQ ID NO: 53954 - DNA, 26 bp, Homo sapiens
ggagaacttccggaaacccatgccgc

SEQ ID NO: 53955 - DNA, 26 bp, Homo sapiens
gagaacttccggaaacccatgccgcc

SEQ ID NO: 53956 - DNA, 26 bp, Homo sapiens
agaacttccggaaacccatgccgcct

SEQ ID NO: 53957 - DNA, 26 bp, Homo sapiens
gaacttccggaaacccatgccgcctc

SEQ ID NO: 53958 - DNA, 26 bp, Homo sapiens
aacttccggaaacccatgccgcctct

SEQ ID NO: 53959 - DNA, 26 bp, Homo sapiens
acttccggaaacccatgccgcctctc

SEQ ID NO: 53960 - DNA, 26 bp, Homo sapiens
cttccggaaacccatgccgcctctct

SEQ ID NO: 53961 - DNA, 26 bp, Homo sapiens
ttccggaaacccatgccgcctctctg

SEQ ID NO: 53962 - DNA, 26 bp, Homo sapiens
tccggaaacccatgccgcctctctgg

SEQ ID NO: 53963 - DNA, 26 bp, Homo sapiens
ccggaaacccatgccgcctctctggc

SEQ ID NO: 53964 - DNA, 26 bp, Homo sapiens
cggaaacccatgccgcctctctggcg

SEQ ID NO: 53965 - DNA, 26 bp, Homo sapiens
ggaaacccatgccgcctctctggcga

SEQ ID NO: 53966 - DNA, 26 bp, Homo sapiens
gaaacccatgccgcctctctggcgac

SEQ ID NO: 53967 - DNA, 26 bp, Homo sapiens
aaacccatgccgcctctctggcgact

SEQ ID NO: 53968 - DNA, 26 bp, Homo sapiens
aacccatgccgcctctctggcgacta

SEQ ID NO: 53969 - DNA, 26 bp, Homo sapiens
acccatgccgcctctctggcgactag

SEQ ID NO: 53970 - DNA, 26 bp, Homo sapiens
cccatgccgcctctctggcgactaga

SEQ ID NO: 53971 - DNA, 26 bp, Homo sapiens
ccatgccgcctctctggcgactagag

SEQ ID NO: 53972 - DNA, 26 bp, Homo sapiens
catgccgcctctctggcgactagagt

SEQ ID NO: 53973 - DNA, 26 bp, Homo sapiens
atgccgcctctctggcgactagagtt

SEQ ID NO: 53974 - DNA, 26 bp, Homo sapiens
tgccgcctctctggcgactagagttt

SEQ ID NO: 53975 - DNA, 26 bp, Homo sapiens
gccgcctctctggcgactagagtttc

SEQ ID NO: 53976 - DNA, 26 bp, Homo sapiens
ccgcctctctggcgactagagtttca

SEQ ID NO: 53977 - DNA, 26 bp, Homo sapiens
cgcctctctggcgactagagtttcag

SEQ ID NO: 53978 - DNA, 26 bp, Homo sapiens
gcctctctggcgactagagtttcagg

SEQ ID NO: 53979 - DNA, 26 bp, Homo sapiens
cctctctggcgactagagtttcaggg

SEQ ID NO: 53980 - DNA, 26 bp, Homo sapiens
ctctctggcgactagagtttcagggc

SEQ ID NO: 53981 - DNA, 26 bp, Homo sapiens
tctctggcgactagagtttcagggca

SEQ ID NO: 53982 - DNA, 26 bp, Homo sapiens
ctctggcgactagagtttcagggcag

SEQ ID NO: 53983 - DNA, 26 bp, Homo sapiens
tctggcgactagagtttcagggcagc

SEQ ID NO: 53984 - DNA, 26 bp, Homo sapiens
ctggcgactagagtttcagggcagcg

SEQ ID NO: 53985 - DNA, 26 bp, Homo sapiens
tggcgactagagtttcagggcagcgc

SEQ ID NO: 53986 - DNA, 26 bp, Homo sapiens
ggcgactagagtttcagggcagcgcg

SEQ ID NO: 53987 - DNA, 26 bp, Homo sapiens
gcgactagagtttcagggcagcgcga

SEQ ID NO: 53988 - DNA, 26 bp, Homo sapiens
cgactagagtttcagggcagcgcgag

SEQ ID NO: 53989 - DNA, 26 bp, Homo sapiens
gactagagtttcagggcagcgcgagc

SEQ ID NO: 53990 - DNA, 26 bp, Homo sapiens
actagagtttcagggcagcgcgagcg

SEQ ID NO: 53991 - DNA, 26 bp, Homo sapiens
ctagagtttcagggcagcgcgagcgg

SEQ ID NO: 53992 - DNA, 26 bp, Homo sapiens
tagagtttcagggcagcgcgagcggc

SEQ ID NO: 53993 - DNA, 26 bp, Homo sapiens
agagtttcagggcagcgcgagcggcc

SEQ ID NO: 53994 - DNA, 26 bp, Homo sapiens
gagtttcagggcagcgcgagcggccg

SEQ ID NO: 53995 - DNA, 26 bp, Homo sapiens
agtttcagggcagcgcgagcggccgg

SEQ ID NO: 53996 - DNA, 26 bp, Homo sapiens
gtttcagggcagcgcgagcggccggt

SEQ ID NO: 53997 - DNA, 26 bp, Homo sapiens
tttcagggcagcgcgagcggccggtc

SEQ ID NO: 53998 - DNA, 26 bp, Homo sapiens
ttcagggcagcgcgagcggccggtcg

SEQ ID NO: 53999 - DNA, 26 bp, Homo sapiens
tcagggcagcgcgagcggccggtcga

SEQ ID NO: 54000 - DNA, 26 bp, Homo sapiens
cagggcagcgcgagcggccggtcgac

SEQ ID NO: 54001 - DNA, 26 bp, Homo sapiens
agggcagcgcgagcggccggtcgacc

SEQ ID NO: 54002 - DNA, 26 bp, Homo sapiens
gggcagcgcgagcggccggtcgaccc

SEQ ID NO: 54003 - DNA, 26 bp, Homo sapiens
ggcagcgcgagcggccggtcgacccg

SEQ ID NO: 54004 - DNA, 26 bp, Homo sapiens
gcagcgcgagcggccggtcgacccgg

SEQ ID NO: 54005 - DNA, 26 bp, Homo sapiens
cagcgcgagcggccggtcgacccggg

SEQ ID NO: 54006 - DNA, 26 bp, Homo sapiens
agcgcgagcggccggtcgacccggga

SEQ ID NO: 54007 - DNA, 26 bp, Homo sapiens
gcgcgagcggccggtcgacccgggat

SEQ ID NO: 54008 - DNA, 26 bp, Homo sapiens
cgcgagcggccggtcgacccgggatg

SEQ ID NO: 54009 - DNA, 26 bp, Homo sapiens
gcgagcggccggtcgacccgggatga

SEQ ID NO: 54010 - DNA, 26 bp, Homo sapiens
cgagcggccggtcgacccgggatgaa

SEQ ID NO: 54011 - DNA, 26 bp, Homo sapiens
gagcggccggtcgacccgggatgaac

SEQ ID NO: 54012 - DNA, 26 bp, Homo sapiens
agcggccggtcgacccgggatgaaca

SEQ ID NO: 54013 - DNA, 26 bp, Homo sapiens
gcggccggtcgacccgggatgaacac

SEQ ID NO: 54014 - DNA, 26 bp, Homo sapiens
cggccggtcgacccgggatgaacacc

SEQ ID NO: 54015 - DNA, 26 bp, Homo sapiens
ggccggtcgacccgggatgaacacca

SEQ ID NO: 54016 - DNA, 26 bp, Homo sapiens
gccggtcgacccgggatgaacaccac

SEQ ID NO: 54017 - DNA, 26 bp, Homo sapiens
ccggtcgacccgggatgaacaccaca

SEQ ID NO: 54018 - DNA, 26 bp, Homo sapiens
cggtcgacccgggatgaacaccacac

SEQ ID NO: 54019 - DNA, 26 bp, Homo sapiens
ggtcgacccgggatgaacaccacacc

SEQ ID NO: 54020 - DNA, 26 bp, Homo sapiens
gtcgacccgggatgaacaccacacct

SEQ ID NO: 54021 - DNA, 26 bp, Homo sapiens
tcgacccgggatgaacaccacacctg

SEQ ID NO: 54022 - DNA, 26 bp, Homo sapiens
cgacccgggatgaacaccacacctgc

SEQ ID NO: 54023 - DNA, 26 bp, Homo sapiens
gacccgggatgaacaccacacctgct

SEQ ID NO: 54024 - DNA, 26 bp, Homo sapiens
acccgggatgaacaccacacctgctg

SEQ ID NO: 54025 - DNA, 26 bp, Homo sapiens
cccgggatgaacaccacacctgctgt

SEQ ID NO: 54026 - DNA, 26 bp, Homo sapiens
ccgggatgaacaccacacctgctgtg

SEQ ID NO: 54027 - DNA, 26 bp, Homo sapiens
cgggatgaacaccacacctgctgtgg

SEQ ID NO: 54028 - DNA, 26 bp, Homo sapiens
taacagtacaaagtttgaaaatttta

SEQ ID NO: 54029 - DNA, 26 bp, Homo sapiens
aacagtacaaagtttgaaaattttat

SEQ ID NO: 54030 - DNA, 26 bp, Homo sapiens
acagtacaaagtttgaaaattttatt

SEQ ID NO: 54031 - DNA, 26 bp, Homo sapiens
cagtacaaagtttgaaaattttattg

SEQ ID NO: 54032 - DNA, 26 bp, Homo sapiens
agtacaaagtttgaaaattttattgg

SEQ ID NO: 54033 - DNA, 26 bp, Homo sapiens
gtacaaagtttgaaaattttattgga

SEQ ID NO: 54034 - DNA, 26 bp, Homo sapiens
tacaaagtttgaaaattttattggaa

SEQ ID NO: 54035 - DNA, 26 bp, Homo sapiens
acaaagtttgaaaattttattggaaa

SEQ ID NO: 54036 - DNA, 26 bp, Homo sapiens
caaagtttgaaaattttattggaaaa

SEQ ID NO: 54037 - DNA, 26 bp, Homo sapiens
aaagtttgaaaattttattggaaaat

SEQ ID NO: 54038 - DNA, 26 bp, Homo sapiens
aagtttgaaaattttattggaaaata

SEQ ID NO: 54039 - DNA, 26 bp, Homo sapiens
agtttgaaaattttattggaaaataa

SEQ ID NO: 54040 - DNA, 26 bp, Homo sapiens
gtttgaaaattttattggaaaataag

SEQ ID NO: 54041 - DNA, 26 bp, Homo sapiens
tttgaaaattttattggaaaataagt

SEQ ID NO: 54042 - DNA, 26 bp, Homo sapiens
ttgaaaattttattggaaaataagta

SEQ ID NO: 54043 - DNA, 26 bp, Homo sapiens
tgaaaattttattggaaaataagtac

SEQ ID NO: 54044 - DNA, 26 bp, Homo sapiens
gaaaattttattggaaaataagtaca

SEQ ID NO: 54045 - DNA, 26 bp, Homo sapiens
aaaattttattggaaaataagtacag

SEQ ID NO: 54046 - DNA, 26 bp, Homo sapiens
aaattttattggaaaataagtacagt

SEQ ID NO: 54047 - DNA, 26 bp, Homo sapiens
aattttattggaaaataagtacagtc

SEQ ID NO: 54048 - DNA, 26 bp, Homo sapiens
attttattggaaaataagtacagtct

SEQ ID NO: 54049 - DNA, 26 bp, Homo sapiens
ttttattggaaaataagtacagtcta

SEQ ID NO: 54050 - DNA, 26 bp, Homo sapiens
tttattggaaaataagtacagtctat

SEQ ID NO: 54051 - DNA, 26 bp, Homo sapiens
ttattggaaaataagtacagtctatt

SEQ ID NO: 54052 - DNA, 26 bp, Homo sapiens
tattggaaaataagtacagtctattg

SEQ ID NO: 54053 - DNA, 26 bp, Homo sapiens
attggaaaataagtacagtctattga

SEQ ID NO: 54054 - DNA, 26 bp, Homo sapiens
ttggaaaataagtacagtctattgat

SEQ ID NO: 54055 - DNA, 26 bp, Homo sapiens
tggaaaataagtacagtctattgatc

SEQ ID NO: 54056 - DNA, 26 bp, Homo sapiens
ggaaaataagtacagtctattgatcc

SEQ ID NO: 54057 - DNA, 26 bp, Homo sapiens
gaaaataagtacagtctattgatccg

SEQ ID NO: 54058 - DNA, 26 bp, Homo sapiens
aaaataagtacagtctattgatccgt

SEQ ID NO: 54059 - DNA, 26 bp, Homo sapiens
aaataagtacagtctattgatccgtg

SEQ ID NO: 54060 - DNA, 26 bp, Homo sapiens
aataagtacagtctattgatccgtga

SEQ ID NO: 54061 - DNA, 26 bp, Homo sapiens
ataagtacagtctattgatccgtgat

SEQ ID NO: 54062 - DNA, 26 bp, Homo sapiens
taagtacagtctattgatccgtgatg

SEQ ID NO: 54063 - DNA, 26 bp, Homo sapiens
aagtacagtctattgatccgtgatgc

SEQ ID NO: 54064 - DNA, 26 bp, Homo sapiens
agtacagtctattgatccgtgatgca

SEQ ID NO: 54065 - DNA, 26 bp, Homo sapiens
gtacagtctattgatccgtgatgcat

SEQ ID NO: 54066 - DNA, 26 bp, Homo sapiens
tacagtctattgatccgtgatgcatg

SEQ ID NO: 54067 - DNA, 26 bp, Homo sapiens
acagtctattgatccgtgatgcatgc

SEQ ID NO: 54068 - DNA, 26 bp, Homo sapiens
cagtctattgatccgtgatgcatgct

SEQ ID NO: 54069 - DNA, 26 bp, Homo sapiens
agtctattgatccgtgatgcatgctg

SEQ ID NO: 54070 - DNA, 26 bp, Homo sapiens
gtctattgatccgtgatgcatgctgt

SEQ ID NO: 54071 - DNA, 26 bp, Homo sapiens
tctattgatccgtgatgcatgctgta

SEQ ID NO: 54072 - DNA, 26 bp, Homo sapiens
ctattgatccgtgatgcatgctgtac

SEQ ID NO: 54073 - DNA, 26 bp, Homo sapiens
tattgatccgtgatgcatgctgtaca

SEQ ID NO: 54074 - DNA, 26 bp, Homo sapiens
attgatccgtgatgcatgctgtacat

SEQ ID NO: 54075 - DNA, 26 bp, Homo sapiens
ttgatccgtgatgcatgctgtacatg

SEQ ID NO: 54076 - DNA, 26 bp, Homo sapiens
tgatccgtgatgcatgctgtacatga

SEQ ID NO: 54077 - DNA, 26 bp, Homo sapiens
gatccgtgatgcatgctgtacatgaa

SEQ ID NO: 54078 - DNA, 26 bp, Homo sapiens
atccgtgatgcatgctgtacatgaat

SEQ ID NO: 54079 - DNA, 26 bp, Homo sapiens
tccgtgatgcatgctgtacatgaatt

SEQ ID NO: 54080 - DNA, 26 bp, Homo sapiens
ccgtgatgcatgctgtacatgaattt

SEQ ID NO: 54081 - DNA, 26 bp, Homo sapiens
cgtgatgcatgctgtacatgaatttg

SEQ ID NO: 54082 - DNA, 26 bp, Homo sapiens
gtgatgcatgctgtacatgaatttgg

SEQ ID NO: 54083 - DNA, 26 bp, Homo sapiens
tgatgcatgctgtacatgaatttggt

SEQ ID NO: 54084 - DNA, 26 bp, Homo sapiens
gatgcatgctgtacatgaatttggtg

SEQ ID NO: 54085 - DNA, 26 bp, Homo sapiens
atgcatgctgtacatgaatttggtgc

SEQ ID NO: 54086 - DNA, 26 bp, Homo sapiens
tgcatgctgtacatgaatttggtgct

SEQ ID NO: 54087 - DNA, 26 bp, Homo sapiens
gcatgctgtacatgaatttggtgctt

SEQ ID NO: 54088 - DNA, 26 bp, Homo sapiens
catgctgtacatgaatttggtgcttt

SEQ ID NO: 54089 - DNA, 26 bp, Homo sapiens
atgctgtacatgaatttggtgcttta

SEQ ID NO: 54090 - DNA, 26 bp, Homo sapiens
tgctgtacatgaatttggtgctttaa

SEQ ID NO: 54091 - DNA, 26 bp, Homo sapiens
gctgtacatgaatttggtgctttaat

SEQ ID NO: 54092 - DNA, 26 bp, Homo sapiens
ctgtacatgaatttggtgctttaata

SEQ ID NO: 54093 - DNA, 26 bp, Homo sapiens
tgtacatgaatttggtgctttaatat

SEQ ID NO: 54094 - DNA, 26 bp, Homo sapiens
gtacatgaatttggtgctttaatata

SEQ ID NO: 54095 - DNA, 26 bp, Homo sapiens
tacatgaatttggtgctttaatatac

SEQ ID NO: 54096 - DNA, 26 bp, Homo sapiens
acatgaatttggtgctttaatataca

SEQ ID NO: 54097 - DNA, 26 bp, Homo sapiens
catgaatttggtgctttaatatacaa

SEQ ID NO: 54098 - DNA, 26 bp, Homo sapiens
atgaatttggtgctttaatatacaaa

SEQ ID NO: 54099 - DNA, 26 bp, Homo sapiens
tgaatttggtgctttaatatacaaaa

SEQ ID NO: 54100 - DNA, 26 bp, Homo sapiens
gaatttggtgctttaatatacaaaaa

SEQ ID NO: 54101 - DNA, 26 bp, Homo sapiens
aatttggtgctttaatatacaaaaaa

SEQ ID NO: 54102 - DNA, 26 bp, Homo sapiens
atttggtgctttaatatacaaaaaat

SEQ ID NO: 54103 - DNA, 26 bp, Homo sapiens
tttggtgctttaatatacaaaaaatt

SEQ ID NO: 54104 - DNA, 26 bp, Homo sapiens
ttggtgctttaatatacaaaaaattt

SEQ ID NO: 54105 - DNA, 26 bp, Homo sapiens
tggtgctttaatatacaaaaaatttg

SEQ ID NO: 54106 - DNA, 26 bp, Homo sapiens
ggtgctttaatatacaaaaaatttgg

SEQ ID NO: 54107 - DNA, 26 bp, Homo sapiens
gtgctttaatatacaaaaaatttggc

SEQ ID NO: 54108 - DNA, 26 bp, Homo sapiens
tgctttaatatacaaaaaatttggct

SEQ ID NO: 54109 - DNA, 26 bp, Homo sapiens
gctttaatatacaaaaaatttggctt

SEQ ID NO: 54110 - DNA, 26 bp, Homo sapiens
ctttaatatacaaaaaatttggcttc

SEQ ID NO: 54111 - DNA, 26 bp, Homo sapiens
tttaatatacaaaaaatttggcttct

SEQ ID NO: 54112 - DNA, 26 bp, Homo sapiens
ttaatatacaaaaaatttggcttctg

SEQ ID NO: 54113 - DNA, 26 bp, Homo sapiens
taatatacaaaaaatttggcttctgc

SEQ ID NO: 54114 - DNA, 26 bp, Homo sapiens
aatatacaaaaaatttggcttctgct

SEQ ID NO: 54115 - DNA, 26 bp, Homo sapiens
atatacaaaaaatttggcttctgctg

SEQ ID NO: 54116 - DNA, 26 bp, Homo sapiens
tatacaaaaaatttggcttctgctgc

SEQ ID NO: 54117 - DNA, 26 bp, Homo sapiens
atacaaaaaatttggcttctgctgca

SEQ ID NO: 54118 - DNA, 26 bp, Homo sapiens
tacaaaaaatttggcttctgctgcaa

SEQ ID NO: 54119 - DNA, 26 bp, Homo sapiens
acaaaaaatttggcttctgctgcaaa

SEQ ID NO: 54120 - DNA, 26 bp, Homo sapiens
caaaaaatttggcttctgctgcaaaa

SEQ ID NO: 54121 - DNA, 26 bp, Homo sapiens
aaaaaatttggcttctgctgcaaaat

SEQ ID NO: 54122 - DNA, 26 bp, Homo sapiens
aaaaatttggcttctgctgcaaaatt

SEQ ID NO: 54123 - DNA, 26 bp, Homo sapiens
aaaatttggcttctgctgcaaaatta

SEQ ID NO: 54124 - DNA, 26 bp, Homo sapiens
aaatttggcttctgctgcaaaattat

SEQ ID NO: 54125 - DNA, 26 bp, Homo sapiens
aatttggcttctgctgcaaaattata

SEQ ID NO: 54126 - DNA, 26 bp, Homo sapiens
atttggcttctgctgcaaaattatat

SEQ ID NO: 54127 - DNA, 26 bp, Homo sapiens
tttggcttctgctgcaaaattatata

SEQ ID NO: 54128 - DNA, 26 bp, Homo sapiens
ttggcttctgctgcaaaattatataa

SEQ ID NO: 54129 - DNA, 26 bp, Homo sapiens
tggcttctgctgcaaaattatataaa

SEQ ID NO: 54130 - DNA, 26 bp, Homo sapiens
ggcttctgctgcaaaattatataaac

SEQ ID NO: 54131 - DNA, 26 bp, Homo sapiens
gcttctgctgcaaaattatataaaca

SEQ ID NO: 54132 - DNA, 26 bp, Homo sapiens
cttctgctgcaaaattatataaacag

SEQ ID NO: 54133 - DNA, 26 bp, Homo sapiens
ttctgctgcaaaattatataaacagg

SEQ ID NO: 54134 - DNA, 26 bp, Homo sapiens
tctgctgcaaaattatataaacaggt

SEQ ID NO: 54135 - DNA, 26 bp, Homo sapiens
ctgctgcaaaattatataaacaggtt

SEQ ID NO: 54136 - DNA, 26 bp, Homo sapiens
tgctgcaaaattatataaacaggtta

SEQ ID NO: 54137 - DNA, 26 bp, Homo sapiens
gctgcaaaattatataaacaggttaa

SEQ ID NO: 54138 - DNA, 26 bp, Homo sapiens
ctgcaaaattatataaacaggttaaa

SEQ ID NO: 54139 - DNA, 26 bp, Homo sapiens
tgcaaaattatataaacaggttaaaa

SEQ ID NO: 54140 - DNA, 26 bp, Homo sapiens
gcaaaattatataaacaggttaaaaa

SEQ ID NO: 54141 - DNA, 26 bp, Homo sapiens
caaaattatataaacaggttaaaaaa

SEQ ID NO: 54142 - DNA, 26 bp, Homo sapiens
aaaattatataaacaggttaaaaaaa

SEQ ID NO: 54143 - DNA, 26 bp, Homo sapiens
aaattatataaacaggttaaaaaaaa

SEQ ID NO: 54144 - DNA, 26 bp, Homo sapiens
aattatataaacaggttaaaaaaaac

SEQ ID NO: 54145 - DNA, 26 bp, Homo sapiens
attatataaacaggttaaaaaaaact

SEQ ID NO: 54146 - DNA, 26 bp, Homo sapiens
ttatataaacaggttaaaaaaaactc

SEQ ID NO: 54147 - DNA, 26 bp, Homo sapiens
tatataaacaggttaaaaaaaactcc

SEQ ID NO: 54148 - DNA, 26 bp, Homo sapiens
atataaacaggttaaaaaaaactcct

SEQ ID NO: 54149 - DNA, 26 bp, Homo sapiens
tataaacaggttaaaaaaaactcctt

SEQ ID NO: 54150 - DNA, 26 bp, Homo sapiens
ataaacaggttaaaaaaaactccttc

SEQ ID NO: 54151 - DNA, 26 bp, Homo sapiens
taaacaggttaaaaaaaactccttca

SEQ ID NO: 54152 - DNA, 26 bp, Homo sapiens
aaacaggttaaaaaaaactccttcat

SEQ ID NO: 54153 - DNA, 26 bp, Homo sapiens
aacaggttaaaaaaaactccttcatc

SEQ ID NO: 54154 - DNA, 26 bp, Homo sapiens
acaggttaaaaaaaactccttcatca

SEQ ID NO: 54155 - DNA, 26 bp, Homo sapiens
caggttaaaaaaaactccttcatcaa

SEQ ID NO: 54156 - DNA, 26 bp, Homo sapiens
aggttaaaaaaaactccttcatcaac

SEQ ID NO: 54157 - DNA, 26 bp, Homo sapiens
ggttaaaaaaaactccttcatcaact

SEQ ID NO: 54158 - DNA, 26 bp, Homo sapiens
gttaaaaaaaactccttcatcaacta

SEQ ID NO: 54159 - DNA, 26 bp, Homo sapiens
ttaaaaaaaactccttcatcaactag

SEQ ID NO: 54160 - DNA, 26 bp, Homo sapiens
taaaaaaaactccttcatcaactagt

SEQ ID NO: 54161 - DNA, 26 bp, Homo sapiens
aaaaaaaactccttcatcaactagta

SEQ ID NO: 54162 - DNA, 26 bp, Homo sapiens
aaaaaaactccttcatcaactagtac

SEQ ID NO: 54163 - DNA, 26 bp, Homo sapiens
aaaaaactccttcatcaactagtaca

SEQ ID NO: 54164 - DNA, 26 bp, Homo sapiens
aaaaactccttcatcaactagtacaa

SEQ ID NO: 54165 - DNA, 26 bp, Homo sapiens
aaaactccttcatcaactagtacaaa

SEQ ID NO: 54166 - DNA, 26 bp, Homo sapiens
aaactccttcatcaactagtacaaac

SEQ ID NO: 54167 - DNA, 26 bp, Homo sapiens
aactccttcatcaactagtacaaaca

SEQ ID NO: 54168 - DNA, 26 bp, Homo sapiens
actccttcatcaactagtacaaacat

SEQ ID NO: 54169 - DNA, 26 bp, Homo sapiens
ctccttcatcaactagtacaaacata

SEQ ID NO: 54170 - DNA, 26 bp, Homo sapiens
tccttcatcaactagtacaaacataa

SEQ ID NO: 54171 - DNA, 26 bp, Homo sapiens
ccttcatcaactagtacaaacataat

SEQ ID NO: 54172 - DNA, 26 bp, Homo sapiens
cttcatcaactagtacaaacataatt

SEQ ID NO: 54173 - DNA, 26 bp, Homo sapiens
ttcatcaactagtacaaacataattt

SEQ ID NO: 54174 - DNA, 26 bp, Homo sapiens
tcatcaactagtacaaacataattta

SEQ ID NO: 54175 - DNA, 26 bp, Homo sapiens
catcaactagtacaaacataatttat

SEQ ID NO: 54176 - DNA, 26 bp, Homo sapiens
atcaactagtacaaacataatttatc

SEQ ID NO: 54177 - DNA, 26 bp, Homo sapiens
tcaactagtacaaacataatttatca

SEQ ID NO: 54178 - DNA, 26 bp, Homo sapiens
caactagtacaaacataatttatcaa

SEQ ID NO: 54179 - DNA, 26 bp, Homo sapiens
aactagtacaaacataatttatcaaa

SEQ ID NO: 54180 - DNA, 26 bp, Homo sapiens
actagtacaaacataatttatcaaaa

SEQ ID NO: 54181 - DNA, 26 bp, Homo sapiens
ctagtacaaacataatttatcaaaaa

SEQ ID NO: 54182 - DNA, 26 bp, Homo sapiens
tagtacaaacataatttatcaaaaat

SEQ ID NO: 54183 - DNA, 26 bp, Homo sapiens
agtacaaacataatttatcaaaaatg

SEQ ID NO: 54184 - DNA, 26 bp, Homo sapiens
gtacaaacataatttatcaaaaatgt

SEQ ID NO: 54185 - DNA, 26 bp, Homo sapiens
tacaaacataatttatcaaaaatgtc

SEQ ID NO: 54186 - DNA, 26 bp, Homo sapiens
acaaacataatttatcaaaaatgtca

SEQ ID NO: 54187 - DNA, 26 bp, Homo sapiens
caaacataatttatcaaaaatgtcat

SEQ ID NO: 54188 - DNA, 26 bp, Homo sapiens
aaacataatttatcaaaaatgtcatt

SEQ ID NO: 54189 - DNA, 26 bp, Homo sapiens
aacataatttatcaaaaatgtcattt

SEQ ID NO: 54190 - DNA, 26 bp, Homo sapiens
acataatttatcaaaaatgtcattta

SEQ ID NO: 54191 - DNA, 26 bp, Homo sapiens
cataatttatcaaaaatgtcatttaa

SEQ ID NO: 54192 - DNA, 26 bp, Homo sapiens
ataatttatcaaaaatgtcatttaaa

SEQ ID NO: 54193 - DNA, 26 bp, Homo sapiens
taatttatcaaaaatgtcatttaaaa

SEQ ID NO: 54194 - DNA, 26 bp, Homo sapiens
aatttatcaaaaatgtcatttaaaaa

SEQ ID NO: 54195 - DNA, 26 bp, Homo sapiens
atttatcaaaaatgtcatttaaaaaa

SEQ ID NO: 54196 - DNA, 26 bp, Homo sapiens
tttatcaaaaatgtcatttaaaaaat

SEQ ID NO: 54197 - DNA, 26 bp, Homo sapiens
ttatcaaaaatgtcatttaaaaaatg

SEQ ID NO: 54198 - DNA, 26 bp, Homo sapiens
tatcaaaaatgtcatttaaaaaatgg

SEQ ID NO: 54199 - DNA, 26 bp, Homo sapiens
atcaaaaatgtcatttaaaaaatggc

SEQ ID NO: 54200 - DNA, 26 bp, Homo sapiens
tcaaaaatgtcatttaaaaaatggct

SEQ ID NO: 54201 - DNA, 26 bp, Homo sapiens
caaaaatgtcatttaaaaaatggctc

SEQ ID NO: 54202 - DNA, 26 bp, Homo sapiens
aaaaatgtcatttaaaaaatggctca

SEQ ID NO: 54203 - DNA, 26 bp, Homo sapiens
aaaatgtcatttaaaaaatggctcaa

SEQ ID NO: 54204 - DNA, 26 bp, Homo sapiens
aaatgtcatttaaaaaatggctcaat

SEQ ID NO: 54205 - DNA, 26 bp, Homo sapiens
aatgtcatttaaaaaatggctcaata

SEQ ID NO: 54206 - DNA, 26 bp, Homo sapiens
atgtcatttaaaaaatggctcaatac

SEQ ID NO: 54207 - DNA, 26 bp, Homo sapiens
tgtcatttaaaaaatggctcaatacc

SEQ ID NO: 54208 - DNA, 26 bp, Homo sapiens
gtcatttaaaaaatggctcaatacct

SEQ ID NO: 54209 - DNA, 26 bp, Homo sapiens
tcatttaaaaaatggctcaatacctt

SEQ ID NO: 54210 - DNA, 26 bp, Homo sapiens
catttaaaaaatggctcaataccttt

SEQ ID NO: 54211 - DNA, 26 bp, Homo sapiens
atttaaaaaatggctcaatacctttt

SEQ ID NO: 54212 - DNA, 26 bp, Homo sapiens
tttaaaaaatggctcaatacctttta

SEQ ID NO: 54213 - DNA, 26 bp, Homo sapiens
ttaaaaaatggctcaataccttttat

SEQ ID NO: 54214 - DNA, 26 bp, Homo sapiens
taaaaaatggctcaataccttttatt

SEQ ID NO: 54215 - DNA, 26 bp, Homo sapiens
aaaaaatggctcaataccttttattg

SEQ ID NO: 54216 - DNA, 26 bp, Homo sapiens
aaaaatggctcaataccttttattgc

SEQ ID NO: 54217 - DNA, 26 bp, Homo sapiens
aaaatggctcaataccttttattgca

SEQ ID NO: 54218 - DNA, 26 bp, Homo sapiens
aaatggctcaataccttttattgcaa

SEQ ID NO: 54219 - DNA, 26 bp, Homo sapiens
aatggctcaataccttttattgcaaa

SEQ ID NO: 54220 - DNA, 26 bp, Homo sapiens
atggctcaataccttttattgcaaat

SEQ ID NO: 54221 - DNA, 26 bp, Homo sapiens
tggctcaataccttttattgcaaata

SEQ ID NO: 54222 - DNA, 26 bp, Homo sapiens
ggctcaataccttttattgcaaataa

SEQ ID NO: 54223 - DNA, 26 bp, Homo sapiens
gctcaataccttttattgcaaataag

SEQ ID NO: 54224 - DNA, 26 bp, Homo sapiens
ctcaataccttttattgcaaataaga

SEQ ID NO: 54225 - DNA, 26 bp, Homo sapiens
tcaataccttttattgcaaataagaa

SEQ ID NO: 54226 - DNA, 26 bp, Homo sapiens
caataccttttattgcaaataagaaa

SEQ ID NO: 54227 - DNA, 26 bp, Homo sapiens
aataccttttattgcaaataagaaag

SEQ ID NO: 54228 - DNA, 26 bp, Homo sapiens
ataccttttattgcaaataagaaagg

SEQ ID NO: 54229 - DNA, 26 bp, Homo sapiens
taccttttattgcaaataagaaaggc

SEQ ID NO: 54230 - DNA, 26 bp, Homo sapiens
accttttattgcaaataagaaaggca

SEQ ID NO: 54231 - DNA, 26 bp, Homo sapiens
ccttttattgcaaataagaaaggcaa

SEQ ID NO: 54232 - DNA, 26 bp, Homo sapiens
cttttattgcaaataagaaaggcaag

SEQ ID NO: 54233 - DNA, 26 bp, Homo sapiens
ttttattgcaaataagaaaggcaaga

SEQ ID NO: 54234 - DNA, 26 bp, Homo sapiens
tttattgcaaataagaaaggcaagag

SEQ ID NO: 54235 - DNA, 26 bp, Homo sapiens
ttattgcaaataagaaaggcaagaga

SEQ ID NO: 54236 - DNA, 26 bp, Homo sapiens
tattgcaaataagaaaggcaagagag

SEQ ID NO: 54237 - DNA, 26 bp, Homo sapiens
attgcaaataagaaaggcaagagagg

SEQ ID NO: 54238 - DNA, 26 bp, Homo sapiens
ttgcaaataagaaaggcaagagaggg

SEQ ID NO: 54239 - DNA, 26 bp, Homo sapiens
tgcaaataagaaaggcaagagaggga

SEQ ID NO: 54240 - DNA, 26 bp, Homo sapiens
gcaaataagaaaggcaagagagggaa

SEQ ID NO: 54241 - DNA, 26 bp, Homo sapiens
caaataagaaaggcaagagagggaaa

SEQ ID NO: 54242 - DNA, 26 bp, Homo sapiens
aaataagaaaggcaagagagggaaaa

SEQ ID NO: 54243 - DNA, 26 bp, Homo sapiens
aataagaaaggcaagagagggaaaat

SEQ ID NO: 54244 - DNA, 26 bp, Homo sapiens
ataagaaaggcaagagagggaaaata

SEQ ID NO: 54245 - DNA, 26 bp, Homo sapiens
taagaaaggcaagagagggaaaatat

SEQ ID NO: 54246 - DNA, 26 bp, Homo sapiens
aagaaaggcaagagagggaaaatata

SEQ ID NO: 54247 - DNA, 26 bp, Homo sapiens
agaaaggcaagagagggaaaatataa

SEQ ID NO: 54248 - DNA, 26 bp, Homo sapiens
gaaaggcaagagagggaaaatataaa

SEQ ID NO: 54249 - DNA, 26 bp, Homo sapiens
aaaggcaagagagggaaaatataaat

SEQ ID NO: 54250 - DNA, 26 bp, Homo sapiens
aaggcaagagagggaaaatataaatt

SEQ ID NO: 54251 - DNA, 26 bp, Homo sapiens
aggcaagagagggaaaatataaattg

SEQ ID NO: 54252 - DNA, 26 bp, Homo sapiens
ggcaagagagggaaaatataaattgt

SEQ ID NO: 54253 - DNA, 26 bp, Homo sapiens
gcaagagagggaaaatataaattgtg

SEQ ID NO: 54254 - DNA, 26 bp, Homo sapiens
caagagagggaaaatataaattgtgc

SEQ ID NO: 54255 - DNA, 26 bp, Homo sapiens
aagagagggaaaatataaattgtgct

SEQ ID NO: 54256 - DNA, 26 bp, Homo sapiens
agagagggaaaatataaattgtgcta

SEQ ID NO: 54257 - DNA, 26 bp, Homo sapiens
gagagggaaaatataaattgtgctaa

SEQ ID NO: 54258 - DNA, 26 bp, Homo sapiens
agagggaaaatataaattgtgctaaa

SEQ ID NO: 54259 - DNA, 26 bp, Homo sapiens
gagggaaaatataaattgtgctaaac

SEQ ID NO: 54260 - DNA, 26 bp, Homo sapiens
agggaaaatataaattgtgctaaacc

SEQ ID NO: 54261 - DNA, 26 bp, Homo sapiens
gggaaaatataaattgtgctaaacca

SEQ ID NO: 54262 - DNA, 26 bp, Homo sapiens
ggaaaatataaattgtgctaaaccag

SEQ ID NO: 54263 - DNA, 26 bp, Homo sapiens
gaaaatataaattgtgctaaaccagt

SEQ ID NO: 54264 - DNA, 26 bp, Homo sapiens
aaaatataaattgtgctaaaccagtt

SEQ ID NO: 54265 - DNA, 26 bp, Homo sapiens
aaatataaattgtgctaaaccagttt

SEQ ID NO: 54266 - DNA, 26 bp, Homo sapiens
aatataaattgtgctaaaccagtttt

SEQ ID NO: 54267 - DNA, 26 bp, Homo sapiens
atataaattgtgctaaaccagtttta

SEQ ID NO: 54268 - DNA, 26 bp, Homo sapiens
tataaattgtgctaaaccagttttaa

SEQ ID NO: 54269 - DNA, 26 bp, Homo sapiens
ataaattgtgctaaaccagttttaac

SEQ ID NO: 54270 - DNA, 26 bp, Homo sapiens
taaattgtgctaaaccagttttaaca

SEQ ID NO: 54271 - DNA, 26 bp, Homo sapiens
aaattgtgctaaaccagttttaacaa

SEQ ID NO: 54272 - DNA, 26 bp, Homo sapiens
aattgtgctaaaccagttttaacaac

SEQ ID NO: 54273 - DNA, 26 bp, Homo sapiens
attgtgctaaaccagttttaacaacc

SEQ ID NO: 54274 - DNA, 26 bp, Homo sapiens
ttgtgctaaaccagttttaacaaccg

SEQ ID NO: 54275 - DNA, 26 bp, Homo sapiens
tgtgctaaaccagttttaacaaccgg

SEQ ID NO: 54276 - DNA, 26 bp, Homo sapiens
gtgctaaaccagttttaacaaccggt

SEQ ID NO: 54277 - DNA, 26 bp, Homo sapiens
tgctaaaccagttttaacaaccggta

SEQ ID NO: 54278 - DNA, 26 bp, Homo sapiens
gctaaaccagttttaacaaccggtaa

SEQ ID NO: 54279 - DNA, 26 bp, Homo sapiens
ctaaaccagttttaacaaccggtaat

SEQ ID NO: 54280 - DNA, 26 bp, Homo sapiens
taaaccagttttaacaaccggtaatt

SEQ ID NO: 54281 - DNA, 26 bp, Homo sapiens
aaaccagttttaacaaccggtaatta

SEQ ID NO: 54282 - DNA, 26 bp, Homo sapiens
aaccagttttaacaaccggtaattaa

SEQ ID NO: 54283 - DNA, 26 bp, Homo sapiens
accagttttaacaaccggtaattaaa

SEQ ID NO: 54284 - DNA, 26 bp, Homo sapiens
ccagttttaacaaccggtaattaaat

SEQ ID NO: 54285 - DNA, 26 bp, Homo sapiens
cagttttaacaaccggtaattaaata

SEQ ID NO: 54286 - DNA, 26 bp, Homo sapiens
agttttaacaaccggtaattaaatat

SEQ ID NO: 54287 - DNA, 26 bp, Homo sapiens
gttttaacaaccggtaattaaatatt

SEQ ID NO: 54288 - DNA, 26 bp, Homo sapiens
ttttaacaaccggtaattaaatattt

SEQ ID NO: 54289 - DNA, 26 bp, Homo sapiens
tttaacaaccggtaattaaatatttt

SEQ ID NO: 54290 - DNA, 26 bp, Homo sapiens
ttaacaaccggtaattaaatattttg

SEQ ID NO: 54291 - DNA, 26 bp, Homo sapiens
taacaaccggtaattaaatattttgt

SEQ ID NO: 54292 - DNA, 26 bp, Homo sapiens
aacaaccggtaattaaatattttgtt

SEQ ID NO: 54293 - DNA, 26 bp, Homo sapiens
acaaccggtaattaaatattttgttg

SEQ ID NO: 54294 - DNA, 26 bp, Homo sapiens
caaccggtaattaaatattttgttgc

SEQ ID NO: 54295 - DNA, 26 bp, Homo sapiens
aaccggtaattaaatattttgttgca

SEQ ID NO: 54296 - DNA, 26 bp, Homo sapiens
accggtaattaaatattttgttgcat

SEQ ID NO: 54297 - DNA, 26 bp, Homo sapiens
ccggtaattaaatattttgttgcatt

SEQ ID NO: 54298 - DNA, 26 bp, Homo sapiens
cggtaattaaatattttgttgcattt

SEQ ID NO: 54299 - DNA, 26 bp, Homo sapiens
ggtaattaaatattttgttgcatttg

SEQ ID NO: 54300 - DNA, 26 bp, Homo sapiens
gtaattaaatattttgttgcatttgc

SEQ ID NO: 54301 - DNA, 26 bp, Homo sapiens
taattaaatattttgttgcatttgca

SEQ ID NO: 54302 - DNA, 26 bp, Homo sapiens
aattaaatattttgttgcatttgcaa

SEQ ID NO: 54303 - DNA, 26 bp, Homo sapiens
attaaatattttgttgcatttgcaaa

SEQ ID NO: 54304 - DNA, 26 bp, Homo sapiens
ttaaatattttgttgcatttgcaaac

SEQ ID NO: 54305 - DNA, 26 bp, Homo sapiens
taaatattttgttgcatttgcaaact

SEQ ID NO: 54306 - DNA, 26 bp, Homo sapiens
aaatattttgttgcatttgcaaactc

SEQ ID NO: 54307 - DNA, 26 bp, Homo sapiens
aatattttgttgcatttgcaaactct

SEQ ID NO: 54308 - DNA, 26 bp, Homo sapiens
atattttgttgcatttgcaaactctt

SEQ ID NO: 54309 - DNA, 26 bp, Homo sapiens
tattttgttgcatttgcaaactcttc

SEQ ID NO: 54310 - DNA, 26 bp, Homo sapiens
attttgttgcatttgcaaactcttct

SEQ ID NO: 54311 - DNA, 26 bp, Homo sapiens
ttttgttgcatttgcaaactcttctt

SEQ ID NO: 54312 - DNA, 26 bp, Homo sapiens
tttgttgcatttgcaaactcttcttc

SEQ ID NO: 54313 - DNA, 26 bp, Homo sapiens
ttgttgcatttgcaaactcttcttca

SEQ ID NO: 54314 - DNA, 26 bp, Homo sapiens
tgttgcatttgcaaactcttcttcaa

SEQ ID NO: 54315 - DNA, 26 bp, Homo sapiens
gttgcatttgcaaactcttcttcaac

SEQ ID NO: 54316 - DNA, 26 bp, Homo sapiens
ttgcatttgcaaactcttcttcaaca

SEQ ID NO: 54317 - DNA, 26 bp, Homo sapiens
tgcatttgcaaactcttcttcaacac

SEQ ID NO: 54318 - DNA, 26 bp, Homo sapiens
gcatttgcaaactcttcttcaacact

SEQ ID NO: 54319 - DNA, 26 bp, Homo sapiens
catttgcaaactcttcttcaacactt

SEQ ID NO: 54320 - DNA, 26 bp, Homo sapiens
atttgcaaactcttcttcaacactta

SEQ ID NO: 54321 - DNA, 26 bp, Homo sapiens
tttgcaaactcttcttcaacacttag

SEQ ID NO: 54322 - DNA, 26 bp, Homo sapiens
ttgcaaactcttcttcaacacttagg

SEQ ID NO: 54323 - DNA, 26 bp, Homo sapiens
tgcaaactcttcttcaacacttaggg

SEQ ID NO: 54324 - DNA, 26 bp, Homo sapiens
gcaaactcttcttcaacacttagggc

SEQ ID NO: 54325 - DNA, 26 bp, Homo sapiens
caaactcttcttcaacacttagggca

SEQ ID NO: 54326 - DNA, 26 bp, Homo sapiens
aaactcttcttcaacacttagggcat

SEQ ID NO: 54327 - DNA, 26 bp, Homo sapiens
aactcttcttcaacacttagggcatc

SEQ ID NO: 54328 - DNA, 26 bp, Homo sapiens
actcttcttcaacacttagggcatct

SEQ ID NO: 54329 - DNA, 26 bp, Homo sapiens
ctcttcttcaacacttagggcatctt

SEQ ID NO: 54330 - DNA, 26 bp, Homo sapiens
tcttcttcaacacttagggcatcttt

SEQ ID NO: 54331 - DNA, 26 bp, Homo sapiens
cttcttcaacacttagggcatcttta

SEQ ID NO: 54332 - DNA, 26 bp, Homo sapiens
ttcttcaacacttagggcatctttaa

SEQ ID NO: 54333 - DNA, 26 bp, Homo sapiens
tcttcaacacttagggcatctttaaa

SEQ ID NO: 54334 - DNA, 26 bp, Homo sapiens
cttcaacacttagggcatctttaaaa

SEQ ID NO: 54335 - DNA, 26 bp, Homo sapiens
ttcaacacttagggcatctttaaaaa

SEQ ID NO: 54336 - DNA, 26 bp, Homo sapiens
tcaacacttagggcatctttaaaaaa

SEQ ID NO: 54337 - DNA, 26 bp, Homo sapiens
caacacttagggcatctttaaaaaaa

SEQ ID NO: 54338 - DNA, 26 bp, Homo sapiens
aacacttagggcatctttaaaaaaat

SEQ ID NO: 54339 - DNA, 26 bp, Homo sapiens
acacttagggcatctttaaaaaaatg

SEQ ID NO: 54340 - DNA, 26 bp, Homo sapiens
cacttagggcatctttaaaaaaatgc

SEQ ID NO: 54341 - DNA, 26 bp, Homo sapiens
acttagggcatctttaaaaaaatgcc

SEQ ID NO: 54342 - DNA, 26 bp, Homo sapiens
cttagggcatctttaaaaaaatgcca

SEQ ID NO: 54343 - DNA, 26 bp, Homo sapiens
ttagggcatctttaaaaaaatgccat

SEQ ID NO: 54344 - DNA, 26 bp, Homo sapiens
tagggcatctttaaaaaaatgccata

SEQ ID NO: 54345 - DNA, 26 bp, Homo sapiens
agggcatctttaaaaaaatgccataa

SEQ ID NO: 54346 - DNA, 26 bp, Homo sapiens
gggcatctttaaaaaaatgccataaa

SEQ ID NO: 54347 - DNA, 26 bp, Homo sapiens
ggcatctttaaaaaaatgccataaaa

SEQ ID NO: 54348 - DNA, 26 bp, Homo sapiens
gcatctttaaaaaaatgccataaaaa

SEQ ID NO: 54349 - DNA, 26 bp, Homo sapiens
catctttaaaaaaatgccataaaaaa

SEQ ID NO: 54350 - DNA, 26 bp, Homo sapiens
atctttaaaaaaatgccataaaaaaa

SEQ ID NO: 54351 - DNA, 26 bp, Homo sapiens
tctttaaaaaaatgccataaaaaaac

SEQ ID NO: 54352 - DNA, 26 bp, Homo sapiens
ctttaaaaaaatgccataaaaaaact

SEQ ID NO: 54353 - DNA, 26 bp, Homo sapiens
tttaaaaaaatgccataaaaaaactg

SEQ ID NO: 54354 - DNA, 26 bp, Homo sapiens
ttaaaaaaatgccataaaaaaactgc

SEQ ID NO: 54355 - DNA, 26 bp, Homo sapiens
taaaaaaatgccataaaaaaactgca

SEQ ID NO: 54356 - DNA, 26 bp, Homo sapiens
aaaaaaatgccataaaaaaactgcaa

SEQ ID NO: 54357 - DNA, 26 bp, Homo sapiens
aaaaaatgccataaaaaaactgcaag

SEQ ID NO: 54358 - DNA, 26 bp, Homo sapiens
aaaaatgccataaaaaaactgcaaga

SEQ ID NO: 54359 - DNA, 26 bp, Homo sapiens
aaaatgccataaaaaaactgcaagaa

SEQ ID NO: 54360 - DNA, 26 bp, Homo sapiens
aaatgccataaaaaaactgcaagaaa

SEQ ID NO: 54361 - DNA, 26 bp, Homo sapiens
aatgccataaaaaaactgcaagaaaa

SEQ ID NO: 54362 - DNA, 26 bp, Homo sapiens
atgccataaaaaaactgcaagaaaat

SEQ ID NO: 54363 - DNA, 26 bp, Homo sapiens
tgccataaaaaaactgcaagaaaatc

SEQ ID NO: 54364 - DNA, 26 bp, Homo sapiens
gccataaaaaaactgcaagaaaatct

SEQ ID NO: 54365 - DNA, 26 bp, Homo sapiens
ccataaaaaaactgcaagaaaatcta

SEQ ID NO: 54366 - DNA, 26 bp, Homo sapiens
cataaaaaaactgcaagaaaatctaa

SEQ ID NO: 54367 - DNA, 26 bp, Homo sapiens
ataaaaaaactgcaagaaaatctaat

SEQ ID NO: 54368 - DNA, 26 bp, Homo sapiens
taaaaaaactgcaagaaaatctaatt

SEQ ID NO: 54369 - DNA, 26 bp, Homo sapiens
aaaaaaactgcaagaaaatctaatta

SEQ ID NO: 54370 - DNA, 26 bp, Homo sapiens
aaaaaactgcaagaaaatctaattaa

SEQ ID NO: 54371 - DNA, 26 bp, Homo sapiens
aaaaactgcaagaaaatctaattaat

SEQ ID NO: 54372 - DNA, 26 bp, Homo sapiens
aaaactgcaagaaaatctaattaatg

SEQ ID NO: 54373 - DNA, 26 bp, Homo sapiens
aaactgcaagaaaatctaattaatgt

SEQ ID NO: 54374 - DNA, 26 bp, Homo sapiens
aactgcaagaaaatctaattaatgtg

SEQ ID NO: 54375 - DNA, 26 bp, Homo sapiens
actgcaagaaaatctaattaatgtgg

SEQ ID NO: 54376 - DNA, 26 bp, Homo sapiens
ctgcaagaaaatctaattaatgtgga

SEQ ID NO: 54377 - DNA, 26 bp, Homo sapiens
tgcaagaaaatctaattaatgtggaa

SEQ ID NO: 54378 - DNA, 26 bp, Homo sapiens
gcaagaaaatctaattaatgtggaag

SEQ ID NO: 54379 - DNA, 26 bp, Homo sapiens
caagaaaatctaattaatgtggaagg

SEQ ID NO: 54380 - DNA, 26 bp, Homo sapiens
aagaaaatctaattaatgtggaaggc

SEQ ID NO: 54381 - DNA, 26 bp, Homo sapiens
agaaaatctaattaatgtggaaggca

SEQ ID NO: 54382 - DNA, 26 bp, Homo sapiens
gaaaatctaattaatgtggaaggcat

SEQ ID NO: 54383 - DNA, 26 bp, Homo sapiens
aaaatctaattaatgtggaaggcatt

SEQ ID NO: 54384 - DNA, 26 bp, Homo sapiens
aaatctaattaatgtggaaggcatta

SEQ ID NO: 54385 - DNA, 26 bp, Homo sapiens
aatctaattaatgtggaaggcattaa

SEQ ID NO: 54386 - DNA, 26 bp, Homo sapiens
atctaattaatgtggaaggcattaaa

SEQ ID NO: 54387 - DNA, 26 bp, Homo sapiens
tctaattaatgtggaaggcattaaaa

SEQ ID NO: 54388 - DNA, 26 bp, Homo sapiens
ctaattaatgtggaaggcattaaaag

SEQ ID NO: 54389 - DNA, 26 bp, Homo sapiens
taattaatgtggaaggcattaaaagt

SEQ ID NO: 54390 - DNA, 26 bp, Homo sapiens
aattaatgtggaaggcattaaaagtt

SEQ ID NO: 54391 - DNA, 26 bp, Homo sapiens
attaatgtggaaggcattaaaagttt

SEQ ID NO: 54392 - DNA, 26 bp, Homo sapiens
ttaatgtggaaggcattaaaagtttt

SEQ ID NO: 54393 - DNA, 26 bp, Homo sapiens
taatgtggaaggcattaaaagttttt

SEQ ID NO: 54394 - DNA, 26 bp, Homo sapiens
aatgtggaaggcattaaaagtttttt

SEQ ID NO: 54395 - DNA, 26 bp, Homo sapiens
atgtggaaggcattaaaagttttttg

SEQ ID NO: 54396 - DNA, 26 bp, Homo sapiens
tgtggaaggcattaaaagttttttgt

SEQ ID NO: 54397 - DNA, 26 bp, Homo sapiens
gtggaaggcattaaaagttttttgtt

SEQ ID NO: 54398 - DNA, 26 bp, Homo sapiens
tggaaggcattaaaagttttttgttt

SEQ ID NO: 54399 - DNA, 26 bp, Homo sapiens
ggaaggcattaaaagttttttgtttt

SEQ ID NO: 54400 - DNA, 26 bp, Homo sapiens
gaaggcattaaaagttttttgttttg

SEQ ID NO: 54401 - DNA, 26 bp, Homo sapiens
aaggcattaaaagttttttgttttgt

SEQ ID NO: 54402 - DNA, 26 bp, Homo sapiens
aggcattaaaagttttttgttttgtt

SEQ ID NO: 54403 - DNA, 26 bp, Homo sapiens
ggcattaaaagttttttgttttgttt

SEQ ID NO: 54404 - DNA, 26 bp, Homo sapiens
gcattaaaagttttttgttttgtttt

SEQ ID NO: 54405 - DNA, 26 bp, Homo sapiens
cattaaaagttttttgttttgtttta

SEQ ID NO: 54406 - DNA, 26 bp, Homo sapiens
attaaaagttttttgttttgttttag

SEQ ID NO: 54407 - DNA, 26 bp, Homo sapiens
ttaaaagttttttgttttgttttagt

SEQ ID NO: 54408 - DNA, 26 bp, Homo sapiens
taaaagttttttgttttgttttagtg

SEQ ID NO: 54409 - DNA, 26 bp, Homo sapiens
aaaagttttttgttttgttttagtgg

SEQ ID NO: 54410 - DNA, 26 bp, Homo sapiens
aaagttttttgttttgttttagtggg

SEQ ID NO: 54411 - DNA, 26 bp, Homo sapiens
aagttttttgttttgttttagtgggg

SEQ ID NO: 54412 - DNA, 26 bp, Homo sapiens
agttttttgttttgttttagtgggga

SEQ ID NO: 54413 - DNA, 26 bp, Homo sapiens
gttttttgttttgttttagtggggac

SEQ ID NO: 54414 - DNA, 26 bp, Homo sapiens
ttttttgttttgttttagtggggaca

SEQ ID NO: 54415 - DNA, 26 bp, Homo sapiens
tttttgttttgttttagtggggacaa

SEQ ID NO: 54416 - DNA, 26 bp, Homo sapiens
ttttgttttgttttagtggggacaat

SEQ ID NO: 54417 - DNA, 26 bp, Homo sapiens
tttgttttgttttagtggggacaata

SEQ ID NO: 54418 - DNA, 26 bp, Homo sapiens
ttgttttgttttagtggggacaataa

SEQ ID NO: 54419 - DNA, 26 bp, Homo sapiens
tgttttgttttagtggggacaataag

SEQ ID NO: 54420 - DNA, 26 bp, Homo sapiens
gttttgttttagtggggacaataagt

SEQ ID NO: 54421 - DNA, 26 bp, Homo sapiens
ttttgttttagtggggacaataagtc

SEQ ID NO: 54422 - DNA, 26 bp, Homo sapiens
tttgttttagtggggacaataagtca

SEQ ID NO: 54423 - DNA, 26 bp, Homo sapiens
ttgttttagtggggacaataagtcaa

SEQ ID NO: 54424 - DNA, 26 bp, Homo sapiens
tgttttagtggggacaataagtcaaa

SEQ ID NO: 54425 - DNA, 26 bp, Homo sapiens
gttttagtggggacaataagtcaaag

SEQ ID NO: 54426 - DNA, 26 bp, Homo sapiens
ttttagtggggacaataagtcaaagg

SEQ ID NO: 54427 - DNA, 26 bp, Homo sapiens
tttagtggggacaataagtcaaagga

SEQ ID NO: 54428 - DNA, 26 bp, Homo sapiens
ttagtggggacaataagtcaaaggaa

SEQ ID NO: 54429 - DNA, 26 bp, Homo sapiens
tagtggggacaataagtcaaaggaag

SEQ ID NO: 54430 - DNA, 26 bp, Homo sapiens
agtggggacaataagtcaaaggaagt

SEQ ID NO: 54431 - DNA, 26 bp, Homo sapiens
gtggggacaataagtcaaaggaagtt

SEQ ID NO: 54432 - DNA, 26 bp, Homo sapiens
tggggacaataagtcaaaggaagttc

SEQ ID NO: 54433 - DNA, 26 bp, Homo sapiens
ggggacaataagtcaaaggaagttca

SEQ ID NO: 54434 - DNA, 26 bp, Homo sapiens
gggacaataagtcaaaggaagttcac

SEQ ID NO: 54435 - DNA, 26 bp, Homo sapiens
ggacaataagtcaaaggaagttcacg

SEQ ID NO: 54436 - DNA, 26 bp, Homo sapiens
gacaataagtcaaaggaagttcacgg

SEQ ID NO: 54437 - DNA, 26 bp, Homo sapiens
acaataagtcaaaggaagttcacggg

SEQ ID NO: 54438 - DNA, 26 bp, Homo sapiens
caataagtcaaaggaagttcacgggg

SEQ ID NO: 54439 - DNA, 26 bp, Homo sapiens
aataagtcaaaggaagttcacgggga

SEQ ID NO: 54440 - DNA, 26 bp, Homo sapiens
ataagtcaaaggaagttcacggggaa

SEQ ID NO: 54441 - DNA, 26 bp, Homo sapiens
taagtcaaaggaagttcacggggaac

SEQ ID NO: 54442 - DNA, 26 bp, Homo sapiens
aagtcaaaggaagttcacggggaact

SEQ ID NO: 54443 - DNA, 26 bp, Homo sapiens
agtcaaaggaagttcacggggaacta

SEQ ID NO: 54444 - DNA, 26 bp, Homo sapiens
gtcaaaggaagttcacggggaactag

SEQ ID NO: 54445 - DNA, 26 bp, Homo sapiens
tcaaaggaagttcacggggaactagg

SEQ ID NO: 54446 - DNA, 26 bp, Homo sapiens
caaaggaagttcacggggaactagga

SEQ ID NO: 54447 - DNA, 26 bp, Homo sapiens
aaaggaagttcacggggaactaggaa

SEQ ID NO: 54448 - DNA, 26 bp, Homo sapiens
aaggaagttcacggggaactaggaat

SEQ ID NO: 54449 - DNA, 26 bp, Homo sapiens
aggaagttcacggggaactaggaatg

SEQ ID NO: 54450 - DNA, 26 bp, Homo sapiens
ggaagttcacggggaactaggaatgt

SEQ ID NO: 54451 - DNA, 26 bp, Homo sapiens
gaagttcacggggaactaggaatgtg

SEQ ID NO: 54452 - DNA, 26 bp, Homo sapiens
aagttcacggggaactaggaatgtgt

SEQ ID NO: 54453 - DNA, 26 bp, Homo sapiens
agttcacggggaactaggaatgtgtc

SEQ ID NO: 54454 - DNA, 26 bp, Homo sapiens
gttcacggggaactaggaatgtgtct

SEQ ID NO: 54455 - DNA, 26 bp, Homo sapiens
ttcacggggaactaggaatgtgtctt

SEQ ID NO: 54456 - DNA, 26 bp, Homo sapiens
tcacggggaactaggaatgtgtcttc

SEQ ID NO: 54457 - DNA, 26 bp, Homo sapiens
cacggggaactaggaatgtgtcttct

SEQ ID NO: 54458 - DNA, 26 bp, Homo sapiens
acggggaactaggaatgtgtcttctt

SEQ ID NO: 54459 - DNA, 26 bp, Homo sapiens
cggggaactaggaatgtgtcttcttc

SEQ ID NO: 54460 - DNA, 26 bp, Homo sapiens
ggggaactaggaatgtgtcttcttcc

SEQ ID NO: 54461 - DNA, 26 bp, Homo sapiens
gggaactaggaatgtgtcttcttcct

SEQ ID NO: 54462 - DNA, 26 bp, Homo sapiens
ggaactaggaatgtgtcttcttcctc

SEQ ID NO: 54463 - DNA, 26 bp, Homo sapiens
gaactaggaatgtgtcttcttcctcc

SEQ ID NO: 54464 - DNA, 26 bp, Homo sapiens
aactaggaatgtgtcttcttcctcca

SEQ ID NO: 54465 - DNA, 26 bp, Homo sapiens
actaggaatgtgtcttcttcctccag

SEQ ID NO: 54466 - DNA, 26 bp, Homo sapiens
ctaggaatgtgtcttcttcctccaga

SEQ ID NO: 54467 - DNA, 26 bp, Homo sapiens
taggaatgtgtcttcttcctccagaa

SEQ ID NO: 54468 - DNA, 26 bp, Homo sapiens
aggaatgtgtcttcttcctccagaat

SEQ ID NO: 54469 - DNA, 26 bp, Homo sapiens
ggaatgtgtcttcttcctccagaatt

SEQ ID NO: 54470 - DNA, 26 bp, Homo sapiens
gaatgtgtcttcttcctccagaattc

SEQ ID NO: 54471 - DNA, 26 bp, Homo sapiens
aatgtgtcttcttcctccagaattca

SEQ ID NO: 54472 - DNA, 26 bp, Homo sapiens
atgtgtcttcttcctccagaattcaa

SEQ ID NO: 54473 - DNA, 26 bp, Homo sapiens
tgtgtcttcttcctccagaattcaac

SEQ ID NO: 54474 - DNA, 26 bp, Homo sapiens
gtgtcttcttcctccagaattcaacc

SEQ ID NO: 54475 - DNA, 26 bp, Homo sapiens
tgtcttcttcctccagaattcaaccc

SEQ ID NO: 54476 - DNA, 26 bp, Homo sapiens
gtcttcttcctccagaattcaaccct

SEQ ID NO: 54477 - DNA, 26 bp, Homo sapiens
tcttcttcctccagaattcaaccctt

SEQ ID NO: 54478 - DNA, 26 bp, Homo sapiens
cttcttcctccagaattcaacccttg

SEQ ID NO: 54479 - DNA, 26 bp, Homo sapiens
ttcttcctccagaattcaacccttgg

SEQ ID NO: 54480 - DNA, 26 bp, Homo sapiens
tcttcctccagaattcaacccttgga

SEQ ID NO: 54481 - DNA, 26 bp, Homo sapiens
cttcctccagaattcaacccttggaa

SEQ ID NO: 54482 - DNA, 26 bp, Homo sapiens
ttcctccagaattcaacccttggaag

SEQ ID NO: 54483 - DNA, 26 bp, Homo sapiens
tcctccagaattcaacccttggaaga

SEQ ID NO: 54484 - DNA, 26 bp, Homo sapiens
cctccagaattcaacccttggaagat

SEQ ID NO: 54485 - DNA, 26 bp, Homo sapiens
ctccagaattcaacccttggaagatg

SEQ ID NO: 54486 - DNA, 26 bp, Homo sapiens
tccagaattcaacccttggaagatgg

SEQ ID NO: 54487 - DNA, 26 bp, Homo sapiens
ccagaattcaacccttggaagatggg

SEQ ID NO: 54488 - DNA, 26 bp, Homo sapiens
cagaattcaacccttggaagatgggg

SEQ ID NO: 54489 - DNA, 26 bp, Homo sapiens
agaattcaacccttggaagatgggga

SEQ ID NO: 54490 - DNA, 26 bp, Homo sapiens
gaattcaacccttggaagatggggaa

SEQ ID NO: 54491 - DNA, 26 bp, Homo sapiens
aattcaacccttggaagatggggaat

SEQ ID NO: 54492 - DNA, 26 bp, Homo sapiens
attcaacccttggaagatggggaata

SEQ ID NO: 54493 - DNA, 26 bp, Homo sapiens
ttcaacccttggaagatggggaataa

SEQ ID NO: 54494 - DNA, 26 bp, Homo sapiens
tcaacccttggaagatggggaataac

SEQ ID NO: 54495 - DNA, 26 bp, Homo sapiens
caacccttggaagatggggaataact

SEQ ID NO: 54496 - DNA, 26 bp, Homo sapiens
aacccttggaagatggggaataactt

SEQ ID NO: 54497 - DNA, 26 bp, Homo sapiens
acccttggaagatggggaataacttt

SEQ ID NO: 54498 - DNA, 26 bp, Homo sapiens
cccttggaagatggggaataactttg

SEQ ID NO: 54499 - DNA, 26 bp, Homo sapiens
ccttggaagatggggaataactttgc

SEQ ID NO: 54500 - DNA, 26 bp, Homo sapiens
cttggaagatggggaataactttgca

SEQ ID NO: 54501 - DNA, 26 bp, Homo sapiens
ttggaagatggggaataactttgcac

SEQ ID NO: 54502 - DNA, 26 bp, Homo sapiens
tggaagatggggaataactttgcact

SEQ ID NO: 54503 - DNA, 26 bp, Homo sapiens
ggaagatggggaataactttgcactt

SEQ ID NO: 54504 - DNA, 26 bp, Homo sapiens
gaagatggggaataactttgcacttt

SEQ ID NO: 54505 - DNA, 26 bp, Homo sapiens
aagatggggaataactttgcactttt

SEQ ID NO: 54506 - DNA, 26 bp, Homo sapiens
agatggggaataactttgcacttttc

SEQ ID NO: 54507 - DNA, 26 bp, Homo sapiens
gatggggaataactttgcacttttct

SEQ ID NO: 54508 - DNA, 26 bp, Homo sapiens
atggggaataactttgcacttttctg

SEQ ID NO: 54509 - DNA, 26 bp, Homo sapiens
tggggaataactttgcacttttctgt

SEQ ID NO: 54510 - DNA, 26 bp, Homo sapiens
ggggaataactttgcacttttctgtt

SEQ ID NO: 54511 - DNA, 26 bp, Homo sapiens
gggaataactttgcacttttctgttt

SEQ ID NO: 54512 - DNA, 26 bp, Homo sapiens
ggaataactttgcacttttctgtttg

SEQ ID NO: 54513 - DNA, 26 bp, Homo sapiens
gaataactttgcacttttctgtttgg

SEQ ID NO: 54514 - DNA, 26 bp, Homo sapiens
aataactttgcacttttctgtttgga

SEQ ID NO: 54515 - DNA, 26 bp, Homo sapiens
ataactttgcacttttctgtttggat

SEQ ID NO: 54516 - DNA, 26 bp, Homo sapiens
taactttgcacttttctgtttggatc

SEQ ID NO: 54517 - DNA, 26 bp, Homo sapiens
aactttgcacttttctgtttggatct

SEQ ID NO: 54518 - DNA, 26 bp, Homo sapiens
actttgcacttttctgtttggatctt

SEQ ID NO: 54519 - DNA, 26 bp, Homo sapiens
ctttgcacttttctgtttggatcttc

SEQ ID NO: 54520 - DNA, 26 bp, Homo sapiens
tttgcacttttctgtttggatcttcc

SEQ ID NO: 54521 - DNA, 26 bp, Homo sapiens
ttgcacttttctgtttggatcttcct

SEQ ID NO: 54522 - DNA, 26 bp, Homo sapiens
tgcacttttctgtttggatcttcctc

SEQ ID NO: 54523 - DNA, 26 bp, Homo sapiens
gcacttttctgtttggatcttcctcc

SEQ ID NO: 54524 - DNA, 26 bp, Homo sapiens
cacttttctgtttggatcttcctcca

SEQ ID NO: 54525 - DNA, 26 bp, Homo sapiens
acttttctgtttggatcttcctccac

SEQ ID NO: 54526 - DNA, 26 bp, Homo sapiens
cttttctgtttggatcttcctccacc

SEQ ID NO: 54527 - DNA, 26 bp, Homo sapiens
ttttctgtttggatcttcctccaccc

SEQ ID NO: 54528 - DNA, 26 bp, Homo sapiens
tttctgtttggatcttcctccaccca

SEQ ID NO: 54529 - DNA, 26 bp, Homo sapiens
ttctgtttggatcttcctccacccac

SEQ ID NO: 54530 - DNA, 26 bp, Homo sapiens
tctgtttggatcttcctccacccacg

SEQ ID NO: 54531 - DNA, 26 bp, Homo sapiens
ctgtttggatcttcctccacccacgc

SEQ ID NO: 54532 - DNA, 26 bp, Homo sapiens
tgtttggatcttcctccacccacgct

SEQ ID NO: 54533 - DNA, 26 bp, Homo sapiens
gtttggatcttcctccacccacgctt

SEQ ID NO: 54534 - DNA, 26 bp, Homo sapiens
tttggatcttcctccacccacgctta

SEQ ID NO: 54535 - DNA, 26 bp, Homo sapiens
ttggatcttcctccacccacgcttat

SEQ ID NO: 54536 - DNA, 26 bp, Homo sapiens
tggatcttcctccacccacgcttatc

SEQ ID NO: 54537 - DNA, 26 bp, Homo sapiens
ggatcttcctccacccacgcttatcc

SEQ ID NO: 54538 - DNA, 26 bp, Homo sapiens
gatcttcctccacccacgcttatcca

SEQ ID NO: 54539 - DNA, 26 bp, Homo sapiens
atcttcctccacccacgcttatccat

SEQ ID NO: 54540 - DNA, 26 bp, Homo sapiens
tcttcctccacccacgcttatccatt

SEQ ID NO: 54541 - DNA, 26 bp, Homo sapiens
cttcctccacccacgcttatccattg

SEQ ID NO: 54542 - DNA, 26 bp, Homo sapiens
ttcctccacccacgcttatccattga

SEQ ID NO: 54543 - DNA, 26 bp, Homo sapiens
tcctccacccacgcttatccattgat

SEQ ID NO: 54544 - DNA, 26 bp, Homo sapiens
cctccacccacgcttatccattgatt

SEQ ID NO: 54545 - DNA, 26 bp, Homo sapiens
ctccacccacgcttatccattgattc

SEQ ID NO: 54546 - DNA, 26 bp, Homo sapiens
tccacccacgcttatccattgattct

SEQ ID NO: 54547 - DNA, 26 bp, Homo sapiens
ccacccacgcttatccattgattctt

SEQ ID NO: 54548 - DNA, 26 bp, Homo sapiens
cacccacgcttatccattgattcttg

SEQ ID NO: 54549 - DNA, 26 bp, Homo sapiens
acccacgcttatccattgattcttgt

SEQ ID NO: 54550 - DNA, 26 bp, Homo sapiens
cccacgcttatccattgattcttgtc

SEQ ID NO: 54551 - DNA, 26 bp, Homo sapiens
ccacgcttatccattgattcttgtcc

SEQ ID NO: 54552 - DNA, 26 bp, Homo sapiens
cacgcttatccattgattcttgtccc

SEQ ID NO: 54553 - DNA, 26 bp, Homo sapiens
acgcttatccattgattcttgtccct

SEQ ID NO: 54554 - DNA, 26 bp, Homo sapiens
cgcttatccattgattcttgtccctc

SEQ ID NO: 54555 - DNA, 26 bp, Homo sapiens
gcttatccattgattcttgtccctcc

SEQ ID NO: 54556 - DNA, 26 bp, Homo sapiens
cttatccattgattcttgtccctcct

SEQ ID NO: 54557 - DNA, 26 bp, Homo sapiens
ttatccattgattcttgtccctcctt

SEQ ID NO: 54558 - DNA, 26 bp, Homo sapiens
tatccattgattcttgtccctcctta

SEQ ID NO: 54559 - DNA, 26 bp, Homo sapiens
atccattgattcttgtccctccttaa

SEQ ID NO: 54560 - DNA, 26 bp, Homo sapiens
tccattgattcttgtccctccttaaa

SEQ ID NO: 54561 - DNA, 26 bp, Homo sapiens
ccattgattcttgtccctccttaaat

SEQ ID NO: 54562 - DNA, 26 bp, Homo sapiens
cattgattcttgtccctccttaaatt

SEQ ID NO: 54563 - DNA, 26 bp, Homo sapiens
attgattcttgtccctccttaaattc

SEQ ID NO: 54564 - DNA, 26 bp, Homo sapiens
ttgattcttgtccctccttaaattcc

SEQ ID NO: 54565 - DNA, 26 bp, Homo sapiens
tgattcttgtccctccttaaattcca

SEQ ID NO: 54566 - DNA, 26 bp, Homo sapiens
gattcttgtccctccttaaattccag

SEQ ID NO: 54567 - DNA, 26 bp, Homo sapiens
attcttgtccctccttaaattccagc

SEQ ID NO: 54568 - DNA, 26 bp, Homo sapiens
ttcttgtccctccttaaattccagct

SEQ ID NO: 54569 - DNA, 26 bp, Homo sapiens
tcttgtccctccttaaattccagctg

SEQ ID NO: 54570 - DNA, 26 bp, Homo sapiens
cttgtccctccttaaattccagctgc

SEQ ID NO: 54571 - DNA, 26 bp, Homo sapiens
ttgtccctccttaaattccagctgcc

SEQ ID NO: 54572 - DNA, 26 bp, Homo sapiens
tgtccctccttaaattccagctgcca

SEQ ID NO: 54573 - DNA, 26 bp, Homo sapiens
gtccctccttaaattccagctgccat

SEQ ID NO: 54574 - DNA, 26 bp, Homo sapiens
tccctccttaaattccagctgccatt

SEQ ID NO: 54575 - DNA, 26 bp, Homo sapiens
ccctccttaaattccagctgccattc

SEQ ID NO: 54576 - DNA, 26 bp, Homo sapiens
cctccttaaattccagctgccattct

SEQ ID NO: 54577 - DNA, 26 bp, Homo sapiens
ctccttaaattccagctgccattcta

SEQ ID NO: 54578 - DNA, 26 bp, Homo sapiens
tccttaaattccagctgccattctac

SEQ ID NO: 54579 - DNA, 26 bp, Homo sapiens
ccttaaattccagctgccattctact

SEQ ID NO: 54580 - DNA, 26 bp, Homo sapiens
cttaaattccagctgccattctactt

SEQ ID NO: 54581 - DNA, 26 bp, Homo sapiens
ttaaattccagctgccattctacttg

SEQ ID NO: 54582 - DNA, 26 bp, Homo sapiens
taaattccagctgccattctacttgt

SEQ ID NO: 54583 - DNA, 26 bp, Homo sapiens
aaattccagctgccattctacttgta

SEQ ID NO: 54584 - DNA, 26 bp, Homo sapiens
aattccagctgccattctacttgtaa

SEQ ID NO: 54585 - DNA, 26 bp, Homo sapiens
attccagctgccattctacttgtaat

SEQ ID NO: 54586 - DNA, 26 bp, Homo sapiens
ttccagctgccattctacttgtaatt

SEQ ID NO: 54587 - DNA, 26 bp, Homo sapiens
tccagctgccattctacttgtaattc

SEQ ID NO: 54588 - DNA, 26 bp, Homo sapiens
ccagctgccattctacttgtaattct

SEQ ID NO: 54589 - DNA, 26 bp, Homo sapiens
cagctgccattctacttgtaattctt

SEQ ID NO: 54590 - DNA, 26 bp, Homo sapiens
agctgccattctacttgtaattcttg

SEQ ID NO: 54591 - DNA, 26 bp, Homo sapiens
gctgccattctacttgtaattcttgg

SEQ ID NO: 54592 - DNA, 26 bp, Homo sapiens
ctgccattctacttgtaattcttggt

SEQ ID NO: 54593 - DNA, 26 bp, Homo sapiens
tgccattctacttgtaattcttggtc

SEQ ID NO: 54594 - DNA, 26 bp, Homo sapiens
gccattctacttgtaattcttggtca

SEQ ID NO: 54595 - DNA, 26 bp, Homo sapiens
ccattctacttgtaattcttggtcat

SEQ ID NO: 54596 - DNA, 26 bp, Homo sapiens
cattctacttgtaattcttggtcatc

SEQ ID NO: 54597 - DNA, 26 bp, Homo sapiens
attctacttgtaattcttggtcatca

SEQ ID NO: 54598 - DNA, 26 bp, Homo sapiens
ttctacttgtaattcttggtcatcat

SEQ ID NO: 54599 - DNA, 26 bp, Homo sapiens
tctacttgtaattcttggtcatcatc

SEQ ID NO: 54600 - DNA, 26 bp, Homo sapiens
ctacttgtaattcttggtcatcatca

SEQ ID NO: 54601 - DNA, 26 bp, Homo sapiens
tacttgtaattcttggtcatcatcac

SEQ ID NO: 54602 - DNA, 26 bp, Homo sapiens
acttgtaattcttggtcatcatcacc

SEQ ID NO: 54603 - DNA, 26 bp, Homo sapiens
cttgtaattcttggtcatcatcaccc

SEQ ID NO: 54604 - DNA, 26 bp, Homo sapiens
ttgtaattcttggtcatcatcacccc

SEQ ID NO: 54605 - DNA, 26 bp, Homo sapiens
tgtaattcttggtcatcatcaccccc

SEQ ID NO: 54606 - DNA, 26 bp, Homo sapiens
gtaattcttggtcatcatcaccccca

SEQ ID NO: 54607 - DNA, 26 bp, Homo sapiens
taattcttggtcatcatcacccccac

SEQ ID NO: 54608 - DNA, 26 bp, Homo sapiens
aattcttggtcatcatcacccccact

SEQ ID NO: 54609 - DNA, 26 bp, Homo sapiens
attcttggtcatcatcacccccactc

SEQ ID NO: 54610 - DNA, 26 bp, Homo sapiens
ttcttggtcatcatcacccccactct

SEQ ID NO: 54611 - DNA, 26 bp, Homo sapiens
tcttggtcatcatcacccccactctc

SEQ ID NO: 54612 - DNA, 26 bp, Homo sapiens
cttggtcatcatcacccccactctct

SEQ ID NO: 54613 - DNA, 26 bp, Homo sapiens
ttggtcatcatcacccccactctctg

SEQ ID NO: 54614 - DNA, 26 bp, Homo sapiens
tggtcatcatcacccccactctctgg

SEQ ID NO: 54615 - DNA, 26 bp, Homo sapiens
ggtcatcatcacccccactctctggc

SEQ ID NO: 54616 - DNA, 26 bp, Homo sapiens
gtcatcatcacccccactctctggcc

SEQ ID NO: 54617 - DNA, 26 bp, Homo sapiens
tcatcatcacccccactctctggcca

SEQ ID NO: 54618 - DNA, 26 bp, Homo sapiens
catcatcacccccactctctggccaa

SEQ ID NO: 54619 - DNA, 26 bp, Homo sapiens
atcatcacccccactctctggccaat

SEQ ID NO: 54620 - DNA, 26 bp, Homo sapiens
tcatcacccccactctctggccaatt

SEQ ID NO: 54621 - DNA, 26 bp, Homo sapiens
catcacccccactctctggccaattt

SEQ ID NO: 54622 - DNA, 26 bp, Homo sapiens
atcacccccactctctggccaatttt

SEQ ID NO: 54623 - DNA, 26 bp, Homo sapiens
tcacccccactctctggccaattttg

SEQ ID NO: 54624 - DNA, 26 bp, Homo sapiens
cacccccactctctggccaattttgt

SEQ ID NO: 54625 - DNA, 26 bp, Homo sapiens
acccccactctctggccaattttgtc

SEQ ID NO: 54626 - DNA, 26 bp, Homo sapiens
cccccactctctggccaattttgtca

SEQ ID NO: 54627 - DNA, 26 bp, Homo sapiens
ccccactctctggccaattttgtcac

SEQ ID NO: 54628 - DNA, 26 bp, Homo sapiens
cccactctctggccaattttgtcact

SEQ ID NO: 54629 - DNA, 26 bp, Homo sapiens
ccactctctggccaattttgtcacta

SEQ ID NO: 54630 - DNA, 26 bp, Homo sapiens
cactctctggccaattttgtcactaa

SEQ ID NO: 54631 - DNA, 26 bp, Homo sapiens
actctctggccaattttgtcactaac

SEQ ID NO: 54632 - DNA, 26 bp, Homo sapiens
ctctctggccaattttgtcactaacc

SEQ ID NO: 54633 - DNA, 26 bp, Homo sapiens
tctctggccaattttgtcactaacct

SEQ ID NO: 54634 - DNA, 26 bp, Homo sapiens
ctctggccaattttgtcactaaccta

SEQ ID NO: 54635 - DNA, 26 bp, Homo sapiens
tctggccaattttgtcactaacctaa

SEQ ID NO: 54636 - DNA, 26 bp, Homo sapiens
ctggccaattttgtcactaacctaag

SEQ ID NO: 54637 - DNA, 26 bp, Homo sapiens
tggccaattttgtcactaacctaagt

SEQ ID NO: 54638 - DNA, 26 bp, Homo sapiens
ggccaattttgtcactaacctaagtt

SEQ ID NO: 54639 - DNA, 26 bp, Homo sapiens
gccaattttgtcactaacctaagttt

SEQ ID NO: 54640 - DNA, 26 bp, Homo sapiens
ccaattttgtcactaacctaagtttc

SEQ ID NO: 54641 - DNA, 26 bp, Homo sapiens
caattttgtcactaacctaagtttcc

SEQ ID NO: 54642 - DNA, 26 bp, Homo sapiens
aattttgtcactaacctaagtttcca

SEQ ID NO: 54643 - DNA, 26 bp, Homo sapiens
attttgtcactaacctaagtttccaa

SEQ ID NO: 54644 - DNA, 26 bp, Homo sapiens
ttttgtcactaacctaagtttccaaa

SEQ ID NO: 54645 - DNA, 26 bp, Homo sapiens
tttgtcactaacctaagtttccaaat

SEQ ID NO: 54646 - DNA, 26 bp, Homo sapiens
ttgtcactaacctaagtttccaaatt

SEQ ID NO: 54647 - DNA, 26 bp, Homo sapiens
tgtcactaacctaagtttccaaattg

SEQ ID NO: 54648 - DNA, 26 bp, Homo sapiens
gtcactaacctaagtttccaaattgg

SEQ ID NO: 54649 - DNA, 26 bp, Homo sapiens
tcactaacctaagtttccaaattggc

SEQ ID NO: 54650 - DNA, 26 bp, Homo sapiens
cactaacctaagtttccaaattggct

SEQ ID NO: 54651 - DNA, 26 bp, Homo sapiens
actaacctaagtttccaaattggctt

SEQ ID NO: 54652 - DNA, 26 bp, Homo sapiens
ctaacctaagtttccaaattggcttg

SEQ ID NO: 54653 - DNA, 26 bp, Homo sapiens
taacctaagtttccaaattggcttgc

SEQ ID NO: 54654 - DNA, 26 bp, Homo sapiens
aacctaagtttccaaattggcttgct

SEQ ID NO: 54655 - DNA, 26 bp, Homo sapiens
acctaagtttccaaattggcttgctt

SEQ ID NO: 54656 - DNA, 26 bp, Homo sapiens
cctaagtttccaaattggcttgcttt

SEQ ID NO: 54657 - DNA, 26 bp, Homo sapiens
ctaagtttccaaattggcttgctttc

SEQ ID NO: 54658 - DNA, 26 bp, Homo sapiens
taagtttccaaattggcttgctttct

SEQ ID NO: 54659 - DNA, 26 bp, Homo sapiens
aagtttccaaattggcttgctttctt

SEQ ID NO: 54660 - DNA, 26 bp, Homo sapiens
agtttccaaattggcttgctttctta

SEQ ID NO: 54661 - DNA, 26 bp, Homo sapiens
gtttccaaattggcttgctttcttag

SEQ ID NO: 54662 - DNA, 26 bp, Homo sapiens
tttccaaattggcttgctttcttagc

SEQ ID NO: 54663 - DNA, 26 bp, Homo sapiens
ttccaaattggcttgctttcttagca

SEQ ID NO: 54664 - DNA, 26 bp, Homo sapiens
tccaaattggcttgctttcttagcac

SEQ ID NO: 54665 - DNA, 26 bp, Homo sapiens
ccaaattggcttgctttcttagcact

SEQ ID NO: 54666 - DNA, 26 bp, Homo sapiens
caaattggcttgctttcttagcacta

SEQ ID NO: 54667 - DNA, 26 bp, Homo sapiens
aaattggcttgctttcttagcactat

SEQ ID NO: 54668 - DNA, 26 bp, Homo sapiens
aattggcttgctttcttagcactatg

SEQ ID NO: 54669 - DNA, 26 bp, Homo sapiens
attggcttgctttcttagcactatgc

SEQ ID NO: 54670 - DNA, 26 bp, Homo sapiens
ttggcttgctttcttagcactatgca

SEQ ID NO: 54671 - DNA, 26 bp, Homo sapiens
tggcttgctttcttagcactatgcat

SEQ ID NO: 54672 - DNA, 26 bp, Homo sapiens
ggcttgctttcttagcactatgcatg

SEQ ID NO: 54673 - DNA, 26 bp, Homo sapiens
gcttgctttcttagcactatgcatgc

SEQ ID NO: 54674 - DNA, 26 bp, Homo sapiens
cttgctttcttagcactatgcatgct

SEQ ID NO: 54675 - DNA, 26 bp, Homo sapiens
ttgctttcttagcactatgcatgctg

SEQ ID NO: 54676 - DNA, 26 bp, Homo sapiens
tgctttcttagcactatgcatgctga

SEQ ID NO: 54677 - DNA, 26 bp, Homo sapiens
gctttcttagcactatgcatgctgac

SEQ ID NO: 54678 - DNA, 26 bp, Homo sapiens
ctttcttagcactatgcatgctgaca

SEQ ID NO: 54679 - DNA, 26 bp, Homo sapiens
tttcttagcactatgcatgctgacac

SEQ ID NO: 54680 - DNA, 26 bp, Homo sapiens
ttcttagcactatgcatgctgacaca

SEQ ID NO: 54681 - DNA, 26 bp, Homo sapiens
tcttagcactatgcatgctgacacat

SEQ ID NO: 54682 - DNA, 26 bp, Homo sapiens
cttagcactatgcatgctgacacatt

SEQ ID NO: 54683 - DNA, 26 bp, Homo sapiens
ttagcactatgcatgctgacacattt

SEQ ID NO: 54684 - DNA, 26 bp, Homo sapiens
tagcactatgcatgctgacacatttt

SEQ ID NO: 54685 - DNA, 26 bp, Homo sapiens
agcactatgcatgctgacacattttc

SEQ ID NO: 54686 - DNA, 26 bp, Homo sapiens
gcactatgcatgctgacacattttct

SEQ ID NO: 54687 - DNA, 26 bp, Homo sapiens
cactatgcatgctgacacattttctg

SEQ ID NO: 54688 - DNA, 26 bp, Homo sapiens
actatgcatgctgacacattttctgg

SEQ ID NO: 54689 - DNA, 26 bp, Homo sapiens
ctatgcatgctgacacattttctgga

SEQ ID NO: 54690 - DNA, 26 bp, Homo sapiens
tatgcatgctgacacattttctggat

SEQ ID NO: 54691 - DNA, 26 bp, Homo sapiens
atgcatgctgacacattttctggatg

SEQ ID NO: 54692 - DNA, 26 bp, Homo sapiens
tgcatgctgacacattttctggatga

SEQ ID NO: 54693 - DNA, 26 bp, Homo sapiens
gcatgctgacacattttctggatgac

SEQ ID NO: 54694 - DNA, 26 bp, Homo sapiens
catgctgacacattttctggatgaca

SEQ ID NO: 54695 - DNA, 26 bp, Homo sapiens
atgctgacacattttctggatgacag

SEQ ID NO: 54696 - DNA, 26 bp, Homo sapiens
tgctgacacattttctggatgacaga

SEQ ID NO: 54697 - DNA, 26 bp, Homo sapiens
gctgacacattttctggatgacagac

SEQ ID NO: 54698 - DNA, 26 bp, Homo sapiens
ctgacacattttctggatgacagact

SEQ ID NO: 54699 - DNA, 26 bp, Homo sapiens
tgacacattttctggatgacagacta

SEQ ID NO: 54700 - DNA, 26 bp, Homo sapiens
gacacattttctggatgacagactaa

SEQ ID NO: 54701 - DNA, 26 bp, Homo sapiens
acacattttctggatgacagactaaa

SEQ ID NO: 54702 - DNA, 26 bp, Homo sapiens
cacattttctggatgacagactaaaa

SEQ ID NO: 54703 - DNA, 26 bp, Homo sapiens
acattttctggatgacagactaaaat

SEQ ID NO: 54704 - DNA, 26 bp, Homo sapiens
cattttctggatgacagactaaaata

SEQ ID NO: 54705 - DNA, 26 bp, Homo sapiens
attttctggatgacagactaaaataa

SEQ ID NO: 54706 - DNA, 26 bp, Homo sapiens
ttttctggatgacagactaaaataat

SEQ ID NO: 54707 - DNA, 26 bp, Homo sapiens
tttctggatgacagactaaaataatc

SEQ ID NO: 54708 - DNA, 26 bp, Homo sapiens
ttctggatgacagactaaaataatct

SEQ ID NO: 54709 - DNA, 26 bp, Homo sapiens
tctggatgacagactaaaataatctg

SEQ ID NO: 54710 - DNA, 26 bp, Homo sapiens
ctggatgacagactaaaataatctgc

SEQ ID NO: 54711 - DNA, 26 bp, Homo sapiens
tggatgacagactaaaataatctgca

SEQ ID NO: 54712 - DNA, 26 bp, Homo sapiens
ggatgacagactaaaataatctgcaa

SEQ ID NO: 54713 - DNA, 26 bp, Homo sapiens
gatgacagactaaaataatctgcaaa

SEQ ID NO: 54714 - DNA, 26 bp, Homo sapiens
atgacagactaaaataatctgcaaaa

SEQ ID NO: 54715 - DNA, 26 bp, Homo sapiens
tgacagactaaaataatctgcaaaat

SEQ ID NO: 54716 - DNA, 26 bp, Homo sapiens
gacagactaaaataatctgcaaaatt

SEQ ID NO: 54717 - DNA, 26 bp, Homo sapiens
acagactaaaataatctgcaaaatta

SEQ ID NO: 54718 - DNA, 26 bp, Homo sapiens
cagactaaaataatctgcaaaattaa

SEQ ID NO: 54719 - DNA, 26 bp, Homo sapiens
agactaaaataatctgcaaaattaaa

SEQ ID NO: 54720 - DNA, 26 bp, Homo sapiens
gactaaaataatctgcaaaattaaat

SEQ ID NO: 54721 - DNA, 26 bp, Homo sapiens
actaaaataatctgcaaaattaaatt

SEQ ID NO: 54722 - DNA, 26 bp, Homo sapiens
ctaaaataatctgcaaaattaaattt

SEQ ID NO: 54723 - DNA, 26 bp, Homo sapiens
taaaataatctgcaaaattaaatttg

SEQ ID NO: 54724 - DNA, 26 bp, Homo sapiens
aaaataatctgcaaaattaaatttgt

SEQ ID NO: 54725 - DNA, 26 bp, Homo sapiens
aaataatctgcaaaattaaatttgta

SEQ ID NO: 54726 - DNA, 26 bp, Homo sapiens
aataatctgcaaaattaaatttgtaa

SEQ ID NO: 54727 - DNA, 26 bp, Homo sapiens
ataatctgcaaaattaaatttgtaaa

SEQ ID NO: 54728 - DNA, 26 bp, Homo sapiens
taatctgcaaaattaaatttgtaaaa

SEQ ID NO: 54729 - DNA, 26 bp, Homo sapiens
aatctgcaaaattaaatttgtaaaac

SEQ ID NO: 54730 - DNA, 26 bp, Homo sapiens
atctgcaaaattaaatttgtaaaaca

SEQ ID NO: 54731 - DNA, 26 bp, Homo sapiens
tctgcaaaattaaatttgtaaaacat

SEQ ID NO: 54732 - DNA, 26 bp, Homo sapiens
ctgcaaaattaaatttgtaaaacatc

SEQ ID NO: 54733 - DNA, 26 bp, Homo sapiens
tgcaaaattaaatttgtaaaacatct

SEQ ID NO: 54734 - DNA, 26 bp, Homo sapiens
gcaaaattaaatttgtaaaacatcta

SEQ ID NO: 54735 - DNA, 26 bp, Homo sapiens
caaaattaaatttgtaaaacatctaa

SEQ ID NO: 54736 - DNA, 26 bp, Homo sapiens
aaaattaaatttgtaaaacatctaat

SEQ ID NO: 54737 - DNA, 26 bp, Homo sapiens
aaattaaatttgtaaaacatctaata

SEQ ID NO: 54738 - DNA, 26 bp, Homo sapiens
aattaaatttgtaaaacatctaatag

SEQ ID NO: 54739 - DNA, 26 bp, Homo sapiens
attaaatttgtaaaacatctaatagg

SEQ ID NO: 54740 - DNA, 26 bp, Homo sapiens
ttaaatttgtaaaacatctaataggc

SEQ ID NO: 54741 - DNA, 26 bp, Homo sapiens
taaatttgtaaaacatctaataggct

SEQ ID NO: 54742 - DNA, 26 bp, Homo sapiens
aaatttgtaaaacatctaataggctt

SEQ ID NO: 54743 - DNA, 26 bp, Homo sapiens
aatttgtaaaacatctaataggcttt

SEQ ID NO: 54744 - DNA, 26 bp, Homo sapiens
atttgtaaaacatctaataggctttt

SEQ ID NO: 54745 - DNA, 26 bp, Homo sapiens
tttgtaaaacatctaataggcttttc

SEQ ID NO: 54746 - DNA, 26 bp, Homo sapiens
ttgtaaaacatctaataggcttttca

SEQ ID NO: 54747 - DNA, 26 bp, Homo sapiens
tgtaaaacatctaataggcttttcaa

SEQ ID NO: 54748 - DNA, 26 bp, Homo sapiens
gtaaaacatctaataggcttttcaag

SEQ ID NO: 54749 - DNA, 26 bp, Homo sapiens
taaaacatctaataggcttttcaaga

SEQ ID NO: 54750 - DNA, 26 bp, Homo sapiens
aaaacatctaataggcttttcaagac

SEQ ID NO: 54751 - DNA, 26 bp, Homo sapiens
aaacatctaataggcttttcaagacg

SEQ ID NO: 54752 - DNA, 26 bp, Homo sapiens
aacatctaataggcttttcaagacgt

SEQ ID NO: 54753 - DNA, 26 bp, Homo sapiens
acatctaataggcttttcaagacgtg

SEQ ID NO: 54754 - DNA, 26 bp, Homo sapiens
catctaataggcttttcaagacgtga

SEQ ID NO: 54755 - DNA, 26 bp, Homo sapiens
atctaataggcttttcaagacgtgac

SEQ ID NO: 54756 - DNA, 26 bp, Homo sapiens
tctaataggcttttcaagacgtgaca

SEQ ID NO: 54757 - DNA, 26 bp, Homo sapiens
ctaataggcttttcaagacgtgacat

SEQ ID NO: 54758 - DNA, 26 bp, Homo sapiens
taataggcttttcaagacgtgacatc

SEQ ID NO: 54759 - DNA, 26 bp, Homo sapiens
aataggcttttcaagacgtgacatcc

SEQ ID NO: 54760 - DNA, 26 bp, Homo sapiens
ataggcttttcaagacgtgacatccc

SEQ ID NO: 54761 - DNA, 26 bp, Homo sapiens
taggcttttcaagacgtgacatccct

SEQ ID NO: 54762 - DNA, 26 bp, Homo sapiens
aggcttttcaagacgtgacatccctg

SEQ ID NO: 54763 - DNA, 26 bp, Homo sapiens
ggcttttcaagacgtgacatccctgc

SEQ ID NO: 54764 - DNA, 26 bp, Homo sapiens
gcttttcaagacgtgacatccctgct

SEQ ID NO: 54765 - DNA, 26 bp, Homo sapiens
cttttcaagacgtgacatccctgctc

SEQ ID NO: 54766 - DNA, 26 bp, Homo sapiens
ttttcaagacgtgacatccctgctcc

SEQ ID NO: 54767 - DNA, 26 bp, Homo sapiens
tttcaagacgtgacatccctgctcca

SEQ ID NO: 54768 - DNA, 26 bp, Homo sapiens
ttcaagacgtgacatccctgctccat

SEQ ID NO: 54769 - DNA, 26 bp, Homo sapiens
tcaagacgtgacatccctgctccatg

SEQ ID NO: 54770 - DNA, 26 bp, Homo sapiens
caagacgtgacatccctgctccatgg

SEQ ID NO: 54771 - DNA, 26 bp, Homo sapiens
aagacgtgacatccctgctccatggg

SEQ ID NO: 54772 - DNA, 26 bp, Homo sapiens
agacgtgacatccctgctccatgggc

SEQ ID NO: 54773 - DNA, 26 bp, Homo sapiens
gacgtgacatccctgctccatgggct

SEQ ID NO: 54774 - DNA, 26 bp, Homo sapiens
acgtgacatccctgctccatgggctt

SEQ ID NO: 54775 - DNA, 26 bp, Homo sapiens
cgtgacatccctgctccatgggcttc

SEQ ID NO: 54776 - DNA, 26 bp, Homo sapiens
gtgacatccctgctccatgggcttct

SEQ ID NO: 54777 - DNA, 26 bp, Homo sapiens
tgacatccctgctccatgggcttctg

SEQ ID NO: 54778 - DNA, 26 bp, Homo sapiens
gacatccctgctccatgggcttctgg

SEQ ID NO: 54779 - DNA, 26 bp, Homo sapiens
acatccctgctccatgggcttctggc

SEQ ID NO: 54780 - DNA, 26 bp, Homo sapiens
catccctgctccatgggcttctggct

SEQ ID NO: 54781 - DNA, 26 bp, Homo sapiens
atccctgctccatgggcttctggctg

SEQ ID NO: 54782 - DNA, 26 bp, Homo sapiens
tccctgctccatgggcttctggctgt

SEQ ID NO: 54783 - DNA, 26 bp, Homo sapiens
ccctgctccatgggcttctggctgta

SEQ ID NO: 54784 - DNA, 26 bp, Homo sapiens
cctgctccatgggcttctggctgtag

SEQ ID NO: 54785 - DNA, 26 bp, Homo sapiens
ctgctccatgggcttctggctgtagt

SEQ ID NO: 54786 - DNA, 26 bp, Homo sapiens
tgctccatgggcttctggctgtagtc

SEQ ID NO: 54787 - DNA, 26 bp, Homo sapiens
gctccatgggcttctggctgtagtct

SEQ ID NO: 54788 - DNA, 26 bp, Homo sapiens
ctccatgggcttctggctgtagtctg

SEQ ID NO: 54789 - DNA, 26 bp, Homo sapiens
tccatgggcttctggctgtagtctgt

SEQ ID NO: 54790 - DNA, 26 bp, Homo sapiens
ccatgggcttctggctgtagtctgtg

SEQ ID NO: 54791 - DNA, 26 bp, Homo sapiens
catgggcttctggctgtagtctgtgt

SEQ ID NO: 54792 - DNA, 26 bp, Homo sapiens
atgggcttctggctgtagtctgtgtg

SEQ ID NO: 54793 - DNA, 26 bp, Homo sapiens
tgggcttctggctgtagtctgtgtgt

SEQ ID NO: 54794 - DNA, 26 bp, Homo sapiens
gggcttctggctgtagtctgtgtgtc

SEQ ID NO: 54795 - DNA, 26 bp, Homo sapiens
ggcttctggctgtagtctgtgtgtca

SEQ ID NO: 54796 - DNA, 26 bp, Homo sapiens
gcttctggctgtagtctgtgtgtcaa

SEQ ID NO: 54797 - DNA, 26 bp, Homo sapiens
cttctggctgtagtctgtgtgtcaaa

SEQ ID NO: 54798 - DNA, 26 bp, Homo sapiens
ttctggctgtagtctgtgtgtcaaat

SEQ ID NO: 54799 - DNA, 26 bp, Homo sapiens
tctggctgtagtctgtgtgtcaaatg

SEQ ID NO: 54800 - DNA, 26 bp, Homo sapiens
ctggctgtagtctgtgtgtcaaatga

SEQ ID NO: 54801 - DNA, 26 bp, Homo sapiens
tggctgtagtctgtgtgtcaaatgaa

SEQ ID NO: 54802 - DNA, 26 bp, Homo sapiens
ggctgtagtctgtgtgtcaaatgaaa

SEQ ID NO: 54803 - DNA, 26 bp, Homo sapiens
gctgtagtctgtgtgtcaaatgaaag

SEQ ID NO: 54804 - DNA, 26 bp, Homo sapiens
ctgtagtctgtgtgtcaaatgaaagc

SEQ ID NO: 54805 - DNA, 26 bp, Homo sapiens
tgtagtctgtgtgtcaaatgaaagct

SEQ ID NO: 54806 - DNA, 26 bp, Homo sapiens
gtagtctgtgtgtcaaatgaaagcta

SEQ ID NO: 54807 - DNA, 26 bp, Homo sapiens
tagtctgtgtgtcaaatgaaagctag

SEQ ID NO: 54808 - DNA, 26 bp, Homo sapiens
agtctgtgtgtcaaatgaaagctagg

SEQ ID NO: 54809 - DNA, 26 bp, Homo sapiens
gtctgtgtgtcaaatgaaagctaggc

SEQ ID NO: 54810 - DNA, 26 bp, Homo sapiens
tctgtgtgtcaaatgaaagctaggcc

SEQ ID NO: 54811 - DNA, 26 bp, Homo sapiens
ctgtgtgtcaaatgaaagctaggccc

SEQ ID NO: 54812 - DNA, 26 bp, Homo sapiens
tgtgtgtcaaatgaaagctaggccct

SEQ ID NO: 54813 - DNA, 26 bp, Homo sapiens
gtgtgtcaaatgaaagctaggccctg

SEQ ID NO: 54814 - DNA, 26 bp, Homo sapiens
tgtgtcaaatgaaagctaggccctgt

SEQ ID NO: 54815 - DNA, 26 bp, Homo sapiens
gtgtcaaatgaaagctaggccctgtc

SEQ ID NO: 54816 - DNA, 26 bp, Homo sapiens
tgtcaaatgaaagctaggccctgtct

SEQ ID NO: 54817 - DNA, 26 bp, Homo sapiens
gtcaaatgaaagctaggccctgtctg

SEQ ID NO: 54818 - DNA, 26 bp, Homo sapiens
tcaaatgaaagctaggccctgtctgt

SEQ ID NO: 54819 - DNA, 26 bp, Homo sapiens
caaatgaaagctaggccctgtctgtt

SEQ ID NO: 54820 - DNA, 26 bp, Homo sapiens
aaatgaaagctaggccctgtctgttg

SEQ ID NO: 54821 - DNA, 26 bp, Homo sapiens
aatgaaagctaggccctgtctgttgg

SEQ ID NO: 54822 - DNA, 26 bp, Homo sapiens
atgaaagctaggccctgtctgttgga

SEQ ID NO: 54823 - DNA, 26 bp, Homo sapiens
tgaaagctaggccctgtctgttggaa

SEQ ID NO: 54824 - DNA, 26 bp, Homo sapiens
gaaagctaggccctgtctgttggaac

SEQ ID NO: 54825 - DNA, 26 bp, Homo sapiens
aaagctaggccctgtctgttggaaca

SEQ ID NO: 54826 - DNA, 26 bp, Homo sapiens
aagctaggccctgtctgttggaacag

SEQ ID NO: 54827 - DNA, 26 bp, Homo sapiens
agctaggccctgtctgttggaacagc

SEQ ID NO: 54828 - DNA, 26 bp, Homo sapiens
gctaggccctgtctgttggaacagca

SEQ ID NO: 54829 - DNA, 26 bp, Homo sapiens
ctaggccctgtctgttggaacagcag

SEQ ID NO: 54830 - DNA, 26 bp, Homo sapiens
taggccctgtctgttggaacagcagc

SEQ ID NO: 54831 - DNA, 26 bp, Homo sapiens
aggccctgtctgttggaacagcagct

SEQ ID NO: 54832 - DNA, 26 bp, Homo sapiens
ggccctgtctgttggaacagcagctc

SEQ ID NO: 54833 - DNA, 26 bp, Homo sapiens
gccctgtctgttggaacagcagctcc

SEQ ID NO: 54834 - DNA, 26 bp, Homo sapiens
ccctgtctgttggaacagcagctcca

SEQ ID NO: 54835 - DNA, 26 bp, Homo sapiens
cctgtctgttggaacagcagctccag

SEQ ID NO: 54836 - DNA, 26 bp, Homo sapiens
ctgtctgttggaacagcagctccaga

SEQ ID NO: 54837 - DNA, 26 bp, Homo sapiens
tgtctgttggaacagcagctccagaa

SEQ ID NO: 54838 - DNA, 26 bp, Homo sapiens
gtctgttggaacagcagctccagaac

SEQ ID NO: 54839 - DNA, 26 bp, Homo sapiens
tctgttggaacagcagctccagaaca

SEQ ID NO: 54840 - DNA, 26 bp, Homo sapiens
ctgttggaacagcagctccagaacag

SEQ ID NO: 54841 - DNA, 26 bp, Homo sapiens
tgttggaacagcagctccagaacagc

SEQ ID NO: 54842 - DNA, 26 bp, Homo sapiens
gttggaacagcagctccagaacagca

SEQ ID NO: 54843 - DNA, 26 bp, Homo sapiens
ttggaacagcagctccagaacagcac

SEQ ID NO: 54844 - DNA, 26 bp, Homo sapiens
tggaacagcagctccagaacagcact

SEQ ID NO: 54845 - DNA, 26 bp, Homo sapiens
ggaacagcagctccagaacagcactg

SEQ ID NO: 54846 - DNA, 26 bp, Homo sapiens
gaacagcagctccagaacagcactgt

SEQ ID NO: 54847 - DNA, 26 bp, Homo sapiens
aacagcagctccagaacagcactgtt

SEQ ID NO: 54848 - DNA, 26 bp, Homo sapiens
acagcagctccagaacagcactgttc

SEQ ID NO: 54849 - DNA, 26 bp, Homo sapiens
cagcagctccagaacagcactgttcc

SEQ ID NO: 54850 - DNA, 26 bp, Homo sapiens
agcagctccagaacagcactgttcct

SEQ ID NO: 54851 - DNA, 26 bp, Homo sapiens
gcagctccagaacagcactgttcctt

SEQ ID NO: 54852 - DNA, 26 bp, Homo sapiens
cagctccagaacagcactgttccttc

SEQ ID NO: 54853 - DNA, 26 bp, Homo sapiens
agctccagaacagcactgttccttca

SEQ ID NO: 54854 - DNA, 26 bp, Homo sapiens
gctccagaacagcactgttccttcaa

SEQ ID NO: 54855 - DNA, 26 bp, Homo sapiens
ctccagaacagcactgttccttcaag

SEQ ID NO: 54856 - DNA, 26 bp, Homo sapiens
tccagaacagcactgttccttcaagc

SEQ ID NO: 54857 - DNA, 26 bp, Homo sapiens
ccagaacagcactgttccttcaagca

SEQ ID NO: 54858 - DNA, 26 bp, Homo sapiens
cagaacagcactgttccttcaagcag

SEQ ID NO: 54859 - DNA, 26 bp, Homo sapiens
agaacagcactgttccttcaagcagg

SEQ ID NO: 54860 - DNA, 26 bp, Homo sapiens
gaacagcactgttccttcaagcaggc

SEQ ID NO: 54861 - DNA, 26 bp, Homo sapiens
aacagcactgttccttcaagcaggca

SEQ ID NO: 54862 - DNA, 26 bp, Homo sapiens
acagcactgttccttcaagcaggcaa

SEQ ID NO: 54863 - DNA, 26 bp, Homo sapiens
cagcactgttccttcaagcaggcaaa

SEQ ID NO: 54864 - DNA, 26 bp, Homo sapiens
agcactgttccttcaagcaggcaaag

SEQ ID NO: 54865 - DNA, 26 bp, Homo sapiens
gcactgttccttcaagcaggcaaagc

SEQ ID NO: 54866 - DNA, 26 bp, Homo sapiens
cactgttccttcaagcaggcaaagcg

SEQ ID NO: 54867 - DNA, 26 bp, Homo sapiens
actgttccttcaagcaggcaaagcgg

SEQ ID NO: 54868 - DNA, 26 bp, Homo sapiens
ctgttccttcaagcaggcaaagcggg

SEQ ID NO: 54869 - DNA, 26 bp, Homo sapiens
tgttccttcaagcaggcaaagcgggc

SEQ ID NO: 54870 - DNA, 26 bp, Homo sapiens
gttccttcaagcaggcaaagcgggcc

SEQ ID NO: 54871 - DNA, 26 bp, Homo sapiens
ttccttcaagcaggcaaagcgggccc

SEQ ID NO: 54872 - DNA, 26 bp, Homo sapiens
tccttcaagcaggcaaagcgggccca

SEQ ID NO: 54873 - DNA, 26 bp, Homo sapiens
ccttcaagcaggcaaagcgggcccag

SEQ ID NO: 54874 - DNA, 26 bp, Homo sapiens
cttcaagcaggcaaagcgggcccagg

SEQ ID NO: 54875 - DNA, 26 bp, Homo sapiens
ttcaagcaggcaaagcgggcccagga

SEQ ID NO: 54876 - DNA, 26 bp, Homo sapiens
tcaagcaggcaaagcgggcccaggag

SEQ ID NO: 54877 - DNA, 26 bp, Homo sapiens
caagcaggcaaagcgggcccaggaga

SEQ ID NO: 54878 - DNA, 26 bp, Homo sapiens
aagcaggcaaagcgggcccaggagaa

SEQ ID NO: 54879 - DNA, 26 bp, Homo sapiens
agcaggcaaagcgggcccaggagaaa

SEQ ID NO: 54880 - DNA, 26 bp, Homo sapiens
gcaggcaaagcgggcccaggagaaag

SEQ ID NO: 54881 - DNA, 26 bp, Homo sapiens
caggcaaagcgggcccaggagaaagc

SEQ ID NO: 54882 - DNA, 26 bp, Homo sapiens
aggcaaagcgggcccaggagaaagca

SEQ ID NO: 54883 - DNA, 26 bp, Homo sapiens
ggcaaagcgggcccaggagaaagcag

SEQ ID NO: 54884 - DNA, 26 bp, Homo sapiens
gcaaagcgggcccaggagaaagcagg

SEQ ID NO: 54885 - DNA, 26 bp, Homo sapiens
caaagcgggcccaggagaaagcaggt

SEQ ID NO: 54886 - DNA, 26 bp, Homo sapiens
aaagcgggcccaggagaaagcaggtg

SEQ ID NO: 54887 - DNA, 26 bp, Homo sapiens
aagcgggcccaggagaaagcaggtgg

SEQ ID NO: 54888 - DNA, 26 bp, Homo sapiens
agcgggcccaggagaaagcaggtgga

SEQ ID NO: 54889 - DNA, 26 bp, Homo sapiens
gcgggcccaggagaaagcaggtggaa

SEQ ID NO: 54890 - DNA, 26 bp, Homo sapiens
cgggcccaggagaaagcaggtggaaa

SEQ ID NO: 54891 - DNA, 26 bp, Homo sapiens
gggcccaggagaaagcaggtggaaag

SEQ ID NO: 54892 - DNA, 26 bp, Homo sapiens
ggcccaggagaaagcaggtggaaagg

SEQ ID NO: 54893 - DNA, 26 bp, Homo sapiens
gcccaggagaaagcaggtggaaaggc

SEQ ID NO: 54894 - DNA, 26 bp, Homo sapiens
cccaggagaaagcaggtggaaaggca

SEQ ID NO: 54895 - DNA, 26 bp, Homo sapiens
ccaggagaaagcaggtggaaaggcaa

SEQ ID NO: 54896 - DNA, 26 bp, Homo sapiens
caggagaaagcaggtggaaaggcaag

SEQ ID NO: 54897 - DNA, 26 bp, Homo sapiens
aggagaaagcaggtggaaaggcaaga

SEQ ID NO: 54898 - DNA, 26 bp, Homo sapiens
ggagaaagcaggtggaaaggcaagag

SEQ ID NO: 54899 - DNA, 26 bp, Homo sapiens
gagaaagcaggtggaaaggcaagagt

SEQ ID NO: 54900 - DNA, 26 bp, Homo sapiens
agaaagcaggtggaaaggcaagagtc

SEQ ID NO: 54901 - DNA, 26 bp, Homo sapiens
gaaagcaggtggaaaggcaagagtca

SEQ ID NO: 54902 - DNA, 26 bp, Homo sapiens
aaagcaggtggaaaggcaagagtcag

SEQ ID NO: 54903 - DNA, 26 bp, Homo sapiens
aagcaggtggaaaggcaagagtcaga

SEQ ID NO: 54904 - DNA, 26 bp, Homo sapiens
agcaggtggaaaggcaagagtcagag

SEQ ID NO: 54905 - DNA, 26 bp, Homo sapiens
gcaggtggaaaggcaagagtcagaga

SEQ ID NO: 54906 - DNA, 26 bp, Homo sapiens
caggtggaaaggcaagagtcagagac

SEQ ID NO: 54907 - DNA, 26 bp, Homo sapiens
aggtggaaaggcaagagtcagagact

SEQ ID NO: 54908 - DNA, 26 bp, Homo sapiens
ggtggaaaggcaagagtcagagactt

SEQ ID NO: 54909 - DNA, 26 bp, Homo sapiens
gtggaaaggcaagagtcagagactta

SEQ ID NO: 54910 - DNA, 26 bp, Homo sapiens
tggaaaggcaagagtcagagacttaa

SEQ ID NO: 54911 - DNA, 26 bp, Homo sapiens
ggaaaggcaagagtcagagacttaaa

SEQ ID NO: 54912 - DNA, 26 bp, Homo sapiens
gaaaggcaagagtcagagacttaaac

SEQ ID NO: 54913 - DNA, 26 bp, Homo sapiens
aaaggcaagagtcagagacttaaact

SEQ ID NO: 54914 - DNA, 26 bp, Homo sapiens
aaggcaagagtcagagacttaaactc

SEQ ID NO: 54915 - DNA, 26 bp, Homo sapiens
aggcaagagtcagagacttaaactca

SEQ ID NO: 54916 - DNA, 26 bp, Homo sapiens
ggcaagagtcagagacttaaactcaa

SEQ ID NO: 54917 - DNA, 26 bp, Homo sapiens
gcaagagtcagagacttaaactcaat

SEQ ID NO: 54918 - DNA, 26 bp, Homo sapiens
caagagtcagagacttaaactcaatg

SEQ ID NO: 54919 - DNA, 26 bp, Homo sapiens
aagagtcagagacttaaactcaatgt

SEQ ID NO: 54920 - DNA, 26 bp, Homo sapiens
agagtcagagacttaaactcaatgtg

SEQ ID NO: 54921 - DNA, 26 bp, Homo sapiens
gagtcagagacttaaactcaatgtgt

SEQ ID NO: 54922 - DNA, 26 bp, Homo sapiens
agtcagagacttaaactcaatgtgtt

SEQ ID NO: 54923 - DNA, 26 bp, Homo sapiens
gtcagagacttaaactcaatgtgttt

SEQ ID NO: 54924 - DNA, 26 bp, Homo sapiens
tcagagacttaaactcaatgtgtttt

SEQ ID NO: 54925 - DNA, 26 bp, Homo sapiens
cagagacttaaactcaatgtgttttt

SEQ ID NO: 54926 - DNA, 26 bp, Homo sapiens
agagacttaaactcaatgtgtttttg

SEQ ID NO: 54927 - DNA, 26 bp, Homo sapiens
gagacttaaactcaatgtgtttttgt

SEQ ID NO: 54928 - DNA, 26 bp, Homo sapiens
agacttaaactcaatgtgtttttgtt

SEQ ID NO: 54929 - DNA, 26 bp, Homo sapiens
gacttaaactcaatgtgtttttgttt

SEQ ID NO: 54930 - DNA, 26 bp, Homo sapiens
acttaaactcaatgtgtttttgttta

SEQ ID NO: 54931 - DNA, 26 bp, Homo sapiens
cttaaactcaatgtgtttttgtttag

SEQ ID NO: 54932 - DNA, 26 bp, Homo sapiens
ttaaactcaatgtgtttttgtttagg

SEQ ID NO: 54933 - DNA, 26 bp, Homo sapiens
taaactcaatgtgtttttgtttagga

SEQ ID NO: 54934 - DNA, 26 bp, Homo sapiens
aaactcaatgtgtttttgtttaggag

SEQ ID NO: 54935 - DNA, 26 bp, Homo sapiens
aactcaatgtgtttttgtttaggagg

SEQ ID NO: 54936 - DNA, 26 bp, Homo sapiens
actcaatgtgtttttgtttaggagga

SEQ ID NO: 54937 - DNA, 26 bp, Homo sapiens
ctcaatgtgtttttgtttaggaggaa

SEQ ID NO: 54938 - DNA, 26 bp, Homo sapiens
tcaatgtgtttttgtttaggaggaaa

SEQ ID NO: 54939 - DNA, 26 bp, Homo sapiens
caatgtgtttttgtttaggaggaaaa

SEQ ID NO: 54940 - DNA, 26 bp, Homo sapiens
aatgtgtttttgtttaggaggaaaat

SEQ ID NO: 54941 - DNA, 26 bp, Homo sapiens
atgtgtttttgtttaggaggaaaatt

SEQ ID NO: 54942 - DNA, 26 bp, Homo sapiens
tgtgtttttgtttaggaggaaaatta

SEQ ID NO: 54943 - DNA, 26 bp, Homo sapiens
gtgtttttgtttaggaggaaaattat

SEQ ID NO: 54944 - DNA, 26 bp, Homo sapiens
tgtttttgtttaggaggaaaattatt

SEQ ID NO: 54945 - DNA, 26 bp, Homo sapiens
gtttttgtttaggaggaaaattatta

SEQ ID NO: 54946 - DNA, 26 bp, Homo sapiens
tttttgtttaggaggaaaattattat

SEQ ID NO: 54947 - DNA, 26 bp, Homo sapiens
ttttgtttaggaggaaaattattatt

SEQ ID NO: 54948 - DNA, 26 bp, Homo sapiens
tttgtttaggaggaaaattattattc

SEQ ID NO: 54949 - DNA, 26 bp, Homo sapiens
ttgtttaggaggaaaattattattcc

SEQ ID NO: 54950 - DNA, 26 bp, Homo sapiens
tgtttaggaggaaaattattattcca

SEQ ID NO: 54951 - DNA, 26 bp, Homo sapiens
gtttaggaggaaaattattattccaa

SEQ ID NO: 54952 - DNA, 26 bp, Homo sapiens
tttaggaggaaaattattattccaaa

SEQ ID NO: 54953 - DNA, 26 bp, Homo sapiens
ttaggaggaaaattattattccaaat

SEQ ID NO: 54954 - DNA, 26 bp, Homo sapiens
taggaggaaaattattattccaaata

SEQ ID NO: 54955 - DNA, 26 bp, Homo sapiens
aggaggaaaattattattccaaataa

SEQ ID NO: 54956 - DNA, 26 bp, Homo sapiens
ggaggaaaattattattccaaataaa

SEQ ID NO: 54957 - DNA, 26 bp, Homo sapiens
gaggaaaattattattccaaataaaa

SEQ ID NO: 54958 - DNA, 26 bp, Homo sapiens
aggaaaattattattccaaataaaag

SEQ ID NO: 54959 - DNA, 26 bp, Homo sapiens
ggaaaattattattccaaataaaagt

SEQ ID NO: 54960 - DNA, 26 bp, Homo sapiens
gaaaattattattccaaataaaagtt

SEQ ID NO: 54961 - DNA, 26 bp, Homo sapiens
aaaattattattccaaataaaagttg

SEQ ID NO: 54962 - DNA, 26 bp, Homo sapiens
aaattattattccaaataaaagttgg

SEQ ID NO: 54963 - DNA, 26 bp, Homo sapiens
aattattattccaaataaaagttggt

SEQ ID NO: 54964 - DNA, 26 bp, Homo sapiens
attattattccaaataaaagttggtg

SEQ ID NO: 54965 - DNA, 26 bp, Homo sapiens
ttattattccaaataaaagttggtgt

SEQ ID NO: 54966 - DNA, 26 bp, Homo sapiens
tattattccaaataaaagttggtgtt

SEQ ID NO: 54967 - DNA, 26 bp, Homo sapiens
attattccaaataaaagttggtgttc

SEQ ID NO: 54968 - DNA, 26 bp, Homo sapiens
ttattccaaataaaagttggtgttca

SEQ ID NO: 54969 - DNA, 26 bp, Homo sapiens
tattccaaataaaagttggtgttcac

SEQ ID NO: 54970 - DNA, 26 bp, Homo sapiens
attccaaataaaagttggtgttcacc

SEQ ID NO: 54971 - DNA, 26 bp, Homo sapiens
ttccaaataaaagttggtgttcaccc

SEQ ID NO: 54972 - DNA, 26 bp, Homo sapiens
tccaaataaaagttggtgttcaccca

SEQ ID NO: 54973 - DNA, 26 bp, Homo sapiens
ccaaataaaagttggtgttcacccat

SEQ ID NO: 54974 - DNA, 26 bp, Homo sapiens
caaataaaagttggtgttcacccata

SEQ ID NO: 54975 - DNA, 26 bp, Homo sapiens
aaataaaagttggtgttcacccatat

SEQ ID NO: 54976 - DNA, 26 bp, Homo sapiens
aataaaagttggtgttcacccatatt

SEQ ID NO: 54977 - DNA, 26 bp, Homo sapiens
ataaaagttggtgttcacccatatta

SEQ ID NO: 54978 - DNA, 26 bp, Homo sapiens
taaaagttggtgttcacccatattaa

SEQ ID NO: 54979 - DNA, 26 bp, Homo sapiens
aaaagttggtgttcacccatattaaa

SEQ ID NO: 54980 - DNA, 26 bp, Homo sapiens
aaagttggtgttcacccatattaaat

SEQ ID NO: 54981 - DNA, 26 bp, Homo sapiens
aagttggtgttcacccatattaaata

SEQ ID NO: 54982 - DNA, 26 bp, Homo sapiens
agttggtgttcacccatattaaatac

SEQ ID NO: 54983 - DNA, 26 bp, Homo sapiens
gttggtgttcacccatattaaatacg

SEQ ID NO: 54984 - DNA, 26 bp, Homo sapiens
ttggtgttcacccatattaaatacga

SEQ ID NO: 54985 - DNA, 26 bp, Homo sapiens
tggtgttcacccatattaaatacgag

SEQ ID NO: 54986 - DNA, 26 bp, Homo sapiens
ggtgttcacccatattaaatacgaga

SEQ ID NO: 54987 - DNA, 26 bp, Homo sapiens
gtgttcacccatattaaatacgagaa

SEQ ID NO: 54988 - DNA, 26 bp, Homo sapiens
tgttcacccatattaaatacgagaaa

SEQ ID NO: 54989 - DNA, 26 bp, Homo sapiens
gttcacccatattaaatacgagaaat

SEQ ID NO: 54990 - DNA, 26 bp, Homo sapiens
ttcacccatattaaatacgagaaata

SEQ ID NO: 54991 - DNA, 26 bp, Homo sapiens
tcacccatattaaatacgagaaatat

SEQ ID NO: 54992 - DNA, 26 bp, Homo sapiens
cacccatattaaatacgagaaatata

SEQ ID NO: 54993 - DNA, 26 bp, Homo sapiens
acccatattaaatacgagaaatataa

SEQ ID NO: 54994 - DNA, 26 bp, Homo sapiens
cccatattaaatacgagaaatataaa

SEQ ID NO: 54995 - DNA, 26 bp, Homo sapiens
ccatattaaatacgagaaatataaaa

SEQ ID NO: 54996 - DNA, 26 bp, Homo sapiens
catattaaatacgagaaatataaaaa

SEQ ID NO: 54997 - DNA, 26 bp, Homo sapiens
atattaaatacgagaaatataaaaac

SEQ ID NO: 54998 - DNA, 26 bp, Homo sapiens
tattaaatacgagaaatataaaaacc

SEQ ID NO: 54999 - DNA, 26 bp, Homo sapiens
attaaatacgagaaatataaaaacca

SEQ ID NO: 55000 - DNA, 26 bp, Homo sapiens
ttaaatacgagaaatataaaaaccaa

SEQ ID NO: 55001 - DNA, 26 bp, Homo sapiens
taaatacgagaaatataaaaaccaaa

SEQ ID NO: 55002 - DNA, 26 bp, Homo sapiens
aaatacgagaaatataaaaaccaaaa

SEQ ID NO: 55003 - DNA, 26 bp, Homo sapiens
aatacgagaaatataaaaaccaaaag

SEQ ID NO: 55004 - DNA, 26 bp, Homo sapiens
atacgagaaatataaaaaccaaaagt

SEQ ID NO: 55005 - DNA, 26 bp, Homo sapiens
tacgagaaatataaaaaccaaaagtc

SEQ ID NO: 55006 - DNA, 26 bp, Homo sapiens
acgagaaatataaaaaccaaaagtcc

SEQ ID NO: 55007 - DNA, 26 bp, Homo sapiens
cgagaaatataaaaaccaaaagtcct

SEQ ID NO: 55008 - DNA, 26 bp, Homo sapiens
gagaaatataaaaaccaaaagtcctc

SEQ ID NO: 55009 - DNA, 26 bp, Homo sapiens
agaaatataaaaaccaaaagtcctct

SEQ ID NO: 55010 - DNA, 26 bp, Homo sapiens
gaaatataaaaaccaaaagtcctctc

SEQ ID NO: 55011 - DNA, 26 bp, Homo sapiens
aaatataaaaaccaaaagtcctctcc

SEQ ID NO: 55012 - DNA, 26 bp, Homo sapiens
aatataaaaaccaaaagtcctctcca

SEQ ID NO: 55013 - DNA, 26 bp, Homo sapiens
atataaaaaccaaaagtcctctccat

SEQ ID NO: 55014 - DNA, 26 bp, Homo sapiens
tataaaaaccaaaagtcctctccatg

SEQ ID NO: 55015 - DNA, 26 bp, Homo sapiens
ataaaaaccaaaagtcctctccatgt

SEQ ID NO: 55016 - DNA, 26 bp, Homo sapiens
taaaaaccaaaagtcctctccatgtt

SEQ ID NO: 55017 - DNA, 26 bp, Homo sapiens
aaaaaccaaaagtcctctccatgttc

SEQ ID NO: 55018 - DNA, 26 bp, Homo sapiens
aaaaccaaaagtcctctccatgttca

SEQ ID NO: 55019 - DNA, 26 bp, Homo sapiens
aaaccaaaagtcctctccatgttcat

SEQ ID NO: 55020 - DNA, 26 bp, Homo sapiens
aaccaaaagtcctctccatgttcata

SEQ ID NO: 55021 - DNA, 26 bp, Homo sapiens
accaaaagtcctctccatgttcatac

SEQ ID NO: 55022 - DNA, 26 bp, Homo sapiens
ccaaaagtcctctccatgttcataca

SEQ ID NO: 55023 - DNA, 26 bp, Homo sapiens
caaaagtcctctccatgttcatacaa

SEQ ID NO: 55024 - DNA, 26 bp, Homo sapiens
aaaagtcctctccatgttcatacaac

SEQ ID NO: 55025 - DNA, 26 bp, Homo sapiens
aaagtcctctccatgttcatacaact

SEQ ID NO: 55026 - DNA, 26 bp, Homo sapiens
aagtcctctccatgttcatacaactc

SEQ ID NO: 55027 - DNA, 26 bp, Homo sapiens
agtcctctccatgttcatacaactct

SEQ ID NO: 55028 - DNA, 26 bp, Homo sapiens
gtcctctccatgttcatacaactctt

SEQ ID NO: 55029 - DNA, 26 bp, Homo sapiens
tcctctccatgttcatacaactctta

SEQ ID NO: 55030 - DNA, 26 bp, Homo sapiens
cctctccatgttcatacaactcttaa

SEQ ID NO: 55031 - DNA, 26 bp, Homo sapiens
ctctccatgttcatacaactcttaaa

SEQ ID NO: 55032 - DNA, 26 bp, Homo sapiens
tctccatgttcatacaactcttaaaa

SEQ ID NO: 55033 - DNA, 26 bp, Homo sapiens
ctccatgttcatacaactcttaaaac

SEQ ID NO: 55034 - DNA, 26 bp, Homo sapiens
tccatgttcatacaactcttaaaact

SEQ ID NO: 55035 - DNA, 26 bp, Homo sapiens
ccatgttcatacaactcttaaaactg

SEQ ID NO: 55036 - DNA, 26 bp, Homo sapiens
catgttcatacaactcttaaaactgt

SEQ ID NO: 55037 - DNA, 26 bp, Homo sapiens
atgttcatacaactcttaaaactgtg

SEQ ID NO: 55038 - DNA, 26 bp, Homo sapiens
tgttcatacaactcttaaaactgtgc

SEQ ID NO: 55039 - DNA, 26 bp, Homo sapiens
gttcatacaactcttaaaactgtgct

SEQ ID NO: 55040 - DNA, 26 bp, Homo sapiens
ttcatacaactcttaaaactgtgctt

SEQ ID NO: 55041 - DNA, 26 bp, Homo sapiens
tcatacaactcttaaaactgtgcttg

SEQ ID NO: 55042 - DNA, 26 bp, Homo sapiens
catacaactcttaaaactgtgcttgt

SEQ ID NO: 55043 - DNA, 26 bp, Homo sapiens
atacaactcttaaaactgtgcttgtg

SEQ ID NO: 55044 - DNA, 26 bp, Homo sapiens
tacaactcttaaaactgtgcttgtgt

SEQ ID NO: 55045 - DNA, 26 bp, Homo sapiens
acaactcttaaaactgtgcttgtgtc

SEQ ID NO: 55046 - DNA, 26 bp, Homo sapiens
caactcttaaaactgtgcttgtgtcc

SEQ ID NO: 55047 - DNA, 26 bp, Homo sapiens
aactcttaaaactgtgcttgtgtcct

SEQ ID NO: 55048 - DNA, 26 bp, Homo sapiens
actcttaaaactgtgcttgtgtcctg

SEQ ID NO: 55049 - DNA, 26 bp, Homo sapiens
ctcttaaaactgtgcttgtgtcctgc

SEQ ID NO: 55050 - DNA, 26 bp, Homo sapiens
tcttaaaactgtgcttgtgtcctgca

SEQ ID NO: 55051 - DNA, 26 bp, Homo sapiens
cttaaaactgtgcttgtgtcctgcaa

SEQ ID NO: 55052 - DNA, 26 bp, Homo sapiens
ttaaaactgtgcttgtgtcctgcaat

SEQ ID NO: 55053 - DNA, 26 bp, Homo sapiens
taaaactgtgcttgtgtcctgcaatc

SEQ ID NO: 55054 - DNA, 26 bp, Homo sapiens
aaaactgtgcttgtgtcctgcaatcg

SEQ ID NO: 55055 - DNA, 26 bp, Homo sapiens
aaactgtgcttgtgtcctgcaatcgg

SEQ ID NO: 55056 - DNA, 26 bp, Homo sapiens
aactgtgcttgtgtcctgcaatcggt

SEQ ID NO: 55057 - DNA, 26 bp, Homo sapiens
actgtgcttgtgtcctgcaatcggtg

SEQ ID NO: 55058 - DNA, 26 bp, Homo sapiens
ctgtgcttgtgtcctgcaatcggtgg

SEQ ID NO: 55059 - DNA, 26 bp, Homo sapiens
tgtgcttgtgtcctgcaatcggtggc

SEQ ID NO: 55060 - DNA, 26 bp, Homo sapiens
gtgcttgtgtcctgcaatcggtggca

SEQ ID NO: 55061 - DNA, 26 bp, Homo sapiens
tgcttgtgtcctgcaatcggtggcat

SEQ ID NO: 55062 - DNA, 26 bp, Homo sapiens
gcttgtgtcctgcaatcggtggcata

SEQ ID NO: 55063 - DNA, 26 bp, Homo sapiens
cttgtgtcctgcaatcggtggcatat

SEQ ID NO: 55064 - DNA, 26 bp, Homo sapiens
ttgtgtcctgcaatcggtggcatata

SEQ ID NO: 55065 - DNA, 26 bp, Homo sapiens
tgtgtcctgcaatcggtggcatataa

SEQ ID NO: 55066 - DNA, 26 bp, Homo sapiens
gtgtcctgcaatcggtggcatataaa

SEQ ID NO: 55067 - DNA, 26 bp, Homo sapiens
tgtcctgcaatcggtggcatataaat

SEQ ID NO: 55068 - DNA, 26 bp, Homo sapiens
gtcctgcaatcggtggcatataaatt

SEQ ID NO: 55069 - DNA, 26 bp, Homo sapiens
tcctgcaatcggtggcatataaattt

SEQ ID NO: 55070 - DNA, 26 bp, Homo sapiens
cctgcaatcggtggcatataaatttg

SEQ ID NO: 55071 - DNA, 26 bp, Homo sapiens
ctgcaatcggtggcatataaatttgg

SEQ ID NO: 55072 - DNA, 26 bp, Homo sapiens
tgcaatcggtggcatataaatttggc

SEQ ID NO: 55073 - DNA, 26 bp, Homo sapiens
gcaatcggtggcatataaatttggct

SEQ ID NO: 55074 - DNA, 26 bp, Homo sapiens
caatcggtggcatataaatttggctt

SEQ ID NO: 55075 - DNA, 26 bp, Homo sapiens
aatcggtggcatataaatttggcttt

SEQ ID NO: 55076 - DNA, 26 bp, Homo sapiens
atcggtggcatataaatttggctttc

SEQ ID NO: 55077 - DNA, 26 bp, Homo sapiens
tcggtggcatataaatttggctttca

SEQ ID NO: 55078 - DNA, 26 bp, Homo sapiens
cggtggcatataaatttggctttcat

SEQ ID NO: 55079 - DNA, 26 bp, Homo sapiens
ggtggcatataaatttggctttcatt

SEQ ID NO: 55080 - DNA, 26 bp, Homo sapiens
gtggcatataaatttggctttcattt

SEQ ID NO: 55081 - DNA, 26 bp, Homo sapiens
tggcatataaatttggctttcatttt

SEQ ID NO: 55082 - DNA, 26 bp, Homo sapiens
ggcatataaatttggctttcattttt

SEQ ID NO: 55083 - DNA, 26 bp, Homo sapiens
gcatataaatttggctttcattttta

SEQ ID NO: 55084 - DNA, 26 bp, Homo sapiens
catataaatttggctttcatttttaa

SEQ ID NO: 55085 - DNA, 26 bp, Homo sapiens
atataaatttggctttcatttttaat

SEQ ID NO: 55086 - DNA, 26 bp, Homo sapiens
tataaatttggctttcatttttaatg

SEQ ID NO: 55087 - DNA, 26 bp, Homo sapiens
ataaatttggctttcatttttaatga

SEQ ID NO: 55088 - DNA, 26 bp, Homo sapiens
taaatttggctttcatttttaatgaa

SEQ ID NO: 55089 - DNA, 26 bp, Homo sapiens
aaatttggctttcatttttaatgaaa

SEQ ID NO: 55090 - DNA, 26 bp, Homo sapiens
aatttggctttcatttttaatgaaaa

SEQ ID NO: 55091 - DNA, 26 bp, Homo sapiens
atttggctttcatttttaatgaaaat

SEQ ID NO: 55092 - DNA, 26 bp, Homo sapiens
tttggctttcatttttaatgaaaatg

SEQ ID NO: 55093 - DNA, 26 bp, Homo sapiens
ttggctttcatttttaatgaaaatga

SEQ ID NO: 55094 - DNA, 26 bp, Homo sapiens
tggctttcatttttaatgaaaatgaa

SEQ ID NO: 55095 - DNA, 26 bp, Homo sapiens
ggctttcatttttaatgaaaatgaaa

SEQ ID NO: 55096 - DNA, 26 bp, Homo sapiens
gctttcatttttaatgaaaatgaaac

SEQ ID NO: 55097 - DNA, 26 bp, Homo sapiens
ctttcatttttaatgaaaatgaaaca

SEQ ID NO: 55098 - DNA, 26 bp, Homo sapiens
tttcatttttaatgaaaatgaaacat

SEQ ID NO: 55099 - DNA, 26 bp, Homo sapiens
ttcatttttaatgaaaatgaaacatt

SEQ ID NO: 55100 - DNA, 26 bp, Homo sapiens
tcatttttaatgaaaatgaaacattt

SEQ ID NO: 55101 - DNA, 26 bp, Homo sapiens
catttttaatgaaaatgaaacatttt

SEQ ID NO: 55102 - DNA, 26 bp, Homo sapiens
atttttaatgaaaatgaaacatttta

SEQ ID NO: 55103 - DNA, 26 bp, Homo sapiens
tttttaatgaaaatgaaacattttaa

SEQ ID NO: 55104 - DNA, 26 bp, Homo sapiens
ttttaatgaaaatgaaacattttaag

SEQ ID NO: 55105 - DNA, 26 bp, Homo sapiens
tttaatgaaaatgaaacattttaaga

SEQ ID NO: 55106 - DNA, 26 bp, Homo sapiens
ttaatgaaaatgaaacattttaagaa

SEQ ID NO: 55107 - DNA, 26 bp, Homo sapiens
taatgaaaatgaaacattttaagaaa

SEQ ID NO: 55108 - DNA, 26 bp, Homo sapiens
aatgaaaatgaaacattttaagaaat

SEQ ID NO: 55109 - DNA, 26 bp, Homo sapiens
atgaaaatgaaacattttaagaaatg

SEQ ID NO: 55110 - DNA, 26 bp, Homo sapiens
tgaaaatgaaacattttaagaaatgt

SEQ ID NO: 55111 - DNA, 26 bp, Homo sapiens
gaaaatgaaacattttaagaaatgtt

SEQ ID NO: 55112 - DNA, 26 bp, Homo sapiens
aaaatgaaacattttaagaaatgttt

SEQ ID NO: 55113 - DNA, 26 bp, Homo sapiens
aaatgaaacattttaagaaatgtttg

SEQ ID NO: 55114 - DNA, 26 bp, Homo sapiens
aatgaaacattttaagaaatgtttgc

SEQ ID NO: 55115 - DNA, 26 bp, Homo sapiens
atgaaacattttaagaaatgtttgcc

SEQ ID NO: 55116 - DNA, 26 bp, Homo sapiens
tgaaacattttaagaaatgtttgcct

SEQ ID NO: 55117 - DNA, 26 bp, Homo sapiens
gaaacattttaagaaatgtttgcctc

SEQ ID NO: 55118 - DNA, 26 bp, Homo sapiens
aaacattttaagaaatgtttgcctct

SEQ ID NO: 55119 - DNA, 26 bp, Homo sapiens
aacattttaagaaatgtttgcctcta

SEQ ID NO: 55120 - DNA, 26 bp, Homo sapiens
acattttaagaaatgtttgcctctag

SEQ ID NO: 55121 - DNA, 26 bp, Homo sapiens
cattttaagaaatgtttgcctctagg

SEQ ID NO: 55122 - DNA, 26 bp, Homo sapiens
attttaagaaatgtttgcctctaggg

SEQ ID NO: 55123 - DNA, 26 bp, Homo sapiens
ttttaagaaatgtttgcctctaggga

SEQ ID NO: 55124 - DNA, 26 bp, Homo sapiens
tttaagaaatgtttgcctctagggaa

SEQ ID NO: 55125 - DNA, 26 bp, Homo sapiens
ttaagaaatgtttgcctctagggaaa

SEQ ID NO: 55126 - DNA, 26 bp, Homo sapiens
taagaaatgtttgcctctagggaaag

SEQ ID NO: 55127 - DNA, 26 bp, Homo sapiens
aagaaatgtttgcctctagggaaaga

SEQ ID NO: 55128 - DNA, 26 bp, Homo sapiens
agaaatgtttgcctctagggaaagaa

SEQ ID NO: 55129 - DNA, 26 bp, Homo sapiens
gaaatgtttgcctctagggaaagaat

SEQ ID NO: 55130 - DNA, 26 bp, Homo sapiens
aaatgtttgcctctagggaaagaata

SEQ ID NO: 55131 - DNA, 26 bp, Homo sapiens
aatgtttgcctctagggaaagaatag

SEQ ID NO: 55132 - DNA, 26 bp, Homo sapiens
atgtttgcctctagggaaagaataga

SEQ ID NO: 55133 - DNA, 26 bp, Homo sapiens
tgtttgcctctagggaaagaatagat

SEQ ID NO: 55134 - DNA, 26 bp, Homo sapiens
gtttgcctctagggaaagaatagatg

SEQ ID NO: 55135 - DNA, 26 bp, Homo sapiens
tttgcctctagggaaagaatagatga

SEQ ID NO: 55136 - DNA, 26 bp, Homo sapiens
ttgcctctagggaaagaatagatgaa

SEQ ID NO: 55137 - DNA, 26 bp, Homo sapiens
tgcctctagggaaagaatagatgaaa

SEQ ID NO: 55138 - DNA, 26 bp, Homo sapiens
gcctctagggaaagaatagatgaaag

SEQ ID NO: 55139 - DNA, 26 bp, Homo sapiens
cctctagggaaagaatagatgaaagt

SEQ ID NO: 55140 - DNA, 26 bp, Homo sapiens
ctctagggaaagaatagatgaaagta

SEQ ID NO: 55141 - DNA, 26 bp, Homo sapiens
tctagggaaagaatagatgaaagtag

SEQ ID NO: 55142 - DNA, 26 bp, Homo sapiens
ctagggaaagaatagatgaaagtaga

SEQ ID NO: 55143 - DNA, 26 bp, Homo sapiens
tagggaaagaatagatgaaagtagaa

SEQ ID NO: 55144 - DNA, 26 bp, Homo sapiens
agggaaagaatagatgaaagtagaag

SEQ ID NO: 55145 - DNA, 26 bp, Homo sapiens
gggaaagaatagatgaaagtagaaga

SEQ ID NO: 55146 - DNA, 26 bp, Homo sapiens
ggaaagaatagatgaaagtagaagag

SEQ ID NO: 55147 - DNA, 26 bp, Homo sapiens
gaaagaatagatgaaagtagaagagt

SEQ ID NO: 55148 - DNA, 26 bp, Homo sapiens
aaagaatagatgaaagtagaagagtt

SEQ ID NO: 55149 - DNA, 26 bp, Homo sapiens
aagaatagatgaaagtagaagagttt

SEQ ID NO: 55150 - DNA, 26 bp, Homo sapiens
agaatagatgaaagtagaagagtttt

SEQ ID NO: 55151 - DNA, 26 bp, Homo sapiens
gaatagatgaaagtagaagagttttt

SEQ ID NO: 55152 - DNA, 26 bp, Homo sapiens
aatagatgaaagtagaagagtttttc

SEQ ID NO: 55153 - DNA, 26 bp, Homo sapiens
atagatgaaagtagaagagtttttca

SEQ ID NO: 55154 - DNA, 26 bp, Homo sapiens
tagatgaaagtagaagagtttttcat

SEQ ID NO: 55155 - DNA, 26 bp, Homo sapiens
agatgaaagtagaagagtttttcata

SEQ ID NO: 55156 - DNA, 26 bp, Homo sapiens
gatgaaagtagaagagtttttcataa

SEQ ID NO: 55157 - DNA, 26 bp, Homo sapiens
atgaaagtagaagagtttttcataaa

SEQ ID NO: 55158 - DNA, 26 bp, Homo sapiens
tgaaagtagaagagtttttcataaaa

SEQ ID NO: 55159 - DNA, 26 bp, Homo sapiens
gaaagtagaagagtttttcataaaat

SEQ ID NO: 55160 - DNA, 26 bp, Homo sapiens
aaagtagaagagtttttcataaaatc

SEQ ID NO: 55161 - DNA, 26 bp, Homo sapiens
aagtagaagagtttttcataaaatct

SEQ ID NO: 55162 - DNA, 26 bp, Homo sapiens
agtagaagagtttttcataaaatcta

SEQ ID NO: 55163 - DNA, 26 bp, Homo sapiens
gtagaagagtttttcataaaatctaa

SEQ ID NO: 55164 - DNA, 26 bp, Homo sapiens
tagaagagtttttcataaaatctaaa

SEQ ID NO: 55165 - DNA, 26 bp, Homo sapiens
agaagagtttttcataaaatctaaac

SEQ ID NO: 55166 - DNA, 26 bp, Homo sapiens
gaagagtttttcataaaatctaaaca

SEQ ID NO: 55167 - DNA, 26 bp, Homo sapiens
aagagtttttcataaaatctaaacac

SEQ ID NO: 55168 - DNA, 26 bp, Homo sapiens
agagtttttcataaaatctaaacaca

SEQ ID NO: 55169 - DNA, 26 bp, Homo sapiens
gagtttttcataaaatctaaacacaa

SEQ ID NO: 55170 - DNA, 26 bp, Homo sapiens
agtttttcataaaatctaaacacaat

SEQ ID NO: 55171 - DNA, 26 bp, Homo sapiens
gtttttcataaaatctaaacacaatt

SEQ ID NO: 55172 - DNA, 26 bp, Homo sapiens
tttttcataaaatctaaacacaattt

SEQ ID NO: 55173 - DNA, 26 bp, Homo sapiens
ttttcataaaatctaaacacaatttt

SEQ ID NO: 55174 - DNA, 26 bp, Homo sapiens
tttcataaaatctaaacacaattttt

SEQ ID NO: 55175 - DNA, 26 bp, Homo sapiens
ttcataaaatctaaacacaatttttg

SEQ ID NO: 55176 - DNA, 26 bp, Homo sapiens
tcataaaatctaaacacaatttttga

SEQ ID NO: 55177 - DNA, 26 bp, Homo sapiens
cataaaatctaaacacaatttttgaa

SEQ ID NO: 55178 - DNA, 26 bp, Homo sapiens
ataaaatctaaacacaatttttgaaa

SEQ ID NO: 55179 - DNA, 26 bp, Homo sapiens
taaaatctaaacacaatttttgaaaa

SEQ ID NO: 55180 - DNA, 26 bp, Homo sapiens
aaaatctaaacacaatttttgaaaat

SEQ ID NO: 55181 - DNA, 26 bp, Homo sapiens
aaatctaaacacaatttttgaaaatt

SEQ ID NO: 55182 - DNA, 26 bp, Homo sapiens
aatctaaacacaatttttgaaaattc

SEQ ID NO: 55183 - DNA, 26 bp, Homo sapiens
atctaaacacaatttttgaaaattcc

SEQ ID NO: 55184 - DNA, 26 bp, Homo sapiens
tctaaacacaatttttgaaaattcca

SEQ ID NO: 55185 - DNA, 26 bp, Homo sapiens
ctaaacacaatttttgaaaattccaa

SEQ ID NO: 55186 - DNA, 26 bp, Homo sapiens
taaacacaatttttgaaaattccaac

SEQ ID NO: 55187 - DNA, 26 bp, Homo sapiens
aaacacaatttttgaaaattccaaca

SEQ ID NO: 55188 - DNA, 26 bp, Homo sapiens
aacacaatttttgaaaattccaacat

SEQ ID NO: 55189 - DNA, 26 bp, Homo sapiens
acacaatttttgaaaattccaacatt

SEQ ID NO: 55190 - DNA, 26 bp, Homo sapiens
cacaatttttgaaaattccaacattt

SEQ ID NO: 55191 - DNA, 26 bp, Homo sapiens
acaatttttgaaaattccaacattta

SEQ ID NO: 55192 - DNA, 26 bp, Homo sapiens
caatttttgaaaattccaacatttag

SEQ ID NO: 55193 - DNA, 26 bp, Homo sapiens
aatttttgaaaattccaacatttaga

SEQ ID NO: 55194 - DNA, 26 bp, Homo sapiens
atttttgaaaattccaacatttagaa

SEQ ID NO: 55195 - DNA, 26 bp, Homo sapiens
tttttgaaaattccaacatttagaag

SEQ ID NO: 55196 - DNA, 26 bp, Homo sapiens
ttttgaaaattccaacatttagaagt

SEQ ID NO: 55197 - DNA, 26 bp, Homo sapiens
tttgaaaattccaacatttagaagtt

SEQ ID NO: 55198 - DNA, 26 bp, Homo sapiens
ttgaaaattccaacatttagaagttt

SEQ ID NO: 55199 - DNA, 26 bp, Homo sapiens
tgaaaattccaacatttagaagtttg

SEQ ID NO: 55200 - DNA, 26 bp, Homo sapiens
gaaaattccaacatttagaagtttgg

SEQ ID NO: 55201 - DNA, 26 bp, Homo sapiens
aaaattccaacatttagaagtttgga

SEQ ID NO: 55202 - DNA, 26 bp, Homo sapiens
aaattccaacatttagaagtttggaa

SEQ ID NO: 55203 - DNA, 26 bp, Homo sapiens
aattccaacatttagaagtttggaat

SEQ ID NO: 55204 - DNA, 26 bp, Homo sapiens
attccaacatttagaagtttggaatt

SEQ ID NO: 55205 - DNA, 26 bp, Homo sapiens
ttccaacatttagaagtttggaattt

SEQ ID NO: 55206 - DNA, 26 bp, Homo sapiens
tccaacatttagaagtttggaatttg

SEQ ID NO: 55207 - DNA, 26 bp, Homo sapiens
ccaacatttagaagtttggaatttgg

SEQ ID NO: 55208 - DNA, 26 bp, Homo sapiens
caacatttagaagtttggaatttggt

SEQ ID NO: 55209 - DNA, 26 bp, Homo sapiens
aacatttagaagtttggaatttggtg

SEQ ID NO: 55210 - DNA, 26 bp, Homo sapiens
acatttagaagtttggaatttggtgt

SEQ ID NO: 55211 - DNA, 26 bp, Homo sapiens
catttagaagtttggaatttggtgtc

SEQ ID NO: 55212 - DNA, 26 bp, Homo sapiens
atttagaagtttggaatttggtgtct

SEQ ID NO: 55213 - DNA, 26 bp, Homo sapiens
tttagaagtttggaatttggtgtctt

SEQ ID NO: 55214 - DNA, 26 bp, Homo sapiens
ttagaagtttggaatttggtgtcttg

SEQ ID NO: 55215 - DNA, 26 bp, Homo sapiens
tagaagtttggaatttggtgtcttga

SEQ ID NO: 55216 - DNA, 26 bp, Homo sapiens
agaagtttggaatttggtgtcttgaa

SEQ ID NO: 55217 - DNA, 26 bp, Homo sapiens
gaagtttggaatttggtgtcttgaat

SEQ ID NO: 55218 - DNA, 26 bp, Homo sapiens
aagtttggaatttggtgtcttgaata

SEQ ID NO: 55219 - DNA, 26 bp, Homo sapiens
agtttggaatttggtgtcttgaataa

SEQ ID NO: 55220 - DNA, 26 bp, Homo sapiens
gtttggaatttggtgtcttgaataaa

SEQ ID NO: 55221 - DNA, 26 bp, Homo sapiens
tttggaatttggtgtcttgaataaaa

SEQ ID NO: 55222 - DNA, 26 bp, Homo sapiens
ttggaatttggtgtcttgaataaaag

SEQ ID NO: 55223 - DNA, 26 bp, Homo sapiens
tggaatttggtgtcttgaataaaagc

SEQ ID NO: 55224 - DNA, 26 bp, Homo sapiens
ggaatttggtgtcttgaataaaagca

SEQ ID NO: 55225 - DNA, 26 bp, Homo sapiens
gaatttggtgtcttgaataaaagcat

SEQ ID NO: 55226 - DNA, 26 bp, Homo sapiens
aatttggtgtcttgaataaaagcatt

SEQ ID NO: 55227 - DNA, 26 bp, Homo sapiens
atttggtgtcttgaataaaagcattc

SEQ ID NO: 55228 - DNA, 26 bp, Homo sapiens
tttggtgtcttgaataaaagcattcc

SEQ ID NO: 55229 - DNA, 26 bp, Homo sapiens
ttggtgtcttgaataaaagcattcct

SEQ ID NO: 55230 - DNA, 26 bp, Homo sapiens
tggtgtcttgaataaaagcattccta

SEQ ID NO: 55231 - DNA, 26 bp, Homo sapiens
ggtgtcttgaataaaagcattcctag

SEQ ID NO: 55232 - DNA, 26 bp, Homo sapiens
gtgtcttgaataaaagcattcctaga

SEQ ID NO: 55233 - DNA, 26 bp, Homo sapiens
tgtcttgaataaaagcattcctagac

SEQ ID NO: 55234 - DNA, 26 bp, Homo sapiens
gtcttgaataaaagcattcctagact

SEQ ID NO: 55235 - DNA, 26 bp, Homo sapiens
tcttgaataaaagcattcctagactc

SEQ ID NO: 55236 - DNA, 26 bp, Homo sapiens
cttgaataaaagcattcctagactcg

SEQ ID NO: 55237 - DNA, 26 bp, Homo sapiens
ttgaataaaagcattcctagactcgg

SEQ ID NO: 55238 - DNA, 26 bp, Homo sapiens
tgaataaaagcattcctagactcggt

SEQ ID NO: 55239 - DNA, 26 bp, Homo sapiens
gaataaaagcattcctagactcggtc

SEQ ID NO: 55240 - DNA, 26 bp, Homo sapiens
aataaaagcattcctagactcggtca

SEQ ID NO: 55241 - DNA, 26 bp, Homo sapiens
ataaaagcattcctagactcggtcac

SEQ ID NO: 55242 - DNA, 26 bp, Homo sapiens
taaaagcattcctagactcggtcact

SEQ ID NO: 55243 - DNA, 26 bp, Homo sapiens
aaaagcattcctagactcggtcactt

SEQ ID NO: 55244 - DNA, 26 bp, Homo sapiens
aaagcattcctagactcggtcacttc

SEQ ID NO: 55245 - DNA, 26 bp, Homo sapiens
aagcattcctagactcggtcacttcc

SEQ ID NO: 55246 - DNA, 26 bp, Homo sapiens
agcattcctagactcggtcacttcct

SEQ ID NO: 55247 - DNA, 26 bp, Homo sapiens
gcattcctagactcggtcacttccta

SEQ ID NO: 55248 - DNA, 26 bp, Homo sapiens
cattcctagactcggtcacttcctag

SEQ ID NO: 55249 - DNA, 26 bp, Homo sapiens
attcctagactcggtcacttcctagc

SEQ ID NO: 55250 - DNA, 26 bp, Homo sapiens
ttcctagactcggtcacttcctagca

SEQ ID NO: 55251 - DNA, 26 bp, Homo sapiens
tcctagactcggtcacttcctagcaa

SEQ ID NO: 55252 - DNA, 26 bp, Homo sapiens
cctagactcggtcacttcctagcaaa

SEQ ID NO: 55253 - DNA, 26 bp, Homo sapiens
ctagactcggtcacttcctagcaaaa

SEQ ID NO: 55254 - DNA, 26 bp, Homo sapiens
tagactcggtcacttcctagcaaaat

SEQ ID NO: 55255 - DNA, 26 bp, Homo sapiens
agactcggtcacttcctagcaaaatg

SEQ ID NO: 55256 - DNA, 26 bp, Homo sapiens
gactcggtcacttcctagcaaaatgt

SEQ ID NO: 55257 - DNA, 26 bp, Homo sapiens
actcggtcacttcctagcaaaatgtc

SEQ ID NO: 55258 - DNA, 26 bp, Homo sapiens
ctcggtcacttcctagcaaaatgtca

SEQ ID NO: 55259 - DNA, 26 bp, Homo sapiens
tcggtcacttcctagcaaaatgtcat

SEQ ID NO: 55260 - DNA, 26 bp, Homo sapiens
cggtcacttcctagcaaaatgtcatt

SEQ ID NO: 55261 - DNA, 26 bp, Homo sapiens
ggtcacttcctagcaaaatgtcattt

SEQ ID NO: 55262 - DNA, 26 bp, Homo sapiens
gtcacttcctagcaaaatgtcatttc

SEQ ID NO: 55263 - DNA, 26 bp, Homo sapiens
tcacttcctagcaaaatgtcatttct

SEQ ID NO: 55264 - DNA, 26 bp, Homo sapiens
cacttcctagcaaaatgtcatttctt

SEQ ID NO: 55265 - DNA, 26 bp, Homo sapiens
acttcctagcaaaatgtcatttcttc

SEQ ID NO: 55266 - DNA, 26 bp, Homo sapiens
cttcctagcaaaatgtcatttcttct

SEQ ID NO: 55267 - DNA, 26 bp, Homo sapiens
ttcctagcaaaatgtcatttcttctc

SEQ ID NO: 55268 - DNA, 26 bp, Homo sapiens
tcctagcaaaatgtcatttcttctca

SEQ ID NO: 55269 - DNA, 26 bp, Homo sapiens
cctagcaaaatgtcatttcttctcac

SEQ ID NO: 55270 - DNA, 26 bp, Homo sapiens
ctagcaaaatgtcatttcttctcaca

SEQ ID NO: 55271 - DNA, 26 bp, Homo sapiens
tagcaaaatgtcatttcttctcacaa

SEQ ID NO: 55272 - DNA, 26 bp, Homo sapiens
agcaaaatgtcatttcttctcacaaa

SEQ ID NO: 55273 - DNA, 26 bp, Homo sapiens
gcaaaatgtcatttcttctcacaaac

SEQ ID NO: 55274 - DNA, 26 bp, Homo sapiens
caaaatgtcatttcttctcacaaacg

SEQ ID NO: 55275 - DNA, 26 bp, Homo sapiens
aaaatgtcatttcttctcacaaacgt

SEQ ID NO: 55276 - DNA, 26 bp, Homo sapiens
aaatgtcatttcttctcacaaacgtg

SEQ ID NO: 55277 - DNA, 26 bp, Homo sapiens
aatgtcatttcttctcacaaacgtgc

SEQ ID NO: 55278 - DNA, 26 bp, Homo sapiens
atgtcatttcttctcacaaacgtgcc

SEQ ID NO: 55279 - DNA, 26 bp, Homo sapiens
tgtcatttcttctcacaaacgtgcca

SEQ ID NO: 55280 - DNA, 26 bp, Homo sapiens
gtcatttcttctcacaaacgtgccag

SEQ ID NO: 55281 - DNA, 26 bp, Homo sapiens
tcatttcttctcacaaacgtgccagt

SEQ ID NO: 55282 - DNA, 26 bp, Homo sapiens
catttcttctcacaaacgtgccagtg

SEQ ID NO: 55283 - DNA, 26 bp, Homo sapiens
atttcttctcacaaacgtgccagtgt

SEQ ID NO: 55284 - DNA, 26 bp, Homo sapiens
tttcttctcacaaacgtgccagtgtg

SEQ ID NO: 55285 - DNA, 26 bp, Homo sapiens
ttcttctcacaaacgtgccagtgtgg

SEQ ID NO: 55286 - DNA, 26 bp, Homo sapiens
tcttctcacaaacgtgccagtgtgga

SEQ ID NO: 55287 - DNA, 26 bp, Homo sapiens
cttctcacaaacgtgccagtgtggag

SEQ ID NO: 55288 - DNA, 26 bp, Homo sapiens
ttctcacaaacgtgccagtgtggagt

SEQ ID NO: 55289 - DNA, 26 bp, Homo sapiens
tctcacaaacgtgccagtgtggagtg

SEQ ID NO: 55290 - DNA, 26 bp, Homo sapiens
ctcacaaacgtgccagtgtggagtga

SEQ ID NO: 55291 - DNA, 26 bp, Homo sapiens
tcacaaacgtgccagtgtggagtgag

SEQ ID NO: 55292 - DNA, 26 bp, Homo sapiens
cacaaacgtgccagtgtggagtgagg

SEQ ID NO: 55293 - DNA, 26 bp, Homo sapiens
acaaacgtgccagtgtggagtgaggg

SEQ ID NO: 55294 - DNA, 26 bp, Homo sapiens
caaacgtgccagtgtggagtgagggg

SEQ ID NO: 55295 - DNA, 26 bp, Homo sapiens
aaacgtgccagtgtggagtgaggggg

SEQ ID NO: 55296 - DNA, 26 bp, Homo sapiens
aacgtgccagtgtggagtgagggggg

SEQ ID NO: 55297 - DNA, 26 bp, Homo sapiens
acgtgccagtgtggagtgagggggga

SEQ ID NO: 55298 - DNA, 26 bp, Homo sapiens
cgtgccagtgtggagtgaggggggac

SEQ ID NO: 55299 - DNA, 26 bp, Homo sapiens
gtgccagtgtggagtgaggggggacc

SEQ ID NO: 55300 - DNA, 26 bp, Homo sapiens
tgccagtgtggagtgaggggggaccg

SEQ ID NO: 55301 - DNA, 26 bp, Homo sapiens
gccagtgtggagtgaggggggaccgt

SEQ ID NO: 55302 - DNA, 26 bp, Homo sapiens
ccagtgtggagtgaggggggaccgtt

SEQ ID NO: 55303 - DNA, 26 bp, Homo sapiens
cagtgtggagtgaggggggaccgtta

SEQ ID NO: 55304 - DNA, 26 bp, Homo sapiens
agtgtggagtgaggggggaccgttat

SEQ ID NO: 55305 - DNA, 26 bp, Homo sapiens
gtgtggagtgaggggggaccgttatt

SEQ ID NO: 55306 - DNA, 26 bp, Homo sapiens
tgtggagtgaggggggaccgttattg

SEQ ID NO: 55307 - DNA, 26 bp, Homo sapiens
gtggagtgaggggggaccgttattga

SEQ ID NO: 55308 - DNA, 26 bp, Homo sapiens
tggagtgaggggggaccgttattgac

SEQ ID NO: 55309 - DNA, 26 bp, Homo sapiens
ggagtgaggggggaccgttattgacc

SEQ ID NO: 55310 - DNA, 26 bp, Homo sapiens
gagtgaggggggaccgttattgacct

SEQ ID NO: 55311 - DNA, 26 bp, Homo sapiens
agtgaggggggaccgttattgacctg

SEQ ID NO: 55312 - DNA, 26 bp, Homo sapiens
gtgaggggggaccgttattgacctga

SEQ ID NO: 55313 - DNA, 26 bp, Homo sapiens
tgaggggggaccgttattgacctgaa

SEQ ID NO: 55314 - DNA, 26 bp, Homo sapiens
gaggggggaccgttattgacctgaaa

SEQ ID NO: 55315 - DNA, 26 bp, Homo sapiens
aggggggaccgttattgacctgaaat

SEQ ID NO: 55316 - DNA, 26 bp, Homo sapiens
ggggggaccgttattgacctgaaatc

SEQ ID NO: 55317 - DNA, 26 bp, Homo sapiens
gggggaccgttattgacctgaaatca

SEQ ID NO: 55318 - DNA, 26 bp, Homo sapiens
ggggaccgttattgacctgaaatcaa

SEQ ID NO: 55319 - DNA, 26 bp, Homo sapiens
gggaccgttattgacctgaaatcaag

SEQ ID NO: 55320 - DNA, 26 bp, Homo sapiens
ggaccgttattgacctgaaatcaagt

SEQ ID NO: 55321 - DNA, 26 bp, Homo sapiens
gaccgttattgacctgaaatcaagta

SEQ ID NO: 55322 - DNA, 26 bp, Homo sapiens
accgttattgacctgaaatcaagtac

SEQ ID NO: 55323 - DNA, 26 bp, Homo sapiens
ccgttattgacctgaaatcaagtact

SEQ ID NO: 55324 - DNA, 26 bp, Homo sapiens
cgttattgacctgaaatcaagtactc

SEQ ID NO: 55325 - DNA, 26 bp, Homo sapiens
gttattgacctgaaatcaagtactca

SEQ ID NO: 55326 - DNA, 26 bp, Homo sapiens
ttattgacctgaaatcaagtactcag

SEQ ID NO: 55327 - DNA, 26 bp, Homo sapiens
tattgacctgaaatcaagtactcaga

SEQ ID NO: 55328 - DNA, 26 bp, Homo sapiens
attgacctgaaatcaagtactcagaa

SEQ ID NO: 55329 - DNA, 26 bp, Homo sapiens
ttgacctgaaatcaagtactcagaac

SEQ ID NO: 55330 - DNA, 26 bp, Homo sapiens
tgacctgaaatcaagtactcagaaca

SEQ ID NO: 55331 - DNA, 26 bp, Homo sapiens
gacctgaaatcaagtactcagaacac

SEQ ID NO: 55332 - DNA, 26 bp, Homo sapiens
acctgaaatcaagtactcagaacacc

SEQ ID NO: 55333 - DNA, 26 bp, Homo sapiens
cctgaaatcaagtactcagaacacca

SEQ ID NO: 55334 - DNA, 26 bp, Homo sapiens
ctgaaatcaagtactcagaacaccag

SEQ ID NO: 55335 - DNA, 26 bp, Homo sapiens
tgaaatcaagtactcagaacaccaga

SEQ ID NO: 55336 - DNA, 26 bp, Homo sapiens
gaaatcaagtactcagaacaccagac

SEQ ID NO: 55337 - DNA, 26 bp, Homo sapiens
aaatcaagtactcagaacaccagact

SEQ ID NO: 55338 - DNA, 26 bp, Homo sapiens
aatcaagtactcagaacaccagacta

SEQ ID NO: 55339 - DNA, 26 bp, Homo sapiens
atcaagtactcagaacaccagactag

SEQ ID NO: 55340 - DNA, 26 bp, Homo sapiens
tcaagtactcagaacaccagactaga

SEQ ID NO: 55341 - DNA, 26 bp, Homo sapiens
caagtactcagaacaccagactagaa

SEQ ID NO: 55342 - DNA, 26 bp, Homo sapiens
aagtactcagaacaccagactagaag

SEQ ID NO: 55343 - DNA, 26 bp, Homo sapiens
agtactcagaacaccagactagaagc

SEQ ID NO: 55344 - DNA, 26 bp, Homo sapiens
gtactcagaacaccagactagaagcc

SEQ ID NO: 55345 - DNA, 26 bp, Homo sapiens
tactcagaacaccagactagaagcca

SEQ ID NO: 55346 - DNA, 26 bp, Homo sapiens
actcagaacaccagactagaagccag

SEQ ID NO: 55347 - DNA, 26 bp, Homo sapiens
ctcagaacaccagactagaagccaga

SEQ ID NO: 55348 - DNA, 26 bp, Homo sapiens
tcagaacaccagactagaagccagaa

SEQ ID NO: 55349 - DNA, 26 bp, Homo sapiens
cagaacaccagactagaagccagaaa

SEQ ID NO: 55350 - DNA, 26 bp, Homo sapiens
agaacaccagactagaagccagaaat

SEQ ID NO: 55351 - DNA, 26 bp, Homo sapiens
gaacaccagactagaagccagaaatg

SEQ ID NO: 55352 - DNA, 26 bp, Homo sapiens
aacaccagactagaagccagaaatgg

SEQ ID NO: 55353 - DNA, 26 bp, Homo sapiens
acaccagactagaagccagaaatgga

SEQ ID NO: 55354 - DNA, 26 bp, Homo sapiens
caccagactagaagccagaaatggag

SEQ ID NO: 55355 - DNA, 26 bp, Homo sapiens
accagactagaagccagaaatggagg

SEQ ID NO: 55356 - DNA, 26 bp, Homo sapiens
ccagactagaagccagaaatggaggc

SEQ ID NO: 55357 - DNA, 26 bp, Homo sapiens
cagactagaagccagaaatggaggct

SEQ ID NO: 55358 - DNA, 26 bp, Homo sapiens
agactagaagccagaaatggaggctc

SEQ ID NO: 55359 - DNA, 26 bp, Homo sapiens
gactagaagccagaaatggaggctca

SEQ ID NO: 55360 - DNA, 26 bp, Homo sapiens
actagaagccagaaatggaggctcaa

SEQ ID NO: 55361 - DNA, 26 bp, Homo sapiens
ctagaagccagaaatggaggctcaag

SEQ ID NO: 55362 - DNA, 26 bp, Homo sapiens
tagaagccagaaatggaggctcaagt

SEQ ID NO: 55363 - DNA, 26 bp, Homo sapiens
agaagccagaaatggaggctcaagtc

SEQ ID NO: 55364 - DNA, 26 bp, Homo sapiens
gaagccagaaatggaggctcaagtcc

SEQ ID NO: 55365 - DNA, 26 bp, Homo sapiens
aagccagaaatggaggctcaagtcct

SEQ ID NO: 55366 - DNA, 26 bp, Homo sapiens
agccagaaatggaggctcaagtccta

SEQ ID NO: 55367 - DNA, 26 bp, Homo sapiens
gccagaaatggaggctcaagtcctag

SEQ ID NO: 55368 - DNA, 26 bp, Homo sapiens
ccagaaatggaggctcaagtcctagg

SEQ ID NO: 55369 - DNA, 26 bp, Homo sapiens
cagaaatggaggctcaagtcctaggt

SEQ ID NO: 55370 - DNA, 26 bp, Homo sapiens
agaaatggaggctcaagtcctaggtt

SEQ ID NO: 55371 - DNA, 26 bp, Homo sapiens
gaaatggaggctcaagtcctaggttc

SEQ ID NO: 55372 - DNA, 26 bp, Homo sapiens
aaatggaggctcaagtcctaggttca

SEQ ID NO: 55373 - DNA, 26 bp, Homo sapiens
aatggaggctcaagtcctaggttcaa

SEQ ID NO: 55374 - DNA, 26 bp, Homo sapiens
atggaggctcaagtcctaggttcaat

SEQ ID NO: 55375 - DNA, 26 bp, Homo sapiens
tggaggctcaagtcctaggttcaata

SEQ ID NO: 55376 - DNA, 26 bp, Homo sapiens
ggaggctcaagtcctaggttcaatag

SEQ ID NO: 55377 - DNA, 26 bp, Homo sapiens
gaggctcaagtcctaggttcaataga

SEQ ID NO: 55378 - DNA, 26 bp, Homo sapiens
aggctcaagtcctaggttcaatagaa

SEQ ID NO: 55379 - DNA, 26 bp, Homo sapiens
ggctcaagtcctaggttcaatagaac

SEQ ID NO: 55380 - DNA, 26 bp, Homo sapiens
gctcaagtcctaggttcaatagaact

SEQ ID NO: 55381 - DNA, 26 bp, Homo sapiens
ctcaagtcctaggttcaatagaactt

SEQ ID NO: 55382 - DNA, 26 bp, Homo sapiens
tcaagtcctaggttcaatagaactta

SEQ ID NO: 55383 - DNA, 26 bp, Homo sapiens
caagtcctaggttcaatagaacttag

SEQ ID NO: 55384 - DNA, 26 bp, Homo sapiens
aagtcctaggttcaatagaacttaga

SEQ ID NO: 55385 - DNA, 26 bp, Homo sapiens
agtcctaggttcaatagaacttagag

SEQ ID NO: 55386 - DNA, 26 bp, Homo sapiens
gtcctaggttcaatagaacttagagt

SEQ ID NO: 55387 - DNA, 26 bp, Homo sapiens
tcctaggttcaatagaacttagagtg

SEQ ID NO: 55388 - DNA, 26 bp, Homo sapiens
cctaggttcaatagaacttagagtgt

SEQ ID NO: 55389 - DNA, 26 bp, Homo sapiens
ctaggttcaatagaacttagagtgtg

SEQ ID NO: 55390 - DNA, 26 bp, Homo sapiens
taggttcaatagaacttagagtgtga

SEQ ID NO: 55391 - DNA, 26 bp, Homo sapiens
aggttcaatagaacttagagtgtgat

SEQ ID NO: 55392 - DNA, 26 bp, Homo sapiens
ggttcaatagaacttagagtgtgatt

SEQ ID NO: 55393 - DNA, 26 bp, Homo sapiens
gttcaatagaacttagagtgtgattt

SEQ ID NO: 55394 - DNA, 26 bp, Homo sapiens
ttcaatagaacttagagtgtgatttt

SEQ ID NO: 55395 - DNA, 26 bp, Homo sapiens
tcaatagaacttagagtgtgattttt

SEQ ID NO: 55396 - DNA, 26 bp, Homo sapiens
caatagaacttagagtgtgatttttt

SEQ ID NO: 55397 - DNA, 26 bp, Homo sapiens
aatagaacttagagtgtgattttttt

SEQ ID NO: 55398 - DNA, 26 bp, Homo sapiens
atagaacttagagtgtgattttttta

SEQ ID NO: 55399 - DNA, 26 bp, Homo sapiens
tagaacttagagtgtgatttttttaa

SEQ ID NO: 55400 - DNA, 26 bp, Homo sapiens
agaacttagagtgtgatttttttaaa

SEQ ID NO: 55401 - DNA, 26 bp, Homo sapiens
gaacttagagtgtgatttttttaaaa

SEQ ID NO: 55402 - DNA, 26 bp, Homo sapiens
aacttagagtgtgatttttttaaaaa

SEQ ID NO: 55403 - DNA, 26 bp, Homo sapiens
acttagagtgtgatttttttaaaaaa

SEQ ID NO: 55404 - DNA, 26 bp, Homo sapiens
cttagagtgtgatttttttaaaaaat

SEQ ID NO: 55405 - DNA, 26 bp, Homo sapiens
ttagagtgtgatttttttaaaaaata

SEQ ID NO: 55406 - DNA, 26 bp, Homo sapiens
tagagtgtgatttttttaaaaaatag

SEQ ID NO: 55407 - DNA, 26 bp, Homo sapiens
agagtgtgatttttttaaaaaatagg

SEQ ID NO: 55408 - DNA, 26 bp, Homo sapiens
gagtgtgatttttttaaaaaataggt

SEQ ID NO: 55409 - DNA, 26 bp, Homo sapiens
agtgtgatttttttaaaaaataggtc

SEQ ID NO: 55410 - DNA, 26 bp, Homo sapiens
gtgtgatttttttaaaaaataggtca

SEQ ID NO: 55411 - DNA, 26 bp, Homo sapiens
tgtgatttttttaaaaaataggtcac

SEQ ID NO: 55412 - DNA, 26 bp, Homo sapiens
gtgatttttttaaaaaataggtcact

SEQ ID NO: 55413 - DNA, 26 bp, Homo sapiens
tgatttttttaaaaaataggtcactt

SEQ ID NO: 55414 - DNA, 26 bp, Homo sapiens
gatttttttaaaaaataggtcacttt

SEQ ID NO: 55415 - DNA, 26 bp, Homo sapiens
atttttttaaaaaataggtcactttc

SEQ ID NO: 55416 - DNA, 26 bp, Homo sapiens
tttttttaaaaaataggtcactttct

SEQ ID NO: 55417 - DNA, 26 bp, Homo sapiens
ttttttaaaaaataggtcactttctc

SEQ ID NO: 55418 - DNA, 26 bp, Homo sapiens
tttttaaaaaataggtcactttctct

SEQ ID NO: 55419 - DNA, 26 bp, Homo sapiens
ttttaaaaaataggtcactttctcta

SEQ ID NO: 55420 - DNA, 26 bp, Homo sapiens
tttaaaaaataggtcactttctctat

SEQ ID NO: 55421 - DNA, 26 bp, Homo sapiens
ttaaaaaataggtcactttctctata

SEQ ID NO: 55422 - DNA, 26 bp, Homo sapiens
taaaaaataggtcactttctctatat

SEQ ID NO: 55423 - DNA, 26 bp, Homo sapiens
aaaaaataggtcactttctctatata

SEQ ID NO: 55424 - DNA, 26 bp, Homo sapiens
aaaaataggtcactttctctatatat

SEQ ID NO: 55425 - DNA, 26 bp, Homo sapiens
aaaataggtcactttctctatatata

SEQ ID NO: 55426 - DNA, 26 bp, Homo sapiens
aaataggtcactttctctatatataa

SEQ ID NO: 55427 - DNA, 26 bp, Homo sapiens
aataggtcactttctctatatataaa

SEQ ID NO: 55428 - DNA, 26 bp, Homo sapiens
ataggtcactttctctatatataaaa

SEQ ID NO: 55429 - DNA, 26 bp, Homo sapiens
taggtcactttctctatatataaaat

SEQ ID NO: 55430 - DNA, 26 bp, Homo sapiens
aggtcactttctctatatataaaatt

SEQ ID NO: 55431 - DNA, 26 bp, Homo sapiens
ggtcactttctctatatataaaatta

SEQ ID NO: 55432 - DNA, 26 bp, Homo sapiens
gtcactttctctatatataaaattag

SEQ ID NO: 55433 - DNA, 26 bp, Homo sapiens
tcactttctctatatataaaattaga

SEQ ID NO: 55434 - DNA, 26 bp, Homo sapiens
cactttctctatatataaaattagaa

SEQ ID NO: 55435 - DNA, 26 bp, Homo sapiens
actttctctatatataaaattagaat

SEQ ID NO: 55436 - DNA, 26 bp, Homo sapiens
ctttctctatatataaaattagaata

SEQ ID NO: 55437 - DNA, 26 bp, Homo sapiens
tttctctatatataaaattagaataa

SEQ ID NO: 55438 - DNA, 26 bp, Homo sapiens
ttctctatatataaaattagaataat

SEQ ID NO: 55439 - DNA, 26 bp, Homo sapiens
tctctatatataaaattagaataatt

SEQ ID NO: 55440 - DNA, 26 bp, Homo sapiens
ctctatatataaaattagaataattg

SEQ ID NO: 55441 - DNA, 26 bp, Homo sapiens
tctatatataaaattagaataattgc

SEQ ID NO: 55442 - DNA, 26 bp, Homo sapiens
ctatatataaaattagaataattgca

SEQ ID NO: 55443 - DNA, 26 bp, Homo sapiens
tatatataaaattagaataattgcaa

SEQ ID NO: 55444 - DNA, 26 bp, Homo sapiens
atatataaaattagaataattgcaaa

SEQ ID NO: 55445 - DNA, 26 bp, Homo sapiens
tatataaaattagaataattgcaaaa

SEQ ID NO: 55446 - DNA, 26 bp, Homo sapiens
atataaaattagaataattgcaaaaa

SEQ ID NO: 55447 - DNA, 26 bp, Homo sapiens
tataaaattagaataattgcaaaaat

SEQ ID NO: 55448 - DNA, 26 bp, Homo sapiens
ataaaattagaataattgcaaaaatt

SEQ ID NO: 55449 - DNA, 26 bp, Homo sapiens
taaaattagaataattgcaaaaatta

SEQ ID NO: 55450 - DNA, 26 bp, Homo sapiens
aaaattagaataattgcaaaaattaa

SEQ ID NO: 55451 - DNA, 26 bp, Homo sapiens
aaattagaataattgcaaaaattaaa

SEQ ID NO: 55452 - DNA, 26 bp, Homo sapiens
aattagaataattgcaaaaattaaat

SEQ ID NO: 55453 - DNA, 26 bp, Homo sapiens
attagaataattgcaaaaattaaata

SEQ ID NO: 55454 - DNA, 26 bp, Homo sapiens
ttagaataattgcaaaaattaaataa

SEQ ID NO: 55455 - DNA, 26 bp, Homo sapiens
tagaataattgcaaaaattaaataag

SEQ ID NO: 55456 - DNA, 26 bp, Homo sapiens
agaataattgcaaaaattaaataaga

SEQ ID NO: 55457 - DNA, 26 bp, Homo sapiens
gaataattgcaaaaattaaataagat

SEQ ID NO: 55458 - DNA, 26 bp, Homo sapiens
aataattgcaaaaattaaataagata

SEQ ID NO: 55459 - DNA, 26 bp, Homo sapiens
ataattgcaaaaattaaataagataa

SEQ ID NO: 55460 - DNA, 26 bp, Homo sapiens
taattgcaaaaattaaataagataat

SEQ ID NO: 55461 - DNA, 26 bp, Homo sapiens
aattgcaaaaattaaataagataatt

SEQ ID NO: 55462 - DNA, 26 bp, Homo sapiens
attgcaaaaattaaataagataattg

SEQ ID NO: 55463 - DNA, 26 bp, Homo sapiens
ttgcaaaaattaaataagataattgg

SEQ ID NO: 55464 - DNA, 26 bp, Homo sapiens
tgcaaaaattaaataagataattggg

SEQ ID NO: 55465 - DNA, 26 bp, Homo sapiens
gcaaaaattaaataagataattgggg

SEQ ID NO: 55466 - DNA, 26 bp, Homo sapiens
caaaaattaaataagataattgggga

SEQ ID NO: 55467 - DNA, 26 bp, Homo sapiens
aaaaattaaataagataattggggaa

SEQ ID NO: 55468 - DNA, 26 bp, Homo sapiens
aaaattaaataagataattggggaat

SEQ ID NO: 55469 - DNA, 26 bp, Homo sapiens
aaattaaataagataattggggaatg

SEQ ID NO: 55470 - DNA, 26 bp, Homo sapiens
aattaaataagataattggggaatgt

SEQ ID NO: 55471 - DNA, 26 bp, Homo sapiens
attaaataagataattggggaatgtt

SEQ ID NO: 55472 - DNA, 26 bp, Homo sapiens
ttaaataagataattggggaatgttt

SEQ ID NO: 55473 - DNA, 26 bp, Homo sapiens
taaataagataattggggaatgtttt

SEQ ID NO: 55474 - DNA, 26 bp, Homo sapiens
aaataagataattggggaatgttttt

SEQ ID NO: 55475 - DNA, 26 bp, Homo sapiens
aataagataattggggaatgttttta

SEQ ID NO: 55476 - DNA, 26 bp, Homo sapiens
ataagataattggggaatgtttttaa

SEQ ID NO: 55477 - DNA, 26 bp, Homo sapiens
taagataattggggaatgtttttaaa

SEQ ID NO: 55478 - DNA, 26 bp, Homo sapiens
aagataattggggaatgtttttaaac

SEQ ID NO: 55479 - DNA, 26 bp, Homo sapiens
agataattggggaatgtttttaaaca

SEQ ID NO: 55480 - DNA, 26 bp, Homo sapiens
gataattggggaatgtttttaaacat

SEQ ID NO: 55481 - DNA, 26 bp, Homo sapiens
ataattggggaatgtttttaaacata

SEQ ID NO: 55482 - DNA, 26 bp, Homo sapiens
taattggggaatgtttttaaacataa

SEQ ID NO: 55483 - DNA, 26 bp, Homo sapiens
aattggggaatgtttttaaacataaa

SEQ ID NO: 55484 - DNA, 26 bp, Homo sapiens
attggggaatgtttttaaacataaag

SEQ ID NO: 55485 - DNA, 26 bp, Homo sapiens
ttggggaatgtttttaaacataaagc

SEQ ID NO: 55486 - DNA, 26 bp, Homo sapiens
tggggaatgtttttaaacataaagca

SEQ ID NO: 55487 - DNA, 26 bp, Homo sapiens
ggggaatgtttttaaacataaagcat

SEQ ID NO: 55488 - DNA, 26 bp, Homo sapiens
gggaatgtttttaaacataaagcatt

SEQ ID NO: 55489 - DNA, 26 bp, Homo sapiens
ggaatgtttttaaacataaagcatta

SEQ ID NO: 55490 - DNA, 26 bp, Homo sapiens
gaatgtttttaaacataaagcattac

SEQ ID NO: 55491 - DNA, 26 bp, Homo sapiens
aatgtttttaaacataaagcattaca

SEQ ID NO: 55492 - DNA, 26 bp, Homo sapiens
atgtttttaaacataaagcattacat

SEQ ID NO: 55493 - DNA, 26 bp, Homo sapiens
tgtttttaaacataaagcattacata

SEQ ID NO: 55494 - DNA, 26 bp, Homo sapiens
gtttttaaacataaagcattacataa

SEQ ID NO: 55495 - DNA, 26 bp, Homo sapiens
tttttaaacataaagcattacataaa

SEQ ID NO: 55496 - DNA, 26 bp, Homo sapiens
ttttaaacataaagcattacataaat

SEQ ID NO: 55497 - DNA, 26 bp, Homo sapiens
tttaaacataaagcattacataaatc

SEQ ID NO: 55498 - DNA, 26 bp, Homo sapiens
ttaaacataaagcattacataaatct

SEQ ID NO: 55499 - DNA, 26 bp, Homo sapiens
taaacataaagcattacataaatcta

SEQ ID NO: 55500 - DNA, 26 bp, Homo sapiens
aaacataaagcattacataaatctat

SEQ ID NO: 55501 - DNA, 26 bp, Homo sapiens
aacataaagcattacataaatctatg

SEQ ID NO: 55502 - DNA, 26 bp, Homo sapiens
acataaagcattacataaatctatgt

SEQ ID NO: 55503 - DNA, 26 bp, Homo sapiens
cataaagcattacataaatctatgtt

SEQ ID NO: 55504 - DNA, 26 bp, Homo sapiens
ataaagcattacataaatctatgtta

SEQ ID NO: 55505 - DNA, 26 bp, Homo sapiens
taaagcattacataaatctatgttac

SEQ ID NO: 55506 - DNA, 26 bp, Homo sapiens
aaagcattacataaatctatgttaca

SEQ ID NO: 55507 - DNA, 26 bp, Homo sapiens
aagcattacataaatctatgttacat

SEQ ID NO: 55508 - DNA, 26 bp, Homo sapiens
agcattacataaatctatgttacatg

SEQ ID NO: 55509 - DNA, 26 bp, Homo sapiens
gcattacataaatctatgttacatgt

SEQ ID NO: 55510 - DNA, 26 bp, Homo sapiens
cattacataaatctatgttacatgtg

SEQ ID NO: 55511 - DNA, 26 bp, Homo sapiens
attacataaatctatgttacatgtgc

SEQ ID NO: 55512 - DNA, 26 bp, Homo sapiens
ttacataaatctatgttacatgtgca

SEQ ID NO: 55513 - DNA, 26 bp, Homo sapiens
tacataaatctatgttacatgtgcaa

SEQ ID NO: 55514 - DNA, 26 bp, Homo sapiens
acataaatctatgttacatgtgcaaa

SEQ ID NO: 55515 - DNA, 26 bp, Homo sapiens
cataaatctatgttacatgtgcaaat

SEQ ID NO: 55516 - DNA, 26 bp, Homo sapiens
ataaatctatgttacatgtgcaaatt

SEQ ID NO: 55517 - DNA, 26 bp, Homo sapiens
taaatctatgttacatgtgcaaattg

SEQ ID NO: 55518 - DNA, 26 bp, Homo sapiens
aaatctatgttacatgtgcaaattgc

SEQ ID NO: 55519 - DNA, 26 bp, Homo sapiens
aatctatgttacatgtgcaaattgct

SEQ ID NO: 55520 - DNA, 26 bp, Homo sapiens
atctatgttacatgtgcaaattgctc

SEQ ID NO: 55521 - DNA, 26 bp, Homo sapiens
tctatgttacatgtgcaaattgctcc

SEQ ID NO: 55522 - DNA, 26 bp, Homo sapiens
ctatgttacatgtgcaaattgctcct

SEQ ID NO: 55523 - DNA, 26 bp, Homo sapiens
tatgttacatgtgcaaattgctcctg

SEQ ID NO: 55524 - DNA, 26 bp, Homo sapiens
atgttacatgtgcaaattgctcctgg

SEQ ID NO: 55525 - DNA, 26 bp, Homo sapiens
tgttacatgtgcaaattgctcctgga

SEQ ID NO: 55526 - DNA, 26 bp, Homo sapiens
gttacatgtgcaaattgctcctggaa

SEQ ID NO: 55527 - DNA, 26 bp, Homo sapiens
ttacatgtgcaaattgctcctggaag

SEQ ID NO: 55528 - DNA, 26 bp, Homo sapiens
tacatgtgcaaattgctcctggaagg

SEQ ID NO: 55529 - DNA, 26 bp, Homo sapiens
acatgtgcaaattgctcctggaaggc

SEQ ID NO: 55530 - DNA, 26 bp, Homo sapiens
catgtgcaaattgctcctggaaggca

SEQ ID NO: 55531 - DNA, 26 bp, Homo sapiens
atgtgcaaattgctcctggaaggcag

SEQ ID NO: 55532 - DNA, 26 bp, Homo sapiens
tgtgcaaattgctcctggaaggcagt

SEQ ID NO: 55533 - DNA, 26 bp, Homo sapiens
gtgcaaattgctcctggaaggcagtg

SEQ ID NO: 55534 - DNA, 26 bp, Homo sapiens
tgcaaattgctcctggaaggcagtga

SEQ ID NO: 55535 - DNA, 26 bp, Homo sapiens
gcaaattgctcctggaaggcagtgag

SEQ ID NO: 55536 - DNA, 26 bp, Homo sapiens
caaattgctcctggaaggcagtgagg

SEQ ID NO: 55537 - DNA, 26 bp, Homo sapiens
aaattgctcctggaaggcagtgaggg

SEQ ID NO: 55538 - DNA, 26 bp, Homo sapiens
aattgctcctggaaggcagtgaggga

SEQ ID NO: 55539 - DNA, 26 bp, Homo sapiens
attgctcctggaaggcagtgagggac

SEQ ID NO: 55540 - DNA, 26 bp, Homo sapiens
ttgctcctggaaggcagtgagggaca

SEQ ID NO: 55541 - DNA, 26 bp, Homo sapiens
tgctcctggaaggcagtgagggacag

SEQ ID NO: 55542 - DNA, 26 bp, Homo sapiens
gctcctggaaggcagtgagggacaga

SEQ ID NO: 55543 - DNA, 26 bp, Homo sapiens
ctcctggaaggcagtgagggacagag

SEQ ID NO: 55544 - DNA, 26 bp, Homo sapiens
tcctggaaggcagtgagggacagaga

SEQ ID NO: 55545 - DNA, 26 bp, Homo sapiens
cctggaaggcagtgagggacagagac

SEQ ID NO: 55546 - DNA, 26 bp, Homo sapiens
ctggaaggcagtgagggacagagaca

SEQ ID NO: 55547 - DNA, 26 bp, Homo sapiens
tggaaggcagtgagggacagagacag

SEQ ID NO: 55548 - DNA, 26 bp, Homo sapiens
ggaaggcagtgagggacagagacagc

SEQ ID NO: 55549 - DNA, 26 bp, Homo sapiens
gaaggcagtgagggacagagacagcc

SEQ ID NO: 55550 - DNA, 26 bp, Homo sapiens
aaggcagtgagggacagagacagcca

SEQ ID NO: 55551 - DNA, 26 bp, Homo sapiens
aggcagtgagggacagagacagccac

SEQ ID NO: 55552 - DNA, 26 bp, Homo sapiens
ggcagtgagggacagagacagccacc

SEQ ID NO: 55553 - DNA, 26 bp, Homo sapiens
gcagtgagggacagagacagccacca

SEQ ID NO: 55554 - DNA, 26 bp, Homo sapiens
cagtgagggacagagacagccaccac

SEQ ID NO: 55555 - DNA, 26 bp, Homo sapiens
agtgagggacagagacagccaccaca

SEQ ID NO: 55556 - DNA, 26 bp, Homo sapiens
gtgagggacagagacagccaccacag

SEQ ID NO: 55557 - DNA, 26 bp, Homo sapiens
tgagggacagagacagccaccacagc

SEQ ID NO: 55558 - DNA, 26 bp, Homo sapiens
gagggacagagacagccaccacagcc

SEQ ID NO: 55559 - DNA, 26 bp, Homo sapiens
agggacagagacagccaccacagcct

SEQ ID NO: 55560 - DNA, 26 bp, Homo sapiens
gggacagagacagccaccacagcctc

SEQ ID NO: 55561 - DNA, 26 bp, Homo sapiens
ggacagagacagccaccacagcctct

SEQ ID NO: 55562 - DNA, 26 bp, Homo sapiens
gacagagacagccaccacagcctctc

SEQ ID NO: 55563 - DNA, 26 bp, Homo sapiens
acagagacagccaccacagcctctcc

SEQ ID NO: 55564 - DNA, 26 bp, Homo sapiens
cagagacagccaccacagcctctccc

SEQ ID NO: 55565 - DNA, 26 bp, Homo sapiens
agagacagccaccacagcctctccct

SEQ ID NO: 55566 - DNA, 26 bp, Homo sapiens
gagacagccaccacagcctctccctc

SEQ ID NO: 55567 - DNA, 26 bp, Homo sapiens
agacagccaccacagcctctccctca

SEQ ID NO: 55568 - DNA, 26 bp, Homo sapiens
gacagccaccacagcctctccctcag

SEQ ID NO: 55569 - DNA, 26 bp, Homo sapiens
acagccaccacagcctctccctcaga

SEQ ID NO: 55570 - DNA, 26 bp, Homo sapiens
cagccaccacagcctctccctcagag

SEQ ID NO: 55571 - DNA, 26 bp, Homo sapiens
agccaccacagcctctccctcagaga

SEQ ID NO: 55572 - DNA, 26 bp, Homo sapiens
gccaccacagcctctccctcagagag

SEQ ID NO: 55573 - DNA, 26 bp, Homo sapiens
ccaccacagcctctccctcagagagc

SEQ ID NO: 55574 - DNA, 26 bp, Homo sapiens
caccacagcctctccctcagagagca

SEQ ID NO: 55575 - DNA, 26 bp, Homo sapiens
accacagcctctccctcagagagcag

SEQ ID NO: 55576 - DNA, 26 bp, Homo sapiens
ccacagcctctccctcagagagcagc

SEQ ID NO: 55577 - DNA, 26 bp, Homo sapiens
cacagcctctccctcagagagcagca

SEQ ID NO: 55578 - DNA, 26 bp, Homo sapiens
acagcctctccctcagagagcagcaa

SEQ ID NO: 55579 - DNA, 26 bp, Homo sapiens
cagcctctccctcagagagcagcaat

SEQ ID NO: 55580 - DNA, 26 bp, Homo sapiens
agcctctccctcagagagcagcaatt

SEQ ID NO: 55581 - DNA, 26 bp, Homo sapiens
gcctctccctcagagagcagcaattc

SEQ ID NO: 55582 - DNA, 26 bp, Homo sapiens
cctctccctcagagagcagcaattcc

SEQ ID NO: 55583 - DNA, 26 bp, Homo sapiens
ctctccctcagagagcagcaattcca

SEQ ID NO: 55584 - DNA, 26 bp, Homo sapiens
tctccctcagagagcagcaattccag

SEQ ID NO: 55585 - DNA, 26 bp, Homo sapiens
ctccctcagagagcagcaattccagc

SEQ ID NO: 55586 - DNA, 26 bp, Homo sapiens
tccctcagagagcagcaattccagct

SEQ ID NO: 55587 - DNA, 26 bp, Homo sapiens
ccctcagagagcagcaattccagctg

SEQ ID NO: 55588 - DNA, 26 bp, Homo sapiens
cctcagagagcagcaattccagctgg

SEQ ID NO: 55589 - DNA, 26 bp, Homo sapiens
ctcagagagcagcaattccagctgga

SEQ ID NO: 55590 - DNA, 26 bp, Homo sapiens
tcagagagcagcaattccagctggag

SEQ ID NO: 55591 - DNA, 26 bp, Homo sapiens
cagagagcagcaattccagctggagg

SEQ ID NO: 55592 - DNA, 26 bp, Homo sapiens
agagagcagcaattccagctggaggg

SEQ ID NO: 55593 - DNA, 26 bp, Homo sapiens
gagagcagcaattccagctggaggga

SEQ ID NO: 55594 - DNA, 26 bp, Homo sapiens
agagcagcaattccagctggagggag

SEQ ID NO: 55595 - DNA, 26 bp, Homo sapiens
gagcagcaattccagctggagggaga

SEQ ID NO: 55596 - DNA, 26 bp, Homo sapiens
agcagcaattccagctggagggagac

SEQ ID NO: 55597 - DNA, 26 bp, Homo sapiens
gcagcaattccagctggagggagacc

SEQ ID NO: 55598 - DNA, 26 bp, Homo sapiens
cagcaattccagctggagggagacca

SEQ ID NO: 55599 - DNA, 26 bp, Homo sapiens
agcaattccagctggagggagaccag

SEQ ID NO: 55600 - DNA, 26 bp, Homo sapiens
gcaattccagctggagggagaccagc

SEQ ID NO: 55601 - DNA, 26 bp, Homo sapiens
caattccagctggagggagaccagcc

SEQ ID NO: 55602 - DNA, 26 bp, Homo sapiens
aattccagctggagggagaccagcct

SEQ ID NO: 55603 - DNA, 26 bp, Homo sapiens
attccagctggagggagaccagcctc

SEQ ID NO: 55604 - DNA, 26 bp, Homo sapiens
ttccagctggagggagaccagcctcc

SEQ ID NO: 55605 - DNA, 26 bp, Homo sapiens
tccagctggagggagaccagcctccc

SEQ ID NO: 55606 - DNA, 26 bp, Homo sapiens
ccagctggagggagaccagcctccca

SEQ ID NO: 55607 - DNA, 26 bp, Homo sapiens
cagctggagggagaccagcctcccag

SEQ ID NO: 55608 - DNA, 26 bp, Homo sapiens
agctggagggagaccagcctcccaga

SEQ ID NO: 55609 - DNA, 26 bp, Homo sapiens
gctggagggagaccagcctcccagat

SEQ ID NO: 55610 - DNA, 26 bp, Homo sapiens
ctggagggagaccagcctcccagatg

SEQ ID NO: 55611 - DNA, 26 bp, Homo sapiens
tggagggagaccagcctcccagatgt

SEQ ID NO: 55612 - DNA, 26 bp, Homo sapiens
ggagggagaccagcctcccagatgtg

SEQ ID NO: 55613 - DNA, 26 bp, Homo sapiens
gagggagaccagcctcccagatgtgc

SEQ ID NO: 55614 - DNA, 26 bp, Homo sapiens
agggagaccagcctcccagatgtgct

SEQ ID NO: 55615 - DNA, 26 bp, Homo sapiens
gggagaccagcctcccagatgtgctc

SEQ ID NO: 55616 - DNA, 26 bp, Homo sapiens
ggagaccagcctcccagatgtgctca

SEQ ID NO: 55617 - DNA, 26 bp, Homo sapiens
gagaccagcctcccagatgtgctcac

SEQ ID NO: 55618 - DNA, 26 bp, Homo sapiens
agaccagcctcccagatgtgctcacc

SEQ ID NO: 55619 - DNA, 26 bp, Homo sapiens
gaccagcctcccagatgtgctcacca

SEQ ID NO: 55620 - DNA, 26 bp, Homo sapiens
accagcctcccagatgtgctcaccac

SEQ ID NO: 55621 - DNA, 26 bp, Homo sapiens
ccagcctcccagatgtgctcaccacc

SEQ ID NO: 55622 - DNA, 26 bp, Homo sapiens
cagcctcccagatgtgctcaccacca

SEQ ID NO: 55623 - DNA, 26 bp, Homo sapiens
agcctcccagatgtgctcaccaccat

SEQ ID NO: 55624 - DNA, 26 bp, Homo sapiens
gcctcccagatgtgctcaccaccatc

SEQ ID NO: 55625 - DNA, 26 bp, Homo sapiens
cctcccagatgtgctcaccaccatct

SEQ ID NO: 55626 - DNA, 26 bp, Homo sapiens
ctcccagatgtgctcaccaccatctc

SEQ ID NO: 55627 - DNA, 26 bp, Homo sapiens
tcccagatgtgctcaccaccatctct

SEQ ID NO: 55628 - DNA, 26 bp, Homo sapiens
cccagatgtgctcaccaccatctctg

SEQ ID NO: 55629 - DNA, 26 bp, Homo sapiens
ccagatgtgctcaccaccatctctgc

SEQ ID NO: 55630 - DNA, 26 bp, Homo sapiens
cagatgtgctcaccaccatctctgca

SEQ ID NO: 55631 - DNA, 26 bp, Homo sapiens
agatgtgctcaccaccatctctgcag

SEQ ID NO: 55632 - DNA, 26 bp, Homo sapiens
gatgtgctcaccaccatctctgcagt

SEQ ID NO: 55633 - DNA, 26 bp, Homo sapiens
atgtgctcaccaccatctctgcagtg

SEQ ID NO: 55634 - DNA, 26 bp, Homo sapiens
tgtgctcaccaccatctctgcagtgg

SEQ ID NO: 55635 - DNA, 26 bp, Homo sapiens
gtgctcaccaccatctctgcagtggg

SEQ ID NO: 55636 - DNA, 26 bp, Homo sapiens
tgctcaccaccatctctgcagtgggc

SEQ ID NO: 55637 - DNA, 26 bp, Homo sapiens
gctcaccaccatctctgcagtgggcc

SEQ ID NO: 55638 - DNA, 26 bp, Homo sapiens
ctcaccaccatctctgcagtgggcct

SEQ ID NO: 55639 - DNA, 26 bp, Homo sapiens
tcaccaccatctctgcagtgggcctg

SEQ ID NO: 55640 - DNA, 26 bp, Homo sapiens
caccaccatctctgcagtgggcctga

SEQ ID NO: 55641 - DNA, 26 bp, Homo sapiens
accaccatctctgcagtgggcctgac

SEQ ID NO: 55642 - DNA, 26 bp, Homo sapiens
ccaccatctctgcagtgggcctgacc

SEQ ID NO: 55643 - DNA, 26 bp, Homo sapiens
caccatctctgcagtgggcctgacca

SEQ ID NO: 55644 - DNA, 26 bp, Homo sapiens
accatctctgcagtgggcctgaccag

SEQ ID NO: 55645 - DNA, 26 bp, Homo sapiens
ccatctctgcagtgggcctgaccaga

SEQ ID NO: 55646 - DNA, 26 bp, Homo sapiens
catctctgcagtgggcctgaccagag

SEQ ID NO: 55647 - DNA, 26 bp, Homo sapiens
atctctgcagtgggcctgaccagaga

SEQ ID NO: 55648 - DNA, 26 bp, Homo sapiens
tctctgcagtgggcctgaccagagag

SEQ ID NO: 55649 - DNA, 26 bp, Homo sapiens
ctctgcagtgggcctgaccagagaga

SEQ ID NO: 55650 - DNA, 26 bp, Homo sapiens
tctgcagtgggcctgaccagagagag

SEQ ID NO: 55651 - DNA, 26 bp, Homo sapiens
ctgcagtgggcctgaccagagagaga

SEQ ID NO: 55652 - DNA, 26 bp, Homo sapiens
tgcagtgggcctgaccagagagagaa

SEQ ID NO: 55653 - DNA, 26 bp, Homo sapiens
gcagtgggcctgaccagagagagaag

SEQ ID NO: 55654 - DNA, 26 bp, Homo sapiens
cagtgggcctgaccagagagagaagg

SEQ ID NO: 55655 - DNA, 26 bp, Homo sapiens
agtgggcctgaccagagagagaaggc

SEQ ID NO: 55656 - DNA, 26 bp, Homo sapiens
gtgggcctgaccagagagagaaggct

SEQ ID NO: 55657 - DNA, 26 bp, Homo sapiens
tgggcctgaccagagagagaaggctg

SEQ ID NO: 55658 - DNA, 26 bp, Homo sapiens
gggcctgaccagagagagaaggctgg

SEQ ID NO: 55659 - DNA, 26 bp, Homo sapiens
ggcctgaccagagagagaaggctgga

SEQ ID NO: 55660 - DNA, 26 bp, Homo sapiens
gcctgaccagagagagaaggctggag

SEQ ID NO: 55661 - DNA, 26 bp, Homo sapiens
cctgaccagagagagaaggctggaga

SEQ ID NO: 55662 - DNA, 26 bp, Homo sapiens
ctgaccagagagagaaggctggagag

SEQ ID NO: 55663 - DNA, 26 bp, Homo sapiens
tgaccagagagagaaggctggagagg

SEQ ID NO: 55664 - DNA, 26 bp, Homo sapiens
gaccagagagagaaggctggagagga

SEQ ID NO: 55665 - DNA, 26 bp, Homo sapiens
accagagagagaaggctggagaggaa

SEQ ID NO: 55666 - DNA, 26 bp, Homo sapiens
ccagagagagaaggctggagaggaag

SEQ ID NO: 55667 - DNA, 26 bp, Homo sapiens
cagagagagaaggctggagaggaagt

SEQ ID NO: 55668 - DNA, 26 bp, Homo sapiens
agagagagaaggctggagaggaagtc

SEQ ID NO: 55669 - DNA, 26 bp, Homo sapiens
gagagagaaggctggagaggaagtcg

SEQ ID NO: 55670 - DNA, 26 bp, Homo sapiens
agagagaaggctggagaggaagtcgc

SEQ ID NO: 55671 - DNA, 26 bp, Homo sapiens
gagagaaggctggagaggaagtcgcc

SEQ ID NO: 55672 - DNA, 26 bp, Homo sapiens
agagaaggctggagaggaagtcgcct

SEQ ID NO: 55673 - DNA, 26 bp, Homo sapiens
gagaaggctggagaggaagtcgcctc

SEQ ID NO: 55674 - DNA, 26 bp, Homo sapiens
agaaggctggagaggaagtcgcctct

SEQ ID NO: 55675 - DNA, 26 bp, Homo sapiens
gaaggctggagaggaagtcgcctctt

SEQ ID NO: 55676 - DNA, 26 bp, Homo sapiens
aaggctggagaggaagtcgcctctta

SEQ ID NO: 55677 - DNA, 26 bp, Homo sapiens
aggctggagaggaagtcgcctcttag

SEQ ID NO: 55678 - DNA, 26 bp, Homo sapiens
ggctggagaggaagtcgcctcttagg

SEQ ID NO: 55679 - DNA, 26 bp, Homo sapiens
gctggagaggaagtcgcctcttaggg

SEQ ID NO: 55680 - DNA, 26 bp, Homo sapiens
ctggagaggaagtcgcctcttaggga

SEQ ID NO: 55681 - DNA, 26 bp, Homo sapiens
tggagaggaagtcgcctcttagggaa

SEQ ID NO: 55682 - DNA, 26 bp, Homo sapiens
ggagaggaagtcgcctcttagggaaa

SEQ ID NO: 55683 - DNA, 26 bp, Homo sapiens
gagaggaagtcgcctcttagggaaag

SEQ ID NO: 55684 - DNA, 26 bp, Homo sapiens
agaggaagtcgcctcttagggaaagt

SEQ ID NO: 55685 - DNA, 26 bp, Homo sapiens
gaggaagtcgcctcttagggaaagtc

SEQ ID NO: 55686 - DNA, 26 bp, Homo sapiens
aggaagtcgcctcttagggaaagtct

SEQ ID NO: 55687 - DNA, 26 bp, Homo sapiens
ggaagtcgcctcttagggaaagtctc

SEQ ID NO: 55688 - DNA, 26 bp, Homo sapiens
gaagtcgcctcttagggaaagtctcc

SEQ ID NO: 55689 - DNA, 26 bp, Homo sapiens
aagtcgcctcttagggaaagtctccc

SEQ ID NO: 55690 - DNA, 26 bp, Homo sapiens
agtcgcctcttagggaaagtctccca

SEQ ID NO: 55691 - DNA, 26 bp, Homo sapiens
gtcgcctcttagggaaagtctcccag

SEQ ID NO: 55692 - DNA, 26 bp, Homo sapiens
tcgcctcttagggaaagtctcccaga

SEQ ID NO: 55693 - DNA, 26 bp, Homo sapiens
cgcctcttagggaaagtctcccagag

SEQ ID NO: 55694 - DNA, 26 bp, Homo sapiens
gcctcttagggaaagtctcccagaga

SEQ ID NO: 55695 - DNA, 26 bp, Homo sapiens
cctcttagggaaagtctcccagagac

SEQ ID NO: 55696 - DNA, 26 bp, Homo sapiens
ctcttagggaaagtctcccagagact

SEQ ID NO: 55697 - DNA, 26 bp, Homo sapiens
tcttagggaaagtctcccagagactg

SEQ ID NO: 55698 - DNA, 26 bp, Homo sapiens
cttagggaaagtctcccagagactgt

SEQ ID NO: 55699 - DNA, 26 bp, Homo sapiens
ttagggaaagtctcccagagactgtg

SEQ ID NO: 55700 - DNA, 26 bp, Homo sapiens
tagggaaagtctcccagagactgtgg

SEQ ID NO: 55701 - DNA, 26 bp, Homo sapiens
agggaaagtctcccagagactgtgga

SEQ ID NO: 55702 - DNA, 26 bp, Homo sapiens
gggaaagtctcccagagactgtggaa

SEQ ID NO: 55703 - DNA, 26 bp, Homo sapiens
ggaaagtctcccagagactgtggaat

SEQ ID NO: 55704 - DNA, 26 bp, Homo sapiens
gaaagtctcccagagactgtggaatt

SEQ ID NO: 55705 - DNA, 26 bp, Homo sapiens
aaagtctcccagagactgtggaattg

SEQ ID NO: 55706 - DNA, 26 bp, Homo sapiens
aagtctcccagagactgtggaattgg

SEQ ID NO: 55707 - DNA, 26 bp, Homo sapiens
agtctcccagagactgtggaattgga

SEQ ID NO: 55708 - DNA, 26 bp, Homo sapiens
gtctcccagagactgtggaattggag

SEQ ID NO: 55709 - DNA, 26 bp, Homo sapiens
tctcccagagactgtggaattggagg

SEQ ID NO: 55710 - DNA, 26 bp, Homo sapiens
ctcccagagactgtggaattggagga

SEQ ID NO: 55711 - DNA, 26 bp, Homo sapiens
tcccagagactgtggaattggaggat

SEQ ID NO: 55712 - DNA, 26 bp, Homo sapiens
cccagagactgtggaattggaggatg

SEQ ID NO: 55713 - DNA, 26 bp, Homo sapiens
ccagagactgtggaattggaggatgt

SEQ ID NO: 55714 - DNA, 26 bp, Homo sapiens
cagagactgtggaattggaggatgtt

SEQ ID NO: 55715 - DNA, 26 bp, Homo sapiens
agagactgtggaattggaggatgttc

SEQ ID NO: 55716 - DNA, 26 bp, Homo sapiens
gagactgtggaattggaggatgttct

SEQ ID NO: 55717 - DNA, 26 bp, Homo sapiens
agactgtggaattggaggatgttctg

SEQ ID NO: 55718 - DNA, 26 bp, Homo sapiens
gactgtggaattggaggatgttctga

SEQ ID NO: 55719 - DNA, 26 bp, Homo sapiens
actgtggaattggaggatgttctgaa

SEQ ID NO: 55720 - DNA, 26 bp, Homo sapiens
ctgtggaattggaggatgttctgaat

SEQ ID NO: 55721 - DNA, 26 bp, Homo sapiens
tgtggaattggaggatgttctgaatt

SEQ ID NO: 55722 - DNA, 26 bp, Homo sapiens
gtggaattggaggatgttctgaattt

SEQ ID NO: 55723 - DNA, 26 bp, Homo sapiens
tggaattggaggatgttctgaatttt

SEQ ID NO: 55724 - DNA, 26 bp, Homo sapiens
ggaattggaggatgttctgaattttg

SEQ ID NO: 55725 - DNA, 26 bp, Homo sapiens
gaattggaggatgttctgaattttgg

SEQ ID NO: 55726 - DNA, 26 bp, Homo sapiens
aattggaggatgttctgaattttggt

SEQ ID NO: 55727 - DNA, 26 bp, Homo sapiens
attggaggatgttctgaattttggta

SEQ ID NO: 55728 - DNA, 26 bp, Homo sapiens
ttggaggatgttctgaattttggtaa

SEQ ID NO: 55729 - DNA, 26 bp, Homo sapiens
tggaggatgttctgaattttggtaaa

SEQ ID NO: 55730 - DNA, 26 bp, Homo sapiens
ggaggatgttctgaattttggtaaaa

SEQ ID NO: 55731 - DNA, 26 bp, Homo sapiens
gaggatgttctgaattttggtaaaat

SEQ ID NO: 55732 - DNA, 26 bp, Homo sapiens
aggatgttctgaattttggtaaaatt

SEQ ID NO: 55733 - DNA, 26 bp, Homo sapiens
ggatgttctgaattttggtaaaattc

SEQ ID NO: 55734 - DNA, 26 bp, Homo sapiens
gatgttctgaattttggtaaaattct

SEQ ID NO: 55735 - DNA, 26 bp, Homo sapiens
atgttctgaattttggtaaaattctg

SEQ ID NO: 55736 - DNA, 26 bp, Homo sapiens
tgttctgaattttggtaaaattctga

SEQ ID NO: 55737 - DNA, 26 bp, Homo sapiens
gttctgaattttggtaaaattctgat

SEQ ID NO: 55738 - DNA, 26 bp, Homo sapiens
ttctgaattttggtaaaattctgatc

SEQ ID NO: 55739 - DNA, 26 bp, Homo sapiens
tctgaattttggtaaaattctgatca

SEQ ID NO: 55740 - DNA, 26 bp, Homo sapiens
ctgaattttggtaaaattctgatcag

SEQ ID NO: 55741 - DNA, 26 bp, Homo sapiens
tgaattttggtaaaattctgatcagc

SEQ ID NO: 55742 - DNA, 26 bp, Homo sapiens
gaattttggtaaaattctgatcagct

SEQ ID NO: 55743 - DNA, 26 bp, Homo sapiens
aattttggtaaaattctgatcagcta

SEQ ID NO: 55744 - DNA, 26 bp, Homo sapiens
attttggtaaaattctgatcagctag

SEQ ID NO: 55745 - DNA, 26 bp, Homo sapiens
ttttggtaaaattctgatcagctaga

SEQ ID NO: 55746 - DNA, 26 bp, Homo sapiens
tttggtaaaattctgatcagctagag

SEQ ID NO: 55747 - DNA, 26 bp, Homo sapiens
ttggtaaaattctgatcagctagaga

SEQ ID NO: 55748 - DNA, 26 bp, Homo sapiens
tggtaaaattctgatcagctagagaa

SEQ ID NO: 55749 - DNA, 26 bp, Homo sapiens
ggtaaaattctgatcagctagagaaa

SEQ ID NO: 55750 - DNA, 26 bp, Homo sapiens
gtaaaattctgatcagctagagaaaa

SEQ ID NO: 55751 - DNA, 26 bp, Homo sapiens
taaaattctgatcagctagagaaaat

SEQ ID NO: 55752 - DNA, 26 bp, Homo sapiens
aaaattctgatcagctagagaaaatg

SEQ ID NO: 55753 - DNA, 26 bp, Homo sapiens
aaattctgatcagctagagaaaatgc

SEQ ID NO: 55754 - DNA, 26 bp, Homo sapiens
aattctgatcagctagagaaaatgcg

SEQ ID NO: 55755 - DNA, 26 bp, Homo sapiens
attctgatcagctagagaaaatgcga

SEQ ID NO: 55756 - DNA, 26 bp, Homo sapiens
ttctgatcagctagagaaaatgcgag

SEQ ID NO: 55757 - DNA, 26 bp, Homo sapiens
tctgatcagctagagaaaatgcgaga

SEQ ID NO: 55758 - DNA, 26 bp, Homo sapiens
ctgatcagctagagaaaatgcgagaa

SEQ ID NO: 55759 - DNA, 26 bp, Homo sapiens
tgatcagctagagaaaatgcgagaag

SEQ ID NO: 55760 - DNA, 26 bp, Homo sapiens
gatcagctagagaaaatgcgagaagg

SEQ ID NO: 55761 - DNA, 26 bp, Homo sapiens
atcagctagagaaaatgcgagaaggc

SEQ ID NO: 55762 - DNA, 26 bp, Homo sapiens
tcagctagagaaaatgcgagaaggcc

SEQ ID NO: 55763 - DNA, 26 bp, Homo sapiens
cagctagagaaaatgcgagaaggcct

SEQ ID NO: 55764 - DNA, 26 bp, Homo sapiens
agctagagaaaatgcgagaaggcctc

SEQ ID NO: 55765 - DNA, 26 bp, Homo sapiens
gctagagaaaatgcgagaaggcctcc

SEQ ID NO: 55766 - DNA, 26 bp, Homo sapiens
ctagagaaaatgcgagaaggcctcct

SEQ ID NO: 55767 - DNA, 26 bp, Homo sapiens
tagagaaaatgcgagaaggcctccta

SEQ ID NO: 55768 - DNA, 26 bp, Homo sapiens
agagaaaatgcgagaaggcctcctag

SEQ ID NO: 55769 - DNA, 26 bp, Homo sapiens
gagaaaatgcgagaaggcctcctagg

SEQ ID NO: 55770 - DNA, 26 bp, Homo sapiens
agaaaatgcgagaaggcctcctaggc

SEQ ID NO: 55771 - DNA, 26 bp, Homo sapiens
gaaaatgcgagaaggcctcctaggca

SEQ ID NO: 55772 - DNA, 26 bp, Homo sapiens
aaaatgcgagaaggcctcctaggcaa

SEQ ID NO: 55773 - DNA, 26 bp, Homo sapiens
aaatgcgagaaggcctcctaggcaaa

SEQ ID NO: 55774 - DNA, 26 bp, Homo sapiens
aatgcgagaaggcctcctaggcaaag

SEQ ID NO: 55775 - DNA, 26 bp, Homo sapiens
atgcgagaaggcctcctaggcaaagg

SEQ ID NO: 55776 - DNA, 26 bp, Homo sapiens
tgcgagaaggcctcctaggcaaagga

SEQ ID NO: 55777 - DNA, 26 bp, Homo sapiens
gcgagaaggcctcctaggcaaaggag

SEQ ID NO: 55778 - DNA, 26 bp, Homo sapiens
cgagaaggcctcctaggcaaaggagg

SEQ ID NO: 55779 - DNA, 26 bp, Homo sapiens
gagaaggcctcctaggcaaaggagga

SEQ ID NO: 55780 - DNA, 26 bp, Homo sapiens
agaaggcctcctaggcaaaggaggag

SEQ ID NO: 55781 - DNA, 26 bp, Homo sapiens
gaaggcctcctaggcaaaggaggagg

SEQ ID NO: 55782 - DNA, 26 bp, Homo sapiens
aaggcctcctaggcaaaggaggagga

SEQ ID NO: 55783 - DNA, 26 bp, Homo sapiens
aggcctcctaggcaaaggaggaggaa

SEQ ID NO: 55784 - DNA, 26 bp, Homo sapiens
ggcctcctaggcaaaggaggaggaag

SEQ ID NO: 55785 - DNA, 26 bp, Homo sapiens
gcctcctaggcaaaggaggaggaagg

SEQ ID NO: 55786 - DNA, 26 bp, Homo sapiens
cctcctaggcaaaggaggaggaaggg

SEQ ID NO: 55787 - DNA, 26 bp, Homo sapiens
ctcctaggcaaaggaggaggaagggt

SEQ ID NO: 55788 - DNA, 26 bp, Homo sapiens
tcctaggcaaaggaggaggaagggtg

SEQ ID NO: 55789 - DNA, 26 bp, Homo sapiens
cctaggcaaaggaggaggaagggtgc

SEQ ID NO: 55790 - DNA, 26 bp, Homo sapiens
ctaggcaaaggaggaggaagggtgca

SEQ ID NO: 55791 - DNA, 26 bp, Homo sapiens
taggcaaaggaggaggaagggtgcag

SEQ ID NO: 55792 - DNA, 26 bp, Homo sapiens
aggcaaaggaggaggaagggtgcagg

SEQ ID NO: 55793 - DNA, 26 bp, Homo sapiens
ggcaaaggaggaggaagggtgcaggc

SEQ ID NO: 55794 - DNA, 26 bp, Homo sapiens
gcaaaggaggaggaagggtgcaggca

SEQ ID NO: 55795 - DNA, 26 bp, Homo sapiens
caaaggaggaggaagggtgcaggcaa

SEQ ID NO: 55796 - DNA, 26 bp, Homo sapiens
aaaggaggaggaagggtgcaggcaag

SEQ ID NO: 55797 - DNA, 26 bp, Homo sapiens
aaggaggaggaagggtgcaggcaaga

SEQ ID NO: 55798 - DNA, 26 bp, Homo sapiens
aggaggaggaagggtgcaggcaagag

SEQ ID NO: 55799 - DNA, 26 bp, Homo sapiens
ggaggaggaagggtgcaggcaagagc

SEQ ID NO: 55800 - DNA, 26 bp, Homo sapiens
gaggaggaagggtgcaggcaagagca

SEQ ID NO: 55801 - DNA, 26 bp, Homo sapiens
aggaggaagggtgcaggcaagagcag

SEQ ID NO: 55802 - DNA, 26 bp, Homo sapiens
ggaggaagggtgcaggcaagagcaga

SEQ ID NO: 55803 - DNA, 26 bp, Homo sapiens
gaggaagggtgcaggcaagagcagag

SEQ ID NO: 55804 - DNA, 26 bp, Homo sapiens
aggaagggtgcaggcaagagcagaga

SEQ ID NO: 55805 - DNA, 26 bp, Homo sapiens
ggaagggtgcaggcaagagcagagac

SEQ ID NO: 55806 - DNA, 26 bp, Homo sapiens
gaagggtgcaggcaagagcagagaca

SEQ ID NO: 55807 - DNA, 26 bp, Homo sapiens
aagggtgcaggcaagagcagagacag

SEQ ID NO: 55808 - DNA, 26 bp, Homo sapiens
agggtgcaggcaagagcagagacaga

SEQ ID NO: 55809 - DNA, 26 bp, Homo sapiens
gggtgcaggcaagagcagagacagag

SEQ ID NO: 55810 - DNA, 26 bp, Homo sapiens
ggtgcaggcaagagcagagacagagg

SEQ ID NO: 55811 - DNA, 26 bp, Homo sapiens
gtgcaggcaagagcagagacagagga

SEQ ID NO: 55812 - DNA, 26 bp, Homo sapiens
tgcaggcaagagcagagacagaggag

SEQ ID NO: 55813 - DNA, 26 bp, Homo sapiens
gcaggcaagagcagagacagaggagt

SEQ ID NO: 55814 - DNA, 26 bp, Homo sapiens
caggcaagagcagagacagaggagtg

SEQ ID NO: 55815 - DNA, 26 bp, Homo sapiens
aggcaagagcagagacagaggagtgc

SEQ ID NO: 55816 - DNA, 26 bp, Homo sapiens
ggcaagagcagagacagaggagtgct

SEQ ID NO: 55817 - DNA, 26 bp, Homo sapiens
gcaagagcagagacagaggagtgctg

SEQ ID NO: 55818 - DNA, 26 bp, Homo sapiens
caagagcagagacagaggagtgctgg

SEQ ID NO: 55819 - DNA, 26 bp, Homo sapiens
aagagcagagacagaggagtgctggg

SEQ ID NO: 55820 - DNA, 26 bp, Homo sapiens
agagcagagacagaggagtgctgggg

SEQ ID NO: 55821 - DNA, 26 bp, Homo sapiens
gagcagagacagaggagtgctggggg

SEQ ID NO: 55822 - DNA, 26 bp, Homo sapiens
agcagagacagaggagtgctgggggc

SEQ ID NO: 55823 - DNA, 26 bp, Homo sapiens
gcagagacagaggagtgctgggggca

SEQ ID NO: 55824 - DNA, 26 bp, Homo sapiens
cagagacagaggagtgctgggggcag

SEQ ID NO: 55825 - DNA, 26 bp, Homo sapiens
agagacagaggagtgctgggggcagg

SEQ ID NO: 55826 - DNA, 26 bp, Homo sapiens
gagacagaggagtgctgggggcaggc

SEQ ID NO: 55827 - DNA, 26 bp, Homo sapiens
agacagaggagtgctgggggcaggcg

SEQ ID NO: 55828 - DNA, 26 bp, Homo sapiens
gacagaggagtgctgggggcaggcga

SEQ ID NO: 55829 - DNA, 26 bp, Homo sapiens
acagaggagtgctgggggcaggcgac

SEQ ID NO: 55830 - DNA, 26 bp, Homo sapiens
cagaggagtgctgggggcaggcgaca

SEQ ID NO: 55831 - DNA, 26 bp, Homo sapiens
agaggagtgctgggggcaggcgacat

SEQ ID NO: 55832 - DNA, 26 bp, Homo sapiens
gaggagtgctgggggcaggcgacatg

SEQ ID NO: 55833 - DNA, 26 bp, Homo sapiens
aggagtgctgggggcaggcgacatgg

SEQ ID NO: 55834 - DNA, 26 bp, Homo sapiens
ggagtgctgggggcaggcgacatggc

SEQ ID NO: 55835 - DNA, 26 bp, Homo sapiens
gagtgctgggggcaggcgacatggcc

SEQ ID NO: 55836 - DNA, 26 bp, Homo sapiens
agtgctgggggcaggcgacatggcca

SEQ ID NO: 55837 - DNA, 26 bp, Homo sapiens
gtgctgggggcaggcgacatggccac

SEQ ID NO: 55838 - DNA, 26 bp, Homo sapiens
tgctgggggcaggcgacatggccacc

SEQ ID NO: 55839 - DNA, 26 bp, Homo sapiens
gctgggggcaggcgacatggccacca

SEQ ID NO: 55840 - DNA, 26 bp, Homo sapiens
ctgggggcaggcgacatggccaccag

SEQ ID NO: 55841 - DNA, 26 bp, Homo sapiens
tgggggcaggcgacatggccaccagg

SEQ ID NO: 55842 - DNA, 26 bp, Homo sapiens
gggggcaggcgacatggccaccaggc

SEQ ID NO: 55843 - DNA, 26 bp, Homo sapiens
ggggcaggcgacatggccaccaggcc

SEQ ID NO: 55844 - DNA, 26 bp, Homo sapiens
gggcaggcgacatggccaccaggcca

SEQ ID NO: 55845 - DNA, 26 bp, Homo sapiens
ggcaggcgacatggccaccaggccaa

SEQ ID NO: 55846 - DNA, 26 bp, Homo sapiens
gcaggcgacatggccaccaggccaac

SEQ ID NO: 55847 - DNA, 26 bp, Homo sapiens
caggcgacatggccaccaggccaacc

SEQ ID NO: 55848 - DNA, 26 bp, Homo sapiens
aggcgacatggccaccaggccaacct

SEQ ID NO: 55849 - DNA, 26 bp, Homo sapiens
ggcgacatggccaccaggccaacctg

SEQ ID NO: 55850 - DNA, 26 bp, Homo sapiens
gcgacatggccaccaggccaacctgg

SEQ ID NO: 55851 - DNA, 26 bp, Homo sapiens
cgacatggccaccaggccaacctggg

SEQ ID NO: 55852 - DNA, 26 bp, Homo sapiens
gacatggccaccaggccaacctggga

SEQ ID NO: 55853 - DNA, 26 bp, Homo sapiens
acatggccaccaggccaacctgggaa

SEQ ID NO: 55854 - DNA, 26 bp, Homo sapiens
catggccaccaggccaacctgggaat

SEQ ID NO: 55855 - DNA, 26 bp, Homo sapiens
atggccaccaggccaacctgggaatt

SEQ ID NO: 55856 - DNA, 26 bp, Homo sapiens
tggccaccaggccaacctgggaattc

SEQ ID NO: 55857 - DNA, 26 bp, Homo sapiens
ggccaccaggccaacctgggaattca

SEQ ID NO: 55858 - DNA, 26 bp, Homo sapiens
gccaccaggccaacctgggaattcac

SEQ ID NO: 55859 - DNA, 26 bp, Homo sapiens
ccaccaggccaacctgggaattcaca

SEQ ID NO: 55860 - DNA, 26 bp, Homo sapiens
caccaggccaacctgggaattcacac

SEQ ID NO: 55861 - DNA, 26 bp, Homo sapiens
accaggccaacctgggaattcacaca

SEQ ID NO: 55862 - DNA, 26 bp, Homo sapiens
ccaggccaacctgggaattcacacag

SEQ ID NO: 55863 - DNA, 26 bp, Homo sapiens
caggccaacctgggaattcacacagc

SEQ ID NO: 55864 - DNA, 26 bp, Homo sapiens
aggccaacctgggaattcacacagca

SEQ ID NO: 55865 - DNA, 26 bp, Homo sapiens
ggccaacctgggaattcacacagcag

SEQ ID NO: 55866 - DNA, 26 bp, Homo sapiens
gccaacctgggaattcacacagcagg

SEQ ID NO: 55867 - DNA, 26 bp, Homo sapiens
ccaacctgggaattcacacagcagga

SEQ ID NO: 55868 - DNA, 26 bp, Homo sapiens
caacctgggaattcacacagcaggac

SEQ ID NO: 55869 - DNA, 26 bp, Homo sapiens
aacctgggaattcacacagcaggaca

SEQ ID NO: 55870 - DNA, 26 bp, Homo sapiens
acctgggaattcacacagcaggacag

SEQ ID NO: 55871 - DNA, 26 bp, Homo sapiens
cctgggaattcacacagcaggacagc

SEQ ID NO: 55872 - DNA, 26 bp, Homo sapiens
ctgggaattcacacagcaggacagcg

SEQ ID NO: 55873 - DNA, 26 bp, Homo sapiens
tgggaattcacacagcaggacagcga

SEQ ID NO: 55874 - DNA, 26 bp, Homo sapiens
gggaattcacacagcaggacagcgag

SEQ ID NO: 55875 - DNA, 26 bp, Homo sapiens
ggaattcacacagcaggacagcgagg

SEQ ID NO: 55876 - DNA, 26 bp, Homo sapiens
gaattcacacagcaggacagcgaggg

SEQ ID NO: 55877 - DNA, 26 bp, Homo sapiens
aattcacacagcaggacagcgagggg

SEQ ID NO: 55878 - DNA, 26 bp, Homo sapiens
attcacacagcaggacagcgagggga

SEQ ID NO: 55879 - DNA, 26 bp, Homo sapiens
ttcacacagcaggacagcgaggggaa

SEQ ID NO: 55880 - DNA, 26 bp, Homo sapiens
tcacacagcaggacagcgaggggaag

SEQ ID NO: 55881 - DNA, 26 bp, Homo sapiens
cacacagcaggacagcgaggggaagc

SEQ ID NO: 55882 - DNA, 26 bp, Homo sapiens
acacagcaggacagcgaggggaagct

SEQ ID NO: 55883 - DNA, 26 bp, Homo sapiens
cacagcaggacagcgaggggaagctg

SEQ ID NO: 55884 - DNA, 26 bp, Homo sapiens
acagcaggacagcgaggggaagctgg

SEQ ID NO: 55885 - DNA, 26 bp, Homo sapiens
cagcaggacagcgaggggaagctgga

SEQ ID NO: 55886 - DNA, 26 bp, Homo sapiens
agcaggacagcgaggggaagctggag

SEQ ID NO: 55887 - DNA, 26 bp, Homo sapiens
gcaggacagcgaggggaagctggagg

SEQ ID NO: 55888 - DNA, 26 bp, Homo sapiens
caggacagcgaggggaagctggagga

SEQ ID NO: 55889 - DNA, 26 bp, Homo sapiens
aggacagcgaggggaagctggaggac

SEQ ID NO: 55890 - DNA, 26 bp, Homo sapiens
ggacagcgaggggaagctggaggaca

SEQ ID NO: 55891 - DNA, 26 bp, Homo sapiens
gacagcgaggggaagctggaggacag

SEQ ID NO: 55892 - DNA, 26 bp, Homo sapiens
acagcgaggggaagctggaggacagg

SEQ ID NO: 55893 - DNA, 26 bp, Homo sapiens
cagcgaggggaagctggaggacaggg

SEQ ID NO: 55894 - DNA, 26 bp, Homo sapiens
agcgaggggaagctggaggacagggc

SEQ ID NO: 55895 - DNA, 26 bp, Homo sapiens
gcgaggggaagctggaggacagggca

SEQ ID NO: 55896 - DNA, 26 bp, Homo sapiens
cgaggggaagctggaggacagggcag

SEQ ID NO: 55897 - DNA, 26 bp, Homo sapiens
gaggggaagctggaggacagggcagg

SEQ ID NO: 55898 - DNA, 26 bp, Homo sapiens
aggggaagctggaggacagggcaggg

SEQ ID NO: 55899 - DNA, 26 bp, Homo sapiens
ggggaagctggaggacagggcaggga

SEQ ID NO: 55900 - DNA, 26 bp, Homo sapiens
gggaagctggaggacagggcagggag

SEQ ID NO: 55901 - DNA, 26 bp, Homo sapiens
ggaagctggaggacagggcagggagg

SEQ ID NO: 55902 - DNA, 26 bp, Homo sapiens
gaagctggaggacagggcagggaggt

SEQ ID NO: 55903 - DNA, 26 bp, Homo sapiens
aagctggaggacagggcagggaggtg

SEQ ID NO: 55904 - DNA, 26 bp, Homo sapiens
agctggaggacagggcagggaggtgg

SEQ ID NO: 55905 - DNA, 26 bp, Homo sapiens
gctggaggacagggcagggaggtggt

SEQ ID NO: 55906 - DNA, 26 bp, Homo sapiens
ctggaggacagggcagggaggtggtc

SEQ ID NO: 55907 - DNA, 26 bp, Homo sapiens
tggaggacagggcagggaggtggtct

SEQ ID NO: 55908 - DNA, 26 bp, Homo sapiens
ggaggacagggcagggaggtggtctg

SEQ ID NO: 55909 - DNA, 26 bp, Homo sapiens
gaggacagggcagggaggtggtctgg

SEQ ID NO: 55910 - DNA, 26 bp, Homo sapiens
aggacagggcagggaggtggtctggg

SEQ ID NO: 55911 - DNA, 26 bp, Homo sapiens
ggacagggcagggaggtggtctggga

SEQ ID NO: 55912 - DNA, 26 bp, Homo sapiens
gacagggcagggaggtggtctgggag

SEQ ID NO: 55913 - DNA, 26 bp, Homo sapiens
acagggcagggaggtggtctgggagt

SEQ ID NO: 55914 - DNA, 26 bp, Homo sapiens
cagggcagggaggtggtctgggagtg

SEQ ID NO: 55915 - DNA, 26 bp, Homo sapiens
agggcagggaggtggtctgggagtga

SEQ ID NO: 55916 - DNA, 26 bp, Homo sapiens
gggcagggaggtggtctgggagtgac

SEQ ID NO: 55917 - DNA, 26 bp, Homo sapiens
ggcagggaggtggtctgggagtgaca

SEQ ID NO: 55918 - DNA, 26 bp, Homo sapiens
gcagggaggtggtctgggagtgacat

SEQ ID NO: 55919 - DNA, 26 bp, Homo sapiens
cagggaggtggtctgggagtgacatg

SEQ ID NO: 55920 - DNA, 26 bp, Homo sapiens
agggaggtggtctgggagtgacatgc

SEQ ID NO: 55921 - DNA, 26 bp, Homo sapiens
gggaggtggtctgggagtgacatgct

SEQ ID NO: 55922 - DNA, 26 bp, Homo sapiens
ggaggtggtctgggagtgacatgctg

SEQ ID NO: 55923 - DNA, 26 bp, Homo sapiens
gaggtggtctgggagtgacatgctgg

SEQ ID NO: 55924 - DNA, 26 bp, Homo sapiens
aggtggtctgggagtgacatgctggt

SEQ ID NO: 55925 - DNA, 26 bp, Homo sapiens
ggtggtctgggagtgacatgctggtg

SEQ ID NO: 55926 - DNA, 26 bp, Homo sapiens
gtggtctgggagtgacatgctggtgg

SEQ ID NO: 55927 - DNA, 26 bp, Homo sapiens
tggtctgggagtgacatgctggtggg

SEQ ID NO: 55928 - DNA, 26 bp, Homo sapiens
ggtctgggagtgacatgctggtggga

SEQ ID NO: 55929 - DNA, 26 bp, Homo sapiens
gtctgggagtgacatgctggtgggaa

SEQ ID NO: 55930 - DNA, 26 bp, Homo sapiens
tctgggagtgacatgctggtgggaaa

SEQ ID NO: 55931 - DNA, 26 bp, Homo sapiens
ctgggagtgacatgctggtgggaaag

SEQ ID NO: 55932 - DNA, 26 bp, Homo sapiens
tgggagtgacatgctggtgggaaagc

SEQ ID NO: 55933 - DNA, 26 bp, Homo sapiens
gggagtgacatgctggtgggaaagca

SEQ ID NO: 55934 - DNA, 26 bp, Homo sapiens
ggagtgacatgctggtgggaaagcat

SEQ ID NO: 55935 - DNA, 26 bp, Homo sapiens
gagtgacatgctggtgggaaagcatg

SEQ ID NO: 55936 - DNA, 26 bp, Homo sapiens
agtgacatgctggtgggaaagcatgg

SEQ ID NO: 55937 - DNA, 26 bp, Homo sapiens
gtgacatgctggtgggaaagcatggg

SEQ ID NO: 55938 - DNA, 26 bp, Homo sapiens
tgacatgctggtgggaaagcatgggc

SEQ ID NO: 55939 - DNA, 26 bp, Homo sapiens
gacatgctggtgggaaagcatgggct

SEQ ID NO: 55940 - DNA, 26 bp, Homo sapiens
acatgctggtgggaaagcatgggctt

SEQ ID NO: 55941 - DNA, 26 bp, Homo sapiens
catgctggtgggaaagcatgggcttc

SEQ ID NO: 55942 - DNA, 26 bp, Homo sapiens
atgctggtgggaaagcatgggcttca

SEQ ID NO: 55943 - DNA, 26 bp, Homo sapiens
tgctggtgggaaagcatgggcttcag

SEQ ID NO: 55944 - DNA, 26 bp, Homo sapiens
gctggtgggaaagcatgggcttcagc

SEQ ID NO: 55945 - DNA, 26 bp, Homo sapiens
ctggtgggaaagcatgggcttcagct

SEQ ID NO: 55946 - DNA, 26 bp, Homo sapiens
tggtgggaaagcatgggcttcagctc

SEQ ID NO: 55947 - DNA, 26 bp, Homo sapiens
ggtgggaaagcatgggcttcagctcc

SEQ ID NO: 55948 - DNA, 26 bp, Homo sapiens
gtgggaaagcatgggcttcagctcct

SEQ ID NO: 55949 - DNA, 26 bp, Homo sapiens
tgggaaagcatgggcttcagctcctg

SEQ ID NO: 55950 - DNA, 26 bp, Homo sapiens
gggaaagcatgggcttcagctcctga

SEQ ID NO: 55951 - DNA, 26 bp, Homo sapiens
ggaaagcatgggcttcagctcctgaa

SEQ ID NO: 55952 - DNA, 26 bp, Homo sapiens
gaaagcatgggcttcagctcctgaac

SEQ ID NO: 55953 - DNA, 26 bp, Homo sapiens
aaagcatgggcttcagctcctgaaca

SEQ ID NO: 55954 - DNA, 26 bp, Homo sapiens
aagcatgggcttcagctcctgaacag

SEQ ID NO: 55955 - DNA, 26 bp, Homo sapiens
agcatgggcttcagctcctgaacagg

SEQ ID NO: 55956 - DNA, 26 bp, Homo sapiens
gcatgggcttcagctcctgaacaggt

SEQ ID NO: 55957 - DNA, 26 bp, Homo sapiens
catgggcttcagctcctgaacaggtg

SEQ ID NO: 55958 - DNA, 26 bp, Homo sapiens
atgggcttcagctcctgaacaggtgg

SEQ ID NO: 55959 - DNA, 26 bp, Homo sapiens
tgggcttcagctcctgaacaggtgga

SEQ ID NO: 55960 - DNA, 26 bp, Homo sapiens
gggcttcagctcctgaacaggtggag

SEQ ID NO: 55961 - DNA, 26 bp, Homo sapiens
ggcttcagctcctgaacaggtggagc

SEQ ID NO: 55962 - DNA, 26 bp, Homo sapiens
gcttcagctcctgaacaggtggagcc

SEQ ID NO: 55963 - DNA, 26 bp, Homo sapiens
cttcagctcctgaacaggtggagccc

SEQ ID NO: 55964 - DNA, 26 bp, Homo sapiens
ttcagctcctgaacaggtggagcccc

SEQ ID NO: 55965 - DNA, 26 bp, Homo sapiens
tcagctcctgaacaggtggagcccct

SEQ ID NO: 55966 - DNA, 26 bp, Homo sapiens
cagctcctgaacaggtggagcccctg

SEQ ID NO: 55967 - DNA, 26 bp, Homo sapiens
agctcctgaacaggtggagcccctgg

SEQ ID NO: 55968 - DNA, 26 bp, Homo sapiens
gctcctgaacaggtggagcccctggg

SEQ ID NO: 55969 - DNA, 26 bp, Homo sapiens
ctcctgaacaggtggagcccctggga

SEQ ID NO: 55970 - DNA, 26 bp, Homo sapiens
tcctgaacaggtggagcccctgggag

SEQ ID NO: 55971 - DNA, 26 bp, Homo sapiens
cctgaacaggtggagcccctgggagg

SEQ ID NO: 55972 - DNA, 26 bp, Homo sapiens
ctgaacaggtggagcccctgggaggt

SEQ ID NO: 55973 - DNA, 26 bp, Homo sapiens
tgaacaggtggagcccctgggaggtg

SEQ ID NO: 55974 - DNA, 26 bp, Homo sapiens
gaacaggtggagcccctgggaggtgt

SEQ ID NO: 55975 - DNA, 26 bp, Homo sapiens
aacaggtggagcccctgggaggtgtt

SEQ ID NO: 55976 - DNA, 26 bp, Homo sapiens
acaggtggagcccctgggaggtgttt

SEQ ID NO: 55977 - DNA, 26 bp, Homo sapiens
caggtggagcccctgggaggtgtttc

SEQ ID NO: 55978 - DNA, 26 bp, Homo sapiens
aggtggagcccctgggaggtgtttca

SEQ ID NO: 55979 - DNA, 26 bp, Homo sapiens
ggtggagcccctgggaggtgtttcag

SEQ ID NO: 55980 - DNA, 26 bp, Homo sapiens
gtggagcccctgggaggtgtttcagc

SEQ ID NO: 55981 - DNA, 26 bp, Homo sapiens
tggagcccctgggaggtgtttcagca

SEQ ID NO: 55982 - DNA, 26 bp, Homo sapiens
ggagcccctgggaggtgtttcagcag

SEQ ID NO: 55983 - DNA, 26 bp, Homo sapiens
gagcccctgggaggtgtttcagcagg

SEQ ID NO: 55984 - DNA, 26 bp, Homo sapiens
agcccctgggaggtgtttcagcagga

SEQ ID NO: 55985 - DNA, 26 bp, Homo sapiens
gcccctgggaggtgtttcagcaggag

SEQ ID NO: 55986 - DNA, 26 bp, Homo sapiens
cccctgggaggtgtttcagcaggagc

SEQ ID NO: 55987 - DNA, 26 bp, Homo sapiens
ccctgggaggtgtttcagcaggagcg

SEQ ID NO: 55988 - DNA, 26 bp, Homo sapiens
cctgggaggtgtttcagcaggagcgg

SEQ ID NO: 55989 - DNA, 26 bp, Homo sapiens
ctgggaggtgtttcagcaggagcggg

SEQ ID NO: 55990 - DNA, 26 bp, Homo sapiens
tgggaggtgtttcagcaggagcggga

SEQ ID NO: 55991 - DNA, 26 bp, Homo sapiens
gggaggtgtttcagcaggagcgggat

SEQ ID NO: 55992 - DNA, 26 bp, Homo sapiens
ggaggtgtttcagcaggagcgggatg

SEQ ID NO: 55993 - DNA, 26 bp, Homo sapiens
gaggtgtttcagcaggagcgggatga

SEQ ID NO: 55994 - DNA, 26 bp, Homo sapiens
aggtgtttcagcaggagcgggatgac

SEQ ID NO: 55995 - DNA, 26 bp, Homo sapiens
ggtgtttcagcaggagcgggatgaca

SEQ ID NO: 55996 - DNA, 26 bp, Homo sapiens
gtgtttcagcaggagcgggatgacag

SEQ ID NO: 55997 - DNA, 26 bp, Homo sapiens
tgtttcagcaggagcgggatgacaga

SEQ ID NO: 55998 - DNA, 26 bp, Homo sapiens
gtttcagcaggagcgggatgacagaa

SEQ ID NO: 55999 - DNA, 26 bp, Homo sapiens
tttcagcaggagcgggatgacagaag

SEQ ID NO: 56000 - DNA, 26 bp, Homo sapiens
ttcagcaggagcgggatgacagaaga

SEQ ID NO: 56001 - DNA, 26 bp, Homo sapiens
tcagcaggagcgggatgacagaagag

SEQ ID NO: 56002 - DNA, 26 bp, Homo sapiens
cagcaggagcgggatgacagaagagc

SEQ ID NO: 56003 - DNA, 26 bp, Homo sapiens
agcaggagcgggatgacagaagagcg

SEQ ID NO: 56004 - DNA, 26 bp, Homo sapiens
gcaggagcgggatgacagaagagcgg

SEQ ID NO: 56005 - DNA, 26 bp, Homo sapiens
caggagcgggatgacagaagagcggc

SEQ ID NO: 56006 - DNA, 26 bp, Homo sapiens
aggagcgggatgacagaagagcggca

SEQ ID NO: 56007 - DNA, 26 bp, Homo sapiens
ggagcgggatgacagaagagcggcat

SEQ ID NO: 56008 - DNA, 26 bp, Homo sapiens
gagcgggatgacagaagagcggcatc

SEQ ID NO: 56009 - DNA, 26 bp, Homo sapiens
agcgggatgacagaagagcggcatca

SEQ ID NO: 56010 - DNA, 26 bp, Homo sapiens
gcgggatgacagaagagcggcatcat

SEQ ID NO: 56011 - DNA, 26 bp, Homo sapiens
cgggatgacagaagagcggcatcatg

SEQ ID NO: 56012 - DNA, 26 bp, Homo sapiens
gggatgacagaagagcggcatcatgg

SEQ ID NO: 56013 - DNA, 26 bp, Homo sapiens
ggatgacagaagagcggcatcatggg

SEQ ID NO: 56014 - DNA, 26 bp, Homo sapiens
gatgacagaagagcggcatcatggga

SEQ ID NO: 56015 - DNA, 26 bp, Homo sapiens
atgacagaagagcggcatcatgggaa

SEQ ID NO: 56016 - DNA, 26 bp, Homo sapiens
tgacagaagagcggcatcatgggaag

SEQ ID NO: 56017 - DNA, 26 bp, Homo sapiens
gacagaagagcggcatcatgggaagg

SEQ ID NO: 56018 - DNA, 26 bp, Homo sapiens
acagaagagcggcatcatgggaagga

SEQ ID NO: 56019 - DNA, 26 bp, Homo sapiens
cagaagagcggcatcatgggaaggat

SEQ ID NO: 56020 - DNA, 26 bp, Homo sapiens
agaagagcggcatcatgggaaggatg

SEQ ID NO: 56021 - DNA, 26 bp, Homo sapiens
gaagagcggcatcatgggaaggatgg

SEQ ID NO: 56022 - DNA, 26 bp, Homo sapiens
aagagcggcatcatgggaaggatggt

SEQ ID NO: 56023 - DNA, 26 bp, Homo sapiens
agagcggcatcatgggaaggatggtt

SEQ ID NO: 56024 - DNA, 26 bp, Homo sapiens
gagcggcatcatgggaaggatggttc

SEQ ID NO: 56025 - DNA, 26 bp, Homo sapiens
agcggcatcatgggaaggatggttca

SEQ ID NO: 56026 - DNA, 26 bp, Homo sapiens
gcggcatcatgggaaggatggttcat

SEQ ID NO: 56027 - DNA, 26 bp, Homo sapiens
cggcatcatgggaaggatggttcatg

SEQ ID NO: 56028 - DNA, 26 bp, Homo sapiens
ggcatcatgggaaggatggttcatgt

SEQ ID NO: 56029 - DNA, 26 bp, Homo sapiens
gcatcatgggaaggatggttcatgtg

SEQ ID NO: 56030 - DNA, 26 bp, Homo sapiens
catcatgggaaggatggttcatgtgt

SEQ ID NO: 56031 - DNA, 26 bp, Homo sapiens
atcatgggaaggatggttcatgtgtg

SEQ ID NO: 56032 - DNA, 26 bp, Homo sapiens
tcatgggaaggatggttcatgtgtgg

SEQ ID NO: 56033 - DNA, 26 bp, Homo sapiens
catgggaaggatggttcatgtgtggg

SEQ ID NO: 56034 - DNA, 26 bp, Homo sapiens
atgggaaggatggttcatgtgtgggc

SEQ ID NO: 56035 - DNA, 26 bp, Homo sapiens
tgggaaggatggttcatgtgtgggct

SEQ ID NO: 56036 - DNA, 26 bp, Homo sapiens
gggaaggatggttcatgtgtgggctg

SEQ ID NO: 56037 - DNA, 26 bp, Homo sapiens
ggaaggatggttcatgtgtgggctgt

SEQ ID NO: 56038 - DNA, 26 bp, Homo sapiens
gaaggatggttcatgtgtgggctgtg

SEQ ID NO: 56039 - DNA, 26 bp, Homo sapiens
aaggatggttcatgtgtgggctgtgc

SEQ ID NO: 56040 - DNA, 26 bp, Homo sapiens
aggatggttcatgtgtgggctgtgca

SEQ ID NO: 56041 - DNA, 26 bp, Homo sapiens
ggatggttcatgtgtgggctgtgcaa

SEQ ID NO: 56042 - DNA, 26 bp, Homo sapiens
gatggttcatgtgtgggctgtgcaag

SEQ ID NO: 56043 - DNA, 26 bp, Homo sapiens
atggttcatgtgtgggctgtgcaagg

SEQ ID NO: 56044 - DNA, 26 bp, Homo sapiens
tggttcatgtgtgggctgtgcaaggg

SEQ ID NO: 56045 - DNA, 26 bp, Homo sapiens
ggttcatgtgtgggctgtgcaaggga

SEQ ID NO: 56046 - DNA, 26 bp, Homo sapiens
gttcatgtgtgggctgtgcaagggac

SEQ ID NO: 56047 - DNA, 26 bp, Homo sapiens
ttcatgtgtgggctgtgcaagggaca

SEQ ID NO: 56048 - DNA, 26 bp, Homo sapiens
tcatgtgtgggctgtgcaagggacat

SEQ ID NO: 56049 - DNA, 26 bp, Homo sapiens
catgtgtgggctgtgcaagggacatt

SEQ ID NO: 56050 - DNA, 26 bp, Homo sapiens
atgtgtgggctgtgcaagggacattg

SEQ ID NO: 56051 - DNA, 26 bp, Homo sapiens
tgtgtgggctgtgcaagggacattgc

SEQ ID NO: 56052 - DNA, 26 bp, Homo sapiens
gtgtgggctgtgcaagggacattgca

SEQ ID NO: 56053 - DNA, 26 bp, Homo sapiens
tgtgggctgtgcaagggacattgcag

SEQ ID NO: 56054 - DNA, 26 bp, Homo sapiens
gtgggctgtgcaagggacattgcaga

SEQ ID NO: 56055 - DNA, 26 bp, Homo sapiens
tgggctgtgcaagggacattgcagac

SEQ ID NO: 56056 - DNA, 26 bp, Homo sapiens
gggctgtgcaagggacattgcagacg

SEQ ID NO: 56057 - DNA, 26 bp, Homo sapiens
ggctgtgcaagggacattgcagacgg

SEQ ID NO: 56058 - DNA, 26 bp, Homo sapiens
gctgtgcaagggacattgcagacgga

SEQ ID NO: 56059 - DNA, 26 bp, Homo sapiens
ctgtgcaagggacattgcagacggag

SEQ ID NO: 56060 - DNA, 26 bp, Homo sapiens
tgtgcaagggacattgcagacggagg

SEQ ID NO: 56061 - DNA, 26 bp, Homo sapiens
gtgcaagggacattgcagacggagga

SEQ ID NO: 56062 - DNA, 26 bp, Homo sapiens
tgcaagggacattgcagacggaggaa

SEQ ID NO: 56063 - DNA, 26 bp, Homo sapiens
gcaagggacattgcagacggaggaag

SEQ ID NO: 56064 - DNA, 26 bp, Homo sapiens
caagggacattgcagacggaggaagc

SEQ ID NO: 56065 - DNA, 26 bp, Homo sapiens
aagggacattgcagacggaggaagcc

SEQ ID NO: 56066 - DNA, 26 bp, Homo sapiens
agggacattgcagacggaggaagcca

SEQ ID NO: 56067 - DNA, 26 bp, Homo sapiens
gggacattgcagacggaggaagccac

SEQ ID NO: 56068 - DNA, 26 bp, Homo sapiens
ggacattgcagacggaggaagccact

SEQ ID NO: 56069 - DNA, 26 bp, Homo sapiens
gacattgcagacggaggaagccacta

SEQ ID NO: 56070 - DNA, 26 bp, Homo sapiens
acattgcagacggaggaagccactag

SEQ ID NO: 56071 - DNA, 26 bp, Homo sapiens
cattgcagacggaggaagccactagg

SEQ ID NO: 56072 - DNA, 26 bp, Homo sapiens
attgcagacggaggaagccactaggg

SEQ ID NO: 56073 - DNA, 26 bp, Homo sapiens
ttgcagacggaggaagccactaggga

SEQ ID NO: 56074 - DNA, 26 bp, Homo sapiens
tgcagacggaggaagccactagggag

SEQ ID NO: 56075 - DNA, 26 bp, Homo sapiens
gcagacggaggaagccactagggagc

SEQ ID NO: 56076 - DNA, 26 bp, Homo sapiens
cagacggaggaagccactagggagct

SEQ ID NO: 56077 - DNA, 26 bp, Homo sapiens
agacggaggaagccactagggagctg

SEQ ID NO: 56078 - DNA, 26 bp, Homo sapiens
gacggaggaagccactagggagctgt

SEQ ID NO: 56079 - DNA, 26 bp, Homo sapiens
acggaggaagccactagggagctgtt

SEQ ID NO: 56080 - DNA, 26 bp, Homo sapiens
cggaggaagccactagggagctgttc

SEQ ID NO: 56081 - DNA, 26 bp, Homo sapiens
ggaggaagccactagggagctgttcc

SEQ ID NO: 56082 - DNA, 26 bp, Homo sapiens
gaggaagccactagggagctgttcct

SEQ ID NO: 56083 - DNA, 26 bp, Homo sapiens
aggaagccactagggagctgttcctc

SEQ ID NO: 56084 - DNA, 26 bp, Homo sapiens
ggaagccactagggagctgttcctcc

SEQ ID NO: 56085 - DNA, 26 bp, Homo sapiens
gaagccactagggagctgttcctcca

SEQ ID NO: 56086 - DNA, 26 bp, Homo sapiens
aagccactagggagctgttcctccaa

SEQ ID NO: 56087 - DNA, 26 bp, Homo sapiens
agccactagggagctgttcctccaaa

SEQ ID NO: 56088 - DNA, 26 bp, Homo sapiens
gccactagggagctgttcctccaaag

SEQ ID NO: 56089 - DNA, 26 bp, Homo sapiens
ccactagggagctgttcctccaaaga

SEQ ID NO: 56090 - DNA, 26 bp, Homo sapiens
cactagggagctgttcctccaaagac

SEQ ID NO: 56091 - DNA, 26 bp, Homo sapiens
actagggagctgttcctccaaagacg

SEQ ID NO: 56092 - DNA, 26 bp, Homo sapiens
ctagggagctgttcctccaaagacgt

SEQ ID NO: 56093 - DNA, 26 bp, Homo sapiens
tagggagctgttcctccaaagacgta

SEQ ID NO: 56094 - DNA, 26 bp, Homo sapiens
agggagctgttcctccaaagacgtaa

SEQ ID NO: 56095 - DNA, 26 bp, Homo sapiens
gggagctgttcctccaaagacgtaaa

SEQ ID NO: 56096 - DNA, 26 bp, Homo sapiens
ggagctgttcctccaaagacgtaaaa

SEQ ID NO: 56097 - DNA, 26 bp, Homo sapiens
gagctgttcctccaaagacgtaaaat

SEQ ID NO: 56098 - DNA, 26 bp, Homo sapiens
agctgttcctccaaagacgtaaaatg

SEQ ID NO: 56099 - DNA, 26 bp, Homo sapiens
gctgttcctccaaagacgtaaaatgc

SEQ ID NO: 56100 - DNA, 26 bp, Homo sapiens
ctgttcctccaaagacgtaaaatgca

SEQ ID NO: 56101 - DNA, 26 bp, Homo sapiens
tgttcctccaaagacgtaaaatgcag

SEQ ID NO: 56102 - DNA, 26 bp, Homo sapiens
gttcctccaaagacgtaaaatgcagg

SEQ ID NO: 56103 - DNA, 26 bp, Homo sapiens
ttcctccaaagacgtaaaatgcagga

SEQ ID NO: 56104 - DNA, 26 bp, Homo sapiens
tcctccaaagacgtaaaatgcaggat

SEQ ID NO: 56105 - DNA, 26 bp, Homo sapiens
cctccaaagacgtaaaatgcaggata

SEQ ID NO: 56106 - DNA, 26 bp, Homo sapiens
ctccaaagacgtaaaatgcaggataa

SEQ ID NO: 56107 - DNA, 26 bp, Homo sapiens
tccaaagacgtaaaatgcaggataat

SEQ ID NO: 56108 - DNA, 26 bp, Homo sapiens
ccaaagacgtaaaatgcaggataata

SEQ ID NO: 56109 - DNA, 26 bp, Homo sapiens
caaagacgtaaaatgcaggataataa

SEQ ID NO: 56110 - DNA, 26 bp, Homo sapiens
aaagacgtaaaatgcaggataataac

SEQ ID NO: 56111 - DNA, 26 bp, Homo sapiens
aagacgtaaaatgcaggataataaca

SEQ ID NO: 56112 - DNA, 26 bp, Homo sapiens
agacgtaaaatgcaggataataacaa

SEQ ID NO: 56113 - DNA, 26 bp, Homo sapiens
gacgtaaaatgcaggataataacaaa

SEQ ID NO: 56114 - DNA, 26 bp, Homo sapiens
acgtaaaatgcaggataataacaaag

SEQ ID NO: 56115 - DNA, 26 bp, Homo sapiens
cgtaaaatgcaggataataacaaagg

SEQ ID NO: 56116 - DNA, 26 bp, Homo sapiens
gtaaaatgcaggataataacaaagga

SEQ ID NO: 56117 - DNA, 26 bp, Homo sapiens
taaaatgcaggataataacaaaggac

SEQ ID NO: 56118 - DNA, 26 bp, Homo sapiens
aaaatgcaggataataacaaaggaca

SEQ ID NO: 56119 - DNA, 26 bp, Homo sapiens
aaatgcaggataataacaaaggacag

SEQ ID NO: 56120 - DNA, 26 bp, Homo sapiens
aatgcaggataataacaaaggacagg

SEQ ID NO: 56121 - DNA, 26 bp, Homo sapiens
atgcaggataataacaaaggacagga

SEQ ID NO: 56122 - DNA, 26 bp, Homo sapiens
tgcaggataataacaaaggacaggat

SEQ ID NO: 56123 - DNA, 26 bp, Homo sapiens
gcaggataataacaaaggacaggatg

SEQ ID NO: 56124 - DNA, 26 bp, Homo sapiens
caggataataacaaaggacaggatgg

SEQ ID NO: 56125 - DNA, 26 bp, Homo sapiens
aggataataacaaaggacaggatggt

SEQ ID NO: 56126 - DNA, 26 bp, Homo sapiens
ggataataacaaaggacaggatggtc

SEQ ID NO: 56127 - DNA, 26 bp, Homo sapiens
gataataacaaaggacaggatggtca

SEQ ID NO: 56128 - DNA, 26 bp, Homo sapiens
ataataacaaaggacaggatggtcat

SEQ ID NO: 56129 - DNA, 26 bp, Homo sapiens
taataacaaaggacaggatggtcatg

SEQ ID NO: 56130 - DNA, 26 bp, Homo sapiens
aataacaaaggacaggatggtcatgc

SEQ ID NO: 56131 - DNA, 26 bp, Homo sapiens
ataacaaaggacaggatggtcatgcc

SEQ ID NO: 56132 - DNA, 26 bp, Homo sapiens
taacaaaggacaggatggtcatgcca

SEQ ID NO: 56133 - DNA, 26 bp, Homo sapiens
aacaaaggacaggatggtcatgccag

SEQ ID NO: 56134 - DNA, 26 bp, Homo sapiens
acaaaggacaggatggtcatgccagg

SEQ ID NO: 56135 - DNA, 26 bp, Homo sapiens
caaaggacaggatggtcatgccaggg

SEQ ID NO: 56136 - DNA, 26 bp, Homo sapiens
aaaggacaggatggtcatgccaggga

SEQ ID NO: 56137 - DNA, 26 bp, Homo sapiens
aaggacaggatggtcatgccagggag

SEQ ID NO: 56138 - DNA, 26 bp, Homo sapiens
aggacaggatggtcatgccagggagg

SEQ ID NO: 56139 - DNA, 26 bp, Homo sapiens
ggacaggatggtcatgccagggagga

SEQ ID NO: 56140 - DNA, 26 bp, Homo sapiens
gacaggatggtcatgccagggaggaa

SEQ ID NO: 56141 - DNA, 26 bp, Homo sapiens
acaggatggtcatgccagggaggaaa

SEQ ID NO: 56142 - DNA, 26 bp, Homo sapiens
caggatggtcatgccagggaggaaag

SEQ ID NO: 56143 - DNA, 26 bp, Homo sapiens
aggatggtcatgccagggaggaaagc

SEQ ID NO: 56144 - DNA, 26 bp, Homo sapiens
ggatggtcatgccagggaggaaagca

SEQ ID NO: 56145 - DNA, 26 bp, Homo sapiens
gatggtcatgccagggaggaaagcat

SEQ ID NO: 56146 - DNA, 26 bp, Homo sapiens
atggtcatgccagggaggaaagcatt

SEQ ID NO: 56147 - DNA, 26 bp, Homo sapiens
tggtcatgccagggaggaaagcatta

SEQ ID NO: 56148 - DNA, 26 bp, Homo sapiens
ggtcatgccagggaggaaagcattaa

SEQ ID NO: 56149 - DNA, 26 bp, Homo sapiens
gtcatgccagggaggaaagcattaag

SEQ ID NO: 56150 - DNA, 26 bp, Homo sapiens
tcatgccagggaggaaagcattaaga

SEQ ID NO: 56151 - DNA, 26 bp, Homo sapiens
catgccagggaggaaagcattaagaa

SEQ ID NO: 56152 - DNA, 26 bp, Homo sapiens
atgccagggaggaaagcattaagaag

SEQ ID NO: 56153 - DNA, 26 bp, Homo sapiens
tgccagggaggaaagcattaagaagt

SEQ ID NO: 56154 - DNA, 26 bp, Homo sapiens
gccagggaggaaagcattaagaagtg

SEQ ID NO: 56155 - DNA, 26 bp, Homo sapiens
ccagggaggaaagcattaagaagtgg

SEQ ID NO: 56156 - DNA, 26 bp, Homo sapiens
cagggaggaaagcattaagaagtgga

SEQ ID NO: 56157 - DNA, 26 bp, Homo sapiens
agggaggaaagcattaagaagtggat

SEQ ID NO: 56158 - DNA, 26 bp, Homo sapiens
gggaggaaagcattaagaagtggatc

SEQ ID NO: 56159 - DNA, 26 bp, Homo sapiens
ggaggaaagcattaagaagtggatca

SEQ ID NO: 56160 - DNA, 26 bp, Homo sapiens
gaggaaagcattaagaagtggatcaa

SEQ ID NO: 56161 - DNA, 26 bp, Homo sapiens
aggaaagcattaagaagtggatcaat

SEQ ID NO: 56162 - DNA, 26 bp, Homo sapiens
ggaaagcattaagaagtggatcaatt

SEQ ID NO: 56163 - DNA, 26 bp, Homo sapiens
gaaagcattaagaagtggatcaattc

SEQ ID NO: 56164 - DNA, 26 bp, Homo sapiens
aaagcattaagaagtggatcaattcc

SEQ ID NO: 56165 - DNA, 26 bp, Homo sapiens
aagcattaagaagtggatcaattccc

SEQ ID NO: 56166 - DNA, 26 bp, Homo sapiens
agcattaagaagtggatcaattccct

SEQ ID NO: 56167 - DNA, 26 bp, Homo sapiens
gcattaagaagtggatcaattccctg

SEQ ID NO: 56168 - DNA, 26 bp, Homo sapiens
cattaagaagtggatcaattccctgc

SEQ ID NO: 56169 - DNA, 26 bp, Homo sapiens
attaagaagtggatcaattccctgct

SEQ ID NO: 56170 - DNA, 26 bp, Homo sapiens
ttaagaagtggatcaattccctgcta

SEQ ID NO: 56171 - DNA, 26 bp, Homo sapiens
taagaagtggatcaattccctgctac

SEQ ID NO: 56172 - DNA, 26 bp, Homo sapiens
aagaagtggatcaattccctgctact

SEQ ID NO: 56173 - DNA, 26 bp, Homo sapiens
agaagtggatcaattccctgctactg

SEQ ID NO: 56174 - DNA, 26 bp, Homo sapiens
gaagtggatcaattccctgctactgt

SEQ ID NO: 56175 - DNA, 26 bp, Homo sapiens
aagtggatcaattccctgctactgtt

SEQ ID NO: 56176 - DNA, 26 bp, Homo sapiens
agtggatcaattccctgctactgttg

SEQ ID NO: 56177 - DNA, 26 bp, Homo sapiens
gtggatcaattccctgctactgttgc

SEQ ID NO: 56178 - DNA, 26 bp, Homo sapiens
tggatcaattccctgctactgttgct

SEQ ID NO: 56179 - DNA, 26 bp, Homo sapiens
ggatcaattccctgctactgttgctt

SEQ ID NO: 56180 - DNA, 26 bp, Homo sapiens
gatcaattccctgctactgttgcttt

SEQ ID NO: 56181 - DNA, 26 bp, Homo sapiens
atcaattccctgctactgttgctttt

SEQ ID NO: 56182 - DNA, 26 bp, Homo sapiens
tcaattccctgctactgttgcttttt

SEQ ID NO: 56183 - DNA, 26 bp, Homo sapiens
caattccctgctactgttgctttttt

SEQ ID NO: 56184 - DNA, 26 bp, Homo sapiens
aattccctgctactgttgctttttta

SEQ ID NO: 56185 - DNA, 26 bp, Homo sapiens
attccctgctactgttgcttttttaa

SEQ ID NO: 56186 - DNA, 26 bp, Homo sapiens
ttccctgctactgttgcttttttaag

SEQ ID NO: 56187 - DNA, 26 bp, Homo sapiens
tccctgctactgttgcttttttaagt

SEQ ID NO: 56188 - DNA, 26 bp, Homo sapiens
ccctgctactgttgcttttttaagtt

SEQ ID NO: 56189 - DNA, 26 bp, Homo sapiens
cctgctactgttgcttttttaagttc

SEQ ID NO: 56190 - DNA, 26 bp, Homo sapiens
ctgctactgttgcttttttaagttct

SEQ ID NO: 56191 - DNA, 26 bp, Homo sapiens
tgctactgttgcttttttaagttctc

SEQ ID NO: 56192 - DNA, 26 bp, Homo sapiens
gctactgttgcttttttaagttctct

SEQ ID NO: 56193 - DNA, 26 bp, Homo sapiens
ctactgttgcttttttaagttctctc

SEQ ID NO: 56194 - DNA, 26 bp, Homo sapiens
tactgttgcttttttaagttctctcc

SEQ ID NO: 56195 - DNA, 26 bp, Homo sapiens
actgttgcttttttaagttctctccc

SEQ ID NO: 56196 - DNA, 26 bp, Homo sapiens
ctgttgcttttttaagttctctccct

SEQ ID NO: 56197 - DNA, 26 bp, Homo sapiens
tgttgcttttttaagttctctccctc

SEQ ID NO: 56198 - DNA, 26 bp, Homo sapiens
gttgcttttttaagttctctccctcc

SEQ ID NO: 56199 - DNA, 26 bp, Homo sapiens
ttgcttttttaagttctctccctcct

SEQ ID NO: 56200 - DNA, 26 bp, Homo sapiens
tgcttttttaagttctctccctcctg

SEQ ID NO: 56201 - DNA, 26 bp, Homo sapiens
gcttttttaagttctctccctcctgt

SEQ ID NO: 56202 - DNA, 26 bp, Homo sapiens
cttttttaagttctctccctcctgtg

SEQ ID NO: 56203 - DNA, 26 bp, Homo sapiens
ttttttaagttctctccctcctgtgg

SEQ ID NO: 56204 - DNA, 26 bp, Homo sapiens
tttttaagttctctccctcctgtgga

SEQ ID NO: 56205 - DNA, 26 bp, Homo sapiens
ttttaagttctctccctcctgtggaa

SEQ ID NO: 56206 - DNA, 26 bp, Homo sapiens
tttaagttctctccctcctgtggaaa

SEQ ID NO: 56207 - DNA, 26 bp, Homo sapiens
ttaagttctctccctcctgtggaaag

SEQ ID NO: 56208 - DNA, 26 bp, Homo sapiens
taagttctctccctcctgtggaaagc

SEQ ID NO: 56209 - DNA, 26 bp, Homo sapiens
aagttctctccctcctgtggaaagct

SEQ ID NO: 56210 - DNA, 26 bp, Homo sapiens
agttctctccctcctgtggaaagcta

SEQ ID NO: 56211 - DNA, 26 bp, Homo sapiens
gttctctccctcctgtggaaagctaa

SEQ ID NO: 56212 - DNA, 26 bp, Homo sapiens
ttctctccctcctgtggaaagctaag

SEQ ID NO: 56213 - DNA, 26 bp, Homo sapiens
tctctccctcctgtggaaagctaaga

SEQ ID NO: 56214 - DNA, 26 bp, Homo sapiens
ctctccctcctgtggaaagctaagat

SEQ ID NO: 56215 - DNA, 26 bp, Homo sapiens
tctccctcctgtggaaagctaagatg

SEQ ID NO: 56216 - DNA, 26 bp, Homo sapiens
ctccctcctgtggaaagctaagatga

SEQ ID NO: 56217 - DNA, 26 bp, Homo sapiens
tccctcctgtggaaagctaagatgac

SEQ ID NO: 56218 - DNA, 26 bp, Homo sapiens
ccctcctgtggaaagctaagatgact

SEQ ID NO: 56219 - DNA, 26 bp, Homo sapiens
cctcctgtggaaagctaagatgactt

SEQ ID NO: 56220 - DNA, 26 bp, Homo sapiens
ctcctgtggaaagctaagatgacttc

SEQ ID NO: 56221 - DNA, 26 bp, Homo sapiens
tcctgtggaaagctaagatgacttca

SEQ ID NO: 56222 - DNA, 26 bp, Homo sapiens
cctgtggaaagctaagatgacttcaa

SEQ ID NO: 56223 - DNA, 26 bp, Homo sapiens
ctgtggaaagctaagatgacttcaaa

SEQ ID NO: 56224 - DNA, 26 bp, Homo sapiens
tgtggaaagctaagatgacttcaaaa

SEQ ID NO: 56225 - DNA, 26 bp, Homo sapiens
gtggaaagctaagatgacttcaaaac

SEQ ID NO: 56226 - DNA, 26 bp, Homo sapiens
tggaaagctaagatgacttcaaaact

SEQ ID NO: 56227 - DNA, 26 bp, Homo sapiens
ggaaagctaagatgacttcaaaactt

SEQ ID NO: 56228 - DNA, 26 bp, Homo sapiens
gaaagctaagatgacttcaaaacttt

SEQ ID NO: 56229 - DNA, 26 bp, Homo sapiens
aaagctaagatgacttcaaaactttg

SEQ ID NO: 56230 - DNA, 26 bp, Homo sapiens
aagctaagatgacttcaaaactttgg

SEQ ID NO: 56231 - DNA, 26 bp, Homo sapiens
agctaagatgacttcaaaactttgga

SEQ ID NO: 56232 - DNA, 26 bp, Homo sapiens
gctaagatgacttcaaaactttggaa

SEQ ID NO: 56233 - DNA, 26 bp, Homo sapiens
ctaagatgacttcaaaactttggaat

SEQ ID NO: 56234 - DNA, 26 bp, Homo sapiens
taagatgacttcaaaactttggaatc

SEQ ID NO: 56235 - DNA, 26 bp, Homo sapiens
aagatgacttcaaaactttggaatcc

SEQ ID NO: 56236 - DNA, 26 bp, Homo sapiens
agatgacttcaaaactttggaatcct

SEQ ID NO: 56237 - DNA, 26 bp, Homo sapiens
gatgacttcaaaactttggaatcctg

SEQ ID NO: 56238 - DNA, 26 bp, Homo sapiens
atgacttcaaaactttggaatcctgg

SEQ ID NO: 56239 - DNA, 26 bp, Homo sapiens
tgacttcaaaactttggaatcctgga

SEQ ID NO: 56240 - DNA, 26 bp, Homo sapiens
gacttcaaaactttggaatcctggag

SEQ ID NO: 56241 - DNA, 26 bp, Homo sapiens
acttcaaaactttggaatcctggaga

SEQ ID NO: 56242 - DNA, 26 bp, Homo sapiens
cttcaaaactttggaatcctggagaa

SEQ ID NO: 56243 - DNA, 26 bp, Homo sapiens
ttcaaaactttggaatcctggagaat

SEQ ID NO: 56244 - DNA, 26 bp, Homo sapiens
tcaaaactttggaatcctggagaatc

SEQ ID NO: 56245 - DNA, 26 bp, Homo sapiens
caaaactttggaatcctggagaatcc

SEQ ID NO: 56246 - DNA, 26 bp, Homo sapiens
aaaactttggaatcctggagaatccc

SEQ ID NO: 56247 - DNA, 26 bp, Homo sapiens
aaactttggaatcctggagaatccct

SEQ ID NO: 56248 - DNA, 26 bp, Homo sapiens
aactttggaatcctggagaatccctt

SEQ ID NO: 56249 - DNA, 26 bp, Homo sapiens
actttggaatcctggagaatcccttt

SEQ ID NO: 56250 - DNA, 26 bp, Homo sapiens
ctttggaatcctggagaatccctttg

SEQ ID NO: 56251 - DNA, 26 bp, Homo sapiens
tttggaatcctggagaatccctttgt

SEQ ID NO: 56252 - DNA, 26 bp, Homo sapiens
ttggaatcctggagaatccctttgtt

SEQ ID NO: 56253 - DNA, 26 bp, Homo sapiens
tggaatcctggagaatccctttgttc

SEQ ID NO: 56254 - DNA, 26 bp, Homo sapiens
ggaatcctggagaatccctttgttca

SEQ ID NO: 56255 - DNA, 26 bp, Homo sapiens
gaatcctggagaatccctttgttcat

SEQ ID NO: 56256 - DNA, 26 bp, Homo sapiens
aatcctggagaatccctttgttcatt

SEQ ID NO: 56257 - DNA, 26 bp, Homo sapiens
atcctggagaatccctttgttcattg

SEQ ID NO: 56258 - DNA, 26 bp, Homo sapiens
tcctggagaatccctttgttcattga

SEQ ID NO: 56259 - DNA, 26 bp, Homo sapiens
cctggagaatccctttgttcattgaa

SEQ ID NO: 56260 - DNA, 26 bp, Homo sapiens
ctggagaatccctttgttcattgaag

SEQ ID NO: 56261 - DNA, 26 bp, Homo sapiens
tggagaatccctttgttcattgaagt

SEQ ID NO: 56262 - DNA, 26 bp, Homo sapiens
ggagaatccctttgttcattgaagtg

SEQ ID NO: 56263 - DNA, 26 bp, Homo sapiens
gagaatccctttgttcattgaagtga

SEQ ID NO: 56264 - DNA, 26 bp, Homo sapiens
agaatccctttgttcattgaagtgag

SEQ ID NO: 56265 - DNA, 26 bp, Homo sapiens
gaatccctttgttcattgaagtgagt

SEQ ID NO: 56266 - DNA, 26 bp, Homo sapiens
aatccctttgttcattgaagtgagtt

SEQ ID NO: 56267 - DNA, 26 bp, Homo sapiens
atccctttgttcattgaagtgagttt

SEQ ID NO: 56268 - DNA, 26 bp, Homo sapiens
tccctttgttcattgaagtgagtttt

SEQ ID NO: 56269 - DNA, 26 bp, Homo sapiens
ccctttgttcattgaagtgagttttc

SEQ ID NO: 56270 - DNA, 26 bp, Homo sapiens
cctttgttcattgaagtgagttttca

SEQ ID NO: 56271 - DNA, 26 bp, Homo sapiens
ctttgttcattgaagtgagttttcaa

SEQ ID NO: 56272 - DNA, 26 bp, Homo sapiens
tttgttcattgaagtgagttttcaag

SEQ ID NO: 56273 - DNA, 26 bp, Homo sapiens
ttgttcattgaagtgagttttcaagc

SEQ ID NO: 56274 - DNA, 26 bp, Homo sapiens
tgttcattgaagtgagttttcaagct

SEQ ID NO: 56275 - DNA, 26 bp, Homo sapiens
gttcattgaagtgagttttcaagctc

SEQ ID NO: 56276 - DNA, 26 bp, Homo sapiens
ttcattgaagtgagttttcaagctct

SEQ ID NO: 56277 - DNA, 26 bp, Homo sapiens
tcattgaagtgagttttcaagctctg

SEQ ID NO: 56278 - DNA, 26 bp, Homo sapiens
cattgaagtgagttttcaagctctgt

SEQ ID NO: 56279 - DNA, 26 bp, Homo sapiens
attgaagtgagttttcaagctctgta

SEQ ID NO: 56280 - DNA, 26 bp, Homo sapiens
ttgaagtgagttttcaagctctgtaa

SEQ ID NO: 56281 - DNA, 26 bp, Homo sapiens
tgaagtgagttttcaagctctgtaaa

SEQ ID NO: 56282 - DNA, 26 bp, Homo sapiens
gaagtgagttttcaagctctgtaaaa

SEQ ID NO: 56283 - DNA, 26 bp, Homo sapiens
aagtgagttttcaagctctgtaaaat

SEQ ID NO: 56284 - DNA, 26 bp, Homo sapiens
agtgagttttcaagctctgtaaaata

SEQ ID NO: 56285 - DNA, 26 bp, Homo sapiens
gtgagttttcaagctctgtaaaataa

SEQ ID NO: 56286 - DNA, 26 bp, Homo sapiens
tgagttttcaagctctgtaaaataaa

SEQ ID NO: 56287 - DNA, 26 bp, Homo sapiens
gagttttcaagctctgtaaaataaaa

SEQ ID NO: 56288 - DNA, 26 bp, Homo sapiens
agttttcaagctctgtaaaataaaat

SEQ ID NO: 56289 - DNA, 26 bp, Homo sapiens
gttttcaagctctgtaaaataaaatt

SEQ ID NO: 56290 - DNA, 26 bp, Homo sapiens
ttttcaagctctgtaaaataaaattc

SEQ ID NO: 56291 - DNA, 26 bp, Homo sapiens
tttcaagctctgtaaaataaaattcg

SEQ ID NO: 56292 - DNA, 26 bp, Homo sapiens
ttcaagctctgtaaaataaaattcgg

SEQ ID NO: 56293 - DNA, 26 bp, Homo sapiens
tcaagctctgtaaaataaaattcggt

SEQ ID NO: 56294 - DNA, 26 bp, Homo sapiens
caagctctgtaaaataaaattcggtc

SEQ ID NO: 56295 - DNA, 26 bp, Homo sapiens
aagctctgtaaaataaaattcggtct

SEQ ID NO: 56296 - DNA, 26 bp, Homo sapiens
agctctgtaaaataaaattcggtctt

SEQ ID NO: 56297 - DNA, 26 bp, Homo sapiens
gctctgtaaaataaaattcggtcttc

SEQ ID NO: 56298 - DNA, 26 bp, Homo sapiens
ctctgtaaaataaaattcggtcttcg

SEQ ID NO: 56299 - DNA, 26 bp, Homo sapiens
tctgtaaaataaaattcggtcttcgg

SEQ ID NO: 56300 - DNA, 26 bp, Homo sapiens
ctgtaaaataaaattcggtcttcgga

SEQ ID NO: 56301 - DNA, 26 bp, Homo sapiens
tgtaaaataaaattcggtcttcggac

SEQ ID NO: 56302 - DNA, 26 bp, Homo sapiens
gtaaaataaaattcggtcttcggaca

SEQ ID NO: 56303 - DNA, 26 bp, Homo sapiens
taaaataaaattcggtcttcggacac

SEQ ID NO: 56304 - DNA, 26 bp, Homo sapiens
aaaataaaattcggtcttcggacact

SEQ ID NO: 56305 - DNA, 26 bp, Homo sapiens
aaataaaattcggtcttcggacacta

SEQ ID NO: 56306 - DNA, 26 bp, Homo sapiens
aataaaattcggtcttcggacactaa

SEQ ID NO: 56307 - DNA, 26 bp, Homo sapiens
ataaaattcggtcttcggacactaac

SEQ ID NO: 56308 - DNA, 26 bp, Homo sapiens
taaaattcggtcttcggacactaact

SEQ ID NO: 56309 - DNA, 26 bp, Homo sapiens
aaaattcggtcttcggacactaactt

SEQ ID NO: 56310 - DNA, 26 bp, Homo sapiens
aaattcggtcttcggacactaacttc

SEQ ID NO: 56311 - DNA, 26 bp, Homo sapiens
aattcggtcttcggacactaacttct

SEQ ID NO: 56312 - DNA, 26 bp, Homo sapiens
attcggtcttcggacactaacttctg

SEQ ID NO: 56313 - DNA, 26 bp, Homo sapiens
ttcggtcttcggacactaacttctgg

SEQ ID NO: 56314 - DNA, 26 bp, Homo sapiens
tcggtcttcggacactaacttctggc

SEQ ID NO: 56315 - DNA, 26 bp, Homo sapiens
cggtcttcggacactaacttctggct

SEQ ID NO: 56316 - DNA, 26 bp, Homo sapiens
ggtcttcggacactaacttctggctg

SEQ ID NO: 56317 - DNA, 26 bp, Homo sapiens
gtcttcggacactaacttctggctgg

SEQ ID NO: 56318 - DNA, 26 bp, Homo sapiens
tcttcggacactaacttctggctggg

SEQ ID NO: 56319 - DNA, 26 bp, Homo sapiens
cttcggacactaacttctggctgggg

SEQ ID NO: 56320 - DNA, 26 bp, Homo sapiens
ttcggacactaacttctggctgggga

SEQ ID NO: 56321 - DNA, 26 bp, Homo sapiens
tcggacactaacttctggctggggat

SEQ ID NO: 56322 - DNA, 26 bp, Homo sapiens
cggacactaacttctggctggggatg

SEQ ID NO: 56323 - DNA, 26 bp, Homo sapiens
ggacactaacttctggctggggatgt

SEQ ID NO: 56324 - DNA, 26 bp, Homo sapiens
gacactaacttctggctggggatgtg

SEQ ID NO: 56325 - DNA, 26 bp, Homo sapiens
acactaacttctggctggggatgtgt

SEQ ID NO: 56326 - DNA, 26 bp, Homo sapiens
cactaacttctggctggggatgtgta

SEQ ID NO: 56327 - DNA, 26 bp, Homo sapiens
actaacttctggctggggatgtgtat

SEQ ID NO: 56328 - DNA, 26 bp, Homo sapiens
ctaacttctggctggggatgtgtatg

SEQ ID NO: 56329 - DNA, 26 bp, Homo sapiens
taacttctggctggggatgtgtatgg

SEQ ID NO: 56330 - DNA, 26 bp, Homo sapiens
aacttctggctggggatgtgtatgga

SEQ ID NO: 56331 - DNA, 26 bp, Homo sapiens
acttctggctggggatgtgtatggaa

SEQ ID NO: 56332 - DNA, 26 bp, Homo sapiens
cttctggctggggatgtgtatggaaa

SEQ ID NO: 56333 - DNA, 26 bp, Homo sapiens
ttctggctggggatgtgtatggaaaa

SEQ ID NO: 56334 - DNA, 26 bp, Homo sapiens
tctggctggggatgtgtatggaaaat

SEQ ID NO: 56335 - DNA, 26 bp, Homo sapiens
ctggctggggatgtgtatggaaaata

SEQ ID NO: 56336 - DNA, 26 bp, Homo sapiens
tggctggggatgtgtatggaaaatac

SEQ ID NO: 56337 - DNA, 26 bp, Homo sapiens
ggctggggatgtgtatggaaaataca

SEQ ID NO: 56338 - DNA, 26 bp, Homo sapiens
gctggggatgtgtatggaaaatacaa

SEQ ID NO: 56339 - DNA, 26 bp, Homo sapiens
ctggggatgtgtatggaaaatacaag

SEQ ID NO: 56340 - DNA, 26 bp, Homo sapiens
tggggatgtgtatggaaaatacaagc

SEQ ID NO: 56341 - DNA, 26 bp, Homo sapiens
ggggatgtgtatggaaaatacaagca

SEQ ID NO: 56342 - DNA, 26 bp, Homo sapiens
gggatgtgtatggaaaatacaagcag

SEQ ID NO: 56343 - DNA, 26 bp, Homo sapiens
ggatgtgtatggaaaatacaagcaga

SEQ ID NO: 56344 - DNA, 26 bp, Homo sapiens
gatgtgtatggaaaatacaagcagat

SEQ ID NO: 56345 - DNA, 26 bp, Homo sapiens
atgtgtatggaaaatacaagcagatg

SEQ ID NO: 56346 - DNA, 26 bp, Homo sapiens
tgtgtatggaaaatacaagcagatgg

SEQ ID NO: 56347 - DNA, 26 bp, Homo sapiens
gtgtatggaaaatacaagcagatgga

SEQ ID NO: 56348 - DNA, 26 bp, Homo sapiens
tgtatggaaaatacaagcagatggaa

SEQ ID NO: 56349 - DNA, 26 bp, Homo sapiens
gtatggaaaatacaagcagatggaaa

SEQ ID NO: 56350 - DNA, 26 bp, Homo sapiens
tatggaaaatacaagcagatggaaag

SEQ ID NO: 56351 - DNA, 26 bp, Homo sapiens
atggaaaatacaagcagatggaaagt

SEQ ID NO: 56352 - DNA, 26 bp, Homo sapiens
tggaaaatacaagcagatggaaagtt

SEQ ID NO: 56353 - DNA, 26 bp, Homo sapiens
ggaaaatacaagcagatggaaagttc

SEQ ID NO: 56354 - DNA, 26 bp, Homo sapiens
gaaaatacaagcagatggaaagttct

SEQ ID NO: 56355 - DNA, 26 bp, Homo sapiens
aaaatacaagcagatggaaagttctc

SEQ ID NO: 56356 - DNA, 26 bp, Homo sapiens
aaatacaagcagatggaaagttctcc

SEQ ID NO: 56357 - DNA, 26 bp, Homo sapiens
aatacaagcagatggaaagttctcca

SEQ ID NO: 56358 - DNA, 26 bp, Homo sapiens
atacaagcagatggaaagttctccaa

SEQ ID NO: 56359 - DNA, 26 bp, Homo sapiens
tacaagcagatggaaagttctccaag

SEQ ID NO: 56360 - DNA, 26 bp, Homo sapiens
acaagcagatggaaagttctccaaga

SEQ ID NO: 56361 - DNA, 26 bp, Homo sapiens
caagcagatggaaagttctccaagaa

SEQ ID NO: 56362 - DNA, 26 bp, Homo sapiens
aagcagatggaaagttctccaagaat

SEQ ID NO: 56363 - DNA, 26 bp, Homo sapiens
agcagatggaaagttctccaagaata

SEQ ID NO: 56364 - DNA, 26 bp, Homo sapiens
gcagatggaaagttctccaagaatat

SEQ ID NO: 56365 - DNA, 26 bp, Homo sapiens
cagatggaaagttctccaagaatatg

SEQ ID NO: 56366 - DNA, 26 bp, Homo sapiens
agatggaaagttctccaagaatatgt

SEQ ID NO: 56367 - DNA, 26 bp, Homo sapiens
gatggaaagttctccaagaatatgtc

SEQ ID NO: 56368 - DNA, 26 bp, Homo sapiens
atggaaagttctccaagaatatgtct

SEQ ID NO: 56369 - DNA, 26 bp, Homo sapiens
tggaaagttctccaagaatatgtctc

SEQ ID NO: 56370 - DNA, 26 bp, Homo sapiens
ggaaagttctccaagaatatgtctcc

SEQ ID NO: 56371 - DNA, 26 bp, Homo sapiens
gaaagttctccaagaatatgtctccc

SEQ ID NO: 56372 - DNA, 26 bp, Homo sapiens
aaagttctccaagaatatgtctccct

SEQ ID NO: 56373 - DNA, 26 bp, Homo sapiens
aagttctccaagaatatgtctccctt

SEQ ID NO: 56374 - DNA, 26 bp, Homo sapiens
agttctccaagaatatgtctcccttc

SEQ ID NO: 56375 - DNA, 26 bp, Homo sapiens
gttctccaagaatatgtctcccttcc

SEQ ID NO: 56376 - DNA, 26 bp, Homo sapiens
ttctccaagaatatgtctcccttcct

SEQ ID NO: 56377 - DNA, 26 bp, Homo sapiens
tctccaagaatatgtctcccttcctc

SEQ ID NO: 56378 - DNA, 26 bp, Homo sapiens
ctccaagaatatgtctcccttcctca

SEQ ID NO: 56379 - DNA, 26 bp, Homo sapiens
tccaagaatatgtctcccttcctcag

SEQ ID NO: 56380 - DNA, 26 bp, Homo sapiens
ccaagaatatgtctcccttcctcagt

SEQ ID NO: 56381 - DNA, 26 bp, Homo sapiens
caagaatatgtctcccttcctcagtg

SEQ ID NO: 56382 - DNA, 26 bp, Homo sapiens
aagaatatgtctcccttcctcagtga

SEQ ID NO: 56383 - DNA, 26 bp, Homo sapiens
agaatatgtctcccttcctcagtgag

SEQ ID NO: 56384 - DNA, 26 bp, Homo sapiens
gaatatgtctcccttcctcagtgagg

SEQ ID NO: 56385 - DNA, 26 bp, Homo sapiens
aatatgtctcccttcctcagtgaggt

SEQ ID NO: 56386 - DNA, 26 bp, Homo sapiens
atatgtctcccttcctcagtgaggtg

SEQ ID NO: 56387 - DNA, 26 bp, Homo sapiens
tatgtctcccttcctcagtgaggtgt

SEQ ID NO: 56388 - DNA, 26 bp, Homo sapiens
atgtctcccttcctcagtgaggtgtc

SEQ ID NO: 56389 - DNA, 26 bp, Homo sapiens
tgtctcccttcctcagtgaggtgtca

SEQ ID NO: 56390 - DNA, 26 bp, Homo sapiens
gtctcccttcctcagtgaggtgtcag

SEQ ID NO: 56391 - DNA, 26 bp, Homo sapiens
tctcccttcctcagtgaggtgtcagt

SEQ ID NO: 56392 - DNA, 26 bp, Homo sapiens
ctcccttcctcagtgaggtgtcagtc

SEQ ID NO: 56393 - DNA, 26 bp, Homo sapiens
tcccttcctcagtgaggtgtcagtct

SEQ ID NO: 56394 - DNA, 26 bp, Homo sapiens
cccttcctcagtgaggtgtcagtctc

SEQ ID NO: 56395 - DNA, 26 bp, Homo sapiens
ccttcctcagtgaggtgtcagtctca

SEQ ID NO: 56396 - DNA, 26 bp, Homo sapiens
cttcctcagtgaggtgtcagtctcac

SEQ ID NO: 56397 - DNA, 26 bp, Homo sapiens
ttcctcagtgaggtgtcagtctcact

SEQ ID NO: 56398 - DNA, 26 bp, Homo sapiens
tcctcagtgaggtgtcagtctcactt

SEQ ID NO: 56399 - DNA, 26 bp, Homo sapiens
cctcagtgaggtgtcagtctcacttt

SEQ ID NO: 56400 - DNA, 26 bp, Homo sapiens
ctcagtgaggtgtcagtctcactttg

SEQ ID NO: 56401 - DNA, 26 bp, Homo sapiens
tcagtgaggtgtcagtctcactttgc

SEQ ID NO: 56402 - DNA, 26 bp, Homo sapiens
cagtgaggtgtcagtctcactttgcc

SEQ ID NO: 56403 - DNA, 26 bp, Homo sapiens
agtgaggtgtcagtctcactttgcct

SEQ ID NO: 56404 - DNA, 26 bp, Homo sapiens
gtgaggtgtcagtctcactttgcctg

SEQ ID NO: 56405 - DNA, 26 bp, Homo sapiens
tgaggtgtcagtctcactttgcctgc

SEQ ID NO: 56406 - DNA, 26 bp, Homo sapiens
gaggtgtcagtctcactttgcctgca

SEQ ID NO: 56407 - DNA, 26 bp, Homo sapiens
aggtgtcagtctcactttgcctgcag

SEQ ID NO: 56408 - DNA, 26 bp, Homo sapiens
ggtgtcagtctcactttgcctgcagc

SEQ ID NO: 56409 - DNA, 26 bp, Homo sapiens
gtgtcagtctcactttgcctgcagca

SEQ ID NO: 56410 - DNA, 26 bp, Homo sapiens
tgtcagtctcactttgcctgcagcac

SEQ ID NO: 56411 - DNA, 26 bp, Homo sapiens
gtcagtctcactttgcctgcagcacc

SEQ ID NO: 56412 - DNA, 26 bp, Homo sapiens
tcagtctcactttgcctgcagcacct

SEQ ID NO: 56413 - DNA, 26 bp, Homo sapiens
cagtctcactttgcctgcagcacctc

SEQ ID NO: 56414 - DNA, 26 bp, Homo sapiens
agtctcactttgcctgcagcacctct

SEQ ID NO: 56415 - DNA, 26 bp, Homo sapiens
gtctcactttgcctgcagcacctctc

SEQ ID NO: 56416 - DNA, 26 bp, Homo sapiens
tctcactttgcctgcagcacctctca

SEQ ID NO: 56417 - DNA, 26 bp, Homo sapiens
ctcactttgcctgcagcacctctcag

SEQ ID NO: 56418 - DNA, 26 bp, Homo sapiens
tcactttgcctgcagcacctctcagg

SEQ ID NO: 56419 - DNA, 26 bp, Homo sapiens
cactttgcctgcagcacctctcagga

SEQ ID NO: 56420 - DNA, 26 bp, Homo sapiens
actttgcctgcagcacctctcaggag

SEQ ID NO: 56421 - DNA, 26 bp, Homo sapiens
ctttgcctgcagcacctctcaggaga

SEQ ID NO: 56422 - DNA, 26 bp, Homo sapiens
tttgcctgcagcacctctcaggagag

SEQ ID NO: 56423 - DNA, 26 bp, Homo sapiens
ttgcctgcagcacctctcaggagagc

SEQ ID NO: 56424 - DNA, 26 bp, Homo sapiens
tgcctgcagcacctctcaggagagcc

SEQ ID NO: 56425 - DNA, 26 bp, Homo sapiens
gcctgcagcacctctcaggagagccg

SEQ ID NO: 56426 - DNA, 26 bp, Homo sapiens
cctgcagcacctctcaggagagccgc

SEQ ID NO: 56427 - DNA, 26 bp, Homo sapiens
ctgcagcacctctcaggagagccgct

SEQ ID NO: 56428 - DNA, 26 bp, Homo sapiens
tgcagcacctctcaggagagccgctc

SEQ ID NO: 56429 - DNA, 26 bp, Homo sapiens
gcagcacctctcaggagagccgctcc

SEQ ID NO: 56430 - DNA, 26 bp, Homo sapiens
cagcacctctcaggagagccgctcca

SEQ ID NO: 56431 - DNA, 26 bp, Homo sapiens
agcacctctcaggagagccgctccag

SEQ ID NO: 56432 - DNA, 26 bp, Homo sapiens
gcacctctcaggagagccgctccagg

SEQ ID NO: 56433 - DNA, 26 bp, Homo sapiens
cacctctcaggagagccgctccaggg

SEQ ID NO: 56434 - DNA, 26 bp, Homo sapiens
acctctcaggagagccgctccagggt

SEQ ID NO: 56435 - DNA, 26 bp, Homo sapiens
cctctcaggagagccgctccagggtc

SEQ ID NO: 56436 - DNA, 26 bp, Homo sapiens
ctctcaggagagccgctccagggtca

SEQ ID NO: 56437 - DNA, 26 bp, Homo sapiens
tctcaggagagccgctccagggtcag

SEQ ID NO: 56438 - DNA, 26 bp, Homo sapiens
ctcaggagagccgctccagggtcagt

SEQ ID NO: 56439 - DNA, 26 bp, Homo sapiens
tcaggagagccgctccagggtcagtg

SEQ ID NO: 56440 - DNA, 26 bp, Homo sapiens
caggagagccgctccagggtcagtga

SEQ ID NO: 56441 - DNA, 26 bp, Homo sapiens
aggagagccgctccagggtcagtgac

SEQ ID NO: 56442 - DNA, 26 bp, Homo sapiens
ggagagccgctccagggtcagtgact

SEQ ID NO: 56443 - DNA, 26 bp, Homo sapiens
gagagccgctccagggtcagtgactc

SEQ ID NO: 56444 - DNA, 26 bp, Homo sapiens
agagccgctccagggtcagtgactct

SEQ ID NO: 56445 - DNA, 26 bp, Homo sapiens
gagccgctccagggtcagtgactcta

SEQ ID NO: 56446 - DNA, 26 bp, Homo sapiens
agccgctccagggtcagtgactctac

SEQ ID NO: 56447 - DNA, 26 bp, Homo sapiens
gccgctccagggtcagtgactctaca

SEQ ID NO: 56448 - DNA, 26 bp, Homo sapiens
ccgctccagggtcagtgactctacag

SEQ ID NO: 56449 - DNA, 26 bp, Homo sapiens
cgctccagggtcagtgactctacagg

SEQ ID NO: 56450 - DNA, 26 bp, Homo sapiens
gctccagggtcagtgactctacaggg

SEQ ID NO: 56451 - DNA, 26 bp, Homo sapiens
ctccagggtcagtgactctacagggt

SEQ ID NO: 56452 - DNA, 26 bp, Homo sapiens
tccagggtcagtgactctacagggtc

SEQ ID NO: 56453 - DNA, 26 bp, Homo sapiens
ccagggtcagtgactctacagggtcc

SEQ ID NO: 56454 - DNA, 26 bp, Homo sapiens
cagggtcagtgactctacagggtccc

SEQ ID NO: 56455 - DNA, 26 bp, Homo sapiens
agggtcagtgactctacagggtcccc

SEQ ID NO: 56456 - DNA, 26 bp, Homo sapiens
gggtcagtgactctacagggtcccca

SEQ ID NO: 56457 - DNA, 26 bp, Homo sapiens
ggtcagtgactctacagggtccccag

SEQ ID NO: 56458 - DNA, 26 bp, Homo sapiens
gtcagtgactctacagggtccccaga

SEQ ID NO: 56459 - DNA, 26 bp, Homo sapiens
tcagtgactctacagggtccccagac

SEQ ID NO: 56460 - DNA, 26 bp, Homo sapiens
cagtgactctacagggtccccagaca

SEQ ID NO: 56461 - DNA, 26 bp, Homo sapiens
agtgactctacagggtccccagacaa

SEQ ID NO: 56462 - DNA, 26 bp, Homo sapiens
gtgactctacagggtccccagacaag

SEQ ID NO: 56463 - DNA, 26 bp, Homo sapiens
tgactctacagggtccccagacaagg

SEQ ID NO: 56464 - DNA, 26 bp, Homo sapiens
gactctacagggtccccagacaaggc

SEQ ID NO: 56465 - DNA, 26 bp, Homo sapiens
actctacagggtccccagacaaggca

SEQ ID NO: 56466 - DNA, 26 bp, Homo sapiens
ctctacagggtccccagacaaggcat

SEQ ID NO: 56467 - DNA, 26 bp, Homo sapiens
tctacagggtccccagacaaggcata

SEQ ID NO: 56468 - DNA, 26 bp, Homo sapiens
ctacagggtccccagacaaggcatag

SEQ ID NO: 56469 - DNA, 26 bp, Homo sapiens
tacagggtccccagacaaggcatagc

SEQ ID NO: 56470 - DNA, 26 bp, Homo sapiens
acagggtccccagacaaggcatagcc

SEQ ID NO: 56471 - DNA, 26 bp, Homo sapiens
cagggtccccagacaaggcatagccc

SEQ ID NO: 56472 - DNA, 26 bp, Homo sapiens
agggtccccagacaaggcatagcccc

SEQ ID NO: 56473 - DNA, 26 bp, Homo sapiens
gggtccccagacaaggcatagccccg

SEQ ID NO: 56474 - DNA, 26 bp, Homo sapiens
ggtccccagacaaggcatagccccgc

SEQ ID NO: 56475 - DNA, 26 bp, Homo sapiens
gtccccagacaaggcatagccccgcc

SEQ ID NO: 56476 - DNA, 26 bp, Homo sapiens
tccccagacaaggcatagccccgccc

SEQ ID NO: 56477 - DNA, 26 bp, Homo sapiens
ccccagacaaggcatagccccgccct

SEQ ID NO: 56478 - DNA, 26 bp, Homo sapiens
cccagacaaggcatagccccgccctt

SEQ ID NO: 56479 - DNA, 26 bp, Homo sapiens
ccagacaaggcatagccccgcccttg

SEQ ID NO: 56480 - DNA, 26 bp, Homo sapiens
cagacaaggcatagccccgcccttgg

SEQ ID NO: 56481 - DNA, 26 bp, Homo sapiens
agacaaggcatagccccgcccttggg

SEQ ID NO: 56482 - DNA, 26 bp, Homo sapiens
gacaaggcatagccccgcccttgggc

SEQ ID NO: 56483 - DNA, 26 bp, Homo sapiens
acaaggcatagccccgcccttgggct

SEQ ID NO: 56484 - DNA, 26 bp, Homo sapiens
caaggcatagccccgcccttgggctg

SEQ ID NO: 56485 - DNA, 26 bp, Homo sapiens
aaggcatagccccgcccttgggctgt

SEQ ID NO: 56486 - DNA, 26 bp, Homo sapiens
aggcatagccccgcccttgggctgtg

SEQ ID NO: 56487 - DNA, 26 bp, Homo sapiens
ggcatagccccgcccttgggctgtgg

SEQ ID NO: 56488 - DNA, 26 bp, Homo sapiens
gcatagccccgcccttgggctgtgga

SEQ ID NO: 56489 - DNA, 26 bp, Homo sapiens
catagccccgcccttgggctgtggat

SEQ ID NO: 56490 - DNA, 26 bp, Homo sapiens
atagccccgcccttgggctgtggatg

SEQ ID NO: 56491 - DNA, 26 bp, Homo sapiens
tagccccgcccttgggctgtggatga

SEQ ID NO: 56492 - DNA, 26 bp, Homo sapiens
agccccgcccttgggctgtggatgac

SEQ ID NO: 56493 - DNA, 26 bp, Homo sapiens
gccccgcccttgggctgtggatgact

SEQ ID NO: 56494 - DNA, 26 bp, Homo sapiens
ccccgcccttgggctgtggatgactt

SEQ ID NO: 56495 - DNA, 26 bp, Homo sapiens
cccgcccttgggctgtggatgactta

SEQ ID NO: 56496 - DNA, 26 bp, Homo sapiens
ccgcccttgggctgtggatgacttaa

SEQ ID NO: 56497 - DNA, 26 bp, Homo sapiens
cgcccttgggctgtggatgacttaac

SEQ ID NO: 56498 - DNA, 26 bp, Homo sapiens
gcccttgggctgtggatgacttaact

SEQ ID NO: 56499 - DNA, 26 bp, Homo sapiens
cccttgggctgtggatgacttaacta

SEQ ID NO: 56500 - DNA, 26 bp, Homo sapiens
ccttgggctgtggatgacttaactaa

SEQ ID NO: 56501 - DNA, 26 bp, Homo sapiens
cttgggctgtggatgacttaactaag

SEQ ID NO: 56502 - DNA, 26 bp, Homo sapiens
ttgggctgtggatgacttaactaagc

SEQ ID NO: 56503 - DNA, 26 bp, Homo sapiens
tgggctgtggatgacttaactaagcc

SEQ ID NO: 56504 - DNA, 26 bp, Homo sapiens
gggctgtggatgacttaactaagcca

SEQ ID NO: 56505 - DNA, 26 bp, Homo sapiens
ggctgtggatgacttaactaagccat

SEQ ID NO: 56506 - DNA, 26 bp, Homo sapiens
gctgtggatgacttaactaagccatc

SEQ ID NO: 56507 - DNA, 26 bp, Homo sapiens
ctgtggatgacttaactaagccatct

SEQ ID NO: 56508 - DNA, 26 bp, Homo sapiens
tgtggatgacttaactaagccatctg

SEQ ID NO: 56509 - DNA, 26 bp, Homo sapiens
gtggatgacttaactaagccatctgt

SEQ ID NO: 56510 - DNA, 26 bp, Homo sapiens
tggatgacttaactaagccatctgta

SEQ ID NO: 56511 - DNA, 26 bp, Homo sapiens
ggatgacttaactaagccatctgtag

SEQ ID NO: 56512 - DNA, 26 bp, Homo sapiens
gatgacttaactaagccatctgtaga

SEQ ID NO: 56513 - DNA, 26 bp, Homo sapiens
atgacttaactaagccatctgtagac

SEQ ID NO: 56514 - DNA, 26 bp, Homo sapiens
tgacttaactaagccatctgtagacg

SEQ ID NO: 56515 - DNA, 26 bp, Homo sapiens
gacttaactaagccatctgtagacgg

SEQ ID NO: 56516 - DNA, 26 bp, Homo sapiens
acttaactaagccatctgtagacggt

SEQ ID NO: 56517 - DNA, 26 bp, Homo sapiens
cttaactaagccatctgtagacggtg

SEQ ID NO: 56518 - DNA, 26 bp, Homo sapiens
ttaactaagccatctgtagacggtgg

SEQ ID NO: 56519 - DNA, 26 bp, Homo sapiens
taactaagccatctgtagacggtggc

SEQ ID NO: 56520 - DNA, 26 bp, Homo sapiens
aactaagccatctgtagacggtggct

SEQ ID NO: 56521 - DNA, 26 bp, Homo sapiens
actaagccatctgtagacggtggcta

SEQ ID NO: 56522 - DNA, 26 bp, Homo sapiens
ctaagccatctgtagacggtggctat

SEQ ID NO: 56523 - DNA, 26 bp, Homo sapiens
taagccatctgtagacggtggctatt

SEQ ID NO: 56524 - DNA, 26 bp, Homo sapiens
aagccatctgtagacggtggctattt

SEQ ID NO: 56525 - DNA, 26 bp, Homo sapiens
agccatctgtagacggtggctatttc

SEQ ID NO: 56526 - DNA, 26 bp, Homo sapiens
gccatctgtagacggtggctatttcc

SEQ ID NO: 56527 - DNA, 26 bp, Homo sapiens
ccatctgtagacggtggctatttcct

SEQ ID NO: 56528 - DNA, 26 bp, Homo sapiens
catctgtagacggtggctatttcctt

SEQ ID NO: 56529 - DNA, 26 bp, Homo sapiens
atctgtagacggtggctatttccttc

SEQ ID NO: 56530 - DNA, 26 bp, Homo sapiens
tctgtagacggtggctatttccttct

SEQ ID NO: 56531 - DNA, 26 bp, Homo sapiens
ctgtagacggtggctatttccttctt

SEQ ID NO: 56532 - DNA, 26 bp, Homo sapiens
tgtagacggtggctatttccttcttg

SEQ ID NO: 56533 - DNA, 26 bp, Homo sapiens
gtagacggtggctatttccttcttgc

SEQ ID NO: 56534 - DNA, 26 bp, Homo sapiens
tagacggtggctatttccttcttgcc

SEQ ID NO: 56535 - DNA, 26 bp, Homo sapiens
agacggtggctatttccttcttgccc

SEQ ID NO: 56536 - DNA, 26 bp, Homo sapiens
gacggtggctatttccttcttgccct

SEQ ID NO: 56537 - DNA, 26 bp, Homo sapiens
acggtggctatttccttcttgccctt

SEQ ID NO: 56538 - DNA, 26 bp, Homo sapiens
cggtggctatttccttcttgcccttt

SEQ ID NO: 56539 - DNA, 26 bp, Homo sapiens
ggtggctatttccttcttgccctttc

SEQ ID NO: 56540 - DNA, 26 bp, Homo sapiens
gtggctatttccttcttgccctttct

SEQ ID NO: 56541 - DNA, 26 bp, Homo sapiens
tggctatttccttcttgccctttctt

SEQ ID NO: 56542 - DNA, 26 bp, Homo sapiens
ggctatttccttcttgccctttcttc

SEQ ID NO: 56543 - DNA, 26 bp, Homo sapiens
gctatttccttcttgccctttcttct

SEQ ID NO: 56544 - DNA, 26 bp, Homo sapiens
ctatttccttcttgccctttcttcta

SEQ ID NO: 56545 - DNA, 26 bp, Homo sapiens
tatttccttcttgccctttcttctag

SEQ ID NO: 56546 - DNA, 26 bp, Homo sapiens
atttccttcttgccctttcttctagt

SEQ ID NO: 56547 - DNA, 26 bp, Homo sapiens
tttccttcttgccctttcttctagtt

SEQ ID NO: 56548 - DNA, 26 bp, Homo sapiens
ttccttcttgccctttcttctagttc

SEQ ID NO: 56549 - DNA, 26 bp, Homo sapiens
tccttcttgccctttcttctagttcg

SEQ ID NO: 56550 - DNA, 26 bp, Homo sapiens
ccttcttgccctttcttctagttcgc

SEQ ID NO: 56551 - DNA, 26 bp, Homo sapiens
cttcttgccctttcttctagttcgct

SEQ ID NO: 56552 - DNA, 26 bp, Homo sapiens
ttcttgccctttcttctagttcgctg

SEQ ID NO: 56553 - DNA, 26 bp, Homo sapiens
tcttgccctttcttctagttcgctgt

SEQ ID NO: 56554 - DNA, 26 bp, Homo sapiens
cttgccctttcttctagttcgctgtc

SEQ ID NO: 56555 - DNA, 26 bp, Homo sapiens
ttgccctttcttctagttcgctgtct

SEQ ID NO: 56556 - DNA, 26 bp, Homo sapiens
tgccctttcttctagttcgctgtctc

SEQ ID NO: 56557 - DNA, 26 bp, Homo sapiens
gccctttcttctagttcgctgtctcc

SEQ ID NO: 56558 - DNA, 26 bp, Homo sapiens
ccctttcttctagttcgctgtctcca

SEQ ID NO: 56559 - DNA, 26 bp, Homo sapiens
cctttcttctagttcgctgtctccat

SEQ ID NO: 56560 - DNA, 26 bp, Homo sapiens
ctttcttctagttcgctgtctccatg

SEQ ID NO: 56561 - DNA, 26 bp, Homo sapiens
tttcttctagttcgctgtctccatgc

SEQ ID NO: 56562 - DNA, 26 bp, Homo sapiens
ttcttctagttcgctgtctccatgcc

SEQ ID NO: 56563 - DNA, 26 bp, Homo sapiens
tcttctagttcgctgtctccatgcct

SEQ ID NO: 56564 - DNA, 26 bp, Homo sapiens
cttctagttcgctgtctccatgcctt

SEQ ID NO: 56565 - DNA, 26 bp, Homo sapiens
ttctagttcgctgtctccatgccttt

SEQ ID NO: 56566 - DNA, 26 bp, Homo sapiens
tctagttcgctgtctccatgcctttt

SEQ ID NO: 56567 - DNA, 26 bp, Homo sapiens
ctagttcgctgtctccatgccttttc

SEQ ID NO: 56568 - DNA, 26 bp, Homo sapiens
tagttcgctgtctccatgccttttct

SEQ ID NO: 56569 - DNA, 26 bp, Homo sapiens
agttcgctgtctccatgccttttctt

SEQ ID NO: 56570 - DNA, 26 bp, Homo sapiens
gttcgctgtctccatgccttttcttg

SEQ ID NO: 56571 - DNA, 26 bp, Homo sapiens
ttcgctgtctccatgccttttcttgg

SEQ ID NO: 56572 - DNA, 26 bp, Homo sapiens
tcgctgtctccatgccttttcttggc

SEQ ID NO: 56573 - DNA, 26 bp, Homo sapiens
cgctgtctccatgccttttcttggca

SEQ ID NO: 56574 - DNA, 26 bp, Homo sapiens
gctgtctccatgccttttcttggcag

SEQ ID NO: 56575 - DNA, 26 bp, Homo sapiens
ctgtctccatgccttttcttggcagt

SEQ ID NO: 56576 - DNA, 26 bp, Homo sapiens
tgtctccatgccttttcttggcagtt

SEQ ID NO: 56577 - DNA, 26 bp, Homo sapiens
gtctccatgccttttcttggcagttc

SEQ ID NO: 56578 - DNA, 26 bp, Homo sapiens
tctccatgccttttcttggcagttca

SEQ ID NO: 56579 - DNA, 26 bp, Homo sapiens
ctccatgccttttcttggcagttcaa

SEQ ID NO: 56580 - DNA, 26 bp, Homo sapiens
tccatgccttttcttggcagttcaaa

SEQ ID NO: 56581 - DNA, 26 bp, Homo sapiens
ccatgccttttcttggcagttcaaac

SEQ ID NO: 56582 - DNA, 26 bp, Homo sapiens
catgccttttcttggcagttcaaaca

SEQ ID NO: 56583 - DNA, 26 bp, Homo sapiens
atgccttttcttggcagttcaaacat

SEQ ID NO: 56584 - DNA, 26 bp, Homo sapiens
tgccttttcttggcagttcaaacatt

SEQ ID NO: 56585 - DNA, 26 bp, Homo sapiens
gccttttcttggcagttcaaacattc

SEQ ID NO: 56586 - DNA, 26 bp, Homo sapiens
ccttttcttggcagttcaaacattca

SEQ ID NO: 56587 - DNA, 26 bp, Homo sapiens
cttttcttggcagttcaaacattcag

SEQ ID NO: 56588 - DNA, 26 bp, Homo sapiens
ttttcttggcagttcaaacattcaga

SEQ ID NO: 56589 - DNA, 26 bp, Homo sapiens
tttcttggcagttcaaacattcagag

SEQ ID NO: 56590 - DNA, 26 bp, Homo sapiens
ttcttggcagttcaaacattcagaga

SEQ ID NO: 56591 - DNA, 26 bp, Homo sapiens
tcttggcagttcaaacattcagagag

SEQ ID NO: 56592 - DNA, 26 bp, Homo sapiens
cttggcagttcaaacattcagagagg

SEQ ID NO: 56593 - DNA, 26 bp, Homo sapiens
ttggcagttcaaacattcagagaggg

SEQ ID NO: 56594 - DNA, 26 bp, Homo sapiens
tggcagttcaaacattcagagagggc

SEQ ID NO: 56595 - DNA, 26 bp, Homo sapiens
ggcagttcaaacattcagagagggca

SEQ ID NO: 56596 - DNA, 26 bp, Homo sapiens
gcagttcaaacattcagagagggcat

SEQ ID NO: 56597 - DNA, 26 bp, Homo sapiens
cagttcaaacattcagagagggcatt

SEQ ID NO: 56598 - DNA, 26 bp, Homo sapiens
agttcaaacattcagagagggcattt

SEQ ID NO: 56599 - DNA, 26 bp, Homo sapiens
gttcaaacattcagagagggcattta

SEQ ID NO: 56600 - DNA, 26 bp, Homo sapiens
ttcaaacattcagagagggcatttat

SEQ ID NO: 56601 - DNA, 26 bp, Homo sapiens
tcaaacattcagagagggcatttatt

SEQ ID NO: 56602 - DNA, 26 bp, Homo sapiens
caaacattcagagagggcatttattg

SEQ ID NO: 56603 - DNA, 26 bp, Homo sapiens
aaacattcagagagggcatttattgc

SEQ ID NO: 56604 - DNA, 26 bp, Homo sapiens
aacattcagagagggcatttattgcc

SEQ ID NO: 56605 - DNA, 26 bp, Homo sapiens
acattcagagagggcatttattgccc

SEQ ID NO: 56606 - DNA, 26 bp, Homo sapiens
cattcagagagggcatttattgccct

SEQ ID NO: 56607 - DNA, 26 bp, Homo sapiens
attcagagagggcatttattgccctt

SEQ ID NO: 56608 - DNA, 26 bp, Homo sapiens
ttcagagagggcatttattgcccttt

SEQ ID NO: 56609 - DNA, 26 bp, Homo sapiens
tcagagagggcatttattgccctttt

SEQ ID NO: 56610 - DNA, 26 bp, Homo sapiens
cagagagggcatttattgcccttttt

SEQ ID NO: 56611 - DNA, 26 bp, Homo sapiens
agagagggcatttattgccctttttt

SEQ ID NO: 56612 - DNA, 26 bp, Homo sapiens
gagagggcatttattgcccttttttt

SEQ ID NO: 56613 - DNA, 26 bp, Homo sapiens
agagggcatttattgccctttttttg

SEQ ID NO: 56614 - DNA, 26 bp, Homo sapiens
gagggcatttattgccctttttttga

SEQ ID NO: 56615 - DNA, 26 bp, Homo sapiens
agggcatttattgccctttttttgag

SEQ ID NO: 56616 - DNA, 26 bp, Homo sapiens
gggcatttattgccctttttttgaga

SEQ ID NO: 56617 - DNA, 26 bp, Homo sapiens
ggcatttattgccctttttttgagac

SEQ ID NO: 56618 - DNA, 26 bp, Homo sapiens
gcatttattgccctttttttgagacg

SEQ ID NO: 56619 - DNA, 26 bp, Homo sapiens
catttattgccctttttttgagacgg

SEQ ID NO: 56620 - DNA, 26 bp, Homo sapiens
atttattgccctttttttgagacgga

SEQ ID NO: 56621 - DNA, 26 bp, Homo sapiens
tttattgccctttttttgagacggag

SEQ ID NO: 56622 - DNA, 26 bp, Homo sapiens
ttattgccctttttttgagacggagt

SEQ ID NO: 56623 - DNA, 26 bp, Homo sapiens
tattgccctttttttgagacggagtc

SEQ ID NO: 56624 - DNA, 26 bp, Homo sapiens
attgccctttttttgagacggagtct

SEQ ID NO: 56625 - DNA, 26 bp, Homo sapiens
ttgccctttttttgagacggagtctt

SEQ ID NO: 56626 - DNA, 26 bp, Homo sapiens
tgccctttttttgagacggagtcttg

SEQ ID NO: 56627 - DNA, 26 bp, Homo sapiens
gccctttttttgagacggagtcttgc

SEQ ID NO: 56628 - DNA, 26 bp, Homo sapiens
ccctttttttgagacggagtcttgct

SEQ ID NO: 56629 - DNA, 26 bp, Homo sapiens
cctttttttgagacggagtcttgctc

SEQ ID NO: 56630 - DNA, 26 bp, Homo sapiens
ctttttttgagacggagtcttgctct

SEQ ID NO: 56631 - DNA, 26 bp, Homo sapiens
tttttttgagacggagtcttgctctg

SEQ ID NO: 56632 - DNA, 26 bp, Homo sapiens
ttttttgagacggagtcttgctctgt

SEQ ID NO: 56633 - DNA, 26 bp, Homo sapiens
tttttgagacggagtcttgctctgtt

SEQ ID NO: 56634 - DNA, 26 bp, Homo sapiens
ttttgagacggagtcttgctctgttg

SEQ ID NO: 56635 - DNA, 26 bp, Homo sapiens
tttgagacggagtcttgctctgttgc

SEQ ID NO: 56636 - DNA, 26 bp, Homo sapiens
ttgagacggagtcttgctctgttgcc

SEQ ID NO: 56637 - DNA, 26 bp, Homo sapiens
tgagacggagtcttgctctgttgcca

SEQ ID NO: 56638 - DNA, 26 bp, Homo sapiens
gagacggagtcttgctctgttgccag

SEQ ID NO: 56639 - DNA, 26 bp, Homo sapiens
agacggagtcttgctctgttgccagg

SEQ ID NO: 56640 - DNA, 26 bp, Homo sapiens
gacggagtcttgctctgttgccaggc

SEQ ID NO: 56641 - DNA, 26 bp, Homo sapiens
acggagtcttgctctgttgccaggct

SEQ ID NO: 56642 - DNA, 26 bp, Homo sapiens
cggagtcttgctctgttgccaggcta

SEQ ID NO: 56643 - DNA, 26 bp, Homo sapiens
ggagtcttgctctgttgccaggctag

SEQ ID NO: 56644 - DNA, 26 bp, Homo sapiens
gagtcttgctctgttgccaggctaga

SEQ ID NO: 56645 - DNA, 26 bp, Homo sapiens
agtcttgctctgttgccaggctagag

SEQ ID NO: 56646 - DNA, 26 bp, Homo sapiens
gtcttgctctgttgccaggctagagt

SEQ ID NO: 56647 - DNA, 26 bp, Homo sapiens
tcttgctctgttgccaggctagagtg

SEQ ID NO: 56648 - DNA, 26 bp, Homo sapiens
cttgctctgttgccaggctagagtgc

SEQ ID NO: 56649 - DNA, 26 bp, Homo sapiens
ttgctctgttgccaggctagagtgca

SEQ ID NO: 56650 - DNA, 26 bp, Homo sapiens
tgctctgttgccaggctagagtgcag

SEQ ID NO: 56651 - DNA, 26 bp, Homo sapiens
gctctgttgccaggctagagtgcagt

SEQ ID NO: 56652 - DNA, 26 bp, Homo sapiens
ctctgttgccaggctagagtgcagtg

SEQ ID NO: 56653 - DNA, 26 bp, Homo sapiens
tctgttgccaggctagagtgcagtgg

SEQ ID NO: 56654 - DNA, 26 bp, Homo sapiens
ctgttgccaggctagagtgcagtggc

SEQ ID NO: 56655 - DNA, 26 bp, Homo sapiens
tgttgccaggctagagtgcagtggcc

SEQ ID NO: 56656 - DNA, 26 bp, Homo sapiens
gttgccaggctagagtgcagtggccc

SEQ ID NO: 56657 - DNA, 26 bp, Homo sapiens
ttgccaggctagagtgcagtggccca

SEQ ID NO: 56658 - DNA, 26 bp, Homo sapiens
tgccaggctagagtgcagtggcccaa

SEQ ID NO: 56659 - DNA, 26 bp, Homo sapiens
gccaggctagagtgcagtggcccaaa

SEQ ID NO: 56660 - DNA, 26 bp, Homo sapiens
ccaggctagagtgcagtggcccaaac

SEQ ID NO: 56661 - DNA, 26 bp, Homo sapiens
caggctagagtgcagtggcccaaact

SEQ ID NO: 56662 - DNA, 26 bp, Homo sapiens
aggctagagtgcagtggcccaaactc

SEQ ID NO: 56663 - DNA, 26 bp, Homo sapiens
ggctagagtgcagtggcccaaactcg

SEQ ID NO: 56664 - DNA, 26 bp, Homo sapiens
gctagagtgcagtggcccaaactcgg

SEQ ID NO: 56665 - DNA, 26 bp, Homo sapiens
ctagagtgcagtggcccaaactcggc

SEQ ID NO: 56666 - DNA, 26 bp, Homo sapiens
tagagtgcagtggcccaaactcggct

SEQ ID NO: 56667 - DNA, 26 bp, Homo sapiens
agagtgcagtggcccaaactcggctc

SEQ ID NO: 56668 - DNA, 26 bp, Homo sapiens
gagtgcagtggcccaaactcggctca

SEQ ID NO: 56669 - DNA, 26 bp, Homo sapiens
agtgcagtggcccaaactcggctcac

SEQ ID NO: 56670 - DNA, 26 bp, Homo sapiens
gtgcagtggcccaaactcggctcact

SEQ ID NO: 56671 - DNA, 26 bp, Homo sapiens
tgcagtggcccaaactcggctcactg

SEQ ID NO: 56672 - DNA, 26 bp, Homo sapiens
gcagtggcccaaactcggctcactgc

SEQ ID NO: 56673 - DNA, 26 bp, Homo sapiens
cagtggcccaaactcggctcactgca

SEQ ID NO: 56674 - DNA, 26 bp, Homo sapiens
agtggcccaaactcggctcactgcaa

SEQ ID NO: 56675 - DNA, 26 bp, Homo sapiens
gtggcccaaactcggctcactgcaac

SEQ ID NO: 56676 - DNA, 26 bp, Homo sapiens
tggcccaaactcggctcactgcaacc

SEQ ID NO: 56677 - DNA, 26 bp, Homo sapiens
ggcccaaactcggctcactgcaacct

SEQ ID NO: 56678 - DNA, 26 bp, Homo sapiens
gcccaaactcggctcactgcaacctc

SEQ ID NO: 56679 - DNA, 26 bp, Homo sapiens
cccaaactcggctcactgcaacctcc

SEQ ID NO: 56680 - DNA, 26 bp, Homo sapiens
ccaaactcggctcactgcaacctccg

SEQ ID NO: 56681 - DNA, 26 bp, Homo sapiens
caaactcggctcactgcaacctccgt

SEQ ID NO: 56682 - DNA, 26 bp, Homo sapiens
aaactcggctcactgcaacctccgtc

SEQ ID NO: 56683 - DNA, 26 bp, Homo sapiens
aactcggctcactgcaacctccgtct

SEQ ID NO: 56684 - DNA, 26 bp, Homo sapiens
actcggctcactgcaacctccgtctc

SEQ ID NO: 56685 - DNA, 26 bp, Homo sapiens
ctcggctcactgcaacctccgtctcc

SEQ ID NO: 56686 - DNA, 26 bp, Homo sapiens
tcggctcactgcaacctccgtctccc

SEQ ID NO: 56687 - DNA, 26 bp, Homo sapiens
cggctcactgcaacctccgtctcccc

SEQ ID NO: 56688 - DNA, 26 bp, Homo sapiens
ggctcactgcaacctccgtctccccg

SEQ ID NO: 56689 - DNA, 26 bp, Homo sapiens
gctcactgcaacctccgtctccccgg

SEQ ID NO: 56690 - DNA, 26 bp, Homo sapiens
ctcactgcaacctccgtctccccggt

SEQ ID NO: 56691 - DNA, 26 bp, Homo sapiens
tcactgcaacctccgtctccccggtt

SEQ ID NO: 56692 - DNA, 26 bp, Homo sapiens
cactgcaacctccgtctccccggttc

SEQ ID NO: 56693 - DNA, 26 bp, Homo sapiens
actgcaacctccgtctccccggttca

SEQ ID NO: 56694 - DNA, 26 bp, Homo sapiens
ctgcaacctccgtctccccggttcaa

SEQ ID NO: 56695 - DNA, 26 bp, Homo sapiens
tgcaacctccgtctccccggttcaag

SEQ ID NO: 56696 - DNA, 26 bp, Homo sapiens
gcaacctccgtctccccggttcaagc

SEQ ID NO: 56697 - DNA, 26 bp, Homo sapiens
caacctccgtctccccggttcaagca

SEQ ID NO: 56698 - DNA, 26 bp, Homo sapiens
aacctccgtctccccggttcaagcaa

SEQ ID NO: 56699 - DNA, 26 bp, Homo sapiens
acctccgtctccccggttcaagcaat

SEQ ID NO: 56700 - DNA, 26 bp, Homo sapiens
cctccgtctccccggttcaagcaatt

SEQ ID NO: 56701 - DNA, 26 bp, Homo sapiens
ctccgtctccccggttcaagcaattc

SEQ ID NO: 56702 - DNA, 26 bp, Homo sapiens
tccgtctccccggttcaagcaattct

SEQ ID NO: 56703 - DNA, 26 bp, Homo sapiens
ccgtctccccggttcaagcaattctc

SEQ ID NO: 56704 - DNA, 26 bp, Homo sapiens
cgtctccccggttcaagcaattctcc

SEQ ID NO: 56705 - DNA, 26 bp, Homo sapiens
gtctccccggttcaagcaattctcct

SEQ ID NO: 56706 - DNA, 26 bp, Homo sapiens
tctccccggttcaagcaattctcctg

SEQ ID NO: 56707 - DNA, 26 bp, Homo sapiens
ctccccggttcaagcaattctcctgc

SEQ ID NO: 56708 - DNA, 26 bp, Homo sapiens
tccccggttcaagcaattctcctgcc

SEQ ID NO: 56709 - DNA, 26 bp, Homo sapiens
ccccggttcaagcaattctcctgcct

SEQ ID NO: 56710 - DNA, 26 bp, Homo sapiens
cccggttcaagcaattctcctgcctc

SEQ ID NO: 56711 - DNA, 26 bp, Homo sapiens
ccggttcaagcaattctcctgcctca

SEQ ID NO: 56712 - DNA, 26 bp, Homo sapiens
cggttcaagcaattctcctgcctcag

SEQ ID NO: 56713 - DNA, 26 bp, Homo sapiens
ggttcaagcaattctcctgcctcagc

SEQ ID NO: 56714 - DNA, 26 bp, Homo sapiens
gttcaagcaattctcctgcctcagcc

SEQ ID NO: 56715 - DNA, 26 bp, Homo sapiens
ttcaagcaattctcctgcctcagcct

SEQ ID NO: 56716 - DNA, 26 bp, Homo sapiens
tcaagcaattctcctgcctcagcctc

SEQ ID NO: 56717 - DNA, 26 bp, Homo sapiens
caagcaattctcctgcctcagcctca

SEQ ID NO: 56718 - DNA, 26 bp, Homo sapiens
aagcaattctcctgcctcagcctcag

SEQ ID NO: 56719 - DNA, 26 bp, Homo sapiens
agcaattctcctgcctcagcctcagg

SEQ ID NO: 56720 - DNA, 26 bp, Homo sapiens
gcaattctcctgcctcagcctcaggt

SEQ ID NO: 56721 - DNA, 26 bp, Homo sapiens
caattctcctgcctcagcctcaggtg

SEQ ID NO: 56722 - DNA, 26 bp, Homo sapiens
aattctcctgcctcagcctcaggtgt

SEQ ID NO: 56723 - DNA, 26 bp, Homo sapiens
attctcctgcctcagcctcaggtgta

SEQ ID NO: 56724 - DNA, 26 bp, Homo sapiens
ttctcctgcctcagcctcaggtgtag

SEQ ID NO: 56725 - DNA, 26 bp, Homo sapiens
tctcctgcctcagcctcaggtgtagc

SEQ ID NO: 56726 - DNA, 26 bp, Homo sapiens
ctcctgcctcagcctcaggtgtagct

SEQ ID NO: 56727 - DNA, 26 bp, Homo sapiens
tcctgcctcagcctcaggtgtagctg

SEQ ID NO: 56728 - DNA, 26 bp, Homo sapiens
cctgcctcagcctcaggtgtagctgg

SEQ ID NO: 56729 - DNA, 26 bp, Homo sapiens
ctgcctcagcctcaggtgtagctggg

SEQ ID NO: 56730 - DNA, 26 bp, Homo sapiens
tgcctcagcctcaggtgtagctggga

SEQ ID NO: 56731 - DNA, 26 bp, Homo sapiens
gcctcagcctcaggtgtagctgggat

SEQ ID NO: 56732 - DNA, 26 bp, Homo sapiens
cctcagcctcaggtgtagctgggatt

SEQ ID NO: 56733 - DNA, 26 bp, Homo sapiens
ctcagcctcaggtgtagctgggatta

SEQ ID NO: 56734 - DNA, 26 bp, Homo sapiens
tcagcctcaggtgtagctgggattac

SEQ ID NO: 56735 - DNA, 26 bp, Homo sapiens
cagcctcaggtgtagctgggattaca

SEQ ID NO: 56736 - DNA, 26 bp, Homo sapiens
agcctcaggtgtagctgggattacag

SEQ ID NO: 56737 - DNA, 26 bp, Homo sapiens
gcctcaggtgtagctgggattacagg

SEQ ID NO: 56738 - DNA, 26 bp, Homo sapiens
cctcaggtgtagctgggattacaggc

SEQ ID NO: 56739 - DNA, 26 bp, Homo sapiens
ctcaggtgtagctgggattacaggcg

SEQ ID NO: 56740 - DNA, 26 bp, Homo sapiens
tcaggtgtagctgggattacaggcgt

SEQ ID NO: 56741 - DNA, 26 bp, Homo sapiens
caggtgtagctgggattacaggcgtg

SEQ ID NO: 56742 - DNA, 26 bp, Homo sapiens
aggtgtagctgggattacaggcgtgt

SEQ ID NO: 56743 - DNA, 26 bp, Homo sapiens
ggtgtagctgggattacaggcgtgtg

SEQ ID NO: 56744 - DNA, 26 bp, Homo sapiens
gtgtagctgggattacaggcgtgtgc

SEQ ID NO: 56745 - DNA, 26 bp, Homo sapiens
tgtagctgggattacaggcgtgtgcc

SEQ ID NO: 56746 - DNA, 26 bp, Homo sapiens
gtagctgggattacaggcgtgtgcca

SEQ ID NO: 56747 - DNA, 26 bp, Homo sapiens
tagctgggattacaggcgtgtgccac

SEQ ID NO: 56748 - DNA, 26 bp, Homo sapiens
agctgggattacaggcgtgtgccacc

SEQ ID NO: 56749 - DNA, 26 bp, Homo sapiens
gctgggattacaggcgtgtgccacca

SEQ ID NO: 56750 - DNA, 26 bp, Homo sapiens
ctgggattacaggcgtgtgccaccat

SEQ ID NO: 56751 - DNA, 26 bp, Homo sapiens
tgggattacaggcgtgtgccaccatg

SEQ ID NO: 56752 - DNA, 26 bp, Homo sapiens
gggattacaggcgtgtgccaccatgc

SEQ ID NO: 56753 - DNA, 26 bp, Homo sapiens
ggattacaggcgtgtgccaccatgcc

SEQ ID NO: 56754 - DNA, 26 bp, Homo sapiens
gattacaggcgtgtgccaccatgcct

SEQ ID NO: 56755 - DNA, 26 bp, Homo sapiens
attacaggcgtgtgccaccatgccta

SEQ ID NO: 56756 - DNA, 26 bp, Homo sapiens
ttacaggcgtgtgccaccatgcctag

SEQ ID NO: 56757 - DNA, 26 bp, Homo sapiens
tacaggcgtgtgccaccatgcctagc

SEQ ID NO: 56758 - DNA, 26 bp, Homo sapiens
acaggcgtgtgccaccatgcctagct

SEQ ID NO: 56759 - DNA, 26 bp, Homo sapiens
caggcgtgtgccaccatgcctagctc

SEQ ID NO: 56760 - DNA, 26 bp, Homo sapiens
aggcgtgtgccaccatgcctagctca

SEQ ID NO: 56761 - DNA, 26 bp, Homo sapiens
ggcgtgtgccaccatgcctagctcat

SEQ ID NO: 56762 - DNA, 26 bp, Homo sapiens
gcgtgtgccaccatgcctagctcatt

SEQ ID NO: 56763 - DNA, 26 bp, Homo sapiens
cgtgtgccaccatgcctagctcattt

SEQ ID NO: 56764 - DNA, 26 bp, Homo sapiens
gtgtgccaccatgcctagctcatttt

SEQ ID NO: 56765 - DNA, 26 bp, Homo sapiens
tgtgccaccatgcctagctcattttt

SEQ ID NO: 56766 - DNA, 26 bp, Homo sapiens
gtgccaccatgcctagctcatttttg

SEQ ID NO: 56767 - DNA, 26 bp, Homo sapiens
tgccaccatgcctagctcatttttgt

SEQ ID NO: 56768 - DNA, 26 bp, Homo sapiens
gccaccatgcctagctcatttttgta

SEQ ID NO: 56769 - DNA, 26 bp, Homo sapiens
ccaccatgcctagctcatttttgtat

SEQ ID NO: 56770 - DNA, 26 bp, Homo sapiens
caccatgcctagctcatttttgtatt

SEQ ID NO: 56771 - DNA, 26 bp, Homo sapiens
accatgcctagctcatttttgtattt

SEQ ID NO: 56772 - DNA, 26 bp, Homo sapiens
ccatgcctagctcatttttgtatttt

SEQ ID NO: 56773 - DNA, 26 bp, Homo sapiens
catgcctagctcatttttgtattttt

SEQ ID NO: 56774 - DNA, 26 bp, Homo sapiens
atgcctagctcatttttgtattttta

SEQ ID NO: 56775 - DNA, 26 bp, Homo sapiens
tgcctagctcatttttgtatttttag

SEQ ID NO: 56776 - DNA, 26 bp, Homo sapiens
gcctagctcatttttgtatttttagt

SEQ ID NO: 56777 - DNA, 26 bp, Homo sapiens
cctagctcatttttgtatttttagta

SEQ ID NO: 56778 - DNA, 26 bp, Homo sapiens
ctagctcatttttgtatttttagtag

SEQ ID NO: 56779 - DNA, 26 bp, Homo sapiens
tagctcatttttgtatttttagtaga

SEQ ID NO: 56780 - DNA, 26 bp, Homo sapiens
agctcatttttgtatttttagtagag

SEQ ID NO: 56781 - DNA, 26 bp, Homo sapiens
gctcatttttgtatttttagtagaga

SEQ ID NO: 56782 - DNA, 26 bp, Homo sapiens
ctcatttttgtatttttagtagagat

SEQ ID NO: 56783 - DNA, 26 bp, Homo sapiens
tcatttttgtatttttagtagagatg

SEQ ID NO: 56784 - DNA, 26 bp, Homo sapiens
catttttgtatttttagtagagatgg

SEQ ID NO: 56785 - DNA, 26 bp, Homo sapiens
atttttgtatttttagtagagatggg

SEQ ID NO: 56786 - DNA, 26 bp, Homo sapiens
tttttgtatttttagtagagatgggg

SEQ ID NO: 56787 - DNA, 26 bp, Homo sapiens
ttttgtatttttagtagagatggggt

SEQ ID NO: 56788 - DNA, 26 bp, Homo sapiens
tttgtatttttagtagagatggggtt

SEQ ID NO: 56789 - DNA, 26 bp, Homo sapiens
ttgtatttttagtagagatggggttt

SEQ ID NO: 56790 - DNA, 26 bp, Homo sapiens
tgtatttttagtagagatggggtttt

SEQ ID NO: 56791 - DNA, 26 bp, Homo sapiens
gtatttttagtagagatggggttttg

SEQ ID NO: 56792 - DNA, 26 bp, Homo sapiens
tatttttagtagagatggggttttgc

SEQ ID NO: 56793 - DNA, 26 bp, Homo sapiens
atttttagtagagatggggttttgcc

SEQ ID NO: 56794 - DNA, 26 bp, Homo sapiens
tttttagtagagatggggttttgcca

SEQ ID NO: 56795 - DNA, 26 bp, Homo sapiens
ttttagtagagatggggttttgccat

SEQ ID NO: 56796 - DNA, 26 bp, Homo sapiens
tttagtagagatggggttttgccatg

SEQ ID NO: 56797 - DNA, 26 bp, Homo sapiens
ttagtagagatggggttttgccatgt

SEQ ID NO: 56798 - DNA, 26 bp, Homo sapiens
tagtagagatggggttttgccatgtt

SEQ ID NO: 56799 - DNA, 26 bp, Homo sapiens
agtagagatggggttttgccatgttg

SEQ ID NO: 56800 - DNA, 26 bp, Homo sapiens
gtagagatggggttttgccatgttgg

SEQ ID NO: 56801 - DNA, 26 bp, Homo sapiens
tagagatggggttttgccatgttggc

SEQ ID NO: 56802 - DNA, 26 bp, Homo sapiens
agagatggggttttgccatgttggct

SEQ ID NO: 56803 - DNA, 26 bp, Homo sapiens
gagatggggttttgccatgttggctg

SEQ ID NO: 56804 - DNA, 26 bp, Homo sapiens
agatggggttttgccatgttggctgg

SEQ ID NO: 56805 - DNA, 26 bp, Homo sapiens
gatggggttttgccatgttggctggg

SEQ ID NO: 56806 - DNA, 26 bp, Homo sapiens
atggggttttgccatgttggctgggc

SEQ ID NO: 56807 - DNA, 26 bp, Homo sapiens
tggggttttgccatgttggctgggct

SEQ ID NO: 56808 - DNA, 26 bp, Homo sapiens
ggggttttgccatgttggctgggctg

SEQ ID NO: 56809 - DNA, 26 bp, Homo sapiens
gggttttgccatgttggctgggctgg

SEQ ID NO: 56810 - DNA, 26 bp, Homo sapiens
ggttttgccatgttggctgggctggt

SEQ ID NO: 56811 - DNA, 26 bp, Homo sapiens
gttttgccatgttggctgggctggtc

SEQ ID NO: 56812 - DNA, 26 bp, Homo sapiens
ttttgccatgttggctgggctggtct

SEQ ID NO: 56813 - DNA, 26 bp, Homo sapiens
tttgccatgttggctgggctggtctc

SEQ ID NO: 56814 - DNA, 26 bp, Homo sapiens
ttgccatgttggctgggctggtctcg

SEQ ID NO: 56815 - DNA, 26 bp, Homo sapiens
tgccatgttggctgggctggtctcga

SEQ ID NO: 56816 - DNA, 26 bp, Homo sapiens
gccatgttggctgggctggtctcgaa

SEQ ID NO: 56817 - DNA, 26 bp, Homo sapiens
ccatgttggctgggctggtctcgaac

SEQ ID NO: 56818 - DNA, 26 bp, Homo sapiens
catgttggctgggctggtctcgaact

SEQ ID NO: 56819 - DNA, 26 bp, Homo sapiens
atgttggctgggctggtctcgaactc

SEQ ID NO: 56820 - DNA, 26 bp, Homo sapiens
tgttggctgggctggtctcgaactcc

SEQ ID NO: 56821 - DNA, 26 bp, Homo sapiens
gttggctgggctggtctcgaactcct

SEQ ID NO: 56822 - DNA, 26 bp, Homo sapiens
ttggctgggctggtctcgaactcctg

SEQ ID NO: 56823 - DNA, 26 bp, Homo sapiens
tggctgggctggtctcgaactcctga

SEQ ID NO: 56824 - DNA, 26 bp, Homo sapiens
ggctgggctggtctcgaactcctgac

SEQ ID NO: 56825 - DNA, 26 bp, Homo sapiens
gctgggctggtctcgaactcctgacc

SEQ ID NO: 56826 - DNA, 26 bp, Homo sapiens
ctgggctggtctcgaactcctgacct

SEQ ID NO: 56827 - DNA, 26 bp, Homo sapiens
tgggctggtctcgaactcctgacctc

SEQ ID NO: 56828 - DNA, 26 bp, Homo sapiens
gggctggtctcgaactcctgacctct

SEQ ID NO: 56829 - DNA, 26 bp, Homo sapiens
ggctggtctcgaactcctgacctctg

SEQ ID NO: 56830 - DNA, 26 bp, Homo sapiens
gctggtctcgaactcctgacctctgg

SEQ ID NO: 56831 - DNA, 26 bp, Homo sapiens
ctggtctcgaactcctgacctctggt

SEQ ID NO: 56832 - DNA, 26 bp, Homo sapiens
tggtctcgaactcctgacctctggtg

SEQ ID NO: 56833 - DNA, 26 bp, Homo sapiens
ggtctcgaactcctgacctctggtga

SEQ ID NO: 56834 - DNA, 26 bp, Homo sapiens
gtctcgaactcctgacctctggtgat

SEQ ID NO: 56835 - DNA, 26 bp, Homo sapiens
tctcgaactcctgacctctggtgatc

SEQ ID NO: 56836 - DNA, 26 bp, Homo sapiens
ctcgaactcctgacctctggtgatcc

SEQ ID NO: 56837 - DNA, 26 bp, Homo sapiens
tcgaactcctgacctctggtgatcca

SEQ ID NO: 56838 - DNA, 26 bp, Homo sapiens
cgaactcctgacctctggtgatccac

SEQ ID NO: 56839 - DNA, 26 bp, Homo sapiens
gaactcctgacctctggtgatccacc

SEQ ID NO: 56840 - DNA, 26 bp, Homo sapiens
aactcctgacctctggtgatccaccc

SEQ ID NO: 56841 - DNA, 26 bp, Homo sapiens
actcctgacctctggtgatccaccca

SEQ ID NO: 56842 - DNA, 26 bp, Homo sapiens
ctcctgacctctggtgatccacccac

SEQ ID NO: 56843 - DNA, 26 bp, Homo sapiens
tcctgacctctggtgatccacccact

SEQ ID NO: 56844 - DNA, 26 bp, Homo sapiens
cctgacctctggtgatccacccactt

SEQ ID NO: 56845 - DNA, 26 bp, Homo sapiens
ctgacctctggtgatccacccacttc

SEQ ID NO: 56846 - DNA, 26 bp, Homo sapiens
tgacctctggtgatccacccacttca

SEQ ID NO: 56847 - DNA, 26 bp, Homo sapiens
gacctctggtgatccacccacttcag

SEQ ID NO: 56848 - DNA, 26 bp, Homo sapiens
acctctggtgatccacccacttcagc

SEQ ID NO: 56849 - DNA, 26 bp, Homo sapiens
cctctggtgatccacccacttcagcc

SEQ ID NO: 56850 - DNA, 26 bp, Homo sapiens
ctctggtgatccacccacttcagcct

SEQ ID NO: 56851 - DNA, 26 bp, Homo sapiens
tctggtgatccacccacttcagcctc

SEQ ID NO: 56852 - DNA, 26 bp, Homo sapiens
ctggtgatccacccacttcagcctcc

SEQ ID NO: 56853 - DNA, 26 bp, Homo sapiens
tggtgatccacccacttcagcctccc

SEQ ID NO: 56854 - DNA, 26 bp, Homo sapiens
ggtgatccacccacttcagcctccca

SEQ ID NO: 56855 - DNA, 26 bp, Homo sapiens
gtgatccacccacttcagcctcccaa

SEQ ID NO: 56856 - DNA, 26 bp, Homo sapiens
tgatccacccacttcagcctcccaaa

SEQ ID NO: 56857 - DNA, 26 bp, Homo sapiens
gatccacccacttcagcctcccaaag

SEQ ID NO: 56858 - DNA, 26 bp, Homo sapiens
atccacccacttcagcctcccaaagt

SEQ ID NO: 56859 - DNA, 26 bp, Homo sapiens
tccacccacttcagcctcccaaagtg

SEQ ID NO: 56860 - DNA, 26 bp, Homo sapiens
ccacccacttcagcctcccaaagtgc

SEQ ID NO: 56861 - DNA, 26 bp, Homo sapiens
cacccacttcagcctcccaaagtgct

SEQ ID NO: 56862 - DNA, 26 bp, Homo sapiens
acccacttcagcctcccaaagtgctg

SEQ ID NO: 56863 - DNA, 26 bp, Homo sapiens
cccacttcagcctcccaaagtgctgg

SEQ ID NO: 56864 - DNA, 26 bp, Homo sapiens
ccacttcagcctcccaaagtgctggg

SEQ ID NO: 56865 - DNA, 26 bp, Homo sapiens
cacttcagcctcccaaagtgctggga

SEQ ID NO: 56866 - DNA, 26 bp, Homo sapiens
acttcagcctcccaaagtgctgggat

SEQ ID NO: 56867 - DNA, 26 bp, Homo sapiens
cttcagcctcccaaagtgctgggatt

SEQ ID NO: 56868 - DNA, 26 bp, Homo sapiens
ttcagcctcccaaagtgctgggatta

SEQ ID NO: 56869 - DNA, 26 bp, Homo sapiens
tcagcctcccaaagtgctgggattat

SEQ ID NO: 56870 - DNA, 26 bp, Homo sapiens
cagcctcccaaagtgctgggattata

SEQ ID NO: 56871 - DNA, 26 bp, Homo sapiens
agcctcccaaagtgctgggattatag

SEQ ID NO: 56872 - DNA, 26 bp, Homo sapiens
gcctcccaaagtgctgggattatagg

SEQ ID NO: 56873 - DNA, 26 bp, Homo sapiens
cctcccaaagtgctgggattataggc

SEQ ID NO: 56874 - DNA, 26 bp, Homo sapiens
ctcccaaagtgctgggattataggcg

SEQ ID NO: 56875 - DNA, 26 bp, Homo sapiens
tcccaaagtgctgggattataggcgt

SEQ ID NO: 56876 - DNA, 26 bp, Homo sapiens
cccaaagtgctgggattataggcgtg

SEQ ID NO: 56877 - DNA, 26 bp, Homo sapiens
ccaaagtgctgggattataggcgtga

SEQ ID NO: 56878 - DNA, 26 bp, Homo sapiens
caaagtgctgggattataggcgtgag

SEQ ID NO: 56879 - DNA, 26 bp, Homo sapiens
aaagtgctgggattataggcgtgagc

SEQ ID NO: 56880 - DNA, 26 bp, Homo sapiens
aagtgctgggattataggcgtgagcc

SEQ ID NO: 56881 - DNA, 26 bp, Homo sapiens
agtgctgggattataggcgtgagcca

SEQ ID NO: 56882 - DNA, 26 bp, Homo sapiens
gtgctgggattataggcgtgagccac

SEQ ID NO: 56883 - DNA, 26 bp, Homo sapiens
tgctgggattataggcgtgagccacc

SEQ ID NO: 56884 - DNA, 26 bp, Homo sapiens
gctgggattataggcgtgagccacca

SEQ ID NO: 56885 - DNA, 26 bp, Homo sapiens
ctgggattataggcgtgagccaccac

SEQ ID NO: 56886 - DNA, 26 bp, Homo sapiens
tgggattataggcgtgagccaccaca

SEQ ID NO: 56887 - DNA, 26 bp, Homo sapiens
gggattataggcgtgagccaccacac

SEQ ID NO: 56888 - DNA, 26 bp, Homo sapiens
ggattataggcgtgagccaccacacc

SEQ ID NO: 56889 - DNA, 26 bp, Homo sapiens
gattataggcgtgagccaccacaccg

SEQ ID NO: 56890 - DNA, 26 bp, Homo sapiens
attataggcgtgagccaccacaccgg

SEQ ID NO: 56891 - DNA, 26 bp, Homo sapiens
ttataggcgtgagccaccacaccggg

SEQ ID NO: 56892 - DNA, 26 bp, Homo sapiens
tataggcgtgagccaccacaccgggc

SEQ ID NO: 56893 - DNA, 26 bp, Homo sapiens
ataggcgtgagccaccacaccgggcc

SEQ ID NO: 56894 - DNA, 26 bp, Homo sapiens
taggcgtgagccaccacaccgggcct

SEQ ID NO: 56895 - DNA, 26 bp, Homo sapiens
aggcgtgagccaccacaccgggccta

SEQ ID NO: 56896 - DNA, 26 bp, Homo sapiens
ggcgtgagccaccacaccgggcctac

SEQ ID NO: 56897 - DNA, 26 bp, Homo sapiens
gcgtgagccaccacaccgggcctact

SEQ ID NO: 56898 - DNA, 26 bp, Homo sapiens
cgtgagccaccacaccgggcctactg

SEQ ID NO: 56899 - DNA, 26 bp, Homo sapiens
gtgagccaccacaccgggcctactgc

SEQ ID NO: 56900 - DNA, 26 bp, Homo sapiens
tgagccaccacaccgggcctactgcc

SEQ ID NO: 56901 - DNA, 26 bp, Homo sapiens
gagccaccacaccgggcctactgcct

SEQ ID NO: 56902 - DNA, 26 bp, Homo sapiens
agccaccacaccgggcctactgcctt

SEQ ID NO: 56903 - DNA, 26 bp, Homo sapiens
gccaccacaccgggcctactgccttt

SEQ ID NO: 56904 - DNA, 26 bp, Homo sapiens
ccaccacaccgggcctactgcctttt

SEQ ID NO: 56905 - DNA, 26 bp, Homo sapiens
caccacaccgggcctactgccttttt

SEQ ID NO: 56906 - DNA, 26 bp, Homo sapiens
accacaccgggcctactgccttttta

SEQ ID NO: 56907 - DNA, 26 bp, Homo sapiens
ccacaccgggcctactgcctttttaa

SEQ ID NO: 56908 - DNA, 26 bp, Homo sapiens
cacaccgggcctactgcctttttaaa

SEQ ID NO: 56909 - DNA, 26 bp, Homo sapiens
acaccgggcctactgcctttttaaaa

SEQ ID NO: 56910 - DNA, 26 bp, Homo sapiens
caccgggcctactgcctttttaaaag

SEQ ID NO: 56911 - DNA, 26 bp, Homo sapiens
accgggcctactgcctttttaaaaga

SEQ ID NO: 56912 - DNA, 26 bp, Homo sapiens
ccgggcctactgcctttttaaaagat

SEQ ID NO: 56913 - DNA, 26 bp, Homo sapiens
cgggcctactgcctttttaaaagatc

SEQ ID NO: 56914 - DNA, 26 bp, Homo sapiens
gggcctactgcctttttaaaagatct

SEQ ID NO: 56915 - DNA, 26 bp, Homo sapiens
ggcctactgcctttttaaaagatctt

SEQ ID NO: 56916 - DNA, 26 bp, Homo sapiens
gcctactgcctttttaaaagatcttc

SEQ ID NO: 56917 - DNA, 26 bp, Homo sapiens
cctactgcctttttaaaagatcttcc

SEQ ID NO: 56918 - DNA, 26 bp, Homo sapiens
ctactgcctttttaaaagatcttccc

SEQ ID NO: 56919 - DNA, 26 bp, Homo sapiens
tactgcctttttaaaagatcttccca

SEQ ID NO: 56920 - DNA, 26 bp, Homo sapiens
actgcctttttaaaagatcttcccaa

SEQ ID NO: 56921 - DNA, 26 bp, Homo sapiens
ctgcctttttaaaagatcttcccaag

SEQ ID NO: 56922 - DNA, 26 bp, Homo sapiens
tgcctttttaaaagatcttcccaagc

SEQ ID NO: 56923 - DNA, 26 bp, Homo sapiens
gcctttttaaaagatcttcccaagcc

SEQ ID NO: 56924 - DNA, 26 bp, Homo sapiens
cctttttaaaagatcttcccaagccc

SEQ ID NO: 56925 - DNA, 26 bp, Homo sapiens
ctttttaaaagatcttcccaagccct

SEQ ID NO: 56926 - DNA, 26 bp, Homo sapiens
tttttaaaagatcttcccaagccctc

SEQ ID NO: 56927 - DNA, 26 bp, Homo sapiens
ttttaaaagatcttcccaagccctct

SEQ ID NO: 56928 - DNA, 26 bp, Homo sapiens
tttaaaagatcttcccaagccctcta

SEQ ID NO: 56929 - DNA, 26 bp, Homo sapiens
ttaaaagatcttcccaagccctctac

SEQ ID NO: 56930 - DNA, 26 bp, Homo sapiens
taaaagatcttcccaagccctctact

SEQ ID NO: 56931 - DNA, 26 bp, Homo sapiens
aaaagatcttcccaagccctctactc

SEQ ID NO: 56932 - DNA, 26 bp, Homo sapiens
aaagatcttcccaagccctctactct

SEQ ID NO: 56933 - DNA, 26 bp, Homo sapiens
aagatcttcccaagccctctactctg

SEQ ID NO: 56934 - DNA, 26 bp, Homo sapiens
agatcttcccaagccctctactctga

SEQ ID NO: 56935 - DNA, 26 bp, Homo sapiens
gatcttcccaagccctctactctgaa

SEQ ID NO: 56936 - DNA, 26 bp, Homo sapiens
atcttcccaagccctctactctgaag

SEQ ID NO: 56937 - DNA, 26 bp, Homo sapiens
tcttcccaagccctctactctgaagt

SEQ ID NO: 56938 - DNA, 26 bp, Homo sapiens
cttcccaagccctctactctgaagtg

SEQ ID NO: 56939 - DNA, 26 bp, Homo sapiens
ttcccaagccctctactctgaagtgc

SEQ ID NO: 56940 - DNA, 26 bp, Homo sapiens
tcccaagccctctactctgaagtgcc

SEQ ID NO: 56941 - DNA, 26 bp, Homo sapiens
cccaagccctctactctgaagtgccc

SEQ ID NO: 56942 - DNA, 26 bp, Homo sapiens
ccaagccctctactctgaagtgccct

SEQ ID NO: 56943 - DNA, 26 bp, Homo sapiens
caagccctctactctgaagtgccctg

SEQ ID NO: 56944 - DNA, 26 bp, Homo sapiens
aagccctctactctgaagtgccctgg

SEQ ID NO: 56945 - DNA, 26 bp, Homo sapiens
agccctctactctgaagtgccctggg

SEQ ID NO: 56946 - DNA, 26 bp, Homo sapiens
gccctctactctgaagtgccctgggc

SEQ ID NO: 56947 - DNA, 26 bp, Homo sapiens
ccctctactctgaagtgccctgggct

SEQ ID NO: 56948 - DNA, 26 bp, Homo sapiens
cctctactctgaagtgccctgggctg

SEQ ID NO: 56949 - DNA, 26 bp, Homo sapiens
ctctactctgaagtgccctgggctgc

SEQ ID NO: 56950 - DNA, 26 bp, Homo sapiens
tctactctgaagtgccctgggctgct

SEQ ID NO: 56951 - DNA, 26 bp, Homo sapiens
ctactctgaagtgccctgggctgcta

SEQ ID NO: 56952 - DNA, 26 bp, Homo sapiens
tactctgaagtgccctgggctgctat

SEQ ID NO: 56953 - DNA, 26 bp, Homo sapiens
actctgaagtgccctgggctgctatt

SEQ ID NO: 56954 - DNA, 26 bp, Homo sapiens
ctctgaagtgccctgggctgctattg

SEQ ID NO: 56955 - DNA, 26 bp, Homo sapiens
tctgaagtgccctgggctgctattga

SEQ ID NO: 56956 - DNA, 26 bp, Homo sapiens
ctgaagtgccctgggctgctattgac

SEQ ID NO: 56957 - DNA, 26 bp, Homo sapiens
tgaagtgccctgggctgctattgacg

SEQ ID NO: 56958 - DNA, 26 bp, Homo sapiens
gaagtgccctgggctgctattgacgt

SEQ ID NO: 56959 - DNA, 26 bp, Homo sapiens
aagtgccctgggctgctattgacgtc

SEQ ID NO: 56960 - DNA, 26 bp, Homo sapiens
agtgccctgggctgctattgacgtca

SEQ ID NO: 56961 - DNA, 26 bp, Homo sapiens
gtgccctgggctgctattgacgtcat

SEQ ID NO: 56962 - DNA, 26 bp, Homo sapiens
tgccctgggctgctattgacgtcatg

SEQ ID NO: 56963 - DNA, 26 bp, Homo sapiens
gccctgggctgctattgacgtcatgg

SEQ ID NO: 56964 - DNA, 26 bp, Homo sapiens
ccctgggctgctattgacgtcatggc

SEQ ID NO: 56965 - DNA, 26 bp, Homo sapiens
cctgggctgctattgacgtcatggct

SEQ ID NO: 56966 - DNA, 26 bp, Homo sapiens
ctgggctgctattgacgtcatggctt

SEQ ID NO: 56967 - DNA, 26 bp, Homo sapiens
tgggctgctattgacgtcatggctta

SEQ ID NO: 56968 - DNA, 26 bp, Homo sapiens
gggctgctattgacgtcatggcttat

SEQ ID NO: 56969 - DNA, 26 bp, Homo sapiens
ggctgctattgacgtcatggcttatt

SEQ ID NO: 56970 - DNA, 26 bp, Homo sapiens
gctgctattgacgtcatggcttattc

SEQ ID NO: 56971 - DNA, 26 bp, Homo sapiens
ctgctattgacgtcatggcttattcc

SEQ ID NO: 56972 - DNA, 26 bp, Homo sapiens
tgctattgacgtcatggcttattccc

SEQ ID NO: 56973 - DNA, 26 bp, Homo sapiens
gctattgacgtcatggcttattccct

SEQ ID NO: 56974 - DNA, 26 bp, Homo sapiens
ctattgacgtcatggcttattccctt

SEQ ID NO: 56975 - DNA, 26 bp, Homo sapiens
tattgacgtcatggcttattccctta

SEQ ID NO: 56976 - DNA, 26 bp, Homo sapiens
attgacgtcatggcttattcccttaa

SEQ ID NO: 56977 - DNA, 26 bp, Homo sapiens
ttgacgtcatggcttattcccttaat

SEQ ID NO: 56978 - DNA, 26 bp, Homo sapiens
tgacgtcatggcttattcccttaata

SEQ ID NO: 56979 - DNA, 26 bp, Homo sapiens
gacgtcatggcttattcccttaataa

SEQ ID NO: 56980 - DNA, 26 bp, Homo sapiens
acgtcatggcttattcccttaataat

SEQ ID NO: 56981 - DNA, 26 bp, Homo sapiens
cgtcatggcttattcccttaataatc

SEQ ID NO: 56982 - DNA, 26 bp, Homo sapiens
gtcatggcttattcccttaataatct

SEQ ID NO: 56983 - DNA, 26 bp, Homo sapiens
tcatggcttattcccttaataatctg

SEQ ID NO: 56984 - DNA, 26 bp, Homo sapiens
catggcttattcccttaataatctga

SEQ ID NO: 56985 - DNA, 26 bp, Homo sapiens
atggcttattcccttaataatctgat

SEQ ID NO: 56986 - DNA, 26 bp, Homo sapiens
tggcttattcccttaataatctgatt

SEQ ID NO: 56987 - DNA, 26 bp, Homo sapiens
ggcttattcccttaataatctgattc

SEQ ID NO: 56988 - DNA, 26 bp, Homo sapiens
gcttattcccttaataatctgattcc

SEQ ID NO: 56989 - DNA, 26 bp, Homo sapiens
cttattcccttaataatctgattcca

SEQ ID NO: 56990 - DNA, 26 bp, Homo sapiens
ttattcccttaataatctgattccag

SEQ ID NO: 56991 - DNA, 26 bp, Homo sapiens
tattcccttaataatctgattccagg

SEQ ID NO: 56992 - DNA, 26 bp, Homo sapiens
attcccttaataatctgattccaggt

SEQ ID NO: 56993 - DNA, 26 bp, Homo sapiens
ttcccttaataatctgattccaggtg

SEQ ID NO: 56994 - DNA, 26 bp, Homo sapiens
tcccttaataatctgattccaggtga

SEQ ID NO: 56995 - DNA, 26 bp, Homo sapiens
cccttaataatctgattccaggtgac

SEQ ID NO: 56996 - DNA, 26 bp, Homo sapiens
ccttaataatctgattccaggtgacc

SEQ ID NO: 56997 - DNA, 26 bp, Homo sapiens
cttaataatctgattccaggtgacct

SEQ ID NO: 56998 - DNA, 26 bp, Homo sapiens
ttaataatctgattccaggtgacctc

SEQ ID NO: 56999 - DNA, 26 bp, Homo sapiens
taataatctgattccaggtgacctca

SEQ ID NO: 57000 - DNA, 26 bp, Homo sapiens
aataatctgattccaggtgacctcag

SEQ ID NO: 57001 - DNA, 26 bp, Homo sapiens
ataatctgattccaggtgacctcagg

SEQ ID NO: 57002 - DNA, 26 bp, Homo sapiens
taatctgattccaggtgacctcaggg

SEQ ID NO: 57003 - DNA, 26 bp, Homo sapiens
aatctgattccaggtgacctcaggga

SEQ ID NO: 57004 - DNA, 26 bp, Homo sapiens
atctgattccaggtgacctcagggat

SEQ ID NO: 57005 - DNA, 26 bp, Homo sapiens
tctgattccaggtgacctcagggata

SEQ ID NO: 57006 - DNA, 26 bp, Homo sapiens
ctgattccaggtgacctcagggataa

SEQ ID NO: 57007 - DNA, 26 bp, Homo sapiens
tgattccaggtgacctcagggataaa

SEQ ID NO: 57008 - DNA, 26 bp, Homo sapiens
gattccaggtgacctcagggataaag

SEQ ID NO: 57009 - DNA, 26 bp, Homo sapiens
attccaggtgacctcagggataaagg

SEQ ID NO: 57010 - DNA, 26 bp, Homo sapiens
ttccaggtgacctcagggataaagga

SEQ ID NO: 57011 - DNA, 26 bp, Homo sapiens
tccaggtgacctcagggataaaggat

SEQ ID NO: 57012 - DNA, 26 bp, Homo sapiens
ccaggtgacctcagggataaaggatg

SEQ ID NO: 57013 - DNA, 26 bp, Homo sapiens
caggtgacctcagggataaaggatga

SEQ ID NO: 57014 - DNA, 26 bp, Homo sapiens
aggtgacctcagggataaaggatgat

SEQ ID NO: 57015 - DNA, 26 bp, Homo sapiens
ggtgacctcagggataaaggatgata

SEQ ID NO: 57016 - DNA, 26 bp, Homo sapiens
gtgacctcagggataaaggatgatat

SEQ ID NO: 57017 - DNA, 26 bp, Homo sapiens
tgacctcagggataaaggatgatata

SEQ ID NO: 57018 - DNA, 26 bp, Homo sapiens
gacctcagggataaaggatgatatag

SEQ ID NO: 57019 - DNA, 26 bp, Homo sapiens
acctcagggataaaggatgatatagt

SEQ ID NO: 57020 - DNA, 26 bp, Homo sapiens
cctcagggataaaggatgatatagtt

SEQ ID NO: 57021 - DNA, 26 bp, Homo sapiens
ctcagggataaaggatgatatagtta

SEQ ID NO: 57022 - DNA, 26 bp, Homo sapiens
tcagggataaaggatgatatagttac

SEQ ID NO: 57023 - DNA, 26 bp, Homo sapiens
cagggataaaggatgatatagttaca

SEQ ID NO: 57024 - DNA, 26 bp, Homo sapiens
agggataaaggatgatatagttacat

SEQ ID NO: 57025 - DNA, 26 bp, Homo sapiens
gggataaaggatgatatagttacatt

SEQ ID NO: 57026 - DNA, 26 bp, Homo sapiens
ggataaaggatgatatagttacattc

SEQ ID NO: 57027 - DNA, 26 bp, Homo sapiens
gataaaggatgatatagttacattcc

SEQ ID NO: 57028 - DNA, 26 bp, Homo sapiens
ataaaggatgatatagttacattcca

SEQ ID NO: 57029 - DNA, 26 bp, Homo sapiens
taaaggatgatatagttacattccat

SEQ ID NO: 57030 - DNA, 26 bp, Homo sapiens
aaaggatgatatagttacattccatg

SEQ ID NO: 57031 - DNA, 26 bp, Homo sapiens
aaggatgatatagttacattccatga

SEQ ID NO: 57032 - DNA, 26 bp, Homo sapiens
aggatgatatagttacattccatgaa

SEQ ID NO: 57033 - DNA, 26 bp, Homo sapiens
ggatgatatagttacattccatgaac

SEQ ID NO: 57034 - DNA, 26 bp, Homo sapiens
gatgatatagttacattccatgaact

SEQ ID NO: 57035 - DNA, 26 bp, Homo sapiens
atgatatagttacattccatgaactc

SEQ ID NO: 57036 - DNA, 26 bp, Homo sapiens
tgatatagttacattccatgaactct

SEQ ID NO: 57037 - DNA, 26 bp, Homo sapiens
gatatagttacattccatgaactctg

SEQ ID NO: 57038 - DNA, 26 bp, Homo sapiens
atatagttacattccatgaactctgc

SEQ ID NO: 57039 - DNA, 26 bp, Homo sapiens
tatagttacattccatgaactctgca

SEQ ID NO: 57040 - DNA, 26 bp, Homo sapiens
atagttacattccatgaactctgcaa

SEQ ID NO: 57041 - DNA, 26 bp, Homo sapiens
tagttacattccatgaactctgcaag

SEQ ID NO: 57042 - DNA, 26 bp, Homo sapiens
agttacattccatgaactctgcaagt

SEQ ID NO: 57043 - DNA, 26 bp, Homo sapiens
gttacattccatgaactctgcaagtc

SEQ ID NO: 57044 - DNA, 26 bp, Homo sapiens
ttacattccatgaactctgcaagtca

SEQ ID NO: 57045 - DNA, 26 bp, Homo sapiens
tacattccatgaactctgcaagtcag

SEQ ID NO: 57046 - DNA, 26 bp, Homo sapiens
acattccatgaactctgcaagtcagc

SEQ ID NO: 57047 - DNA, 26 bp, Homo sapiens
cattccatgaactctgcaagtcagca

SEQ ID NO: 57048 - DNA, 26 bp, Homo sapiens
attccatgaactctgcaagtcagcat

SEQ ID NO: 57049 - DNA, 26 bp, Homo sapiens
ttccatgaactctgcaagtcagcatg

SEQ ID NO: 57050 - DNA, 26 bp, Homo sapiens
tccatgaactctgcaagtcagcatga

SEQ ID NO: 57051 - DNA, 26 bp, Homo sapiens
ccatgaactctgcaagtcagcatgag

SEQ ID NO: 57052 - DNA, 26 bp, Homo sapiens
catgaactctgcaagtcagcatgagg

SEQ ID NO: 57053 - DNA, 26 bp, Homo sapiens
atgaactctgcaagtcagcatgaggc

SEQ ID NO: 57054 - DNA, 26 bp, Homo sapiens
tgaactctgcaagtcagcatgaggca

SEQ ID NO: 57055 - DNA, 26 bp, Homo sapiens
gaactctgcaagtcagcatgaggcat

SEQ ID NO: 57056 - DNA, 26 bp, Homo sapiens
aactctgcaagtcagcatgaggcata

SEQ ID NO: 57057 - DNA, 26 bp, Homo sapiens
actctgcaagtcagcatgaggcataa

SEQ ID NO: 57058 - DNA, 26 bp, Homo sapiens
ctctgcaagtcagcatgaggcataac

SEQ ID NO: 57059 - DNA, 26 bp, Homo sapiens
tctgcaagtcagcatgaggcataacc

SEQ ID NO: 57060 - DNA, 26 bp, Homo sapiens
ctgcaagtcagcatgaggcataacct

SEQ ID NO: 57061 - DNA, 26 bp, Homo sapiens
tgcaagtcagcatgaggcataacctg

SEQ ID NO: 57062 - DNA, 26 bp, Homo sapiens
gcaagtcagcatgaggcataacctgg

SEQ ID NO: 57063 - DNA, 26 bp, Homo sapiens
caagtcagcatgaggcataacctggc

SEQ ID NO: 57064 - DNA, 26 bp, Homo sapiens
aagtcagcatgaggcataacctggcc

SEQ ID NO: 57065 - DNA, 26 bp, Homo sapiens
agtcagcatgaggcataacctggcct

SEQ ID NO: 57066 - DNA, 26 bp, Homo sapiens
gtcagcatgaggcataacctggcctg

SEQ ID NO: 57067 - DNA, 26 bp, Homo sapiens
tcagcatgaggcataacctggcctgc

SEQ ID NO: 57068 - DNA, 26 bp, Homo sapiens
cagcatgaggcataacctggcctgca

SEQ ID NO: 57069 - DNA, 26 bp, Homo sapiens
agcatgaggcataacctggcctgcaa

SEQ ID NO: 57070 - DNA, 26 bp, Homo sapiens
gcatgaggcataacctggcctgcaac

SEQ ID NO: 57071 - DNA, 26 bp, Homo sapiens
catgaggcataacctggcctgcaacg

SEQ ID NO: 57072 - DNA, 26 bp, Homo sapiens
atgaggcataacctggcctgcaacgc

SEQ ID NO: 57073 - DNA, 26 bp, Homo sapiens
tgaggcataacctggcctgcaacgcc

SEQ ID NO: 57074 - DNA, 26 bp, Homo sapiens
gaggcataacctggcctgcaacgcca

SEQ ID NO: 57075 - DNA, 26 bp, Homo sapiens
aggcataacctggcctgcaacgccat

SEQ ID NO: 57076 - DNA, 26 bp, Homo sapiens
ggcataacctggcctgcaacgccata

SEQ ID NO: 57077 - DNA, 26 bp, Homo sapiens
gcataacctggcctgcaacgccataa

SEQ ID NO: 57078 - DNA, 26 bp, Homo sapiens
cataacctggcctgcaacgccataag

SEQ ID NO: 57079 - DNA, 26 bp, Homo sapiens
ataacctggcctgcaacgccataaga

SEQ ID NO: 57080 - DNA, 26 bp, Homo sapiens
taacctggcctgcaacgccataagac

SEQ ID NO: 57081 - DNA, 26 bp, Homo sapiens
aacctggcctgcaacgccataagaca

SEQ ID NO: 57082 - DNA, 26 bp, Homo sapiens
acctggcctgcaacgccataagacag

SEQ ID NO: 57083 - DNA, 26 bp, Homo sapiens
cctggcctgcaacgccataagacagg

SEQ ID NO: 57084 - DNA, 26 bp, Homo sapiens
ctggcctgcaacgccataagacagga

SEQ ID NO: 57085 - DNA, 26 bp, Homo sapiens
tggcctgcaacgccataagacaggag

SEQ ID NO: 57086 - DNA, 26 bp, Homo sapiens
ggcctgcaacgccataagacaggagg

SEQ ID NO: 57087 - DNA, 26 bp, Homo sapiens
gcctgcaacgccataagacaggaggc

SEQ ID NO: 57088 - DNA, 26 bp, Homo sapiens
cctgcaacgccataagacaggaggca

SEQ ID NO: 57089 - DNA, 26 bp, Homo sapiens
ctgcaacgccataagacaggaggcac

SEQ ID NO: 57090 - DNA, 26 bp, Homo sapiens
tgcaacgccataagacaggaggcacc

SEQ ID NO: 57091 - DNA, 26 bp, Homo sapiens
gcaacgccataagacaggaggcacct

SEQ ID NO: 57092 - DNA, 26 bp, Homo sapiens
caacgccataagacaggaggcaccta

SEQ ID NO: 57093 - DNA, 26 bp, Homo sapiens
aacgccataagacaggaggcacctaa

SEQ ID NO: 57094 - DNA, 26 bp, Homo sapiens
acgccataagacaggaggcacctaaa

SEQ ID NO: 57095 - DNA, 26 bp, Homo sapiens
cgccataagacaggaggcacctaaag

SEQ ID NO: 57096 - DNA, 26 bp, Homo sapiens
gccataagacaggaggcacctaaaga

SEQ ID NO: 57097 - DNA, 26 bp, Homo sapiens
ccataagacaggaggcacctaaagaa

SEQ ID NO: 57098 - DNA, 26 bp, Homo sapiens
cataagacaggaggcacctaaagaac

SEQ ID NO: 57099 - DNA, 26 bp, Homo sapiens
ataagacaggaggcacctaaagaact

SEQ ID NO: 57100 - DNA, 26 bp, Homo sapiens
taagacaggaggcacctaaagaactc

SEQ ID NO: 57101 - DNA, 26 bp, Homo sapiens
aagacaggaggcacctaaagaactct

SEQ ID NO: 57102 - DNA, 26 bp, Homo sapiens
agacaggaggcacctaaagaactctt

SEQ ID NO: 57103 - DNA, 26 bp, Homo sapiens
gacaggaggcacctaaagaactcttg

SEQ ID NO: 57104 - DNA, 26 bp, Homo sapiens
acaggaggcacctaaagaactcttgg

SEQ ID NO: 57105 - DNA, 26 bp, Homo sapiens
caggaggcacctaaagaactcttggc

SEQ ID NO: 57106 - DNA, 26 bp, Homo sapiens
aggaggcacctaaagaactcttggca

SEQ ID NO: 57107 - DNA, 26 bp, Homo sapiens
ggaggcacctaaagaactcttggcaa

SEQ ID NO: 57108 - DNA, 26 bp, Homo sapiens
gaggcacctaaagaactcttggcaac

SEQ ID NO: 57109 - DNA, 26 bp, Homo sapiens
aggcacctaaagaactcttggcaact

SEQ ID NO: 57110 - DNA, 26 bp, Homo sapiens
ggcacctaaagaactcttggcaactt

SEQ ID NO: 57111 - DNA, 26 bp, Homo sapiens
gcacctaaagaactcttggcaacttc

SEQ ID NO: 57112 - DNA, 26 bp, Homo sapiens
cacctaaagaactcttggcaacttct

SEQ ID NO: 57113 - DNA, 26 bp, Homo sapiens
acctaaagaactcttggcaacttctc

SEQ ID NO: 57114 - DNA, 26 bp, Homo sapiens
cctaaagaactcttggcaacttctcc

SEQ ID NO: 57115 - DNA, 26 bp, Homo sapiens
ctaaagaactcttggcaacttctcca

SEQ ID NO: 57116 - DNA, 26 bp, Homo sapiens
taaagaactcttggcaacttctccat

SEQ ID NO: 57117 - DNA, 26 bp, Homo sapiens
aaagaactcttggcaacttctccatg

SEQ ID NO: 57118 - DNA, 26 bp, Homo sapiens
aagaactcttggcaacttctccatgc

SEQ ID NO: 57119 - DNA, 26 bp, Homo sapiens
agaactcttggcaacttctccatgct

SEQ ID NO: 57120 - DNA, 26 bp, Homo sapiens
gaactcttggcaacttctccatgcta

SEQ ID NO: 57121 - DNA, 26 bp, Homo sapiens
aactcttggcaacttctccatgctac

SEQ ID NO: 57122 - DNA, 26 bp, Homo sapiens
actcttggcaacttctccatgctacc

SEQ ID NO: 57123 - DNA, 26 bp, Homo sapiens
ctcttggcaacttctccatgctaccc

SEQ ID NO: 57124 - DNA, 26 bp, Homo sapiens
tcttggcaacttctccatgctacccg

SEQ ID NO: 57125 - DNA, 26 bp, Homo sapiens
cttggcaacttctccatgctacccga

SEQ ID NO: 57126 - DNA, 26 bp, Homo sapiens
ttggcaacttctccatgctacccgag

SEQ ID NO: 57127 - DNA, 26 bp, Homo sapiens
tggcaacttctccatgctacccgaga

SEQ ID NO: 57128 - DNA, 26 bp, Homo sapiens
ggcaacttctccatgctacccgagag

SEQ ID NO: 57129 - DNA, 26 bp, Homo sapiens
gcaacttctccatgctacccgagagg

SEQ ID NO: 57130 - DNA, 26 bp, Homo sapiens
caacttctccatgctacccgagaggc

SEQ ID NO: 57131 - DNA, 26 bp, Homo sapiens
aacttctccatgctacccgagaggca

SEQ ID NO: 57132 - DNA, 26 bp, Homo sapiens
acttctccatgctacccgagaggcac

SEQ ID NO: 57133 - DNA, 26 bp, Homo sapiens
cttctccatgctacccgagaggcacg

SEQ ID NO: 57134 - DNA, 26 bp, Homo sapiens
ttctccatgctacccgagaggcacgt

SEQ ID NO: 57135 - DNA, 26 bp, Homo sapiens
tctccatgctacccgagaggcacgtg

SEQ ID NO: 57136 - DNA, 26 bp, Homo sapiens
ctccatgctacccgagaggcacgtga

SEQ ID NO: 57137 - DNA, 26 bp, Homo sapiens
tccatgctacccgagaggcacgtgag

SEQ ID NO: 57138 - DNA, 26 bp, Homo sapiens
ccatgctacccgagaggcacgtgagc

SEQ ID NO: 57139 - DNA, 26 bp, Homo sapiens
catgctacccgagaggcacgtgagcc

SEQ ID NO: 57140 - DNA, 26 bp, Homo sapiens
atgctacccgagaggcacgtgagcct

SEQ ID NO: 57141 - DNA, 26 bp, Homo sapiens
tgctacccgagaggcacgtgagcctc

SEQ ID NO: 57142 - DNA, 26 bp, Homo sapiens
gctacccgagaggcacgtgagcctct

SEQ ID NO: 57143 - DNA, 26 bp, Homo sapiens
ctacccgagaggcacgtgagcctctc

SEQ ID NO: 57144 - DNA, 26 bp, Homo sapiens
tacccgagaggcacgtgagcctctct

SEQ ID NO: 57145 - DNA, 26 bp, Homo sapiens
acccgagaggcacgtgagcctctctt

SEQ ID NO: 57146 - DNA, 26 bp, Homo sapiens
cccgagaggcacgtgagcctctcttt

SEQ ID NO: 57147 - DNA, 26 bp, Homo sapiens
ccgagaggcacgtgagcctctctttg

SEQ ID NO: 57148 - DNA, 26 bp, Homo sapiens
cgagaggcacgtgagcctctctttgc

SEQ ID NO: 57149 - DNA, 26 bp, Homo sapiens
gagaggcacgtgagcctctctttgca

SEQ ID NO: 57150 - DNA, 26 bp, Homo sapiens
agaggcacgtgagcctctctttgcag

SEQ ID NO: 57151 - DNA, 26 bp, Homo sapiens
gaggcacgtgagcctctctttgcagt

SEQ ID NO: 57152 - DNA, 26 bp, Homo sapiens
aggcacgtgagcctctctttgcagtt

SEQ ID NO: 57153 - DNA, 26 bp, Homo sapiens
ggcacgtgagcctctctttgcagttt

SEQ ID NO: 57154 - DNA, 26 bp, Homo sapiens
gcacgtgagcctctctttgcagtttc

SEQ ID NO: 57155 - DNA, 26 bp, Homo sapiens
cacgtgagcctctctttgcagtttct

SEQ ID NO: 57156 - DNA, 26 bp, Homo sapiens
acgtgagcctctctttgcagtttctc

SEQ ID NO: 57157 - DNA, 26 bp, Homo sapiens
cgtgagcctctctttgcagtttctcc

SEQ ID NO: 57158 - DNA, 26 bp, Homo sapiens
gtgagcctctctttgcagtttctcct

SEQ ID NO: 57159 - DNA, 26 bp, Homo sapiens
tgagcctctctttgcagtttctcctt

SEQ ID NO: 57160 - DNA, 26 bp, Homo sapiens
gagcctctctttgcagtttctcctta

SEQ ID NO: 57161 - DNA, 26 bp, Homo sapiens
agcctctctttgcagtttctccttag

SEQ ID NO: 57162 - DNA, 26 bp, Homo sapiens
gcctctctttgcagtttctccttagt

SEQ ID NO: 57163 - DNA, 26 bp, Homo sapiens
cctctctttgcagtttctccttagtg

SEQ ID NO: 57164 - DNA, 26 bp, Homo sapiens
ctctctttgcagtttctccttagtgg

SEQ ID NO: 57165 - DNA, 26 bp, Homo sapiens
tctctttgcagtttctccttagtggc

SEQ ID NO: 57166 - DNA, 26 bp, Homo sapiens
ctctttgcagtttctccttagtggct

SEQ ID NO: 57167 - DNA, 26 bp, Homo sapiens
tctttgcagtttctccttagtggctg

SEQ ID NO: 57168 - DNA, 26 bp, Homo sapiens
ctttgcagtttctccttagtggctgg

SEQ ID NO: 57169 - DNA, 26 bp, Homo sapiens
tttgcagtttctccttagtggctggt

SEQ ID NO: 57170 - DNA, 26 bp, Homo sapiens
ttgcagtttctccttagtggctggtg

SEQ ID NO: 57171 - DNA, 26 bp, Homo sapiens
tgcagtttctccttagtggctggtga

SEQ ID NO: 57172 - DNA, 26 bp, Homo sapiens
gcagtttctccttagtggctggtgac

SEQ ID NO: 57173 - DNA, 26 bp, Homo sapiens
cagtttctccttagtggctggtgaca

SEQ ID NO: 57174 - DNA, 26 bp, Homo sapiens
agtttctccttagtggctggtgacag

SEQ ID NO: 57175 - DNA, 26 bp, Homo sapiens
gtttctccttagtggctggtgacagt

SEQ ID NO: 57176 - DNA, 26 bp, Homo sapiens
tttctccttagtggctggtgacagta

SEQ ID NO: 57177 - DNA, 26 bp, Homo sapiens
ttctccttagtggctggtgacagtaa

SEQ ID NO: 57178 - DNA, 26 bp, Homo sapiens
tctccttagtggctggtgacagtaac

SEQ ID NO: 57179 - DNA, 26 bp, Homo sapiens
ctccttagtggctggtgacagtaact

SEQ ID NO: 57180 - DNA, 26 bp, Homo sapiens
tccttagtggctggtgacagtaactg

SEQ ID NO: 57181 - DNA, 26 bp, Homo sapiens
ccttagtggctggtgacagtaactgg

SEQ ID NO: 57182 - DNA, 26 bp, Homo sapiens
cttagtggctggtgacagtaactggt

SEQ ID NO: 57183 - DNA, 26 bp, Homo sapiens
ttagtggctggtgacagtaactggtg

SEQ ID NO: 57184 - DNA, 26 bp, Homo sapiens
tagtggctggtgacagtaactggtgt

SEQ ID NO: 57185 - DNA, 26 bp, Homo sapiens
agtggctggtgacagtaactggtgtt

SEQ ID NO: 57186 - DNA, 26 bp, Homo sapiens
gtggctggtgacagtaactggtgttt

SEQ ID NO: 57187 - DNA, 26 bp, Homo sapiens
tggctggtgacagtaactggtgttta

SEQ ID NO: 57188 - DNA, 26 bp, Homo sapiens
ggctggtgacagtaactggtgtttag

SEQ ID NO: 57189 - DNA, 26 bp, Homo sapiens
gctggtgacagtaactggtgtttaga

SEQ ID NO: 57190 - DNA, 26 bp, Homo sapiens
ctggtgacagtaactggtgtttagat

SEQ ID NO: 57191 - DNA, 26 bp, Homo sapiens
tggtgacagtaactggtgtttagatg

SEQ ID NO: 57192 - DNA, 26 bp, Homo sapiens
ggtgacagtaactggtgtttagatga

SEQ ID NO: 57193 - DNA, 26 bp, Homo sapiens
gtgacagtaactggtgtttagatgaa

SEQ ID NO: 57194 - DNA, 26 bp, Homo sapiens
tgacagtaactggtgtttagatgaag

SEQ ID NO: 57195 - DNA, 26 bp, Homo sapiens
gacagtaactggtgtttagatgaagg

SEQ ID NO: 57196 - DNA, 26 bp, Homo sapiens
acagtaactggtgtttagatgaaggt

SEQ ID NO: 57197 - DNA, 26 bp, Homo sapiens
cagtaactggtgtttagatgaaggtg

SEQ ID NO: 57198 - DNA, 26 bp, Homo sapiens
agtaactggtgtttagatgaaggtga

SEQ ID NO: 57199 - DNA, 26 bp, Homo sapiens
gtaactggtgtttagatgaaggtgac

SEQ ID NO: 57200 - DNA, 26 bp, Homo sapiens
taactggtgtttagatgaaggtgacc

SEQ ID NO: 57201 - DNA, 26 bp, Homo sapiens
aactggtgtttagatgaaggtgaccg

SEQ ID NO: 57202 - DNA, 26 bp, Homo sapiens
actggtgtttagatgaaggtgaccgt

SEQ ID NO: 57203 - DNA, 26 bp, Homo sapiens
ctggtgtttagatgaaggtgaccgtc

SEQ ID NO: 57204 - DNA, 26 bp, Homo sapiens
tggtgtttagatgaaggtgaccgtcg

SEQ ID NO: 57205 - DNA, 26 bp, Homo sapiens
ggtgtttagatgaaggtgaccgtcgc

SEQ ID NO: 57206 - DNA, 26 bp, Homo sapiens
gtgtttagatgaaggtgaccgtcgct

SEQ ID NO: 57207 - DNA, 26 bp, Homo sapiens
tgtttagatgaaggtgaccgtcgctg

SEQ ID NO: 57208 - DNA, 26 bp, Homo sapiens
gtttagatgaaggtgaccgtcgctgg

SEQ ID NO: 57209 - DNA, 26 bp, Homo sapiens
tttagatgaaggtgaccgtcgctgga

SEQ ID NO: 57210 - DNA, 26 bp, Homo sapiens
ttagatgaaggtgaccgtcgctggac

SEQ ID NO: 57211 - DNA, 26 bp, Homo sapiens
tagatgaaggtgaccgtcgctggact

SEQ ID NO: 57212 - DNA, 26 bp, Homo sapiens
agatgaaggtgaccgtcgctggactg

SEQ ID NO: 57213 - DNA, 26 bp, Homo sapiens
gatgaaggtgaccgtcgctggactgg

SEQ ID NO: 57214 - DNA, 26 bp, Homo sapiens
atgaaggtgaccgtcgctggactggc

SEQ ID NO: 57215 - DNA, 26 bp, Homo sapiens
tgaaggtgaccgtcgctggactggca

SEQ ID NO: 57216 - DNA, 26 bp, Homo sapiens
gaaggtgaccgtcgctggactggcat

SEQ ID NO: 57217 - DNA, 26 bp, Homo sapiens
aaggtgaccgtcgctggactggcatg

SEQ ID NO: 57218 - DNA, 26 bp, Homo sapiens
aggtgaccgtcgctggactggcatgt

SEQ ID NO: 57219 - DNA, 26 bp, Homo sapiens
ggtgaccgtcgctggactggcatgtg

SEQ ID NO: 57220 - DNA, 26 bp, Homo sapiens
gtgaccgtcgctggactggcatgtgg

SEQ ID NO: 57221 - DNA, 26 bp, Homo sapiens
tgaccgtcgctggactggcatgtggt

SEQ ID NO: 57222 - DNA, 26 bp, Homo sapiens
gaccgtcgctggactggcatgtggta

SEQ ID NO: 57223 - DNA, 26 bp, Homo sapiens
accgtcgctggactggcatgtggtac

SEQ ID NO: 57224 - DNA, 26 bp, Homo sapiens
ccgtcgctggactggcatgtggtacc

SEQ ID NO: 57225 - DNA, 26 bp, Homo sapiens
cgtcgctggactggcatgtggtacct

SEQ ID NO: 57226 - DNA, 26 bp, Homo sapiens
gtcgctggactggcatgtggtacctg

SEQ ID NO: 57227 - DNA, 26 bp, Homo sapiens
tcgctggactggcatgtggtacctga

SEQ ID NO: 57228 - DNA, 26 bp, Homo sapiens
cgctggactggcatgtggtacctgac

SEQ ID NO: 57229 - DNA, 26 bp, Homo sapiens
gctggactggcatgtggtacctgaca

SEQ ID NO: 57230 - DNA, 26 bp, Homo sapiens
ctggactggcatgtggtacctgacat

SEQ ID NO: 57231 - DNA, 26 bp, Homo sapiens
tggactggcatgtggtacctgacatt

SEQ ID NO: 57232 - DNA, 26 bp, Homo sapiens
ggactggcatgtggtacctgacattc

SEQ ID NO: 57233 - DNA, 26 bp, Homo sapiens
gactggcatgtggtacctgacattct

SEQ ID NO: 57234 - DNA, 26 bp, Homo sapiens
actggcatgtggtacctgacattctt

SEQ ID NO: 57235 - DNA, 26 bp, Homo sapiens
ctggcatgtggtacctgacattcttc

SEQ ID NO: 57236 - DNA, 26 bp, Homo sapiens
tggcatgtggtacctgacattcttcc

SEQ ID NO: 57237 - DNA, 26 bp, Homo sapiens
ggcatgtggtacctgacattcttcca

SEQ ID NO: 57238 - DNA, 26 bp, Homo sapiens
gcatgtggtacctgacattcttccag

SEQ ID NO: 57239 - DNA, 26 bp, Homo sapiens
catgtggtacctgacattcttccaga

SEQ ID NO: 57240 - DNA, 26 bp, Homo sapiens
atgtggtacctgacattcttccagaa

SEQ ID NO: 57241 - DNA, 26 bp, Homo sapiens
tgtggtacctgacattcttccagaac

SEQ ID NO: 57242 - DNA, 26 bp, Homo sapiens
gtggtacctgacattcttccagaacc

SEQ ID NO: 57243 - DNA, 26 bp, Homo sapiens
tggtacctgacattcttccagaacct

SEQ ID NO: 57244 - DNA, 26 bp, Homo sapiens
ggtacctgacattcttccagaacctt

SEQ ID NO: 57245 - DNA, 26 bp, Homo sapiens
gtacctgacattcttccagaaccttg

SEQ ID NO: 57246 - DNA, 26 bp, Homo sapiens
tacctgacattcttccagaaccttgt

SEQ ID NO: 57247 - DNA, 26 bp, Homo sapiens
acctgacattcttccagaaccttgtc

SEQ ID NO: 57248 - DNA, 26 bp, Homo sapiens
cctgacattcttccagaaccttgtct

SEQ ID NO: 57249 - DNA, 26 bp, Homo sapiens
ctgacattcttccagaaccttgtctt

SEQ ID NO: 57250 - DNA, 26 bp, Homo sapiens
tgacattcttccagaaccttgtcttt

SEQ ID NO: 57251 - DNA, 26 bp, Homo sapiens
gacattcttccagaaccttgtctttg

SEQ ID NO: 57252 - DNA, 26 bp, Homo sapiens
acattcttccagaaccttgtctttgc

SEQ ID NO: 57253 - DNA, 26 bp, Homo sapiens
cattcttccagaaccttgtctttgca

SEQ ID NO: 57254 - DNA, 26 bp, Homo sapiens
attcttccagaaccttgtctttgcag

SEQ ID NO: 57255 - DNA, 26 bp, Homo sapiens
ttcttccagaaccttgtctttgcaga

SEQ ID NO: 57256 - DNA, 26 bp, Homo sapiens
tcttccagaaccttgtctttgcagac

SEQ ID NO: 57257 - DNA, 26 bp, Homo sapiens
cttccagaaccttgtctttgcagact

SEQ ID NO: 57258 - DNA, 26 bp, Homo sapiens
ttccagaaccttgtctttgcagactg

SEQ ID NO: 57259 - DNA, 26 bp, Homo sapiens
tccagaaccttgtctttgcagactgt

SEQ ID NO: 57260 - DNA, 26 bp, Homo sapiens
ccagaaccttgtctttgcagactgtg

SEQ ID NO: 57261 - DNA, 26 bp, Homo sapiens
cagaaccttgtctttgcagactgtgg

SEQ ID NO: 57262 - DNA, 26 bp, Homo sapiens
agaaccttgtctttgcagactgtggt

SEQ ID NO: 57263 - DNA, 26 bp, Homo sapiens
gaaccttgtctttgcagactgtggtc

SEQ ID NO: 57264 - DNA, 26 bp, Homo sapiens
aaccttgtctttgcagactgtggtcc

SEQ ID NO: 57265 - DNA, 26 bp, Homo sapiens
accttgtctttgcagactgtggtccc

SEQ ID NO: 57266 - DNA, 26 bp, Homo sapiens
ccttgtctttgcagactgtggtccct

SEQ ID NO: 57267 - DNA, 26 bp, Homo sapiens
cttgtctttgcagactgtggtccctg

SEQ ID NO: 57268 - DNA, 26 bp, Homo sapiens
ttgtctttgcagactgtggtccctgt

SEQ ID NO: 57269 - DNA, 26 bp, Homo sapiens
tgtctttgcagactgtggtccctgtg

SEQ ID NO: 57270 - DNA, 26 bp, Homo sapiens
gtctttgcagactgtggtccctgtgt

SEQ ID NO: 57271 - DNA, 26 bp, Homo sapiens
tctttgcagactgtggtccctgtgta

SEQ ID NO: 57272 - DNA, 26 bp, Homo sapiens
ctttgcagactgtggtccctgtgtaa

SEQ ID NO: 57273 - DNA, 26 bp, Homo sapiens
tttgcagactgtggtccctgtgtaaa

SEQ ID NO: 57274 - DNA, 26 bp, Homo sapiens
ttgcagactgtggtccctgtgtaaag

SEQ ID NO: 57275 - DNA, 26 bp, Homo sapiens
tgcagactgtggtccctgtgtaaagt

SEQ ID NO: 57276 - DNA, 26 bp, Homo sapiens
gcagactgtggtccctgtgtaaagtc

SEQ ID NO: 57277 - DNA, 26 bp, Homo sapiens
cagactgtggtccctgtgtaaagtcc

SEQ ID NO: 57278 - DNA, 26 bp, Homo sapiens
agactgtggtccctgtgtaaagtccc

SEQ ID NO: 57279 - DNA, 26 bp, Homo sapiens
gactgtggtccctgtgtaaagtcccc

SEQ ID NO: 57280 - DNA, 26 bp, Homo sapiens
actgtggtccctgtgtaaagtcccct

SEQ ID NO: 57281 - DNA, 26 bp, Homo sapiens
ctgtggtccctgtgtaaagtcccctg

SEQ ID NO: 57282 - DNA, 26 bp, Homo sapiens
tgtggtccctgtgtaaagtcccctga

SEQ ID NO: 57283 - DNA, 26 bp, Homo sapiens
gtggtccctgtgtaaagtcccctgac

SEQ ID NO: 57284 - DNA, 26 bp, Homo sapiens
tggtccctgtgtaaagtcccctgacc

SEQ ID NO: 57285 - DNA, 26 bp, Homo sapiens
ggtccctgtgtaaagtcccctgacca

SEQ ID NO: 57286 - DNA, 26 bp, Homo sapiens
gtccctgtgtaaagtcccctgaccag

SEQ ID NO: 57287 - DNA, 26 bp, Homo sapiens
tccctgtgtaaagtcccctgaccagc

SEQ ID NO: 57288 - DNA, 26 bp, Homo sapiens
ccctgtgtaaagtcccctgaccagcg

SEQ ID NO: 57289 - DNA, 26 bp, Homo sapiens
cctgtgtaaagtcccctgaccagcgg

SEQ ID NO: 57290 - DNA, 26 bp, Homo sapiens
ctgtgtaaagtcccctgaccagcgga

SEQ ID NO: 57291 - DNA, 26 bp, Homo sapiens
tgtgtaaagtcccctgaccagcggat

SEQ ID NO: 57292 - DNA, 26 bp, Homo sapiens
gtgtaaagtcccctgaccagcggata

SEQ ID NO: 57293 - DNA, 26 bp, Homo sapiens
tgtaaagtcccctgaccagcggatag

SEQ ID NO: 57294 - DNA, 26 bp, Homo sapiens
gtaaagtcccctgaccagcggatagc

SEQ ID NO: 57295 - DNA, 26 bp, Homo sapiens
taaagtcccctgaccagcggatagcc

SEQ ID NO: 57296 - DNA, 26 bp, Homo sapiens
aaagtcccctgaccagcggatagccc

SEQ ID NO: 57297 - DNA, 26 bp, Homo sapiens
aagtcccctgaccagcggatagcccc

SEQ ID NO: 57298 - DNA, 26 bp, Homo sapiens
agtcccctgaccagcggatagcccca

SEQ ID NO: 57299 - DNA, 26 bp, Homo sapiens
gtcccctgaccagcggatagccccat

SEQ ID NO: 57300 - DNA, 26 bp, Homo sapiens
tcccctgaccagcggatagccccatg

SEQ ID NO: 57301 - DNA, 26 bp, Homo sapiens
cccctgaccagcggatagccccatgt

SEQ ID NO: 57302 - DNA, 26 bp, Homo sapiens
ccctgaccagcggatagccccatgtt

SEQ ID NO: 57303 - DNA, 26 bp, Homo sapiens
cctgaccagcggatagccccatgttt

SEQ ID NO: 57304 - DNA, 26 bp, Homo sapiens
ctgaccagcggatagccccatgtttc

SEQ ID NO: 57305 - DNA, 26 bp, Homo sapiens
tgaccagcggatagccccatgtttct

SEQ ID NO: 57306 - DNA, 26 bp, Homo sapiens
gaccagcggatagccccatgtttctg

SEQ ID NO: 57307 - DNA, 26 bp, Homo sapiens
accagcggatagccccatgtttctgc

SEQ ID NO: 57308 - DNA, 26 bp, Homo sapiens
ccagcggatagccccatgtttctgct

SEQ ID NO: 57309 - DNA, 26 bp, Homo sapiens
cagcggatagccccatgtttctgctt

SEQ ID NO: 57310 - DNA, 26 bp, Homo sapiens
agcggatagccccatgtttctgctta

SEQ ID NO: 57311 - DNA, 26 bp, Homo sapiens
gcggatagccccatgtttctgcttaa

SEQ ID NO: 57312 - DNA, 26 bp, Homo sapiens
cggatagccccatgtttctgcttaat

SEQ ID NO: 57313 - DNA, 26 bp, Homo sapiens
ggatagccccatgtttctgcttaatg

SEQ ID NO: 57314 - DNA, 26 bp, Homo sapiens
gatagccccatgtttctgcttaatga

SEQ ID NO: 57315 - DNA, 26 bp, Homo sapiens
atagccccatgtttctgcttaatgaa

SEQ ID NO: 57316 - DNA, 26 bp, Homo sapiens
tagccccatgtttctgcttaatgaat

SEQ ID NO: 57317 - DNA, 26 bp, Homo sapiens
agccccatgtttctgcttaatgaatt

SEQ ID NO: 57318 - DNA, 26 bp, Homo sapiens
gccccatgtttctgcttaatgaattt

SEQ ID NO: 57319 - DNA, 26 bp, Homo sapiens
ccccatgtttctgcttaatgaattta

SEQ ID NO: 57320 - DNA, 26 bp, Homo sapiens
cccatgtttctgcttaatgaatttaa

SEQ ID NO: 57321 - DNA, 26 bp, Homo sapiens
ccatgtttctgcttaatgaatttaat

SEQ ID NO: 57322 - DNA, 26 bp, Homo sapiens
catgtttctgcttaatgaatttaatc

SEQ ID NO: 57323 - DNA, 26 bp, Homo sapiens
atgtttctgcttaatgaatttaatcg

SEQ ID NO: 57324 - DNA, 26 bp, Homo sapiens
tgtttctgcttaatgaatttaatcga

SEQ ID NO: 57325 - DNA, 26 bp, Homo sapiens
gtttctgcttaatgaatttaatcgat

SEQ ID NO: 57326 - DNA, 26 bp, Homo sapiens
tttctgcttaatgaatttaatcgatt

SEQ ID NO: 57327 - DNA, 26 bp, Homo sapiens
ttctgcttaatgaatttaatcgattc

SEQ ID NO: 57328 - DNA, 26 bp, Homo sapiens
tctgcttaatgaatttaatcgattct

SEQ ID NO: 57329 - DNA, 26 bp, Homo sapiens
ctgcttaatgaatttaatcgattctg

SEQ ID NO: 57330 - DNA, 26 bp, Homo sapiens
tgcttaatgaatttaatcgattctgg

SEQ ID NO: 57331 - DNA, 26 bp, Homo sapiens
gcttaatgaatttaatcgattctggc

SEQ ID NO: 57332 - DNA, 26 bp, Homo sapiens
cttaatgaatttaatcgattctggca

SEQ ID NO: 57333 - DNA, 26 bp, Homo sapiens
ttaatgaatttaatcgattctggcat

SEQ ID NO: 57334 - DNA, 26 bp, Homo sapiens
taatgaatttaatcgattctggcatt

SEQ ID NO: 57335 - DNA, 26 bp, Homo sapiens
aatgaatttaatcgattctggcattt

SEQ ID NO: 57336 - DNA, 26 bp, Homo sapiens
atgaatttaatcgattctggcatttt

SEQ ID NO: 57337 - DNA, 26 bp, Homo sapiens
tgaatttaatcgattctggcattttc

SEQ ID NO: 57338 - DNA, 26 bp, Homo sapiens
gaatttaatcgattctggcattttct

SEQ ID NO: 57339 - DNA, 26 bp, Homo sapiens
aatttaatcgattctggcattttctc

SEQ ID NO: 57340 - DNA, 26 bp, Homo sapiens
atttaatcgattctggcattttctca

SEQ ID NO: 57341 - DNA, 26 bp, Homo sapiens
tttaatcgattctggcattttctcat

SEQ ID NO: 57342 - DNA, 26 bp, Homo sapiens
ttaatcgattctggcattttctcata

SEQ ID NO: 57343 - DNA, 26 bp, Homo sapiens
taatcgattctggcattttctcatag

SEQ ID NO: 57344 - DNA, 26 bp, Homo sapiens
aatcgattctggcattttctcatagt

SEQ ID NO: 57345 - DNA, 26 bp, Homo sapiens
atcgattctggcattttctcatagtc

SEQ ID NO: 57346 - DNA, 26 bp, Homo sapiens
tcgattctggcattttctcatagtct

SEQ ID NO: 57347 - DNA, 26 bp, Homo sapiens
cgattctggcattttctcatagtctt

SEQ ID NO: 57348 - DNA, 26 bp, Homo sapiens
gattctggcattttctcatagtcttg

SEQ ID NO: 57349 - DNA, 26 bp, Homo sapiens
attctggcattttctcatagtcttgg

SEQ ID NO: 57350 - DNA, 26 bp, Homo sapiens
ttctggcattttctcatagtcttgga

SEQ ID NO: 57351 - DNA, 26 bp, Homo sapiens
tctggcattttctcatagtcttggat

SEQ ID NO: 57352 - DNA, 26 bp, Homo sapiens
ctggcattttctcatagtcttggatt

SEQ ID NO: 57353 - DNA, 26 bp, Homo sapiens
tggcattttctcatagtcttggattt

SEQ ID NO: 57354 - DNA, 26 bp, Homo sapiens
ggcattttctcatagtcttggatttt

SEQ ID NO: 57355 - DNA, 26 bp, Homo sapiens
gcattttctcatagtcttggattttc

SEQ ID NO: 57356 - DNA, 26 bp, Homo sapiens
cattttctcatagtcttggattttct

SEQ ID NO: 57357 - DNA, 26 bp, Homo sapiens
attttctcatagtcttggattttctc

SEQ ID NO: 57358 - DNA, 26 bp, Homo sapiens
ttttctcatagtcttggattttctcc

SEQ ID NO: 57359 - DNA, 26 bp, Homo sapiens
tttctcatagtcttggattttctcca

SEQ ID NO: 57360 - DNA, 26 bp, Homo sapiens
ttctcatagtcttggattttctccag

SEQ ID NO: 57361 - DNA, 26 bp, Homo sapiens
tctcatagtcttggattttctccagc

SEQ ID NO: 57362 - DNA, 26 bp, Homo sapiens
ctcatagtcttggattttctccagct

SEQ ID NO: 57363 - DNA, 26 bp, Homo sapiens
tcatagtcttggattttctccagctc

SEQ ID NO: 57364 - DNA, 26 bp, Homo sapiens
catagtcttggattttctccagctca

SEQ ID NO: 57365 - DNA, 26 bp, Homo sapiens
atagtcttggattttctccagctcaa

SEQ ID NO: 57366 - DNA, 26 bp, Homo sapiens
tagtcttggattttctccagctcaag

SEQ ID NO: 57367 - DNA, 26 bp, Homo sapiens
agtcttggattttctccagctcaagc

SEQ ID NO: 57368 - DNA, 26 bp, Homo sapiens
gtcttggattttctccagctcaagca

SEQ ID NO: 57369 - DNA, 26 bp, Homo sapiens
tcttggattttctccagctcaagcag

SEQ ID NO: 57370 - DNA, 26 bp, Homo sapiens
cttggattttctccagctcaagcagg

SEQ ID NO: 57371 - DNA, 26 bp, Homo sapiens
ttggattttctccagctcaagcagga

SEQ ID NO: 57372 - DNA, 26 bp, Homo sapiens
tggattttctccagctcaagcaggac

SEQ ID NO: 57373 - DNA, 26 bp, Homo sapiens
ggattttctccagctcaagcaggaca

SEQ ID NO: 57374 - DNA, 26 bp, Homo sapiens
gattttctccagctcaagcaggacaa

SEQ ID NO: 57375 - DNA, 26 bp, Homo sapiens
attttctccagctcaagcaggacaac

SEQ ID NO: 57376 - DNA, 26 bp, Homo sapiens
ttttctccagctcaagcaggacaact

SEQ ID NO: 57377 - DNA, 26 bp, Homo sapiens
tttctccagctcaagcaggacaactt

SEQ ID NO: 57378 - DNA, 26 bp, Homo sapiens
ttctccagctcaagcaggacaacttt

SEQ ID NO: 57379 - DNA, 26 bp, Homo sapiens
tctccagctcaagcaggacaacttta

SEQ ID NO: 57380 - DNA, 26 bp, Homo sapiens
ctccagctcaagcaggacaactttaa

SEQ ID NO: 57381 - DNA, 26 bp, Homo sapiens
tccagctcaagcaggacaactttaat

SEQ ID NO: 57382 - DNA, 26 bp, Homo sapiens
ccagctcaagcaggacaactttaatt

SEQ ID NO: 57383 - DNA, 26 bp, Homo sapiens
cagctcaagcaggacaactttaattc

SEQ ID NO: 57384 - DNA, 26 bp, Homo sapiens
agctcaagcaggacaactttaattcc

SEQ ID NO: 57385 - DNA, 26 bp, Homo sapiens
gctcaagcaggacaactttaattcca

SEQ ID NO: 57386 - DNA, 26 bp, Homo sapiens
ctcaagcaggacaactttaattccat

SEQ ID NO: 57387 - DNA, 26 bp, Homo sapiens
tcaagcaggacaactttaattccatc

SEQ ID NO: 57388 - DNA, 26 bp, Homo sapiens
caagcaggacaactttaattccatcc

SEQ ID NO: 57389 - DNA, 26 bp, Homo sapiens
aagcaggacaactttaattccatcct

SEQ ID NO: 57390 - DNA, 26 bp, Homo sapiens
agcaggacaactttaattccatcctg

SEQ ID NO: 57391 - DNA, 26 bp, Homo sapiens
gcaggacaactttaattccatcctga

SEQ ID NO: 57392 - DNA, 26 bp, Homo sapiens
caggacaactttaattccatcctgaa

SEQ ID NO: 57393 - DNA, 26 bp, Homo sapiens
aggacaactttaattccatcctgaac

SEQ ID NO: 57394 - DNA, 26 bp, Homo sapiens
ggacaactttaattccatcctgaaca

SEQ ID NO: 57395 - DNA, 26 bp, Homo sapiens
gacaactttaattccatcctgaacaa

SEQ ID NO: 57396 - DNA, 26 bp, Homo sapiens
acaactttaattccatcctgaacaag

SEQ ID NO: 57397 - DNA, 26 bp, Homo sapiens
caactttaattccatcctgaacaaga

SEQ ID NO: 57398 - DNA, 26 bp, Homo sapiens
aactttaattccatcctgaacaagag

SEQ ID NO: 57399 - DNA, 26 bp, Homo sapiens
actttaattccatcctgaacaagagc

SEQ ID NO: 57400 - DNA, 26 bp, Homo sapiens
ctttaattccatcctgaacaagagca

SEQ ID NO: 57401 - DNA, 26 bp, Homo sapiens
tttaattccatcctgaacaagagcat

SEQ ID NO: 57402 - DNA, 26 bp, Homo sapiens
ttaattccatcctgaacaagagcatt

SEQ ID NO: 57403 - DNA, 26 bp, Homo sapiens
taattccatcctgaacaagagcatta

SEQ ID NO: 57404 - DNA, 26 bp, Homo sapiens
aattccatcctgaacaagagcattat

SEQ ID NO: 57405 - DNA, 26 bp, Homo sapiens
attccatcctgaacaagagcattata

SEQ ID NO: 57406 - DNA, 26 bp, Homo sapiens
ttccatcctgaacaagagcattatac

SEQ ID NO: 57407 - DNA, 26 bp, Homo sapiens
tccatcctgaacaagagcattataca

SEQ ID NO: 57408 - DNA, 26 bp, Homo sapiens
ccatcctgaacaagagcattatacat

SEQ ID NO: 57409 - DNA, 26 bp, Homo sapiens
catcctgaacaagagcattatacatg

SEQ ID NO: 57410 - DNA, 26 bp, Homo sapiens
atcctgaacaagagcattatacatgg

SEQ ID NO: 57411 - DNA, 26 bp, Homo sapiens
tcctgaacaagagcattatacatggc

SEQ ID NO: 57412 - DNA, 26 bp, Homo sapiens
cctgaacaagagcattatacatggct

SEQ ID NO: 57413 - DNA, 26 bp, Homo sapiens
ctgaacaagagcattatacatggcta

SEQ ID NO: 57414 - DNA, 26 bp, Homo sapiens
tgaacaagagcattatacatggctat

SEQ ID NO: 57415 - DNA, 26 bp, Homo sapiens
gaacaagagcattatacatggctatt

SEQ ID NO: 57416 - DNA, 26 bp, Homo sapiens
aacaagagcattatacatggctattt

SEQ ID NO: 57417 - DNA, 26 bp, Homo sapiens
acaagagcattatacatggctatttg

SEQ ID NO: 57418 - DNA, 26 bp, Homo sapiens
caagagcattatacatggctatttgc

SEQ ID NO: 57419 - DNA, 26 bp, Homo sapiens
aagagcattatacatggctatttgct

SEQ ID NO: 57420 - DNA, 26 bp, Homo sapiens
agagcattatacatggctatttgctc

SEQ ID NO: 57421 - DNA, 26 bp, Homo sapiens
gagcattatacatggctatttgctct

SEQ ID NO: 57422 - DNA, 26 bp, Homo sapiens
agcattatacatggctatttgctctt

SEQ ID NO: 57423 - DNA, 26 bp, Homo sapiens
gcattatacatggctatttgctcttc

SEQ ID NO: 57424 - DNA, 26 bp, Homo sapiens
cattatacatggctatttgctcttca

SEQ ID NO: 57425 - DNA, 26 bp, Homo sapiens
attatacatggctatttgctcttcag

SEQ ID NO: 57426 - DNA, 26 bp, Homo sapiens
ttatacatggctatttgctcttcaga

SEQ ID NO: 57427 - DNA, 26 bp, Homo sapiens
tatacatggctatttgctcttcagat

SEQ ID NO: 57428 - DNA, 26 bp, Homo sapiens
atacatggctatttgctcttcagatg

SEQ ID NO: 57429 - DNA, 26 bp, Homo sapiens
tacatggctatttgctcttcagatga

SEQ ID NO: 57430 - DNA, 26 bp, Homo sapiens
acatggctatttgctcttcagatgaa

SEQ ID NO: 57431 - DNA, 26 bp, Homo sapiens
catggctatttgctcttcagatgaac

SEQ ID NO: 57432 - DNA, 26 bp, Homo sapiens
atggctatttgctcttcagatgaacc

SEQ ID NO: 57433 - DNA, 26 bp, Homo sapiens
tggctatttgctcttcagatgaacca

SEQ ID NO: 57434 - DNA, 26 bp, Homo sapiens
ggctatttgctcttcagatgaaccac

SEQ ID NO: 57435 - DNA, 26 bp, Homo sapiens
gctatttgctcttcagatgaaccacc

SEQ ID NO: 57436 - DNA, 26 bp, Homo sapiens
ctatttgctcttcagatgaaccaccc

SEQ ID NO: 57437 - DNA, 26 bp, Homo sapiens
tatttgctcttcagatgaaccaccca

SEQ ID NO: 57438 - DNA, 26 bp, Homo sapiens
atttgctcttcagatgaaccacccag

SEQ ID NO: 57439 - DNA, 26 bp, Homo sapiens
tttgctcttcagatgaaccacccagc

SEQ ID NO: 57440 - DNA, 26 bp, Homo sapiens
ttgctcttcagatgaaccacccagcc

SEQ ID NO: 57441 - DNA, 26 bp, Homo sapiens
tgctcttcagatgaaccacccagcca

SEQ ID NO: 57442 - DNA, 26 bp, Homo sapiens
gctcttcagatgaaccacccagccag

SEQ ID NO: 57443 - DNA, 26 bp, Homo sapiens
ctcttcagatgaaccacccagccagc

SEQ ID NO: 57444 - DNA, 26 bp, Homo sapiens
tcttcagatgaaccacccagccagct

SEQ ID NO: 57445 - DNA, 26 bp, Homo sapiens
cttcagatgaaccacccagccagctg

SEQ ID NO: 57446 - DNA, 26 bp, Homo sapiens
ttcagatgaaccacccagccagctga

SEQ ID NO: 57447 - DNA, 26 bp, Homo sapiens
tcagatgaaccacccagccagctgaa

SEQ ID NO: 57448 - DNA, 26 bp, Homo sapiens
cagatgaaccacccagccagctgaag

SEQ ID NO: 57449 - DNA, 26 bp, Homo sapiens
agatgaaccacccagccagctgaagc

SEQ ID NO: 57450 - DNA, 26 bp, Homo sapiens
gatgaaccacccagccagctgaagcc

SEQ ID NO: 57451 - DNA, 26 bp, Homo sapiens
atgaaccacccagccagctgaagcct

SEQ ID NO: 57452 - DNA, 26 bp, Homo sapiens
tgaaccacccagccagctgaagcctg

SEQ ID NO: 57453 - DNA, 26 bp, Homo sapiens
gaaccacccagccagctgaagcctga

SEQ ID NO: 57454 - DNA, 26 bp, Homo sapiens
aaccacccagccagctgaagcctgat

SEQ ID NO: 57455 - DNA, 26 bp, Homo sapiens
accacccagccagctgaagcctgatg

SEQ ID NO: 57456 - DNA, 26 bp, Homo sapiens
ccacccagccagctgaagcctgatgt

SEQ ID NO: 57457 - DNA, 26 bp, Homo sapiens
cacccagccagctgaagcctgatgtt

SEQ ID NO: 57458 - DNA, 26 bp, Homo sapiens
acccagccagctgaagcctgatgttt

SEQ ID NO: 57459 - DNA, 26 bp, Homo sapiens
cccagccagctgaagcctgatgtttc

SEQ ID NO: 57460 - DNA, 26 bp, Homo sapiens
ccagccagctgaagcctgatgtttct

SEQ ID NO: 57461 - DNA, 26 bp, Homo sapiens
cagccagctgaagcctgatgtttctc

SEQ ID NO: 57462 - DNA, 26 bp, Homo sapiens
agccagctgaagcctgatgtttctct

SEQ ID NO: 57463 - DNA, 26 bp, Homo sapiens
gccagctgaagcctgatgtttctctg

SEQ ID NO: 57464 - DNA, 26 bp, Homo sapiens
ccagctgaagcctgatgtttctctga

SEQ ID NO: 57465 - DNA, 26 bp, Homo sapiens
cagctgaagcctgatgtttctctgac

SEQ ID NO: 57466 - DNA, 26 bp, Homo sapiens
agctgaagcctgatgtttctctgact

SEQ ID NO: 57467 - DNA, 26 bp, Homo sapiens
gctgaagcctgatgtttctctgacta

SEQ ID NO: 57468 - DNA, 26 bp, Homo sapiens
ctgaagcctgatgtttctctgactaa

SEQ ID NO: 57469 - DNA, 26 bp, Homo sapiens
tgaagcctgatgtttctctgactaaa

SEQ ID NO: 57470 - DNA, 26 bp, Homo sapiens
gaagcctgatgtttctctgactaaaa

SEQ ID NO: 57471 - DNA, 26 bp, Homo sapiens
aagcctgatgtttctctgactaaaat

SEQ ID NO: 57472 - DNA, 26 bp, Homo sapiens
agcctgatgtttctctgactaaaatg

SEQ ID NO: 57473 - DNA, 26 bp, Homo sapiens
gcctgatgtttctctgactaaaatga

SEQ ID NO: 57474 - DNA, 26 bp, Homo sapiens
cctgatgtttctctgactaaaatgat

SEQ ID NO: 57475 - DNA, 26 bp, Homo sapiens
ctgatgtttctctgactaaaatgata

SEQ ID NO: 57476 - DNA, 26 bp, Homo sapiens
tgatgtttctctgactaaaatgataa

SEQ ID NO: 57477 - DNA, 26 bp, Homo sapiens
gatgtttctctgactaaaatgataat

SEQ ID NO: 57478 - DNA, 26 bp, Homo sapiens
atgtttctctgactaaaatgataatc

SEQ ID NO: 57479 - DNA, 26 bp, Homo sapiens
tgtttctctgactaaaatgataatca

SEQ ID NO: 57480 - DNA, 26 bp, Homo sapiens
gtttctctgactaaaatgataatcag

SEQ ID NO: 57481 - DNA, 26 bp, Homo sapiens
tttctctgactaaaatgataatcagt

SEQ ID NO: 57482 - DNA, 26 bp, Homo sapiens
ttctctgactaaaatgataatcagtc

SEQ ID NO: 57483 - DNA, 26 bp, Homo sapiens
tctctgactaaaatgataatcagtct

SEQ ID NO: 57484 - DNA, 26 bp, Homo sapiens
ctctgactaaaatgataatcagtctt

SEQ ID NO: 57485 - DNA, 26 bp, Homo sapiens
tctgactaaaatgataatcagtcttc

SEQ ID NO: 57486 - DNA, 26 bp, Homo sapiens
ctgactaaaatgataatcagtcttct

SEQ ID NO: 57487 - DNA, 26 bp, Homo sapiens
tgactaaaatgataatcagtcttctg

SEQ ID NO: 57488 - DNA, 26 bp, Homo sapiens
gactaaaatgataatcagtcttctgc

SEQ ID NO: 57489 - DNA, 26 bp, Homo sapiens
actaaaatgataatcagtcttctgct

SEQ ID NO: 57490 - DNA, 26 bp, Homo sapiens
ctaaaatgataatcagtcttctgctt

SEQ ID NO: 57491 - DNA, 26 bp, Homo sapiens
taaaatgataatcagtcttctgcttt

SEQ ID NO: 57492 - DNA, 26 bp, Homo sapiens
aaaatgataatcagtcttctgctttt

SEQ ID NO: 57493 - DNA, 26 bp, Homo sapiens
aaatgataatcagtcttctgcttttc

SEQ ID NO: 57494 - DNA, 26 bp, Homo sapiens
aatgataatcagtcttctgcttttct

SEQ ID NO: 57495 - DNA, 26 bp, Homo sapiens
atgataatcagtcttctgcttttctt

SEQ ID NO: 57496 - DNA, 26 bp, Homo sapiens
tgataatcagtcttctgcttttcttt

SEQ ID NO: 57497 - DNA, 26 bp, Homo sapiens
gataatcagtcttctgcttttcttta

SEQ ID NO: 57498 - DNA, 26 bp, Homo sapiens
ataatcagtcttctgcttttctttac

SEQ ID NO: 57499 - DNA, 26 bp, Homo sapiens
taatcagtcttctgcttttctttacg

SEQ ID NO: 57500 - DNA, 26 bp, Homo sapiens
aatcagtcttctgcttttctttacgt

SEQ ID NO: 57501 - DNA, 26 bp, Homo sapiens
atcagtcttctgcttttctttacgtt

SEQ ID NO: 57502 - DNA, 26 bp, Homo sapiens
tcagtcttctgcttttctttacgttt

SEQ ID NO: 57503 - DNA, 26 bp, Homo sapiens
cagtcttctgcttttctttacgtttt

SEQ ID NO: 57504 - DNA, 26 bp, Homo sapiens
agtcttctgcttttctttacgttttc

SEQ ID NO: 57505 - DNA, 26 bp, Homo sapiens
gtcttctgcttttctttacgttttca

SEQ ID NO: 57506 - DNA, 26 bp, Homo sapiens
tcttctgcttttctttacgttttcat

SEQ ID NO: 57507 - DNA, 26 bp, Homo sapiens
cttctgcttttctttacgttttcatt

SEQ ID NO: 57508 - DNA, 26 bp, Homo sapiens
ttctgcttttctttacgttttcatta

SEQ ID NO: 57509 - DNA, 26 bp, Homo sapiens
tctgcttttctttacgttttcattaa

SEQ ID NO: 57510 - DNA, 26 bp, Homo sapiens
ctgcttttctttacgttttcattaat

SEQ ID NO: 57511 - DNA, 26 bp, Homo sapiens
tgcttttctttacgttttcattaatg

SEQ ID NO: 57512 - DNA, 26 bp, Homo sapiens
gcttttctttacgttttcattaatga

SEQ ID NO: 57513 - DNA, 26 bp, Homo sapiens
cttttctttacgttttcattaatgac

SEQ ID NO: 57514 - DNA, 26 bp, Homo sapiens
ttttctttacgttttcattaatgacc

SEQ ID NO: 57515 - DNA, 26 bp, Homo sapiens
tttctttacgttttcattaatgacct

SEQ ID NO: 57516 - DNA, 26 bp, Homo sapiens
ttctttacgttttcattaatgacctc

SEQ ID NO: 57517 - DNA, 26 bp, Homo sapiens
tctttacgttttcattaatgacctca

SEQ ID NO: 57518 - DNA, 26 bp, Homo sapiens
ctttacgttttcattaatgacctcaa

SEQ ID NO: 57519 - DNA, 26 bp, Homo sapiens
tttacgttttcattaatgacctcaac

SEQ ID NO: 57520 - DNA, 26 bp, Homo sapiens
ttacgttttcattaatgacctcaaca

SEQ ID NO: 57521 - DNA, 26 bp, Homo sapiens
tacgttttcattaatgacctcaacaa

SEQ ID NO: 57522 - DNA, 26 bp, Homo sapiens
acgttttcattaatgacctcaacaat

SEQ ID NO: 57523 - DNA, 26 bp, Homo sapiens
cgttttcattaatgacctcaacaatg

SEQ ID NO: 57524 - DNA, 26 bp, Homo sapiens
gttttcattaatgacctcaacaatgt

SEQ ID NO: 57525 - DNA, 26 bp, Homo sapiens
ttttcattaatgacctcaacaatgtc

SEQ ID NO: 57526 - DNA, 26 bp, Homo sapiens
tttcattaatgacctcaacaatgtct

SEQ ID NO: 57527 - DNA, 26 bp, Homo sapiens
ttcattaatgacctcaacaatgtctt

SEQ ID NO: 57528 - DNA, 26 bp, Homo sapiens
tcattaatgacctcaacaatgtcttc

SEQ ID NO: 57529 - DNA, 26 bp, Homo sapiens
cattaatgacctcaacaatgtcttcc

SEQ ID NO: 57530 - DNA, 26 bp, Homo sapiens
attaatgacctcaacaatgtcttccc

SEQ ID NO: 57531 - DNA, 26 bp, Homo sapiens
ttaatgacctcaacaatgtcttcccc

SEQ ID NO: 57532 - DNA, 26 bp, Homo sapiens
taatgacctcaacaatgtcttcccca

SEQ ID NO: 57533 - DNA, 26 bp, Homo sapiens
aatgacctcaacaatgtcttccccaa

SEQ ID NO: 57534 - DNA, 26 bp, Homo sapiens
atgacctcaacaatgtcttccccaac

SEQ ID NO: 57535 - DNA, 26 bp, Homo sapiens
tgacctcaacaatgtcttccccaacg

SEQ ID NO: 57536 - DNA, 26 bp, Homo sapiens
gacctcaacaatgtcttccccaacgt

SEQ ID NO: 57537 - DNA, 26 bp, Homo sapiens
acctcaacaatgtcttccccaacgta

SEQ ID NO: 57538 - DNA, 26 bp, Homo sapiens
cctcaacaatgtcttccccaacgtag

SEQ ID NO: 57539 - DNA, 26 bp, Homo sapiens
ctcaacaatgtcttccccaacgtagt

SEQ ID NO: 57540 - DNA, 26 bp, Homo sapiens
tcaacaatgtcttccccaacgtagtc

SEQ ID NO: 57541 - DNA, 26 bp, Homo sapiens
caacaatgtcttccccaacgtagtca

SEQ ID NO: 57542 - DNA, 26 bp, Homo sapiens
aacaatgtcttccccaacgtagtcat

SEQ ID NO: 57543 - DNA, 26 bp, Homo sapiens
acaatgtcttccccaacgtagtcatc

SEQ ID NO: 57544 - DNA, 26 bp, Homo sapiens
caatgtcttccccaacgtagtcatcc

SEQ ID NO: 57545 - DNA, 26 bp, Homo sapiens
aatgtcttccccaacgtagtcatccc

SEQ ID NO: 57546 - DNA, 26 bp, Homo sapiens
atgtcttccccaacgtagtcatccct

SEQ ID NO: 57547 - DNA, 26 bp, Homo sapiens
tgtcttccccaacgtagtcatccctt

SEQ ID NO: 57548 - DNA, 26 bp, Homo sapiens
gtcttccccaacgtagtcatcccttc

SEQ ID NO: 57549 - DNA, 26 bp, Homo sapiens
tcttccccaacgtagtcatcccttcc

SEQ ID NO: 57550 - DNA, 26 bp, Homo sapiens
cttccccaacgtagtcatcccttcca

SEQ ID NO: 57551 - DNA, 26 bp, Homo sapiens
ttccccaacgtagtcatcccttccat

SEQ ID NO: 57552 - DNA, 26 bp, Homo sapiens
tccccaacgtagtcatcccttccata

SEQ ID NO: 57553 - DNA, 26 bp, Homo sapiens
ccccaacgtagtcatcccttccataa

SEQ ID NO: 57554 - DNA, 26 bp, Homo sapiens
cccaacgtagtcatcccttccataaa

SEQ ID NO: 57555 - DNA, 26 bp, Homo sapiens
ccaacgtagtcatcccttccataaat

SEQ ID NO: 57556 - DNA, 26 bp, Homo sapiens
caacgtagtcatcccttccataaatg

SEQ ID NO: 57557 - DNA, 26 bp, Homo sapiens
aacgtagtcatcccttccataaatga

SEQ ID NO: 57558 - DNA, 26 bp, Homo sapiens
acgtagtcatcccttccataaatgaa

SEQ ID NO: 57559 - DNA, 26 bp, Homo sapiens
cgtagtcatcccttccataaatgaac

SEQ ID NO: 57560 - DNA, 26 bp, Homo sapiens
gtagtcatcccttccataaatgaaca

SEQ ID NO: 57561 - DNA, 26 bp, Homo sapiens
tagtcatcccttccataaatgaacag

SEQ ID NO: 57562 - DNA, 26 bp, Homo sapiens
agtcatcccttccataaatgaacagc

SEQ ID NO: 57563 - DNA, 26 bp, Homo sapiens
gtcatcccttccataaatgaacagct

SEQ ID NO: 57564 - DNA, 26 bp, Homo sapiens
tcatcccttccataaatgaacagctt

SEQ ID NO: 57565 - DNA, 26 bp, Homo sapiens
catcccttccataaatgaacagctta

SEQ ID NO: 57566 - DNA, 26 bp, Homo sapiens
atcccttccataaatgaacagcttat

SEQ ID NO: 57567 - DNA, 26 bp, Homo sapiens
tcccttccataaatgaacagcttata

SEQ ID NO: 57568 - DNA, 26 bp, Homo sapiens
cccttccataaatgaacagcttatat

SEQ ID NO: 57569 - DNA, 26 bp, Homo sapiens
ccttccataaatgaacagcttatatc

SEQ ID NO: 57570 - DNA, 26 bp, Homo sapiens
cttccataaatgaacagcttatatcc

SEQ ID NO: 57571 - DNA, 26 bp, Homo sapiens
ttccataaatgaacagcttatatcca

SEQ ID NO: 57572 - DNA, 26 bp, Homo sapiens
tccataaatgaacagcttatatccac

SEQ ID NO: 57573 - DNA, 26 bp, Homo sapiens
ccataaatgaacagcttatatccaca

SEQ ID NO: 57574 - DNA, 26 bp, Homo sapiens
cataaatgaacagcttatatccacac

SEQ ID NO: 57575 - DNA, 26 bp, Homo sapiens
ataaatgaacagcttatatccacact

SEQ ID NO: 57576 - DNA, 26 bp, Homo sapiens
taaatgaacagcttatatccacactg

SEQ ID NO: 57577 - DNA, 26 bp, Homo sapiens
aaatgaacagcttatatccacactgt

SEQ ID NO: 57578 - DNA, 26 bp, Homo sapiens
aatgaacagcttatatccacactgtt

SEQ ID NO: 57579 - DNA, 26 bp, Homo sapiens
atgaacagcttatatccacactgttt

SEQ ID NO: 57580 - DNA, 26 bp, Homo sapiens
tgaacagcttatatccacactgtttt

SEQ ID NO: 57581 - DNA, 26 bp, Homo sapiens
gaacagcttatatccacactgttttt

SEQ ID NO: 57582 - DNA, 26 bp, Homo sapiens
aacagcttatatccacactgtttttc

SEQ ID NO: 57583 - DNA, 26 bp, Homo sapiens
acagcttatatccacactgtttttcc

SEQ ID NO: 57584 - DNA, 26 bp, Homo sapiens
cagcttatatccacactgtttttcca

SEQ ID NO: 57585 - DNA, 26 bp, Homo sapiens
agcttatatccacactgtttttccaa

SEQ ID NO: 57586 - DNA, 26 bp, Homo sapiens
gcttatatccacactgtttttccaag

SEQ ID NO: 57587 - DNA, 26 bp, Homo sapiens
cttatatccacactgtttttccaaga

SEQ ID NO: 57588 - DNA, 26 bp, Homo sapiens
ttatatccacactgtttttccaagac

SEQ ID NO: 57589 - DNA, 26 bp, Homo sapiens
tatatccacactgtttttccaagacc

SEQ ID NO: 57590 - DNA, 26 bp, Homo sapiens
atatccacactgtttttccaagacct

SEQ ID NO: 57591 - DNA, 26 bp, Homo sapiens
tatccacactgtttttccaagacctc

SEQ ID NO: 57592 - DNA, 26 bp, Homo sapiens
atccacactgtttttccaagacctca

SEQ ID NO: 57593 - DNA, 26 bp, Homo sapiens
tccacactgtttttccaagacctcag

SEQ ID NO: 57594 - DNA, 26 bp, Homo sapiens
ccacactgtttttccaagacctcagg

SEQ ID NO: 57595 - DNA, 26 bp, Homo sapiens
cacactgtttttccaagacctcaggc

SEQ ID NO: 57596 - DNA, 26 bp, Homo sapiens
acactgtttttccaagacctcaggca

SEQ ID NO: 57597 - DNA, 26 bp, Homo sapiens
cactgtttttccaagacctcaggcaa

SEQ ID NO: 57598 - DNA, 26 bp, Homo sapiens
actgtttttccaagacctcaggcaag

SEQ ID NO: 57599 - DNA, 26 bp, Homo sapiens
ctgtttttccaagacctcaggcaaga

SEQ ID NO: 57600 - DNA, 26 bp, Homo sapiens
tgtttttccaagacctcaggcaagac

SEQ ID NO: 57601 - DNA, 26 bp, Homo sapiens
gtttttccaagacctcaggcaagact

SEQ ID NO: 57602 - DNA, 26 bp, Homo sapiens
tttttccaagacctcaggcaagactt

SEQ ID NO: 57603 - DNA, 26 bp, Homo sapiens
ttttccaagacctcaggcaagacttt

SEQ ID NO: 57604 - DNA, 26 bp, Homo sapiens
tttccaagacctcaggcaagacttta

SEQ ID NO: 57605 - DNA, 26 bp, Homo sapiens
ttccaagacctcaggcaagactttaa

SEQ ID NO: 57606 - DNA, 26 bp, Homo sapiens
tccaagacctcaggcaagactttaaa

SEQ ID NO: 57607 - DNA, 26 bp, Homo sapiens
ccaagacctcaggcaagactttaaac

SEQ ID NO: 57608 - DNA, 26 bp, Homo sapiens
caagacctcaggcaagactttaaaca

SEQ ID NO: 57609 - DNA, 26 bp, Homo sapiens
aagacctcaggcaagactttaaacac

SEQ ID NO: 57610 - DNA, 26 bp, Homo sapiens
agacctcaggcaagactttaaacaca

SEQ ID NO: 57611 - DNA, 26 bp, Homo sapiens
gacctcaggcaagactttaaacacaa

SEQ ID NO: 57612 - DNA, 26 bp, Homo sapiens
acctcaggcaagactttaaacacaaa

SEQ ID NO: 57613 - DNA, 26 bp, Homo sapiens
cctcaggcaagactttaaacacaaaa

SEQ ID NO: 57614 - DNA, 26 bp, Homo sapiens
ctcaggcaagactttaaacacaaaaa

SEQ ID NO: 57615 - DNA, 26 bp, Homo sapiens
tcaggcaagactttaaacacaaaaat

SEQ ID NO: 57616 - DNA, 26 bp, Homo sapiens
caggcaagactttaaacacaaaaata

SEQ ID NO: 57617 - DNA, 26 bp, Homo sapiens
aggcaagactttaaacacaaaaatat

SEQ ID NO: 57618 - DNA, 26 bp, Homo sapiens
ggcaagactttaaacacaaaaatatc

SEQ ID NO: 57619 - DNA, 26 bp, Homo sapiens
gcaagactttaaacacaaaaatatca

SEQ ID NO: 57620 - DNA, 26 bp, Homo sapiens
caagactttaaacacaaaaatatcac

SEQ ID NO: 57621 - DNA, 26 bp, Homo sapiens
aagactttaaacacaaaaatatcaca

SEQ ID NO: 57622 - DNA, 26 bp, Homo sapiens
agactttaaacacaaaaatatcacag

SEQ ID NO: 57623 - DNA, 26 bp, Homo sapiens
gactttaaacacaaaaatatcacagt

SEQ ID NO: 57624 - DNA, 26 bp, Homo sapiens
actttaaacacaaaaatatcacagtc

SEQ ID NO: 57625 - DNA, 26 bp, Homo sapiens
ctttaaacacaaaaatatcacagtca

SEQ ID NO: 57626 - DNA, 26 bp, Homo sapiens
tttaaacacaaaaatatcacagtcag

SEQ ID NO: 57627 - DNA, 26 bp, Homo sapiens
ttaaacacaaaaatatcacagtcaga

SEQ ID NO: 57628 - DNA, 26 bp, Homo sapiens
taaacacaaaaatatcacagtcagag

SEQ ID NO: 57629 - DNA, 26 bp, Homo sapiens
aaacacaaaaatatcacagtcagagg

SEQ ID NO: 57630 - DNA, 26 bp, Homo sapiens
aacacaaaaatatcacagtcagaggt

SEQ ID NO: 57631 - DNA, 26 bp, Homo sapiens
acacaaaaatatcacagtcagaggta

SEQ ID NO: 57632 - DNA, 26 bp, Homo sapiens
cacaaaaatatcacagtcagaggtag

SEQ ID NO: 57633 - DNA, 26 bp, Homo sapiens
acaaaaatatcacagtcagaggtaga

SEQ ID NO: 57634 - DNA, 26 bp, Homo sapiens
caaaaatatcacagtcagaggtagac

SEQ ID NO: 57635 - DNA, 26 bp, Homo sapiens
aaaaatatcacagtcagaggtagacc

SEQ ID NO: 57636 - DNA, 26 bp, Homo sapiens
aaaatatcacagtcagaggtagaccc

SEQ ID NO: 57637 - DNA, 26 bp, Homo sapiens
aaatatcacagtcagaggtagaccct

SEQ ID NO: 57638 - DNA, 26 bp, Homo sapiens
aatatcacagtcagaggtagaccctt

SEQ ID NO: 57639 - DNA, 26 bp, Homo sapiens
atatcacagtcagaggtagacccttc

SEQ ID NO: 57640 - DNA, 26 bp, Homo sapiens
tatcacagtcagaggtagacccttcc

SEQ ID NO: 57641 - DNA, 26 bp, Homo sapiens
atcacagtcagaggtagacccttccc

SEQ ID NO: 57642 - DNA, 26 bp, Homo sapiens
tcacagtcagaggtagacccttcccc

SEQ ID NO: 57643 - DNA, 26 bp, Homo sapiens
cacagtcagaggtagacccttcccca

SEQ ID NO: 57644 - DNA, 26 bp, Homo sapiens
acagtcagaggtagacccttccccaa

SEQ ID NO: 57645 - DNA, 26 bp, Homo sapiens
cagtcagaggtagacccttccccaac

SEQ ID NO: 57646 - DNA, 26 bp, Homo sapiens
agtcagaggtagacccttccccaaca

SEQ ID NO: 57647 - DNA, 26 bp, Homo sapiens
gtcagaggtagacccttccccaacag

SEQ ID NO: 57648 - DNA, 26 bp, Homo sapiens
tcagaggtagacccttccccaacagt

SEQ ID NO: 57649 - DNA, 26 bp, Homo sapiens
cagaggtagacccttccccaacagtc

SEQ ID NO: 57650 - DNA, 26 bp, Homo sapiens
agaggtagacccttccccaacagtct

SEQ ID NO: 57651 - DNA, 26 bp, Homo sapiens
gaggtagacccttccccaacagtctt

SEQ ID NO: 57652 - DNA, 26 bp, Homo sapiens
aggtagacccttccccaacagtcttt

SEQ ID NO: 57653 - DNA, 26 bp, Homo sapiens
ggtagacccttccccaacagtctttg

SEQ ID NO: 57654 - DNA, 26 bp, Homo sapiens
gtagacccttccccaacagtctttgg

SEQ ID NO: 57655 - DNA, 26 bp, Homo sapiens
tagacccttccccaacagtctttgga

SEQ ID NO: 57656 - DNA, 26 bp, Homo sapiens
agacccttccccaacagtctttggat

SEQ ID NO: 57657 - DNA, 26 bp, Homo sapiens
gacccttccccaacagtctttggata

SEQ ID NO: 57658 - DNA, 26 bp, Homo sapiens
acccttccccaacagtctttggatac

SEQ ID NO: 57659 - DNA, 26 bp, Homo sapiens
cccttccccaacagtctttggataca

SEQ ID NO: 57660 - DNA, 26 bp, Homo sapiens
ccttccccaacagtctttggatacag

SEQ ID NO: 57661 - DNA, 26 bp, Homo sapiens
cttccccaacagtctttggatacagt

SEQ ID NO: 57662 - DNA, 26 bp, Homo sapiens
ttccccaacagtctttggatacagta

SEQ ID NO: 57663 - DNA, 26 bp, Homo sapiens
tccccaacagtctttggatacagtat

SEQ ID NO: 57664 - DNA, 26 bp, Homo sapiens
ccccaacagtctttggatacagtata

SEQ ID NO: 57665 - DNA, 26 bp, Homo sapiens
cccaacagtctttggatacagtatat

SEQ ID NO: 57666 - DNA, 26 bp, Homo sapiens
ccaacagtctttggatacagtatata

SEQ ID NO: 57667 - DNA, 26 bp, Homo sapiens
caacagtctttggatacagtatatat

SEQ ID NO: 57668 - DNA, 26 bp, Homo sapiens
aacagtctttggatacagtatatatg

SEQ ID NO: 57669 - DNA, 26 bp, Homo sapiens
acagtctttggatacagtatatatgc

SEQ ID NO: 57670 - DNA, 26 bp, Homo sapiens
cagtctttggatacagtatatatgcg

SEQ ID NO: 57671 - DNA, 26 bp, Homo sapiens
agtctttggatacagtatatatgcgt

SEQ ID NO: 57672 - DNA, 26 bp, Homo sapiens
gtctttggatacagtatatatgcgtc

SEQ ID NO: 57673 - DNA, 26 bp, Homo sapiens
tctttggatacagtatatatgcgtca

SEQ ID NO: 57674 - DNA, 26 bp, Homo sapiens
ctttggatacagtatatatgcgtcat

SEQ ID NO: 57675 - DNA, 26 bp, Homo sapiens
tttggatacagtatatatgcgtcata

SEQ ID NO: 57676 - DNA, 26 bp, Homo sapiens
ttggatacagtatatatgcgtcatag

SEQ ID NO: 57677 - DNA, 26 bp, Homo sapiens
tggatacagtatatatgcgtcatagg

SEQ ID NO: 57678 - DNA, 26 bp, Homo sapiens
ggatacagtatatatgcgtcataggt

SEQ ID NO: 57679 - DNA, 26 bp, Homo sapiens
gatacagtatatatgcgtcataggtc

SEQ ID NO: 57680 - DNA, 26 bp, Homo sapiens
atacagtatatatgcgtcataggtct

SEQ ID NO: 57681 - DNA, 26 bp, Homo sapiens
tacagtatatatgcgtcataggtctt

SEQ ID NO: 57682 - DNA, 26 bp, Homo sapiens
acagtatatatgcgtcataggtcttt

SEQ ID NO: 57683 - DNA, 26 bp, Homo sapiens
cagtatatatgcgtcataggtctttc

SEQ ID NO: 57684 - DNA, 26 bp, Homo sapiens
agtatatatgcgtcataggtctttcc

SEQ ID NO: 57685 - DNA, 26 bp, Homo sapiens
gtatatatgcgtcataggtctttcca

SEQ ID NO: 57686 - DNA, 26 bp, Homo sapiens
tatatatgcgtcataggtctttccat

SEQ ID NO: 57687 - DNA, 26 bp, Homo sapiens
atatatgcgtcataggtctttccatc

SEQ ID NO: 57688 - DNA, 26 bp, Homo sapiens
tatatgcgtcataggtctttccatct

SEQ ID NO: 57689 - DNA, 26 bp, Homo sapiens
atatgcgtcataggtctttccatctg

SEQ ID NO: 57690 - DNA, 26 bp, Homo sapiens
tatgcgtcataggtctttccatctga

SEQ ID NO: 57691 - DNA, 26 bp, Homo sapiens
atgcgtcataggtctttccatctgaa

SEQ ID NO: 57692 - DNA, 26 bp, Homo sapiens
tgcgtcataggtctttccatctgaag

SEQ ID NO: 57693 - DNA, 26 bp, Homo sapiens
gcgtcataggtctttccatctgaagc

SEQ ID NO: 57694 - DNA, 26 bp, Homo sapiens
cgtcataggtctttccatctgaagct

SEQ ID NO: 57695 - DNA, 26 bp, Homo sapiens
gtcataggtctttccatctgaagctt

SEQ ID NO: 57696 - DNA, 26 bp, Homo sapiens
tcataggtctttccatctgaagcttt

SEQ ID NO: 57697 - DNA, 26 bp, Homo sapiens
cataggtctttccatctgaagctttt

SEQ ID NO: 57698 - DNA, 26 bp, Homo sapiens
ataggtctttccatctgaagctttta

SEQ ID NO: 57699 - DNA, 26 bp, Homo sapiens
taggtctttccatctgaagcttttat

SEQ ID NO: 57700 - DNA, 26 bp, Homo sapiens
aggtctttccatctgaagcttttatt

SEQ ID NO: 57701 - DNA, 26 bp, Homo sapiens
ggtctttccatctgaagcttttattg

SEQ ID NO: 57702 - DNA, 26 bp, Homo sapiens
gtctttccatctgaagcttttattgg

SEQ ID NO: 57703 - DNA, 26 bp, Homo sapiens
tctttccatctgaagcttttattggg

SEQ ID NO: 57704 - DNA, 26 bp, Homo sapiens
ctttccatctgaagcttttattggga

SEQ ID NO: 57705 - DNA, 26 bp, Homo sapiens
tttccatctgaagcttttattgggag

SEQ ID NO: 57706 - DNA, 26 bp, Homo sapiens
ttccatctgaagcttttattgggaga

SEQ ID NO: 57707 - DNA, 26 bp, Homo sapiens
tccatctgaagcttttattgggagaa

SEQ ID NO: 57708 - DNA, 26 bp, Homo sapiens
ccatctgaagcttttattgggagaaa

SEQ ID NO: 57709 - DNA, 26 bp, Homo sapiens
catctgaagcttttattgggagaaaa

SEQ ID NO: 57710 - DNA, 26 bp, Homo sapiens
atctgaagcttttattgggagaaaat

SEQ ID NO: 57711 - DNA, 26 bp, Homo sapiens
tctgaagcttttattgggagaaaatc

SEQ ID NO: 57712 - DNA, 26 bp, Homo sapiens
ctgaagcttttattgggagaaaatca

SEQ ID NO: 57713 - DNA, 26 bp, Homo sapiens
tgaagcttttattgggagaaaatcat

SEQ ID NO: 57714 - DNA, 26 bp, Homo sapiens
gaagcttttattgggagaaaatcata

SEQ ID NO: 57715 - DNA, 26 bp, Homo sapiens
aagcttttattgggagaaaatcatag

SEQ ID NO: 57716 - DNA, 26 bp, Homo sapiens
agcttttattgggagaaaatcatagc

SEQ ID NO: 57717 - DNA, 26 bp, Homo sapiens
gcttttattgggagaaaatcatagca

SEQ ID NO: 57718 - DNA, 26 bp, Homo sapiens
cttttattgggagaaaatcatagcag

SEQ ID NO: 57719 - DNA, 26 bp, Homo sapiens
ttttattgggagaaaatcatagcagg

SEQ ID NO: 57720 - DNA, 26 bp, Homo sapiens
tttattgggagaaaatcatagcagga

SEQ ID NO: 57721 - DNA, 26 bp, Homo sapiens
ttattgggagaaaatcatagcaggaa

SEQ ID NO: 57722 - DNA, 26 bp, Homo sapiens
tattgggagaaaatcatagcaggaat

SEQ ID NO: 57723 - DNA, 26 bp, Homo sapiens
attgggagaaaatcatagcaggaatc

SEQ ID NO: 57724 - DNA, 26 bp, Homo sapiens
ttgggagaaaatcatagcaggaatcc

SEQ ID NO: 57725 - DNA, 26 bp, Homo sapiens
tgggagaaaatcatagcaggaatccc

SEQ ID NO: 57726 - DNA, 26 bp, Homo sapiens
gggagaaaatcatagcaggaatccct

SEQ ID NO: 57727 - DNA, 26 bp, Homo sapiens
ggagaaaatcatagcaggaatccctg

SEQ ID NO: 57728 - DNA, 26 bp, Homo sapiens
gagaaaatcatagcaggaatccctgt

SEQ ID NO: 57729 - DNA, 26 bp, Homo sapiens
agaaaatcatagcaggaatccctgta

SEQ ID NO: 57730 - DNA, 26 bp, Homo sapiens
gaaaatcatagcaggaatccctgtac

SEQ ID NO: 57731 - DNA, 26 bp, Homo sapiens
aaaatcatagcaggaatccctgtacc

SEQ ID NO: 57732 - DNA, 26 bp, Homo sapiens
aaatcatagcaggaatccctgtacca

SEQ ID NO: 57733 - DNA, 26 bp, Homo sapiens
aatcatagcaggaatccctgtaccaa

SEQ ID NO: 57734 - DNA, 26 bp, Homo sapiens
atcatagcaggaatccctgtaccaaa

SEQ ID NO: 57735 - DNA, 26 bp, Homo sapiens
tcatagcaggaatccctgtaccaaag

SEQ ID NO: 57736 - DNA, 26 bp, Homo sapiens
catagcaggaatccctgtaccaaagc

SEQ ID NO: 57737 - DNA, 26 bp, Homo sapiens
atagcaggaatccctgtaccaaagca

SEQ ID NO: 57738 - DNA, 26 bp, Homo sapiens
tagcaggaatccctgtaccaaagcac

SEQ ID NO: 57739 - DNA, 26 bp, Homo sapiens
agcaggaatccctgtaccaaagcaca

SEQ ID NO: 57740 - DNA, 26 bp, Homo sapiens
gcaggaatccctgtaccaaagcacaa

SEQ ID NO: 57741 - DNA, 26 bp, Homo sapiens
caggaatccctgtaccaaagcacaat

SEQ ID NO: 57742 - DNA, 26 bp, Homo sapiens
aggaatccctgtaccaaagcacaatg

SEQ ID NO: 57743 - DNA, 26 bp, Homo sapiens
ggaatccctgtaccaaagcacaatgt

SEQ ID NO: 57744 - DNA, 26 bp, Homo sapiens
gaatccctgtaccaaagcacaatgtc

SEQ ID NO: 57745 - DNA, 26 bp, Homo sapiens
aatccctgtaccaaagcacaatgtca

SEQ ID NO: 57746 - DNA, 26 bp, Homo sapiens
atccctgtaccaaagcacaatgtcaa

SEQ ID NO: 57747 - DNA, 26 bp, Homo sapiens
tccctgtaccaaagcacaatgtcaat

SEQ ID NO: 57748 - DNA, 26 bp, Homo sapiens
ccctgtaccaaagcacaatgtcaatc

SEQ ID NO: 57749 - DNA, 26 bp, Homo sapiens
cctgtaccaaagcacaatgtcaatct

SEQ ID NO: 57750 - DNA, 26 bp, Homo sapiens
ctgtaccaaagcacaatgtcaatctt

SEQ ID NO: 57751 - DNA, 26 bp, Homo sapiens
tgtaccaaagcacaatgtcaatcttg

SEQ ID NO: 57752 - DNA, 26 bp, Homo sapiens
gtaccaaagcacaatgtcaatcttga

SEQ ID NO: 57753 - DNA, 26 bp, Homo sapiens
taccaaagcacaatgtcaatcttgaa

SEQ ID NO: 57754 - DNA, 26 bp, Homo sapiens
accaaagcacaatgtcaatcttgaag

SEQ ID NO: 57755 - DNA, 26 bp, Homo sapiens
ccaaagcacaatgtcaatcttgaaga

SEQ ID NO: 57756 - DNA, 26 bp, Homo sapiens
caaagcacaatgtcaatcttgaagat

SEQ ID NO: 57757 - DNA, 26 bp, Homo sapiens
aaagcacaatgtcaatcttgaagatt

SEQ ID NO: 57758 - DNA, 26 bp, Homo sapiens
aagcacaatgtcaatcttgaagattt

SEQ ID NO: 57759 - DNA, 26 bp, Homo sapiens
agcacaatgtcaatcttgaagatttt

SEQ ID NO: 57760 - DNA, 26 bp, Homo sapiens
gcacaatgtcaatcttgaagatttta

SEQ ID NO: 57761 - DNA, 26 bp, Homo sapiens
cacaatgtcaatcttgaagattttat

SEQ ID NO: 57762 - DNA, 26 bp, Homo sapiens
acaatgtcaatcttgaagattttata

SEQ ID NO: 57763 - DNA, 26 bp, Homo sapiens
caatgtcaatcttgaagattttatag

SEQ ID NO: 57764 - DNA, 26 bp, Homo sapiens
aatgtcaatcttgaagattttataga

SEQ ID NO: 57765 - DNA, 26 bp, Homo sapiens
atgtcaatcttgaagattttatagat

SEQ ID NO: 57766 - DNA, 26 bp, Homo sapiens
tgtcaatcttgaagattttatagatg

SEQ ID NO: 57767 - DNA, 26 bp, Homo sapiens
gtcaatcttgaagattttatagatga

SEQ ID NO: 57768 - DNA, 26 bp, Homo sapiens
tcaatcttgaagattttatagatgaa

SEQ ID NO: 57769 - DNA, 26 bp, Homo sapiens
caatcttgaagattttatagatgaaa

SEQ ID NO: 57770 - DNA, 26 bp, Homo sapiens
aatcttgaagattttatagatgaaaa

SEQ ID NO: 57771 - DNA, 26 bp, Homo sapiens
atcttgaagattttatagatgaaaac

SEQ ID NO: 57772 - DNA, 26 bp, Homo sapiens
tcttgaagattttatagatgaaaaca

SEQ ID NO: 57773 - DNA, 26 bp, Homo sapiens
cttgaagattttatagatgaaaacag

SEQ ID NO: 57774 - DNA, 26 bp, Homo sapiens
ttgaagattttatagatgaaaacaga

SEQ ID NO: 57775 - DNA, 26 bp, Homo sapiens
tgaagattttatagatgaaaacagaa

SEQ ID NO: 57776 - DNA, 26 bp, Homo sapiens
gaagattttatagatgaaaacagaac

SEQ ID NO: 57777 - DNA, 26 bp, Homo sapiens
aagattttatagatgaaaacagaaca

SEQ ID NO: 57778 - DNA, 26 bp, Homo sapiens
agattttatagatgaaaacagaacac

SEQ ID NO: 57779 - DNA, 26 bp, Homo sapiens
gattttatagatgaaaacagaacaca

SEQ ID NO: 57780 - DNA, 26 bp, Homo sapiens
attttatagatgaaaacagaacacac

SEQ ID NO: 57781 - DNA, 26 bp, Homo sapiens
ttttatagatgaaaacagaacacaca

SEQ ID NO: 57782 - DNA, 26 bp, Homo sapiens
tttatagatgaaaacagaacacacaa

SEQ ID NO: 57783 - DNA, 26 bp, Homo sapiens
ttatagatgaaaacagaacacacaat

SEQ ID NO: 57784 - DNA, 26 bp, Homo sapiens
tatagatgaaaacagaacacacaatt

SEQ ID NO: 57785 - DNA, 26 bp, Homo sapiens
atagatgaaaacagaacacacaatta

SEQ ID NO: 57786 - DNA, 26 bp, Homo sapiens
tagatgaaaacagaacacacaattat

SEQ ID NO: 57787 - DNA, 26 bp, Homo sapiens
agatgaaaacagaacacacaattatg

SEQ ID NO: 57788 - DNA, 26 bp, Homo sapiens
gatgaaaacagaacacacaattatga

SEQ ID NO: 57789 - DNA, 26 bp, Homo sapiens
atgaaaacagaacacacaattatgac

SEQ ID NO: 57790 - DNA, 26 bp, Homo sapiens
tgaaaacagaacacacaattatgact

SEQ ID NO: 57791 - DNA, 26 bp, Homo sapiens
gaaaacagaacacacaattatgactg

SEQ ID NO: 57792 - DNA, 26 bp, Homo sapiens
aaaacagaacacacaattatgactgt

SEQ ID NO: 57793 - DNA, 26 bp, Homo sapiens
aaacagaacacacaattatgactgtc

SEQ ID NO: 57794 - DNA, 26 bp, Homo sapiens
aacagaacacacaattatgactgtca

SEQ ID NO: 57795 - DNA, 26 bp, Homo sapiens
acagaacacacaattatgactgtcaa

SEQ ID NO: 57796 - DNA, 26 bp, Homo sapiens
cagaacacacaattatgactgtcaac

SEQ ID NO: 57797 - DNA, 26 bp, Homo sapiens
agaacacacaattatgactgtcaacg

SEQ ID NO: 57798 - DNA, 26 bp, Homo sapiens
gaacacacaattatgactgtcaacgt

SEQ ID NO: 57799 - DNA, 26 bp, Homo sapiens
aacacacaattatgactgtcaacgtg

SEQ ID NO: 57800 - DNA, 26 bp, Homo sapiens
acacacaattatgactgtcaacgtga

SEQ ID NO: 57801 - DNA, 26 bp, Homo sapiens
cacacaattatgactgtcaacgtgac

SEQ ID NO: 57802 - DNA, 26 bp, Homo sapiens
acacaattatgactgtcaacgtgaca

SEQ ID NO: 57803 - DNA, 26 bp, Homo sapiens
cacaattatgactgtcaacgtgacac

SEQ ID NO: 57804 - DNA, 26 bp, Homo sapiens
acaattatgactgtcaacgtgacaca

SEQ ID NO: 57805 - DNA, 26 bp, Homo sapiens
caattatgactgtcaacgtgacacat

SEQ ID NO: 57806 - DNA, 26 bp, Homo sapiens
aattatgactgtcaacgtgacacata

SEQ ID NO: 57807 - DNA, 26 bp, Homo sapiens
attatgactgtcaacgtgacacatat

SEQ ID NO: 57808 - DNA, 26 bp, Homo sapiens
ttatgactgtcaacgtgacacatata

SEQ ID NO: 57809 - DNA, 26 bp, Homo sapiens
tatgactgtcaacgtgacacatatac

SEQ ID NO: 57810 - DNA, 26 bp, Homo sapiens
atgactgtcaacgtgacacatatacc

SEQ ID NO: 57811 - DNA, 26 bp, Homo sapiens
tgactgtcaacgtgacacatatacca

SEQ ID NO: 57812 - DNA, 26 bp, Homo sapiens
gactgtcaacgtgacacatataccaa

SEQ ID NO: 57813 - DNA, 26 bp, Homo sapiens
actgtcaacgtgacacatataccaat

SEQ ID NO: 57814 - DNA, 26 bp, Homo sapiens
ctgtcaacgtgacacatataccaatc

SEQ ID NO: 57815 - DNA, 26 bp, Homo sapiens
tgtcaacgtgacacatataccaatca

SEQ ID NO: 57816 - DNA, 26 bp, Homo sapiens
gtcaacgtgacacatataccaatcat

SEQ ID NO: 57817 - DNA, 26 bp, Homo sapiens
tcaacgtgacacatataccaatcatg

SEQ ID NO: 57818 - DNA, 26 bp, Homo sapiens
caacgtgacacatataccaatcatgt

SEQ ID NO: 57819 - DNA, 26 bp, Homo sapiens
aacgtgacacatataccaatcatgtg

SEQ ID NO: 57820 - DNA, 26 bp, Homo sapiens
acgtgacacatataccaatcatgtgc

SEQ ID NO: 57821 - DNA, 26 bp, Homo sapiens
cgtgacacatataccaatcatgtgct

SEQ ID NO: 57822 - DNA, 26 bp, Homo sapiens
gtgacacatataccaatcatgtgctt

SEQ ID NO: 57823 - DNA, 26 bp, Homo sapiens
tgacacatataccaatcatgtgcttc

SEQ ID NO: 57824 - DNA, 26 bp, Homo sapiens
gacacatataccaatcatgtgcttct

SEQ ID NO: 57825 - DNA, 26 bp, Homo sapiens
acacatataccaatcatgtgcttctg

SEQ ID NO: 57826 - DNA, 26 bp, Homo sapiens
cacatataccaatcatgtgcttctgg

SEQ ID NO: 57827 - DNA, 26 bp, Homo sapiens
acatataccaatcatgtgcttctgga

SEQ ID NO: 57828 - DNA, 26 bp, Homo sapiens
catataccaatcatgtgcttctggaa

SEQ ID NO: 57829 - DNA, 26 bp, Homo sapiens
atataccaatcatgtgcttctggaaa

SEQ ID NO: 57830 - DNA, 26 bp, Homo sapiens
tataccaatcatgtgcttctggaaat

SEQ ID NO: 57831 - DNA, 26 bp, Homo sapiens
ataccaatcatgtgcttctggaaatt

SEQ ID NO: 57832 - DNA, 26 bp, Homo sapiens
taccaatcatgtgcttctggaaatta

SEQ ID NO: 57833 - DNA, 26 bp, Homo sapiens
accaatcatgtgcttctggaaattag

SEQ ID NO: 57834 - DNA, 26 bp, Homo sapiens
ccaatcatgtgcttctggaaattagt

SEQ ID NO: 57835 - DNA, 26 bp, Homo sapiens
caatcatgtgcttctggaaattagtg

SEQ ID NO: 57836 - DNA, 26 bp, Homo sapiens
aatcatgtgcttctggaaattagtga

SEQ ID NO: 57837 - DNA, 26 bp, Homo sapiens
atcatgtgcttctggaaattagtgac

SEQ ID NO: 57838 - DNA, 26 bp, Homo sapiens
tcatgtgcttctggaaattagtgact

SEQ ID NO: 57839 - DNA, 26 bp, Homo sapiens
catgtgcttctggaaattagtgactg

SEQ ID NO: 57840 - DNA, 26 bp, Homo sapiens
atgtgcttctggaaattagtgactgg

SEQ ID NO: 57841 - DNA, 26 bp, Homo sapiens
tgtgcttctggaaattagtgactgga

SEQ ID NO: 57842 - DNA, 26 bp, Homo sapiens
gtgcttctggaaattagtgactggat

SEQ ID NO: 57843 - DNA, 26 bp, Homo sapiens
tgcttctggaaattagtgactggata

SEQ ID NO: 57844 - DNA, 26 bp, Homo sapiens
gcttctggaaattagtgactggatat

SEQ ID NO: 57845 - DNA, 26 bp, Homo sapiens
cttctggaaattagtgactggatata

SEQ ID NO: 57846 - DNA, 26 bp, Homo sapiens
ttctggaaattagtgactggatatat

SEQ ID NO: 57847 - DNA, 26 bp, Homo sapiens
tctggaaattagtgactggatatatt

SEQ ID NO: 57848 - DNA, 26 bp, Homo sapiens
ctggaaattagtgactggatatatta

SEQ ID NO: 57849 - DNA, 26 bp, Homo sapiens
tggaaattagtgactggatatattaa

SEQ ID NO: 57850 - DNA, 26 bp, Homo sapiens
ggaaattagtgactggatatattaac

SEQ ID NO: 57851 - DNA, 26 bp, Homo sapiens
gaaattagtgactggatatattaact

SEQ ID NO: 57852 - DNA, 26 bp, Homo sapiens
aaattagtgactggatatattaactg

SEQ ID NO: 57853 - DNA, 26 bp, Homo sapiens
aattagtgactggatatattaactgg

SEQ ID NO: 57854 - DNA, 26 bp, Homo sapiens
attagtgactggatatattaactgga

SEQ ID NO: 57855 - DNA, 26 bp, Homo sapiens
ttagtgactggatatattaactggat

SEQ ID NO: 57856 - DNA, 26 bp, Homo sapiens
tagtgactggatatattaactggata

SEQ ID NO: 57857 - DNA, 26 bp, Homo sapiens
agtgactggatatattaactggatat

SEQ ID NO: 57858 - DNA, 26 bp, Homo sapiens
gtgactggatatattaactggatata

SEQ ID NO: 57859 - DNA, 26 bp, Homo sapiens
tgactggatatattaactggatatat

SEQ ID NO: 57860 - DNA, 26 bp, Homo sapiens
gactggatatattaactggatatatg

SEQ ID NO: 57861 - DNA, 26 bp, Homo sapiens
actggatatattaactggatatatgc

SEQ ID NO: 57862 - DNA, 26 bp, Homo sapiens
ctggatatattaactggatatatgct

SEQ ID NO: 57863 - DNA, 26 bp, Homo sapiens
tggatatattaactggatatatgctg

SEQ ID NO: 57864 - DNA, 26 bp, Homo sapiens
ggatatattaactggatatatgctgc

SEQ ID NO: 57865 - DNA, 26 bp, Homo sapiens
gatatattaactggatatatgctgca

SEQ ID NO: 57866 - DNA, 26 bp, Homo sapiens
atatattaactggatatatgctgcat

SEQ ID NO: 57867 - DNA, 26 bp, Homo sapiens
tatattaactggatatatgctgcatc

SEQ ID NO: 57868 - DNA, 26 bp, Homo sapiens
atattaactggatatatgctgcatct

SEQ ID NO: 57869 - DNA, 26 bp, Homo sapiens
tattaactggatatatgctgcatcta

SEQ ID NO: 57870 - DNA, 26 bp, Homo sapiens
attaactggatatatgctgcatctat

SEQ ID NO: 57871 - DNA, 26 bp, Homo sapiens
ttaactggatatatgctgcatctata

SEQ ID NO: 57872 - DNA, 26 bp, Homo sapiens
taactggatatatgctgcatctatac

SEQ ID NO: 57873 - DNA, 26 bp, Homo sapiens
aactggatatatgctgcatctatacc

SEQ ID NO: 57874 - DNA, 26 bp, Homo sapiens
actggatatatgctgcatctatacca

SEQ ID NO: 57875 - DNA, 26 bp, Homo sapiens
ctggatatatgctgcatctataccat

SEQ ID NO: 57876 - DNA, 26 bp, Homo sapiens
tggatatatgctgcatctataccatg

SEQ ID NO: 57877 - DNA, 26 bp, Homo sapiens
ggatatatgctgcatctataccatgt

SEQ ID NO: 57878 - DNA, 26 bp, Homo sapiens
gatatatgctgcatctataccatgtg

SEQ ID NO: 57879 - DNA, 26 bp, Homo sapiens
atatatgctgcatctataccatgtgt

SEQ ID NO: 57880 - DNA, 26 bp, Homo sapiens
tatatgctgcatctataccatgtgta

SEQ ID NO: 57881 - DNA, 26 bp, Homo sapiens
atatgctgcatctataccatgtgtat

SEQ ID NO: 57882 - DNA, 26 bp, Homo sapiens
tatgctgcatctataccatgtgtatt

SEQ ID NO: 57883 - DNA, 26 bp, Homo sapiens
atgctgcatctataccatgtgtattc

SEQ ID NO: 57884 - DNA, 26 bp, Homo sapiens
tgctgcatctataccatgtgtattct

SEQ ID NO: 57885 - DNA, 26 bp, Homo sapiens
gctgcatctataccatgtgtattctt

SEQ ID NO: 57886 - DNA, 26 bp, Homo sapiens
ctgcatctataccatgtgtattcttg

SEQ ID NO: 57887 - DNA, 26 bp, Homo sapiens
tgcatctataccatgtgtattcttgg

SEQ ID NO: 57888 - DNA, 26 bp, Homo sapiens
gcatctataccatgtgtattcttggc

SEQ ID NO: 57889 - DNA, 26 bp, Homo sapiens
catctataccatgtgtattcttggca

SEQ ID NO: 57890 - DNA, 26 bp, Homo sapiens
atctataccatgtgtattcttggcaa

SEQ ID NO: 57891 - DNA, 26 bp, Homo sapiens
tctataccatgtgtattcttggcaaa

SEQ ID NO: 57892 - DNA, 26 bp, Homo sapiens
ctataccatgtgtattcttggcaaaa

SEQ ID NO: 57893 - DNA, 26 bp, Homo sapiens
tataccatgtgtattcttggcaaaac

SEQ ID NO: 57894 - DNA, 26 bp, Homo sapiens
ataccatgtgtattcttggcaaaaca

SEQ ID NO: 57895 - DNA, 26 bp, Homo sapiens
taccatgtgtattcttggcaaaacag

SEQ ID NO: 57896 - DNA, 26 bp, Homo sapiens
accatgtgtattcttggcaaaacagg

SEQ ID NO: 57897 - DNA, 26 bp, Homo sapiens
ccatgtgtattcttggcaaaacaggt

SEQ ID NO: 57898 - DNA, 26 bp, Homo sapiens
catgtgtattcttggcaaaacaggta

SEQ ID NO: 57899 - DNA, 26 bp, Homo sapiens
atgtgtattcttggcaaaacaggtaa

SEQ ID NO: 57900 - DNA, 26 bp, Homo sapiens
tgtgtattcttggcaaaacaggtaaa

SEQ ID NO: 57901 - DNA, 26 bp, Homo sapiens
gtgtattcttggcaaaacaggtaaat

SEQ ID NO: 57902 - DNA, 26 bp, Homo sapiens
tgtattcttggcaaaacaggtaaatg

SEQ ID NO: 57903 - DNA, 26 bp, Homo sapiens
gtattcttggcaaaacaggtaaatgg

SEQ ID NO: 57904 - DNA, 26 bp, Homo sapiens
tattcttggcaaaacaggtaaatgga

SEQ ID NO: 57905 - DNA, 26 bp, Homo sapiens
attcttggcaaaacaggtaaatggat

SEQ ID NO: 57906 - DNA, 26 bp, Homo sapiens
ttcttggcaaaacaggtaaatggatg

SEQ ID NO: 57907 - DNA, 26 bp, Homo sapiens
tcttggcaaaacaggtaaatggatgt

SEQ ID NO: 57908 - DNA, 26 bp, Homo sapiens
cttggcaaaacaggtaaatggatgtt

SEQ ID NO: 57909 - DNA, 26 bp, Homo sapiens
ttggcaaaacaggtaaatggatgttt

SEQ ID NO: 57910 - DNA, 26 bp, Homo sapiens
tggcaaaacaggtaaatggatgttta

SEQ ID NO: 57911 - DNA, 26 bp, Homo sapiens
ggcaaaacaggtaaatggatgtttat

SEQ ID NO: 57912 - DNA, 26 bp, Homo sapiens
gcaaaacaggtaaatggatgtttata

SEQ ID NO: 57913 - DNA, 26 bp, Homo sapiens
caaaacaggtaaatggatgtttataa

SEQ ID NO: 57914 - DNA, 26 bp, Homo sapiens
aaaacaggtaaatggatgtttataaa

SEQ ID NO: 57915 - DNA, 26 bp, Homo sapiens
aaacaggtaaatggatgtttataaaa

SEQ ID NO: 57916 - DNA, 26 bp, Homo sapiens
aacaggtaaatggatgtttataaaat

SEQ ID NO: 57917 - DNA, 26 bp, Homo sapiens
acaggtaaatggatgtttataaaatc

SEQ ID NO: 57918 - DNA, 26 bp, Homo sapiens
caggtaaatggatgtttataaaatct

SEQ ID NO: 57919 - DNA, 26 bp, Homo sapiens
aggtaaatggatgtttataaaatcta

SEQ ID NO: 57920 - DNA, 26 bp, Homo sapiens
ggtaaatggatgtttataaaatctac

SEQ ID NO: 57921 - DNA, 26 bp, Homo sapiens
gtaaatggatgtttataaaatctact

SEQ ID NO: 57922 - DNA, 26 bp, Homo sapiens
taaatggatgtttataaaatctactt

SEQ ID NO: 57923 - DNA, 26 bp, Homo sapiens
aaatggatgtttataaaatctacttt

SEQ ID NO: 57924 - DNA, 26 bp, Homo sapiens
aatggatgtttataaaatctactttc

SEQ ID NO: 57925 - DNA, 26 bp, Homo sapiens
atggatgtttataaaatctactttca

SEQ ID NO: 57926 - DNA, 26 bp, Homo sapiens
tggatgtttataaaatctactttcaa

SEQ ID NO: 57927 - DNA, 26 bp, Homo sapiens
ggatgtttataaaatctactttcaat

SEQ ID NO: 57928 - DNA, 26 bp, Homo sapiens
gatgtttataaaatctactttcaatt

SEQ ID NO: 57929 - DNA, 26 bp, Homo sapiens
atgtttataaaatctactttcaattt

SEQ ID NO: 57930 - DNA, 26 bp, Homo sapiens
tgtttataaaatctactttcaatttc

SEQ ID NO: 57931 - DNA, 26 bp, Homo sapiens
gtttataaaatctactttcaatttcc

SEQ ID NO: 57932 - DNA, 26 bp, Homo sapiens
tttataaaatctactttcaatttccg

SEQ ID NO: 57933 - DNA, 26 bp, Homo sapiens
ttataaaatctactttcaatttccga

SEQ ID NO: 57934 - DNA, 26 bp, Homo sapiens
tataaaatctactttcaatttccgat

SEQ ID NO: 57935 - DNA, 26 bp, Homo sapiens
ataaaatctactttcaatttccgata

SEQ ID NO: 57936 - DNA, 26 bp, Homo sapiens
taaaatctactttcaatttccgatat

SEQ ID NO: 57937 - DNA, 26 bp, Homo sapiens
aaaatctactttcaatttccgatata

SEQ ID NO: 57938 - DNA, 26 bp, Homo sapiens
aaatctactttcaatttccgatatat

SEQ ID NO: 57939 - DNA, 26 bp, Homo sapiens
aatctactttcaatttccgatatatt

SEQ ID NO: 57940 - DNA, 26 bp, Homo sapiens
atctactttcaatttccgatatatta

SEQ ID NO: 57941 - DNA, 26 bp, Homo sapiens
tctactttcaatttccgatatattaa

SEQ ID NO: 57942 - DNA, 26 bp, Homo sapiens
ctactttcaatttccgatatattaag

SEQ ID NO: 57943 - DNA, 26 bp, Homo sapiens
tactttcaatttccgatatattaagc

SEQ ID NO: 57944 - DNA, 26 bp, Homo sapiens
actttcaatttccgatatattaagca

SEQ ID NO: 57945 - DNA, 26 bp, Homo sapiens
ctttcaatttccgatatattaagcac

SEQ ID NO: 57946 - DNA, 26 bp, Homo sapiens
tttcaatttccgatatattaagcact

SEQ ID NO: 57947 - DNA, 26 bp, Homo sapiens
ttcaatttccgatatattaagcactg

SEQ ID NO: 57948 - DNA, 26 bp, Homo sapiens
tcaatttccgatatattaagcactgt

SEQ ID NO: 57949 - DNA, 26 bp, Homo sapiens
caatttccgatatattaagcactgtg

SEQ ID NO: 57950 - DNA, 26 bp, Homo sapiens
aatttccgatatattaagcactgtga

SEQ ID NO: 57951 - DNA, 26 bp, Homo sapiens
atttccgatatattaagcactgtgat

SEQ ID NO: 57952 - DNA, 26 bp, Homo sapiens
tttccgatatattaagcactgtgatg

SEQ ID NO: 57953 - DNA, 26 bp, Homo sapiens
ttccgatatattaagcactgtgatga

SEQ ID NO: 57954 - DNA, 26 bp, Homo sapiens
tccgatatattaagcactgtgatgag

SEQ ID NO: 57955 - DNA, 26 bp, Homo sapiens
ccgatatattaagcactgtgatgagg

SEQ ID NO: 57956 - DNA, 26 bp, Homo sapiens
cgatatattaagcactgtgatgaggg

SEQ ID NO: 57957 - DNA, 26 bp, Homo sapiens
gatatattaagcactgtgatgagggt

SEQ ID NO: 57958 - DNA, 26 bp, Homo sapiens
atatattaagcactgtgatgagggta

SEQ ID NO: 57959 - DNA, 26 bp, Homo sapiens
tatattaagcactgtgatgagggtac

SEQ ID NO: 57960 - DNA, 26 bp, Homo sapiens
atattaagcactgtgatgagggtact

SEQ ID NO: 57961 - DNA, 26 bp, Homo sapiens
tattaagcactgtgatgagggtactc

SEQ ID NO: 57962 - DNA, 26 bp, Homo sapiens
attaagcactgtgatgagggtactcc

SEQ ID NO: 57963 - DNA, 26 bp, Homo sapiens
ttaagcactgtgatgagggtactcct

SEQ ID NO: 57964 - DNA, 26 bp, Homo sapiens
taagcactgtgatgagggtactcctt

SEQ ID NO: 57965 - DNA, 26 bp, Homo sapiens
aagcactgtgatgagggtactccttc

SEQ ID NO: 57966 - DNA, 26 bp, Homo sapiens
agcactgtgatgagggtactccttct

SEQ ID NO: 57967 - DNA, 26 bp, Homo sapiens
gcactgtgatgagggtactccttctt

SEQ ID NO: 57968 - DNA, 26 bp, Homo sapiens
cactgtgatgagggtactccttcttt

SEQ ID NO: 57969 - DNA, 26 bp, Homo sapiens
actgtgatgagggtactccttctttt

SEQ ID NO: 57970 - DNA, 26 bp, Homo sapiens
ctgtgatgagggtactccttcttttg

SEQ ID NO: 57971 - DNA, 26 bp, Homo sapiens
tgtgatgagggtactccttcttttgt

SEQ ID NO: 57972 - DNA, 26 bp, Homo sapiens
gtgatgagggtactccttcttttgtt

SEQ ID NO: 57973 - DNA, 26 bp, Homo sapiens
tgatgagggtactccttcttttgttt

SEQ ID NO: 57974 - DNA, 26 bp, Homo sapiens
gatgagggtactccttcttttgtttg

SEQ ID NO: 57975 - DNA, 26 bp, Homo sapiens
atgagggtactccttcttttgtttgc

SEQ ID NO: 57976 - DNA, 26 bp, Homo sapiens
tgagggtactccttcttttgtttgca

SEQ ID NO: 57977 - DNA, 26 bp, Homo sapiens
gagggtactccttcttttgtttgcag

SEQ ID NO: 57978 - DNA, 26 bp, Homo sapiens
agggtactccttcttttgtttgcagg

SEQ ID NO: 57979 - DNA, 26 bp, Homo sapiens
gggtactccttcttttgtttgcagga

SEQ ID NO: 57980 - DNA, 26 bp, Homo sapiens
ggtactccttcttttgtttgcaggat

SEQ ID NO: 57981 - DNA, 26 bp, Homo sapiens
gtactccttcttttgtttgcaggatt

SEQ ID NO: 57982 - DNA, 26 bp, Homo sapiens
tactccttcttttgtttgcaggattt

SEQ ID NO: 57983 - DNA, 26 bp, Homo sapiens
actccttcttttgtttgcaggatttt

SEQ ID NO: 57984 - DNA, 26 bp, Homo sapiens
ctccttcttttgtttgcaggattttc

SEQ ID NO: 57985 - DNA, 26 bp, Homo sapiens
tccttcttttgtttgcaggattttcc

SEQ ID NO: 57986 - DNA, 26 bp, Homo sapiens
ccttcttttgtttgcaggattttcca

SEQ ID NO: 57987 - DNA, 26 bp, Homo sapiens
cttcttttgtttgcaggattttccac

SEQ ID NO: 57988 - DNA, 26 bp, Homo sapiens
ttcttttgtttgcaggattttccaca

SEQ ID NO: 57989 - DNA, 26 bp, Homo sapiens
tcttttgtttgcaggattttccacac

SEQ ID NO: 57990 - DNA, 26 bp, Homo sapiens
cttttgtttgcaggattttccacact

SEQ ID NO: 57991 - DNA, 26 bp, Homo sapiens
ttttgtttgcaggattttccacactg

SEQ ID NO: 57992 - DNA, 26 bp, Homo sapiens
tttgtttgcaggattttccacactgt

SEQ ID NO: 57993 - DNA, 26 bp, Homo sapiens
ttgtttgcaggattttccacactgta

SEQ ID NO: 57994 - DNA, 26 bp, Homo sapiens
tgtttgcaggattttccacactgtaa

SEQ ID NO: 57995 - DNA, 26 bp, Homo sapiens
gtttgcaggattttccacactgtaat

SEQ ID NO: 57996 - DNA, 26 bp, Homo sapiens
tttgcaggattttccacactgtaata

SEQ ID NO: 57997 - DNA, 26 bp, Homo sapiens
ttgcaggattttccacactgtaatag

SEQ ID NO: 57998 - DNA, 26 bp, Homo sapiens
tgcaggattttccacactgtaatagt

SEQ ID NO: 57999 - DNA, 26 bp, Homo sapiens
gcaggattttccacactgtaatagtc

SEQ ID NO: 58000 - DNA, 26 bp, Homo sapiens
caggattttccacactgtaatagtct

SEQ ID NO: 58001 - DNA, 26 bp, Homo sapiens
aggattttccacactgtaatagtctt

SEQ ID NO: 58002 - DNA, 26 bp, Homo sapiens
ggattttccacactgtaatagtcttc

SEQ ID NO: 58003 - DNA, 26 bp, Homo sapiens
gattttccacactgtaatagtcttcc

SEQ ID NO: 58004 - DNA, 26 bp, Homo sapiens
attttccacactgtaatagtcttccc

SEQ ID NO: 58005 - DNA, 26 bp, Homo sapiens
ttttccacactgtaatagtcttcccc

SEQ ID NO: 58006 - DNA, 26 bp, Homo sapiens
tttccacactgtaatagtcttcccct

SEQ ID NO: 58007 - DNA, 26 bp, Homo sapiens
ttccacactgtaatagtcttccccta

SEQ ID NO: 58008 - DNA, 26 bp, Homo sapiens
tccacactgtaatagtcttcccctag

SEQ ID NO: 58009 - DNA, 26 bp, Homo sapiens
ccacactgtaatagtcttcccctagc

SEQ ID NO: 58010 - DNA, 26 bp, Homo sapiens
cacactgtaatagtcttcccctagca

SEQ ID NO: 58011 - DNA, 26 bp, Homo sapiens
acactgtaatagtcttcccctagcac

SEQ ID NO: 58012 - DNA, 26 bp, Homo sapiens
cactgtaatagtcttcccctagcact

SEQ ID NO: 58013 - DNA, 26 bp, Homo sapiens
actgtaatagtcttcccctagcactg

SEQ ID NO: 58014 - DNA, 26 bp, Homo sapiens
ctgtaatagtcttcccctagcactgg

SEQ ID NO: 58015 - DNA, 26 bp, Homo sapiens
tgtaatagtcttcccctagcactggg

SEQ ID NO: 58016 - DNA, 26 bp, Homo sapiens
gtaatagtcttcccctagcactgggt

SEQ ID NO: 58017 - DNA, 26 bp, Homo sapiens
taatagtcttcccctagcactgggtc

SEQ ID NO: 58018 - DNA, 26 bp, Homo sapiens
aatagtcttcccctagcactgggtca

SEQ ID NO: 58019 - DNA, 26 bp, Homo sapiens
atagtcttcccctagcactgggtcat

SEQ ID NO: 58020 - DNA, 26 bp, Homo sapiens
tagtcttcccctagcactgggtcatc

SEQ ID NO: 58021 - DNA, 26 bp, Homo sapiens
agtcttcccctagcactgggtcatct

SEQ ID NO: 58022 - DNA, 26 bp, Homo sapiens
gtcttcccctagcactgggtcatctt

SEQ ID NO: 58023 - DNA, 26 bp, Homo sapiens
tcttcccctagcactgggtcatcttc

SEQ ID NO: 58024 - DNA, 26 bp, Homo sapiens
cttcccctagcactgggtcatcttca

SEQ ID NO: 58025 - DNA, 26 bp, Homo sapiens
ttcccctagcactgggtcatcttcat

SEQ ID NO: 58026 - DNA, 26 bp, Homo sapiens
tcccctagcactgggtcatcttcatc

SEQ ID NO: 58027 - DNA, 26 bp, Homo sapiens
cccctagcactgggtcatcttcatca

SEQ ID NO: 58028 - DNA, 26 bp, Homo sapiens
ccctagcactgggtcatcttcatcaa

SEQ ID NO: 58029 - DNA, 26 bp, Homo sapiens
cctagcactgggtcatcttcatcaat

SEQ ID NO: 58030 - DNA, 26 bp, Homo sapiens
ctagcactgggtcatcttcatcaatt

SEQ ID NO: 58031 - DNA, 26 bp, Homo sapiens
tagcactgggtcatcttcatcaatta

SEQ ID NO: 58032 - DNA, 26 bp, Homo sapiens
agcactgggtcatcttcatcaattac

SEQ ID NO: 58033 - DNA, 26 bp, Homo sapiens
gcactgggtcatcttcatcaattact

SEQ ID NO: 58034 - DNA, 26 bp, Homo sapiens
cactgggtcatcttcatcaattactg

SEQ ID NO: 58035 - DNA, 26 bp, Homo sapiens
actgggtcatcttcatcaattactga

SEQ ID NO: 58036 - DNA, 26 bp, Homo sapiens
ctgggtcatcttcatcaattactgac

SEQ ID NO: 58037 - DNA, 26 bp, Homo sapiens
tgggtcatcttcatcaattactgacc

SEQ ID NO: 58038 - DNA, 26 bp, Homo sapiens
gggtcatcttcatcaattactgaccc

SEQ ID NO: 58039 - DNA, 26 bp, Homo sapiens
ggtcatcttcatcaattactgaccca

SEQ ID NO: 58040 - DNA, 26 bp, Homo sapiens
gtcatcttcatcaattactgacccat

SEQ ID NO: 58041 - DNA, 26 bp, Homo sapiens
tcatcttcatcaattactgacccatt

SEQ ID NO: 58042 - DNA, 26 bp, Homo sapiens
catcttcatcaattactgacccattc

SEQ ID NO: 58043 - DNA, 26 bp, Homo sapiens
atcttcatcaattactgacccattcc

SEQ ID NO: 58044 - DNA, 26 bp, Homo sapiens
tcttcatcaattactgacccattcca

SEQ ID NO: 58045 - DNA, 26 bp, Homo sapiens
cttcatcaattactgacccattccac

SEQ ID NO: 58046 - DNA, 26 bp, Homo sapiens
ttcatcaattactgacccattccact

SEQ ID NO: 58047 - DNA, 26 bp, Homo sapiens
tcatcaattactgacccattccactt

SEQ ID NO: 58048 - DNA, 26 bp, Homo sapiens
catcaattactgacccattccacttc

SEQ ID NO: 58049 - DNA, 26 bp, Homo sapiens
atcaattactgacccattccacttcc

SEQ ID NO: 58050 - DNA, 26 bp, Homo sapiens
tcaattactgacccattccacttcca

SEQ ID NO: 58051 - DNA, 26 bp, Homo sapiens
caattactgacccattccacttccag

SEQ ID NO: 58052 - DNA, 26 bp, Homo sapiens
aattactgacccattccacttccagt

SEQ ID NO: 58053 - DNA, 26 bp, Homo sapiens
attactgacccattccacttccagta

SEQ ID NO: 58054 - DNA, 26 bp, Homo sapiens
ttactgacccattccacttccagtaa

SEQ ID NO: 58055 - DNA, 26 bp, Homo sapiens
tactgacccattccacttccagtaag

SEQ ID NO: 58056 - DNA, 26 bp, Homo sapiens
actgacccattccacttccagtaagc

SEQ ID NO: 58057 - DNA, 26 bp, Homo sapiens
ctgacccattccacttccagtaagca

SEQ ID NO: 58058 - DNA, 26 bp, Homo sapiens
tgacccattccacttccagtaagcaa

SEQ ID NO: 58059 - DNA, 26 bp, Homo sapiens
gacccattccacttccagtaagcaat

SEQ ID NO: 58060 - DNA, 26 bp, Homo sapiens
acccattccacttccagtaagcaatg

SEQ ID NO: 58061 - DNA, 26 bp, Homo sapiens
cccattccacttccagtaagcaatgt

SEQ ID NO: 58062 - DNA, 26 bp, Homo sapiens
ccattccacttccagtaagcaatgtc

SEQ ID NO: 58063 - DNA, 26 bp, Homo sapiens
cattccacttccagtaagcaatgtca

SEQ ID NO: 58064 - DNA, 26 bp, Homo sapiens
attccacttccagtaagcaatgtcac

SEQ ID NO: 58065 - DNA, 26 bp, Homo sapiens
ttccacttccagtaagcaatgtcact

SEQ ID NO: 58066 - DNA, 26 bp, Homo sapiens
tccacttccagtaagcaatgtcactc

SEQ ID NO: 58067 - DNA, 26 bp, Homo sapiens
ccacttccagtaagcaatgtcactca

SEQ ID NO: 58068 - DNA, 26 bp, Homo sapiens
cacttccagtaagcaatgtcactcaa

SEQ ID NO: 58069 - DNA, 26 bp, Homo sapiens
acttccagtaagcaatgtcactcaac

SEQ ID NO: 58070 - DNA, 26 bp, Homo sapiens
cttccagtaagcaatgtcactcaact

SEQ ID NO: 58071 - DNA, 26 bp, Homo sapiens
ttccagtaagcaatgtcactcaactg

SEQ ID NO: 58072 - DNA, 26 bp, Homo sapiens
tccagtaagcaatgtcactcaactgg

SEQ ID NO: 58073 - DNA, 26 bp, Homo sapiens
ccagtaagcaatgtcactcaactggc

SEQ ID NO: 58074 - DNA, 26 bp, Homo sapiens
cagtaagcaatgtcactcaactggcc

SEQ ID NO: 58075 - DNA, 26 bp, Homo sapiens
agtaagcaatgtcactcaactggccg

SEQ ID NO: 58076 - DNA, 26 bp, Homo sapiens
gtaagcaatgtcactcaactggccgg

SEQ ID NO: 58077 - DNA, 26 bp, Homo sapiens
taagcaatgtcactcaactggccggt

SEQ ID NO: 58078 - DNA, 26 bp, Homo sapiens
aagcaatgtcactcaactggccggtg

SEQ ID NO: 58079 - DNA, 26 bp, Homo sapiens
agcaatgtcactcaactggccggtga

SEQ ID NO: 58080 - DNA, 26 bp, Homo sapiens
gcaatgtcactcaactggccggtgac

SEQ ID NO: 58081 - DNA, 26 bp, Homo sapiens
caatgtcactcaactggccggtgaca

SEQ ID NO: 58082 - DNA, 26 bp, Homo sapiens
aatgtcactcaactggccggtgacat

SEQ ID NO: 58083 - DNA, 26 bp, Homo sapiens
atgtcactcaactggccggtgacatt

SEQ ID NO: 58084 - DNA, 26 bp, Homo sapiens
tgtcactcaactggccggtgacatta

SEQ ID NO: 58085 - DNA, 26 bp, Homo sapiens
gtcactcaactggccggtgacattac

SEQ ID NO: 58086 - DNA, 26 bp, Homo sapiens
tcactcaactggccggtgacattaca

SEQ ID NO: 58087 - DNA, 26 bp, Homo sapiens
cactcaactggccggtgacattacag

SEQ ID NO: 58088 - DNA, 26 bp, Homo sapiens
actcaactggccggtgacattacaga

SEQ ID NO: 58089 - DNA, 26 bp, Homo sapiens
ctcaactggccggtgacattacagat

SEQ ID NO: 58090 - DNA, 26 bp, Homo sapiens
tcaactggccggtgacattacagatc

SEQ ID NO: 58091 - DNA, 26 bp, Homo sapiens
caactggccggtgacattacagatca

SEQ ID NO: 58092 - DNA, 26 bp, Homo sapiens
aactggccggtgacattacagatcaa

SEQ ID NO: 58093 - DNA, 26 bp, Homo sapiens
actggccggtgacattacagatcaat

SEQ ID NO: 58094 - DNA, 26 bp, Homo sapiens
ctggccggtgacattacagatcaatt

SEQ ID NO: 58095 - DNA, 26 bp, Homo sapiens
tggccggtgacattacagatcaattg

SEQ ID NO: 58096 - DNA, 26 bp, Homo sapiens
ggccggtgacattacagatcaattgt

SEQ ID NO: 58097 - DNA, 26 bp, Homo sapiens
gccggtgacattacagatcaattgta

SEQ ID NO: 58098 - DNA, 26 bp, Homo sapiens
ccggtgacattacagatcaattgtat

SEQ ID NO: 58099 - DNA, 26 bp, Homo sapiens
cggtgacattacagatcaattgtatc

SEQ ID NO: 58100 - DNA, 26 bp, Homo sapiens
ggtgacattacagatcaattgtatct

SEQ ID NO: 58101 - DNA, 26 bp, Homo sapiens
gtgacattacagatcaattgtatctg

SEQ ID NO: 58102 - DNA, 26 bp, Homo sapiens
tgacattacagatcaattgtatctgg

SEQ ID NO: 58103 - DNA, 26 bp, Homo sapiens
gacattacagatcaattgtatctggg

SEQ ID NO: 58104 - DNA, 26 bp, Homo sapiens
acattacagatcaattgtatctggga

SEQ ID NO: 58105 - DNA, 26 bp, Homo sapiens
cattacagatcaattgtatctgggat

SEQ ID NO: 58106 - DNA, 26 bp, Homo sapiens
attacagatcaattgtatctgggatc

SEQ ID NO: 58107 - DNA, 26 bp, Homo sapiens
ttacagatcaattgtatctgggatcc

SEQ ID NO: 58108 - DNA, 26 bp, Homo sapiens
tacagatcaattgtatctgggatccc

SEQ ID NO: 58109 - DNA, 26 bp, Homo sapiens
acagatcaattgtatctgggatccca

SEQ ID NO: 58110 - DNA, 26 bp, Homo sapiens
cagatcaattgtatctgggatcccaa

SEQ ID NO: 58111 - DNA, 26 bp, Homo sapiens
agatcaattgtatctgggatcccaag

SEQ ID NO: 58112 - DNA, 26 bp, Homo sapiens
gatcaattgtatctgggatcccaagt

SEQ ID NO: 58113 - DNA, 26 bp, Homo sapiens
atcaattgtatctgggatcccaagtc

SEQ ID NO: 58114 - DNA, 26 bp, Homo sapiens
tcaattgtatctgggatcccaagtct

SEQ ID NO: 58115 - DNA, 26 bp, Homo sapiens
caattgtatctgggatcccaagtcta

SEQ ID NO: 58116 - DNA, 26 bp, Homo sapiens
aattgtatctgggatcccaagtctac

SEQ ID NO: 58117 - DNA, 26 bp, Homo sapiens
attgtatctgggatcccaagtctact

SEQ ID NO: 58118 - DNA, 26 bp, Homo sapiens
ttgtatctgggatcccaagtctactt

SEQ ID NO: 58119 - DNA, 26 bp, Homo sapiens
tgtatctgggatcccaagtctacttc

SEQ ID NO: 58120 - DNA, 26 bp, Homo sapiens
gtatctgggatcccaagtctacttcc

SEQ ID NO: 58121 - DNA, 26 bp, Homo sapiens
tatctgggatcccaagtctacttcca

SEQ ID NO: 58122 - DNA, 26 bp, Homo sapiens
atctgggatcccaagtctacttccat

SEQ ID NO: 58123 - DNA, 26 bp, Homo sapiens
tctgggatcccaagtctacttccatt

SEQ ID NO: 58124 - DNA, 26 bp, Homo sapiens
ctgggatcccaagtctacttccattg

SEQ ID NO: 58125 - DNA, 26 bp, Homo sapiens
tgggatcccaagtctacttccattgt

SEQ ID NO: 58126 - DNA, 26 bp, Homo sapiens
gggatcccaagtctacttccattgtc

SEQ ID NO: 58127 - DNA, 26 bp, Homo sapiens
ggatcccaagtctacttccattgtct

SEQ ID NO: 58128 - DNA, 26 bp, Homo sapiens
gatcccaagtctacttccattgtctc

SEQ ID NO: 58129 - DNA, 26 bp, Homo sapiens
atcccaagtctacttccattgtctca

SEQ ID NO: 58130 - DNA, 26 bp, Homo sapiens
tcccaagtctacttccattgtctcat

SEQ ID NO: 58131 - DNA, 26 bp, Homo sapiens
cccaagtctacttccattgtctcatt

SEQ ID NO: 58132 - DNA, 26 bp, Homo sapiens
ccaagtctacttccattgtctcatta

SEQ ID NO: 58133 - DNA, 26 bp, Homo sapiens
caagtctacttccattgtctcattag

SEQ ID NO: 58134 - DNA, 26 bp, Homo sapiens
aagtctacttccattgtctcattagc

SEQ ID NO: 58135 - DNA, 26 bp, Homo sapiens
agtctacttccattgtctcattagct

SEQ ID NO: 58136 - DNA, 26 bp, Homo sapiens
gtctacttccattgtctcattagctg

SEQ ID NO: 58137 - DNA, 26 bp, Homo sapiens
tctacttccattgtctcattagctgg

SEQ ID NO: 58138 - DNA, 26 bp, Homo sapiens
ctacttccattgtctcattagctggg

SEQ ID NO: 58139 - DNA, 26 bp, Homo sapiens
tacttccattgtctcattagctgggc

SEQ ID NO: 58140 - DNA, 26 bp, Homo sapiens
acttccattgtctcattagctgggct

SEQ ID NO: 58141 - DNA, 26 bp, Homo sapiens
cttccattgtctcattagctgggctc

SEQ ID NO: 58142 - DNA, 26 bp, Homo sapiens
ttccattgtctcattagctgggctca

SEQ ID NO: 58143 - DNA, 26 bp, Homo sapiens
tccattgtctcattagctgggctcac

SEQ ID NO: 58144 - DNA, 26 bp, Homo sapiens
ccattgtctcattagctgggctcaca

SEQ ID NO: 58145 - DNA, 26 bp, Homo sapiens
cattgtctcattagctgggctcacaa

SEQ ID NO: 58146 - DNA, 26 bp, Homo sapiens
attgtctcattagctgggctcacaat

SEQ ID NO: 58147 - DNA, 26 bp, Homo sapiens
ttgtctcattagctgggctcacaatc

SEQ ID NO: 58148 - DNA, 26 bp, Homo sapiens
tgtctcattagctgggctcacaatca

SEQ ID NO: 58149 - DNA, 26 bp, Homo sapiens
gtctcattagctgggctcacaatcac

SEQ ID NO: 58150 - DNA, 26 bp, Homo sapiens
tctcattagctgggctcacaatcaca

SEQ ID NO: 58151 - DNA, 26 bp, Homo sapiens
ctcattagctgggctcacaatcacag

SEQ ID NO: 58152 - DNA, 26 bp, Homo sapiens
tcattagctgggctcacaatcacagg

SEQ ID NO: 58153 - DNA, 26 bp, Homo sapiens
cattagctgggctcacaatcacaggc

SEQ ID NO: 58154 - DNA, 26 bp, Homo sapiens
attagctgggctcacaatcacaggcc

SEQ ID NO: 58155 - DNA, 26 bp, Homo sapiens
ttagctgggctcacaatcacaggcct

SEQ ID NO: 58156 - DNA, 26 bp, Homo sapiens
tagctgggctcacaatcacaggcctt

SEQ ID NO: 58157 - DNA, 26 bp, Homo sapiens
agctgggctcacaatcacaggccttg

SEQ ID NO: 58158 - DNA, 26 bp, Homo sapiens
gctgggctcacaatcacaggccttgt

SEQ ID NO: 58159 - DNA, 26 bp, Homo sapiens
ctgggctcacaatcacaggccttgtg

SEQ ID NO: 58160 - DNA, 26 bp, Homo sapiens
tgggctcacaatcacaggccttgtgg

SEQ ID NO: 58161 - DNA, 26 bp, Homo sapiens
gggctcacaatcacaggccttgtggg

SEQ ID NO: 58162 - DNA, 26 bp, Homo sapiens
ggctcacaatcacaggccttgtgggt

SEQ ID NO: 58163 - DNA, 26 bp, Homo sapiens
gctcacaatcacaggccttgtgggtt

SEQ ID NO: 58164 - DNA, 26 bp, Homo sapiens
ctcacaatcacaggccttgtgggttt

SEQ ID NO: 58165 - DNA, 26 bp, Homo sapiens
tcacaatcacaggccttgtgggtttg

SEQ ID NO: 58166 - DNA, 26 bp, Homo sapiens
cacaatcacaggccttgtgggtttgt

SEQ ID NO: 58167 - DNA, 26 bp, Homo sapiens
acaatcacaggccttgtgggtttgtt

SEQ ID NO: 58168 - DNA, 26 bp, Homo sapiens
caatcacaggccttgtgggtttgttt

SEQ ID NO: 58169 - DNA, 26 bp, Homo sapiens
aatcacaggccttgtgggtttgtttt

SEQ ID NO: 58170 - DNA, 26 bp, Homo sapiens
atcacaggccttgtgggtttgttttc

SEQ ID NO: 58171 - DNA, 26 bp, Homo sapiens
tcacaggccttgtgggtttgttttcc

SEQ ID NO: 58172 - DNA, 26 bp, Homo sapiens
cacaggccttgtgggtttgttttcct

SEQ ID NO: 58173 - DNA, 26 bp, Homo sapiens
acaggccttgtgggtttgttttcctc

SEQ ID NO: 58174 - DNA, 26 bp, Homo sapiens
caggccttgtgggtttgttttcctct

SEQ ID NO: 58175 - DNA, 26 bp, Homo sapiens
aggccttgtgggtttgttttcctcta

SEQ ID NO: 58176 - DNA, 26 bp, Homo sapiens
ggccttgtgggtttgttttcctctag

SEQ ID NO: 58177 - DNA, 26 bp, Homo sapiens
gccttgtgggtttgttttcctctaga

SEQ ID NO: 58178 - DNA, 26 bp, Homo sapiens
ccttgtgggtttgttttcctctagag

SEQ ID NO: 58179 - DNA, 26 bp, Homo sapiens
cttgtgggtttgttttcctctagagt

SEQ ID NO: 58180 - DNA, 26 bp, Homo sapiens
ttgtgggtttgttttcctctagagta

SEQ ID NO: 58181 - DNA, 26 bp, Homo sapiens
tgtgggtttgttttcctctagagtaa

SEQ ID NO: 58182 - DNA, 26 bp, Homo sapiens
gtgggtttgttttcctctagagtaat

SEQ ID NO: 58183 - DNA, 26 bp, Homo sapiens
tgggtttgttttcctctagagtaata

SEQ ID NO: 58184 - DNA, 26 bp, Homo sapiens
gggtttgttttcctctagagtaataa

SEQ ID NO: 58185 - DNA, 26 bp, Homo sapiens
ggtttgttttcctctagagtaataaa

SEQ ID NO: 58186 - DNA, 26 bp, Homo sapiens
gtttgttttcctctagagtaataaat

SEQ ID NO: 58187 - DNA, 26 bp, Homo sapiens
tttgttttcctctagagtaataaatt

SEQ ID NO: 58188 - DNA, 26 bp, Homo sapiens
ttgttttcctctagagtaataaattc

SEQ ID NO: 58189 - DNA, 26 bp, Homo sapiens
tgttttcctctagagtaataaattct

SEQ ID NO: 58190 - DNA, 26 bp, Homo sapiens
gttttcctctagagtaataaattcta

SEQ ID NO: 58191 - DNA, 26 bp, Homo sapiens
ttttcctctagagtaataaattctat

SEQ ID NO: 58192 - DNA, 26 bp, Homo sapiens
tttcctctagagtaataaattctatt

SEQ ID NO: 58193 - DNA, 26 bp, Homo sapiens
ttcctctagagtaataaattctatta

SEQ ID NO: 58194 - DNA, 26 bp, Homo sapiens
tcctctagagtaataaattctattac

SEQ ID NO: 58195 - DNA, 26 bp, Homo sapiens
cctctagagtaataaattctattacc

SEQ ID NO: 58196 - DNA, 26 bp, Homo sapiens
ctctagagtaataaattctattaccc

SEQ ID NO: 58197 - DNA, 26 bp, Homo sapiens
tctagagtaataaattctattacccg

SEQ ID NO: 58198 - DNA, 26 bp, Homo sapiens
ctagagtaataaattctattacccgg

SEQ ID NO: 58199 - DNA, 26 bp, Homo sapiens
tagagtaataaattctattacccggg

SEQ ID NO: 58200 - DNA, 26 bp, Homo sapiens
agagtaataaattctattacccgggt

SEQ ID NO: 58201 - DNA, 26 bp, Homo sapiens
gagtaataaattctattacccgggta

SEQ ID NO: 58202 - DNA, 26 bp, Homo sapiens
agtaataaattctattacccgggtaa

SEQ ID NO: 58203 - DNA, 26 bp, Homo sapiens
gtaataaattctattacccgggtaat

SEQ ID NO: 58204 - DNA, 26 bp, Homo sapiens
taataaattctattacccgggtaata

SEQ ID NO: 58205 - DNA, 26 bp, Homo sapiens
aataaattctattacccgggtaatag

SEQ ID NO: 58206 - DNA, 26 bp, Homo sapiens
ataaattctattacccgggtaatagg

SEQ ID NO: 58207 - DNA, 26 bp, Homo sapiens
taaattctattacccgggtaatagga

SEQ ID NO: 58208 - DNA, 26 bp, Homo sapiens
aaattctattacccgggtaataggat

SEQ ID NO: 58209 - DNA, 26 bp, Homo sapiens
aattctattacccgggtaataggata

SEQ ID NO: 58210 - DNA, 26 bp, Homo sapiens
attctattacccgggtaataggatat

SEQ ID NO: 58211 - DNA, 26 bp, Homo sapiens
ttctattacccgggtaataggatatt

SEQ ID NO: 58212 - DNA, 26 bp, Homo sapiens
tctattacccgggtaataggatattg

SEQ ID NO: 58213 - DNA, 26 bp, Homo sapiens
ctattacccgggtaataggatattgc

SEQ ID NO: 58214 - DNA, 26 bp, Homo sapiens
tattacccgggtaataggatattgct

SEQ ID NO: 58215 - DNA, 26 bp, Homo sapiens
attacccgggtaataggatattgctt

SEQ ID NO: 58216 - DNA, 26 bp, Homo sapiens
ttacccgggtaataggatattgcttg

SEQ ID NO: 58217 - DNA, 26 bp, Homo sapiens
tacccgggtaataggatattgcttgc

SEQ ID NO: 58218 - DNA, 26 bp, Homo sapiens
acccgggtaataggatattgcttgcc

SEQ ID NO: 58219 - DNA, 26 bp, Homo sapiens
cccgggtaataggatattgcttgccc

SEQ ID NO: 58220 - DNA, 26 bp, Homo sapiens
ccgggtaataggatattgcttgccca

SEQ ID NO: 58221 - DNA, 26 bp, Homo sapiens
cgggtaataggatattgcttgcccaa

SEQ ID NO: 58222 - DNA, 26 bp, Homo sapiens
gggtaataggatattgcttgcccaag

SEQ ID NO: 58223 - DNA, 26 bp, Homo sapiens
ggtaataggatattgcttgcccaagt

SEQ ID NO: 58224 - DNA, 26 bp, Homo sapiens
gtaataggatattgcttgcccaagta

SEQ ID NO: 58225 - DNA, 26 bp, Homo sapiens
taataggatattgcttgcccaagtat

SEQ ID NO: 58226 - DNA, 26 bp, Homo sapiens
aataggatattgcttgcccaagtatg

SEQ ID NO: 58227 - DNA, 26 bp, Homo sapiens
ataggatattgcttgcccaagtatgt

SEQ ID NO: 58228 - DNA, 26 bp, Homo sapiens
taggatattgcttgcccaagtatgtg

SEQ ID NO: 58229 - DNA, 26 bp, Homo sapiens
aggatattgcttgcccaagtatgtgt

SEQ ID NO: 58230 - DNA, 26 bp, Homo sapiens
ggatattgcttgcccaagtatgtgta

SEQ ID NO: 58231 - DNA, 26 bp, Homo sapiens
gatattgcttgcccaagtatgtgtag

SEQ ID NO: 58232 - DNA, 26 bp, Homo sapiens
atattgcttgcccaagtatgtgtagg

SEQ ID NO: 58233 - DNA, 26 bp, Homo sapiens
tattgcttgcccaagtatgtgtagga

SEQ ID NO: 58234 - DNA, 26 bp, Homo sapiens
attgcttgcccaagtatgtgtaggat

SEQ ID NO: 58235 - DNA, 26 bp, Homo sapiens
ttgcttgcccaagtatgtgtaggatg

SEQ ID NO: 58236 - DNA, 26 bp, Homo sapiens
tgcttgcccaagtatgtgtaggatgc

SEQ ID NO: 58237 - DNA, 26 bp, Homo sapiens
gcttgcccaagtatgtgtaggatgca

SEQ ID NO: 58238 - DNA, 26 bp, Homo sapiens
cttgcccaagtatgtgtaggatgcat

SEQ ID NO: 58239 - DNA, 26 bp, Homo sapiens
ttgcccaagtatgtgtaggatgcatg

SEQ ID NO: 58240 - DNA, 26 bp, Homo sapiens
tgcccaagtatgtgtaggatgcatga

SEQ ID NO: 58241 - DNA, 26 bp, Homo sapiens
gcccaagtatgtgtaggatgcatgac

SEQ ID NO: 58242 - DNA, 26 bp, Homo sapiens
cccaagtatgtgtaggatgcatgaca

SEQ ID NO: 58243 - DNA, 26 bp, Homo sapiens
ccaagtatgtgtaggatgcatgacaa

SEQ ID NO: 58244 - DNA, 26 bp, Homo sapiens
caagtatgtgtaggatgcatgacaag

SEQ ID NO: 58245 - DNA, 26 bp, Homo sapiens
aagtatgtgtaggatgcatgacaagt

SEQ ID NO: 58246 - DNA, 26 bp, Homo sapiens
agtatgtgtaggatgcatgacaagta

SEQ ID NO: 58247 - DNA, 26 bp, Homo sapiens
gtatgtgtaggatgcatgacaagtat

SEQ ID NO: 58248 - DNA, 26 bp, Homo sapiens
tatgtgtaggatgcatgacaagtata

SEQ ID NO: 58249 - DNA, 26 bp, Homo sapiens
atgtgtaggatgcatgacaagtatag

SEQ ID NO: 58250 - DNA, 26 bp, Homo sapiens
tgtgtaggatgcatgacaagtatagt

SEQ ID NO: 58251 - DNA, 26 bp, Homo sapiens
gtgtaggatgcatgacaagtatagtt

SEQ ID NO: 58252 - DNA, 26 bp, Homo sapiens
tgtaggatgcatgacaagtatagttc

SEQ ID NO: 58253 - DNA, 26 bp, Homo sapiens
gtaggatgcatgacaagtatagttcc

SEQ ID NO: 58254 - DNA, 26 bp, Homo sapiens
taggatgcatgacaagtatagttccc

SEQ ID NO: 58255 - DNA, 26 bp, Homo sapiens
aggatgcatgacaagtatagttccct

SEQ ID NO: 58256 - DNA, 26 bp, Homo sapiens
ggatgcatgacaagtatagttccctc

SEQ ID NO: 58257 - DNA, 26 bp, Homo sapiens
gatgcatgacaagtatagttccctct

SEQ ID NO: 58258 - DNA, 26 bp, Homo sapiens
atgcatgacaagtatagttccctcta

SEQ ID NO: 58259 - DNA, 26 bp, Homo sapiens
tgcatgacaagtatagttccctctat

SEQ ID NO: 58260 - DNA, 26 bp, Homo sapiens
gcatgacaagtatagttccctctatg

SEQ ID NO: 58261 - DNA, 26 bp, Homo sapiens
catgacaagtatagttccctctatgc

SEQ ID NO: 58262 - DNA, 26 bp, Homo sapiens
atgacaagtatagttccctctatgct

SEQ ID NO: 58263 - DNA, 26 bp, Homo sapiens
tgacaagtatagttccctctatgctt

SEQ ID NO: 58264 - DNA, 26 bp, Homo sapiens
gacaagtatagttccctctatgcttt

SEQ ID NO: 58265 - DNA, 26 bp, Homo sapiens
acaagtatagttccctctatgctttt

SEQ ID NO: 58266 - DNA, 26 bp, Homo sapiens
caagtatagttccctctatgcttttc

SEQ ID NO: 58267 - DNA, 26 bp, Homo sapiens
aagtatagttccctctatgcttttca

SEQ ID NO: 58268 - DNA, 26 bp, Homo sapiens
agtatagttccctctatgcttttcag

SEQ ID NO: 58269 - DNA, 26 bp, Homo sapiens
gtatagttccctctatgcttttcagc

SEQ ID NO: 58270 - DNA, 26 bp, Homo sapiens
tatagttccctctatgcttttcagcc

SEQ ID NO: 58271 - DNA, 26 bp, Homo sapiens
atagttccctctatgcttttcagcca

SEQ ID NO: 58272 - DNA, 26 bp, Homo sapiens
tagttccctctatgcttttcagccac

SEQ ID NO: 58273 - DNA, 26 bp, Homo sapiens
agttccctctatgcttttcagccaca

SEQ ID NO: 58274 - DNA, 26 bp, Homo sapiens
gttccctctatgcttttcagccacat

SEQ ID NO: 58275 - DNA, 26 bp, Homo sapiens
ttccctctatgcttttcagccacatt

SEQ ID NO: 58276 - DNA, 26 bp, Homo sapiens
tccctctatgcttttcagccacattc

SEQ ID NO: 58277 - DNA, 26 bp, Homo sapiens
ccctctatgcttttcagccacattca

SEQ ID NO: 58278 - DNA, 26 bp, Homo sapiens
cctctatgcttttcagccacattcat

SEQ ID NO: 58279 - DNA, 26 bp, Homo sapiens
ctctatgcttttcagccacattcatc

SEQ ID NO: 58280 - DNA, 26 bp, Homo sapiens
tctatgcttttcagccacattcatca

SEQ ID NO: 58281 - DNA, 26 bp, Homo sapiens
ctatgcttttcagccacattcatcac

SEQ ID NO: 58282 - DNA, 26 bp, Homo sapiens
tatgcttttcagccacattcatcacg

SEQ ID NO: 58283 - DNA, 26 bp, Homo sapiens
atgcttttcagccacattcatcacga

SEQ ID NO: 58284 - DNA, 26 bp, Homo sapiens
tgcttttcagccacattcatcacgat

SEQ ID NO: 58285 - DNA, 26 bp, Homo sapiens
gcttttcagccacattcatcacgatg

SEQ ID NO: 58286 - DNA, 26 bp, Homo sapiens
cttttcagccacattcatcacgatga

SEQ ID NO: 58287 - DNA, 26 bp, Homo sapiens
ttttcagccacattcatcacgatgag

SEQ ID NO: 58288 - DNA, 26 bp, Homo sapiens
tttcagccacattcatcacgatgagc

SEQ ID NO: 58289 - DNA, 26 bp, Homo sapiens
ttcagccacattcatcacgatgagcc

SEQ ID NO: 58290 - DNA, 26 bp, Homo sapiens
tcagccacattcatcacgatgagcct

SEQ ID NO: 58291 - DNA, 26 bp, Homo sapiens
cagccacattcatcacgatgagccta

SEQ ID NO: 58292 - DNA, 26 bp, Homo sapiens
agccacattcatcacgatgagcctat

SEQ ID NO: 58293 - DNA, 26 bp, Homo sapiens
gccacattcatcacgatgagcctatc

SEQ ID NO: 58294 - DNA, 26 bp, Homo sapiens
ccacattcatcacgatgagcctatct

SEQ ID NO: 58295 - DNA, 26 bp, Homo sapiens
cacattcatcacgatgagcctatctt

SEQ ID NO: 58296 - DNA, 26 bp, Homo sapiens
acattcatcacgatgagcctatcttt

SEQ ID NO: 58297 - DNA, 26 bp, Homo sapiens
cattcatcacgatgagcctatctttg

SEQ ID NO: 58298 - DNA, 26 bp, Homo sapiens
attcatcacgatgagcctatctttga

SEQ ID NO: 58299 - DNA, 26 bp, Homo sapiens
ttcatcacgatgagcctatctttgac

SEQ ID NO: 58300 - DNA, 26 bp, Homo sapiens
tcatcacgatgagcctatctttgact

SEQ ID NO: 58301 - DNA, 26 bp, Homo sapiens
catcacgatgagcctatctttgactc

SEQ ID NO: 58302 - DNA, 26 bp, Homo sapiens
atcacgatgagcctatctttgactcc

SEQ ID NO: 58303 - DNA, 26 bp, Homo sapiens
tcacgatgagcctatctttgactcca

SEQ ID NO: 58304 - DNA, 26 bp, Homo sapiens
cacgatgagcctatctttgactccac

SEQ ID NO: 58305 - DNA, 26 bp, Homo sapiens
acgatgagcctatctttgactccact

SEQ ID NO: 58306 - DNA, 26 bp, Homo sapiens
cgatgagcctatctttgactccacta

SEQ ID NO: 58307 - DNA, 26 bp, Homo sapiens
gatgagcctatctttgactccactaa

SEQ ID NO: 58308 - DNA, 26 bp, Homo sapiens
atgagcctatctttgactccactaaa

SEQ ID NO: 58309 - DNA, 26 bp, Homo sapiens
tgagcctatctttgactccactaaag

SEQ ID NO: 58310 - DNA, 26 bp, Homo sapiens
gagcctatctttgactccactaaagt

SEQ ID NO: 58311 - DNA, 26 bp, Homo sapiens
agcctatctttgactccactaaagtg

SEQ ID NO: 58312 - DNA, 26 bp, Homo sapiens
gcctatctttgactccactaaagtgt

SEQ ID NO: 58313 - DNA, 26 bp, Homo sapiens
cctatctttgactccactaaagtgta

SEQ ID NO: 58314 - DNA, 26 bp, Homo sapiens
ctatctttgactccactaaagtgtat

SEQ ID NO: 58315 - DNA, 26 bp, Homo sapiens
tatctttgactccactaaagtgtata

SEQ ID NO: 58316 - DNA, 26 bp, Homo sapiens
atctttgactccactaaagtgtatat

SEQ ID NO: 58317 - DNA, 26 bp, Homo sapiens
tctttgactccactaaagtgtatatt

SEQ ID NO: 58318 - DNA, 26 bp, Homo sapiens
ctttgactccactaaagtgtatattg

SEQ ID NO: 58319 - DNA, 26 bp, Homo sapiens
tttgactccactaaagtgtatattgt

SEQ ID NO: 58320 - DNA, 26 bp, Homo sapiens
ttgactccactaaagtgtatattgtc

SEQ ID NO: 58321 - DNA, 26 bp, Homo sapiens
tgactccactaaagtgtatattgtca

SEQ ID NO: 58322 - DNA, 26 bp, Homo sapiens
gactccactaaagtgtatattgtcaa

SEQ ID NO: 58323 - DNA, 26 bp, Homo sapiens
actccactaaagtgtatattgtcaag

SEQ ID NO: 58324 - DNA, 26 bp, Homo sapiens
ctccactaaagtgtatattgtcaaga

SEQ ID NO: 58325 - DNA, 26 bp, Homo sapiens
tccactaaagtgtatattgtcaagaa

SEQ ID NO: 58326 - DNA, 26 bp, Homo sapiens
ccactaaagtgtatattgtcaagaag

SEQ ID NO: 58327 - DNA, 26 bp, Homo sapiens
cactaaagtgtatattgtcaagaagt

SEQ ID NO: 58328 - DNA, 26 bp, Homo sapiens
actaaagtgtatattgtcaagaagta

SEQ ID NO: 58329 - DNA, 26 bp, Homo sapiens
ctaaagtgtatattgtcaagaagtag

SEQ ID NO: 58330 - DNA, 26 bp, Homo sapiens
taaagtgtatattgtcaagaagtaga

SEQ ID NO: 58331 - DNA, 26 bp, Homo sapiens
aaagtgtatattgtcaagaagtagag

SEQ ID NO: 58332 - DNA, 26 bp, Homo sapiens
aagtgtatattgtcaagaagtagagg

SEQ ID NO: 58333 - DNA, 26 bp, Homo sapiens
agtgtatattgtcaagaagtagaggt

SEQ ID NO: 58334 - DNA, 26 bp, Homo sapiens
gtgtatattgtcaagaagtagaggtt

SEQ ID NO: 58335 - DNA, 26 bp, Homo sapiens
tgtatattgtcaagaagtagaggttt

SEQ ID NO: 58336 - DNA, 26 bp, Homo sapiens
gtatattgtcaagaagtagaggtttg

SEQ ID NO: 58337 - DNA, 26 bp, Homo sapiens
tatattgtcaagaagtagaggtttgc

SEQ ID NO: 58338 - DNA, 26 bp, Homo sapiens
atattgtcaagaagtagaggtttgca

SEQ ID NO: 58339 - DNA, 26 bp, Homo sapiens
tattgtcaagaagtagaggtttgcaa

SEQ ID NO: 58340 - DNA, 26 bp, Homo sapiens
attgtcaagaagtagaggtttgcaat

SEQ ID NO: 58341 - DNA, 26 bp, Homo sapiens
ttgtcaagaagtagaggtttgcaatc

SEQ ID NO: 58342 - DNA, 26 bp, Homo sapiens
tgtcaagaagtagaggtttgcaatcc

SEQ ID NO: 58343 - DNA, 26 bp, Homo sapiens
gtcaagaagtagaggtttgcaatcct

SEQ ID NO: 58344 - DNA, 26 bp, Homo sapiens
tcaagaagtagaggtttgcaatcctt

SEQ ID NO: 58345 - DNA, 26 bp, Homo sapiens
caagaagtagaggtttgcaatcctta

SEQ ID NO: 58346 - DNA, 26 bp, Homo sapiens
aagaagtagaggtttgcaatccttat

SEQ ID NO: 58347 - DNA, 26 bp, Homo sapiens
agaagtagaggtttgcaatccttata

SEQ ID NO: 58348 - DNA, 26 bp, Homo sapiens
gaagtagaggtttgcaatccttatac

SEQ ID NO: 58349 - DNA, 26 bp, Homo sapiens
aagtagaggtttgcaatccttatacc

SEQ ID NO: 58350 - DNA, 26 bp, Homo sapiens
agtagaggtttgcaatccttatacca

SEQ ID NO: 58351 - DNA, 26 bp, Homo sapiens
gtagaggtttgcaatccttataccac

SEQ ID NO: 58352 - DNA, 26 bp, Homo sapiens
tagaggtttgcaatccttataccact

SEQ ID NO: 58353 - DNA, 26 bp, Homo sapiens
agaggtttgcaatccttataccactg

SEQ ID NO: 58354 - DNA, 26 bp, Homo sapiens
gaggtttgcaatccttataccactgt

SEQ ID NO: 58355 - DNA, 26 bp, Homo sapiens
aggtttgcaatccttataccactgta

SEQ ID NO: 58356 - DNA, 26 bp, Homo sapiens
ggtttgcaatccttataccactgtaa

SEQ ID NO: 58357 - DNA, 26 bp, Homo sapiens
gtttgcaatccttataccactgtaat

SEQ ID NO: 58358 - DNA, 26 bp, Homo sapiens
tttgcaatccttataccactgtaatt

SEQ ID NO: 58359 - DNA, 26 bp, Homo sapiens
ttgcaatccttataccactgtaattt

SEQ ID NO: 58360 - DNA, 26 bp, Homo sapiens
tgcaatccttataccactgtaattta

SEQ ID NO: 58361 - DNA, 26 bp, Homo sapiens
gcaatccttataccactgtaatttag

SEQ ID NO: 58362 - DNA, 26 bp, Homo sapiens
caatccttataccactgtaatttagg

SEQ ID NO: 58363 - DNA, 26 bp, Homo sapiens
aatccttataccactgtaatttaggt

SEQ ID NO: 58364 - DNA, 26 bp, Homo sapiens
atccttataccactgtaatttaggta

SEQ ID NO: 58365 - DNA, 26 bp, Homo sapiens
tccttataccactgtaatttaggtaa

SEQ ID NO: 58366 - DNA, 26 bp, Homo sapiens
ccttataccactgtaatttaggtaac

SEQ ID NO: 58367 - DNA, 26 bp, Homo sapiens
cttataccactgtaatttaggtaact

SEQ ID NO: 58368 - DNA, 26 bp, Homo sapiens
ttataccactgtaatttaggtaactc

SEQ ID NO: 58369 - DNA, 26 bp, Homo sapiens
tataccactgtaatttaggtaactca

SEQ ID NO: 58370 - DNA, 26 bp, Homo sapiens
ataccactgtaatttaggtaactcat

SEQ ID NO: 58371 - DNA, 26 bp, Homo sapiens
taccactgtaatttaggtaactcatt

SEQ ID NO: 58372 - DNA, 26 bp, Homo sapiens
accactgtaatttaggtaactcatta

SEQ ID NO: 58373 - DNA, 26 bp, Homo sapiens
ccactgtaatttaggtaactcattat

SEQ ID NO: 58374 - DNA, 26 bp, Homo sapiens
cactgtaatttaggtaactcattatt

SEQ ID NO: 58375 - DNA, 26 bp, Homo sapiens
actgtaatttaggtaactcattattt

SEQ ID NO: 58376 - DNA, 26 bp, Homo sapiens
ctgtaatttaggtaactcattatttt

SEQ ID NO: 58377 - DNA, 26 bp, Homo sapiens
tgtaatttaggtaactcattattttc

SEQ ID NO: 58378 - DNA, 26 bp, Homo sapiens
gtaatttaggtaactcattattttca

SEQ ID NO: 58379 - DNA, 26 bp, Homo sapiens
taatttaggtaactcattattttcat

SEQ ID NO: 58380 - DNA, 26 bp, Homo sapiens
aatttaggtaactcattattttcatt

SEQ ID NO: 58381 - DNA, 26 bp, Homo sapiens
atttaggtaactcattattttcattt

SEQ ID NO: 58382 - DNA, 26 bp, Homo sapiens
tttaggtaactcattattttcatttt

SEQ ID NO: 58383 - DNA, 26 bp, Homo sapiens
ttaggtaactcattattttcattttt

SEQ ID NO: 58384 - DNA, 26 bp, Homo sapiens
taggtaactcattattttcattttta

SEQ ID NO: 58385 - DNA, 26 bp, Homo sapiens
aggtaactcattattttcatttttaa

SEQ ID NO: 58386 - DNA, 26 bp, Homo sapiens
ggtaactcattattttcatttttaaa

SEQ ID NO: 58387 - DNA, 26 bp, Homo sapiens
gtaactcattattttcatttttaaaa

SEQ ID NO: 58388 - DNA, 26 bp, Homo sapiens
taactcattattttcatttttaaaaa

SEQ ID NO: 58389 - DNA, 26 bp, Homo sapiens
aactcattattttcatttttaaaaaa

SEQ ID NO: 58390 - DNA, 26 bp, Homo sapiens
actcattattttcatttttaaaaaac

SEQ ID NO: 58391 - DNA, 26 bp, Homo sapiens
ctcattattttcatttttaaaaaact

SEQ ID NO: 58392 - DNA, 26 bp, Homo sapiens
tcattattttcatttttaaaaaactc

SEQ ID NO: 58393 - DNA, 26 bp, Homo sapiens
cattattttcatttttaaaaaactcc

SEQ ID NO: 58394 - DNA, 26 bp, Homo sapiens
attattttcatttttaaaaaactcca

SEQ ID NO: 58395 - DNA, 26 bp, Homo sapiens
ttattttcatttttaaaaaactccat

SEQ ID NO: 58396 - DNA, 26 bp, Homo sapiens
tattttcatttttaaaaaactccata

SEQ ID NO: 58397 - DNA, 26 bp, Homo sapiens
attttcatttttaaaaaactccatat

SEQ ID NO: 58398 - DNA, 26 bp, Homo sapiens
ttttcatttttaaaaaactccatata

SEQ ID NO: 58399 - DNA, 26 bp, Homo sapiens
tttcatttttaaaaaactccatataa

SEQ ID NO: 58400 - DNA, 26 bp, Homo sapiens
ttcatttttaaaaaactccatataag

SEQ ID NO: 58401 - DNA, 26 bp, Homo sapiens
tcatttttaaaaaactccatataagg

SEQ ID NO: 58402 - DNA, 26 bp, Homo sapiens
catttttaaaaaactccatataaggg

SEQ ID NO: 58403 - DNA, 26 bp, Homo sapiens
atttttaaaaaactccatataagggc

SEQ ID NO: 58404 - DNA, 26 bp, Homo sapiens
tttttaaaaaactccatataagggca

SEQ ID NO: 58405 - DNA, 26 bp, Homo sapiens
ttttaaaaaactccatataagggcac

SEQ ID NO: 58406 - DNA, 26 bp, Homo sapiens
tttaaaaaactccatataagggcaca

SEQ ID NO: 58407 - DNA, 26 bp, Homo sapiens
ttaaaaaactccatataagggcacac

SEQ ID NO: 58408 - DNA, 26 bp, Homo sapiens
taaaaaactccatataagggcacaca

SEQ ID NO: 58409 - DNA, 26 bp, Homo sapiens
aaaaaactccatataagggcacacaa

SEQ ID NO: 58410 - DNA, 26 bp, Homo sapiens
aaaaactccatataagggcacacaag

SEQ ID NO: 58411 - DNA, 26 bp, Homo sapiens
aaaactccatataagggcacacaagt

SEQ ID NO: 58412 - DNA, 26 bp, Homo sapiens
aaactccatataagggcacacaagtc

SEQ ID NO: 58413 - DNA, 26 bp, Homo sapiens
aactccatataagggcacacaagtcc

SEQ ID NO: 58414 - DNA, 26 bp, Homo sapiens
actccatataagggcacacaagtcct

SEQ ID NO: 58415 - DNA, 26 bp, Homo sapiens
ctccatataagggcacacaagtcctc

SEQ ID NO: 58416 - DNA, 26 bp, Homo sapiens
tccatataagggcacacaagtcctcc

SEQ ID NO: 58417 - DNA, 26 bp, Homo sapiens
ccatataagggcacacaagtcctccg

SEQ ID NO: 58418 - DNA, 26 bp, Homo sapiens
catataagggcacacaagtcctccgt

SEQ ID NO: 58419 - DNA, 26 bp, Homo sapiens
atataagggcacacaagtcctccgtc

SEQ ID NO: 58420 - DNA, 26 bp, Homo sapiens
tataagggcacacaagtcctccgtct

SEQ ID NO: 58421 - DNA, 26 bp, Homo sapiens
ataagggcacacaagtcctccgtctc

SEQ ID NO: 58422 - DNA, 26 bp, Homo sapiens
taagggcacacaagtcctccgtctcc

SEQ ID NO: 58423 - DNA, 26 bp, Homo sapiens
aagggcacacaagtcctccgtctcct

SEQ ID NO: 58424 - DNA, 26 bp, Homo sapiens
agggcacacaagtcctccgtctcctg

SEQ ID NO: 58425 - DNA, 26 bp, Homo sapiens
gggcacacaagtcctccgtctcctgc

SEQ ID NO: 58426 - DNA, 26 bp, Homo sapiens
ggcacacaagtcctccgtctcctgca

SEQ ID NO: 58427 - DNA, 26 bp, Homo sapiens
gcacacaagtcctccgtctcctgcaa

SEQ ID NO: 58428 - DNA, 26 bp, Homo sapiens
cacacaagtcctccgtctcctgcaac

SEQ ID NO: 58429 - DNA, 26 bp, Homo sapiens
acacaagtcctccgtctcctgcaacg

SEQ ID NO: 58430 - DNA, 26 bp, Homo sapiens
cacaagtcctccgtctcctgcaacgg

SEQ ID NO: 58431 - DNA, 26 bp, Homo sapiens
acaagtcctccgtctcctgcaacggg

SEQ ID NO: 58432 - DNA, 26 bp, Homo sapiens
caagtcctccgtctcctgcaacgggt

SEQ ID NO: 58433 - DNA, 26 bp, Homo sapiens
aagtcctccgtctcctgcaacgggta

SEQ ID NO: 58434 - DNA, 26 bp, Homo sapiens
agtcctccgtctcctgcaacgggtag

SEQ ID NO: 58435 - DNA, 26 bp, Homo sapiens
gtcctccgtctcctgcaacgggtagt

SEQ ID NO: 58436 - DNA, 26 bp, Homo sapiens
tcctccgtctcctgcaacgggtagtt

SEQ ID NO: 58437 - DNA, 26 bp, Homo sapiens
cctccgtctcctgcaacgggtagttt

SEQ ID NO: 58438 - DNA, 26 bp, Homo sapiens
ctccgtctcctgcaacgggtagtttc

SEQ ID NO: 58439 - DNA, 26 bp, Homo sapiens
tccgtctcctgcaacgggtagtttct

SEQ ID NO: 58440 - DNA, 26 bp, Homo sapiens
ccgtctcctgcaacgggtagtttctg

SEQ ID NO: 58441 - DNA, 26 bp, Homo sapiens
cgtctcctgcaacgggtagtttctgc

SEQ ID NO: 58442 - DNA, 26 bp, Homo sapiens
gtctcctgcaacgggtagtttctgct

SEQ ID NO: 58443 - DNA, 26 bp, Homo sapiens
tctcctgcaacgggtagtttctgctt

SEQ ID NO: 58444 - DNA, 26 bp, Homo sapiens
ctcctgcaacgggtagtttctgctta

SEQ ID NO: 58445 - DNA, 26 bp, Homo sapiens
tcctgcaacgggtagtttctgcttaa

SEQ ID NO: 58446 - DNA, 26 bp, Homo sapiens
cctgcaacgggtagtttctgcttaaa

SEQ ID NO: 58447 - DNA, 26 bp, Homo sapiens
ctgcaacgggtagtttctgcttaaat

SEQ ID NO: 58448 - DNA, 26 bp, Homo sapiens
tgcaacgggtagtttctgcttaaata

SEQ ID NO: 58449 - DNA, 26 bp, Homo sapiens
gcaacgggtagtttctgcttaaatat

SEQ ID NO: 58450 - DNA, 26 bp, Homo sapiens
caacgggtagtttctgcttaaatatg

SEQ ID NO: 58451 - DNA, 26 bp, Homo sapiens
aacgggtagtttctgcttaaatatgg

SEQ ID NO: 58452 - DNA, 26 bp, Homo sapiens
acgggtagtttctgcttaaatatggc

SEQ ID NO: 58453 - DNA, 26 bp, Homo sapiens
cgggtagtttctgcttaaatatggct

SEQ ID NO: 58454 - DNA, 26 bp, Homo sapiens
gggtagtttctgcttaaatatggctt

SEQ ID NO: 58455 - DNA, 26 bp, Homo sapiens
ggtagtttctgcttaaatatggcttg

SEQ ID NO: 58456 - DNA, 26 bp, Homo sapiens
gtagtttctgcttaaatatggcttgt

SEQ ID NO: 58457 - DNA, 26 bp, Homo sapiens
tagtttctgcttaaatatggcttgtg

SEQ ID NO: 58458 - DNA, 26 bp, Homo sapiens
agtttctgcttaaatatggcttgtgc

SEQ ID NO: 58459 - DNA, 26 bp, Homo sapiens
gtttctgcttaaatatggcttgtgca

SEQ ID NO: 58460 - DNA, 26 bp, Homo sapiens
tttctgcttaaatatggcttgtgcat

SEQ ID NO: 58461 - DNA, 26 bp, Homo sapiens
ttctgcttaaatatggcttgtgcatt

SEQ ID NO: 58462 - DNA, 26 bp, Homo sapiens
tctgcttaaatatggcttgtgcatta

SEQ ID NO: 58463 - DNA, 26 bp, Homo sapiens
ctgcttaaatatggcttgtgcattat

SEQ ID NO: 58464 - DNA, 26 bp, Homo sapiens
tgcttaaatatggcttgtgcattata

SEQ ID NO: 58465 - DNA, 26 bp, Homo sapiens
gcttaaatatggcttgtgcattataa

SEQ ID NO: 58466 - DNA, 26 bp, Homo sapiens
cttaaatatggcttgtgcattataac

SEQ ID NO: 58467 - DNA, 26 bp, Homo sapiens
ttaaatatggcttgtgcattataaca

SEQ ID NO: 58468 - DNA, 26 bp, Homo sapiens
taaatatggcttgtgcattataacat

SEQ ID NO: 58469 - DNA, 26 bp, Homo sapiens
aaatatggcttgtgcattataacata

SEQ ID NO: 58470 - DNA, 26 bp, Homo sapiens
aatatggcttgtgcattataacataa

SEQ ID NO: 58471 - DNA, 26 bp, Homo sapiens
atatggcttgtgcattataacataag

SEQ ID NO: 58472 - DNA, 26 bp, Homo sapiens
tatggcttgtgcattataacataagt

SEQ ID NO: 58473 - DNA, 26 bp, Homo sapiens
atggcttgtgcattataacataagtt

SEQ ID NO: 58474 - DNA, 26 bp, Homo sapiens
tggcttgtgcattataacataagtta

SEQ ID NO: 58475 - DNA, 26 bp, Homo sapiens
ggcttgtgcattataacataagttag

SEQ ID NO: 58476 - DNA, 26 bp, Homo sapiens
gcttgtgcattataacataagttagg

SEQ ID NO: 58477 - DNA, 26 bp, Homo sapiens
cttgtgcattataacataagttaggc

SEQ ID NO: 58478 - DNA, 26 bp, Homo sapiens
ttgtgcattataacataagttaggct

SEQ ID NO: 58479 - DNA, 26 bp, Homo sapiens
tgtgcattataacataagttaggctc

SEQ ID NO: 58480 - DNA, 26 bp, Homo sapiens
gtgcattataacataagttaggctca

SEQ ID NO: 58481 - DNA, 26 bp, Homo sapiens
tgcattataacataagttaggctcat

SEQ ID NO: 58482 - DNA, 26 bp, Homo sapiens
gcattataacataagttaggctcatt

SEQ ID NO: 58483 - DNA, 26 bp, Homo sapiens
cattataacataagttaggctcattc

SEQ ID NO: 58484 - DNA, 26 bp, Homo sapiens
attataacataagttaggctcattct

SEQ ID NO: 58485 - DNA, 26 bp, Homo sapiens
ttataacataagttaggctcattctc

SEQ ID NO: 58486 - DNA, 26 bp, Homo sapiens
tataacataagttaggctcattctcc

SEQ ID NO: 58487 - DNA, 26 bp, Homo sapiens
ataacataagttaggctcattctcca

SEQ ID NO: 58488 - DNA, 26 bp, Homo sapiens
taacataagttaggctcattctccac

SEQ ID NO: 58489 - DNA, 26 bp, Homo sapiens
aacataagttaggctcattctccaca

SEQ ID NO: 58490 - DNA, 26 bp, Homo sapiens
acataagttaggctcattctccacaa

SEQ ID NO: 58491 - DNA, 26 bp, Homo sapiens
cataagttaggctcattctccacaaa

SEQ ID NO: 58492 - DNA, 26 bp, Homo sapiens
ataagttaggctcattctccacaaat

SEQ ID NO: 58493 - DNA, 26 bp, Homo sapiens
taagttaggctcattctccacaaatt

SEQ ID NO: 58494 - DNA, 26 bp, Homo sapiens
aagttaggctcattctccacaaattt

SEQ ID NO: 58495 - DNA, 26 bp, Homo sapiens
agttaggctcattctccacaaatttt

SEQ ID NO: 58496 - DNA, 26 bp, Homo sapiens
gttaggctcattctccacaaattttg

SEQ ID NO: 58497 - DNA, 26 bp, Homo sapiens
ttaggctcattctccacaaattttgc

SEQ ID NO: 58498 - DNA, 26 bp, Homo sapiens
taggctcattctccacaaattttgca

SEQ ID NO: 58499 - DNA, 26 bp, Homo sapiens
aggctcattctccacaaattttgcac

SEQ ID NO: 58500 - DNA, 26 bp, Homo sapiens
ggctcattctccacaaattttgcact

SEQ ID NO: 58501 - DNA, 26 bp, Homo sapiens
gctcattctccacaaattttgcactt

SEQ ID NO: 58502 - DNA, 26 bp, Homo sapiens
ctcattctccacaaattttgcactta

SEQ ID NO: 58503 - DNA, 26 bp, Homo sapiens
tcattctccacaaattttgcacttat

SEQ ID NO: 58504 - DNA, 26 bp, Homo sapiens
cattctccacaaattttgcacttatt

SEQ ID NO: 58505 - DNA, 26 bp, Homo sapiens
attctccacaaattttgcacttattt

SEQ ID NO: 58506 - DNA, 26 bp, Homo sapiens
ttctccacaaattttgcacttatttt

SEQ ID NO: 58507 - DNA, 26 bp, Homo sapiens
tctccacaaattttgcacttatttta

SEQ ID NO: 58508 - DNA, 26 bp, Homo sapiens
ctccacaaattttgcacttattttaa

SEQ ID NO: 58509 - DNA, 26 bp, Homo sapiens
tccacaaattttgcacttattttaat

SEQ ID NO: 58510 - DNA, 26 bp, Homo sapiens
ccacaaattttgcacttattttaatt

SEQ ID NO: 58511 - DNA, 26 bp, Homo sapiens
cacaaattttgcacttattttaattc

SEQ ID NO: 58512 - DNA, 26 bp, Homo sapiens
acaaattttgcacttattttaattct

SEQ ID NO: 58513 - DNA, 26 bp, Homo sapiens
caaattttgcacttattttaattctg

SEQ ID NO: 58514 - DNA, 26 bp, Homo sapiens
aaattttgcacttattttaattctga

SEQ ID NO: 58515 - DNA, 26 bp, Homo sapiens
aattttgcacttattttaattctgag

SEQ ID NO: 58516 - DNA, 26 bp, Homo sapiens
attttgcacttattttaattctgagg

SEQ ID NO: 58517 - DNA, 26 bp, Homo sapiens
ttttgcacttattttaattctgaggc

SEQ ID NO: 58518 - DNA, 26 bp, Homo sapiens
tttgcacttattttaattctgaggca

SEQ ID NO: 58519 - DNA, 26 bp, Homo sapiens
ttgcacttattttaattctgaggcag

SEQ ID NO: 58520 - DNA, 26 bp, Homo sapiens
tgcacttattttaattctgaggcagt

SEQ ID NO: 58521 - DNA, 26 bp, Homo sapiens
gcacttattttaattctgaggcagta

SEQ ID NO: 58522 - DNA, 26 bp, Homo sapiens
cacttattttaattctgaggcagtaa

SEQ ID NO: 58523 - DNA, 26 bp, Homo sapiens
acttattttaattctgaggcagtaag

SEQ ID NO: 58524 - DNA, 26 bp, Homo sapiens
cttattttaattctgaggcagtaaga

SEQ ID NO: 58525 - DNA, 26 bp, Homo sapiens
ttattttaattctgaggcagtaagat

SEQ ID NO: 58526 - DNA, 26 bp, Homo sapiens
tattttaattctgaggcagtaagatg

SEQ ID NO: 58527 - DNA, 26 bp, Homo sapiens
attttaattctgaggcagtaagatga

SEQ ID NO: 58528 - DNA, 26 bp, Homo sapiens
ttttaattctgaggcagtaagatgaa

SEQ ID NO: 58529 - DNA, 26 bp, Homo sapiens
tttaattctgaggcagtaagatgaat

SEQ ID NO: 58530 - DNA, 26 bp, Homo sapiens
ttaattctgaggcagtaagatgaatt

SEQ ID NO: 58531 - DNA, 26 bp, Homo sapiens
taattctgaggcagtaagatgaattt

SEQ ID NO: 58532 - DNA, 26 bp, Homo sapiens
aattctgaggcagtaagatgaatttc

SEQ ID NO: 58533 - DNA, 26 bp, Homo sapiens
attctgaggcagtaagatgaatttct

SEQ ID NO: 58534 - DNA, 26 bp, Homo sapiens
ttctgaggcagtaagatgaatttctt

SEQ ID NO: 58535 - DNA, 26 bp, Homo sapiens
tctgaggcagtaagatgaatttctta

SEQ ID NO: 58536 - DNA, 26 bp, Homo sapiens
ctgaggcagtaagatgaatttcttac

SEQ ID NO: 58537 - DNA, 26 bp, Homo sapiens
tgaggcagtaagatgaatttcttacc

SEQ ID NO: 58538 - DNA, 26 bp, Homo sapiens
gaggcagtaagatgaatttcttacca

SEQ ID NO: 58539 - DNA, 26 bp, Homo sapiens
aggcagtaagatgaatttcttaccac

SEQ ID NO: 58540 - DNA, 26 bp, Homo sapiens
ggcagtaagatgaatttcttaccacg

SEQ ID NO: 58541 - DNA, 26 bp, Homo sapiens
gcagtaagatgaatttcttaccacgc

SEQ ID NO: 58542 - DNA, 26 bp, Homo sapiens
cagtaagatgaatttcttaccacgca

SEQ ID NO: 58543 - DNA, 26 bp, Homo sapiens
agtaagatgaatttcttaccacgcaa

SEQ ID NO: 58544 - DNA, 26 bp, Homo sapiens
gtaagatgaatttcttaccacgcaat

SEQ ID NO: 58545 - DNA, 26 bp, Homo sapiens
taagatgaatttcttaccacgcaata

SEQ ID NO: 58546 - DNA, 26 bp, Homo sapiens
aagatgaatttcttaccacgcaatag

SEQ ID NO: 58547 - DNA, 26 bp, Homo sapiens
agatgaatttcttaccacgcaatagt

SEQ ID NO: 58548 - DNA, 26 bp, Homo sapiens
gatgaatttcttaccacgcaatagta

SEQ ID NO: 58549 - DNA, 26 bp, Homo sapiens
atgaatttcttaccacgcaatagtaa

SEQ ID NO: 58550 - DNA, 26 bp, Homo sapiens
tgaatttcttaccacgcaatagtaat

SEQ ID NO: 58551 - DNA, 26 bp, Homo sapiens
gaatttcttaccacgcaatagtaatg

SEQ ID NO: 58552 - DNA, 26 bp, Homo sapiens
aatttcttaccacgcaatagtaatgt

SEQ ID NO: 58553 - DNA, 26 bp, Homo sapiens
atttcttaccacgcaatagtaatgtc

SEQ ID NO: 58554 - DNA, 26 bp, Homo sapiens
tttcttaccacgcaatagtaatgtcc

SEQ ID NO: 58555 - DNA, 26 bp, Homo sapiens
ttcttaccacgcaatagtaatgtcct

SEQ ID NO: 58556 - DNA, 26 bp, Homo sapiens
tcttaccacgcaatagtaatgtcctg

SEQ ID NO: 58557 - DNA, 26 bp, Homo sapiens
cttaccacgcaatagtaatgtcctga

SEQ ID NO: 58558 - DNA, 26 bp, Homo sapiens
ttaccacgcaatagtaatgtcctgaa

SEQ ID NO: 58559 - DNA, 26 bp, Homo sapiens
taccacgcaatagtaatgtcctgaat

SEQ ID NO: 58560 - DNA, 26 bp, Homo sapiens
accacgcaatagtaatgtcctgaatc

SEQ ID NO: 58561 - DNA, 26 bp, Homo sapiens
ccacgcaatagtaatgtcctgaatcc

SEQ ID NO: 58562 - DNA, 26 bp, Homo sapiens
cacgcaatagtaatgtcctgaatcct

SEQ ID NO: 58563 - DNA, 26 bp, Homo sapiens
acgcaatagtaatgtcctgaatcctc

SEQ ID NO: 58564 - DNA, 26 bp, Homo sapiens
cgcaatagtaatgtcctgaatcctcc

SEQ ID NO: 58565 - DNA, 26 bp, Homo sapiens
gcaatagtaatgtcctgaatcctcca

SEQ ID NO: 58566 - DNA, 26 bp, Homo sapiens
caatagtaatgtcctgaatcctccac

SEQ ID NO: 58567 - DNA, 26 bp, Homo sapiens
aatagtaatgtcctgaatcctccacc

SEQ ID NO: 58568 - DNA, 26 bp, Homo sapiens
atagtaatgtcctgaatcctccacct

SEQ ID NO: 58569 - DNA, 26 bp, Homo sapiens
tagtaatgtcctgaatcctccacctt

SEQ ID NO: 58570 - DNA, 26 bp, Homo sapiens
agtaatgtcctgaatcctccacctta

SEQ ID NO: 58571 - DNA, 26 bp, Homo sapiens
gtaatgtcctgaatcctccaccttag

SEQ ID NO: 58572 - DNA, 26 bp, Homo sapiens
taatgtcctgaatcctccaccttagc

SEQ ID NO: 58573 - DNA, 26 bp, Homo sapiens
aatgtcctgaatcctccaccttagca

SEQ ID NO: 58574 - DNA, 26 bp, Homo sapiens
atgtcctgaatcctccaccttagcag

SEQ ID NO: 58575 - DNA, 26 bp, Homo sapiens
tgtcctgaatcctccaccttagcagg

SEQ ID NO: 58576 - DNA, 26 bp, Homo sapiens
gtcctgaatcctccaccttagcagga

SEQ ID NO: 58577 - DNA, 26 bp, Homo sapiens
tcctgaatcctccaccttagcaggaa

SEQ ID NO: 58578 - DNA, 26 bp, Homo sapiens
cctgaatcctccaccttagcaggaac

SEQ ID NO: 58579 - DNA, 26 bp, Homo sapiens
ctgaatcctccaccttagcaggaaca

SEQ ID NO: 58580 - DNA, 26 bp, Homo sapiens
tgaatcctccaccttagcaggaacaa

SEQ ID NO: 58581 - DNA, 26 bp, Homo sapiens
gaatcctccaccttagcaggaacaaa

SEQ ID NO: 58582 - DNA, 26 bp, Homo sapiens
aatcctccaccttagcaggaacaaac

SEQ ID NO: 58583 - DNA, 26 bp, Homo sapiens
atcctccaccttagcaggaacaaacc

SEQ ID NO: 58584 - DNA, 26 bp, Homo sapiens
tcctccaccttagcaggaacaaacca

SEQ ID NO: 58585 - DNA, 26 bp, Homo sapiens
cctccaccttagcaggaacaaaccaa

SEQ ID NO: 58586 - DNA, 26 bp, Homo sapiens
ctccaccttagcaggaacaaaccaaa

SEQ ID NO: 58587 - DNA, 26 bp, Homo sapiens
tccaccttagcaggaacaaaccaaag

SEQ ID NO: 58588 - DNA, 26 bp, Homo sapiens
ccaccttagcaggaacaaaccaaagt

SEQ ID NO: 58589 - DNA, 26 bp, Homo sapiens
caccttagcaggaacaaaccaaagtt

SEQ ID NO: 58590 - DNA, 26 bp, Homo sapiens
accttagcaggaacaaaccaaagttt

SEQ ID NO: 58591 - DNA, 26 bp, Homo sapiens
ccttagcaggaacaaaccaaagtttc

SEQ ID NO: 58592 - DNA, 26 bp, Homo sapiens
cttagcaggaacaaaccaaagtttct

SEQ ID NO: 58593 - DNA, 26 bp, Homo sapiens
ttagcaggaacaaaccaaagtttctc

SEQ ID NO: 58594 - DNA, 26 bp, Homo sapiens
tagcaggaacaaaccaaagtttctct

SEQ ID NO: 58595 - DNA, 26 bp, Homo sapiens
agcaggaacaaaccaaagtttctctt

SEQ ID NO: 58596 - DNA, 26 bp, Homo sapiens
gcaggaacaaaccaaagtttctcttt

SEQ ID NO: 58597 - DNA, 26 bp, Homo sapiens
caggaacaaaccaaagtttctctttg

SEQ ID NO: 58598 - DNA, 26 bp, Homo sapiens
aggaacaaaccaaagtttctctttgt

SEQ ID NO: 58599 - DNA, 26 bp, Homo sapiens
ggaacaaaccaaagtttctctttgtg

SEQ ID NO: 58600 - DNA, 26 bp, Homo sapiens
gaacaaaccaaagtttctctttgtgt

SEQ ID NO: 58601 - DNA, 26 bp, Homo sapiens
aacaaaccaaagtttctctttgtgtt

SEQ ID NO: 58602 - DNA, 26 bp, Homo sapiens
acaaaccaaagtttctctttgtgttg

SEQ ID NO: 58603 - DNA, 26 bp, Homo sapiens
caaaccaaagtttctctttgtgttga

SEQ ID NO: 58604 - DNA, 26 bp, Homo sapiens
aaaccaaagtttctctttgtgttgat

SEQ ID NO: 58605 - DNA, 26 bp, Homo sapiens
aaccaaagtttctctttgtgttgatg

SEQ ID NO: 58606 - DNA, 26 bp, Homo sapiens
accaaagtttctctttgtgttgatga

SEQ ID NO: 58607 - DNA, 26 bp, Homo sapiens
ccaaagtttctctttgtgttgatgaa

SEQ ID NO: 58608 - DNA, 26 bp, Homo sapiens
caaagtttctctttgtgttgatgaat

SEQ ID NO: 58609 - DNA, 26 bp, Homo sapiens
aaagtttctctttgtgttgatgaatc

SEQ ID NO: 58610 - DNA, 26 bp, Homo sapiens
aagtttctctttgtgttgatgaatcc

SEQ ID NO: 58611 - DNA, 26 bp, Homo sapiens
agtttctctttgtgttgatgaatcct

SEQ ID NO: 58612 - DNA, 26 bp, Homo sapiens
gtttctctttgtgttgatgaatcctg

SEQ ID NO: 58613 - DNA, 26 bp, Homo sapiens
tttctctttgtgttgatgaatcctgg

SEQ ID NO: 58614 - DNA, 26 bp, Homo sapiens
ttctctttgtgttgatgaatcctgga

SEQ ID NO: 58615 - DNA, 26 bp, Homo sapiens
tctctttgtgttgatgaatcctggag

SEQ ID NO: 58616 - DNA, 26 bp, Homo sapiens
ctctttgtgttgatgaatcctggagg

SEQ ID NO: 58617 - DNA, 26 bp, Homo sapiens
tctttgtgttgatgaatcctggaggc

SEQ ID NO: 58618 - DNA, 26 bp, Homo sapiens
ctttgtgttgatgaatcctggaggct

SEQ ID NO: 58619 - DNA, 26 bp, Homo sapiens
tttgtgttgatgaatcctggaggctt

SEQ ID NO: 58620 - DNA, 26 bp, Homo sapiens
ttgtgttgatgaatcctggaggcttg

SEQ ID NO: 58621 - DNA, 26 bp, Homo sapiens
tgtgttgatgaatcctggaggcttgt

SEQ ID NO: 58622 - DNA, 26 bp, Homo sapiens
gtgttgatgaatcctggaggcttgtt

SEQ ID NO: 58623 - DNA, 26 bp, Homo sapiens
tgttgatgaatcctggaggcttgttc

SEQ ID NO: 58624 - DNA, 26 bp, Homo sapiens
gttgatgaatcctggaggcttgttct

SEQ ID NO: 58625 - DNA, 26 bp, Homo sapiens
ttgatgaatcctggaggcttgttctg

SEQ ID NO: 58626 - DNA, 26 bp, Homo sapiens
tgatgaatcctggaggcttgttctgt

SEQ ID NO: 58627 - DNA, 26 bp, Homo sapiens
gatgaatcctggaggcttgttctgta

SEQ ID NO: 58628 - DNA, 26 bp, Homo sapiens
atgaatcctggaggcttgttctgtag

SEQ ID NO: 58629 - DNA, 26 bp, Homo sapiens
tgaatcctggaggcttgttctgtaga

SEQ ID NO: 58630 - DNA, 26 bp, Homo sapiens
gaatcctggaggcttgttctgtagat

SEQ ID NO: 58631 - DNA, 26 bp, Homo sapiens
aatcctggaggcttgttctgtagata

SEQ ID NO: 58632 - DNA, 26 bp, Homo sapiens
atcctggaggcttgttctgtagatac

SEQ ID NO: 58633 - DNA, 26 bp, Homo sapiens
tcctggaggcttgttctgtagataca

SEQ ID NO: 58634 - DNA, 26 bp, Homo sapiens
cctggaggcttgttctgtagatacag

SEQ ID NO: 58635 - DNA, 26 bp, Homo sapiens
ctggaggcttgttctgtagatacagg

SEQ ID NO: 58636 - DNA, 26 bp, Homo sapiens
tggaggcttgttctgtagatacaggt

SEQ ID NO: 58637 - DNA, 26 bp, Homo sapiens
ggaggcttgttctgtagatacaggtg

SEQ ID NO: 58638 - DNA, 26 bp, Homo sapiens
gaggcttgttctgtagatacaggtgt

SEQ ID NO: 58639 - DNA, 26 bp, Homo sapiens
aggcttgttctgtagatacaggtgtc

SEQ ID NO: 58640 - DNA, 26 bp, Homo sapiens
ggcttgttctgtagatacaggtgtct

SEQ ID NO: 58641 - DNA, 26 bp, Homo sapiens
gcttgttctgtagatacaggtgtctt

SEQ ID NO: 58642 - DNA, 26 bp, Homo sapiens
cttgttctgtagatacaggtgtcttg

SEQ ID NO: 58643 - DNA, 26 bp, Homo sapiens
ttgttctgtagatacaggtgtcttgc

SEQ ID NO: 58644 - DNA, 26 bp, Homo sapiens
tgttctgtagatacaggtgtcttgct

SEQ ID NO: 58645 - DNA, 26 bp, Homo sapiens
gttctgtagatacaggtgtcttgctg

SEQ ID NO: 58646 - DNA, 26 bp, Homo sapiens
ttctgtagatacaggtgtcttgctgt

SEQ ID NO: 58647 - DNA, 26 bp, Homo sapiens
tctgtagatacaggtgtcttgctgtc

SEQ ID NO: 58648 - DNA, 26 bp, Homo sapiens
ctgtagatacaggtgtcttgctgtca

SEQ ID NO: 58649 - DNA, 26 bp, Homo sapiens
tgtagatacaggtgtcttgctgtcat

SEQ ID NO: 58650 - DNA, 26 bp, Homo sapiens
gtagatacaggtgtcttgctgtcatc

SEQ ID NO: 58651 - DNA, 26 bp, Homo sapiens
tagatacaggtgtcttgctgtcatct

SEQ ID NO: 58652 - DNA, 26 bp, Homo sapiens
agatacaggtgtcttgctgtcatctt

SEQ ID NO: 58653 - DNA, 26 bp, Homo sapiens
gatacaggtgtcttgctgtcatcttt

SEQ ID NO: 58654 - DNA, 26 bp, Homo sapiens
atacaggtgtcttgctgtcatcttta

SEQ ID NO: 58655 - DNA, 26 bp, Homo sapiens
tacaggtgtcttgctgtcatctttat

SEQ ID NO: 58656 - DNA, 26 bp, Homo sapiens
acaggtgtcttgctgtcatctttata

SEQ ID NO: 58657 - DNA, 26 bp, Homo sapiens
caggtgtcttgctgtcatctttatac

SEQ ID NO: 58658 - DNA, 26 bp, Homo sapiens
aggtgtcttgctgtcatctttatacc

SEQ ID NO: 58659 - DNA, 26 bp, Homo sapiens
ggtgtcttgctgtcatctttatacca

SEQ ID NO: 58660 - DNA, 26 bp, Homo sapiens
gtgtcttgctgtcatctttataccaa

SEQ ID NO: 58661 - DNA, 26 bp, Homo sapiens
tgtcttgctgtcatctttataccaag

SEQ ID NO: 58662 - DNA, 26 bp, Homo sapiens
gtcttgctgtcatctttataccaagt

SEQ ID NO: 58663 - DNA, 26 bp, Homo sapiens
tcttgctgtcatctttataccaagtt

SEQ ID NO: 58664 - DNA, 26 bp, Homo sapiens
cttgctgtcatctttataccaagtta

SEQ ID NO: 58665 - DNA, 26 bp, Homo sapiens
ttgctgtcatctttataccaagttat

SEQ ID NO: 58666 - DNA, 26 bp, Homo sapiens
tgctgtcatctttataccaagttata

SEQ ID NO: 58667 - DNA, 26 bp, Homo sapiens
gctgtcatctttataccaagttatag

SEQ ID NO: 58668 - DNA, 26 bp, Homo sapiens
ctgtcatctttataccaagttatagt

SEQ ID NO: 58669 - DNA, 26 bp, Homo sapiens
tgtcatctttataccaagttatagtg

SEQ ID NO: 58670 - DNA, 26 bp, Homo sapiens
gtcatctttataccaagttatagtgc

SEQ ID NO: 58671 - DNA, 26 bp, Homo sapiens
tcatctttataccaagttatagtgcc

SEQ ID NO: 58672 - DNA, 26 bp, Homo sapiens
catctttataccaagttatagtgcct

SEQ ID NO: 58673 - DNA, 26 bp, Homo sapiens
atctttataccaagttatagtgcctt

SEQ ID NO: 58674 - DNA, 26 bp, Homo sapiens
tctttataccaagttatagtgccttt

SEQ ID NO: 58675 - DNA, 26 bp, Homo sapiens
ctttataccaagttatagtgcctttg

SEQ ID NO: 58676 - DNA, 26 bp, Homo sapiens
tttataccaagttatagtgcctttgt

SEQ ID NO: 58677 - DNA, 26 bp, Homo sapiens
ttataccaagttatagtgcctttgtg

SEQ ID NO: 58678 - DNA, 26 bp, Homo sapiens
tataccaagttatagtgcctttgtgt

SEQ ID NO: 58679 - DNA, 26 bp, Homo sapiens
ataccaagttatagtgcctttgtgtt

SEQ ID NO: 58680 - DNA, 26 bp, Homo sapiens
taccaagttatagtgcctttgtgttc

SEQ ID NO: 58681 - DNA, 26 bp, Homo sapiens
accaagttatagtgcctttgtgttca

SEQ ID NO: 58682 - DNA, 26 bp, Homo sapiens
ccaagttatagtgcctttgtgttcat

SEQ ID NO: 58683 - DNA, 26 bp, Homo sapiens
caagttatagtgcctttgtgttcatt

SEQ ID NO: 58684 - DNA, 26 bp, Homo sapiens
aagttatagtgcctttgtgttcattt

SEQ ID NO: 58685 - DNA, 26 bp, Homo sapiens
agttatagtgcctttgtgttcatttg

SEQ ID NO: 58686 - DNA, 26 bp, Homo sapiens
gttatagtgcctttgtgttcatttgg

SEQ ID NO: 58687 - DNA, 26 bp, Homo sapiens
ttatagtgcctttgtgttcatttggg

SEQ ID NO: 58688 - DNA, 26 bp, Homo sapiens
tatagtgcctttgtgttcatttgggt

SEQ ID NO: 58689 - DNA, 26 bp, Homo sapiens
atagtgcctttgtgttcatttgggtt

SEQ ID NO: 58690 - DNA, 26 bp, Homo sapiens
tagtgcctttgtgttcatttgggtta

SEQ ID NO: 58691 - DNA, 26 bp, Homo sapiens
agtgcctttgtgttcatttgggttaa

SEQ ID NO: 58692 - DNA, 26 bp, Homo sapiens
gtgcctttgtgttcatttgggttaag

SEQ ID NO: 58693 - DNA, 26 bp, Homo sapiens
tgcctttgtgttcatttgggttaaga

SEQ ID NO: 58694 - DNA, 26 bp, Homo sapiens
gcctttgtgttcatttgggttaagag

SEQ ID NO: 58695 - DNA, 26 bp, Homo sapiens
cctttgtgttcatttgggttaagagg

SEQ ID NO: 58696 - DNA, 26 bp, Homo sapiens
ctttgtgttcatttgggttaagagga

SEQ ID NO: 58697 - DNA, 26 bp, Homo sapiens
tttgtgttcatttgggttaagaggac

SEQ ID NO: 58698 - DNA, 26 bp, Homo sapiens
ttgtgttcatttgggttaagaggaca

SEQ ID NO: 58699 - DNA, 26 bp, Homo sapiens
tgtgttcatttgggttaagaggacag

SEQ ID NO: 58700 - DNA, 26 bp, Homo sapiens
gtgttcatttgggttaagaggacagg

SEQ ID NO: 58701 - DNA, 26 bp, Homo sapiens
tgttcatttgggttaagaggacaggg

SEQ ID NO: 58702 - DNA, 26 bp, Homo sapiens
gttcatttgggttaagaggacaggga

SEQ ID NO: 58703 - DNA, 26 bp, Homo sapiens
ttcatttgggttaagaggacagggac

SEQ ID NO: 58704 - DNA, 26 bp, Homo sapiens
tcatttgggttaagaggacagggacg

SEQ ID NO: 58705 - DNA, 26 bp, Homo sapiens
catttgggttaagaggacagggacga

SEQ ID NO: 58706 - DNA, 26 bp, Homo sapiens
atttgggttaagaggacagggacgaa

SEQ ID NO: 58707 - DNA, 26 bp, Homo sapiens
tttgggttaagaggacagggacgaac

SEQ ID NO: 58708 - DNA, 26 bp, Homo sapiens
ttgggttaagaggacagggacgaaca

SEQ ID NO: 58709 - DNA, 26 bp, Homo sapiens
tgggttaagaggacagggacgaacat

SEQ ID NO: 58710 - DNA, 26 bp, Homo sapiens
gggttaagaggacagggacgaacatc

SEQ ID NO: 58711 - DNA, 26 bp, Homo sapiens
ggttaagaggacagggacgaacatca

SEQ ID NO: 58712 - DNA, 26 bp, Homo sapiens
gttaagaggacagggacgaacatcaa

SEQ ID NO: 58713 - DNA, 26 bp, Homo sapiens
ttaagaggacagggacgaacatcaat

SEQ ID NO: 58714 - DNA, 26 bp, Homo sapiens
taagaggacagggacgaacatcaatt

SEQ ID NO: 58715 - DNA, 26 bp, Homo sapiens
aagaggacagggacgaacatcaattt

SEQ ID NO: 58716 - DNA, 26 bp, Homo sapiens
agaggacagggacgaacatcaatttc

SEQ ID NO: 58717 - DNA, 26 bp, Homo sapiens
gaggacagggacgaacatcaatttca

SEQ ID NO: 58718 - DNA, 26 bp, Homo sapiens
aggacagggacgaacatcaatttcat

SEQ ID NO: 58719 - DNA, 26 bp, Homo sapiens
ggacagggacgaacatcaatttcatt

SEQ ID NO: 58720 - DNA, 26 bp, Homo sapiens
gacagggacgaacatcaatttcattt

SEQ ID NO: 58721 - DNA, 26 bp, Homo sapiens
acagggacgaacatcaatttcatttg

SEQ ID NO: 58722 - DNA, 26 bp, Homo sapiens
cagggacgaacatcaatttcatttgc

SEQ ID NO: 58723 - DNA, 26 bp, Homo sapiens
agggacgaacatcaatttcatttgca

SEQ ID NO: 58724 - DNA, 26 bp, Homo sapiens
gggacgaacatcaatttcatttgcag

SEQ ID NO: 58725 - DNA, 26 bp, Homo sapiens
ggacgaacatcaatttcatttgcaga

SEQ ID NO: 58726 - DNA, 26 bp, Homo sapiens
gacgaacatcaatttcatttgcagat

SEQ ID NO: 58727 - DNA, 26 bp, Homo sapiens
acgaacatcaatttcatttgcagatg

SEQ ID NO: 58728 - DNA, 26 bp, Homo sapiens
cgaacatcaatttcatttgcagatga

SEQ ID NO: 58729 - DNA, 26 bp, Homo sapiens
gaacatcaatttcatttgcagatgac

SEQ ID NO: 58730 - DNA, 26 bp, Homo sapiens
aacatcaatttcatttgcagatgaca

SEQ ID NO: 58731 - DNA, 26 bp, Homo sapiens
acatcaatttcatttgcagatgacac

SEQ ID NO: 58732 - DNA, 26 bp, Homo sapiens
catcaatttcatttgcagatgacact

SEQ ID NO: 58733 - DNA, 26 bp, Homo sapiens
atcaatttcatttgcagatgacacta

SEQ ID NO: 58734 - DNA, 26 bp, Homo sapiens
tcaatttcatttgcagatgacactaa

SEQ ID NO: 58735 - DNA, 26 bp, Homo sapiens
caatttcatttgcagatgacactaaa

SEQ ID NO: 58736 - DNA, 26 bp, Homo sapiens
aatttcatttgcagatgacactaaaa

SEQ ID NO: 58737 - DNA, 26 bp, Homo sapiens
atttcatttgcagatgacactaaaat

SEQ ID NO: 58738 - DNA, 26 bp, Homo sapiens
tttcatttgcagatgacactaaaatt

SEQ ID NO: 58739 - DNA, 26 bp, Homo sapiens
ttcatttgcagatgacactaaaatta

SEQ ID NO: 58740 - DNA, 26 bp, Homo sapiens
tcatttgcagatgacactaaaattat

SEQ ID NO: 58741 - DNA, 26 bp, Homo sapiens
catttgcagatgacactaaaattatt

SEQ ID NO: 58742 - DNA, 26 bp, Homo sapiens
atttgcagatgacactaaaattattt

SEQ ID NO: 58743 - DNA, 26 bp, Homo sapiens
tttgcagatgacactaaaattatttt

SEQ ID NO: 58744 - DNA, 26 bp, Homo sapiens
ttgcagatgacactaaaattattttt

SEQ ID NO: 58745 - DNA, 26 bp, Homo sapiens
tgcagatgacactaaaattatttttt

SEQ ID NO: 58746 - DNA, 26 bp, Homo sapiens
gcagatgacactaaaattattttttc

SEQ ID NO: 58747 - DNA, 26 bp, Homo sapiens
cagatgacactaaaattattttttct

SEQ ID NO: 58748 - DNA, 26 bp, Homo sapiens
agatgacactaaaattattttttctt

SEQ ID NO: 58749 - DNA, 26 bp, Homo sapiens
gatgacactaaaattattttttcttc

SEQ ID NO: 58750 - DNA, 26 bp, Homo sapiens
atgacactaaaattattttttcttca

SEQ ID NO: 58751 - DNA, 26 bp, Homo sapiens
tgacactaaaattattttttcttcac

SEQ ID NO: 58752 - DNA, 26 bp, Homo sapiens
gacactaaaattattttttcttcacg

SEQ ID NO: 58753 - DNA, 26 bp, Homo sapiens
acactaaaattattttttcttcacgt

SEQ ID NO: 58754 - DNA, 26 bp, Homo sapiens
cactaaaattattttttcttcacgtt

SEQ ID NO: 58755 - DNA, 26 bp, Homo sapiens
actaaaattattttttcttcacgttc

SEQ ID NO: 58756 - DNA, 26 bp, Homo sapiens
ctaaaattattttttcttcacgttcc

SEQ ID NO: 58757 - DNA, 26 bp, Homo sapiens
taaaattattttttcttcacgttcct

SEQ ID NO: 58758 - DNA, 26 bp, Homo sapiens
aaaattattttttcttcacgttcctt

SEQ ID NO: 58759 - DNA, 26 bp, Homo sapiens
aaattattttttcttcacgttccttg

SEQ ID NO: 58760 - DNA, 26 bp, Homo sapiens
aattattttttcttcacgttccttgc

SEQ ID NO: 58761 - DNA, 26 bp, Homo sapiens
attattttttcttcacgttccttgca

SEQ ID NO: 58762 - DNA, 26 bp, Homo sapiens
ttattttttcttcacgttccttgcat

SEQ ID NO: 58763 - DNA, 26 bp, Homo sapiens
tattttttcttcacgttccttgcatt

SEQ ID NO: 58764 - DNA, 26 bp, Homo sapiens
attttttcttcacgttccttgcattt

SEQ ID NO: 58765 - DNA, 26 bp, Homo sapiens
ttttttcttcacgttccttgcattta

SEQ ID NO: 58766 - DNA, 26 bp, Homo sapiens
tttttcttcacgttccttgcatttat

SEQ ID NO: 58767 - DNA, 26 bp, Homo sapiens
ttttcttcacgttccttgcatttatc

SEQ ID NO: 58768 - DNA, 26 bp, Homo sapiens
tttcttcacgttccttgcatttatca

SEQ ID NO: 58769 - DNA, 26 bp, Homo sapiens
ttcttcacgttccttgcatttatcag

SEQ ID NO: 58770 - DNA, 26 bp, Homo sapiens
tcttcacgttccttgcatttatcagc

SEQ ID NO: 58771 - DNA, 26 bp, Homo sapiens
cttcacgttccttgcatttatcagcc

SEQ ID NO: 58772 - DNA, 26 bp, Homo sapiens
ttcacgttccttgcatttatcagcct

SEQ ID NO: 58773 - DNA, 26 bp, Homo sapiens
tcacgttccttgcatttatcagcctc

SEQ ID NO: 58774 - DNA, 26 bp, Homo sapiens
cacgttccttgcatttatcagcctcc

SEQ ID NO: 58775 - DNA, 26 bp, Homo sapiens
acgttccttgcatttatcagcctcca

SEQ ID NO: 58776 - DNA, 26 bp, Homo sapiens
cgttccttgcatttatcagcctccag

SEQ ID NO: 58777 - DNA, 26 bp, Homo sapiens
gttccttgcatttatcagcctccaga

SEQ ID NO: 58778 - DNA, 26 bp, Homo sapiens
ttccttgcatttatcagcctccagag

SEQ ID NO: 58779 - DNA, 26 bp, Homo sapiens
tccttgcatttatcagcctccagaga

SEQ ID NO: 58780 - DNA, 26 bp, Homo sapiens
ccttgcatttatcagcctccagagaa

SEQ ID NO: 58781 - DNA, 26 bp, Homo sapiens
cttgcatttatcagcctccagagaag

SEQ ID NO: 58782 - DNA, 26 bp, Homo sapiens
ttgcatttatcagcctccagagaaga

SEQ ID NO: 58783 - DNA, 26 bp, Homo sapiens
tgcatttatcagcctccagagaagaa

SEQ ID NO: 58784 - DNA, 26 bp, Homo sapiens
gcatttatcagcctccagagaagaaa

SEQ ID NO: 58785 - DNA, 26 bp, Homo sapiens
catttatcagcctccagagaagaaat

SEQ ID NO: 58786 - DNA, 26 bp, Homo sapiens
atttatcagcctccagagaagaaatc

SEQ ID NO: 58787 - DNA, 26 bp, Homo sapiens
tttatcagcctccagagaagaaatca

SEQ ID NO: 58788 - DNA, 26 bp, Homo sapiens
ttatcagcctccagagaagaaatcag

SEQ ID NO: 58789 - DNA, 26 bp, Homo sapiens
tatcagcctccagagaagaaatcagt

SEQ ID NO: 58790 - DNA, 26 bp, Homo sapiens
atcagcctccagagaagaaatcagta

SEQ ID NO: 58791 - DNA, 26 bp, Homo sapiens
tcagcctccagagaagaaatcagtag

SEQ ID NO: 58792 - DNA, 26 bp, Homo sapiens
cagcctccagagaagaaatcagtaga

SEQ ID NO: 58793 - DNA, 26 bp, Homo sapiens
agcctccagagaagaaatcagtagag

SEQ ID NO: 58794 - DNA, 26 bp, Homo sapiens
gcctccagagaagaaatcagtagagc

SEQ ID NO: 58795 - DNA, 26 bp, Homo sapiens
cctccagagaagaaatcagtagagct

SEQ ID NO: 58796 - DNA, 26 bp, Homo sapiens
ctccagagaagaaatcagtagagcta

SEQ ID NO: 58797 - DNA, 26 bp, Homo sapiens
tccagagaagaaatcagtagagctat

SEQ ID NO: 58798 - DNA, 26 bp, Homo sapiens
ccagagaagaaatcagtagagctatg

SEQ ID NO: 58799 - DNA, 26 bp, Homo sapiens
cagagaagaaatcagtagagctatga

SEQ ID NO: 58800 - DNA, 26 bp, Homo sapiens
agagaagaaatcagtagagctatgaa

SEQ ID NO: 58801 - DNA, 26 bp, Homo sapiens
gagaagaaatcagtagagctatgaaa

SEQ ID NO: 58802 - DNA, 26 bp, Homo sapiens
agaagaaatcagtagagctatgaaac

SEQ ID NO: 58803 - DNA, 26 bp, Homo sapiens
gaagaaatcagtagagctatgaaaca

SEQ ID NO: 58804 - DNA, 26 bp, Homo sapiens
aagaaatcagtagagctatgaaacaa

SEQ ID NO: 58805 - DNA, 26 bp, Homo sapiens
agaaatcagtagagctatgaaacaaa

SEQ ID NO: 58806 - DNA, 26 bp, Homo sapiens
gaaatcagtagagctatgaaacaaat

SEQ ID NO: 58807 - DNA, 26 bp, Homo sapiens
aaatcagtagagctatgaaacaaata

SEQ ID NO: 58808 - DNA, 26 bp, Homo sapiens
aatcagtagagctatgaaacaaataa

SEQ ID NO: 58809 - DNA, 26 bp, Homo sapiens
atcagtagagctatgaaacaaataag

SEQ ID NO: 58810 - DNA, 26 bp, Homo sapiens
tcagtagagctatgaaacaaataagt

SEQ ID NO: 58811 - DNA, 26 bp, Homo sapiens
cagtagagctatgaaacaaataagtc

SEQ ID NO: 58812 - DNA, 26 bp, Homo sapiens
agtagagctatgaaacaaataagtct

SEQ ID NO: 58813 - DNA, 26 bp, Homo sapiens
gtagagctatgaaacaaataagtctg

SEQ ID NO: 58814 - DNA, 26 bp, Homo sapiens
tagagctatgaaacaaataagtctga

SEQ ID NO: 58815 - DNA, 26 bp, Homo sapiens
agagctatgaaacaaataagtctgag

SEQ ID NO: 58816 - DNA, 26 bp, Homo sapiens
gagctatgaaacaaataagtctgagt

SEQ ID NO: 58817 - DNA, 26 bp, Homo sapiens
agctatgaaacaaataagtctgagta

SEQ ID NO: 58818 - DNA, 26 bp, Homo sapiens
gctatgaaacaaataagtctgagtaa

SEQ ID NO: 58819 - DNA, 26 bp, Homo sapiens
ctatgaaacaaataagtctgagtaac

SEQ ID NO: 58820 - DNA, 26 bp, Homo sapiens
tatgaaacaaataagtctgagtaaca

SEQ ID NO: 58821 - DNA, 26 bp, Homo sapiens
atgaaacaaataagtctgagtaacac

SEQ ID NO: 58822 - DNA, 26 bp, Homo sapiens
tgaaacaaataagtctgagtaacact

SEQ ID NO: 58823 - DNA, 26 bp, Homo sapiens
gaaacaaataagtctgagtaacactt

SEQ ID NO: 58824 - DNA, 26 bp, Homo sapiens
aaacaaataagtctgagtaacacttt

SEQ ID NO: 58825 - DNA, 26 bp, Homo sapiens
aacaaataagtctgagtaacactttc

SEQ ID NO: 58826 - DNA, 26 bp, Homo sapiens
acaaataagtctgagtaacactttca

SEQ ID NO: 58827 - DNA, 26 bp, Homo sapiens
caaataagtctgagtaacactttcat

SEQ ID NO: 58828 - DNA, 26 bp, Homo sapiens
aaataagtctgagtaacactttcata

SEQ ID NO: 58829 - DNA, 26 bp, Homo sapiens
aataagtctgagtaacactttcatat

SEQ ID NO: 58830 - DNA, 26 bp, Homo sapiens
ataagtctgagtaacactttcatatt

SEQ ID NO: 58831 - DNA, 26 bp, Homo sapiens
taagtctgagtaacactttcatattc

SEQ ID NO: 58832 - DNA, 26 bp, Homo sapiens
aagtctgagtaacactttcatattct

SEQ ID NO: 58833 - DNA, 26 bp, Homo sapiens
agtctgagtaacactttcatattctt

SEQ ID NO: 58834 - DNA, 26 bp, Homo sapiens
gtctgagtaacactttcatattcttc

SEQ ID NO: 58835 - DNA, 26 bp, Homo sapiens
tctgagtaacactttcatattcttct

SEQ ID NO: 58836 - DNA, 26 bp, Homo sapiens
ctgagtaacactttcatattcttctt

SEQ ID NO: 58837 - DNA, 26 bp, Homo sapiens
tgagtaacactttcatattcttcttg

SEQ ID NO: 58838 - DNA, 26 bp, Homo sapiens
gagtaacactttcatattcttcttgg

SEQ ID NO: 58839 - DNA, 26 bp, Homo sapiens
agtaacactttcatattcttcttgga

SEQ ID NO: 58840 - DNA, 26 bp, Homo sapiens
gtaacactttcatattcttcttggag

SEQ ID NO: 58841 - DNA, 26 bp, Homo sapiens
taacactttcatattcttcttggaga

SEQ ID NO: 58842 - DNA, 26 bp, Homo sapiens
aacactttcatattcttcttggagaa

SEQ ID NO: 58843 - DNA, 26 bp, Homo sapiens
acactttcatattcttcttggagaag

SEQ ID NO: 58844 - DNA, 26 bp, Homo sapiens
cactttcatattcttcttggagaagg

SEQ ID NO: 58845 - DNA, 26 bp, Homo sapiens
actttcatattcttcttggagaaggc

SEQ ID NO: 58846 - DNA, 26 bp, Homo sapiens
ctttcatattcttcttggagaaggcc

SEQ ID NO: 58847 - DNA, 26 bp, Homo sapiens
tttcatattcttcttggagaaggcct

SEQ ID NO: 58848 - DNA, 26 bp, Homo sapiens
ttcatattcttcttggagaaggcctt

SEQ ID NO: 58849 - DNA, 26 bp, Homo sapiens
tcatattcttcttggagaaggccttg

SEQ ID NO: 58850 - DNA, 26 bp, Homo sapiens
catattcttcttggagaaggccttgt

SEQ ID NO: 58851 - DNA, 26 bp, Homo sapiens
atattcttcttggagaaggccttgtc

SEQ ID NO: 58852 - DNA, 26 bp, Homo sapiens
tattcttcttggagaaggccttgtct

SEQ ID NO: 58853 - DNA, 26 bp, Homo sapiens
attcttcttggagaaggccttgtctt

SEQ ID NO: 58854 - DNA, 26 bp, Homo sapiens
ttcttcttggagaaggccttgtcttt

SEQ ID NO: 58855 - DNA, 26 bp, Homo sapiens
tcttcttggagaaggccttgtctttt

SEQ ID NO: 58856 - DNA, 26 bp, Homo sapiens
cttcttggagaaggccttgtctttta

SEQ ID NO: 58857 - DNA, 26 bp, Homo sapiens
ttcttggagaaggccttgtcttttac

SEQ ID NO: 58858 - DNA, 26 bp, Homo sapiens
tcttggagaaggccttgtcttttacc

SEQ ID NO: 58859 - DNA, 26 bp, Homo sapiens
cttggagaaggccttgtcttttacca

SEQ ID NO: 58860 - DNA, 26 bp, Homo sapiens
ttggagaaggccttgtcttttaccaa

SEQ ID NO: 58861 - DNA, 26 bp, Homo sapiens
tggagaaggccttgtcttttaccaag

SEQ ID NO: 58862 - DNA, 26 bp, Homo sapiens
ggagaaggccttgtcttttaccaagg

SEQ ID NO: 58863 - DNA, 26 bp, Homo sapiens
gagaaggccttgtcttttaccaaggg

SEQ ID NO: 58864 - DNA, 26 bp, Homo sapiens
agaaggccttgtcttttaccaagggg

SEQ ID NO: 58865 - DNA, 26 bp, Homo sapiens
gaaggccttgtcttttaccaaggggt

SEQ ID NO: 58866 - DNA, 26 bp, Homo sapiens
aaggccttgtcttttaccaaggggtc

SEQ ID NO: 58867 - DNA, 26 bp, Homo sapiens
aggccttgtcttttaccaaggggtcc

SEQ ID NO: 58868 - DNA, 26 bp, Homo sapiens
ggccttgtcttttaccaaggggtcca

SEQ ID NO: 58869 - DNA, 26 bp, Homo sapiens
gccttgtcttttaccaaggggtccag

SEQ ID NO: 58870 - DNA, 26 bp, Homo sapiens
ccttgtcttttaccaaggggtccagc

SEQ ID NO: 58871 - DNA, 26 bp, Homo sapiens
cttgtcttttaccaaggggtccagct

SEQ ID NO: 58872 - DNA, 26 bp, Homo sapiens
ttgtcttttaccaaggggtccagctt

SEQ ID NO: 58873 - DNA, 26 bp, Homo sapiens
tgtcttttaccaaggggtccagcttc

SEQ ID NO: 58874 - DNA, 26 bp, Homo sapiens
gtcttttaccaaggggtccagcttct

SEQ ID NO: 58875 - DNA, 26 bp, Homo sapiens
tcttttaccaaggggtccagcttctc

SEQ ID NO: 58876 - DNA, 26 bp, Homo sapiens
cttttaccaaggggtccagcttctca

SEQ ID NO: 58877 - DNA, 26 bp, Homo sapiens
ttttaccaaggggtccagcttctcag

SEQ ID NO: 58878 - DNA, 26 bp, Homo sapiens
tttaccaaggggtccagcttctcagg

SEQ ID NO: 58879 - DNA, 26 bp, Homo sapiens
ttaccaaggggtccagcttctcagga

SEQ ID NO: 58880 - DNA, 26 bp, Homo sapiens
taccaaggggtccagcttctcaggag

SEQ ID NO: 58881 - DNA, 26 bp, Homo sapiens
accaaggggtccagcttctcaggagg

SEQ ID NO: 58882 - DNA, 26 bp, Homo sapiens
ccaaggggtccagcttctcaggaggg

SEQ ID NO: 58883 - DNA, 26 bp, Homo sapiens
caaggggtccagcttctcaggaggga

SEQ ID NO: 58884 - DNA, 26 bp, Homo sapiens
aaggggtccagcttctcaggagggag

SEQ ID NO: 58885 - DNA, 26 bp, Homo sapiens
aggggtccagcttctcaggagggagt

SEQ ID NO: 58886 - DNA, 26 bp, Homo sapiens
ggggtccagcttctcaggagggagtc

SEQ ID NO: 58887 - DNA, 26 bp, Homo sapiens
gggtccagcttctcaggagggagtca

SEQ ID NO: 58888 - DNA, 26 bp, Homo sapiens
ggtccagcttctcaggagggagtcac

SEQ ID NO: 58889 - DNA, 26 bp, Homo sapiens
gtccagcttctcaggagggagtcacc

SEQ ID NO: 58890 - DNA, 26 bp, Homo sapiens
tccagcttctcaggagggagtcacca

SEQ ID NO: 58891 - DNA, 26 bp, Homo sapiens
ccagcttctcaggagggagtcaccat

SEQ ID NO: 58892 - DNA, 26 bp, Homo sapiens
cagcttctcaggagggagtcaccatc

SEQ ID NO: 58893 - DNA, 26 bp, Homo sapiens
agcttctcaggagggagtcaccatct

SEQ ID NO: 58894 - DNA, 26 bp, Homo sapiens
gcttctcaggagggagtcaccatctt

SEQ ID NO: 58895 - DNA, 26 bp, Homo sapiens
cttctcaggagggagtcaccatcttc

SEQ ID NO: 58896 - DNA, 26 bp, Homo sapiens
ttctcaggagggagtcaccatcttca

SEQ ID NO: 58897 - DNA, 26 bp, Homo sapiens
tctcaggagggagtcaccatcttcag

SEQ ID NO: 58898 - DNA, 26 bp, Homo sapiens
ctcaggagggagtcaccatcttcaga

SEQ ID NO: 58899 - DNA, 26 bp, Homo sapiens
tcaggagggagtcaccatcttcagag

SEQ ID NO: 58900 - DNA, 26 bp, Homo sapiens
caggagggagtcaccatcttcagagg

SEQ ID NO: 58901 - DNA, 26 bp, Homo sapiens
aggagggagtcaccatcttcagaggg

SEQ ID NO: 58902 - DNA, 26 bp, Homo sapiens
ggagggagtcaccatcttcagagggt

SEQ ID NO: 58903 - DNA, 26 bp, Homo sapiens
gagggagtcaccatcttcagagggtg

SEQ ID NO: 58904 - DNA, 26 bp, Homo sapiens
agggagtcaccatcttcagagggtgc

SEQ ID NO: 58905 - DNA, 26 bp, Homo sapiens
gggagtcaccatcttcagagggtgcg

SEQ ID NO: 58906 - DNA, 26 bp, Homo sapiens
ggagtcaccatcttcagagggtgcgt

SEQ ID NO: 58907 - DNA, 26 bp, Homo sapiens
gagtcaccatcttcagagggtgcgtc

SEQ ID NO: 58908 - DNA, 26 bp, Homo sapiens
agtcaccatcttcagagggtgcgtct

SEQ ID NO: 58909 - DNA, 26 bp, Homo sapiens
gtcaccatcttcagagggtgcgtcta

SEQ ID NO: 58910 - DNA, 26 bp, Homo sapiens
tcaccatcttcagagggtgcgtctac

SEQ ID NO: 58911 - DNA, 26 bp, Homo sapiens
caccatcttcagagggtgcgtctacg

SEQ ID NO: 58912 - DNA, 26 bp, Homo sapiens
accatcttcagagggtgcgtctacgc

SEQ ID NO: 58913 - DNA, 26 bp, Homo sapiens
ccatcttcagagggtgcgtctacgcg

SEQ ID NO: 58914 - DNA, 26 bp, Homo sapiens
catcttcagagggtgcgtctacgcgt

SEQ ID NO: 58915 - DNA, 26 bp, Homo sapiens
atcttcagagggtgcgtctacgcgtt

SEQ ID NO: 58916 - DNA, 26 bp, Homo sapiens
tcttcagagggtgcgtctacgcgtta

SEQ ID NO: 58917 - DNA, 26 bp, Homo sapiens
cttcagagggtgcgtctacgcgttat

SEQ ID NO: 58918 - DNA, 26 bp, Homo sapiens
ttcagagggtgcgtctacgcgttatc

SEQ ID NO: 58919 - DNA, 26 bp, Homo sapiens
tcagagggtgcgtctacgcgttatct

SEQ ID NO: 58920 - DNA, 26 bp, Homo sapiens
cagagggtgcgtctacgcgttatctg

SEQ ID NO: 58921 - DNA, 26 bp, Homo sapiens
agagggtgcgtctacgcgttatctgc

SEQ ID NO: 58922 - DNA, 26 bp, Homo sapiens
gagggtgcgtctacgcgttatctgct

SEQ ID NO: 58923 - DNA, 26 bp, Homo sapiens
agggtgcgtctacgcgttatctgctg

SEQ ID NO: 58924 - DNA, 26 bp, Homo sapiens
gggtgcgtctacgcgttatctgctgg

SEQ ID NO: 58925 - DNA, 26 bp, Homo sapiens
ggtgcgtctacgcgttatctgctggt

SEQ ID NO: 58926 - DNA, 26 bp, Homo sapiens
gtgcgtctacgcgttatctgctggtt

SEQ ID NO: 58927 - DNA, 26 bp, Homo sapiens
tgcgtctacgcgttatctgctggttt

SEQ ID NO: 58928 - DNA, 26 bp, Homo sapiens
gcgtctacgcgttatctgctggtttc

SEQ ID NO: 58929 - DNA, 26 bp, Homo sapiens
cgtctacgcgttatctgctggtttca

SEQ ID NO: 58930 - DNA, 26 bp, Homo sapiens
gtctacgcgttatctgctggtttcat

SEQ ID NO: 58931 - DNA, 26 bp, Homo sapiens
tctacgcgttatctgctggtttcatt

SEQ ID NO: 58932 - DNA, 26 bp, Homo sapiens
ctacgcgttatctgctggtttcattg

SEQ ID NO: 58933 - DNA, 26 bp, Homo sapiens
tacgcgttatctgctggtttcattgt

SEQ ID NO: 58934 - DNA, 26 bp, Homo sapiens
acgcgttatctgctggtttcattgtt

SEQ ID NO: 58935 - DNA, 26 bp, Homo sapiens
cgcgttatctgctggtttcattgttg

SEQ ID NO: 58936 - DNA, 26 bp, Homo sapiens
gcgttatctgctggtttcattgttgc

SEQ ID NO: 58937 - DNA, 26 bp, Homo sapiens
cgttatctgctggtttcattgttgct

SEQ ID NO: 58938 - DNA, 26 bp, Homo sapiens
gttatctgctggtttcattgttgctg

SEQ ID NO: 58939 - DNA, 26 bp, Homo sapiens
ttatctgctggtttcattgttgctgt

SEQ ID NO: 58940 - DNA, 26 bp, Homo sapiens
tatctgctggtttcattgttgctgtt

SEQ ID NO: 58941 - DNA, 26 bp, Homo sapiens
atctgctggtttcattgttgctgtta

SEQ ID NO: 58942 - DNA, 26 bp, Homo sapiens
tctgctggtttcattgttgctgttac

SEQ ID NO: 58943 - DNA, 26 bp, Homo sapiens
ctgctggtttcattgttgctgttacg

SEQ ID NO: 58944 - DNA, 26 bp, Homo sapiens
tgctggtttcattgttgctgttacgc

SEQ ID NO: 58945 - DNA, 26 bp, Homo sapiens
gctggtttcattgttgctgttacgcg

SEQ ID NO: 58946 - DNA, 26 bp, Homo sapiens
ctggtttcattgttgctgttacgcgc

SEQ ID NO: 58947 - DNA, 26 bp, Homo sapiens
tggtttcattgttgctgttacgcgcc

SEQ ID NO: 58948 - DNA, 26 bp, Homo sapiens
ggtttcattgttgctgttacgcgccc

SEQ ID NO: 58949 - DNA, 26 bp, Homo sapiens
gtttcattgttgctgttacgcgcccg

SEQ ID NO: 58950 - DNA, 26 bp, Homo sapiens
tttcattgttgctgttacgcgcccgg

SEQ ID NO: 58951 - DNA, 26 bp, Homo sapiens
ttcattgttgctgttacgcgcccgga

SEQ ID NO: 58952 - DNA, 26 bp, Homo sapiens
tcattgttgctgttacgcgcccggat

SEQ ID NO: 58953 - DNA, 26 bp, Homo sapiens
cattgttgctgttacgcgcccggatg

SEQ ID NO: 58954 - DNA, 26 bp, Homo sapiens
attgttgctgttacgcgcccggatga

SEQ ID NO: 58955 - DNA, 26 bp, Homo sapiens
ttgttgctgttacgcgcccggatgaa

SEQ ID NO: 58956 - DNA, 26 bp, Homo sapiens
tgttgctgttacgcgcccggatgaaa

SEQ ID NO: 58957 - DNA, 26 bp, Homo sapiens
gttgctgttacgcgcccggatgaaaa

SEQ ID NO: 58958 - DNA, 26 bp, Homo sapiens
ttgctgttacgcgcccggatgaaaaa

SEQ ID NO: 58959 - DNA, 26 bp, Homo sapiens
tgctgttacgcgcccggatgaaaaaa

SEQ ID NO: 58960 - DNA, 26 bp, Homo sapiens
gctgttacgcgcccggatgaaaaaag

SEQ ID NO: 58961 - DNA, 26 bp, Homo sapiens
ctgttacgcgcccggatgaaaaaagc

SEQ ID NO: 58962 - DNA, 26 bp, Homo sapiens
tgttacgcgcccggatgaaaaaagca

SEQ ID NO: 58963 - DNA, 26 bp, Homo sapiens
gttacgcgcccggatgaaaaaagcaa

SEQ ID NO: 58964 - DNA, 26 bp, Homo sapiens
ttacgcgcccggatgaaaaaagcaat

SEQ ID NO: 58965 - DNA, 26 bp, Homo sapiens
tacgcgcccggatgaaaaaagcaatt

SEQ ID NO: 58966 - DNA, 26 bp, Homo sapiens
acgcgcccggatgaaaaaagcaattt

SEQ ID NO: 58967 - DNA, 26 bp, Homo sapiens
cgcgcccggatgaaaaaagcaattta

SEQ ID NO: 58968 - DNA, 26 bp, Homo sapiens
gcgcccggatgaaaaaagcaatttaa

SEQ ID NO: 58969 - DNA, 26 bp, Homo sapiens
cgcccggatgaaaaaagcaatttaag

SEQ ID NO: 58970 - DNA, 26 bp, Homo sapiens
gcccggatgaaaaaagcaatttaagt

SEQ ID NO: 58971 - DNA, 26 bp, Homo sapiens
cccggatgaaaaaagcaatttaagtg

SEQ ID NO: 58972 - DNA, 26 bp, Homo sapiens
ccggatgaaaaaagcaatttaagtgt

SEQ ID NO: 58973 - DNA, 26 bp, Homo sapiens
cggatgaaaaaagcaatttaagtgtc

SEQ ID NO: 58974 - DNA, 26 bp, Homo sapiens
ggatgaaaaaagcaatttaagtgtca

SEQ ID NO: 58975 - DNA, 26 bp, Homo sapiens
gatgaaaaaagcaatttaagtgtcat

SEQ ID NO: 58976 - DNA, 26 bp, Homo sapiens
atgaaaaaagcaatttaagtgtcata

SEQ ID NO: 58977 - DNA, 26 bp, Homo sapiens
tgaaaaaagcaatttaagtgtcatac

SEQ ID NO: 58978 - DNA, 26 bp, Homo sapiens
gaaaaaagcaatttaagtgtcatact

SEQ ID NO: 58979 - DNA, 26 bp, Homo sapiens
aaaaaagcaatttaagtgtcatacta

SEQ ID NO: 58980 - DNA, 26 bp, Homo sapiens
aaaaagcaatttaagtgtcatactat

SEQ ID NO: 58981 - DNA, 26 bp, Homo sapiens
aaaagcaatttaagtgtcatactata

SEQ ID NO: 58982 - DNA, 26 bp, Homo sapiens
aaagcaatttaagtgtcatactataa

SEQ ID NO: 58983 - DNA, 26 bp, Homo sapiens
aagcaatttaagtgtcatactataaa

SEQ ID NO: 58984 - DNA, 26 bp, Homo sapiens
agcaatttaagtgtcatactataaaa

SEQ ID NO: 58985 - DNA, 26 bp, Homo sapiens
gcaatttaagtgtcatactataaaat

SEQ ID NO: 58986 - DNA, 26 bp, Homo sapiens
caatttaagtgtcatactataaaatc

SEQ ID NO: 58987 - DNA, 26 bp, Homo sapiens
aatttaagtgtcatactataaaatct

SEQ ID NO: 58988 - DNA, 26 bp, Homo sapiens
atttaagtgtcatactataaaatctt

SEQ ID NO: 58989 - DNA, 26 bp, Homo sapiens
tttaagtgtcatactataaaatcttg

SEQ ID NO: 58990 - DNA, 26 bp, Homo sapiens
ttaagtgtcatactataaaatcttga

SEQ ID NO: 58991 - DNA, 26 bp, Homo sapiens
taagtgtcatactataaaatcttgat

SEQ ID NO: 58992 - DNA, 26 bp, Homo sapiens
aagtgtcatactataaaatcttgata

SEQ ID NO: 58993 - DNA, 26 bp, Homo sapiens
agtgtcatactataaaatcttgatac

SEQ ID NO: 58994 - DNA, 26 bp, Homo sapiens
gtgtcatactataaaatcttgatacc

SEQ ID NO: 58995 - DNA, 26 bp, Homo sapiens
tgtcatactataaaatcttgatacca

SEQ ID NO: 58996 - DNA, 26 bp, Homo sapiens
gtcatactataaaatcttgataccac

SEQ ID NO: 58997 - DNA, 26 bp, Homo sapiens
tcatactataaaatcttgataccaca

SEQ ID NO: 58998 - DNA, 26 bp, Homo sapiens
catactataaaatcttgataccacac

SEQ ID NO: 58999 - DNA, 26 bp, Homo sapiens
atactataaaatcttgataccacact

SEQ ID NO: 59000 - DNA, 26 bp, Homo sapiens
tactataaaatcttgataccacactt

SEQ ID NO: 59001 - DNA, 26 bp, Homo sapiens
actataaaatcttgataccacacttg

SEQ ID NO: 59002 - DNA, 26 bp, Homo sapiens
ctataaaatcttgataccacacttgg

SEQ ID NO: 59003 - DNA, 26 bp, Homo sapiens
tataaaatcttgataccacacttggg

SEQ ID NO: 59004 - DNA, 26 bp, Homo sapiens
ataaaatcttgataccacacttgggg

SEQ ID NO: 59005 - DNA, 26 bp, Homo sapiens
taaaatcttgataccacacttggggg

SEQ ID NO: 59006 - DNA, 26 bp, Homo sapiens
aaaatcttgataccacacttgggggc

SEQ ID NO: 59007 - DNA, 26 bp, Homo sapiens
aaatcttgataccacacttgggggca

SEQ ID NO: 59008 - DNA, 26 bp, Homo sapiens
aatcttgataccacacttgggggcag

SEQ ID NO: 59009 - DNA, 26 bp, Homo sapiens
atcttgataccacacttgggggcaga

SEQ ID NO: 59010 - DNA, 26 bp, Homo sapiens
tcttgataccacacttgggggcagac

SEQ ID NO: 59011 - DNA, 26 bp, Homo sapiens
cttgataccacacttgggggcagaca

SEQ ID NO: 59012 - DNA, 26 bp, Homo sapiens
ttgataccacacttgggggcagacag

SEQ ID NO: 59013 - DNA, 26 bp, Homo sapiens
tgataccacacttgggggcagacagg

SEQ ID NO: 59014 - DNA, 26 bp, Homo sapiens
gataccacacttgggggcagacaggg

SEQ ID NO: 59015 - DNA, 26 bp, Homo sapiens
ataccacacttgggggcagacagggt

SEQ ID NO: 59016 - DNA, 26 bp, Homo sapiens
ttttttttttttttttttcccaggaa

SEQ ID NO: 59017 - DNA, 26 bp, Homo sapiens
tttttttttttttttttcccaggaaa

SEQ ID NO: 59018 - DNA, 26 bp, Homo sapiens
ttttttttttttttttcccaggaaac

SEQ ID NO: 59019 - DNA, 26 bp, Homo sapiens
tttttttttttttttcccaggaaact

SEQ ID NO: 59020 - DNA, 26 bp, Homo sapiens
ttttttttttttttcccaggaaactt

SEQ ID NO: 59021 - DNA, 26 bp, Homo sapiens
tttttttttttttcccaggaaacttt

SEQ ID NO: 59022 - DNA, 26 bp, Homo sapiens
ttttttttttttcccaggaaactttc

SEQ ID NO: 59023 - DNA, 26 bp, Homo sapiens
tttttttttttcccaggaaactttca

SEQ ID NO: 59024 - DNA, 26 bp, Homo sapiens
ttttttttttcccaggaaactttcaa

SEQ ID NO: 59025 - DNA, 26 bp, Homo sapiens
tttttttttcccaggaaactttcaat

SEQ ID NO: 59026 - DNA, 26 bp, Homo sapiens
ttttttttcccaggaaactttcaata

SEQ ID NO: 59027 - DNA, 26 bp, Homo sapiens
tttttttcccaggaaactttcaatat

SEQ ID NO: 59028 - DNA, 26 bp, Homo sapiens
ttttttcccaggaaactttcaatata

SEQ ID NO: 59029 - DNA, 26 bp, Homo sapiens
tttttcccaggaaactttcaatatac

SEQ ID NO: 59030 - DNA, 26 bp, Homo sapiens
ttttcccaggaaactttcaatatact

SEQ ID NO: 59031 - DNA, 26 bp, Homo sapiens
tttcccaggaaactttcaatatactt

SEQ ID NO: 59032 - DNA, 26 bp, Homo sapiens
ttcccaggaaactttcaatatacttt

SEQ ID NO: 59033 - DNA, 26 bp, Homo sapiens
tcccaggaaactttcaatatacttta

SEQ ID NO: 59034 - DNA, 26 bp, Homo sapiens
cccaggaaactttcaatatactttat

SEQ ID NO: 59035 - DNA, 26 bp, Homo sapiens
ccaggaaactttcaatatactttatt

SEQ ID NO: 59036 - DNA, 26 bp, Homo sapiens
caggaaactttcaatatactttatta

SEQ ID NO: 59037 - DNA, 26 bp, Homo sapiens
aggaaactttcaatatactttattaa

SEQ ID NO: 59038 - DNA, 26 bp, Homo sapiens
ggaaactttcaatatactttattaaa

SEQ ID NO: 59039 - DNA, 26 bp, Homo sapiens
gaaactttcaatatactttattaaaa

SEQ ID NO: 59040 - DNA, 26 bp, Homo sapiens
aaactttcaatatactttattaaaaa

SEQ ID NO: 59041 - DNA, 26 bp, Homo sapiens
aactttcaatatactttattaaaaag

SEQ ID NO: 59042 - DNA, 26 bp, Homo sapiens
actttcaatatactttattaaaaagt

SEQ ID NO: 59043 - DNA, 26 bp, Homo sapiens
ctttcaatatactttattaaaaagtt

SEQ ID NO: 59044 - DNA, 26 bp, Homo sapiens
tttcaatatactttattaaaaagttt

SEQ ID NO: 59045 - DNA, 26 bp, Homo sapiens
ttcaatatactttattaaaaagtttc

SEQ ID NO: 59046 - DNA, 26 bp, Homo sapiens
tcaatatactttattaaaaagtttct

SEQ ID NO: 59047 - DNA, 26 bp, Homo sapiens
caatatactttattaaaaagtttctt

SEQ ID NO: 59048 - DNA, 26 bp, Homo sapiens
aatatactttattaaaaagtttcttt

SEQ ID NO: 59049 - DNA, 26 bp, Homo sapiens
atatactttattaaaaagtttctttg

SEQ ID NO: 59050 - DNA, 26 bp, Homo sapiens
tatactttattaaaaagtttctttgt

SEQ ID NO: 59051 - DNA, 26 bp, Homo sapiens
atactttattaaaaagtttctttgta

SEQ ID NO: 59052 - DNA, 26 bp, Homo sapiens
tactttattaaaaagtttctttgtat

SEQ ID NO: 59053 - DNA, 26 bp, Homo sapiens
actttattaaaaagtttctttgtata

SEQ ID NO: 59054 - DNA, 26 bp, Homo sapiens
ctttattaaaaagtttctttgtataa

SEQ ID NO: 59055 - DNA, 26 bp, Homo sapiens
tttattaaaaagtttctttgtataaa

SEQ ID NO: 59056 - DNA, 26 bp, Homo sapiens
ttattaaaaagtttctttgtataaat

SEQ ID NO: 59057 - DNA, 26 bp, Homo sapiens
tattaaaaagtttctttgtataaatt

SEQ ID NO: 59058 - DNA, 26 bp, Homo sapiens
attaaaaagtttctttgtataaattt

SEQ ID NO: 59059 - DNA, 26 bp, Homo sapiens
ttaaaaagtttctttgtataaatttc

SEQ ID NO: 59060 - DNA, 26 bp, Homo sapiens
taaaaagtttctttgtataaatttcc

SEQ ID NO: 59061 - DNA, 26 bp, Homo sapiens
aaaaagtttctttgtataaatttcct

SEQ ID NO: 59062 - DNA, 26 bp, Homo sapiens
aaaagtttctttgtataaatttccta

SEQ ID NO: 59063 - DNA, 26 bp, Homo sapiens
aaagtttctttgtataaatttcctaa

SEQ ID NO: 59064 - DNA, 26 bp, Homo sapiens
aagtttctttgtataaatttcctaaa

SEQ ID NO: 59065 - DNA, 26 bp, Homo sapiens
agtttctttgtataaatttcctaaac

SEQ ID NO: 59066 - DNA, 26 bp, Homo sapiens
gtttctttgtataaatttcctaaaca

SEQ ID NO: 59067 - DNA, 26 bp, Homo sapiens
tttctttgtataaatttcctaaacat

SEQ ID NO: 59068 - DNA, 26 bp, Homo sapiens
ttctttgtataaatttcctaaacatt

SEQ ID NO: 59069 - DNA, 26 bp, Homo sapiens
tctttgtataaatttcctaaacattt

SEQ ID NO: 59070 - DNA, 26 bp, Homo sapiens
ctttgtataaatttcctaaacatttt

SEQ ID NO: 59071 - DNA, 26 bp, Homo sapiens
tttgtataaatttcctaaacatttta

SEQ ID NO: 59072 - DNA, 26 bp, Homo sapiens
ttgtataaatttcctaaacattttaa

SEQ ID NO: 59073 - DNA, 26 bp, Homo sapiens
tgtataaatttcctaaacattttaaa

SEQ ID NO: 59074 - DNA, 26 bp, Homo sapiens
gtataaatttcctaaacattttaaaa

SEQ ID NO: 59075 - DNA, 26 bp, Homo sapiens
tataaatttcctaaacattttaaaat

SEQ ID NO: 59076 - DNA, 26 bp, Homo sapiens
ataaatttcctaaacattttaaaatt

SEQ ID NO: 59077 - DNA, 26 bp, Homo sapiens
taaatttcctaaacattttaaaatta

SEQ ID NO: 59078 - DNA, 26 bp, Homo sapiens
aaatttcctaaacattttaaaattaa

SEQ ID NO: 59079 - DNA, 26 bp, Homo sapiens
aatttcctaaacattttaaaattaaa

SEQ ID NO: 59080 - DNA, 26 bp, Homo sapiens
atttcctaaacattttaaaattaaaa

SEQ ID NO: 59081 - DNA, 26 bp, Homo sapiens
tttcctaaacattttaaaattaaaat

SEQ ID NO: 59082 - DNA, 26 bp, Homo sapiens
ttcctaaacattttaaaattaaaatt

SEQ ID NO: 59083 - DNA, 26 bp, Homo sapiens
tcctaaacattttaaaattaaaatta

SEQ ID NO: 59084 - DNA, 26 bp, Homo sapiens
cctaaacattttaaaattaaaattaa

SEQ ID NO: 59085 - DNA, 26 bp, Homo sapiens
ctaaacattttaaaattaaaattaaa

SEQ ID NO: 59086 - DNA, 26 bp, Homo sapiens
taaacattttaaaattaaaattaaat

SEQ ID NO: 59087 - DNA, 26 bp, Homo sapiens
aaacattttaaaattaaaattaaatc

SEQ ID NO: 59088 - DNA, 26 bp, Homo sapiens
aacattttaaaattaaaattaaatcc

SEQ ID NO: 59089 - DNA, 26 bp, Homo sapiens
acattttaaaattaaaattaaatccc

SEQ ID NO: 59090 - DNA, 26 bp, Homo sapiens
cattttaaaattaaaattaaatcccc

SEQ ID NO: 59091 - DNA, 26 bp, Homo sapiens
attttaaaattaaaattaaatcccct

SEQ ID NO: 59092 - DNA, 26 bp, Homo sapiens
ttttaaaattaaaattaaatcccctc

SEQ ID NO: 59093 - DNA, 26 bp, Homo sapiens
tttaaaattaaaattaaatcccctcc

SEQ ID NO: 59094 - DNA, 26 bp, Homo sapiens
ttaaaattaaaattaaatcccctccc

SEQ ID NO: 59095 - DNA, 26 bp, Homo sapiens
taaaattaaaattaaatcccctccct

SEQ ID NO: 59096 - DNA, 26 bp, Homo sapiens
aaaattaaaattaaatcccctccctc

SEQ ID NO: 59097 - DNA, 26 bp, Homo sapiens
aaattaaaattaaatcccctccctcc

SEQ ID NO: 59098 - DNA, 26 bp, Homo sapiens
aattaaaattaaatcccctccctcca

SEQ ID NO: 59099 - DNA, 26 bp, Homo sapiens
attaaaattaaatcccctccctccag

SEQ ID NO: 59100 - DNA, 26 bp, Homo sapiens
ttaaaattaaatcccctccctccagc

SEQ ID NO: 59101 - DNA, 26 bp, Homo sapiens
taaaattaaatcccctccctccagca

SEQ ID NO: 59102 - DNA, 26 bp, Homo sapiens
aaaattaaatcccctccctccagcac

SEQ ID NO: 59103 - DNA, 26 bp, Homo sapiens
aaattaaatcccctccctccagcaca

SEQ ID NO: 59104 - DNA, 26 bp, Homo sapiens
aattaaatcccctccctccagcacac

SEQ ID NO: 59105 - DNA, 26 bp, Homo sapiens
attaaatcccctccctccagcacaca

SEQ ID NO: 59106 - DNA, 26 bp, Homo sapiens
ttaaatcccctccctccagcacacac

SEQ ID NO: 59107 - DNA, 26 bp, Homo sapiens
taaatcccctccctccagcacacaca

SEQ ID NO: 59108 - DNA, 26 bp, Homo sapiens
aaatcccctccctccagcacacacaa

SEQ ID NO: 59109 - DNA, 26 bp, Homo sapiens
aatcccctccctccagcacacacaaa

SEQ ID NO: 59110 - DNA, 26 bp, Homo sapiens
atcccctccctccagcacacacaaaa

SEQ ID NO: 59111 - DNA, 26 bp, Homo sapiens
tcccctccctccagcacacacaaaaa

SEQ ID NO: 59112 - DNA, 26 bp, Homo sapiens
cccctccctccagcacacacaaaaaa

SEQ ID NO: 59113 - DNA, 26 bp, Homo sapiens
ccctccctccagcacacacaaaaaaa

SEQ ID NO: 59114 - DNA, 26 bp, Homo sapiens
cctccctccagcacacacaaaaaaaa

SEQ ID NO: 59115 - DNA, 26 bp, Homo sapiens
ctccctccagcacacacaaaaaaaaa

SEQ ID NO: 59116 - DNA, 26 bp, Homo sapiens
tccctccagcacacacaaaaaaaaaa

SEQ ID NO: 59117 - DNA, 26 bp, Homo sapiens
ccctccagcacacacaaaaaaaaaac

SEQ ID NO: 59118 - DNA, 26 bp, Homo sapiens
cctccagcacacacaaaaaaaaaaca

SEQ ID NO: 59119 - DNA, 26 bp, Homo sapiens
ctccagcacacacaaaaaaaaaacac

SEQ ID NO: 59120 - DNA, 26 bp, Homo sapiens
tccagcacacacaaaaaaaaaacaca

SEQ ID NO: 59121 - DNA, 26 bp, Homo sapiens
ccagcacacacaaaaaaaaaacacac

SEQ ID NO: 59122 - DNA, 26 bp, Homo sapiens
cagcacacacaaaaaaaaaacacaca

SEQ ID NO: 59123 - DNA, 26 bp, Homo sapiens
agcacacacaaaaaaaaaacacacaa

SEQ ID NO: 59124 - DNA, 26 bp, Homo sapiens
gcacacacaaaaaaaaaacacacaac

SEQ ID NO: 59125 - DNA, 26 bp, Homo sapiens
cacacacaaaaaaaaaacacacaaca

SEQ ID NO: 59126 - DNA, 26 bp, Homo sapiens
acacacaaaaaaaaaacacacaacat

SEQ ID NO: 59127 - DNA, 26 bp, Homo sapiens
cacacaaaaaaaaaacacacaacatt

SEQ ID NO: 59128 - DNA, 26 bp, Homo sapiens
acacaaaaaaaaaacacacaacatta

SEQ ID NO: 59129 - DNA, 26 bp, Homo sapiens
cacaaaaaaaaaacacacaacattag

SEQ ID NO: 59130 - DNA, 26 bp, Homo sapiens
acaaaaaaaaaacacacaacattaga

SEQ ID NO: 59131 - DNA, 26 bp, Homo sapiens
caaaaaaaaaacacacaacattagag

SEQ ID NO: 59132 - DNA, 26 bp, Homo sapiens
aaaaaaaaaacacacaacattagagg

SEQ ID NO: 59133 - DNA, 26 bp, Homo sapiens
aaaaaaaaacacacaacattagagga

SEQ ID NO: 59134 - DNA, 26 bp, Homo sapiens
aaaaaaaacacacaacattagaggaa

SEQ ID NO: 59135 - DNA, 26 bp, Homo sapiens
aaaaaaacacacaacattagaggaat

SEQ ID NO: 59136 - DNA, 26 bp, Homo sapiens
aaaaaacacacaacattagaggaatg

SEQ ID NO: 59137 - DNA, 26 bp, Homo sapiens
aaaaacacacaacattagaggaatgc

SEQ ID NO: 59138 - DNA, 26 bp, Homo sapiens
aaaacacacaacattagaggaatgcc

SEQ ID NO: 59139 - DNA, 26 bp, Homo sapiens
aaacacacaacattagaggaatgcca

SEQ ID NO: 59140 - DNA, 26 bp, Homo sapiens
aacacacaacattagaggaatgccaa

SEQ ID NO: 59141 - DNA, 26 bp, Homo sapiens
acacacaacattagaggaatgccaaa

SEQ ID NO: 59142 - DNA, 26 bp, Homo sapiens
cacacaacattagaggaatgccaaaa

SEQ ID NO: 59143 - DNA, 26 bp, Homo sapiens
acacaacattagaggaatgccaaaaa

SEQ ID NO: 59144 - DNA, 26 bp, Homo sapiens
cacaacattagaggaatgccaaaaat

SEQ ID NO: 59145 - DNA, 26 bp, Homo sapiens
acaacattagaggaatgccaaaaata

SEQ ID NO: 59146 - DNA, 26 bp, Homo sapiens
caacattagaggaatgccaaaaatat

SEQ ID NO: 59147 - DNA, 26 bp, Homo sapiens
aacattagaggaatgccaaaaatatt

SEQ ID NO: 59148 - DNA, 26 bp, Homo sapiens
acattagaggaatgccaaaaatattc

SEQ ID NO: 59149 - DNA, 26 bp, Homo sapiens
cattagaggaatgccaaaaatattct

SEQ ID NO: 59150 - DNA, 26 bp, Homo sapiens
attagaggaatgccaaaaatattctc

SEQ ID NO: 59151 - DNA, 26 bp, Homo sapiens
ttagaggaatgccaaaaatattctct

SEQ ID NO: 59152 - DNA, 26 bp, Homo sapiens
tagaggaatgccaaaaatattctcta

SEQ ID NO: 59153 - DNA, 26 bp, Homo sapiens
agaggaatgccaaaaatattctctat

SEQ ID NO: 59154 - DNA, 26 bp, Homo sapiens
gaggaatgccaaaaatattctctatt

SEQ ID NO: 59155 - DNA, 26 bp, Homo sapiens
aggaatgccaaaaatattctctatta

SEQ ID NO: 59156 - DNA, 26 bp, Homo sapiens
ggaatgccaaaaatattctctattac

SEQ ID NO: 59157 - DNA, 26 bp, Homo sapiens
gaatgccaaaaatattctctattaca

SEQ ID NO: 59158 - DNA, 26 bp, Homo sapiens
aatgccaaaaatattctctattacaa

SEQ ID NO: 59159 - DNA, 26 bp, Homo sapiens
atgccaaaaatattctctattacaac

SEQ ID NO: 59160 - DNA, 26 bp, Homo sapiens
tgccaaaaatattctctattacaact

SEQ ID NO: 59161 - DNA, 26 bp, Homo sapiens
gccaaaaatattctctattacaactt

SEQ ID NO: 59162 - DNA, 26 bp, Homo sapiens
ccaaaaatattctctattacaacttt

SEQ ID NO: 59163 - DNA, 26 bp, Homo sapiens
caaaaatattctctattacaactttt

SEQ ID NO: 59164 - DNA, 26 bp, Homo sapiens
aaaaatattctctattacaacttttt

SEQ ID NO: 59165 - DNA, 26 bp, Homo sapiens
aaaatattctctattacaactttttt

SEQ ID NO: 59166 - DNA, 26 bp, Homo sapiens
aaatattctctattacaactttttta

SEQ ID NO: 59167 - DNA, 26 bp, Homo sapiens
aatattctctattacaacttttttaa

SEQ ID NO: 59168 - DNA, 26 bp, Homo sapiens
atattctctattacaacttttttaaa

SEQ ID NO: 59169 - DNA, 26 bp, Homo sapiens
tattctctattacaacttttttaaat

SEQ ID NO: 59170 - DNA, 26 bp, Homo sapiens
attctctattacaacttttttaaatt

SEQ ID NO: 59171 - DNA, 26 bp, Homo sapiens
ttctctattacaacttttttaaattc

SEQ ID NO: 59172 - DNA, 26 bp, Homo sapiens
tctctattacaacttttttaaattct

SEQ ID NO: 59173 - DNA, 26 bp, Homo sapiens
ctctattacaacttttttaaattctt

SEQ ID NO: 59174 - DNA, 26 bp, Homo sapiens
tctattacaacttttttaaattcttt

SEQ ID NO: 59175 - DNA, 26 bp, Homo sapiens
ctattacaacttttttaaattcttta

SEQ ID NO: 59176 - DNA, 26 bp, Homo sapiens
tattacaacttttttaaattctttaa

SEQ ID NO: 59177 - DNA, 26 bp, Homo sapiens
attacaacttttttaaattctttaat

SEQ ID NO: 59178 - DNA, 26 bp, Homo sapiens
ttacaacttttttaaattctttaatt

SEQ ID NO: 59179 - DNA, 26 bp, Homo sapiens
tacaacttttttaaattctttaatta

SEQ ID NO: 59180 - DNA, 26 bp, Homo sapiens
acaacttttttaaattctttaattaa

SEQ ID NO: 59181 - DNA, 26 bp, Homo sapiens
caacttttttaaattctttaattaag

SEQ ID NO: 59182 - DNA, 26 bp, Homo sapiens
aacttttttaaattctttaattaagg

SEQ ID NO: 59183 - DNA, 26 bp, Homo sapiens
acttttttaaattctttaattaaggc

SEQ ID NO: 59184 - DNA, 26 bp, Homo sapiens
cttttttaaattctttaattaaggca

SEQ ID NO: 59185 - DNA, 26 bp, Homo sapiens
ttttttaaattctttaattaaggcat

SEQ ID NO: 59186 - DNA, 26 bp, Homo sapiens
tttttaaattctttaattaaggcatt

SEQ ID NO: 59187 - DNA, 26 bp, Homo sapiens
ttttaaattctttaattaaggcattg

SEQ ID NO: 59188 - DNA, 26 bp, Homo sapiens
tttaaattctttaattaaggcattgg

SEQ ID NO: 59189 - DNA, 26 bp, Homo sapiens
ttaaattctttaattaaggcattggt

SEQ ID NO: 59190 - DNA, 26 bp, Homo sapiens
taaattctttaattaaggcattggtc

SEQ ID NO: 59191 - DNA, 26 bp, Homo sapiens
aaattctttaattaaggcattggtcc

SEQ ID NO: 59192 - DNA, 26 bp, Homo sapiens
aattctttaattaaggcattggtccc

SEQ ID NO: 59193 - DNA, 26 bp, Homo sapiens
attctttaattaaggcattggtccca

SEQ ID NO: 59194 - DNA, 26 bp, Homo sapiens
ttctttaattaaggcattggtcccaa

SEQ ID NO: 59195 - DNA, 26 bp, Homo sapiens
tctttaattaaggcattggtcccaac

SEQ ID NO: 59196 - DNA, 26 bp, Homo sapiens
ctttaattaaggcattggtcccaacg

SEQ ID NO: 59197 - DNA, 26 bp, Homo sapiens
tttaattaaggcattggtcccaacgg

SEQ ID NO: 59198 - DNA, 26 bp, Homo sapiens
ttaattaaggcattggtcccaacggt

SEQ ID NO: 59199 - DNA, 26 bp, Homo sapiens
taattaaggcattggtcccaacggtg

SEQ ID NO: 59200 - DNA, 26 bp, Homo sapiens
aattaaggcattggtcccaacggtgc

SEQ ID NO: 59201 - DNA, 26 bp, Homo sapiens
attaaggcattggtcccaacggtgca

SEQ ID NO: 59202 - DNA, 26 bp, Homo sapiens
ttaaggcattggtcccaacggtgcac

SEQ ID NO: 59203 - DNA, 26 bp, Homo sapiens
taaggcattggtcccaacggtgcaca

SEQ ID NO: 59204 - DNA, 26 bp, Homo sapiens
aaggcattggtcccaacggtgcacat

SEQ ID NO: 59205 - DNA, 26 bp, Homo sapiens
aggcattggtcccaacggtgcacata

SEQ ID NO: 59206 - DNA, 26 bp, Homo sapiens
ggcattggtcccaacggtgcacatag

SEQ ID NO: 59207 - DNA, 26 bp, Homo sapiens
gcattggtcccaacggtgcacataga

SEQ ID NO: 59208 - DNA, 26 bp, Homo sapiens
cattggtcccaacggtgcacatagat

SEQ ID NO: 59209 - DNA, 26 bp, Homo sapiens
attggtcccaacggtgcacatagatt

SEQ ID NO: 59210 - DNA, 26 bp, Homo sapiens
ttggtcccaacggtgcacatagatta

SEQ ID NO: 59211 - DNA, 26 bp, Homo sapiens
tggtcccaacggtgcacatagattaa

SEQ ID NO: 59212 - DNA, 26 bp, Homo sapiens
ggtcccaacggtgcacatagattaag

SEQ ID NO: 59213 - DNA, 26 bp, Homo sapiens
gtcccaacggtgcacatagattaagg

SEQ ID NO: 59214 - DNA, 26 bp, Homo sapiens
tcccaacggtgcacatagattaaggg

SEQ ID NO: 59215 - DNA, 26 bp, Homo sapiens
cccaacggtgcacatagattaaggga

SEQ ID NO: 59216 - DNA, 26 bp, Homo sapiens
ccaacggtgcacatagattaagggat

SEQ ID NO: 59217 - DNA, 26 bp, Homo sapiens
caacggtgcacatagattaagggatt

SEQ ID NO: 59218 - DNA, 26 bp, Homo sapiens
aacggtgcacatagattaagggattt

SEQ ID NO: 59219 - DNA, 26 bp, Homo sapiens
acggtgcacatagattaagggatttt

SEQ ID NO: 59220 - DNA, 26 bp, Homo sapiens
cggtgcacatagattaagggattttg

SEQ ID NO: 59221 - DNA, 26 bp, Homo sapiens
ggtgcacatagattaagggattttgc

SEQ ID NO: 59222 - DNA, 26 bp, Homo sapiens
gtgcacatagattaagggattttgct

SEQ ID NO: 59223 - DNA, 26 bp, Homo sapiens
tgcacatagattaagggattttgctt

SEQ ID NO: 59224 - DNA, 26 bp, Homo sapiens
gcacatagattaagggattttgcttc

SEQ ID NO: 59225 - DNA, 26 bp, Homo sapiens
cacatagattaagggattttgcttcc

SEQ ID NO: 59226 - DNA, 26 bp, Homo sapiens
acatagattaagggattttgcttcct

SEQ ID NO: 59227 - DNA, 26 bp, Homo sapiens
catagattaagggattttgcttcctt

SEQ ID NO: 59228 - DNA, 26 bp, Homo sapiens
atagattaagggattttgcttccttc

SEQ ID NO: 59229 - DNA, 26 bp, Homo sapiens
tagattaagggattttgcttccttct

SEQ ID NO: 59230 - DNA, 26 bp, Homo sapiens
agattaagggattttgcttccttctg

SEQ ID NO: 59231 - DNA, 26 bp, Homo sapiens
gattaagggattttgcttccttctga

SEQ ID NO: 59232 - DNA, 26 bp, Homo sapiens
attaagggattttgcttccttctgaa

SEQ ID NO: 59233 - DNA, 26 bp, Homo sapiens
ttaagggattttgcttccttctgaac

SEQ ID NO: 59234 - DNA, 26 bp, Homo sapiens
taagggattttgcttccttctgaact

SEQ ID NO: 59235 - DNA, 26 bp, Homo sapiens
aagggattttgcttccttctgaacta

SEQ ID NO: 59236 - DNA, 26 bp, Homo sapiens
agggattttgcttccttctgaactag

SEQ ID NO: 59237 - DNA, 26 bp, Homo sapiens
gggattttgcttccttctgaactaga

SEQ ID NO: 59238 - DNA, 26 bp, Homo sapiens
ggattttgcttccttctgaactagat

SEQ ID NO: 59239 - DNA, 26 bp, Homo sapiens
gattttgcttccttctgaactagatc

SEQ ID NO: 59240 - DNA, 26 bp, Homo sapiens
attttgcttccttctgaactagatca

SEQ ID NO: 59241 - DNA, 26 bp, Homo sapiens
ttttgcttccttctgaactagatcat

SEQ ID NO: 59242 - DNA, 26 bp, Homo sapiens
tttgcttccttctgaactagatcatt

SEQ ID NO: 59243 - DNA, 26 bp, Homo sapiens
ttgcttccttctgaactagatcattt

SEQ ID NO: 59244 - DNA, 26 bp, Homo sapiens
tgcttccttctgaactagatcatttg

SEQ ID NO: 59245 - DNA, 26 bp, Homo sapiens
gcttccttctgaactagatcatttgt

SEQ ID NO: 59246 - DNA, 26 bp, Homo sapiens
cttccttctgaactagatcatttgtt

SEQ ID NO: 59247 - DNA, 26 bp, Homo sapiens
ttccttctgaactagatcatttgtta

SEQ ID NO: 59248 - DNA, 26 bp, Homo sapiens
tccttctgaactagatcatttgttag

SEQ ID NO: 59249 - DNA, 26 bp, Homo sapiens
ccttctgaactagatcatttgttaga

SEQ ID NO: 59250 - DNA, 26 bp, Homo sapiens
cttctgaactagatcatttgttagag

SEQ ID NO: 59251 - DNA, 26 bp, Homo sapiens
ttctgaactagatcatttgttagagg

SEQ ID NO: 59252 - DNA, 26 bp, Homo sapiens
tctgaactagatcatttgttagaggc

SEQ ID NO: 59253 - DNA, 26 bp, Homo sapiens
ctgaactagatcatttgttagaggct

SEQ ID NO: 59254 - DNA, 26 bp, Homo sapiens
tgaactagatcatttgttagaggctt

SEQ ID NO: 59255 - DNA, 26 bp, Homo sapiens
gaactagatcatttgttagaggcttc

SEQ ID NO: 59256 - DNA, 26 bp, Homo sapiens
aactagatcatttgttagaggcttca

SEQ ID NO: 59257 - DNA, 26 bp, Homo sapiens
actagatcatttgttagaggcttcag

SEQ ID NO: 59258 - DNA, 26 bp, Homo sapiens
ctagatcatttgttagaggcttcaga

SEQ ID NO: 59259 - DNA, 26 bp, Homo sapiens
tagatcatttgttagaggcttcagaa

SEQ ID NO: 59260 - DNA, 26 bp, Homo sapiens
agatcatttgttagaggcttcagaaa

SEQ ID NO: 59261 - DNA, 26 bp, Homo sapiens
gatcatttgttagaggcttcagaaaa

SEQ ID NO: 59262 - DNA, 26 bp, Homo sapiens
atcatttgttagaggcttcagaaaaa

SEQ ID NO: 59263 - DNA, 26 bp, Homo sapiens
tcatttgttagaggcttcagaaaaag

SEQ ID NO: 59264 - DNA, 26 bp, Homo sapiens
catttgttagaggcttcagaaaaaga

SEQ ID NO: 59265 - DNA, 26 bp, Homo sapiens
atttgttagaggcttcagaaaaagaa

SEQ ID NO: 59266 - DNA, 26 bp, Homo sapiens
tttgttagaggcttcagaaaaagaaa

SEQ ID NO: 59267 - DNA, 26 bp, Homo sapiens
ttgttagaggcttcagaaaaagaaaa

SEQ ID NO: 59268 - DNA, 26 bp, Homo sapiens
tgttagaggcttcagaaaaagaaaat

SEQ ID NO: 59269 - DNA, 26 bp, Homo sapiens
gttagaggcttcagaaaaagaaaatt

SEQ ID NO: 59270 - DNA, 26 bp, Homo sapiens
ttagaggcttcagaaaaagaaaatta

SEQ ID NO: 59271 - DNA, 26 bp, Homo sapiens
tagaggcttcagaaaaagaaaattag

SEQ ID NO: 59272 - DNA, 26 bp, Homo sapiens
agaggcttcagaaaaagaaaattagc

SEQ ID NO: 59273 - DNA, 26 bp, Homo sapiens
gaggcttcagaaaaagaaaattagct

SEQ ID NO: 59274 - DNA, 26 bp, Homo sapiens
aggcttcagaaaaagaaaattagctt

SEQ ID NO: 59275 - DNA, 26 bp, Homo sapiens
ggcttcagaaaaagaaaattagcttg

SEQ ID NO: 59276 - DNA, 26 bp, Homo sapiens
gcttcagaaaaagaaaattagcttga

SEQ ID NO: 59277 - DNA, 26 bp, Homo sapiens
cttcagaaaaagaaaattagcttgaa

SEQ ID NO: 59278 - DNA, 26 bp, Homo sapiens
ttcagaaaaagaaaattagcttgaaa

SEQ ID NO: 59279 - DNA, 26 bp, Homo sapiens
tcagaaaaagaaaattagcttgaaat

SEQ ID NO: 59280 - DNA, 26 bp, Homo sapiens
cagaaaaagaaaattagcttgaaatc

SEQ ID NO: 59281 - DNA, 26 bp, Homo sapiens
agaaaaagaaaattagcttgaaatct

SEQ ID NO: 59282 - DNA, 26 bp, Homo sapiens
gaaaaagaaaattagcttgaaatcta

SEQ ID NO: 59283 - DNA, 26 bp, Homo sapiens
aaaaagaaaattagcttgaaatctag

SEQ ID NO: 59284 - DNA, 26 bp, Homo sapiens
aaaagaaaattagcttgaaatctagt

SEQ ID NO: 59285 - DNA, 26 bp, Homo sapiens
aaagaaaattagcttgaaatctagtc

SEQ ID NO: 59286 - DNA, 26 bp, Homo sapiens
aagaaaattagcttgaaatctagtct

SEQ ID NO: 59287 - DNA, 26 bp, Homo sapiens
agaaaattagcttgaaatctagtctg

SEQ ID NO: 59288 - DNA, 26 bp, Homo sapiens
gaaaattagcttgaaatctagtctgg

SEQ ID NO: 59289 - DNA, 26 bp, Homo sapiens
aaaattagcttgaaatctagtctggg

SEQ ID NO: 59290 - DNA, 26 bp, Homo sapiens
aaattagcttgaaatctagtctggga

SEQ ID NO: 59291 - DNA, 26 bp, Homo sapiens
aattagcttgaaatctagtctgggaa

SEQ ID NO: 59292 - DNA, 26 bp, Homo sapiens
attagcttgaaatctagtctgggaaa

SEQ ID NO: 59293 - DNA, 26 bp, Homo sapiens
ttagcttgaaatctagtctgggaaat

SEQ ID NO: 59294 - DNA, 26 bp, Homo sapiens
tagcttgaaatctagtctgggaaatt

SEQ ID NO: 59295 - DNA, 26 bp, Homo sapiens
agcttgaaatctagtctgggaaattg

SEQ ID NO: 59296 - DNA, 26 bp, Homo sapiens
gcttgaaatctagtctgggaaattgg

SEQ ID NO: 59297 - DNA, 26 bp, Homo sapiens
cttgaaatctagtctgggaaattggg

SEQ ID NO: 59298 - DNA, 26 bp, Homo sapiens
ttgaaatctagtctgggaaattgggg

SEQ ID NO: 59299 - DNA, 26 bp, Homo sapiens
tgaaatctagtctgggaaattggggg

SEQ ID NO: 59300 - DNA, 26 bp, Homo sapiens
gaaatctagtctgggaaattgggggc

SEQ ID NO: 59301 - DNA, 26 bp, Homo sapiens
aaatctagtctgggaaattgggggca

SEQ ID NO: 59302 - DNA, 26 bp, Homo sapiens
aatctagtctgggaaattgggggcag

SEQ ID NO: 59303 - DNA, 26 bp, Homo sapiens
atctagtctgggaaattgggggcagg

SEQ ID NO: 59304 - DNA, 26 bp, Homo sapiens
tctagtctgggaaattgggggcaggg

SEQ ID NO: 59305 - DNA, 26 bp, Homo sapiens
ctagtctgggaaattgggggcaggga

SEQ ID NO: 59306 - DNA, 26 bp, Homo sapiens
tagtctgggaaattgggggcagggaa

SEQ ID NO: 59307 - DNA, 26 bp, Homo sapiens
agtctgggaaattgggggcagggaat

SEQ ID NO: 59308 - DNA, 26 bp, Homo sapiens
gtctgggaaattgggggcagggaatg

SEQ ID NO: 59309 - DNA, 26 bp, Homo sapiens
tctgggaaattgggggcagggaatga

SEQ ID NO: 59310 - DNA, 26 bp, Homo sapiens
ctgggaaattgggggcagggaatgaa

SEQ ID NO: 59311 - DNA, 26 bp, Homo sapiens
tgggaaattgggggcagggaatgaaa

SEQ ID NO: 59312 - DNA, 26 bp, Homo sapiens
gggaaattgggggcagggaatgaaaa

SEQ ID NO: 59313 - DNA, 26 bp, Homo sapiens
ggaaattgggggcagggaatgaaaaa

SEQ ID NO: 59314 - DNA, 26 bp, Homo sapiens
gaaattgggggcagggaatgaaaaag

SEQ ID NO: 59315 - DNA, 26 bp, Homo sapiens
aaattgggggcagggaatgaaaaagt

SEQ ID NO: 59316 - DNA, 26 bp, Homo sapiens
aattgggggcagggaatgaaaaagtt

SEQ ID NO: 59317 - DNA, 26 bp, Homo sapiens
attgggggcagggaatgaaaaagttg

SEQ ID NO: 59318 - DNA, 26 bp, Homo sapiens
ttgggggcagggaatgaaaaagttgg

SEQ ID NO: 59319 - DNA, 26 bp, Homo sapiens
tgggggcagggaatgaaaaagttggt

SEQ ID NO: 59320 - DNA, 26 bp, Homo sapiens
gggggcagggaatgaaaaagttggtc

SEQ ID NO: 59321 - DNA, 26 bp, Homo sapiens
ggggcagggaatgaaaaagttggtct

SEQ ID NO: 59322 - DNA, 26 bp, Homo sapiens
gggcagggaatgaaaaagttggtctc

SEQ ID NO: 59323 - DNA, 26 bp, Homo sapiens
ggcagggaatgaaaaagttggtctct

SEQ ID NO: 59324 - DNA, 26 bp, Homo sapiens
gcagggaatgaaaaagttggtctctt

SEQ ID NO: 59325 - DNA, 26 bp, Homo sapiens
cagggaatgaaaaagttggtctcttg

SEQ ID NO: 59326 - DNA, 26 bp, Homo sapiens
agggaatgaaaaagttggtctcttgt

SEQ ID NO: 59327 - DNA, 26 bp, Homo sapiens
gggaatgaaaaagttggtctcttgtt

SEQ ID NO: 59328 - DNA, 26 bp, Homo sapiens
ggaatgaaaaagttggtctcttgttt

SEQ ID NO: 59329 - DNA, 26 bp, Homo sapiens
gaatgaaaaagttggtctcttgtttc

SEQ ID NO: 59330 - DNA, 26 bp, Homo sapiens
aatgaaaaagttggtctcttgtttct

SEQ ID NO: 59331 - DNA, 26 bp, Homo sapiens
atgaaaaagttggtctcttgtttctc

SEQ ID NO: 59332 - DNA, 26 bp, Homo sapiens
tgaaaaagttggtctcttgtttctcc

SEQ ID NO: 59333 - DNA, 26 bp, Homo sapiens
gaaaaagttggtctcttgtttctcca

SEQ ID NO: 59334 - DNA, 26 bp, Homo sapiens
aaaaagttggtctcttgtttctccac

SEQ ID NO: 59335 - DNA, 26 bp, Homo sapiens
aaaagttggtctcttgtttctccacg

SEQ ID NO: 59336 - DNA, 26 bp, Homo sapiens
aaagttggtctcttgtttctccacga

SEQ ID NO: 59337 - DNA, 26 bp, Homo sapiens
aagttggtctcttgtttctccacgat

SEQ ID NO: 59338 - DNA, 26 bp, Homo sapiens
agttggtctcttgtttctccacgata

SEQ ID NO: 59339 - DNA, 26 bp, Homo sapiens
gttggtctcttgtttctccacgatac

SEQ ID NO: 59340 - DNA, 26 bp, Homo sapiens
ttggtctcttgtttctccacgataca

SEQ ID NO: 59341 - DNA, 26 bp, Homo sapiens
tggtctcttgtttctccacgatacac

SEQ ID NO: 59342 - DNA, 26 bp, Homo sapiens
ggtctcttgtttctccacgatacaca

SEQ ID NO: 59343 - DNA, 26 bp, Homo sapiens
gtctcttgtttctccacgatacacag

SEQ ID NO: 59344 - DNA, 26 bp, Homo sapiens
tctcttgtttctccacgatacacagg

SEQ ID NO: 59345 - DNA, 26 bp, Homo sapiens
ctcttgtttctccacgatacacaggc

SEQ ID NO: 59346 - DNA, 26 bp, Homo sapiens
tcttgtttctccacgatacacaggct

SEQ ID NO: 59347 - DNA, 26 bp, Homo sapiens
cttgtttctccacgatacacaggctt

SEQ ID NO: 59348 - DNA, 26 bp, Homo sapiens
ttgtttctccacgatacacaggcttc

SEQ ID NO: 59349 - DNA, 26 bp, Homo sapiens
tgtttctccacgatacacaggcttcc

SEQ ID NO: 59350 - DNA, 26 bp, Homo sapiens
gtttctccacgatacacaggcttccc

SEQ ID NO: 59351 - DNA, 26 bp, Homo sapiens
tttctccacgatacacaggcttccca

SEQ ID NO: 59352 - DNA, 26 bp, Homo sapiens
ttctccacgatacacaggcttcccat

SEQ ID NO: 59353 - DNA, 26 bp, Homo sapiens
tctccacgatacacaggcttcccatc

SEQ ID NO: 59354 - DNA, 26 bp, Homo sapiens
ctccacgatacacaggcttcccatct

SEQ ID NO: 59355 - DNA, 26 bp, Homo sapiens
tccacgatacacaggcttcccatcta

SEQ ID NO: 59356 - DNA, 26 bp, Homo sapiens
ccacgatacacaggcttcccatctaa

SEQ ID NO: 59357 - DNA, 26 bp, Homo sapiens
cacgatacacaggcttcccatctaaa

SEQ ID NO: 59358 - DNA, 26 bp, Homo sapiens
acgatacacaggcttcccatctaaag

SEQ ID NO: 59359 - DNA, 26 bp, Homo sapiens
cgatacacaggcttcccatctaaagt

SEQ ID NO: 59360 - DNA, 26 bp, Homo sapiens
gatacacaggcttcccatctaaagtc

SEQ ID NO: 59361 - DNA, 26 bp, Homo sapiens
atacacaggcttcccatctaaagtca

SEQ ID NO: 59362 - DNA, 26 bp, Homo sapiens
tacacaggcttcccatctaaagtcat

SEQ ID NO: 59363 - DNA, 26 bp, Homo sapiens
acacaggcttcccatctaaagtcatg

SEQ ID NO: 59364 - DNA, 26 bp, Homo sapiens
cacaggcttcccatctaaagtcatgc

SEQ ID NO: 59365 - DNA, 26 bp, Homo sapiens
acaggcttcccatctaaagtcatgct

SEQ ID NO: 59366 - DNA, 26 bp, Homo sapiens
caggcttcccatctaaagtcatgctt

SEQ ID NO: 59367 - DNA, 26 bp, Homo sapiens
aggcttcccatctaaagtcatgctta

SEQ ID NO: 59368 - DNA, 26 bp, Homo sapiens
ggcttcccatctaaagtcatgcttaa

SEQ ID NO: 59369 - DNA, 26 bp, Homo sapiens
gcttcccatctaaagtcatgcttaac

SEQ ID NO: 59370 - DNA, 26 bp, Homo sapiens
cttcccatctaaagtcatgcttaact

SEQ ID NO: 59371 - DNA, 26 bp, Homo sapiens
ttcccatctaaagtcatgcttaacta

SEQ ID NO: 59372 - DNA, 26 bp, Homo sapiens
tcccatctaaagtcatgcttaactaa

SEQ ID NO: 59373 - DNA, 26 bp, Homo sapiens
cccatctaaagtcatgcttaactaaa

SEQ ID NO: 59374 - DNA, 26 bp, Homo sapiens
ccatctaaagtcatgcttaactaaaa

SEQ ID NO: 59375 - DNA, 26 bp, Homo sapiens
catctaaagtcatgcttaactaaaag

SEQ ID NO: 59376 - DNA, 26 bp, Homo sapiens
atctaaagtcatgcttaactaaaagg

SEQ ID NO: 59377 - DNA, 26 bp, Homo sapiens
tctaaagtcatgcttaactaaaaggg

SEQ ID NO: 59378 - DNA, 26 bp, Homo sapiens
ctaaagtcatgcttaactaaaaggga

SEQ ID NO: 59379 - DNA, 26 bp, Homo sapiens
taaagtcatgcttaactaaaagggaa

SEQ ID NO: 59380 - DNA, 26 bp, Homo sapiens
aaagtcatgcttaactaaaagggaaa

SEQ ID NO: 59381 - DNA, 26 bp, Homo sapiens
aagtcatgcttaactaaaagggaaaa

SEQ ID NO: 59382 - DNA, 26 bp, Homo sapiens
agtcatgcttaactaaaagggaaaaa

SEQ ID NO: 59383 - DNA, 26 bp, Homo sapiens
gtcatgcttaactaaaagggaaaaaa

SEQ ID NO: 59384 - DNA, 26 bp, Homo sapiens
tcatgcttaactaaaagggaaaaaaa

SEQ ID NO: 59385 - DNA, 26 bp, Homo sapiens
catgcttaactaaaagggaaaaaaaa

SEQ ID NO: 59386 - DNA, 26 bp, Homo sapiens
atgcttaactaaaagggaaaaaaaat

SEQ ID NO: 59387 - DNA, 26 bp, Homo sapiens
tgcttaactaaaagggaaaaaaaatg

SEQ ID NO: 59388 - DNA, 26 bp, Homo sapiens
gcttaactaaaagggaaaaaaaatga

SEQ ID NO: 59389 - DNA, 26 bp, Homo sapiens
cttaactaaaagggaaaaaaaatgaa

SEQ ID NO: 59390 - DNA, 26 bp, Homo sapiens
ttaactaaaagggaaaaaaaatgaac

SEQ ID NO: 59391 - DNA, 26 bp, Homo sapiens
taactaaaagggaaaaaaaatgaacc

SEQ ID NO: 59392 - DNA, 26 bp, Homo sapiens
aactaaaagggaaaaaaaatgaacca

SEQ ID NO: 59393 - DNA, 26 bp, Homo sapiens
actaaaagggaaaaaaaatgaaccaa

SEQ ID NO: 59394 - DNA, 26 bp, Homo sapiens
ctaaaagggaaaaaaaatgaaccaag

SEQ ID NO: 59395 - DNA, 26 bp, Homo sapiens
taaaagggaaaaaaaatgaaccaagc

SEQ ID NO: 59396 - DNA, 26 bp, Homo sapiens
aaaagggaaaaaaaatgaaccaagca

SEQ ID NO: 59397 - DNA, 26 bp, Homo sapiens
aaagggaaaaaaaatgaaccaagcaa

SEQ ID NO: 59398 - DNA, 26 bp, Homo sapiens
aagggaaaaaaaatgaaccaagcaaa

SEQ ID NO: 59399 - DNA, 26 bp, Homo sapiens
agggaaaaaaaatgaaccaagcaaaa

SEQ ID NO: 59400 - DNA, 26 bp, Homo sapiens
gggaaaaaaaatgaaccaagcaaaag

SEQ ID NO: 59401 - DNA, 26 bp, Homo sapiens
ggaaaaaaaatgaaccaagcaaaagt

SEQ ID NO: 59402 - DNA, 26 bp, Homo sapiens
gaaaaaaaatgaaccaagcaaaagta

SEQ ID NO: 59403 - DNA, 26 bp, Homo sapiens
aaaaaaaatgaaccaagcaaaagtat

SEQ ID NO: 59404 - DNA, 26 bp, Homo sapiens
aaaaaaatgaaccaagcaaaagtata

SEQ ID NO: 59405 - DNA, 26 bp, Homo sapiens
aaaaaatgaaccaagcaaaagtatat

SEQ ID NO: 59406 - DNA, 26 bp, Homo sapiens
aaaaatgaaccaagcaaaagtatata

SEQ ID NO: 59407 - DNA, 26 bp, Homo sapiens
aaaatgaaccaagcaaaagtatatag

SEQ ID NO: 59408 - DNA, 26 bp, Homo sapiens
aaatgaaccaagcaaaagtatataga

SEQ ID NO: 59409 - DNA, 26 bp, Homo sapiens
aatgaaccaagcaaaagtatatagag

SEQ ID NO: 59410 - DNA, 26 bp, Homo sapiens
atgaaccaagcaaaagtatatagagt

SEQ ID NO: 59411 - DNA, 26 bp, Homo sapiens
tgaaccaagcaaaagtatatagagta

SEQ ID NO: 59412 - DNA, 26 bp, Homo sapiens
gaaccaagcaaaagtatatagagtag

SEQ ID NO: 59413 - DNA, 26 bp, Homo sapiens
aaccaagcaaaagtatatagagtagc

SEQ ID NO: 59414 - DNA, 26 bp, Homo sapiens
accaagcaaaagtatatagagtagcc

SEQ ID NO: 59415 - DNA, 26 bp, Homo sapiens
ccaagcaaaagtatatagagtagccg

SEQ ID NO: 59416 - DNA, 26 bp, Homo sapiens
caagcaaaagtatatagagtagccgt

SEQ ID NO: 59417 - DNA, 26 bp, Homo sapiens
aagcaaaagtatatagagtagccgtg

SEQ ID NO: 59418 - DNA, 26 bp, Homo sapiens
agcaaaagtatatagagtagccgtga

SEQ ID NO: 59419 - DNA, 26 bp, Homo sapiens
gcaaaagtatatagagtagccgtgac

SEQ ID NO: 59420 - DNA, 26 bp, Homo sapiens
caaaagtatatagagtagccgtgaca

SEQ ID NO: 59421 - DNA, 26 bp, Homo sapiens
aaaagtatatagagtagccgtgacat

SEQ ID NO: 59422 - DNA, 26 bp, Homo sapiens
aaagtatatagagtagccgtgacatt

SEQ ID NO: 59423 - DNA, 26 bp, Homo sapiens
aagtatatagagtagccgtgacattt

SEQ ID NO: 59424 - DNA, 26 bp, Homo sapiens
agtatatagagtagccgtgacatttg

SEQ ID NO: 59425 - DNA, 26 bp, Homo sapiens
gtatatagagtagccgtgacatttgc

SEQ ID NO: 59426 - DNA, 26 bp, Homo sapiens
tatatagagtagccgtgacatttgca

SEQ ID NO: 59427 - DNA, 26 bp, Homo sapiens
atatagagtagccgtgacatttgcat

SEQ ID NO: 59428 - DNA, 26 bp, Homo sapiens
tatagagtagccgtgacatttgcatt

SEQ ID NO: 59429 - DNA, 26 bp, Homo sapiens
atagagtagccgtgacatttgcatta

SEQ ID NO: 59430 - DNA, 26 bp, Homo sapiens
tagagtagccgtgacatttgcattat

SEQ ID NO: 59431 - DNA, 26 bp, Homo sapiens
agagtagccgtgacatttgcattatt

SEQ ID NO: 59432 - DNA, 26 bp, Homo sapiens
gagtagccgtgacatttgcattattt

SEQ ID NO: 59433 - DNA, 26 bp, Homo sapiens
agtagccgtgacatttgcattatttt

SEQ ID NO: 59434 - DNA, 26 bp, Homo sapiens
gtagccgtgacatttgcattattttc

SEQ ID NO: 59435 - DNA, 26 bp, Homo sapiens
tagccgtgacatttgcattattttct

SEQ ID NO: 59436 - DNA, 26 bp, Homo sapiens
agccgtgacatttgcattattttcta

SEQ ID NO: 59437 - DNA, 26 bp, Homo sapiens
gccgtgacatttgcattattttctag

SEQ ID NO: 59438 - DNA, 26 bp, Homo sapiens
ccgtgacatttgcattattttctaga

SEQ ID NO: 59439 - DNA, 26 bp, Homo sapiens
cgtgacatttgcattattttctagac

SEQ ID NO: 59440 - DNA, 26 bp, Homo sapiens
gtgacatttgcattattttctagact

SEQ ID NO: 59441 - DNA, 26 bp, Homo sapiens
tgacatttgcattattttctagactt

SEQ ID NO: 59442 - DNA, 26 bp, Homo sapiens
gacatttgcattattttctagacttt

SEQ ID NO: 59443 - DNA, 26 bp, Homo sapiens
acatttgcattattttctagacttta

SEQ ID NO: 59444 - DNA, 26 bp, Homo sapiens
catttgcattattttctagactttac

SEQ ID NO: 59445 - DNA, 26 bp, Homo sapiens
atttgcattattttctagactttaca

SEQ ID NO: 59446 - DNA, 26 bp, Homo sapiens
tttgcattattttctagactttacat

SEQ ID NO: 59447 - DNA, 26 bp, Homo sapiens
ttgcattattttctagactttacatt

SEQ ID NO: 59448 - DNA, 26 bp, Homo sapiens
tgcattattttctagactttacattt

SEQ ID NO: 59449 - DNA, 26 bp, Homo sapiens
gcattattttctagactttacatttg

SEQ ID NO: 59450 - DNA, 26 bp, Homo sapiens
cattattttctagactttacatttgc

SEQ ID NO: 59451 - DNA, 26 bp, Homo sapiens
attattttctagactttacatttgcc

SEQ ID NO: 59452 - DNA, 26 bp, Homo sapiens
ttattttctagactttacatttgcct

SEQ ID NO: 59453 - DNA, 26 bp, Homo sapiens
tattttctagactttacatttgcctg

SEQ ID NO: 59454 - DNA, 26 bp, Homo sapiens
attttctagactttacatttgcctgc

SEQ ID NO: 59455 - DNA, 26 bp, Homo sapiens
ttttctagactttacatttgcctgca

SEQ ID NO: 59456 - DNA, 26 bp, Homo sapiens
tttctagactttacatttgcctgcaa

SEQ ID NO: 59457 - DNA, 26 bp, Homo sapiens
ttctagactttacatttgcctgcaac

SEQ ID NO: 59458 - DNA, 26 bp, Homo sapiens
tctagactttacatttgcctgcaaca

SEQ ID NO: 59459 - DNA, 26 bp, Homo sapiens
ctagactttacatttgcctgcaacag

SEQ ID NO: 59460 - DNA, 26 bp, Homo sapiens
tagactttacatttgcctgcaacagg

SEQ ID NO: 59461 - DNA, 26 bp, Homo sapiens
agactttacatttgcctgcaacaggc

SEQ ID NO: 59462 - DNA, 26 bp, Homo sapiens
gactttacatttgcctgcaacaggca

SEQ ID NO: 59463 - DNA, 26 bp, Homo sapiens
actttacatttgcctgcaacaggcat

SEQ ID NO: 59464 - DNA, 26 bp, Homo sapiens
ctttacatttgcctgcaacaggcata

SEQ ID NO: 59465 - DNA, 26 bp, Homo sapiens
tttacatttgcctgcaacaggcataa

SEQ ID NO: 59466 - DNA, 26 bp, Homo sapiens
ttacatttgcctgcaacaggcataac

SEQ ID NO: 59467 - DNA, 26 bp, Homo sapiens
tacatttgcctgcaacaggcataaca

SEQ ID NO: 59468 - DNA, 26 bp, Homo sapiens
acatttgcctgcaacaggcataacat

SEQ ID NO: 59469 - DNA, 26 bp, Homo sapiens
catttgcctgcaacaggcataacatg

SEQ ID NO: 59470 - DNA, 26 bp, Homo sapiens
atttgcctgcaacaggcataacatga

SEQ ID NO: 59471 - DNA, 26 bp, Homo sapiens
tttgcctgcaacaggcataacatgaa

SEQ ID NO: 59472 - DNA, 26 bp, Homo sapiens
ttgcctgcaacaggcataacatgaaa

SEQ ID NO: 59473 - DNA, 26 bp, Homo sapiens
tgcctgcaacaggcataacatgaaac

SEQ ID NO: 59474 - DNA, 26 bp, Homo sapiens
gcctgcaacaggcataacatgaaact

SEQ ID NO: 59475 - DNA, 26 bp, Homo sapiens
cctgcaacaggcataacatgaaactc

SEQ ID NO: 59476 - DNA, 26 bp, Homo sapiens
ctgcaacaggcataacatgaaactcc

SEQ ID NO: 59477 - DNA, 26 bp, Homo sapiens
tgcaacaggcataacatgaaactcca

SEQ ID NO: 59478 - DNA, 26 bp, Homo sapiens
gcaacaggcataacatgaaactccag

SEQ ID NO: 59479 - DNA, 26 bp, Homo sapiens
caacaggcataacatgaaactccaga

SEQ ID NO: 59480 - DNA, 26 bp, Homo sapiens
aacaggcataacatgaaactccagag

SEQ ID NO: 59481 - DNA, 26 bp, Homo sapiens
acaggcataacatgaaactccagagg

SEQ ID NO: 59482 - DNA, 26 bp, Homo sapiens
caggcataacatgaaactccagaggg

SEQ ID NO: 59483 - DNA, 26 bp, Homo sapiens
aggcataacatgaaactccagaggga

SEQ ID NO: 59484 - DNA, 26 bp, Homo sapiens
ggcataacatgaaactccagagggaa

SEQ ID NO: 59485 - DNA, 26 bp, Homo sapiens
gcataacatgaaactccagagggaat

SEQ ID NO: 59486 - DNA, 26 bp, Homo sapiens
cataacatgaaactccagagggaatt

SEQ ID NO: 59487 - DNA, 26 bp, Homo sapiens
ataacatgaaactccagagggaattt

SEQ ID NO: 59488 - DNA, 26 bp, Homo sapiens
taacatgaaactccagagggaatttg

SEQ ID NO: 59489 - DNA, 26 bp, Homo sapiens
aacatgaaactccagagggaatttgg

SEQ ID NO: 59490 - DNA, 26 bp, Homo sapiens
acatgaaactccagagggaatttgga

SEQ ID NO: 59491 - DNA, 26 bp, Homo sapiens
catgaaactccagagggaatttggat

SEQ ID NO: 59492 - DNA, 26 bp, Homo sapiens
atgaaactccagagggaatttggatt

SEQ ID NO: 59493 - DNA, 26 bp, Homo sapiens
tgaaactccagagggaatttggattg

SEQ ID NO: 59494 - DNA, 26 bp, Homo sapiens
gaaactccagagggaatttggattga

SEQ ID NO: 59495 - DNA, 26 bp, Homo sapiens
aaactccagagggaatttggattgat

SEQ ID NO: 59496 - DNA, 26 bp, Homo sapiens
aactccagagggaatttggattgata

SEQ ID NO: 59497 - DNA, 26 bp, Homo sapiens
actccagagggaatttggattgatag

SEQ ID NO: 59498 - DNA, 26 bp, Homo sapiens
ctccagagggaatttggattgatagg

SEQ ID NO: 59499 - DNA, 26 bp, Homo sapiens
tccagagggaatttggattgatagga

SEQ ID NO: 59500 - DNA, 26 bp, Homo sapiens
ccagagggaatttggattgataggaa

SEQ ID NO: 59501 - DNA, 26 bp, Homo sapiens
cagagggaatttggattgataggaat

SEQ ID NO: 59502 - DNA, 26 bp, Homo sapiens
agagggaatttggattgataggaatg

SEQ ID NO: 59503 - DNA, 26 bp, Homo sapiens
gagggaatttggattgataggaatgt

SEQ ID NO: 59504 - DNA, 26 bp, Homo sapiens
agggaatttggattgataggaatgtt

SEQ ID NO: 59505 - DNA, 26 bp, Homo sapiens
gggaatttggattgataggaatgttc

SEQ ID NO: 59506 - DNA, 26 bp, Homo sapiens
ggaatttggattgataggaatgttca

SEQ ID NO: 59507 - DNA, 26 bp, Homo sapiens
gaatttggattgataggaatgttcac

SEQ ID NO: 59508 - DNA, 26 bp, Homo sapiens
aatttggattgataggaatgttcaca

SEQ ID NO: 59509 - DNA, 26 bp, Homo sapiens
atttggattgataggaatgttcacat

SEQ ID NO: 59510 - DNA, 26 bp, Homo sapiens
tttggattgataggaatgttcacata

SEQ ID NO: 59511 - DNA, 26 bp, Homo sapiens
ttggattgataggaatgttcacataa

SEQ ID NO: 59512 - DNA, 26 bp, Homo sapiens
tggattgataggaatgttcacataaa

SEQ ID NO: 59513 - DNA, 26 bp, Homo sapiens
ggattgataggaatgttcacataaac

SEQ ID NO: 59514 - DNA, 26 bp, Homo sapiens
gattgataggaatgttcacataaaca

SEQ ID NO: 59515 - DNA, 26 bp, Homo sapiens
attgataggaatgttcacataaacac

SEQ ID NO: 59516 - DNA, 26 bp, Homo sapiens
ttgataggaatgttcacataaacacc

SEQ ID NO: 59517 - DNA, 26 bp, Homo sapiens
tgataggaatgttcacataaacacca

SEQ ID NO: 59518 - DNA, 26 bp, Homo sapiens
gataggaatgttcacataaacaccag

SEQ ID NO: 59519 - DNA, 26 bp, Homo sapiens
ataggaatgttcacataaacaccagc

SEQ ID NO: 59520 - DNA, 26 bp, Homo sapiens
taggaatgttcacataaacaccagca

SEQ ID NO: 59521 - DNA, 26 bp, Homo sapiens
aggaatgttcacataaacaccagcag

SEQ ID NO: 59522 - DNA, 26 bp, Homo sapiens
ggaatgttcacataaacaccagcagt

SEQ ID NO: 59523 - DNA, 26 bp, Homo sapiens
gaatgttcacataaacaccagcagtg

SEQ ID NO: 59524 - DNA, 26 bp, Homo sapiens
aatgttcacataaacaccagcagtgg

SEQ ID NO: 59525 - DNA, 26 bp, Homo sapiens
atgttcacataaacaccagcagtggc

SEQ ID NO: 59526 - DNA, 26 bp, Homo sapiens
tgttcacataaacaccagcagtggct

SEQ ID NO: 59527 - DNA, 26 bp, Homo sapiens
gttcacataaacaccagcagtggcta

SEQ ID NO: 59528 - DNA, 26 bp, Homo sapiens
ttcacataaacaccagcagtggctaa

SEQ ID NO: 59529 - DNA, 26 bp, Homo sapiens
tcacataaacaccagcagtggctaac

SEQ ID NO: 59530 - DNA, 26 bp, Homo sapiens
cacataaacaccagcagtggctaact

SEQ ID NO: 59531 - DNA, 26 bp, Homo sapiens
acataaacaccagcagtggctaactg

SEQ ID NO: 59532 - DNA, 26 bp, Homo sapiens
cataaacaccagcagtggctaactgt

SEQ ID NO: 59533 - DNA, 26 bp, Homo sapiens
ataaacaccagcagtggctaactgtt

SEQ ID NO: 59534 - DNA, 26 bp, Homo sapiens
taaacaccagcagtggctaactgtta

SEQ ID NO: 59535 - DNA, 26 bp, Homo sapiens
aaacaccagcagtggctaactgttac

SEQ ID NO: 59536 - DNA, 26 bp, Homo sapiens
aacaccagcagtggctaactgttaca

SEQ ID NO: 59537 - DNA, 26 bp, Homo sapiens
acaccagcagtggctaactgttacac

SEQ ID NO: 59538 - DNA, 26 bp, Homo sapiens
caccagcagtggctaactgttacaca

SEQ ID NO: 59539 - DNA, 26 bp, Homo sapiens
accagcagtggctaactgttacacaa

SEQ ID NO: 59540 - DNA, 26 bp, Homo sapiens
ccagcagtggctaactgttacacaac

SEQ ID NO: 59541 - DNA, 26 bp, Homo sapiens
cagcagtggctaactgttacacaaca

SEQ ID NO: 59542 - DNA, 26 bp, Homo sapiens
agcagtggctaactgttacacaacat

SEQ ID NO: 59543 - DNA, 26 bp, Homo sapiens
gcagtggctaactgttacacaacatt

SEQ ID NO: 59544 - DNA, 26 bp, Homo sapiens
cagtggctaactgttacacaacattc

SEQ ID NO: 59545 - DNA, 26 bp, Homo sapiens
agtggctaactgttacacaacattca

SEQ ID NO: 59546 - DNA, 26 bp, Homo sapiens
gtggctaactgttacacaacattcaa

SEQ ID NO: 59547 - DNA, 26 bp, Homo sapiens
tggctaactgttacacaacattcaaa

SEQ ID NO: 59548 - DNA, 26 bp, Homo sapiens
ggctaactgttacacaacattcaaag

SEQ ID NO: 59549 - DNA, 26 bp, Homo sapiens
gctaactgttacacaacattcaaagt

SEQ ID NO: 59550 - DNA, 26 bp, Homo sapiens
ctaactgttacacaacattcaaagta

SEQ ID NO: 59551 - DNA, 26 bp, Homo sapiens
taactgttacacaacattcaaagtat

SEQ ID NO: 59552 - DNA, 26 bp, Homo sapiens
aactgttacacaacattcaaagtatt

SEQ ID NO: 59553 - DNA, 26 bp, Homo sapiens
actgttacacaacattcaaagtattc

SEQ ID NO: 59554 - DNA, 26 bp, Homo sapiens
ctgttacacaacattcaaagtattcg

SEQ ID NO: 59555 - DNA, 26 bp, Homo sapiens
tgttacacaacattcaaagtattcga

SEQ ID NO: 59556 - DNA, 26 bp, Homo sapiens
gttacacaacattcaaagtattcgag

SEQ ID NO: 59557 - DNA, 26 bp, Homo sapiens
ttacacaacattcaaagtattcgaga

SEQ ID NO: 59558 - DNA, 26 bp, Homo sapiens
tacacaacattcaaagtattcgagag

SEQ ID NO: 59559 - DNA, 26 bp, Homo sapiens
acacaacattcaaagtattcgagaga

SEQ ID NO: 59560 - DNA, 26 bp, Homo sapiens
cacaacattcaaagtattcgagagaa

SEQ ID NO: 59561 - DNA, 26 bp, Homo sapiens
acaacattcaaagtattcgagagaac

SEQ ID NO: 59562 - DNA, 26 bp, Homo sapiens
caacattcaaagtattcgagagaact

SEQ ID NO: 59563 - DNA, 26 bp, Homo sapiens
aacattcaaagtattcgagagaactg

SEQ ID NO: 59564 - DNA, 26 bp, Homo sapiens
acattcaaagtattcgagagaactgc

SEQ ID NO: 59565 - DNA, 26 bp, Homo sapiens
cattcaaagtattcgagagaactgcc

SEQ ID NO: 59566 - DNA, 26 bp, Homo sapiens
attcaaagtattcgagagaactgcct

SEQ ID NO: 59567 - DNA, 26 bp, Homo sapiens
ttcaaagtattcgagagaactgcctg

SEQ ID NO: 59568 - DNA, 26 bp, Homo sapiens
tcaaagtattcgagagaactgcctgg

SEQ ID NO: 59569 - DNA, 26 bp, Homo sapiens
caaagtattcgagagaactgcctgga

SEQ ID NO: 59570 - DNA, 26 bp, Homo sapiens
aaagtattcgagagaactgcctggag

SEQ ID NO: 59571 - DNA, 26 bp, Homo sapiens
aagtattcgagagaactgcctggaga

SEQ ID NO: 59572 - DNA, 26 bp, Homo sapiens
agtattcgagagaactgcctggagac

SEQ ID NO: 59573 - DNA, 26 bp, Homo sapiens
gtattcgagagaactgcctggagaca

SEQ ID NO: 59574 - DNA, 26 bp, Homo sapiens
tattcgagagaactgcctggagacag

SEQ ID NO: 59575 - DNA, 26 bp, Homo sapiens
attcgagagaactgcctggagacaga

SEQ ID NO: 59576 - DNA, 26 bp, Homo sapiens
ttcgagagaactgcctggagacagag

SEQ ID NO: 59577 - DNA, 26 bp, Homo sapiens
tcgagagaactgcctggagacagaga

SEQ ID NO: 59578 - DNA, 26 bp, Homo sapiens
cgagagaactgcctggagacagagag

SEQ ID NO: 59579 - DNA, 26 bp, Homo sapiens
gagagaactgcctggagacagagagc

SEQ ID NO: 59580 - DNA, 26 bp, Homo sapiens
agagaactgcctggagacagagagcg

SEQ ID NO: 59581 - DNA, 26 bp, Homo sapiens
gagaactgcctggagacagagagcga

SEQ ID NO: 59582 - DNA, 26 bp, Homo sapiens
agaactgcctggagacagagagcgag

SEQ ID NO: 59583 - DNA, 26 bp, Homo sapiens
gaactgcctggagacagagagcgagg

SEQ ID NO: 59584 - DNA, 26 bp, Homo sapiens
aactgcctggagacagagagcgaggg

SEQ ID NO: 59585 - DNA, 26 bp, Homo sapiens
actgcctggagacagagagcgagggt

SEQ ID NO: 59586 - DNA, 26 bp, Homo sapiens
ctgcctggagacagagagcgagggtc

SEQ ID NO: 59587 - DNA, 26 bp, Homo sapiens
tgcctggagacagagagcgagggtcc

SEQ ID NO: 59588 - DNA, 26 bp, Homo sapiens
gcctggagacagagagcgagggtcca

SEQ ID NO: 59589 - DNA, 26 bp, Homo sapiens
cctggagacagagagcgagggtccac

SEQ ID NO: 59590 - DNA, 26 bp, Homo sapiens
ctggagacagagagcgagggtccaca

SEQ ID NO: 59591 - DNA, 26 bp, Homo sapiens
tggagacagagagcgagggtccacag

SEQ ID NO: 59592 - DNA, 26 bp, Homo sapiens
ggagacagagagcgagggtccacaga

SEQ ID NO: 59593 - DNA, 26 bp, Homo sapiens
gagacagagagcgagggtccacagac

SEQ ID NO: 59594 - DNA, 26 bp, Homo sapiens
agacagagagcgagggtccacagaca

SEQ ID NO: 59595 - DNA, 26 bp, Homo sapiens
gacagagagcgagggtccacagacac

SEQ ID NO: 59596 - DNA, 26 bp, Homo sapiens
acagagagcgagggtccacagacaca

SEQ ID NO: 59597 - DNA, 26 bp, Homo sapiens
cagagagcgagggtccacagacacat

SEQ ID NO: 59598 - DNA, 26 bp, Homo sapiens
agagagcgagggtccacagacacatt

SEQ ID NO: 59599 - DNA, 26 bp, Homo sapiens
gagagcgagggtccacagacacatta

SEQ ID NO: 59600 - DNA, 26 bp, Homo sapiens
agagcgagggtccacagacacattag

SEQ ID NO: 59601 - DNA, 26 bp, Homo sapiens
gagcgagggtccacagacacattagc

SEQ ID NO: 59602 - DNA, 26 bp, Homo sapiens
agcgagggtccacagacacattagca

SEQ ID NO: 59603 - DNA, 26 bp, Homo sapiens
gcgagggtccacagacacattagcac

SEQ ID NO: 59604 - DNA, 26 bp, Homo sapiens
cgagggtccacagacacattagcacc

SEQ ID NO: 59605 - DNA, 26 bp, Homo sapiens
gagggtccacagacacattagcacca

SEQ ID NO: 59606 - DNA, 26 bp, Homo sapiens
agggtccacagacacattagcaccat

SEQ ID NO: 59607 - DNA, 26 bp, Homo sapiens
gggtccacagacacattagcaccata

SEQ ID NO: 59608 - DNA, 26 bp, Homo sapiens
ggtccacagacacattagcaccatac

SEQ ID NO: 59609 - DNA, 26 bp, Homo sapiens
gtccacagacacattagcaccatact

SEQ ID NO: 59610 - DNA, 26 bp, Homo sapiens
tccacagacacattagcaccatactg

SEQ ID NO: 59611 - DNA, 26 bp, Homo sapiens
ccacagacacattagcaccatactga

SEQ ID NO: 59612 - DNA, 26 bp, Homo sapiens
cacagacacattagcaccatactgat

SEQ ID NO: 59613 - DNA, 26 bp, Homo sapiens
acagacacattagcaccatactgata

SEQ ID NO: 59614 - DNA, 26 bp, Homo sapiens
cagacacattagcaccatactgatag

SEQ ID NO: 59615 - DNA, 26 bp, Homo sapiens
agacacattagcaccatactgatagg

SEQ ID NO: 59616 - DNA, 26 bp, Homo sapiens
gacacattagcaccatactgataggt

SEQ ID NO: 59617 - DNA, 26 bp, Homo sapiens
acacattagcaccatactgataggtc

SEQ ID NO: 59618 - DNA, 26 bp, Homo sapiens
cacattagcaccatactgataggtca

SEQ ID NO: 59619 - DNA, 26 bp, Homo sapiens
acattagcaccatactgataggtcat

SEQ ID NO: 59620 - DNA, 26 bp, Homo sapiens
cattagcaccatactgataggtcatg

SEQ ID NO: 59621 - DNA, 26 bp, Homo sapiens
attagcaccatactgataggtcatgc

SEQ ID NO: 59622 - DNA, 26 bp, Homo sapiens
ttagcaccatactgataggtcatgca

SEQ ID NO: 59623 - DNA, 26 bp, Homo sapiens
tagcaccatactgataggtcatgcag

SEQ ID NO: 59624 - DNA, 26 bp, Homo sapiens
agcaccatactgataggtcatgcagc

SEQ ID NO: 59625 - DNA, 26 bp, Homo sapiens
gcaccatactgataggtcatgcagca

SEQ ID NO: 59626 - DNA, 26 bp, Homo sapiens
caccatactgataggtcatgcagcag

SEQ ID NO: 59627 - DNA, 26 bp, Homo sapiens
accatactgataggtcatgcagcagg

SEQ ID NO: 59628 - DNA, 26 bp, Homo sapiens
ccatactgataggtcatgcagcagga

SEQ ID NO: 59629 - DNA, 26 bp, Homo sapiens
catactgataggtcatgcagcaggat

SEQ ID NO: 59630 - DNA, 26 bp, Homo sapiens
atactgataggtcatgcagcaggatg

SEQ ID NO: 59631 - DNA, 26 bp, Homo sapiens
tactgataggtcatgcagcaggatgt

SEQ ID NO: 59632 - DNA, 26 bp, Homo sapiens
actgataggtcatgcagcaggatgtt

SEQ ID NO: 59633 - DNA, 26 bp, Homo sapiens
ctgataggtcatgcagcaggatgttc

SEQ ID NO: 59634 - DNA, 26 bp, Homo sapiens
tgataggtcatgcagcaggatgttcc

SEQ ID NO: 59635 - DNA, 26 bp, Homo sapiens
gataggtcatgcagcaggatgttccc

SEQ ID NO: 59636 - DNA, 26 bp, Homo sapiens
ataggtcatgcagcaggatgttccct

SEQ ID NO: 59637 - DNA, 26 bp, Homo sapiens
taggtcatgcagcaggatgttccctc

SEQ ID NO: 59638 - DNA, 26 bp, Homo sapiens
aggtcatgcagcaggatgttccctcc

SEQ ID NO: 59639 - DNA, 26 bp, Homo sapiens
ggtcatgcagcaggatgttccctccc

SEQ ID NO: 59640 - DNA, 26 bp, Homo sapiens
gtcatgcagcaggatgttccctcccg

SEQ ID NO: 59641 - DNA, 26 bp, Homo sapiens
tcatgcagcaggatgttccctcccga

SEQ ID NO: 59642 - DNA, 26 bp, Homo sapiens
catgcagcaggatgttccctcccgag

SEQ ID NO: 59643 - DNA, 26 bp, Homo sapiens
atgcagcaggatgttccctcccgagt

SEQ ID NO: 59644 - DNA, 26 bp, Homo sapiens
tgcagcaggatgttccctcccgagtt

SEQ ID NO: 59645 - DNA, 26 bp, Homo sapiens
gcagcaggatgttccctcccgagttc

SEQ ID NO: 59646 - DNA, 26 bp, Homo sapiens
cagcaggatgttccctcccgagttcg

SEQ ID NO: 59647 - DNA, 26 bp, Homo sapiens
agcaggatgttccctcccgagttcga

SEQ ID NO: 59648 - DNA, 26 bp, Homo sapiens
gcaggatgttccctcccgagttcgag

SEQ ID NO: 59649 - DNA, 26 bp, Homo sapiens
caggatgttccctcccgagttcgagt

SEQ ID NO: 59650 - DNA, 26 bp, Homo sapiens
aggatgttccctcccgagttcgagtg

SEQ ID NO: 59651 - DNA, 26 bp, Homo sapiens
ggatgttccctcccgagttcgagtgt

SEQ ID NO: 59652 - DNA, 26 bp, Homo sapiens
gatgttccctcccgagttcgagtgta

SEQ ID NO: 59653 - DNA, 26 bp, Homo sapiens
atgttccctcccgagttcgagtgtaa

SEQ ID NO: 59654 - DNA, 26 bp, Homo sapiens
tgttccctcccgagttcgagtgtaaa

SEQ ID NO: 59655 - DNA, 26 bp, Homo sapiens
gttccctcccgagttcgagtgtaaat

SEQ ID NO: 59656 - DNA, 26 bp, Homo sapiens
ttccctcccgagttcgagtgtaaatc

SEQ ID NO: 59657 - DNA, 26 bp, Homo sapiens
tccctcccgagttcgagtgtaaatca

SEQ ID NO: 59658 - DNA, 26 bp, Homo sapiens
ccctcccgagttcgagtgtaaatcaa

SEQ ID NO: 59659 - DNA, 26 bp, Homo sapiens
cctcccgagttcgagtgtaaatcaaa

SEQ ID NO: 59660 - DNA, 26 bp, Homo sapiens
ctcccgagttcgagtgtaaatcaaag

SEQ ID NO: 59661 - DNA, 26 bp, Homo sapiens
tcccgagttcgagtgtaaatcaaagc

SEQ ID NO: 59662 - DNA, 26 bp, Homo sapiens
cccgagttcgagtgtaaatcaaagca

SEQ ID NO: 59663 - DNA, 26 bp, Homo sapiens
ccgagttcgagtgtaaatcaaagcat

SEQ ID NO: 59664 - DNA, 26 bp, Homo sapiens
cgagttcgagtgtaaatcaaagcatg

SEQ ID NO: 59665 - DNA, 26 bp, Homo sapiens
gagttcgagtgtaaatcaaagcatga

SEQ ID NO: 59666 - DNA, 26 bp, Homo sapiens
agttcgagtgtaaatcaaagcatgaa

SEQ ID NO: 59667 - DNA, 26 bp, Homo sapiens
gttcgagtgtaaatcaaagcatgaaa

SEQ ID NO: 59668 - DNA, 26 bp, Homo sapiens
ttcgagtgtaaatcaaagcatgaaat

SEQ ID NO: 59669 - DNA, 26 bp, Homo sapiens
tcgagtgtaaatcaaagcatgaaatg

SEQ ID NO: 59670 - DNA, 26 bp, Homo sapiens
cgagtgtaaatcaaagcatgaaatga

SEQ ID NO: 59671 - DNA, 26 bp, Homo sapiens
gagtgtaaatcaaagcatgaaatgat

SEQ ID NO: 59672 - DNA, 26 bp, Homo sapiens
agtgtaaatcaaagcatgaaatgata

SEQ ID NO: 59673 - DNA, 26 bp, Homo sapiens
gtgtaaatcaaagcatgaaatgatac

SEQ ID NO: 59674 - DNA, 26 bp, Homo sapiens
tgtaaatcaaagcatgaaatgataca

SEQ ID NO: 59675 - DNA, 26 bp, Homo sapiens
gtaaatcaaagcatgaaatgatacag

SEQ ID NO: 59676 - DNA, 26 bp, Homo sapiens
taaatcaaagcatgaaatgatacagt

SEQ ID NO: 59677 - DNA, 26 bp, Homo sapiens
aaatcaaagcatgaaatgatacagtg

SEQ ID NO: 59678 - DNA, 26 bp, Homo sapiens
aatcaaagcatgaaatgatacagtgc

SEQ ID NO: 59679 - DNA, 26 bp, Homo sapiens
atcaaagcatgaaatgatacagtgca

SEQ ID NO: 59680 - DNA, 26 bp, Homo sapiens
tcaaagcatgaaatgatacagtgcaa

SEQ ID NO: 59681 - DNA, 26 bp, Homo sapiens
caaagcatgaaatgatacagtgcaag

SEQ ID NO: 59682 - DNA, 26 bp, Homo sapiens
aaagcatgaaatgatacagtgcaagg

SEQ ID NO: 59683 - DNA, 26 bp, Homo sapiens
aagcatgaaatgatacagtgcaaggg

SEQ ID NO: 59684 - DNA, 26 bp, Homo sapiens
agcatgaaatgatacagtgcaaggga

SEQ ID NO: 59685 - DNA, 26 bp, Homo sapiens
gcatgaaatgatacagtgcaagggaa

SEQ ID NO: 59686 - DNA, 26 bp, Homo sapiens
catgaaatgatacagtgcaagggaat

SEQ ID NO: 59687 - DNA, 26 bp, Homo sapiens
atgaaatgatacagtgcaagggaatc

SEQ ID NO: 59688 - DNA, 26 bp, Homo sapiens
tgaaatgatacagtgcaagggaatct

SEQ ID NO: 59689 - DNA, 26 bp, Homo sapiens
gaaatgatacagtgcaagggaatcta

SEQ ID NO: 59690 - DNA, 26 bp, Homo sapiens
aaatgatacagtgcaagggaatctac

SEQ ID NO: 59691 - DNA, 26 bp, Homo sapiens
aatgatacagtgcaagggaatctaca

SEQ ID NO: 59692 - DNA, 26 bp, Homo sapiens
atgatacagtgcaagggaatctacac

SEQ ID NO: 59693 - DNA, 26 bp, Homo sapiens
tgatacagtgcaagggaatctacacc

SEQ ID NO: 59694 - DNA, 26 bp, Homo sapiens
gatacagtgcaagggaatctacaccc

SEQ ID NO: 59695 - DNA, 26 bp, Homo sapiens
atacagtgcaagggaatctacacccg

SEQ ID NO: 59696 - DNA, 26 bp, Homo sapiens
tacagtgcaagggaatctacacccgg

SEQ ID NO: 59697 - DNA, 26 bp, Homo sapiens
acagtgcaagggaatctacacccgga

SEQ ID NO: 59698 - DNA, 26 bp, Homo sapiens
cagtgcaagggaatctacacccggag

SEQ ID NO: 59699 - DNA, 26 bp, Homo sapiens
agtgcaagggaatctacacccggagc

SEQ ID NO: 59700 - DNA, 26 bp, Homo sapiens
gtgcaagggaatctacacccggagct

SEQ ID NO: 59701 - DNA, 26 bp, Homo sapiens
tgcaagggaatctacacccggagctt

SEQ ID NO: 59702 - DNA, 26 bp, Homo sapiens
gcaagggaatctacacccggagcttc

SEQ ID NO: 59703 - DNA, 26 bp, Homo sapiens
caagggaatctacacccggagcttct

SEQ ID NO: 59704 - DNA, 26 bp, Homo sapiens
aagggaatctacacccggagcttcta

SEQ ID NO: 59705 - DNA, 26 bp, Homo sapiens
agggaatctacacccggagcttctac

SEQ ID NO: 59706 - DNA, 26 bp, Homo sapiens
gggaatctacacccggagcttctaca

SEQ ID NO: 59707 - DNA, 26 bp, Homo sapiens
ggaatctacacccggagcttctacag

SEQ ID NO: 59708 - DNA, 26 bp, Homo sapiens
gaatctacacccggagcttctacaga

SEQ ID NO: 59709 - DNA, 26 bp, Homo sapiens
aatctacacccggagcttctacagag

SEQ ID NO: 59710 - DNA, 26 bp, Homo sapiens
atctacacccggagcttctacagaga

SEQ ID NO: 59711 - DNA, 26 bp, Homo sapiens
tctacacccggagcttctacagagac

SEQ ID NO: 59712 - DNA, 26 bp, Homo sapiens
ctacacccggagcttctacagagaca

SEQ ID NO: 59713 - DNA, 26 bp, Homo sapiens
tacacccggagcttctacagagacaa

SEQ ID NO: 59714 - DNA, 26 bp, Homo sapiens
acacccggagcttctacagagacaag

SEQ ID NO: 59715 - DNA, 26 bp, Homo sapiens
cacccggagcttctacagagacaagt

SEQ ID NO: 59716 - DNA, 26 bp, Homo sapiens
acccggagcttctacagagacaagtt

SEQ ID NO: 59717 - DNA, 26 bp, Homo sapiens
cccggagcttctacagagacaagttg

SEQ ID NO: 59718 - DNA, 26 bp, Homo sapiens
ccggagcttctacagagacaagttgg

SEQ ID NO: 59719 - DNA, 26 bp, Homo sapiens
cggagcttctacagagacaagttggc

SEQ ID NO: 59720 - DNA, 26 bp, Homo sapiens
ggagcttctacagagacaagttggcg

SEQ ID NO: 59721 - DNA, 26 bp, Homo sapiens
gagcttctacagagacaagttggcga

SEQ ID NO: 59722 - DNA, 26 bp, Homo sapiens
agcttctacagagacaagttggcgat

SEQ ID NO: 59723 - DNA, 26 bp, Homo sapiens
gcttctacagagacaagttggcgatg

SEQ ID NO: 59724 - DNA, 26 bp, Homo sapiens
cttctacagagacaagttggcgatgg

SEQ ID NO: 59725 - DNA, 26 bp, Homo sapiens
ttctacagagacaagttggcgatggc

SEQ ID NO: 59726 - DNA, 26 bp, Homo sapiens
tctacagagacaagttggcgatggct

SEQ ID NO: 59727 - DNA, 26 bp, Homo sapiens
ctacagagacaagttggcgatggctg

SEQ ID NO: 59728 - DNA, 26 bp, Homo sapiens
tacagagacaagttggcgatggctga

SEQ ID NO: 59729 - DNA, 26 bp, Homo sapiens
acagagacaagttggcgatggctgac

SEQ ID NO: 59730 - DNA, 26 bp, Homo sapiens
cagagacaagttggcgatggctgact

SEQ ID NO: 59731 - DNA, 26 bp, Homo sapiens
agagacaagttggcgatggctgactc

SEQ ID NO: 59732 - DNA, 26 bp, Homo sapiens
gagacaagttggcgatggctgactcc

SEQ ID NO: 59733 - DNA, 26 bp, Homo sapiens
agacaagttggcgatggctgactcct

SEQ ID NO: 59734 - DNA, 26 bp, Homo sapiens
gacaagttggcgatggctgactcctt

SEQ ID NO: 59735 - DNA, 26 bp, Homo sapiens
acaagttggcgatggctgactccttc

SEQ ID NO: 59736 - DNA, 26 bp, Homo sapiens
caagttggcgatggctgactccttct

SEQ ID NO: 59737 - DNA, 26 bp, Homo sapiens
aagttggcgatggctgactccttctt

SEQ ID NO: 59738 - DNA, 26 bp, Homo sapiens
agttggcgatggctgactccttcttc

SEQ ID NO: 59739 - DNA, 26 bp, Homo sapiens
gttggcgatggctgactccttcttct

SEQ ID NO: 59740 - DNA, 26 bp, Homo sapiens
ttggcgatggctgactccttcttctt

SEQ ID NO: 59741 - DNA, 26 bp, Homo sapiens
tggcgatggctgactccttcttcttc

SEQ ID NO: 59742 - DNA, 26 bp, Homo sapiens
ggcgatggctgactccttcttcttca

SEQ ID NO: 59743 - DNA, 26 bp, Homo sapiens
gcgatggctgactccttcttcttcaa

SEQ ID NO: 59744 - DNA, 26 bp, Homo sapiens
cgatggctgactccttcttcttcaag

SEQ ID NO: 59745 - DNA, 26 bp, Homo sapiens
gatggctgactccttcttcttcaaga

SEQ ID NO: 59746 - DNA, 26 bp, Homo sapiens
atggctgactccttcttcttcaagag

SEQ ID NO: 59747 - DNA, 26 bp, Homo sapiens
tggctgactccttcttcttcaagagg

SEQ ID NO: 59748 - DNA, 26 bp, Homo sapiens
ggctgactccttcttcttcaagaggt

SEQ ID NO: 59749 - DNA, 26 bp, Homo sapiens
gctgactccttcttcttcaagaggta

SEQ ID NO: 59750 - DNA, 26 bp, Homo sapiens
ctgactccttcttcttcaagaggtat

SEQ ID NO: 59751 - DNA, 26 bp, Homo sapiens
tgactccttcttcttcaagaggtata

SEQ ID NO: 59752 - DNA, 26 bp, Homo sapiens
gactccttcttcttcaagaggtatat

SEQ ID NO: 59753 - DNA, 26 bp, Homo sapiens
actccttcttcttcaagaggtatatg

SEQ ID NO: 59754 - DNA, 26 bp, Homo sapiens
ctccttcttcttcaagaggtatatga

SEQ ID NO: 59755 - DNA, 26 bp, Homo sapiens
tccttcttcttcaagaggtatatgat

SEQ ID NO: 59756 - DNA, 26 bp, Homo sapiens
ccttcttcttcaagaggtatatgatg

SEQ ID NO: 59757 - DNA, 26 bp, Homo sapiens
cttcttcttcaagaggtatatgatgt

SEQ ID NO: 59758 - DNA, 26 bp, Homo sapiens
ttcttcttcaagaggtatatgatgtt

SEQ ID NO: 59759 - DNA, 26 bp, Homo sapiens
tcttcttcaagaggtatatgatgttg

SEQ ID NO: 59760 - DNA, 26 bp, Homo sapiens
cttcttcaagaggtatatgatgttgg

SEQ ID NO: 59761 - DNA, 26 bp, Homo sapiens
ttcttcaagaggtatatgatgttggc

SEQ ID NO: 59762 - DNA, 26 bp, Homo sapiens
tcttcaagaggtatatgatgttggcc

SEQ ID NO: 59763 - DNA, 26 bp, Homo sapiens
cttcaagaggtatatgatgttggcca

SEQ ID NO: 59764 - DNA, 26 bp, Homo sapiens
ttcaagaggtatatgatgttggccac

SEQ ID NO: 59765 - DNA, 26 bp, Homo sapiens
tcaagaggtatatgatgttggccacc

SEQ ID NO: 59766 - DNA, 26 bp, Homo sapiens
caagaggtatatgatgttggccaccc

SEQ ID NO: 59767 - DNA, 26 bp, Homo sapiens
aagaggtatatgatgttggccaccca

SEQ ID NO: 59768 - DNA, 26 bp, Homo sapiens
agaggtatatgatgttggccacccac

SEQ ID NO: 59769 - DNA, 26 bp, Homo sapiens
gaggtatatgatgttggccacccacg

SEQ ID NO: 59770 - DNA, 26 bp, Homo sapiens
aggtatatgatgttggccacccacgc

SEQ ID NO: 59771 - DNA, 26 bp, Homo sapiens
ggtatatgatgttggccacccacgct

SEQ ID NO: 59772 - DNA, 26 bp, Homo sapiens
gtatatgatgttggccacccacgctt

SEQ ID NO: 59773 - DNA, 26 bp, Homo sapiens
tatatgatgttggccacccacgctta

SEQ ID NO: 59774 - DNA, 26 bp, Homo sapiens
atatgatgttggccacccacgcttag

SEQ ID NO: 59775 - DNA, 26 bp, Homo sapiens
tatgatgttggccacccacgcttagg

SEQ ID NO: 59776 - DNA, 26 bp, Homo sapiens
atgatgttggccacccacgcttaggt

SEQ ID NO: 59777 - DNA, 26 bp, Homo sapiens
tgatgttggccacccacgcttaggtt

SEQ ID NO: 59778 - DNA, 26 bp, Homo sapiens
gatgttggccacccacgcttaggttc

SEQ ID NO: 59779 - DNA, 26 bp, Homo sapiens
atgttggccacccacgcttaggttcc

SEQ ID NO: 59780 - DNA, 26 bp, Homo sapiens
tgttggccacccacgcttaggttccc

SEQ ID NO: 59781 - DNA, 26 bp, Homo sapiens
gttggccacccacgcttaggttccca

SEQ ID NO: 59782 - DNA, 26 bp, Homo sapiens
ttggccacccacgcttaggttcccat

SEQ ID NO: 59783 - DNA, 26 bp, Homo sapiens
tggccacccacgcttaggttcccatc

SEQ ID NO: 59784 - DNA, 26 bp, Homo sapiens
ggccacccacgcttaggttcccatca

SEQ ID NO: 59785 - DNA, 26 bp, Homo sapiens
gccacccacgcttaggttcccatcac

SEQ ID NO: 59786 - DNA, 26 bp, Homo sapiens
ccacccacgcttaggttcccatcaca

SEQ ID NO: 59787 - DNA, 26 bp, Homo sapiens
cacccacgcttaggttcccatcacac

SEQ ID NO: 59788 - DNA, 26 bp, Homo sapiens
acccacgcttaggttcccatcacact

SEQ ID NO: 59789 - DNA, 26 bp, Homo sapiens
cccacgcttaggttcccatcacactg

SEQ ID NO: 59790 - DNA, 26 bp, Homo sapiens
ccacgcttaggttcccatcacactga

SEQ ID NO: 59791 - DNA, 26 bp, Homo sapiens
cacgcttaggttcccatcacactgat

SEQ ID NO: 59792 - DNA, 26 bp, Homo sapiens
acgcttaggttcccatcacactgatg

SEQ ID NO: 59793 - DNA, 26 bp, Homo sapiens
cgcttaggttcccatcacactgatga

SEQ ID NO: 59794 - DNA, 26 bp, Homo sapiens
gcttaggttcccatcacactgatgac

SEQ ID NO: 59795 - DNA, 26 bp, Homo sapiens
cttaggttcccatcacactgatgact

SEQ ID NO: 59796 - DNA, 26 bp, Homo sapiens
ttaggttcccatcacactgatgactc

SEQ ID NO: 59797 - DNA, 26 bp, Homo sapiens
taggttcccatcacactgatgactcc

SEQ ID NO: 59798 - DNA, 26 bp, Homo sapiens
aggttcccatcacactgatgactccg

SEQ ID NO: 59799 - DNA, 26 bp, Homo sapiens
ggttcccatcacactgatgactccgg

SEQ ID NO: 59800 - DNA, 26 bp, Homo sapiens
gttcccatcacactgatgactccggg

SEQ ID NO: 59801 - DNA, 26 bp, Homo sapiens
ttcccatcacactgatgactccgggt

SEQ ID NO: 59802 - DNA, 26 bp, Homo sapiens
tcccatcacactgatgactccgggtt

SEQ ID NO: 59803 - DNA, 26 bp, Homo sapiens
cccatcacactgatgactccgggttt

SEQ ID NO: 59804 - DNA, 26 bp, Homo sapiens
ccatcacactgatgactccgggtttg

SEQ ID NO: 59805 - DNA, 26 bp, Homo sapiens
catcacactgatgactccgggtttgg

SEQ ID NO: 59806 - DNA, 26 bp, Homo sapiens
atcacactgatgactccgggtttggc

SEQ ID NO: 59807 - DNA, 26 bp, Homo sapiens
tcacactgatgactccgggtttggcg

SEQ ID NO: 59808 - DNA, 26 bp, Homo sapiens
cacactgatgactccgggtttggcga

SEQ ID NO: 59809 - DNA, 26 bp, Homo sapiens
acactgatgactccgggtttggcgag

SEQ ID NO: 59810 - DNA, 26 bp, Homo sapiens
cactgatgactccgggtttggcgagc

SEQ ID NO: 59811 - DNA, 26 bp, Homo sapiens
actgatgactccgggtttggcgagca

SEQ ID NO: 59812 - DNA, 26 bp, Homo sapiens
ctgatgactccgggtttggcgagcac

SEQ ID NO: 59813 - DNA, 26 bp, Homo sapiens
tgatgactccgggtttggcgagcaca

SEQ ID NO: 59814 - DNA, 26 bp, Homo sapiens
gatgactccgggtttggcgagcacag

SEQ ID NO: 59815 - DNA, 26 bp, Homo sapiens
atgactccgggtttggcgagcacagg

SEQ ID NO: 59816 - DNA, 26 bp, Homo sapiens
tgactccgggtttggcgagcacagga

SEQ ID NO: 59817 - DNA, 26 bp, Homo sapiens
gactccgggtttggcgagcacaggag

SEQ ID NO: 59818 - DNA, 26 bp, Homo sapiens
actccgggtttggcgagcacaggagc

SEQ ID NO: 59819 - DNA, 26 bp, Homo sapiens
ctccgggtttggcgagcacaggagcg

SEQ ID NO: 59820 - DNA, 26 bp, Homo sapiens
tccgggtttggcgagcacaggagcgc

SEQ ID NO: 59821 - DNA, 26 bp, Homo sapiens
ccgggtttggcgagcacaggagcgca

SEQ ID NO: 59822 - DNA, 26 bp, Homo sapiens
cgggtttggcgagcacaggagcgcaa

SEQ ID NO: 59823 - DNA, 26 bp, Homo sapiens
gggtttggcgagcacaggagcgcaaa

SEQ ID NO: 59824 - DNA, 26 bp, Homo sapiens
ggtttggcgagcacaggagcgcaaac

SEQ ID NO: 59825 - DNA, 26 bp, Homo sapiens
gtttggcgagcacaggagcgcaaacc

SEQ ID NO: 59826 - DNA, 26 bp, Homo sapiens
tttggcgagcacaggagcgcaaacct

SEQ ID NO: 59827 - DNA, 26 bp, Homo sapiens
ttggcgagcacaggagcgcaaacctt

SEQ ID NO: 59828 - DNA, 26 bp, Homo sapiens
tggcgagcacaggagcgcaaaccttt

SEQ ID NO: 59829 - DNA, 26 bp, Homo sapiens
ggcgagcacaggagcgcaaacctttt

SEQ ID NO: 59830 - DNA, 26 bp, Homo sapiens
gcgagcacaggagcgcaaaccttttc

SEQ ID NO: 59831 - DNA, 26 bp, Homo sapiens
cgagcacaggagcgcaaaccttttca

SEQ ID NO: 59832 - DNA, 26 bp, Homo sapiens
gagcacaggagcgcaaaccttttcac

SEQ ID NO: 59833 - DNA, 26 bp, Homo sapiens
agcacaggagcgcaaaccttttcaca

SEQ ID NO: 59834 - DNA, 26 bp, Homo sapiens
gcacaggagcgcaaaccttttcacat

SEQ ID NO: 59835 - DNA, 26 bp, Homo sapiens
cacaggagcgcaaaccttttcacatt

SEQ ID NO: 59836 - DNA, 26 bp, Homo sapiens
acaggagcgcaaaccttttcacattc

SEQ ID NO: 59837 - DNA, 26 bp, Homo sapiens
caggagcgcaaaccttttcacattct

SEQ ID NO: 59838 - DNA, 26 bp, Homo sapiens
aggagcgcaaaccttttcacattctt

SEQ ID NO: 59839 - DNA, 26 bp, Homo sapiens
ggagcgcaaaccttttcacattcttt

SEQ ID NO: 59840 - DNA, 26 bp, Homo sapiens
gagcgcaaaccttttcacattctttc

SEQ ID NO: 59841 - DNA, 26 bp, Homo sapiens
agcgcaaaccttttcacattctttct

SEQ ID NO: 59842 - DNA, 26 bp, Homo sapiens
gcgcaaaccttttcacattctttctg

SEQ ID NO: 59843 - DNA, 26 bp, Homo sapiens
cgcaaaccttttcacattctttctgt

SEQ ID NO: 59844 - DNA, 26 bp, Homo sapiens
gcaaaccttttcacattctttctgtg

SEQ ID NO: 59845 - DNA, 26 bp, Homo sapiens
caaaccttttcacattctttctgtga

SEQ ID NO: 59846 - DNA, 26 bp, Homo sapiens
aaaccttttcacattctttctgtgat

SEQ ID NO: 59847 - DNA, 26 bp, Homo sapiens
aaccttttcacattctttctgtgatc

SEQ ID NO: 59848 - DNA, 26 bp, Homo sapiens
accttttcacattctttctgtgatcc

SEQ ID NO: 59849 - DNA, 26 bp, Homo sapiens
ccttttcacattctttctgtgatcca

SEQ ID NO: 59850 - DNA, 26 bp, Homo sapiens
cttttcacattctttctgtgatccaa

SEQ ID NO: 59851 - DNA, 26 bp, Homo sapiens
ttttcacattctttctgtgatccaaa

SEQ ID NO: 59852 - DNA, 26 bp, Homo sapiens
tttcacattctttctgtgatccaaat

SEQ ID NO: 59853 - DNA, 26 bp, Homo sapiens
ttcacattctttctgtgatccaaatt

SEQ ID NO: 59854 - DNA, 26 bp, Homo sapiens
tcacattctttctgtgatccaaattt

SEQ ID NO: 59855 - DNA, 26 bp, Homo sapiens
cacattctttctgtgatccaaatttg

SEQ ID NO: 59856 - DNA, 26 bp, Homo sapiens
acattctttctgtgatccaaatttgt

SEQ ID NO: 59857 - DNA, 26 bp, Homo sapiens
cattctttctgtgatccaaatttgtt

SEQ ID NO: 59858 - DNA, 26 bp, Homo sapiens
attctttctgtgatccaaatttgttt

SEQ ID NO: 59859 - DNA, 26 bp, Homo sapiens
ttctttctgtgatccaaatttgtttt

SEQ ID NO: 59860 - DNA, 26 bp, Homo sapiens
tctttctgtgatccaaatttgttttc

SEQ ID NO: 59861 - DNA, 26 bp, Homo sapiens
ctttctgtgatccaaatttgttttcg

SEQ ID NO: 59862 - DNA, 26 bp, Homo sapiens
tttctgtgatccaaatttgttttcgt

SEQ ID NO: 59863 - DNA, 26 bp, Homo sapiens
ttctgtgatccaaatttgttttcgtt

SEQ ID NO: 59864 - DNA, 26 bp, Homo sapiens
tctgtgatccaaatttgttttcgttt

SEQ ID NO: 59865 - DNA, 26 bp, Homo sapiens
ctgtgatccaaatttgttttcgtttc

SEQ ID NO: 59866 - DNA, 26 bp, Homo sapiens
tgtgatccaaatttgttttcgtttcc

SEQ ID NO: 59867 - DNA, 26 bp, Homo sapiens
gtgatccaaatttgttttcgtttcca

SEQ ID NO: 59868 - DNA, 26 bp, Homo sapiens
tgatccaaatttgttttcgtttccac

SEQ ID NO: 59869 - DNA, 26 bp, Homo sapiens
gatccaaatttgttttcgtttccacc

SEQ ID NO: 59870 - DNA, 26 bp, Homo sapiens
atccaaatttgttttcgtttccacca

SEQ ID NO: 59871 - DNA, 26 bp, Homo sapiens
tccaaatttgttttcgtttccaccac

SEQ ID NO: 59872 - DNA, 26 bp, Homo sapiens
ccaaatttgttttcgtttccaccaca

SEQ ID NO: 59873 - DNA, 26 bp, Homo sapiens
caaatttgttttcgtttccaccacaa

SEQ ID NO: 59874 - DNA, 26 bp, Homo sapiens
aaatttgttttcgtttccaccacaac

SEQ ID NO: 59875 - DNA, 26 bp, Homo sapiens
aatttgttttcgtttccaccacaacc

SEQ ID NO: 59876 - DNA, 26 bp, Homo sapiens
atttgttttcgtttccaccacaacct

SEQ ID NO: 59877 - DNA, 26 bp, Homo sapiens
tttgttttcgtttccaccacaacctc

SEQ ID NO: 59878 - DNA, 26 bp, Homo sapiens
ttgttttcgtttccaccacaacctcc

SEQ ID NO: 59879 - DNA, 26 bp, Homo sapiens
tgttttcgtttccaccacaacctcca

SEQ ID NO: 59880 - DNA, 26 bp, Homo sapiens
gttttcgtttccaccacaacctccat

SEQ ID NO: 59881 - DNA, 26 bp, Homo sapiens
ttttcgtttccaccacaacctccata

SEQ ID NO: 59882 - DNA, 26 bp, Homo sapiens
tttcgtttccaccacaacctccatac

SEQ ID NO: 59883 - DNA, 26 bp, Homo sapiens
ttcgtttccaccacaacctccatacc

SEQ ID NO: 59884 - DNA, 26 bp, Homo sapiens
tcgtttccaccacaacctccatacca

SEQ ID NO: 59885 - DNA, 26 bp, Homo sapiens
cgtttccaccacaacctccataccag

SEQ ID NO: 59886 - DNA, 26 bp, Homo sapiens
gtttccaccacaacctccataccaga

SEQ ID NO: 59887 - DNA, 26 bp, Homo sapiens
tttccaccacaacctccataccagaa

SEQ ID NO: 59888 - DNA, 26 bp, Homo sapiens
ttccaccacaacctccataccagaat

SEQ ID NO: 59889 - DNA, 26 bp, Homo sapiens
tccaccacaacctccataccagaatc

SEQ ID NO: 59890 - DNA, 26 bp, Homo sapiens
ccaccacaacctccataccagaatct

SEQ ID NO: 59891 - DNA, 26 bp, Homo sapiens
caccacaacctccataccagaatctt

SEQ ID NO: 59892 - DNA, 26 bp, Homo sapiens
accacaacctccataccagaatcttg

SEQ ID NO: 59893 - DNA, 26 bp, Homo sapiens
ccacaacctccataccagaatcttgc

SEQ ID NO: 59894 - DNA, 26 bp, Homo sapiens
cacaacctccataccagaatcttgca

SEQ ID NO: 59895 - DNA, 26 bp, Homo sapiens
acaacctccataccagaatcttgcac

SEQ ID NO: 59896 - DNA, 26 bp, Homo sapiens
caacctccataccagaatcttgcaca

SEQ ID NO: 59897 - DNA, 26 bp, Homo sapiens
aacctccataccagaatcttgcacag

SEQ ID NO: 59898 - DNA, 26 bp, Homo sapiens
acctccataccagaatcttgcacagc

SEQ ID NO: 59899 - DNA, 26 bp, Homo sapiens
cctccataccagaatcttgcacagct

SEQ ID NO: 59900 - DNA, 26 bp, Homo sapiens
ctccataccagaatcttgcacagctt

SEQ ID NO: 59901 - DNA, 26 bp, Homo sapiens
tccataccagaatcttgcacagcttt

SEQ ID NO: 59902 - DNA, 26 bp, Homo sapiens
ccataccagaatcttgcacagctttt

SEQ ID NO: 59903 - DNA, 26 bp, Homo sapiens
cataccagaatcttgcacagcttttg

SEQ ID NO: 59904 - DNA, 26 bp, Homo sapiens
ataccagaatcttgcacagcttttgg

SEQ ID NO: 59905 - DNA, 26 bp, Homo sapiens
taccagaatcttgcacagcttttggt

SEQ ID NO: 59906 - DNA, 26 bp, Homo sapiens
accagaatcttgcacagcttttggtg

SEQ ID NO: 59907 - DNA, 26 bp, Homo sapiens
ccagaatcttgcacagcttttggtgt

SEQ ID NO: 59908 - DNA, 26 bp, Homo sapiens
cagaatcttgcacagcttttggtgtt

SEQ ID NO: 59909 - DNA, 26 bp, Homo sapiens
agaatcttgcacagcttttggtgttt

SEQ ID NO: 59910 - DNA, 26 bp, Homo sapiens
gaatcttgcacagcttttggtgtttg

SEQ ID NO: 59911 - DNA, 26 bp, Homo sapiens
aatcttgcacagcttttggtgtttgg

SEQ ID NO: 59912 - DNA, 26 bp, Homo sapiens
atcttgcacagcttttggtgtttgga

SEQ ID NO: 59913 - DNA, 26 bp, Homo sapiens
tcttgcacagcttttggtgtttggat

SEQ ID NO: 59914 - DNA, 26 bp, Homo sapiens
cttgcacagcttttggtgtttggatc

SEQ ID NO: 59915 - DNA, 26 bp, Homo sapiens
ttgcacagcttttggtgtttggatca

SEQ ID NO: 59916 - DNA, 26 bp, Homo sapiens
tgcacagcttttggtgtttggatcat

SEQ ID NO: 59917 - DNA, 26 bp, Homo sapiens
gcacagcttttggtgtttggatcata

SEQ ID NO: 59918 - DNA, 26 bp, Homo sapiens
cacagcttttggtgtttggatcatag

SEQ ID NO: 59919 - DNA, 26 bp, Homo sapiens
acagcttttggtgtttggatcatagt

SEQ ID NO: 59920 - DNA, 26 bp, Homo sapiens
cagcttttggtgtttggatcatagta

SEQ ID NO: 59921 - DNA, 26 bp, Homo sapiens
agcttttggtgtttggatcatagtac

SEQ ID NO: 59922 - DNA, 26 bp, Homo sapiens
gcttttggtgtttggatcatagtacc

SEQ ID NO: 59923 - DNA, 26 bp, Homo sapiens
cttttggtgtttggatcatagtacca

SEQ ID NO: 59924 - DNA, 26 bp, Homo sapiens
ttttggtgtttggatcatagtaccat

SEQ ID NO: 59925 - DNA, 26 bp, Homo sapiens
tttggtgtttggatcatagtaccatt

SEQ ID NO: 59926 - DNA, 26 bp, Homo sapiens
ttggtgtttggatcatagtaccattt

SEQ ID NO: 59927 - DNA, 26 bp, Homo sapiens
tggtgtttggatcatagtaccatttt

SEQ ID NO: 59928 - DNA, 26 bp, Homo sapiens
ggtgtttggatcatagtaccatttta

SEQ ID NO: 59929 - DNA, 26 bp, Homo sapiens
gtgtttggatcatagtaccattttaa

SEQ ID NO: 59930 - DNA, 26 bp, Homo sapiens
tgtttggatcatagtaccattttaat

SEQ ID NO: 59931 - DNA, 26 bp, Homo sapiens
gtttggatcatagtaccattttaata

SEQ ID NO: 59932 - DNA, 26 bp, Homo sapiens
tttggatcatagtaccattttaatat

SEQ ID NO: 59933 - DNA, 26 bp, Homo sapiens
ttggatcatagtaccattttaatatg

SEQ ID NO: 59934 - DNA, 26 bp, Homo sapiens
tggatcatagtaccattttaatatga

SEQ ID NO: 59935 - DNA, 26 bp, Homo sapiens
ggatcatagtaccattttaatatgaa

SEQ ID NO: 59936 - DNA, 26 bp, Homo sapiens
gatcatagtaccattttaatatgaaa

SEQ ID NO: 59937 - DNA, 26 bp, Homo sapiens
atcatagtaccattttaatatgaaat

SEQ ID NO: 59938 - DNA, 26 bp, Homo sapiens
tcatagtaccattttaatatgaaatc

SEQ ID NO: 59939 - DNA, 26 bp, Homo sapiens
catagtaccattttaatatgaaatcc

SEQ ID NO: 59940 - DNA, 26 bp, Homo sapiens
atagtaccattttaatatgaaatccc

SEQ ID NO: 59941 - DNA, 26 bp, Homo sapiens
tagtaccattttaatatgaaatccct

SEQ ID NO: 59942 - DNA, 26 bp, Homo sapiens
agtaccattttaatatgaaatccctg

SEQ ID NO: 59943 - DNA, 26 bp, Homo sapiens
gtaccattttaatatgaaatccctgc

SEQ ID NO: 59944 - DNA, 26 bp, Homo sapiens
taccattttaatatgaaatccctgca

SEQ ID NO: 59945 - DNA, 26 bp, Homo sapiens
accattttaatatgaaatccctgcaa

SEQ ID NO: 59946 - DNA, 26 bp, Homo sapiens
ccattttaatatgaaatccctgcaag

SEQ ID NO: 59947 - DNA, 26 bp, Homo sapiens
cattttaatatgaaatccctgcaagt

SEQ ID NO: 59948 - DNA, 26 bp, Homo sapiens
attttaatatgaaatccctgcaagtt

SEQ ID NO: 59949 - DNA, 26 bp, Homo sapiens
ttttaatatgaaatccctgcaagttc

SEQ ID NO: 59950 - DNA, 26 bp, Homo sapiens
tttaatatgaaatccctgcaagttcc

SEQ ID NO: 59951 - DNA, 26 bp, Homo sapiens
ttaatatgaaatccctgcaagttcct

SEQ ID NO: 59952 - DNA, 26 bp, Homo sapiens
taatatgaaatccctgcaagttcctt

SEQ ID NO: 59953 - DNA, 26 bp, Homo sapiens
aatatgaaatccctgcaagttccttc

SEQ ID NO: 59954 - DNA, 26 bp, Homo sapiens
atatgaaatccctgcaagttccttcg

SEQ ID NO: 59955 - DNA, 26 bp, Homo sapiens
tatgaaatccctgcaagttccttcgt

SEQ ID NO: 59956 - DNA, 26 bp, Homo sapiens
atgaaatccctgcaagttccttcgtc

SEQ ID NO: 59957 - DNA, 26 bp, Homo sapiens
tgaaatccctgcaagttccttcgtct

SEQ ID NO: 59958 - DNA, 26 bp, Homo sapiens
gaaatccctgcaagttccttcgtctt

SEQ ID NO: 59959 - DNA, 26 bp, Homo sapiens
aaatccctgcaagttccttcgtcttt

SEQ ID NO: 59960 - DNA, 26 bp, Homo sapiens
aatccctgcaagttccttcgtctttc

SEQ ID NO: 59961 - DNA, 26 bp, Homo sapiens
atccctgcaagttccttcgtctttcg

SEQ ID NO: 59962 - DNA, 26 bp, Homo sapiens
tccctgcaagttccttcgtctttcgg

SEQ ID NO: 59963 - DNA, 26 bp, Homo sapiens
ccctgcaagttccttcgtctttcggc

SEQ ID NO: 59964 - DNA, 26 bp, Homo sapiens
cctgcaagttccttcgtctttcggca

SEQ ID NO: 59965 - DNA, 26 bp, Homo sapiens
ctgcaagttccttcgtctttcggcaa

SEQ ID NO: 59966 - DNA, 26 bp, Homo sapiens
tgcaagttccttcgtctttcggcaac

SEQ ID NO: 59967 - DNA, 26 bp, Homo sapiens
gcaagttccttcgtctttcggcaact

SEQ ID NO: 59968 - DNA, 26 bp, Homo sapiens
caagttccttcgtctttcggcaactt

SEQ ID NO: 59969 - DNA, 26 bp, Homo sapiens
aagttccttcgtctttcggcaacttg

SEQ ID NO: 59970 - DNA, 26 bp, Homo sapiens
agttccttcgtctttcggcaacttgc

SEQ ID NO: 59971 - DNA, 26 bp, Homo sapiens
gttccttcgtctttcggcaacttgca

SEQ ID NO: 59972 - DNA, 26 bp, Homo sapiens
ttccttcgtctttcggcaacttgcat

SEQ ID NO: 59973 - DNA, 26 bp, Homo sapiens
tccttcgtctttcggcaacttgcata

SEQ ID NO: 59974 - DNA, 26 bp, Homo sapiens
ccttcgtctttcggcaacttgcatat

SEQ ID NO: 59975 - DNA, 26 bp, Homo sapiens
cttcgtctttcggcaacttgcatata

SEQ ID NO: 59976 - DNA, 26 bp, Homo sapiens
ttcgtctttcggcaacttgcatatat

SEQ ID NO: 59977 - DNA, 26 bp, Homo sapiens
tcgtctttcggcaacttgcatatatc

SEQ ID NO: 59978 - DNA, 26 bp, Homo sapiens
cgtctttcggcaacttgcatatatct

SEQ ID NO: 59979 - DNA, 26 bp, Homo sapiens
gtctttcggcaacttgcatatatctg

SEQ ID NO: 59980 - DNA, 26 bp, Homo sapiens
tctttcggcaacttgcatatatctgt

SEQ ID NO: 59981 - DNA, 26 bp, Homo sapiens
ctttcggcaacttgcatatatctgtt

SEQ ID NO: 59982 - DNA, 26 bp, Homo sapiens
tttcggcaacttgcatatatctgttt

SEQ ID NO: 59983 - DNA, 26 bp, Homo sapiens
ttcggcaacttgcatatatctgtttc

SEQ ID NO: 59984 - DNA, 26 bp, Homo sapiens
tcggcaacttgcatatatctgtttca

SEQ ID NO: 59985 - DNA, 26 bp, Homo sapiens
cggcaacttgcatatatctgtttcag

SEQ ID NO: 59986 - DNA, 26 bp, Homo sapiens
ggcaacttgcatatatctgtttcagt

SEQ ID NO: 59987 - DNA, 26 bp, Homo sapiens
gcaacttgcatatatctgtttcagtg

SEQ ID NO: 59988 - DNA, 26 bp, Homo sapiens
caacttgcatatatctgtttcagtga

SEQ ID NO: 59989 - DNA, 26 bp, Homo sapiens
aacttgcatatatctgtttcagtgag

SEQ ID NO: 59990 - DNA, 26 bp, Homo sapiens
acttgcatatatctgtttcagtgaga

SEQ ID NO: 59991 - DNA, 26 bp, Homo sapiens
cttgcatatatctgtttcagtgagag

SEQ ID NO: 59992 - DNA, 26 bp, Homo sapiens
ttgcatatatctgtttcagtgagagc

SEQ ID NO: 59993 - DNA, 26 bp, Homo sapiens
tgcatatatctgtttcagtgagagcc

SEQ ID NO: 59994 - DNA, 26 bp, Homo sapiens
gcatatatctgtttcagtgagagcca

SEQ ID NO: 59995 - DNA, 26 bp, Homo sapiens
catatatctgtttcagtgagagccaa

SEQ ID NO: 59996 - DNA, 26 bp, Homo sapiens
atatatctgtttcagtgagagccaat

SEQ ID NO: 59997 - DNA, 26 bp, Homo sapiens
tatatctgtttcagtgagagccaatg

SEQ ID NO: 59998 - DNA, 26 bp, Homo sapiens
atatctgtttcagtgagagccaatgg

SEQ ID NO: 59999 - DNA, 26 bp, Homo sapiens
tatctgtttcagtgagagccaatggt

SEQ ID NO: 60000 - DNA, 26 bp, Homo sapiens
atctgtttcagtgagagccaatggtt

SEQ ID NO: 60001 - DNA, 26 bp, Homo sapiens
tctgtttcagtgagagccaatggttc

SEQ ID NO: 60002 - DNA, 26 bp, Homo sapiens
ctgtttcagtgagagccaatggttct

SEQ ID NO: 60003 - DNA, 26 bp, Homo sapiens
tgtttcagtgagagccaatggttctg

SEQ ID NO: 60004 - DNA, 26 bp, Homo sapiens
gtttcagtgagagccaatggttctgt

SEQ ID NO: 60005 - DNA, 26 bp, Homo sapiens
tttcagtgagagccaatggttctgtg

SEQ ID NO: 60006 - DNA, 26 bp, Homo sapiens
ttcagtgagagccaatggttctgtgc

SEQ ID NO: 60007 - DNA, 26 bp, Homo sapiens
tcagtgagagccaatggttctgtgct

SEQ ID NO: 60008 - DNA, 26 bp, Homo sapiens
cagtgagagccaatggttctgtgctc

SEQ ID NO: 60009 - DNA, 26 bp, Homo sapiens
agtgagagccaatggttctgtgctca

SEQ ID NO: 60010 - DNA, 26 bp, Homo sapiens
gtgagagccaatggttctgtgctcac

SEQ ID NO: 60011 - DNA, 26 bp, Homo sapiens
tgagagccaatggttctgtgctcacc

SEQ ID NO: 60012 - DNA, 26 bp, Homo sapiens
gagagccaatggttctgtgctcacca

SEQ ID NO: 60013 - DNA, 26 bp, Homo sapiens
agagccaatggttctgtgctcaccat

SEQ ID NO: 60014 - DNA, 26 bp, Homo sapiens
gagccaatggttctgtgctcaccatt

SEQ ID NO: 60015 - DNA, 26 bp, Homo sapiens
agccaatggttctgtgctcaccatta

SEQ ID NO: 60016 - DNA, 26 bp, Homo sapiens
gccaatggttctgtgctcaccattag

SEQ ID NO: 60017 - DNA, 26 bp, Homo sapiens
ccaatggttctgtgctcaccattaga

SEQ ID NO: 60018 - DNA, 26 bp, Homo sapiens
caatggttctgtgctcaccattagat

SEQ ID NO: 60019 - DNA, 26 bp, Homo sapiens
aatggttctgtgctcaccattagatt

SEQ ID NO: 60020 - DNA, 26 bp, Homo sapiens
atggttctgtgctcaccattagattg

SEQ ID NO: 60021 - DNA, 26 bp, Homo sapiens
tggttctgtgctcaccattagattga

SEQ ID NO: 60022 - DNA, 26 bp, Homo sapiens
ggttctgtgctcaccattagattgat

SEQ ID NO: 60023 - DNA, 26 bp, Homo sapiens
gttctgtgctcaccattagattgatg

SEQ ID NO: 60024 - DNA, 26 bp, Homo sapiens
ttctgtgctcaccattagattgatgg

SEQ ID NO: 60025 - DNA, 26 bp, Homo sapiens
tctgtgctcaccattagattgatggt

SEQ ID NO: 60026 - DNA, 26 bp, Homo sapiens
ctgtgctcaccattagattgatggtt

SEQ ID NO: 60027 - DNA, 26 bp, Homo sapiens
tgtgctcaccattagattgatggttg

SEQ ID NO: 60028 - DNA, 26 bp, Homo sapiens
gtgctcaccattagattgatggttga

SEQ ID NO: 60029 - DNA, 26 bp, Homo sapiens
tgctcaccattagattgatggttgaa

SEQ ID NO: 60030 - DNA, 26 bp, Homo sapiens
gctcaccattagattgatggttgaac

SEQ ID NO: 60031 - DNA, 26 bp, Homo sapiens
ctcaccattagattgatggttgaact

SEQ ID NO: 60032 - DNA, 26 bp, Homo sapiens
tcaccattagattgatggttgaacta

SEQ ID NO: 60033 - DNA, 26 bp, Homo sapiens
caccattagattgatggttgaactag

SEQ ID NO: 60034 - DNA, 26 bp, Homo sapiens
accattagattgatggttgaactaga

SEQ ID NO: 60035 - DNA, 26 bp, Homo sapiens
ccattagattgatggttgaactagaa

SEQ ID NO: 60036 - DNA, 26 bp, Homo sapiens
cattagattgatggttgaactagaag

SEQ ID NO: 60037 - DNA, 26 bp, Homo sapiens
attagattgatggttgaactagaagc

SEQ ID NO: 60038 - DNA, 26 bp, Homo sapiens
ttagattgatggttgaactagaagct

SEQ ID NO: 60039 - DNA, 26 bp, Homo sapiens
tagattgatggttgaactagaagctg

SEQ ID NO: 60040 - DNA, 26 bp, Homo sapiens
agattgatggttgaactagaagctga

SEQ ID NO: 60041 - DNA, 26 bp, Homo sapiens
gattgatggttgaactagaagctgac

SEQ ID NO: 60042 - DNA, 26 bp, Homo sapiens
attgatggttgaactagaagctgacc

SEQ ID NO: 60043 - DNA, 26 bp, Homo sapiens
ttgatggttgaactagaagctgacct

SEQ ID NO: 60044 - DNA, 26 bp, Homo sapiens
tgatggttgaactagaagctgacctt

SEQ ID NO: 60045 - DNA, 26 bp, Homo sapiens
gatggttgaactagaagctgaccttg

SEQ ID NO: 60046 - DNA, 26 bp, Homo sapiens
atggttgaactagaagctgaccttgc

SEQ ID NO: 60047 - DNA, 26 bp, Homo sapiens
tggttgaactagaagctgaccttgct

SEQ ID NO: 60048 - DNA, 26 bp, Homo sapiens
ggttgaactagaagctgaccttgctg

SEQ ID NO: 60049 - DNA, 26 bp, Homo sapiens
gttgaactagaagctgaccttgctgg

SEQ ID NO: 60050 - DNA, 26 bp, Homo sapiens
ttgaactagaagctgaccttgctggc

SEQ ID NO: 60051 - DNA, 26 bp, Homo sapiens
tgaactagaagctgaccttgctggct

SEQ ID NO: 60052 - DNA, 26 bp, Homo sapiens
gaactagaagctgaccttgctggctg

SEQ ID NO: 60053 - DNA, 26 bp, Homo sapiens
aactagaagctgaccttgctggctgt

SEQ ID NO: 60054 - DNA, 26 bp, Homo sapiens
actagaagctgaccttgctggctgtg

SEQ ID NO: 60055 - DNA, 26 bp, Homo sapiens
ctagaagctgaccttgctggctgtgg

SEQ ID NO: 60056 - DNA, 26 bp, Homo sapiens
tagaagctgaccttgctggctgtgga

SEQ ID NO: 60057 - DNA, 26 bp, Homo sapiens
agaagctgaccttgctggctgtggag

SEQ ID NO: 60058 - DNA, 26 bp, Homo sapiens
gaagctgaccttgctggctgtggagg

SEQ ID NO: 60059 - DNA, 26 bp, Homo sapiens
aagctgaccttgctggctgtggaggt

SEQ ID NO: 60060 - DNA, 26 bp, Homo sapiens
agctgaccttgctggctgtggaggtg

SEQ ID NO: 60061 - DNA, 26 bp, Homo sapiens
gctgaccttgctggctgtggaggtgg

SEQ ID NO: 60062 - DNA, 26 bp, Homo sapiens
ctgaccttgctggctgtggaggtggg

SEQ ID NO: 60063 - DNA, 26 bp, Homo sapiens
tgaccttgctggctgtggaggtgggg

SEQ ID NO: 60064 - DNA, 26 bp, Homo sapiens
gaccttgctggctgtggaggtggggg

SEQ ID NO: 60065 - DNA, 26 bp, Homo sapiens
accttgctggctgtggaggtgggggc

SEQ ID NO: 60066 - DNA, 26 bp, Homo sapiens
ccttgctggctgtggaggtgggggct

SEQ ID NO: 60067 - DNA, 26 bp, Homo sapiens
cttgctggctgtggaggtgggggctg

SEQ ID NO: 60068 - DNA, 26 bp, Homo sapiens
ttgctggctgtggaggtgggggctga

SEQ ID NO: 60069 - DNA, 26 bp, Homo sapiens
tgctggctgtggaggtgggggctgag

SEQ ID NO: 60070 - DNA, 26 bp, Homo sapiens
gctggctgtggaggtgggggctgaga

SEQ ID NO: 60071 - DNA, 26 bp, Homo sapiens
ctggctgtggaggtgggggctgagat

SEQ ID NO: 60072 - DNA, 26 bp, Homo sapiens
tggctgtggaggtgggggctgagatt

SEQ ID NO: 60073 - DNA, 26 bp, Homo sapiens
ggctgtggaggtgggggctgagattt

SEQ ID NO: 60074 - DNA, 26 bp, Homo sapiens
gctgtggaggtgggggctgagatttc

SEQ ID NO: 60075 - DNA, 26 bp, Homo sapiens
ctgtggaggtgggggctgagatttct

SEQ ID NO: 60076 - DNA, 26 bp, Homo sapiens
tgtggaggtgggggctgagatttctt

SEQ ID NO: 60077 - DNA, 26 bp, Homo sapiens
gtggaggtgggggctgagatttcttt

SEQ ID NO: 60078 - DNA, 26 bp, Homo sapiens
tggaggtgggggctgagatttctttg

SEQ ID NO: 60079 - DNA, 26 bp, Homo sapiens
ggaggtgggggctgagatttctttgt

SEQ ID NO: 60080 - DNA, 26 bp, Homo sapiens
gaggtgggggctgagatttctttgta

SEQ ID NO: 60081 - DNA, 26 bp, Homo sapiens
aggtgggggctgagatttctttgtac

SEQ ID NO: 60082 - DNA, 26 bp, Homo sapiens
ggtgggggctgagatttctttgtact

SEQ ID NO: 60083 - DNA, 26 bp, Homo sapiens
gtgggggctgagatttctttgtactg

SEQ ID NO: 60084 - DNA, 26 bp, Homo sapiens
tgggggctgagatttctttgtactga

SEQ ID NO: 60085 - DNA, 26 bp, Homo sapiens
gggggctgagatttctttgtactgaa

SEQ ID NO: 60086 - DNA, 26 bp, Homo sapiens
ggggctgagatttctttgtactgaaa

SEQ ID NO: 60087 - DNA, 26 bp, Homo sapiens
gggctgagatttctttgtactgaaac

SEQ ID NO: 60088 - DNA, 26 bp, Homo sapiens
ggctgagatttctttgtactgaaact

SEQ ID NO: 60089 - DNA, 26 bp, Homo sapiens
gctgagatttctttgtactgaaactt

SEQ ID NO: 60090 - DNA, 26 bp, Homo sapiens
ctgagatttctttgtactgaaacttc

SEQ ID NO: 60091 - DNA, 26 bp, Homo sapiens
tgagatttctttgtactgaaacttcc

SEQ ID NO: 60092 - DNA, 26 bp, Homo sapiens
gagatttctttgtactgaaacttccg

SEQ ID NO: 60093 - DNA, 26 bp, Homo sapiens
agatttctttgtactgaaacttccgt

SEQ ID NO: 60094 - DNA, 26 bp, Homo sapiens
gatttctttgtactgaaacttccgtg

SEQ ID NO: 60095 - DNA, 26 bp, Homo sapiens
atttctttgtactgaaacttccgtgg

SEQ ID NO: 60096 - DNA, 26 bp, Homo sapiens
tttctttgtactgaaacttccgtggt

SEQ ID NO: 60097 - DNA, 26 bp, Homo sapiens
ttctttgtactgaaacttccgtggta

SEQ ID NO: 60098 - DNA, 26 bp, Homo sapiens
tctttgtactgaaacttccgtggtag

SEQ ID NO: 60099 - DNA, 26 bp, Homo sapiens
ctttgtactgaaacttccgtggtagg

SEQ ID NO: 60100 - DNA, 26 bp, Homo sapiens
tttgtactgaaacttccgtggtaggt

SEQ ID NO: 60101 - DNA, 26 bp, Homo sapiens
ttgtactgaaacttccgtggtaggtg

SEQ ID NO: 60102 - DNA, 26 bp, Homo sapiens
tgtactgaaacttccgtggtaggtgg

SEQ ID NO: 60103 - DNA, 26 bp, Homo sapiens
gtactgaaacttccgtggtaggtggc

SEQ ID NO: 60104 - DNA, 26 bp, Homo sapiens
tactgaaacttccgtggtaggtggct

SEQ ID NO: 60105 - DNA, 26 bp, Homo sapiens
actgaaacttccgtggtaggtggctc

SEQ ID NO: 60106 - DNA, 26 bp, Homo sapiens
ctgaaacttccgtggtaggtggctct

SEQ ID NO: 60107 - DNA, 26 bp, Homo sapiens
tgaaacttccgtggtaggtggctctg

SEQ ID NO: 60108 - DNA, 26 bp, Homo sapiens
gaaacttccgtggtaggtggctctga

SEQ ID NO: 60109 - DNA, 26 bp, Homo sapiens
aaacttccgtggtaggtggctctgac

SEQ ID NO: 60110 - DNA, 26 bp, Homo sapiens
aacttccgtggtaggtggctctgacc

SEQ ID NO: 60111 - DNA, 26 bp, Homo sapiens
acttccgtggtaggtggctctgacct

SEQ ID NO: 60112 - DNA, 26 bp, Homo sapiens
cttccgtggtaggtggctctgacctg

SEQ ID NO: 60113 - DNA, 26 bp, Homo sapiens
ttccgtggtaggtggctctgacctga

SEQ ID NO: 60114 - DNA, 26 bp, Homo sapiens
tccgtggtaggtggctctgacctgag

SEQ ID NO: 60115 - DNA, 26 bp, Homo sapiens
ccgtggtaggtggctctgacctgaga

SEQ ID NO: 60116 - DNA, 26 bp, Homo sapiens
cgtggtaggtggctctgacctgagac

SEQ ID NO: 60117 - DNA, 26 bp, Homo sapiens
gtggtaggtggctctgacctgagacc

SEQ ID NO: 60118 - DNA, 26 bp, Homo sapiens
tggtaggtggctctgacctgagacct

SEQ ID NO: 60119 - DNA, 26 bp, Homo sapiens
ggtaggtggctctgacctgagacctc

SEQ ID NO: 60120 - DNA, 26 bp, Homo sapiens
gtaggtggctctgacctgagacctca

SEQ ID NO: 60121 - DNA, 26 bp, Homo sapiens
taggtggctctgacctgagacctcag

SEQ ID NO: 60122 - DNA, 26 bp, Homo sapiens
aggtggctctgacctgagacctcagg

SEQ ID NO: 60123 - DNA, 26 bp, Homo sapiens
ggtggctctgacctgagacctcaggt

SEQ ID NO: 60124 - DNA, 26 bp, Homo sapiens
gtggctctgacctgagacctcaggta

SEQ ID NO: 60125 - DNA, 26 bp, Homo sapiens
tggctctgacctgagacctcaggtag

SEQ ID NO: 60126 - DNA, 26 bp, Homo sapiens
ggctctgacctgagacctcaggtagc

SEQ ID NO: 60127 - DNA, 26 bp, Homo sapiens
gctctgacctgagacctcaggtagca

SEQ ID NO: 60128 - DNA, 26 bp, Homo sapiens
ctctgacctgagacctcaggtagcag

SEQ ID NO: 60129 - DNA, 26 bp, Homo sapiens
tctgacctgagacctcaggtagcaga

SEQ ID NO: 60130 - DNA, 26 bp, Homo sapiens
ctgacctgagacctcaggtagcagac

SEQ ID NO: 60131 - DNA, 26 bp, Homo sapiens
tgacctgagacctcaggtagcagacc

SEQ ID NO: 60132 - DNA, 26 bp, Homo sapiens
gacctgagacctcaggtagcagacca

SEQ ID NO: 60133 - DNA, 26 bp, Homo sapiens
acctgagacctcaggtagcagaccac

SEQ ID NO: 60134 - DNA, 26 bp, Homo sapiens
cctgagacctcaggtagcagaccaca

SEQ ID NO: 60135 - DNA, 26 bp, Homo sapiens
ctgagacctcaggtagcagaccacag

SEQ ID NO: 60136 - DNA, 26 bp, Homo sapiens
tgagacctcaggtagcagaccacagc

SEQ ID NO: 60137 - DNA, 26 bp, Homo sapiens
gagacctcaggtagcagaccacagcc

SEQ ID NO: 60138 - DNA, 26 bp, Homo sapiens
agacctcaggtagcagaccacagcca

SEQ ID NO: 60139 - DNA, 26 bp, Homo sapiens
gacctcaggtagcagaccacagccac

SEQ ID NO: 60140 - DNA, 26 bp, Homo sapiens
acctcaggtagcagaccacagccaca

SEQ ID NO: 60141 - DNA, 26 bp, Homo sapiens
cctcaggtagcagaccacagccacat

SEQ ID NO: 60142 - DNA, 26 bp, Homo sapiens
ctcaggtagcagaccacagccacatg

SEQ ID NO: 60143 - DNA, 26 bp, Homo sapiens
tcaggtagcagaccacagccacatgg

SEQ ID NO: 60144 - DNA, 26 bp, Homo sapiens
caggtagcagaccacagccacatggt

SEQ ID NO: 60145 - DNA, 26 bp, Homo sapiens
aggtagcagaccacagccacatggta

SEQ ID NO: 60146 - DNA, 26 bp, Homo sapiens
ggtagcagaccacagccacatggtat

SEQ ID NO: 60147 - DNA, 26 bp, Homo sapiens
gtagcagaccacagccacatggtatg

SEQ ID NO: 60148 - DNA, 26 bp, Homo sapiens
tagcagaccacagccacatggtatgt

SEQ ID NO: 60149 - DNA, 26 bp, Homo sapiens
agcagaccacagccacatggtatgtc

SEQ ID NO: 60150 - DNA, 26 bp, Homo sapiens
gcagaccacagccacatggtatgtct

SEQ ID NO: 60151 - DNA, 26 bp, Homo sapiens
cagaccacagccacatggtatgtctg

SEQ ID NO: 60152 - DNA, 26 bp, Homo sapiens
agaccacagccacatggtatgtctgc

SEQ ID NO: 60153 - DNA, 26 bp, Homo sapiens
gaccacagccacatggtatgtctgcc

SEQ ID NO: 60154 - DNA, 26 bp, Homo sapiens
accacagccacatggtatgtctgccc

SEQ ID NO: 60155 - DNA, 26 bp, Homo sapiens
ccacagccacatggtatgtctgccca

SEQ ID NO: 60156 - DNA, 26 bp, Homo sapiens
cacagccacatggtatgtctgcccag

SEQ ID NO: 60157 - DNA, 26 bp, Homo sapiens
acagccacatggtatgtctgcccagc

SEQ ID NO: 60158 - DNA, 26 bp, Homo sapiens
cagccacatggtatgtctgcccagcg

SEQ ID NO: 60159 - DNA, 26 bp, Homo sapiens
agccacatggtatgtctgcccagcga

SEQ ID NO: 60160 - DNA, 26 bp, Homo sapiens
gccacatggtatgtctgcccagcgag

SEQ ID NO: 60161 - DNA, 26 bp, Homo sapiens
ccacatggtatgtctgcccagcgagc

SEQ ID NO: 60162 - DNA, 26 bp, Homo sapiens
cacatggtatgtctgcccagcgagca

SEQ ID NO: 60163 - DNA, 26 bp, Homo sapiens
acatggtatgtctgcccagcgagcag

SEQ ID NO: 60164 - DNA, 26 bp, Homo sapiens
catggtatgtctgcccagcgagcagg

SEQ ID NO: 60165 - DNA, 26 bp, Homo sapiens
atggtatgtctgcccagcgagcaggc

SEQ ID NO: 60166 - DNA, 26 bp, Homo sapiens
tggtatgtctgcccagcgagcaggcc

SEQ ID NO: 60167 - DNA, 26 bp, Homo sapiens
ggtatgtctgcccagcgagcaggcct

SEQ ID NO: 60168 - DNA, 26 bp, Homo sapiens
gtatgtctgcccagcgagcaggcctc

SEQ ID NO: 60169 - DNA, 26 bp, Homo sapiens
tatgtctgcccagcgagcaggcctcc

SEQ ID NO: 60170 - DNA, 26 bp, Homo sapiens
atgtctgcccagcgagcaggcctcca

SEQ ID NO: 60171 - DNA, 26 bp, Homo sapiens
tgtctgcccagcgagcaggcctccaa

SEQ ID NO: 60172 - DNA, 26 bp, Homo sapiens
gtctgcccagcgagcaggcctccaat

SEQ ID NO: 60173 - DNA, 26 bp, Homo sapiens
tctgcccagcgagcaggcctccaatg

SEQ ID NO: 60174 - DNA, 26 bp, Homo sapiens
ctgcccagcgagcaggcctccaatga

SEQ ID NO: 60175 - DNA, 26 bp, Homo sapiens
tgcccagcgagcaggcctccaatgac

SEQ ID NO: 60176 - DNA, 26 bp, Homo sapiens
gcccagcgagcaggcctccaatgacg

SEQ ID NO: 60177 - DNA, 26 bp, Homo sapiens
cccagcgagcaggcctccaatgacgc

SEQ ID NO: 60178 - DNA, 26 bp, Homo sapiens
ccagcgagcaggcctccaatgacgcg

SEQ ID NO: 60179 - DNA, 26 bp, Homo sapiens
cagcgagcaggcctccaatgacgcgg

SEQ ID NO: 60180 - DNA, 26 bp, Homo sapiens
agcgagcaggcctccaatgacgcggt

SEQ ID NO: 60181 - DNA, 26 bp, Homo sapiens
gcgagcaggcctccaatgacgcggtc

SEQ ID NO: 60182 - DNA, 26 bp, Homo sapiens
cgagcaggcctccaatgacgcggtcc

SEQ ID NO: 60183 - DNA, 26 bp, Homo sapiens
gagcaggcctccaatgacgcggtccg

SEQ ID NO: 60184 - DNA, 26 bp, Homo sapiens
agcaggcctccaatgacgcggtccgt

SEQ ID NO: 60185 - DNA, 26 bp, Homo sapiens
gcaggcctccaatgacgcggtccgtg

SEQ ID NO: 60186 - DNA, 26 bp, Homo sapiens
caggcctccaatgacgcggtccgtga

SEQ ID NO: 60187 - DNA, 26 bp, Homo sapiens
aggcctccaatgacgcggtccgtgac

SEQ ID NO: 60188 - DNA, 26 bp, Homo sapiens
ggcctccaatgacgcggtccgtgacc

SEQ ID NO: 60189 - DNA, 26 bp, Homo sapiens
gcctccaatgacgcggtccgtgaccg

SEQ ID NO: 60190 - DNA, 26 bp, Homo sapiens
cctccaatgacgcggtccgtgaccgt

SEQ ID NO: 60191 - DNA, 26 bp, Homo sapiens
ctccaatgacgcggtccgtgaccgtg

SEQ ID NO: 60192 - DNA, 26 bp, Homo sapiens
tccaatgacgcggtccgtgaccgtga

SEQ ID NO: 60193 - DNA, 26 bp, Homo sapiens
ccaatgacgcggtccgtgaccgtgag

SEQ ID NO: 60194 - DNA, 26 bp, Homo sapiens
caatgacgcggtccgtgaccgtgagg

SEQ ID NO: 60195 - DNA, 26 bp, Homo sapiens
aatgacgcggtccgtgaccgtgaggt

SEQ ID NO: 60196 - DNA, 26 bp, Homo sapiens
atgacgcggtccgtgaccgtgaggtt

SEQ ID NO: 60197 - DNA, 26 bp, Homo sapiens
tgacgcggtccgtgaccgtgaggttc

SEQ ID NO: 60198 - DNA, 26 bp, Homo sapiens
gacgcggtccgtgaccgtgaggttct

SEQ ID NO: 60199 - DNA, 26 bp, Homo sapiens
acgcggtccgtgaccgtgaggttctg

SEQ ID NO: 60200 - DNA, 26 bp, Homo sapiens
cgcggtccgtgaccgtgaggttctgc

SEQ ID NO: 60201 - DNA, 26 bp, Homo sapiens
gcggtccgtgaccgtgaggttctgct

SEQ ID NO: 60202 - DNA, 26 bp, Homo sapiens
cggtccgtgaccgtgaggttctgctt

SEQ ID NO: 60203 - DNA, 26 bp, Homo sapiens
ggtccgtgaccgtgaggttctgcttc

SEQ ID NO: 60204 - DNA, 26 bp, Homo sapiens
gtccgtgaccgtgaggttctgcttca

SEQ ID NO: 60205 - DNA, 26 bp, Homo sapiens
tccgtgaccgtgaggttctgcttcag

SEQ ID NO: 60206 - DNA, 26 bp, Homo sapiens
ccgtgaccgtgaggttctgcttcaga

SEQ ID NO: 60207 - DNA, 26 bp, Homo sapiens
cgtgaccgtgaggttctgcttcagaa

SEQ ID NO: 60208 - DNA, 26 bp, Homo sapiens
gtgaccgtgaggttctgcttcagaac

SEQ ID NO: 60209 - DNA, 26 bp, Homo sapiens
tgaccgtgaggttctgcttcagaacc

SEQ ID NO: 60210 - DNA, 26 bp, Homo sapiens
gaccgtgaggttctgcttcagaacca

SEQ ID NO: 60211 - DNA, 26 bp, Homo sapiens
accgtgaggttctgcttcagaaccag

SEQ ID NO: 60212 - DNA, 26 bp, Homo sapiens
ccgtgaggttctgcttcagaaccagg

SEQ ID NO: 60213 - DNA, 26 bp, Homo sapiens
cgtgaggttctgcttcagaaccaggg

SEQ ID NO: 60214 - DNA, 26 bp, Homo sapiens
gtgaggttctgcttcagaaccaggga

SEQ ID NO: 60215 - DNA, 26 bp, Homo sapiens
tgaggttctgcttcagaaccagggac

SEQ ID NO: 60216 - DNA, 26 bp, Homo sapiens
gaggttctgcttcagaaccagggact

SEQ ID NO: 60217 - DNA, 26 bp, Homo sapiens
aggttctgcttcagaaccagggactg

SEQ ID NO: 60218 - DNA, 26 bp, Homo sapiens
ggttctgcttcagaaccagggactga

SEQ ID NO: 60219 - DNA, 26 bp, Homo sapiens
gttctgcttcagaaccagggactgat

SEQ ID NO: 60220 - DNA, 26 bp, Homo sapiens
ttctgcttcagaaccagggactgatc

SEQ ID NO: 60221 - DNA, 26 bp, Homo sapiens
tctgcttcagaaccagggactgatca

SEQ ID NO: 60222 - DNA, 26 bp, Homo sapiens
ctgcttcagaaccagggactgatcat

SEQ ID NO: 60223 - DNA, 26 bp, Homo sapiens
tgcttcagaaccagggactgatcatg

SEQ ID NO: 60224 - DNA, 26 bp, Homo sapiens
gcttcagaaccagggactgatcatgg

SEQ ID NO: 60225 - DNA, 26 bp, Homo sapiens
cttcagaaccagggactgatcatggg

SEQ ID NO: 60226 - DNA, 26 bp, Homo sapiens
ttcagaaccagggactgatcatgggc

SEQ ID NO: 60227 - DNA, 26 bp, Homo sapiens
tcagaaccagggactgatcatgggct

SEQ ID NO: 60228 - DNA, 26 bp, Homo sapiens
cagaaccagggactgatcatgggctg

SEQ ID NO: 60229 - DNA, 26 bp, Homo sapiens
agaaccagggactgatcatgggctga

SEQ ID NO: 60230 - DNA, 26 bp, Homo sapiens
gaaccagggactgatcatgggctgag

SEQ ID NO: 60231 - DNA, 26 bp, Homo sapiens
aaccagggactgatcatgggctgagg

SEQ ID NO: 60232 - DNA, 26 bp, Homo sapiens
accagggactgatcatgggctgaggt

SEQ ID NO: 60233 - DNA, 26 bp, Homo sapiens
ccagggactgatcatgggctgaggtg

SEQ ID NO: 60234 - DNA, 26 bp, Homo sapiens
cagggactgatcatgggctgaggtga

SEQ ID NO: 60235 - DNA, 26 bp, Homo sapiens
agggactgatcatgggctgaggtgac

SEQ ID NO: 60236 - DNA, 26 bp, Homo sapiens
gggactgatcatgggctgaggtgacg

SEQ ID NO: 60237 - DNA, 26 bp, Homo sapiens
ggactgatcatgggctgaggtgacgg

SEQ ID NO: 60238 - DNA, 26 bp, Homo sapiens
gactgatcatgggctgaggtgacggt

SEQ ID NO: 60239 - DNA, 26 bp, Homo sapiens
actgatcatgggctgaggtgacggtg

SEQ ID NO: 60240 - DNA, 26 bp, Homo sapiens
ctgatcatgggctgaggtgacggtga

SEQ ID NO: 60241 - DNA, 26 bp, Homo sapiens
tgatcatgggctgaggtgacggtgag

SEQ ID NO: 60242 - DNA, 26 bp, Homo sapiens
gatcatgggctgaggtgacggtgagg

SEQ ID NO: 60243 - DNA, 26 bp, Homo sapiens
atcatgggctgaggtgacggtgaggt

SEQ ID NO: 60244 - DNA, 26 bp, Homo sapiens
tcatgggctgaggtgacggtgaggtc

SEQ ID NO: 60245 - DNA, 26 bp, Homo sapiens
catgggctgaggtgacggtgaggtca

SEQ ID NO: 60246 - DNA, 26 bp, Homo sapiens
atgggctgaggtgacggtgaggtcat

SEQ ID NO: 60247 - DNA, 26 bp, Homo sapiens
tgggctgaggtgacggtgaggtcata

SEQ ID NO: 60248 - DNA, 26 bp, Homo sapiens
gggctgaggtgacggtgaggtcataa

SEQ ID NO: 60249 - DNA, 26 bp, Homo sapiens
ggctgaggtgacggtgaggtcataaa

SEQ ID NO: 60250 - DNA, 26 bp, Homo sapiens
gctgaggtgacggtgaggtcataaaa

SEQ ID NO: 60251 - DNA, 26 bp, Homo sapiens
ctgaggtgacggtgaggtcataaaaa

SEQ ID NO: 60252 - DNA, 26 bp, Homo sapiens
tgaggtgacggtgaggtcataaaaat

SEQ ID NO: 60253 - DNA, 26 bp, Homo sapiens
gaggtgacggtgaggtcataaaaata

SEQ ID NO: 60254 - DNA, 26 bp, Homo sapiens
aggtgacggtgaggtcataaaaataa

SEQ ID NO: 60255 - DNA, 26 bp, Homo sapiens
ggtgacggtgaggtcataaaaataag

SEQ ID NO: 60256 - DNA, 26 bp, Homo sapiens
gtgacggtgaggtcataaaaataagg

SEQ ID NO: 60257 - DNA, 26 bp, Homo sapiens
tgacggtgaggtcataaaaataagga

SEQ ID NO: 60258 - DNA, 26 bp, Homo sapiens
gacggtgaggtcataaaaataaggac

SEQ ID NO: 60259 - DNA, 26 bp, Homo sapiens
acggtgaggtcataaaaataaggacc

SEQ ID NO: 60260 - DNA, 26 bp, Homo sapiens
cggtgaggtcataaaaataaggaccg

SEQ ID NO: 60261 - DNA, 26 bp, Homo sapiens
ggtgaggtcataaaaataaggaccgg

SEQ ID NO: 60262 - DNA, 26 bp, Homo sapiens
gtgaggtcataaaaataaggaccggg

SEQ ID NO: 60263 - DNA, 26 bp, Homo sapiens
tgaggtcataaaaataaggaccgggg

SEQ ID NO: 60264 - DNA, 26 bp, Homo sapiens
gaggtcataaaaataaggaccggggg

SEQ ID NO: 60265 - DNA, 26 bp, Homo sapiens
aggtcataaaaataaggaccgggggg

SEQ ID NO: 60266 - DNA, 26 bp, Homo sapiens
ggtcataaaaataaggaccggggggc

SEQ ID NO: 60267 - DNA, 26 bp, Homo sapiens
gtcataaaaataaggaccggggggct

SEQ ID NO: 60268 - DNA, 26 bp, Homo sapiens
tcataaaaataaggaccggggggctc

SEQ ID NO: 60269 - DNA, 26 bp, Homo sapiens
cataaaaataaggaccggggggctca

SEQ ID NO: 60270 - DNA, 26 bp, Homo sapiens
ataaaaataaggaccggggggctcag

SEQ ID NO: 60271 - DNA, 26 bp, Homo sapiens
taaaaataaggaccggggggctcagc

SEQ ID NO: 60272 - DNA, 26 bp, Homo sapiens
aaaaataaggaccggggggctcagcc

SEQ ID NO: 60273 - DNA, 26 bp, Homo sapiens
aaaataaggaccggggggctcagccc

SEQ ID NO: 60274 - DNA, 26 bp, Homo sapiens
aaataaggaccggggggctcagccct

SEQ ID NO: 60275 - DNA, 26 bp, Homo sapiens
aataaggaccggggggctcagccctc

SEQ ID NO: 60276 - DNA, 26 bp, Homo sapiens
ataaggaccggggggctcagccctct

SEQ ID NO: 60277 - DNA, 26 bp, Homo sapiens
taaggaccggggggctcagccctctc

SEQ ID NO: 60278 - DNA, 26 bp, Homo sapiens
aaggaccggggggctcagccctctcc

SEQ ID NO: 60279 - DNA, 26 bp, Homo sapiens
aggaccggggggctcagccctctccc

SEQ ID NO: 60280 - DNA, 26 bp, Homo sapiens
ggaccggggggctcagccctctccca

SEQ ID NO: 60281 - DNA, 26 bp, Homo sapiens
gaccggggggctcagccctctcccag

SEQ ID NO: 60282 - DNA, 26 bp, Homo sapiens
accggggggctcagccctctcccagt

SEQ ID NO: 60283 - DNA, 26 bp, Homo sapiens
ccggggggctcagccctctcccagtg

SEQ ID NO: 60284 - DNA, 26 bp, Homo sapiens
cggggggctcagccctctcccagtgg

SEQ ID NO: 60285 - DNA, 26 bp, Homo sapiens
ggggggctcagccctctcccagtgga

SEQ ID NO: 60286 - DNA, 26 bp, Homo sapiens
gggggctcagccctctcccagtggag

SEQ ID NO: 60287 - DNA, 26 bp, Homo sapiens
ggggctcagccctctcccagtggagt

SEQ ID NO: 60288 - DNA, 26 bp, Homo sapiens
gggctcagccctctcccagtggagtt

SEQ ID NO: 60289 - DNA, 26 bp, Homo sapiens
ggctcagccctctcccagtggagttt

SEQ ID NO: 60290 - DNA, 26 bp, Homo sapiens
gctcagccctctcccagtggagtttg

SEQ ID NO: 60291 - DNA, 26 bp, Homo sapiens
ctcagccctctcccagtggagtttgg

SEQ ID NO: 60292 - DNA, 26 bp, Homo sapiens
tcagccctctcccagtggagtttggc

SEQ ID NO: 60293 - DNA, 26 bp, Homo sapiens
cagccctctcccagtggagtttggcg

SEQ ID NO: 60294 - DNA, 26 bp, Homo sapiens
agccctctcccagtggagtttggcgc

SEQ ID NO: 60295 - DNA, 26 bp, Homo sapiens
gccctctcccagtggagtttggcgct

SEQ ID NO: 60296 - DNA, 26 bp, Homo sapiens
ccctctcccagtggagtttggcgctg

SEQ ID NO: 60297 - DNA, 26 bp, Homo sapiens
cctctcccagtggagtttggcgctgt

SEQ ID NO: 60298 - DNA, 26 bp, Homo sapiens
ctctcccagtggagtttggcgctgtt

SEQ ID NO: 60299 - DNA, 26 bp, Homo sapiens
tctcccagtggagtttggcgctgttc

SEQ ID NO: 60300 - DNA, 26 bp, Homo sapiens
ctcccagtggagtttggcgctgttct

SEQ ID NO: 60301 - DNA, 26 bp, Homo sapiens
tcccagtggagtttggcgctgttctc

SEQ ID NO: 60302 - DNA, 26 bp, Homo sapiens
cccagtggagtttggcgctgttctct

SEQ ID NO: 60303 - DNA, 26 bp, Homo sapiens
ccagtggagtttggcgctgttctctg

SEQ ID NO: 60304 - DNA, 26 bp, Homo sapiens
cagtggagtttggcgctgttctctgt

SEQ ID NO: 60305 - DNA, 26 bp, Homo sapiens
agtggagtttggcgctgttctctgtt

SEQ ID NO: 60306 - DNA, 26 bp, Homo sapiens
gtggagtttggcgctgttctctgtta

SEQ ID NO: 60307 - DNA, 26 bp, Homo sapiens
tggagtttggcgctgttctctgttat

SEQ ID NO: 60308 - DNA, 26 bp, Homo sapiens
ggagtttggcgctgttctctgttatc

SEQ ID NO: 60309 - DNA, 26 bp, Homo sapiens
gagtttggcgctgttctctgttatct

SEQ ID NO: 60310 - DNA, 26 bp, Homo sapiens
agtttggcgctgttctctgttatctc

SEQ ID NO: 60311 - DNA, 26 bp, Homo sapiens
gtttggcgctgttctctgttatctca

SEQ ID NO: 60312 - DNA, 26 bp, Homo sapiens
tttggcgctgttctctgttatctcaa

SEQ ID NO: 60313 - DNA, 26 bp, Homo sapiens
ttggcgctgttctctgttatctcaaa

SEQ ID NO: 60314 - DNA, 26 bp, Homo sapiens
tggcgctgttctctgttatctcaaac

SEQ ID NO: 60315 - DNA, 26 bp, Homo sapiens
ggcgctgttctctgttatctcaaaca

SEQ ID NO: 60316 - DNA, 26 bp, Homo sapiens
gcgctgttctctgttatctcaaacac

SEQ ID NO: 60317 - DNA, 26 bp, Homo sapiens
cgctgttctctgttatctcaaacacc

SEQ ID NO: 60318 - DNA, 26 bp, Homo sapiens
gctgttctctgttatctcaaacacct

SEQ ID NO: 60319 - DNA, 26 bp, Homo sapiens
ctgttctctgttatctcaaacacctg

SEQ ID NO: 60320 - DNA, 26 bp, Homo sapiens
tgttctctgttatctcaaacacctgg

SEQ ID NO: 60321 - DNA, 26 bp, Homo sapiens
gttctctgttatctcaaacacctgga

SEQ ID NO: 60322 - DNA, 26 bp, Homo sapiens
ttctctgttatctcaaacacctggac

SEQ ID NO: 60323 - DNA, 26 bp, Homo sapiens
tctctgttatctcaaacacctggact

SEQ ID NO: 60324 - DNA, 26 bp, Homo sapiens
ctctgttatctcaaacacctggactt

SEQ ID NO: 60325 - DNA, 26 bp, Homo sapiens
tctgttatctcaaacacctggacttc

SEQ ID NO: 60326 - DNA, 26 bp, Homo sapiens
ctgttatctcaaacacctggacttca

SEQ ID NO: 60327 - DNA, 26 bp, Homo sapiens
tgttatctcaaacacctggacttcac

SEQ ID NO: 60328 - DNA, 26 bp, Homo sapiens
gttatctcaaacacctggacttcacg

SEQ ID NO: 60329 - DNA, 26 bp, Homo sapiens
ttatctcaaacacctggacttcacgg

SEQ ID NO: 60330 - DNA, 26 bp, Homo sapiens
tatctcaaacacctggacttcacggg

SEQ ID NO: 60331 - DNA, 26 bp, Homo sapiens
atctcaaacacctggacttcacggga

SEQ ID NO: 60332 - DNA, 26 bp, Homo sapiens
tctcaaacacctggacttcacgggac

SEQ ID NO: 60333 - DNA, 26 bp, Homo sapiens
ctcaaacacctggacttcacgggaca

SEQ ID NO: 60334 - DNA, 26 bp, Homo sapiens
tcaaacacctggacttcacgggacat

SEQ ID NO: 60335 - DNA, 26 bp, Homo sapiens
caaacacctggacttcacgggacatc

SEQ ID NO: 60336 - DNA, 26 bp, Homo sapiens
aaacacctggacttcacgggacatct

SEQ ID NO: 60337 - DNA, 26 bp, Homo sapiens
aacacctggacttcacgggacatctt

SEQ ID NO: 60338 - DNA, 26 bp, Homo sapiens
acacctggacttcacgggacatctta

SEQ ID NO: 60339 - DNA, 26 bp, Homo sapiens
cacctggacttcacgggacatcttaa

SEQ ID NO: 60340 - DNA, 26 bp, Homo sapiens
acctggacttcacgggacatcttaac

SEQ ID NO: 60341 - DNA, 26 bp, Homo sapiens
cctggacttcacgggacatcttaacc

SEQ ID NO: 60342 - DNA, 26 bp, Homo sapiens
ctggacttcacgggacatcttaacca

SEQ ID NO: 60343 - DNA, 26 bp, Homo sapiens
tggacttcacgggacatcttaaccat

SEQ ID NO: 60344 - DNA, 26 bp, Homo sapiens
ggacttcacgggacatcttaaccatg

SEQ ID NO: 60345 - DNA, 26 bp, Homo sapiens
gacttcacgggacatcttaaccatgg

SEQ ID NO: 60346 - DNA, 26 bp, Homo sapiens
acttcacgggacatcttaaccatggg

SEQ ID NO: 60347 - DNA, 26 bp, Homo sapiens
cttcacgggacatcttaaccatgggc

SEQ ID NO: 60348 - DNA, 26 bp, Homo sapiens
ttcacgggacatcttaaccatgggct

SEQ ID NO: 60349 - DNA, 26 bp, Homo sapiens
tcacgggacatcttaaccatgggctt

SEQ ID NO: 60350 - DNA, 26 bp, Homo sapiens
cacgggacatcttaaccatgggctta

SEQ ID NO: 60351 - DNA, 26 bp, Homo sapiens
acgggacatcttaaccatgggcttag

SEQ ID NO: 60352 - DNA, 26 bp, Homo sapiens
cgggacatcttaaccatgggcttagt

SEQ ID NO: 60353 - DNA, 26 bp, Homo sapiens
gggacatcttaaccatgggcttagtg

SEQ ID NO: 60354 - DNA, 26 bp, Homo sapiens
ggacatcttaaccatgggcttagtgg

SEQ ID NO: 60355 - DNA, 26 bp, Homo sapiens
gacatcttaaccatgggcttagtggt

SEQ ID NO: 60356 - DNA, 26 bp, Homo sapiens
acatcttaaccatgggcttagtggtg

SEQ ID NO: 60357 - DNA, 26 bp, Homo sapiens
catcttaaccatgggcttagtggtgg

SEQ ID NO: 60358 - DNA, 26 bp, Homo sapiens
atcttaaccatgggcttagtggtggc

SEQ ID NO: 60359 - DNA, 26 bp, Homo sapiens
tcttaaccatgggcttagtggtggct

SEQ ID NO: 60360 - DNA, 26 bp, Homo sapiens
cttaaccatgggcttagtggtggctg

SEQ ID NO: 60361 - DNA, 26 bp, Homo sapiens
ttaaccatgggcttagtggtggctgg

SEQ ID NO: 60362 - DNA, 26 bp, Homo sapiens
taaccatgggcttagtggtggctggc

SEQ ID NO: 60363 - DNA, 26 bp, Homo sapiens
aaccatgggcttagtggtggctggct

SEQ ID NO: 60364 - DNA, 26 bp, Homo sapiens
accatgggcttagtggtggctggctt

SEQ ID NO: 60365 - DNA, 26 bp, Homo sapiens
ccatgggcttagtggtggctggcttg

SEQ ID NO: 60366 - DNA, 26 bp, Homo sapiens
catgggcttagtggtggctggcttgg

SEQ ID NO: 60367 - DNA, 26 bp, Homo sapiens
atgggcttagtggtggctggcttggt

SEQ ID NO: 60368 - DNA, 26 bp, Homo sapiens
tgggcttagtggtggctggcttggtg

SEQ ID NO: 60369 - DNA, 26 bp, Homo sapiens
gggcttagtggtggctggcttggtgg

SEQ ID NO: 60370 - DNA, 26 bp, Homo sapiens
ggcttagtggtggctggcttggtggc

SEQ ID NO: 60371 - DNA, 26 bp, Homo sapiens
gcttagtggtggctggcttggtggca

SEQ ID NO: 60372 - DNA, 26 bp, Homo sapiens
cttagtggtggctggcttggtggcag

SEQ ID NO: 60373 - DNA, 26 bp, Homo sapiens
ttagtggtggctggcttggtggcagc

SEQ ID NO: 60374 - DNA, 26 bp, Homo sapiens
tagtggtggctggcttggtggcagct

SEQ ID NO: 60375 - DNA, 26 bp, Homo sapiens
agtggtggctggcttggtggcagctg

SEQ ID NO: 60376 - DNA, 26 bp, Homo sapiens
gtggtggctggcttggtggcagctgg

SEQ ID NO: 60377 - DNA, 26 bp, Homo sapiens
tggtggctggcttggtggcagctggt

SEQ ID NO: 60378 - DNA, 26 bp, Homo sapiens
ggtggctggcttggtggcagctggtt

SEQ ID NO: 60379 - DNA, 26 bp, Homo sapiens
gtggctggcttggtggcagctggttt

SEQ ID NO: 60380 - DNA, 26 bp, Homo sapiens
tggctggcttggtggcagctggtttg

SEQ ID NO: 60381 - DNA, 26 bp, Homo sapiens
ggctggcttggtggcagctggtttgg

SEQ ID NO: 60382 - DNA, 26 bp, Homo sapiens
gctggcttggtggcagctggtttggc

SEQ ID NO: 60383 - DNA, 26 bp, Homo sapiens
ctggcttggtggcagctggtttggct

SEQ ID NO: 60384 - DNA, 26 bp, Homo sapiens
tggcttggtggcagctggtttggctg

SEQ ID NO: 60385 - DNA, 26 bp, Homo sapiens
ggcttggtggcagctggtttggctgc

SEQ ID NO: 60386 - DNA, 26 bp, Homo sapiens
gcttggtggcagctggtttggctgcc

SEQ ID NO: 60387 - DNA, 26 bp, Homo sapiens
cttggtggcagctggtttggctgcct

SEQ ID NO: 60388 - DNA, 26 bp, Homo sapiens
ttggtggcagctggtttggctgcctg

SEQ ID NO: 60389 - DNA, 26 bp, Homo sapiens
tggtggcagctggtttggctgcctgt

SEQ ID NO: 60390 - DNA, 26 bp, Homo sapiens
ggtggcagctggtttggctgcctgtg

SEQ ID NO: 60391 - DNA, 26 bp, Homo sapiens
gtggcagctggtttggctgcctgtgg

SEQ ID NO: 60392 - DNA, 26 bp, Homo sapiens
tggcagctggtttggctgcctgtggc

SEQ ID NO: 60393 - DNA, 26 bp, Homo sapiens
ggcagctggtttggctgcctgtggcc

SEQ ID NO: 60394 - DNA, 26 bp, Homo sapiens
gcagctggtttggctgcctgtggcct

SEQ ID NO: 60395 - DNA, 26 bp, Homo sapiens
cagctggtttggctgcctgtggccta

SEQ ID NO: 60396 - DNA, 26 bp, Homo sapiens
agctggtttggctgcctgtggcctag

SEQ ID NO: 60397 - DNA, 26 bp, Homo sapiens
gctggtttggctgcctgtggcctagg

SEQ ID NO: 60398 - DNA, 26 bp, Homo sapiens
ctggtttggctgcctgtggcctaggg

SEQ ID NO: 60399 - DNA, 26 bp, Homo sapiens
tggtttggctgcctgtggcctaggga

SEQ ID NO: 60400 - DNA, 26 bp, Homo sapiens
ggtttggctgcctgtggcctagggac

SEQ ID NO: 60401 - DNA, 26 bp, Homo sapiens
gtttggctgcctgtggcctagggacc

SEQ ID NO: 60402 - DNA, 26 bp, Homo sapiens
tttggctgcctgtggcctagggacct

SEQ ID NO: 60403 - DNA, 26 bp, Homo sapiens
ttggctgcctgtggcctagggacctc

SEQ ID NO: 60404 - DNA, 26 bp, Homo sapiens
tggctgcctgtggcctagggacctca

SEQ ID NO: 60405 - DNA, 26 bp, Homo sapiens
ggctgcctgtggcctagggacctcag

SEQ ID NO: 60406 - DNA, 26 bp, Homo sapiens
gctgcctgtggcctagggacctcagg

SEQ ID NO: 60407 - DNA, 26 bp, Homo sapiens
ctgcctgtggcctagggacctcaggc

SEQ ID NO: 60408 - DNA, 26 bp, Homo sapiens
tgcctgtggcctagggacctcaggct

SEQ ID NO: 60409 - DNA, 26 bp, Homo sapiens
gcctgtggcctagggacctcaggctt

SEQ ID NO: 60410 - DNA, 26 bp, Homo sapiens
cctgtggcctagggacctcaggcttg

SEQ ID NO: 60411 - DNA, 26 bp, Homo sapiens
ctgtggcctagggacctcaggcttgg

SEQ ID NO: 60412 - DNA, 26 bp, Homo sapiens
tgtggcctagggacctcaggcttggt

SEQ ID NO: 60413 - DNA, 26 bp, Homo sapiens
gtggcctagggacctcaggcttggtc

SEQ ID NO: 60414 - DNA, 26 bp, Homo sapiens
tggcctagggacctcaggcttggtcg

SEQ ID NO: 60415 - DNA, 26 bp, Homo sapiens
ggcctagggacctcaggcttggtcgc

SEQ ID NO: 60416 - DNA, 26 bp, Homo sapiens
gcctagggacctcaggcttggtcgcc

SEQ ID NO: 60417 - DNA, 26 bp, Homo sapiens
cctagggacctcaggcttggtcgcca

SEQ ID NO: 60418 - DNA, 26 bp, Homo sapiens
ctagggacctcaggcttggtcgccac

SEQ ID NO: 60419 - DNA, 26 bp, Homo sapiens
tagggacctcaggcttggtcgccact

SEQ ID NO: 60420 - DNA, 26 bp, Homo sapiens
agggacctcaggcttggtcgccactg

SEQ ID NO: 60421 - DNA, 26 bp, Homo sapiens
gggacctcaggcttggtcgccactgg

SEQ ID NO: 60422 - DNA, 26 bp, Homo sapiens
ggacctcaggcttggtcgccactggt

SEQ ID NO: 60423 - DNA, 26 bp, Homo sapiens
gacctcaggcttggtcgccactggtt

SEQ ID NO: 60424 - DNA, 26 bp, Homo sapiens
acctcaggcttggtcgccactggttt

SEQ ID NO: 60425 - DNA, 26 bp, Homo sapiens
cctcaggcttggtcgccactggtttt

SEQ ID NO: 60426 - DNA, 26 bp, Homo sapiens
ctcaggcttggtcgccactggttttg

SEQ ID NO: 60427 - DNA, 26 bp, Homo sapiens
tcaggcttggtcgccactggttttgc

SEQ ID NO: 60428 - DNA, 26 bp, Homo sapiens
caggcttggtcgccactggttttgca

SEQ ID NO: 60429 - DNA, 26 bp, Homo sapiens
aggcttggtcgccactggttttgcag

SEQ ID NO: 60430 - DNA, 26 bp, Homo sapiens
ggcttggtcgccactggttttgcagc

SEQ ID NO: 60431 - DNA, 26 bp, Homo sapiens
gcttggtcgccactggttttgcagca

SEQ ID NO: 60432 - DNA, 26 bp, Homo sapiens
cttggtcgccactggttttgcagcag

SEQ ID NO: 60433 - DNA, 26 bp, Homo sapiens
ttggtcgccactggttttgcagcagc

SEQ ID NO: 60434 - DNA, 26 bp, Homo sapiens
tggtcgccactggttttgcagcagca

SEQ ID NO: 60435 - DNA, 26 bp, Homo sapiens
ggtcgccactggttttgcagcagcag

SEQ ID NO: 60436 - DNA, 26 bp, Homo sapiens
gtcgccactggttttgcagcagcagc

SEQ ID NO: 60437 - DNA, 26 bp, Homo sapiens
tcgccactggttttgcagcagcagca

SEQ ID NO: 60438 - DNA, 26 bp, Homo sapiens
cgccactggttttgcagcagcagcag

SEQ ID NO: 60439 - DNA, 26 bp, Homo sapiens
gccactggttttgcagcagcagcagc

SEQ ID NO: 60440 - DNA, 26 bp, Homo sapiens
ccactggttttgcagcagcagcagcg

SEQ ID NO: 60441 - DNA, 26 bp, Homo sapiens
cactggttttgcagcagcagcagcgg

SEQ ID NO: 60442 - DNA, 26 bp, Homo sapiens
actggttttgcagcagcagcagcggg

SEQ ID NO: 60443 - DNA, 26 bp, Homo sapiens
ctggttttgcagcagcagcagcgggg

SEQ ID NO: 60444 - DNA, 26 bp, Homo sapiens
tggttttgcagcagcagcagcggggg

SEQ ID NO: 60445 - DNA, 26 bp, Homo sapiens
ggttttgcagcagcagcagcgggggg

SEQ ID NO: 60446 - DNA, 26 bp, Homo sapiens
gttttgcagcagcagcagcggggggt

SEQ ID NO: 60447 - DNA, 26 bp, Homo sapiens
ttttgcagcagcagcagcggggggtc

SEQ ID NO: 60448 - DNA, 26 bp, Homo sapiens
tttgcagcagcagcagcggggggtct

SEQ ID NO: 60449 - DNA, 26 bp, Homo sapiens
ttgcagcagcagcagcggggggtctt

SEQ ID NO: 60450 - DNA, 26 bp, Homo sapiens
tgcagcagcagcagcggggggtctta

SEQ ID NO: 60451 - DNA, 26 bp, Homo sapiens
gcagcagcagcagcggggggtcttac

SEQ ID NO: 60452 - DNA, 26 bp, Homo sapiens
cagcagcagcagcggggggtcttaca

SEQ ID NO: 60453 - DNA, 26 bp, Homo sapiens
agcagcagcagcggggggtcttacag

SEQ ID NO: 60454 - DNA, 26 bp, Homo sapiens
gcagcagcagcggggggtcttacagc

SEQ ID NO: 60455 - DNA, 26 bp, Homo sapiens
cagcagcagcggggggtcttacagct

SEQ ID NO: 60456 - DNA, 26 bp, Homo sapiens
agcagcagcggggggtcttacagctg

SEQ ID NO: 60457 - DNA, 26 bp, Homo sapiens
gcagcagcggggggtcttacagctgc

SEQ ID NO: 60458 - DNA, 26 bp, Homo sapiens
cagcagcggggggtcttacagctgct

SEQ ID NO: 60459 - DNA, 26 bp, Homo sapiens
agcagcggggggtcttacagctgctg

SEQ ID NO: 60460 - DNA, 26 bp, Homo sapiens
gcagcggggggtcttacagctgctgg

SEQ ID NO: 60461 - DNA, 26 bp, Homo sapiens
cagcggggggtcttacagctgctggc

SEQ ID NO: 60462 - DNA, 26 bp, Homo sapiens
agcggggggtcttacagctgctggct

SEQ ID NO: 60463 - DNA, 26 bp, Homo sapiens
gcggggggtcttacagctgctggctt

SEQ ID NO: 60464 - DNA, 26 bp, Homo sapiens
cggggggtcttacagctgctggcttt

SEQ ID NO: 60465 - DNA, 26 bp, Homo sapiens
ggggggtcttacagctgctggctttg

SEQ ID NO: 60466 - DNA, 26 bp, Homo sapiens
gggggtcttacagctgctggctttgc

SEQ ID NO: 60467 - DNA, 26 bp, Homo sapiens
ggggtcttacagctgctggctttgct

SEQ ID NO: 60468 - DNA, 26 bp, Homo sapiens
gggtcttacagctgctggctttgctg

SEQ ID NO: 60469 - DNA, 26 bp, Homo sapiens
ggtcttacagctgctggctttgctgc

SEQ ID NO: 60470 - DNA, 26 bp, Homo sapiens
gtcttacagctgctggctttgctgct

SEQ ID NO: 60471 - DNA, 26 bp, Homo sapiens
tcttacagctgctggctttgctgcta

SEQ ID NO: 60472 - DNA, 26 bp, Homo sapiens
cttacagctgctggctttgctgctac

SEQ ID NO: 60473 - DNA, 26 bp, Homo sapiens
ttacagctgctggctttgctgctaca

SEQ ID NO: 60474 - DNA, 26 bp, Homo sapiens
tacagctgctggctttgctgctacag

SEQ ID NO: 60475 - DNA, 26 bp, Homo sapiens
acagctgctggctttgctgctacagg

SEQ ID NO: 60476 - DNA, 26 bp, Homo sapiens
cagctgctggctttgctgctacaggc

SEQ ID NO: 60477 - DNA, 26 bp, Homo sapiens
agctgctggctttgctgctacaggct

SEQ ID NO: 60478 - DNA, 26 bp, Homo sapiens
gctgctggctttgctgctacaggctt

SEQ ID NO: 60479 - DNA, 26 bp, Homo sapiens
ctgctggctttgctgctacaggcttc

SEQ ID NO: 60480 - DNA, 26 bp, Homo sapiens
tgctggctttgctgctacaggcttcg

SEQ ID NO: 60481 - DNA, 26 bp, Homo sapiens
gctggctttgctgctacaggcttcgc

SEQ ID NO: 60482 - DNA, 26 bp, Homo sapiens
ctggctttgctgctacaggcttcgct

SEQ ID NO: 60483 - DNA, 26 bp, Homo sapiens
tggctttgctgctacaggcttcgctg

SEQ ID NO: 60484 - DNA, 26 bp, Homo sapiens
ggctttgctgctacaggcttcgctgc

SEQ ID NO: 60485 - DNA, 26 bp, Homo sapiens
gctttgctgctacaggcttcgctgcc

SEQ ID NO: 60486 - DNA, 26 bp, Homo sapiens
ctttgctgctacaggcttcgctgccg

SEQ ID NO: 60487 - DNA, 26 bp, Homo sapiens
tttgctgctacaggcttcgctgccgt

SEQ ID NO: 60488 - DNA, 26 bp, Homo sapiens
ttgctgctacaggcttcgctgccgtt

SEQ ID NO: 60489 - DNA, 26 bp, Homo sapiens
tgctgctacaggcttcgctgccgttg

SEQ ID NO: 60490 - DNA, 26 bp, Homo sapiens
gctgctacaggcttcgctgccgttgc

SEQ ID NO: 60491 - DNA, 26 bp, Homo sapiens
ctgctacaggcttcgctgccgttgct

SEQ ID NO: 60492 - DNA, 26 bp, Homo sapiens
tgctacaggcttcgctgccgttgctg

SEQ ID NO: 60493 - DNA, 26 bp, Homo sapiens
gctacaggcttcgctgccgttgctgg

SEQ ID NO: 60494 - DNA, 26 bp, Homo sapiens
ctacaggcttcgctgccgttgctggc

SEQ ID NO: 60495 - DNA, 26 bp, Homo sapiens
tacaggcttcgctgccgttgctggct

SEQ ID NO: 60496 - DNA, 26 bp, Homo sapiens
acaggcttcgctgccgttgctggctt

SEQ ID NO: 60497 - DNA, 26 bp, Homo sapiens
caggcttcgctgccgttgctggcttc

SEQ ID NO: 60498 - DNA, 26 bp, Homo sapiens
aggcttcgctgccgttgctggcttca

SEQ ID NO: 60499 - DNA, 26 bp, Homo sapiens
ggcttcgctgccgttgctggcttcac

SEQ ID NO: 60500 - DNA, 26 bp, Homo sapiens
gcttcgctgccgttgctggcttcacc

SEQ ID NO: 60501 - DNA, 26 bp, Homo sapiens
cttcgctgccgttgctggcttcaccg

SEQ ID NO: 60502 - DNA, 26 bp, Homo sapiens
ttcgctgccgttgctggcttcaccgc

SEQ ID NO: 60503 - DNA, 26 bp, Homo sapiens
tcgctgccgttgctggcttcaccgcc

SEQ ID NO: 60504 - DNA, 26 bp, Homo sapiens
cgctgccgttgctggcttcaccgcca

SEQ ID NO: 60505 - DNA, 26 bp, Homo sapiens
gctgccgttgctggcttcaccgccac

SEQ ID NO: 60506 - DNA, 26 bp, Homo sapiens
ctgccgttgctggcttcaccgccact

SEQ ID NO: 60507 - DNA, 26 bp, Homo sapiens
tgccgttgctggcttcaccgccactg

SEQ ID NO: 60508 - DNA, 26 bp, Homo sapiens
gccgttgctggcttcaccgccactgg

SEQ ID NO: 60509 - DNA, 26 bp, Homo sapiens
ccgttgctggcttcaccgccactggg

SEQ ID NO: 60510 - DNA, 26 bp, Homo sapiens
cgttgctggcttcaccgccactgggg

SEQ ID NO: 60511 - DNA, 26 bp, Homo sapiens
gttgctggcttcaccgccactggggg

SEQ ID NO: 60512 - DNA, 26 bp, Homo sapiens
ttgctggcttcaccgccactgggggt

SEQ ID NO: 60513 - DNA, 26 bp, Homo sapiens
tgctggcttcaccgccactgggggtc

SEQ ID NO: 60514 - DNA, 26 bp, Homo sapiens
gctggcttcaccgccactgggggtct

SEQ ID NO: 60515 - DNA, 26 bp, Homo sapiens
ctggcttcaccgccactgggggtcta

SEQ ID NO: 60516 - DNA, 26 bp, Homo sapiens
tggcttcaccgccactgggggtctaa

SEQ ID NO: 60517 - DNA, 26 bp, Homo sapiens
ggcttcaccgccactgggggtctaac

SEQ ID NO: 60518 - DNA, 26 bp, Homo sapiens
gcttcaccgccactgggggtctaaca

SEQ ID NO: 60519 - DNA, 26 bp, Homo sapiens
cttcaccgccactgggggtctaacag

SEQ ID NO: 60520 - DNA, 26 bp, Homo sapiens
ttcaccgccactgggggtctaacagt

SEQ ID NO: 60521 - DNA, 26 bp, Homo sapiens
tcaccgccactgggggtctaacagtg

SEQ ID NO: 60522 - DNA, 26 bp, Homo sapiens
caccgccactgggggtctaacagtgg

SEQ ID NO: 60523 - DNA, 26 bp, Homo sapiens
accgccactgggggtctaacagtggc

SEQ ID NO: 60524 - DNA, 26 bp, Homo sapiens
ccgccactgggggtctaacagtggcc

SEQ ID NO: 60525 - DNA, 26 bp, Homo sapiens
cgccactgggggtctaacagtggcca

SEQ ID NO: 60526 - DNA, 26 bp, Homo sapiens
gccactgggggtctaacagtggccat

SEQ ID NO: 60527 - DNA, 26 bp, Homo sapiens
ccactgggggtctaacagtggccatc

SEQ ID NO: 60528 - DNA, 26 bp, Homo sapiens
cactgggggtctaacagtggccatct

SEQ ID NO: 60529 - DNA, 26 bp, Homo sapiens
actgggggtctaacagtggccatctt

SEQ ID NO: 60530 - DNA, 26 bp, Homo sapiens
ctgggggtctaacagtggccatcttt

SEQ ID NO: 60531 - DNA, 26 bp, Homo sapiens
tgggggtctaacagtggccatctttg

SEQ ID NO: 60532 - DNA, 26 bp, Homo sapiens
gggggtctaacagtggccatctttgt

SEQ ID NO: 60533 - DNA, 26 bp, Homo sapiens
ggggtctaacagtggccatctttgtg

SEQ ID NO: 60534 - DNA, 26 bp, Homo sapiens
gggtctaacagtggccatctttgtgg

SEQ ID NO: 60535 - DNA, 26 bp, Homo sapiens
ggtctaacagtggccatctttgtggc

SEQ ID NO: 60536 - DNA, 26 bp, Homo sapiens
gtctaacagtggccatctttgtggcc

SEQ ID NO: 60537 - DNA, 26 bp, Homo sapiens
tctaacagtggccatctttgtggcca

SEQ ID NO: 60538 - DNA, 26 bp, Homo sapiens
ctaacagtggccatctttgtggccac

SEQ ID NO: 60539 - DNA, 26 bp, Homo sapiens
taacagtggccatctttgtggccaca

SEQ ID NO: 60540 - DNA, 26 bp, Homo sapiens
aacagtggccatctttgtggccacag

SEQ ID NO: 60541 - DNA, 26 bp, Homo sapiens
acagtggccatctttgtggccacagg

SEQ ID NO: 60542 - DNA, 26 bp, Homo sapiens
cagtggccatctttgtggccacaggc

SEQ ID NO: 60543 - DNA, 26 bp, Homo sapiens
agtggccatctttgtggccacaggct

SEQ ID NO: 60544 - DNA, 26 bp, Homo sapiens
gtggccatctttgtggccacaggctt

SEQ ID NO: 60545 - DNA, 26 bp, Homo sapiens
tggccatctttgtggccacaggcttg

SEQ ID NO: 60546 - DNA, 26 bp, Homo sapiens
ggccatctttgtggccacaggcttgg

SEQ ID NO: 60547 - DNA, 26 bp, Homo sapiens
gccatctttgtggccacaggcttggc

SEQ ID NO: 60548 - DNA, 26 bp, Homo sapiens
ccatctttgtggccacaggcttggca

SEQ ID NO: 60549 - DNA, 26 bp, Homo sapiens
catctttgtggccacaggcttggcag

SEQ ID NO: 60550 - DNA, 26 bp, Homo sapiens
atctttgtggccacaggcttggcagc

SEQ ID NO: 60551 - DNA, 26 bp, Homo sapiens
tctttgtggccacaggcttggcagcc

SEQ ID NO: 60552 - DNA, 26 bp, Homo sapiens
ctttgtggccacaggcttggcagcca

SEQ ID NO: 60553 - DNA, 26 bp, Homo sapiens
tttgtggccacaggcttggcagccac

SEQ ID NO: 60554 - DNA, 26 bp, Homo sapiens
ttgtggccacaggcttggcagccaca

SEQ ID NO: 60555 - DNA, 26 bp, Homo sapiens
tgtggccacaggcttggcagccacag

SEQ ID NO: 60556 - DNA, 26 bp, Homo sapiens
gtggccacaggcttggcagccacagg

SEQ ID NO: 60557 - DNA, 26 bp, Homo sapiens
tggccacaggcttggcagccacaggt

SEQ ID NO: 60558 - DNA, 26 bp, Homo sapiens
ggccacaggcttggcagccacaggtt

SEQ ID NO: 60559 - DNA, 26 bp, Homo sapiens
gccacaggcttggcagccacaggttt

SEQ ID NO: 60560 - DNA, 26 bp, Homo sapiens
ccacaggcttggcagccacaggtttc

SEQ ID NO: 60561 - DNA, 26 bp, Homo sapiens
cacaggcttggcagccacaggtttcg

SEQ ID NO: 60562 - DNA, 26 bp, Homo sapiens
acaggcttggcagccacaggtttcgc

SEQ ID NO: 60563 - DNA, 26 bp, Homo sapiens
caggcttggcagccacaggtttcgca

SEQ ID NO: 60564 - DNA, 26 bp, Homo sapiens
aggcttggcagccacaggtttcgcag

SEQ ID NO: 60565 - DNA, 26 bp, Homo sapiens
ggcttggcagccacaggtttcgcagg

SEQ ID NO: 60566 - DNA, 26 bp, Homo sapiens
gcttggcagccacaggtttcgcaggg

SEQ ID NO: 60567 - DNA, 26 bp, Homo sapiens
cttggcagccacaggtttcgcagggg

SEQ ID NO: 60568 - DNA, 26 bp, Homo sapiens
ttggcagccacaggtttcgcaggggc

SEQ ID NO: 60569 - DNA, 26 bp, Homo sapiens
tggcagccacaggtttcgcaggggcc

SEQ ID NO: 60570 - DNA, 26 bp, Homo sapiens
ggcagccacaggtttcgcaggggccg

SEQ ID NO: 60571 - DNA, 26 bp, Homo sapiens
gcagccacaggtttcgcaggggccgg

SEQ ID NO: 60572 - DNA, 26 bp, Homo sapiens
cagccacaggtttcgcaggggccggc

SEQ ID NO: 60573 - DNA, 26 bp, Homo sapiens
agccacaggtttcgcaggggccggct

SEQ ID NO: 60574 - DNA, 26 bp, Homo sapiens
gccacaggtttcgcaggggccggctt

SEQ ID NO: 60575 - DNA, 26 bp, Homo sapiens
ccacaggtttcgcaggggccggcttt

SEQ ID NO: 60576 - DNA, 26 bp, Homo sapiens
cacaggtttcgcaggggccggctttg

SEQ ID NO: 60577 - DNA, 26 bp, Homo sapiens
acaggtttcgcaggggccggctttgc

SEQ ID NO: 60578 - DNA, 26 bp, Homo sapiens
caggtttcgcaggggccggctttgca

SEQ ID NO: 60579 - DNA, 26 bp, Homo sapiens
aggtttcgcaggggccggctttgcag

SEQ ID NO: 60580 - DNA, 26 bp, Homo sapiens
ggtttcgcaggggccggctttgcagc

SEQ ID NO: 60581 - DNA, 26 bp, Homo sapiens
gtttcgcaggggccggctttgcagcg

SEQ ID NO: 60582 - DNA, 26 bp, Homo sapiens
tttcgcaggggccggctttgcagcgg

SEQ ID NO: 60583 - DNA, 26 bp, Homo sapiens
ttcgcaggggccggctttgcagcggc

SEQ ID NO: 60584 - DNA, 26 bp, Homo sapiens
tcgcaggggccggctttgcagcggct

SEQ ID NO: 60585 - DNA, 26 bp, Homo sapiens
cgcaggggccggctttgcagcggctg

SEQ ID NO: 60586 - DNA, 26 bp, Homo sapiens
gcaggggccggctttgcagcggctgg

SEQ ID NO: 60587 - DNA, 26 bp, Homo sapiens
caggggccggctttgcagcggctggc

SEQ ID NO: 60588 - DNA, 26 bp, Homo sapiens
aggggccggctttgcagcggctggct

SEQ ID NO: 60589 - DNA, 26 bp, Homo sapiens
ggggccggctttgcagcggctggctt

SEQ ID NO: 60590 - DNA, 26 bp, Homo sapiens
gggccggctttgcagcggctggcttc

SEQ ID NO: 60591 - DNA, 26 bp, Homo sapiens
ggccggctttgcagcggctggcttca

SEQ ID NO: 60592 - DNA, 26 bp, Homo sapiens
gccggctttgcagcggctggcttcac

SEQ ID NO: 60593 - DNA, 26 bp, Homo sapiens
ccggctttgcagcggctggcttcaca

SEQ ID NO: 60594 - DNA, 26 bp, Homo sapiens
cggctttgcagcggctggcttcacag

SEQ ID NO: 60595 - DNA, 26 bp, Homo sapiens
ggctttgcagcggctggcttcacaga

SEQ ID NO: 60596 - DNA, 26 bp, Homo sapiens
gctttgcagcggctggcttcacagat

SEQ ID NO: 60597 - DNA, 26 bp, Homo sapiens
ctttgcagcggctggcttcacagatg

SEQ ID NO: 60598 - DNA, 26 bp, Homo sapiens
tttgcagcggctggcttcacagatgg

SEQ ID NO: 60599 - DNA, 26 bp, Homo sapiens
ttgcagcggctggcttcacagatggc

SEQ ID NO: 60600 - DNA, 26 bp, Homo sapiens
tgcagcggctggcttcacagatggct

SEQ ID NO: 60601 - DNA, 26 bp, Homo sapiens
gcagcggctggcttcacagatggctg

SEQ ID NO: 60602 - DNA, 26 bp, Homo sapiens
cagcggctggcttcacagatggctga

SEQ ID NO: 60603 - DNA, 26 bp, Homo sapiens
agcggctggcttcacagatggctgat

SEQ ID NO: 60604 - DNA, 26 bp, Homo sapiens
gcggctggcttcacagatggctgatt

SEQ ID NO: 60605 - DNA, 26 bp, Homo sapiens
cggctggcttcacagatggctgattt

SEQ ID NO: 60606 - DNA, 26 bp, Homo sapiens
ggctggcttcacagatggctgattta

SEQ ID NO: 60607 - DNA, 26 bp, Homo sapiens
gctggcttcacagatggctgatttat

SEQ ID NO: 60608 - DNA, 26 bp, Homo sapiens
ctggcttcacagatggctgatttata

SEQ ID NO: 60609 - DNA, 26 bp, Homo sapiens
tggcttcacagatggctgatttataa

SEQ ID NO: 60610 - DNA, 26 bp, Homo sapiens
ggcttcacagatggctgatttataat

SEQ ID NO: 60611 - DNA, 26 bp, Homo sapiens
gcttcacagatggctgatttataata

SEQ ID NO: 60612 - DNA, 26 bp, Homo sapiens
cttcacagatggctgatttataatag

SEQ ID NO: 60613 - DNA, 26 bp, Homo sapiens
ttcacagatggctgatttataatagt

SEQ ID NO: 60614 - DNA, 26 bp, Homo sapiens
tcacagatggctgatttataatagtc

SEQ ID NO: 60615 - DNA, 26 bp, Homo sapiens
cacagatggctgatttataatagtca

SEQ ID NO: 60616 - DNA, 26 bp, Homo sapiens
acagatggctgatttataatagtcac

SEQ ID NO: 60617 - DNA, 26 bp, Homo sapiens
cagatggctgatttataatagtcaca

SEQ ID NO: 60618 - DNA, 26 bp, Homo sapiens
agatggctgatttataatagtcacag

SEQ ID NO: 60619 - DNA, 26 bp, Homo sapiens
gatggctgatttataatagtcacagg

SEQ ID NO: 60620 - DNA, 26 bp, Homo sapiens
atggctgatttataatagtcacaggc

SEQ ID NO: 60621 - DNA, 26 bp, Homo sapiens
tggctgatttataatagtcacaggct

SEQ ID NO: 60622 - DNA, 26 bp, Homo sapiens
ggctgatttataatagtcacaggctt

SEQ ID NO: 60623 - DNA, 26 bp, Homo sapiens
gctgatttataatagtcacaggcttt

SEQ ID NO: 60624 - DNA, 26 bp, Homo sapiens
ctgatttataatagtcacaggctttg

SEQ ID NO: 60625 - DNA, 26 bp, Homo sapiens
tgatttataatagtcacaggctttgt

SEQ ID NO: 60626 - DNA, 26 bp, Homo sapiens
gatttataatagtcacaggctttgtt

SEQ ID NO: 60627 - DNA, 26 bp, Homo sapiens
atttataatagtcacaggctttgttg

SEQ ID NO: 60628 - DNA, 26 bp, Homo sapiens
tttataatagtcacaggctttgttgt

SEQ ID NO: 60629 - DNA, 26 bp, Homo sapiens
ttataatagtcacaggctttgttgtg

SEQ ID NO: 60630 - DNA, 26 bp, Homo sapiens
tataatagtcacaggctttgttgtgg

SEQ ID NO: 60631 - DNA, 26 bp, Homo sapiens
ataatagtcacaggctttgttgtggt

SEQ ID NO: 60632 - DNA, 26 bp, Homo sapiens
taatagtcacaggctttgttgtggtg

SEQ ID NO: 60633 - DNA, 26 bp, Homo sapiens
aatagtcacaggctttgttgtggtgg

SEQ ID NO: 60634 - DNA, 26 bp, Homo sapiens
atagtcacaggctttgttgtggtggt

SEQ ID NO: 60635 - DNA, 26 bp, Homo sapiens
tagtcacaggctttgttgtggtggtt

SEQ ID NO: 60636 - DNA, 26 bp, Homo sapiens
agtcacaggctttgttgtggtggtta

SEQ ID NO: 60637 - DNA, 26 bp, Homo sapiens
gtcacaggctttgttgtggtggttac

SEQ ID NO: 60638 - DNA, 26 bp, Homo sapiens
tcacaggctttgttgtggtggttaca

SEQ ID NO: 60639 - DNA, 26 bp, Homo sapiens
cacaggctttgttgtggtggttacag

SEQ ID NO: 60640 - DNA, 26 bp, Homo sapiens
acaggctttgttgtggtggttacagg

SEQ ID NO: 60641 - DNA, 26 bp, Homo sapiens
caggctttgttgtggtggttacaggc

SEQ ID NO: 60642 - DNA, 26 bp, Homo sapiens
aggctttgttgtggtggttacaggct

SEQ ID NO: 60643 - DNA, 26 bp, Homo sapiens
ggctttgttgtggtggttacaggctt

SEQ ID NO: 60644 - DNA, 26 bp, Homo sapiens
gctttgttgtggtggttacaggcttt

SEQ ID NO: 60645 - DNA, 26 bp, Homo sapiens
ctttgttgtggtggttacaggctttg

SEQ ID NO: 60646 - DNA, 26 bp, Homo sapiens
tttgttgtggtggttacaggctttgt

SEQ ID NO: 60647 - DNA, 26 bp, Homo sapiens
ttgttgtggtggttacaggctttgtt

SEQ ID NO: 60648 - DNA, 26 bp, Homo sapiens
tgttgtggtggttacaggctttgttg

SEQ ID NO: 60649 - DNA, 26 bp, Homo sapiens
gttgtggtggttacaggctttgttgt

SEQ ID NO: 60650 - DNA, 26 bp, Homo sapiens
ttgtggtggttacaggctttgttgtg

SEQ ID NO: 60651 - DNA, 26 bp, Homo sapiens
tgtggtggttacaggctttgttgtgg

SEQ ID NO: 60652 - DNA, 26 bp, Homo sapiens
gtggtggttacaggctttgttgtggt

SEQ ID NO: 60653 - DNA, 26 bp, Homo sapiens
tggtggttacaggctttgttgtggtg

SEQ ID NO: 60654 - DNA, 26 bp, Homo sapiens
ggtggttacaggctttgttgtggtgg

SEQ ID NO: 60655 - DNA, 26 bp, Homo sapiens
gtggttacaggctttgttgtggtggt

SEQ ID NO: 60656 - DNA, 26 bp, Homo sapiens
tggttacaggctttgttgtggtggtc

SEQ ID NO: 60657 - DNA, 26 bp, Homo sapiens
ggttacaggctttgttgtggtggtca

SEQ ID NO: 60658 - DNA, 26 bp, Homo sapiens
gttacaggctttgttgtggtggtcac

SEQ ID NO: 60659 - DNA, 26 bp, Homo sapiens
ttacaggctttgttgtggtggtcacc

SEQ ID NO: 60660 - DNA, 26 bp, Homo sapiens
tacaggctttgttgtggtggtcaccg

SEQ ID NO: 60661 - DNA, 26 bp, Homo sapiens
acaggctttgttgtggtggtcaccgg

SEQ ID NO: 60662 - DNA, 26 bp, Homo sapiens
caggctttgttgtggtggtcaccggc

SEQ ID NO: 60663 - DNA, 26 bp, Homo sapiens
aggctttgttgtggtggtcaccggct

SEQ ID NO: 60664 - DNA, 26 bp, Homo sapiens
ggctttgttgtggtggtcaccggctt

SEQ ID NO: 60665 - DNA, 26 bp, Homo sapiens
gctttgttgtggtggtcaccggcttc

SEQ ID NO: 60666 - DNA, 26 bp, Homo sapiens
ctttgttgtggtggtcaccggcttcg

SEQ ID NO: 60667 - DNA, 26 bp, Homo sapiens
tttgttgtggtggtcaccggcttcgt

SEQ ID NO: 60668 - DNA, 26 bp, Homo sapiens
ttgttgtggtggtcaccggcttcgtc

SEQ ID NO: 60669 - DNA, 26 bp, Homo sapiens
tgttgtggtggtcaccggcttcgtcg

SEQ ID NO: 60670 - DNA, 26 bp, Homo sapiens
gttgtggtggtcaccggcttcgtcgt

SEQ ID NO: 60671 - DNA, 26 bp, Homo sapiens
ttgtggtggtcaccggcttcgtcgta

SEQ ID NO: 60672 - DNA, 26 bp, Homo sapiens
tgtggtggtcaccggcttcgtcgtag

SEQ ID NO: 60673 - DNA, 26 bp, Homo sapiens
gtggtggtcaccggcttcgtcgtagt

SEQ ID NO: 60674 - DNA, 26 bp, Homo sapiens
tggtggtcaccggcttcgtcgtagtc

SEQ ID NO: 60675 - DNA, 26 bp, Homo sapiens
ggtggtcaccggcttcgtcgtagtca

SEQ ID NO: 60676 - DNA, 26 bp, Homo sapiens
gtggtcaccggcttcgtcgtagtcac

SEQ ID NO: 60677 - DNA, 26 bp, Homo sapiens
tggtcaccggcttcgtcgtagtcacc

SEQ ID NO: 60678 - DNA, 26 bp, Homo sapiens
ggtcaccggcttcgtcgtagtcaccg

SEQ ID NO: 60679 - DNA, 26 bp, Homo sapiens
gtcaccggcttcgtcgtagtcaccgg

SEQ ID NO: 60680 - DNA, 26 bp, Homo sapiens
tcaccggcttcgtcgtagtcaccggc

SEQ ID NO: 60681 - DNA, 26 bp, Homo sapiens
caccggcttcgtcgtagtcaccggct

SEQ ID NO: 60682 - DNA, 26 bp, Homo sapiens
accggcttcgtcgtagtcaccggctt

SEQ ID NO: 60683 - DNA, 26 bp, Homo sapiens
ccggcttcgtcgtagtcaccggcttc

SEQ ID NO: 60684 - DNA, 26 bp, Homo sapiens
cggcttcgtcgtagtcaccggcttcg

SEQ ID NO: 60685 - DNA, 26 bp, Homo sapiens
ggcttcgtcgtagtcaccggcttcgt

SEQ ID NO: 60686 - DNA, 26 bp, Homo sapiens
gcttcgtcgtagtcaccggcttcgtt

SEQ ID NO: 60687 - DNA, 26 bp, Homo sapiens
cttcgtcgtagtcaccggcttcgttg

SEQ ID NO: 60688 - DNA, 26 bp, Homo sapiens
ttcgtcgtagtcaccggcttcgttgt

SEQ ID NO: 60689 - DNA, 26 bp, Homo sapiens
tcgtcgtagtcaccggcttcgttgtc

SEQ ID NO: 60690 - DNA, 26 bp, Homo sapiens
cgtcgtagtcaccggcttcgttgtcg

SEQ ID NO: 60691 - DNA, 26 bp, Homo sapiens
gtcgtagtcaccggcttcgttgtcgt

SEQ ID NO: 60692 - DNA, 26 bp, Homo sapiens
tcgtagtcaccggcttcgttgtcgtc

SEQ ID NO: 60693 - DNA, 26 bp, Homo sapiens
cgtagtcaccggcttcgttgtcgtca

SEQ ID NO: 60694 - DNA, 26 bp, Homo sapiens
gtagtcaccggcttcgttgtcgtcac

SEQ ID NO: 60695 - DNA, 26 bp, Homo sapiens
tagtcaccggcttcgttgtcgtcact

SEQ ID NO: 60696 - DNA, 26 bp, Homo sapiens
agtcaccggcttcgttgtcgtcactg

SEQ ID NO: 60697 - DNA, 26 bp, Homo sapiens
gtcaccggcttcgttgtcgtcactgg

SEQ ID NO: 60698 - DNA, 26 bp, Homo sapiens
tcaccggcttcgttgtcgtcactggg

SEQ ID NO: 60699 - DNA, 26 bp, Homo sapiens
caccggcttcgttgtcgtcactgggt

SEQ ID NO: 60700 - DNA, 26 bp, Homo sapiens
accggcttcgttgtcgtcactgggtt

SEQ ID NO: 60701 - DNA, 26 bp, Homo sapiens
ccggcttcgttgtcgtcactgggttg

SEQ ID NO: 60702 - DNA, 26 bp, Homo sapiens
cggcttcgttgtcgtcactgggttgg

SEQ ID NO: 60703 - DNA, 26 bp, Homo sapiens
ggcttcgttgtcgtcactgggttgga

SEQ ID NO: 60704 - DNA, 26 bp, Homo sapiens
gcttcgttgtcgtcactgggttggat

SEQ ID NO: 60705 - DNA, 26 bp, Homo sapiens
cttcgttgtcgtcactgggttggatg

SEQ ID NO: 60706 - DNA, 26 bp, Homo sapiens
ttcgttgtcgtcactgggttggatgt

SEQ ID NO: 60707 - DNA, 26 bp, Homo sapiens
tcgttgtcgtcactgggttggatgta

SEQ ID NO: 60708 - DNA, 26 bp, Homo sapiens
cgttgtcgtcactgggttggatgtag

SEQ ID NO: 60709 - DNA, 26 bp, Homo sapiens
gttgtcgtcactgggttggatgtagg

SEQ ID NO: 60710 - DNA, 26 bp, Homo sapiens
ttgtcgtcactgggttggatgtagga

SEQ ID NO: 60711 - DNA, 26 bp, Homo sapiens
tgtcgtcactgggttggatgtaggac

SEQ ID NO: 60712 - DNA, 26 bp, Homo sapiens
gtcgtcactgggttggatgtaggact

SEQ ID NO: 60713 - DNA, 26 bp, Homo sapiens
tcgtcactgggttggatgtaggactt

SEQ ID NO: 60714 - DNA, 26 bp, Homo sapiens
cgtcactgggttggatgtaggacttg

SEQ ID NO: 60715 - DNA, 26 bp, Homo sapiens
gtcactgggttggatgtaggacttga

SEQ ID NO: 60716 - DNA, 26 bp, Homo sapiens
tcactgggttggatgtaggacttgaa

SEQ ID NO: 60717 - DNA, 26 bp, Homo sapiens
cactgggttggatgtaggacttgaag

SEQ ID NO: 60718 - DNA, 26 bp, Homo sapiens
actgggttggatgtaggacttgaagt

SEQ ID NO: 60719 - DNA, 26 bp, Homo sapiens
ctgggttggatgtaggacttgaagta

SEQ ID NO: 60720 - DNA, 26 bp, Homo sapiens
tgggttggatgtaggacttgaagtaa

SEQ ID NO: 60721 - DNA, 26 bp, Homo sapiens
gggttggatgtaggacttgaagtaac

SEQ ID NO: 60722 - DNA, 26 bp, Homo sapiens
ggttggatgtaggacttgaagtaacg

SEQ ID NO: 60723 - DNA, 26 bp, Homo sapiens
gttggatgtaggacttgaagtaacgt

SEQ ID NO: 60724 - DNA, 26 bp, Homo sapiens
ttggatgtaggacttgaagtaacgtt

SEQ ID NO: 60725 - DNA, 26 bp, Homo sapiens
tggatgtaggacttgaagtaacgtta

SEQ ID NO: 60726 - DNA, 26 bp, Homo sapiens
ggatgtaggacttgaagtaacgttat

SEQ ID NO: 60727 - DNA, 26 bp, Homo sapiens
gatgtaggacttgaagtaacgttatt

SEQ ID NO: 60728 - DNA, 26 bp, Homo sapiens
atgtaggacttgaagtaacgttattc

SEQ ID NO: 60729 - DNA, 26 bp, Homo sapiens
tgtaggacttgaagtaacgttattcg

SEQ ID NO: 60730 - DNA, 26 bp, Homo sapiens
gtaggacttgaagtaacgttattcgg

SEQ ID NO: 60731 - DNA, 26 bp, Homo sapiens
taggacttgaagtaacgttattcgga

SEQ ID NO: 60732 - DNA, 26 bp, Homo sapiens
aggacttgaagtaacgttattcggaa

SEQ ID NO: 60733 - DNA, 26 bp, Homo sapiens
ggacttgaagtaacgttattcggaac

SEQ ID NO: 60734 - DNA, 26 bp, Homo sapiens
gacttgaagtaacgttattcggaaca

SEQ ID NO: 60735 - DNA, 26 bp, Homo sapiens
acttgaagtaacgttattcggaacat

SEQ ID NO: 60736 - DNA, 26 bp, Homo sapiens
cttgaagtaacgttattcggaacatt

SEQ ID NO: 60737 - DNA, 26 bp, Homo sapiens
ttgaagtaacgttattcggaacattt

SEQ ID NO: 60738 - DNA, 26 bp, Homo sapiens
tgaagtaacgttattcggaacattta

SEQ ID NO: 60739 - DNA, 26 bp, Homo sapiens
gaagtaacgttattcggaacatttac

SEQ ID NO: 60740 - DNA, 26 bp, Homo sapiens
aagtaacgttattcggaacatttact

SEQ ID NO: 60741 - DNA, 26 bp, Homo sapiens
agtaacgttattcggaacatttactt

SEQ ID NO: 60742 - DNA, 26 bp, Homo sapiens
gtaacgttattcggaacatttacttg

SEQ ID NO: 60743 - DNA, 26 bp, Homo sapiens
taacgttattcggaacatttacttgt

SEQ ID NO: 60744 - DNA, 26 bp, Homo sapiens
aacgttattcggaacatttacttgtt

SEQ ID NO: 60745 - DNA, 26 bp, Homo sapiens
acgttattcggaacatttacttgttt

SEQ ID NO: 60746 - DNA, 26 bp, Homo sapiens
cgttattcggaacatttacttgtttg

SEQ ID NO: 60747 - DNA, 26 bp, Homo sapiens
gttattcggaacatttacttgtttgt

SEQ ID NO: 60748 - DNA, 26 bp, Homo sapiens
ttattcggaacatttacttgtttgtg

SEQ ID NO: 60749 - DNA, 26 bp, Homo sapiens
tattcggaacatttacttgtttgtga

SEQ ID NO: 60750 - DNA, 26 bp, Homo sapiens
attcggaacatttacttgtttgtgac

SEQ ID NO: 60751 - DNA, 26 bp, Homo sapiens
ttcggaacatttacttgtttgtgacc

SEQ ID NO: 60752 - DNA, 26 bp, Homo sapiens
tcggaacatttacttgtttgtgacca

SEQ ID NO: 60753 - DNA, 26 bp, Homo sapiens
cggaacatttacttgtttgtgaccaa

SEQ ID NO: 60754 - DNA, 26 bp, Homo sapiens
ggaacatttacttgtttgtgaccaaa

SEQ ID NO: 60755 - DNA, 26 bp, Homo sapiens
gaacatttacttgtttgtgaccaaac

SEQ ID NO: 60756 - DNA, 26 bp, Homo sapiens
aacatttacttgtttgtgaccaaact

SEQ ID NO: 60757 - DNA, 26 bp, Homo sapiens
acatttacttgtttgtgaccaaactt

SEQ ID NO: 60758 - DNA, 26 bp, Homo sapiens
catttacttgtttgtgaccaaacttc

SEQ ID NO: 60759 - DNA, 26 bp, Homo sapiens
atttacttgtttgtgaccaaacttca

SEQ ID NO: 60760 - DNA, 26 bp, Homo sapiens
tttacttgtttgtgaccaaacttcac

SEQ ID NO: 60761 - DNA, 26 bp, Homo sapiens
ttacttgtttgtgaccaaacttcaca

SEQ ID NO: 60762 - DNA, 26 bp, Homo sapiens
tacttgtttgtgaccaaacttcacaa

SEQ ID NO: 60763 - DNA, 26 bp, Homo sapiens
acttgtttgtgaccaaacttcacaag

SEQ ID NO: 60764 - DNA, 26 bp, Homo sapiens
cttgtttgtgaccaaacttcacaagg

SEQ ID NO: 60765 - DNA, 26 bp, Homo sapiens
ttgtttgtgaccaaacttcacaaggt

SEQ ID NO: 60766 - DNA, 26 bp, Homo sapiens
tgtttgtgaccaaacttcacaaggtt

SEQ ID NO: 60767 - DNA, 26 bp, Homo sapiens
gtttgtgaccaaacttcacaaggttc

SEQ ID NO: 60768 - DNA, 26 bp, Homo sapiens
tttgtgaccaaacttcacaaggttct

SEQ ID NO: 60769 - DNA, 26 bp, Homo sapiens
ttgtgaccaaacttcacaaggttctt

SEQ ID NO: 60770 - DNA, 26 bp, Homo sapiens
tgtgaccaaacttcacaaggttcttt

SEQ ID NO: 60771 - DNA, 26 bp, Homo sapiens
gtgaccaaacttcacaaggttctttg

SEQ ID NO: 60772 - DNA, 26 bp, Homo sapiens
tgaccaaacttcacaaggttctttgt

SEQ ID NO: 60773 - DNA, 26 bp, Homo sapiens
gaccaaacttcacaaggttctttgtg

SEQ ID NO: 60774 - DNA, 26 bp, Homo sapiens
accaaacttcacaaggttctttgtgg

SEQ ID NO: 60775 - DNA, 26 bp, Homo sapiens
ccaaacttcacaaggttctttgtggg

SEQ ID NO: 60776 - DNA, 26 bp, Homo sapiens
caaacttcacaaggttctttgtgggt

SEQ ID NO: 60777 - DNA, 26 bp, Homo sapiens
aaacttcacaaggttctttgtgggtt

SEQ ID NO: 60778 - DNA, 26 bp, Homo sapiens
aacttcacaaggttctttgtgggttg

SEQ ID NO: 60779 - DNA, 26 bp, Homo sapiens
acttcacaaggttctttgtgggttgg

SEQ ID NO: 60780 - DNA, 26 bp, Homo sapiens
cttcacaaggttctttgtgggttggt

SEQ ID NO: 60781 - DNA, 26 bp, Homo sapiens
ttcacaaggttctttgtgggttggtc

SEQ ID NO: 60782 - DNA, 26 bp, Homo sapiens
tcacaaggttctttgtgggttggtcc

SEQ ID NO: 60783 - DNA, 26 bp, Homo sapiens
cacaaggttctttgtgggttggtccc

SEQ ID NO: 60784 - DNA, 26 bp, Homo sapiens
acaaggttctttgtgggttggtcccc

SEQ ID NO: 60785 - DNA, 26 bp, Homo sapiens
caaggttctttgtgggttggtcccct

SEQ ID NO: 60786 - DNA, 26 bp, Homo sapiens
aaggttctttgtgggttggtcccctt

SEQ ID NO: 60787 - DNA, 26 bp, Homo sapiens
aggttctttgtgggttggtccccttg

SEQ ID NO: 60788 - DNA, 26 bp, Homo sapiens
ggttctttgtgggttggtccccttgg

SEQ ID NO: 60789 - DNA, 26 bp, Homo sapiens
gttctttgtgggttggtccccttgga

SEQ ID NO: 60790 - DNA, 26 bp, Homo sapiens
ttctttgtgggttggtccccttggaa

SEQ ID NO: 60791 - DNA, 26 bp, Homo sapiens
tctttgtgggttggtccccttggaac

SEQ ID NO: 60792 - DNA, 26 bp, Homo sapiens
ctttgtgggttggtccccttggaacc

SEQ ID NO: 60793 - DNA, 26 bp, Homo sapiens
tttgtgggttggtccccttggaacca

SEQ ID NO: 60794 - DNA, 26 bp, Homo sapiens
ttgtgggttggtccccttggaaccaa

SEQ ID NO: 60795 - DNA, 26 bp, Homo sapiens
tgtgggttggtccccttggaaccaat

SEQ ID NO: 60796 - DNA, 26 bp, Homo sapiens
gtgggttggtccccttggaaccaatc

SEQ ID NO: 60797 - DNA, 26 bp, Homo sapiens
tgggttggtccccttggaaccaatca

SEQ ID NO: 60798 - DNA, 26 bp, Homo sapiens
gggttggtccccttggaaccaatcac

SEQ ID NO: 60799 - DNA, 26 bp, Homo sapiens
ggttggtccccttggaaccaatcaca

SEQ ID NO: 60800 - DNA, 26 bp, Homo sapiens
gttggtccccttggaaccaatcacac

SEQ ID NO: 60801 - DNA, 26 bp, Homo sapiens
ttggtccccttggaaccaatcacact

SEQ ID NO: 60802 - DNA, 26 bp, Homo sapiens
tggtccccttggaaccaatcacactg

SEQ ID NO: 60803 - DNA, 26 bp, Homo sapiens
ggtccccttggaaccaatcacactgt

SEQ ID NO: 60804 - DNA, 26 bp, Homo sapiens
gtccccttggaaccaatcacactgtt

SEQ ID NO: 60805 - DNA, 26 bp, Homo sapiens
tccccttggaaccaatcacactgttt

SEQ ID NO: 60806 - DNA, 26 bp, Homo sapiens
ccccttggaaccaatcacactgtttc

SEQ ID NO: 60807 - DNA, 26 bp, Homo sapiens
cccttggaaccaatcacactgtttcc

SEQ ID NO: 60808 - DNA, 26 bp, Homo sapiens
ccttggaaccaatcacactgtttcct

SEQ ID NO: 60809 - DNA, 26 bp, Homo sapiens
cttggaaccaatcacactgtttcctg

SEQ ID NO: 60810 - DNA, 26 bp, Homo sapiens
ttggaaccaatcacactgtttcctga

SEQ ID NO: 60811 - DNA, 26 bp, Homo sapiens
tggaaccaatcacactgtttcctgat

SEQ ID NO: 60812 - DNA, 26 bp, Homo sapiens
ggaaccaatcacactgtttcctgata

SEQ ID NO: 60813 - DNA, 26 bp, Homo sapiens
gaaccaatcacactgtttcctgatat

SEQ ID NO: 60814 - DNA, 26 bp, Homo sapiens
aaccaatcacactgtttcctgatatc

SEQ ID NO: 60815 - DNA, 26 bp, Homo sapiens
accaatcacactgtttcctgatatct

SEQ ID NO: 60816 - DNA, 26 bp, Homo sapiens
ccaatcacactgtttcctgatatctg

SEQ ID NO: 60817 - DNA, 26 bp, Homo sapiens
caatcacactgtttcctgatatctgg

SEQ ID NO: 60818 - DNA, 26 bp, Homo sapiens
aatcacactgtttcctgatatctggg

SEQ ID NO: 60819 - DNA, 26 bp, Homo sapiens
atcacactgtttcctgatatctgggg

SEQ ID NO: 60820 - DNA, 26 bp, Homo sapiens
tcacactgtttcctgatatctgggga

SEQ ID NO: 60821 - DNA, 26 bp, Homo sapiens
cacactgtttcctgatatctggggac

SEQ ID NO: 60822 - DNA, 26 bp, Homo sapiens
acactgtttcctgatatctggggaca

SEQ ID NO: 60823 - DNA, 26 bp, Homo sapiens
cactgtttcctgatatctggggacaa

SEQ ID NO: 60824 - DNA, 26 bp, Homo sapiens
actgtttcctgatatctggggacaag

SEQ ID NO: 60825 - DNA, 26 bp, Homo sapiens
ctgtttcctgatatctggggacaagt

SEQ ID NO: 60826 - DNA, 26 bp, Homo sapiens
tgtttcctgatatctggggacaagta

SEQ ID NO: 60827 - DNA, 26 bp, Homo sapiens
gtttcctgatatctggggacaagtaa

SEQ ID NO: 60828 - DNA, 26 bp, Homo sapiens
tttcctgatatctggggacaagtaaa

SEQ ID NO: 60829 - DNA, 26 bp, Homo sapiens
ttcctgatatctggggacaagtaaaa

SEQ ID NO: 60830 - DNA, 26 bp, Homo sapiens
tcctgatatctggggacaagtaaaaa

SEQ ID NO: 60831 - DNA, 26 bp, Homo sapiens
cctgatatctggggacaagtaaaaag

SEQ ID NO: 60832 - DNA, 26 bp, Homo sapiens
ctgatatctggggacaagtaaaaagc

SEQ ID NO: 60833 - DNA, 26 bp, Homo sapiens
tgatatctggggacaagtaaaaagca

SEQ ID NO: 60834 - DNA, 26 bp, Homo sapiens
gatatctggggacaagtaaaaagcat

SEQ ID NO: 60835 - DNA, 26 bp, Homo sapiens
atatctggggacaagtaaaaagcatt

SEQ ID NO: 60836 - DNA, 26 bp, Homo sapiens
tatctggggacaagtaaaaagcattt

SEQ ID NO: 60837 - DNA, 26 bp, Homo sapiens
atctggggacaagtaaaaagcatttt

SEQ ID NO: 60838 - DNA, 26 bp, Homo sapiens
tctggggacaagtaaaaagcattttc

SEQ ID NO: 60839 - DNA, 26 bp, Homo sapiens
ctggggacaagtaaaaagcattttca

SEQ ID NO: 60840 - DNA, 26 bp, Homo sapiens
tggggacaagtaaaaagcattttcac

SEQ ID NO: 60841 - DNA, 26 bp, Homo sapiens
ggggacaagtaaaaagcattttcact

SEQ ID NO: 60842 - DNA, 26 bp, Homo sapiens
gggacaagtaaaaagcattttcactg

SEQ ID NO: 60843 - DNA, 26 bp, Homo sapiens
ggacaagtaaaaagcattttcactgc

SEQ ID NO: 60844 - DNA, 26 bp, Homo sapiens
gacaagtaaaaagcattttcactgct

SEQ ID NO: 60845 - DNA, 26 bp, Homo sapiens
acaagtaaaaagcattttcactgctg

SEQ ID NO: 60846 - DNA, 26 bp, Homo sapiens
caagtaaaaagcattttcactgctga

SEQ ID NO: 60847 - DNA, 26 bp, Homo sapiens
aagtaaaaagcattttcactgctgac

SEQ ID NO: 60848 - DNA, 26 bp, Homo sapiens
agtaaaaagcattttcactgctgacg

SEQ ID NO: 60849 - DNA, 26 bp, Homo sapiens
gtaaaaagcattttcactgctgacga

SEQ ID NO: 60850 - DNA, 26 bp, Homo sapiens
taaaaagcattttcactgctgacgaa

SEQ ID NO: 60851 - DNA, 26 bp, Homo sapiens
aaaaagcattttcactgctgacgaag

SEQ ID NO: 60852 - DNA, 26 bp, Homo sapiens
aaaagcattttcactgctgacgaagg

SEQ ID NO: 60853 - DNA, 26 bp, Homo sapiens
aaagcattttcactgctgacgaagga

SEQ ID NO: 60854 - DNA, 26 bp, Homo sapiens
aagcattttcactgctgacgaaggat

SEQ ID NO: 60855 - DNA, 26 bp, Homo sapiens
agcattttcactgctgacgaaggatg

SEQ ID NO: 60856 - DNA, 26 bp, Homo sapiens
gcattttcactgctgacgaaggatgg

SEQ ID NO: 60857 - DNA, 26 bp, Homo sapiens
cattttcactgctgacgaaggatggc

SEQ ID NO: 60858 - DNA, 26 bp, Homo sapiens
attttcactgctgacgaaggatggca

SEQ ID NO: 60859 - DNA, 26 bp, Homo sapiens
ttttcactgctgacgaaggatggcaa

SEQ ID NO: 60860 - DNA, 26 bp, Homo sapiens
tttcactgctgacgaaggatggcaac

SEQ ID NO: 60861 - DNA, 26 bp, Homo sapiens
ttcactgctgacgaaggatggcaaca

SEQ ID NO: 60862 - DNA, 26 bp, Homo sapiens
tcactgctgacgaaggatggcaacag

SEQ ID NO: 60863 - DNA, 26 bp, Homo sapiens
cactgctgacgaaggatggcaacagc

SEQ ID NO: 60864 - DNA, 26 bp, Homo sapiens
actgctgacgaaggatggcaacagcc

SEQ ID NO: 60865 - DNA, 26 bp, Homo sapiens
ctgctgacgaaggatggcaacagcct

SEQ ID NO: 60866 - DNA, 26 bp, Homo sapiens
tgctgacgaaggatggcaacagcctc

SEQ ID NO: 60867 - DNA, 26 bp, Homo sapiens
gctgacgaaggatggcaacagcctcc

SEQ ID NO: 60868 - DNA, 26 bp, Homo sapiens
ctgacgaaggatggcaacagcctccc

SEQ ID NO: 60869 - DNA, 26 bp, Homo sapiens
tgacgaaggatggcaacagcctcccg

SEQ ID NO: 60870 - DNA, 26 bp, Homo sapiens
gacgaaggatggcaacagcctcccga

SEQ ID NO: 60871 - DNA, 26 bp, Homo sapiens
acgaaggatggcaacagcctcccgaa

SEQ ID NO: 60872 - DNA, 26 bp, Homo sapiens
cgaaggatggcaacagcctcccgaag

SEQ ID NO: 60873 - DNA, 26 bp, Homo sapiens
gaaggatggcaacagcctcccgaagc

SEQ ID NO: 60874 - DNA, 26 bp, Homo sapiens
aaggatggcaacagcctcccgaagcg

SEQ ID NO: 60875 - DNA, 26 bp, Homo sapiens
aggatggcaacagcctcccgaagcgc

SEQ ID NO: 60876 - DNA, 26 bp, Homo sapiens
ggatggcaacagcctcccgaagcgca

SEQ ID NO: 60877 - DNA, 26 bp, Homo sapiens
gatggcaacagcctcccgaagcgcat

SEQ ID NO: 60878 - DNA, 26 bp, Homo sapiens
atggcaacagcctcccgaagcgcatc

SEQ ID NO: 60879 - DNA, 26 bp, Homo sapiens
tggcaacagcctcccgaagcgcatca

SEQ ID NO: 60880 - DNA, 26 bp, Homo sapiens
ggcaacagcctcccgaagcgcatcaa

SEQ ID NO: 60881 - DNA, 26 bp, Homo sapiens
gcaacagcctcccgaagcgcatcaaa

SEQ ID NO: 60882 - DNA, 26 bp, Homo sapiens
caacagcctcccgaagcgcatcaaag

SEQ ID NO: 60883 - DNA, 26 bp, Homo sapiens
aacagcctcccgaagcgcatcaaagg

SEQ ID NO: 60884 - DNA, 26 bp, Homo sapiens
acagcctcccgaagcgcatcaaaggc

SEQ ID NO: 60885 - DNA, 26 bp, Homo sapiens
cagcctcccgaagcgcatcaaaggct

SEQ ID NO: 60886 - DNA, 26 bp, Homo sapiens
agcctcccgaagcgcatcaaaggctc

SEQ ID NO: 60887 - DNA, 26 bp, Homo sapiens
gcctcccgaagcgcatcaaaggctcc

SEQ ID NO: 60888 - DNA, 26 bp, Homo sapiens
cctcccgaagcgcatcaaaggctcct

SEQ ID NO: 60889 - DNA, 26 bp, Homo sapiens
ctcccgaagcgcatcaaaggctcctc

SEQ ID NO: 60890 - DNA, 26 bp, Homo sapiens
tcccgaagcgcatcaaaggctcctcg

SEQ ID NO: 60891 - DNA, 26 bp, Homo sapiens
cccgaagcgcatcaaaggctcctcgt

SEQ ID NO: 60892 - DNA, 26 bp, Homo sapiens
ccgaagcgcatcaaaggctcctcgtt

SEQ ID NO: 60893 - DNA, 26 bp, Homo sapiens
cgaagcgcatcaaaggctcctcgttg

SEQ ID NO: 60894 - DNA, 26 bp, Homo sapiens
gaagcgcatcaaaggctcctcgttga

SEQ ID NO: 60895 - DNA, 26 bp, Homo sapiens
aagcgcatcaaaggctcctcgttgag

SEQ ID NO: 60896 - DNA, 26 bp, Homo sapiens
agcgcatcaaaggctcctcgttgagc

SEQ ID NO: 60897 - DNA, 26 bp, Homo sapiens
gcgcatcaaaggctcctcgttgagct

SEQ ID NO: 60898 - DNA, 26 bp, Homo sapiens
cgcatcaaaggctcctcgttgagctc

SEQ ID NO: 60899 - DNA, 26 bp, Homo sapiens
gcatcaaaggctcctcgttgagctcg

SEQ ID NO: 60900 - DNA, 26 bp, Homo sapiens
catcaaaggctcctcgttgagctcgg

SEQ ID NO: 60901 - DNA, 26 bp, Homo sapiens
atcaaaggctcctcgttgagctcggt

SEQ ID NO: 60902 - DNA, 26 bp, Homo sapiens
tcaaaggctcctcgttgagctcggtg

SEQ ID NO: 60903 - DNA, 26 bp, Homo sapiens
caaaggctcctcgttgagctcggtgg

SEQ ID NO: 60904 - DNA, 26 bp, Homo sapiens
aaaggctcctcgttgagctcggtgga

SEQ ID NO: 60905 - DNA, 26 bp, Homo sapiens
aaggctcctcgttgagctcggtggac

SEQ ID NO: 60906 - DNA, 26 bp, Homo sapiens
aggctcctcgttgagctcggtggact

SEQ ID NO: 60907 - DNA, 26 bp, Homo sapiens
ggctcctcgttgagctcggtggactt

SEQ ID NO: 60908 - DNA, 26 bp, Homo sapiens
gctcctcgttgagctcggtggacttg

SEQ ID NO: 60909 - DNA, 26 bp, Homo sapiens
ctcctcgttgagctcggtggacttgt

SEQ ID NO: 60910 - DNA, 26 bp, Homo sapiens
tcctcgttgagctcggtggacttgtc

SEQ ID NO: 60911 - DNA, 26 bp, Homo sapiens
cctcgttgagctcggtggacttgtcc

SEQ ID NO: 60912 - DNA, 26 bp, Homo sapiens
ctcgttgagctcggtggacttgtcca

SEQ ID NO: 60913 - DNA, 26 bp, Homo sapiens
tcgttgagctcggtggacttgtccac

SEQ ID NO: 60914 - DNA, 26 bp, Homo sapiens
cgttgagctcggtggacttgtccact

SEQ ID NO: 60915 - DNA, 26 bp, Homo sapiens
gttgagctcggtggacttgtccacta

SEQ ID NO: 60916 - DNA, 26 bp, Homo sapiens
ttgagctcggtggacttgtccactaa

SEQ ID NO: 60917 - DNA, 26 bp, Homo sapiens
tgagctcggtggacttgtccactaat

SEQ ID NO: 60918 - DNA, 26 bp, Homo sapiens
gagctcggtggacttgtccactaatt

SEQ ID NO: 60919 - DNA, 26 bp, Homo sapiens
agctcggtggacttgtccactaattt

SEQ ID NO: 60920 - DNA, 26 bp, Homo sapiens
gctcggtggacttgtccactaatttg

SEQ ID NO: 60921 - DNA, 26 bp, Homo sapiens
ctcggtggacttgtccactaatttga

SEQ ID NO: 60922 - DNA, 26 bp, Homo sapiens
tcggtggacttgtccactaatttgaa

SEQ ID NO: 60923 - DNA, 26 bp, Homo sapiens
cggtggacttgtccactaatttgaag

SEQ ID NO: 60924 - DNA, 26 bp, Homo sapiens
ggtggacttgtccactaatttgaaga

SEQ ID NO: 60925 - DNA, 26 bp, Homo sapiens
gtggacttgtccactaatttgaagaa

SEQ ID NO: 60926 - DNA, 26 bp, Homo sapiens
tggacttgtccactaatttgaagaag

SEQ ID NO: 60927 - DNA, 26 bp, Homo sapiens
ggacttgtccactaatttgaagaaga

SEQ ID NO: 60928 - DNA, 26 bp, Homo sapiens
gacttgtccactaatttgaagaagac

SEQ ID NO: 60929 - DNA, 26 bp, Homo sapiens
acttgtccactaatttgaagaagacg

SEQ ID NO: 60930 - DNA, 26 bp, Homo sapiens
cttgtccactaatttgaagaagacgt

SEQ ID NO: 60931 - DNA, 26 bp, Homo sapiens
ttgtccactaatttgaagaagacgtc

SEQ ID NO: 60932 - DNA, 26 bp, Homo sapiens
tgtccactaatttgaagaagacgtcg

SEQ ID NO: 60933 - DNA, 26 bp, Homo sapiens
gtccactaatttgaagaagacgtcgt

SEQ ID NO: 60934 - DNA, 26 bp, Homo sapiens
tccactaatttgaagaagacgtcgtt

SEQ ID NO: 60935 - DNA, 26 bp, Homo sapiens
ccactaatttgaagaagacgtcgttt

SEQ ID NO: 60936 - DNA, 26 bp, Homo sapiens
cactaatttgaagaagacgtcgtttg

SEQ ID NO: 60937 - DNA, 26 bp, Homo sapiens
actaatttgaagaagacgtcgtttgg

SEQ ID NO: 60938 - DNA, 26 bp, Homo sapiens
ctaatttgaagaagacgtcgtttggc

SEQ ID NO: 60939 - DNA, 26 bp, Homo sapiens
taatttgaagaagacgtcgtttggct

SEQ ID NO: 60940 - DNA, 26 bp, Homo sapiens
aatttgaagaagacgtcgtttggctc

SEQ ID NO: 60941 - DNA, 26 bp, Homo sapiens
atttgaagaagacgtcgtttggctca

SEQ ID NO: 60942 - DNA, 26 bp, Homo sapiens
tttgaagaagacgtcgtttggctcac

SEQ ID NO: 60943 - DNA, 26 bp, Homo sapiens
ttgaagaagacgtcgtttggctcact

SEQ ID NO: 60944 - DNA, 26 bp, Homo sapiens
tgaagaagacgtcgtttggctcactg

SEQ ID NO: 60945 - DNA, 26 bp, Homo sapiens
gaagaagacgtcgtttggctcactgg

SEQ ID NO: 60946 - DNA, 26 bp, Homo sapiens
aagaagacgtcgtttggctcactggc

SEQ ID NO: 60947 - DNA, 26 bp, Homo sapiens
agaagacgtcgtttggctcactggcg

SEQ ID NO: 60948 - DNA, 26 bp, Homo sapiens
gaagacgtcgtttggctcactggcga

SEQ ID NO: 60949 - DNA, 26 bp, Homo sapiens
aagacgtcgtttggctcactggcgaa

SEQ ID NO: 60950 - DNA, 26 bp, Homo sapiens
agacgtcgtttggctcactggcgaag

SEQ ID NO: 60951 - DNA, 26 bp, Homo sapiens
gacgtcgtttggctcactggcgaagg

SEQ ID NO: 60952 - DNA, 26 bp, Homo sapiens
acgtcgtttggctcactggcgaaggt

SEQ ID NO: 60953 - DNA, 26 bp, Homo sapiens
cgtcgtttggctcactggcgaaggtg

SEQ ID NO: 60954 - DNA, 26 bp, Homo sapiens
gtcgtttggctcactggcgaaggtgt

SEQ ID NO: 60955 - DNA, 26 bp, Homo sapiens
tcgtttggctcactggcgaaggtgta

SEQ ID NO: 60956 - DNA, 26 bp, Homo sapiens
cgtttggctcactggcgaaggtgtat

SEQ ID NO: 60957 - DNA, 26 bp, Homo sapiens
gtttggctcactggcgaaggtgtata

SEQ ID NO: 60958 - DNA, 26 bp, Homo sapiens
tttggctcactggcgaaggtgtatac

SEQ ID NO: 60959 - DNA, 26 bp, Homo sapiens
ttggctcactggcgaaggtgtatacc

SEQ ID NO: 60960 - DNA, 26 bp, Homo sapiens
tggctcactggcgaaggtgtatacct

SEQ ID NO: 60961 - DNA, 26 bp, Homo sapiens
ggctcactggcgaaggtgtatacctc

SEQ ID NO: 60962 - DNA, 26 bp, Homo sapiens
gctcactggcgaaggtgtatacctcc

SEQ ID NO: 60963 - DNA, 26 bp, Homo sapiens
ctcactggcgaaggtgtatacctcct

SEQ ID NO: 60964 - DNA, 26 bp, Homo sapiens
tcactggcgaaggtgtatacctcctt

SEQ ID NO: 60965 - DNA, 26 bp, Homo sapiens
cactggcgaaggtgtatacctccttg

SEQ ID NO: 60966 - DNA, 26 bp, Homo sapiens
actggcgaaggtgtatacctccttga

SEQ ID NO: 60967 - DNA, 26 bp, Homo sapiens
ctggcgaaggtgtatacctccttgat

SEQ ID NO: 60968 - DNA, 26 bp, Homo sapiens
tggcgaaggtgtatacctccttgatg

SEQ ID NO: 60969 - DNA, 26 bp, Homo sapiens
ggcgaaggtgtatacctccttgatgt

SEQ ID NO: 60970 - DNA, 26 bp, Homo sapiens
gcgaaggtgtatacctccttgatgtt

SEQ ID NO: 60971 - DNA, 26 bp, Homo sapiens
cgaaggtgtatacctccttgatgttc

SEQ ID NO: 60972 - DNA, 26 bp, Homo sapiens
gaaggtgtatacctccttgatgttca

SEQ ID NO: 60973 - DNA, 26 bp, Homo sapiens
aaggtgtatacctccttgatgttcac

SEQ ID NO: 60974 - DNA, 26 bp, Homo sapiens
aggtgtatacctccttgatgttcacc

SEQ ID NO: 60975 - DNA, 26 bp, Homo sapiens
ggtgtatacctccttgatgttcacct

SEQ ID NO: 60976 - DNA, 26 bp, Homo sapiens
gtgtatacctccttgatgttcacctt

SEQ ID NO: 60977 - DNA, 26 bp, Homo sapiens
tgtatacctccttgatgttcaccttc

SEQ ID NO: 60978 - DNA, 26 bp, Homo sapiens
gtatacctccttgatgttcaccttcc

SEQ ID NO: 60979 - DNA, 26 bp, Homo sapiens
tatacctccttgatgttcaccttcct

SEQ ID NO: 60980 - DNA, 26 bp, Homo sapiens
atacctccttgatgttcaccttcctg

SEQ ID NO: 60981 - DNA, 26 bp, Homo sapiens
tacctccttgatgttcaccttcctgc

SEQ ID NO: 60982 - DNA, 26 bp, Homo sapiens
acctccttgatgttcaccttcctgcc

SEQ ID NO: 60983 - DNA, 26 bp, Homo sapiens
cctccttgatgttcaccttcctgcca

SEQ ID NO: 60984 - DNA, 26 bp, Homo sapiens
ctccttgatgttcaccttcctgccaa

SEQ ID NO: 60985 - DNA, 26 bp, Homo sapiens
tccttgatgttcaccttcctgccaat

SEQ ID NO: 60986 - DNA, 26 bp, Homo sapiens
ccttgatgttcaccttcctgccaatg

SEQ ID NO: 60987 - DNA, 26 bp, Homo sapiens
cttgatgttcaccttcctgccaatgc

SEQ ID NO: 60988 - DNA, 26 bp, Homo sapiens
ttgatgttcaccttcctgccaatgcc

SEQ ID NO: 60989 - DNA, 26 bp, Homo sapiens
tgatgttcaccttcctgccaatgccc

SEQ ID NO: 60990 - DNA, 26 bp, Homo sapiens
gatgttcaccttcctgccaatgccca

SEQ ID NO: 60991 - DNA, 26 bp, Homo sapiens
atgttcaccttcctgccaatgcccag

SEQ ID NO: 60992 - DNA, 26 bp, Homo sapiens
tgttcaccttcctgccaatgcccagg

SEQ ID NO: 60993 - DNA, 26 bp, Homo sapiens
gttcaccttcctgccaatgcccagga

SEQ ID NO: 60994 - DNA, 26 bp, Homo sapiens
ttcaccttcctgccaatgcccaggac

SEQ ID NO: 60995 - DNA, 26 bp, Homo sapiens
tcaccttcctgccaatgcccaggacc

SEQ ID NO: 60996 - DNA, 26 bp, Homo sapiens
caccttcctgccaatgcccaggacca

SEQ ID NO: 60997 - DNA, 26 bp, Homo sapiens
accttcctgccaatgcccaggaccac

SEQ ID NO: 60998 - DNA, 26 bp, Homo sapiens
ccttcctgccaatgcccaggaccacg

SEQ ID NO: 60999 - DNA, 26 bp, Homo sapiens
cttcctgccaatgcccaggaccacga

SEQ ID NO: 61000 - DNA, 26 bp, Homo sapiens
ttcctgccaatgcccaggaccacgaa

SEQ ID NO: 61001 - DNA, 26 bp, Homo sapiens
tcctgccaatgcccaggaccacgaag

SEQ ID NO: 61002 - DNA, 26 bp, Homo sapiens
cctgccaatgcccaggaccacgaaga

SEQ ID NO: 61003 - DNA, 26 bp, Homo sapiens
ctgccaatgcccaggaccacgaagaa

SEQ ID NO: 61004 - DNA, 26 bp, Homo sapiens
tgccaatgcccaggaccacgaagaag

SEQ ID NO: 61005 - DNA, 26 bp, Homo sapiens
gccaatgcccaggaccacgaagaagt

SEQ ID NO: 61006 - DNA, 26 bp, Homo sapiens
ccaatgcccaggaccacgaagaagta

SEQ ID NO: 61007 - DNA, 26 bp, Homo sapiens
caatgcccaggaccacgaagaagtag

SEQ ID NO: 61008 - DNA, 26 bp, Homo sapiens
aatgcccaggaccacgaagaagtagc

SEQ ID NO: 61009 - DNA, 26 bp, Homo sapiens
atgcccaggaccacgaagaagtagcc

SEQ ID NO: 61010 - DNA, 26 bp, Homo sapiens
tgcccaggaccacgaagaagtagccc

SEQ ID NO: 61011 - DNA, 26 bp, Homo sapiens
gcccaggaccacgaagaagtagccct

SEQ ID NO: 61012 - DNA, 26 bp, Homo sapiens
cccaggaccacgaagaagtagccctt

SEQ ID NO: 61013 - DNA, 26 bp, Homo sapiens
ccaggaccacgaagaagtagcccttg

SEQ ID NO: 61014 - DNA, 26 bp, Homo sapiens
caggaccacgaagaagtagcccttgc

SEQ ID NO: 61015 - DNA, 26 bp, Homo sapiens
aggaccacgaagaagtagcccttgca

SEQ ID NO: 61016 - DNA, 26 bp, Homo sapiens
ggaccacgaagaagtagcccttgcat

SEQ ID NO: 61017 - DNA, 26 bp, Homo sapiens
gaccacgaagaagtagcccttgcatt

SEQ ID NO: 61018 - DNA, 26 bp, Homo sapiens
accacgaagaagtagcccttgcattt

SEQ ID NO: 61019 - DNA, 26 bp, Homo sapiens
ccacgaagaagtagcccttgcatttg

SEQ ID NO: 61020 - DNA, 26 bp, Homo sapiens
cacgaagaagtagcccttgcatttgg

SEQ ID NO: 61021 - DNA, 26 bp, Homo sapiens
acgaagaagtagcccttgcatttggc

SEQ ID NO: 61022 - DNA, 26 bp, Homo sapiens
cgaagaagtagcccttgcatttggcc

SEQ ID NO: 61023 - DNA, 26 bp, Homo sapiens
gaagaagtagcccttgcatttggcct

SEQ ID NO: 61024 - DNA, 26 bp, Homo sapiens
aagaagtagcccttgcatttggcctg

SEQ ID NO: 61025 - DNA, 26 bp, Homo sapiens
agaagtagcccttgcatttggcctgc

SEQ ID NO: 61026 - DNA, 26 bp, Homo sapiens
gaagtagcccttgcatttggcctgca

SEQ ID NO: 61027 - DNA, 26 bp, Homo sapiens
aagtagcccttgcatttggcctgcag

SEQ ID NO: 61028 - DNA, 26 bp, Homo sapiens
agtagcccttgcatttggcctgcagg

SEQ ID NO: 61029 - DNA, 26 bp, Homo sapiens
gtagcccttgcatttggcctgcagga

SEQ ID NO: 61030 - DNA, 26 bp, Homo sapiens
tagcccttgcatttggcctgcaggat

SEQ ID NO: 61031 - DNA, 26 bp, Homo sapiens
agcccttgcatttggcctgcaggatg

SEQ ID NO: 61032 - DNA, 26 bp, Homo sapiens
gcccttgcatttggcctgcaggatga

SEQ ID NO: 61033 - DNA, 26 bp, Homo sapiens
cccttgcatttggcctgcaggatgac

SEQ ID NO: 61034 - DNA, 26 bp, Homo sapiens
ccttgcatttggcctgcaggatgact

SEQ ID NO: 61035 - DNA, 26 bp, Homo sapiens
cttgcatttggcctgcaggatgactc

SEQ ID NO: 61036 - DNA, 26 bp, Homo sapiens
ttgcatttggcctgcaggatgactct

SEQ ID NO: 61037 - DNA, 26 bp, Homo sapiens
tgcatttggcctgcaggatgactctc

SEQ ID NO: 61038 - DNA, 26 bp, Homo sapiens
gcatttggcctgcaggatgactctct

SEQ ID NO: 61039 - DNA, 26 bp, Homo sapiens
catttggcctgcaggatgactctctg

SEQ ID NO: 61040 - DNA, 26 bp, Homo sapiens
atttggcctgcaggatgactctctgg

SEQ ID NO: 61041 - DNA, 26 bp, Homo sapiens
tttggcctgcaggatgactctctggg

SEQ ID NO: 61042 - DNA, 26 bp, Homo sapiens
ttggcctgcaggatgactctctgggc

SEQ ID NO: 61043 - DNA, 26 bp, Homo sapiens
tggcctgcaggatgactctctgggcc

SEQ ID NO: 61044 - DNA, 26 bp, Homo sapiens
ggcctgcaggatgactctctgggcct

SEQ ID NO: 61045 - DNA, 26 bp, Homo sapiens
gcctgcaggatgactctctgggcctc

SEQ ID NO: 61046 - DNA, 26 bp, Homo sapiens
cctgcaggatgactctctgggcctcc

SEQ ID NO: 61047 - DNA, 26 bp, Homo sapiens
ctgcaggatgactctctgggcctcct

SEQ ID NO: 61048 - DNA, 26 bp, Homo sapiens
tgcaggatgactctctgggcctcctc

SEQ ID NO: 61049 - DNA, 26 bp, Homo sapiens
gcaggatgactctctgggcctcctcc

SEQ ID NO: 61050 - DNA, 26 bp, Homo sapiens
caggatgactctctgggcctcctcca

SEQ ID NO: 61051 - DNA, 26 bp, Homo sapiens
aggatgactctctgggcctcctccag

SEQ ID NO: 61052 - DNA, 26 bp, Homo sapiens
ggatgactctctgggcctcctccagc

SEQ ID NO: 61053 - DNA, 26 bp, Homo sapiens
gatgactctctgggcctcctccagct

SEQ ID NO: 61054 - DNA, 26 bp, Homo sapiens
atgactctctgggcctcctccagctg

SEQ ID NO: 61055 - DNA, 26 bp, Homo sapiens
tgactctctgggcctcctccagctgc

SEQ ID NO: 61056 - DNA, 26 bp, Homo sapiens
gactctctgggcctcctccagctgct

SEQ ID NO: 61057 - DNA, 26 bp, Homo sapiens
actctctgggcctcctccagctgctg

SEQ ID NO: 61058 - DNA, 26 bp, Homo sapiens
ctctctgggcctcctccagctgctgc

SEQ ID NO: 61059 - DNA, 26 bp, Homo sapiens
tctctgggcctcctccagctgctgct

SEQ ID NO: 61060 - DNA, 26 bp, Homo sapiens
ctctgggcctcctccagctgctgctc

SEQ ID NO: 61061 - DNA, 26 bp, Homo sapiens
tctgggcctcctccagctgctgctcc

SEQ ID NO: 61062 - DNA, 26 bp, Homo sapiens
ctgggcctcctccagctgctgctccg

SEQ ID NO: 61063 - DNA, 26 bp, Homo sapiens
tgggcctcctccagctgctgctccgg

SEQ ID NO: 61064 - DNA, 26 bp, Homo sapiens
gggcctcctccagctgctgctccggc

SEQ ID NO: 61065 - DNA, 26 bp, Homo sapiens
ggcctcctccagctgctgctccggca

SEQ ID NO: 61066 - DNA, 26 bp, Homo sapiens
gcctcctccagctgctgctccggcac

SEQ ID NO: 61067 - DNA, 26 bp, Homo sapiens
cctcctccagctgctgctccggcacc

SEQ ID NO: 61068 - DNA, 26 bp, Homo sapiens
ctcctccagctgctgctccggcacct

SEQ ID NO: 61069 - DNA, 26 bp, Homo sapiens
tcctccagctgctgctccggcacctc

SEQ ID NO: 61070 - DNA, 26 bp, Homo sapiens
cctccagctgctgctccggcacctcg

SEQ ID NO: 61071 - DNA, 26 bp, Homo sapiens
ctccagctgctgctccggcacctcgc

SEQ ID NO: 61072 - DNA, 26 bp, Homo sapiens
tccagctgctgctccggcacctcgcc

SEQ ID NO: 61073 - DNA, 26 bp, Homo sapiens
ccagctgctgctccggcacctcgccc

SEQ ID NO: 61074 - DNA, 26 bp, Homo sapiens
cagctgctgctccggcacctcgcccg

SEQ ID NO: 61075 - DNA, 26 bp, Homo sapiens
agctgctgctccggcacctcgcccgt

SEQ ID NO: 61076 - DNA, 26 bp, Homo sapiens
gctgctgctccggcacctcgcccgtc

SEQ ID NO: 61077 - DNA, 26 bp, Homo sapiens
ctgctgctccggcacctcgcccgtca

SEQ ID NO: 61078 - DNA, 26 bp, Homo sapiens
tgctgctccggcacctcgcccgtcag

SEQ ID NO: 61079 - DNA, 26 bp, Homo sapiens
gctgctccggcacctcgcccgtcagc

SEQ ID NO: 61080 - DNA, 26 bp, Homo sapiens
ctgctccggcacctcgcccgtcagca

SEQ ID NO: 61081 - DNA, 26 bp, Homo sapiens
tgctccggcacctcgcccgtcagcat

SEQ ID NO: 61082 - DNA, 26 bp, Homo sapiens
gctccggcacctcgcccgtcagcatc

SEQ ID NO: 61083 - DNA, 26 bp, Homo sapiens
ctccggcacctcgcccgtcagcatca

SEQ ID NO: 61084 - DNA, 26 bp, Homo sapiens
tccggcacctcgcccgtcagcatcag

SEQ ID NO: 61085 - DNA, 26 bp, Homo sapiens
ccggcacctcgcccgtcagcatcagg

SEQ ID NO: 61086 - DNA, 26 bp, Homo sapiens
cggcacctcgcccgtcagcatcagga

SEQ ID NO: 61087 - DNA, 26 bp, Homo sapiens
ggcacctcgcccgtcagcatcaggac

SEQ ID NO: 61088 - DNA, 26 bp, Homo sapiens
gcacctcgcccgtcagcatcaggacc

SEQ ID NO: 61089 - DNA, 26 bp, Homo sapiens
cacctcgcccgtcagcatcaggacca

SEQ ID NO: 61090 - DNA, 26 bp, Homo sapiens
acctcgcccgtcagcatcaggaccac

SEQ ID NO: 61091 - DNA, 26 bp, Homo sapiens
cctcgcccgtcagcatcaggaccaca

SEQ ID NO: 61092 - DNA, 26 bp, Homo sapiens
ctcgcccgtcagcatcaggaccacaa

SEQ ID NO: 61093 - DNA, 26 bp, Homo sapiens
tcgcccgtcagcatcaggaccacaat

SEQ ID NO: 61094 - DNA, 26 bp, Homo sapiens
cgcccgtcagcatcaggaccacaatt

SEQ ID NO: 61095 - DNA, 26 bp, Homo sapiens
gcccgtcagcatcaggaccacaattt

SEQ ID NO: 61096 - DNA, 26 bp, Homo sapiens
cccgtcagcatcaggaccacaatttt

SEQ ID NO: 61097 - DNA, 26 bp, Homo sapiens
ccgtcagcatcaggaccacaattttc

SEQ ID NO: 61098 - DNA, 26 bp, Homo sapiens
cgtcagcatcaggaccacaattttca

SEQ ID NO: 61099 - DNA, 26 bp, Homo sapiens
gtcagcatcaggaccacaattttcag

SEQ ID NO: 61100 - DNA, 26 bp, Homo sapiens
tcagcatcaggaccacaattttcagg

SEQ ID NO: 61101 - DNA, 26 bp, Homo sapiens
cagcatcaggaccacaattttcaggt

SEQ ID NO: 61102 - DNA, 26 bp, Homo sapiens
agcatcaggaccacaattttcaggtc

SEQ ID NO: 61103 - DNA, 26 bp, Homo sapiens
gcatcaggaccacaattttcaggtcc

SEQ ID NO: 61104 - DNA, 26 bp, Homo sapiens
catcaggaccacaattttcaggtccc

SEQ ID NO: 61105 - DNA, 26 bp, Homo sapiens
atcaggaccacaattttcaggtcccg

SEQ ID NO: 61106 - DNA, 26 bp, Homo sapiens
tcaggaccacaattttcaggtcccgt

SEQ ID NO: 61107 - DNA, 26 bp, Homo sapiens
caggaccacaattttcaggtcccgtg

SEQ ID NO: 61108 - DNA, 26 bp, Homo sapiens
aggaccacaattttcaggtcccgtgg

SEQ ID NO: 61109 - DNA, 26 bp, Homo sapiens
ggaccacaattttcaggtcccgtggg

SEQ ID NO: 61110 - DNA, 26 bp, Homo sapiens
gaccacaattttcaggtcccgtgggt

SEQ ID NO: 61111 - DNA, 26 bp, Homo sapiens
accacaattttcaggtcccgtgggtt

SEQ ID NO: 61112 - DNA, 26 bp, Homo sapiens
ccacaattttcaggtcccgtgggttt

SEQ ID NO: 61113 - DNA, 26 bp, Homo sapiens
cacaattttcaggtcccgtgggtttg

SEQ ID NO: 61114 - DNA, 26 bp, Homo sapiens
acaattttcaggtcccgtgggtttgg

SEQ ID NO: 61115 - DNA, 26 bp, Homo sapiens
caattttcaggtcccgtgggtttggg

SEQ ID NO: 61116 - DNA, 26 bp, Homo sapiens
aattttcaggtcccgtgggtttgggg

SEQ ID NO: 61117 - DNA, 26 bp, Homo sapiens
attttcaggtcccgtgggtttggggc

SEQ ID NO: 61118 - DNA, 26 bp, Homo sapiens
ttttcaggtcccgtgggtttggggca

SEQ ID NO: 61119 - DNA, 26 bp, Homo sapiens
tttcaggtcccgtgggtttggggcac

SEQ ID NO: 61120 - DNA, 26 bp, Homo sapiens
ttcaggtcccgtgggtttggggcact

SEQ ID NO: 61121 - DNA, 26 bp, Homo sapiens
tcaggtcccgtgggtttggggcactt

SEQ ID NO: 61122 - DNA, 26 bp, Homo sapiens
caggtcccgtgggtttggggcacttt

SEQ ID NO: 61123 - DNA, 26 bp, Homo sapiens
aggtcccgtgggtttggggcactttc

SEQ ID NO: 61124 - DNA, 26 bp, Homo sapiens
ggtcccgtgggtttggggcactttca

SEQ ID NO: 61125 - DNA, 26 bp, Homo sapiens
gtcccgtgggtttggggcactttcaa

SEQ ID NO: 61126 - DNA, 26 bp, Homo sapiens
tcccgtgggtttggggcactttcaaa

SEQ ID NO: 61127 - DNA, 26 bp, Homo sapiens
cccgtgggtttggggcactttcaaag

SEQ ID NO: 61128 - DNA, 26 bp, Homo sapiens
ccgtgggtttggggcactttcaaaga

SEQ ID NO: 61129 - DNA, 26 bp, Homo sapiens
cgtgggtttggggcactttcaaagac

SEQ ID NO: 61130 - DNA, 26 bp, Homo sapiens
gtgggtttggggcactttcaaagaca

SEQ ID NO: 61131 - DNA, 26 bp, Homo sapiens
tgggtttggggcactttcaaagacat

SEQ ID NO: 61132 - DNA, 26 bp, Homo sapiens
gggtttggggcactttcaaagacatt

SEQ ID NO: 61133 - DNA, 26 bp, Homo sapiens
ggtttggggcactttcaaagacattc

SEQ ID NO: 61134 - DNA, 26 bp, Homo sapiens
gtttggggcactttcaaagacattct

SEQ ID NO: 61135 - DNA, 26 bp, Homo sapiens
tttggggcactttcaaagacattctc

SEQ ID NO: 61136 - DNA, 26 bp, Homo sapiens
ttggggcactttcaaagacattctct

SEQ ID NO: 61137 - DNA, 26 bp, Homo sapiens
tggggcactttcaaagacattctcta

SEQ ID NO: 61138 - DNA, 26 bp, Homo sapiens
ggggcactttcaaagacattctctat

SEQ ID NO: 61139 - DNA, 26 bp, Homo sapiens
gggcactttcaaagacattctctatg

SEQ ID NO: 61140 - DNA, 26 bp, Homo sapiens
ggcactttcaaagacattctctatgg

SEQ ID NO: 61141 - DNA, 26 bp, Homo sapiens
gcactttcaaagacattctctatggt

SEQ ID NO: 61142 - DNA, 26 bp, Homo sapiens
cactttcaaagacattctctatggtg

SEQ ID NO: 61143 - DNA, 26 bp, Homo sapiens
actttcaaagacattctctatggtgt

SEQ ID NO: 61144 - DNA, 26 bp, Homo sapiens
ctttcaaagacattctctatggtgta

SEQ ID NO: 61145 - DNA, 26 bp, Homo sapiens
tttcaaagacattctctatggtgtat

SEQ ID NO: 61146 - DNA, 26 bp, Homo sapiens
ttcaaagacattctctatggtgtatt

SEQ ID NO: 61147 - DNA, 26 bp, Homo sapiens
tcaaagacattctctatggtgtattc

SEQ ID NO: 61148 - DNA, 26 bp, Homo sapiens
caaagacattctctatggtgtattca

SEQ ID NO: 61149 - DNA, 26 bp, Homo sapiens
aaagacattctctatggtgtattcaa

SEQ ID NO: 61150 - DNA, 26 bp, Homo sapiens
aagacattctctatggtgtattcaat

SEQ ID NO: 61151 - DNA, 26 bp, Homo sapiens
agacattctctatggtgtattcaatg

SEQ ID NO: 61152 - DNA, 26 bp, Homo sapiens
gacattctctatggtgtattcaatgg

SEQ ID NO: 61153 - DNA, 26 bp, Homo sapiens
acattctctatggtgtattcaatggc

SEQ ID NO: 61154 - DNA, 26 bp, Homo sapiens
cattctctatggtgtattcaatggca

SEQ ID NO: 61155 - DNA, 26 bp, Homo sapiens
attctctatggtgtattcaatggcac

SEQ ID NO: 61156 - DNA, 26 bp, Homo sapiens
ttctctatggtgtattcaatggcact

SEQ ID NO: 61157 - DNA, 26 bp, Homo sapiens
tctctatggtgtattcaatggcactg

SEQ ID NO: 61158 - DNA, 26 bp, Homo sapiens
ctctatggtgtattcaatggcactgc

SEQ ID NO: 61159 - DNA, 26 bp, Homo sapiens
tctatggtgtattcaatggcactgcc

SEQ ID NO: 61160 - DNA, 26 bp, Homo sapiens
ctatggtgtattcaatggcactgcct

SEQ ID NO: 61161 - DNA, 26 bp, Homo sapiens
tatggtgtattcaatggcactgccta

SEQ ID NO: 61162 - DNA, 26 bp, Homo sapiens
atggtgtattcaatggcactgcctaa

SEQ ID NO: 61163 - DNA, 26 bp, Homo sapiens
tggtgtattcaatggcactgcctaag

SEQ ID NO: 61164 - DNA, 26 bp, Homo sapiens
ggtgtattcaatggcactgcctaagg

SEQ ID NO: 61165 - DNA, 26 bp, Homo sapiens
gtgtattcaatggcactgcctaaggc

SEQ ID NO: 61166 - DNA, 26 bp, Homo sapiens
tgtattcaatggcactgcctaaggcc

SEQ ID NO: 61167 - DNA, 26 bp, Homo sapiens
gtattcaatggcactgcctaaggccc

SEQ ID NO: 61168 - DNA, 26 bp, Homo sapiens
tattcaatggcactgcctaaggccct

SEQ ID NO: 61169 - DNA, 26 bp, Homo sapiens
attcaatggcactgcctaaggccctg

SEQ ID NO: 61170 - DNA, 26 bp, Homo sapiens
ttcaatggcactgcctaaggccctgg

SEQ ID NO: 61171 - DNA, 26 bp, Homo sapiens
tcaatggcactgcctaaggccctggt

SEQ ID NO: 61172 - DNA, 26 bp, Homo sapiens
caatggcactgcctaaggccctggtt

SEQ ID NO: 61173 - DNA, 26 bp, Homo sapiens
aatggcactgcctaaggccctggttc

SEQ ID NO: 61174 - DNA, 26 bp, Homo sapiens
atggcactgcctaaggccctggttcc

SEQ ID NO: 61175 - DNA, 26 bp, Homo sapiens
tggcactgcctaaggccctggttccc

SEQ ID NO: 61176 - DNA, 26 bp, Homo sapiens
ggcactgcctaaggccctggttccct

SEQ ID NO: 61177 - DNA, 26 bp, Homo sapiens
gcactgcctaaggccctggttccctg

SEQ ID NO: 61178 - DNA, 26 bp, Homo sapiens
cactgcctaaggccctggttccctgc

SEQ ID NO: 61179 - DNA, 26 bp, Homo sapiens
actgcctaaggccctggttccctgca

SEQ ID NO: 61180 - DNA, 26 bp, Homo sapiens
ctgcctaaggccctggttccctgcaa

SEQ ID NO: 61181 - DNA, 26 bp, Homo sapiens
tgcctaaggccctggttccctgcaac

SEQ ID NO: 61182 - DNA, 26 bp, Homo sapiens
gcctaaggccctggttccctgcaact

SEQ ID NO: 61183 - DNA, 26 bp, Homo sapiens
cctaaggccctggttccctgcaactg

SEQ ID NO: 61184 - DNA, 26 bp, Homo sapiens
ctaaggccctggttccctgcaactgt

SEQ ID NO: 61185 - DNA, 26 bp, Homo sapiens
taaggccctggttccctgcaactgtg

SEQ ID NO: 61186 - DNA, 26 bp, Homo sapiens
aaggccctggttccctgcaactgtgt

SEQ ID NO: 61187 - DNA, 26 bp, Homo sapiens
aggccctggttccctgcaactgtgtc

SEQ ID NO: 61188 - DNA, 26 bp, Homo sapiens
ggccctggttccctgcaactgtgtca

SEQ ID NO: 61189 - DNA, 26 bp, Homo sapiens
gccctggttccctgcaactgtgtcat

SEQ ID NO: 61190 - DNA, 26 bp, Homo sapiens
ccctggttccctgcaactgtgtcatt

SEQ ID NO: 61191 - DNA, 26 bp, Homo sapiens
cctggttccctgcaactgtgtcattc

SEQ ID NO: 61192 - DNA, 26 bp, Homo sapiens
ctggttccctgcaactgtgtcattcc

SEQ ID NO: 61193 - DNA, 26 bp, Homo sapiens
tggttccctgcaactgtgtcattccc

SEQ ID NO: 61194 - DNA, 26 bp, Homo sapiens
ggttccctgcaactgtgtcattcccc

SEQ ID NO: 61195 - DNA, 26 bp, Homo sapiens
gttccctgcaactgtgtcattcccct

SEQ ID NO: 61196 - DNA, 26 bp, Homo sapiens
ttccctgcaactgtgtcattcccctg

SEQ ID NO: 61197 - DNA, 26 bp, Homo sapiens
tccctgcaactgtgtcattcccctgc

SEQ ID NO: 61198 - DNA, 26 bp, Homo sapiens
ccctgcaactgtgtcattcccctgct

SEQ ID NO: 61199 - DNA, 26 bp, Homo sapiens
cctgcaactgtgtcattcccctgctg

SEQ ID NO: 61200 - DNA, 26 bp, Homo sapiens
ctgcaactgtgtcattcccctgctga

SEQ ID NO: 61201 - DNA, 26 bp, Homo sapiens
tgcaactgtgtcattcccctgctgag

SEQ ID NO: 61202 - DNA, 26 bp, Homo sapiens
gcaactgtgtcattcccctgctgagg

SEQ ID NO: 61203 - DNA, 26 bp, Homo sapiens
caactgtgtcattcccctgctgagga

SEQ ID NO: 61204 - DNA, 26 bp, Homo sapiens
aactgtgtcattcccctgctgaggaa

SEQ ID NO: 61205 - DNA, 26 bp, Homo sapiens
actgtgtcattcccctgctgaggaag

SEQ ID NO: 61206 - DNA, 26 bp, Homo sapiens
ctgtgtcattcccctgctgaggaagt

SEQ ID NO: 61207 - DNA, 26 bp, Homo sapiens
tgtgtcattcccctgctgaggaagtc

SEQ ID NO: 61208 - DNA, 26 bp, Homo sapiens
gtgtcattcccctgctgaggaagtcc

SEQ ID NO: 61209 - DNA, 26 bp, Homo sapiens
tgtcattcccctgctgaggaagtcca

SEQ ID NO: 61210 - DNA, 26 bp, Homo sapiens
gtcattcccctgctgaggaagtccac

SEQ ID NO: 61211 - DNA, 26 bp, Homo sapiens
tcattcccctgctgaggaagtccacc

SEQ ID NO: 61212 - DNA, 26 bp, Homo sapiens
cattcccctgctgaggaagtccacca

SEQ ID NO: 61213 - DNA, 26 bp, Homo sapiens
attcccctgctgaggaagtccaccag

SEQ ID NO: 61214 - DNA, 26 bp, Homo sapiens
ttcccctgctgaggaagtccaccagc

SEQ ID NO: 61215 - DNA, 26 bp, Homo sapiens
tcccctgctgaggaagtccaccagct

SEQ ID NO: 61216 - DNA, 26 bp, Homo sapiens
cccctgctgaggaagtccaccagctt

SEQ ID NO: 61217 - DNA, 26 bp, Homo sapiens
ccctgctgaggaagtccaccagcttc

SEQ ID NO: 61218 - DNA, 26 bp, Homo sapiens
cctgctgaggaagtccaccagcttct

SEQ ID NO: 61219 - DNA, 26 bp, Homo sapiens
ctgctgaggaagtccaccagcttctc

SEQ ID NO: 61220 - DNA, 26 bp, Homo sapiens
tgctgaggaagtccaccagcttctcc

SEQ ID NO: 61221 - DNA, 26 bp, Homo sapiens
gctgaggaagtccaccagcttctcct

SEQ ID NO: 61222 - DNA, 26 bp, Homo sapiens
ctgaggaagtccaccagcttctcctt

SEQ ID NO: 61223 - DNA, 26 bp, Homo sapiens
tgaggaagtccaccagcttctccttg

SEQ ID NO: 61224 - DNA, 26 bp, Homo sapiens
gaggaagtccaccagcttctccttgg

SEQ ID NO: 61225 - DNA, 26 bp, Homo sapiens
aggaagtccaccagcttctccttgga

SEQ ID NO: 61226 - DNA, 26 bp, Homo sapiens
ggaagtccaccagcttctccttggag

SEQ ID NO: 61227 - DNA, 26 bp, Homo sapiens
gaagtccaccagcttctccttggagc

SEQ ID NO: 61228 - DNA, 26 bp, Homo sapiens
aagtccaccagcttctccttggagcc

SEQ ID NO: 61229 - DNA, 26 bp, Homo sapiens
agtccaccagcttctccttggagcca

SEQ ID NO: 61230 - DNA, 26 bp, Homo sapiens
gtccaccagcttctccttggagccat

SEQ ID NO: 61231 - DNA, 26 bp, Homo sapiens
tccaccagcttctccttggagccata

SEQ ID NO: 61232 - DNA, 26 bp, Homo sapiens
ccaccagcttctccttggagccatag

SEQ ID NO: 61233 - DNA, 26 bp, Homo sapiens
caccagcttctccttggagccatagt

SEQ ID NO: 61234 - DNA, 26 bp, Homo sapiens
accagcttctccttggagccatagtc

SEQ ID NO: 61235 - DNA, 26 bp, Homo sapiens
ccagcttctccttggagccatagtca

SEQ ID NO: 61236 - DNA, 26 bp, Homo sapiens
cagcttctccttggagccatagtcag

SEQ ID NO: 61237 - DNA, 26 bp, Homo sapiens
agcttctccttggagccatagtcagt

SEQ ID NO: 61238 - DNA, 26 bp, Homo sapiens
gcttctccttggagccatagtcagtc

SEQ ID NO: 61239 - DNA, 26 bp, Homo sapiens
cttctccttggagccatagtcagtca

SEQ ID NO: 61240 - DNA, 26 bp, Homo sapiens
ttctccttggagccatagtcagtcag

SEQ ID NO: 61241 - DNA, 26 bp, Homo sapiens
tctccttggagccatagtcagtcagg

SEQ ID NO: 61242 - DNA, 26 bp, Homo sapiens
ctccttggagccatagtcagtcaggg

SEQ ID NO: 61243 - DNA, 26 bp, Homo sapiens
tccttggagccatagtcagtcaggga

SEQ ID NO: 61244 - DNA, 26 bp, Homo sapiens
ccttggagccatagtcagtcagggag

SEQ ID NO: 61245 - DNA, 26 bp, Homo sapiens
cttggagccatagtcagtcagggaga

SEQ ID NO: 61246 - DNA, 26 bp, Homo sapiens
ttggagccatagtcagtcagggagaa

SEQ ID NO: 61247 - DNA, 26 bp, Homo sapiens
tggagccatagtcagtcagggagaat

SEQ ID NO: 61248 - DNA, 26 bp, Homo sapiens
ggagccatagtcagtcagggagaatt

SEQ ID NO: 61249 - DNA, 26 bp, Homo sapiens
gagccatagtcagtcagggagaattc

SEQ ID NO: 61250 - DNA, 26 bp, Homo sapiens
agccatagtcagtcagggagaattcc

SEQ ID NO: 61251 - DNA, 26 bp, Homo sapiens
gccatagtcagtcagggagaattcca

SEQ ID NO: 61252 - DNA, 26 bp, Homo sapiens
ccatagtcagtcagggagaattccac

SEQ ID NO: 61253 - DNA, 26 bp, Homo sapiens
catagtcagtcagggagaattccacc

SEQ ID NO: 61254 - DNA, 26 bp, Homo sapiens
atagtcagtcagggagaattccacct

SEQ ID NO: 61255 - DNA, 26 bp, Homo sapiens
tagtcagtcagggagaattccacctt

SEQ ID NO: 61256 - DNA, 26 bp, Homo sapiens
agtcagtcagggagaattccaccttc

SEQ ID NO: 61257 - DNA, 26 bp, Homo sapiens
gtcagtcagggagaattccaccttca

SEQ ID NO: 61258 - DNA, 26 bp, Homo sapiens
tcagtcagggagaattccaccttcac

SEQ ID NO: 61259 - DNA, 26 bp, Homo sapiens
cagtcagggagaattccaccttcaca

SEQ ID NO: 61260 - DNA, 26 bp, Homo sapiens
agtcagggagaattccaccttcacag

SEQ ID NO: 61261 - DNA, 26 bp, Homo sapiens
gtcagggagaattccaccttcacagg

SEQ ID NO: 61262 - DNA, 26 bp, Homo sapiens
tcagggagaattccaccttcacaggt

SEQ ID NO: 61263 - DNA, 26 bp, Homo sapiens
cagggagaattccaccttcacaggtg

SEQ ID NO: 61264 - DNA, 26 bp, Homo sapiens
agggagaattccaccttcacaggtgg

SEQ ID NO: 61265 - DNA, 26 bp, Homo sapiens
gggagaattccaccttcacaggtggc

SEQ ID NO: 61266 - DNA, 26 bp, Homo sapiens
ggagaattccaccttcacaggtggca

SEQ ID NO: 61267 - DNA, 26 bp, Homo sapiens
gagaattccaccttcacaggtggcat

SEQ ID NO: 61268 - DNA, 26 bp, Homo sapiens
agaattccaccttcacaggtggcatg

SEQ ID NO: 61269 - DNA, 26 bp, Homo sapiens
gaattccaccttcacaggtggcatgc

SEQ ID NO: 61270 - DNA, 26 bp, Homo sapiens
aattccaccttcacaggtggcatgct

SEQ ID NO: 61271 - DNA, 26 bp, Homo sapiens
attccaccttcacaggtggcatgctg

SEQ ID NO: 61272 - DNA, 26 bp, Homo sapiens
ttccaccttcacaggtggcatgctgg

SEQ ID NO: 61273 - DNA, 26 bp, Homo sapiens
tccaccttcacaggtggcatgctggc

SEQ ID NO: 61274 - DNA, 26 bp, Homo sapiens
ccaccttcacaggtggcatgctggca

SEQ ID NO: 61275 - DNA, 26 bp, Homo sapiens
caccttcacaggtggcatgctggcat

SEQ ID NO: 61276 - DNA, 26 bp, Homo sapiens
accttcacaggtggcatgctggcatt

SEQ ID NO: 61277 - DNA, 26 bp, Homo sapiens
ccttcacaggtggcatgctggcattg

SEQ ID NO: 61278 - DNA, 26 bp, Homo sapiens
cttcacaggtggcatgctggcattgt

SEQ ID NO: 61279 - DNA, 26 bp, Homo sapiens
ttcacaggtggcatgctggcattgtc

SEQ ID NO: 61280 - DNA, 26 bp, Homo sapiens
tcacaggtggcatgctggcattgtcc

SEQ ID NO: 61281 - DNA, 26 bp, Homo sapiens
cacaggtggcatgctggcattgtcca

SEQ ID NO: 61282 - DNA, 26 bp, Homo sapiens
acaggtggcatgctggcattgtccac

SEQ ID NO: 61283 - DNA, 26 bp, Homo sapiens
caggtggcatgctggcattgtccacg

SEQ ID NO: 61284 - DNA, 26 bp, Homo sapiens
aggtggcatgctggcattgtccacgg

SEQ ID NO: 61285 - DNA, 26 bp, Homo sapiens
ggtggcatgctggcattgtccacgga

SEQ ID NO: 61286 - DNA, 26 bp, Homo sapiens
gtggcatgctggcattgtccacggac

SEQ ID NO: 61287 - DNA, 26 bp, Homo sapiens
tggcatgctggcattgtccacggact

SEQ ID NO: 61288 - DNA, 26 bp, Homo sapiens
ggcatgctggcattgtccacggactc

SEQ ID NO: 61289 - DNA, 26 bp, Homo sapiens
gcatgctggcattgtccacggactca

SEQ ID NO: 61290 - DNA, 26 bp, Homo sapiens
catgctggcattgtccacggactcag

SEQ ID NO: 61291 - DNA, 26 bp, Homo sapiens
atgctggcattgtccacggactcaga

SEQ ID NO: 61292 - DNA, 26 bp, Homo sapiens
tgctggcattgtccacggactcagag

SEQ ID NO: 61293 - DNA, 26 bp, Homo sapiens
gctggcattgtccacggactcagagg

SEQ ID NO: 61294 - DNA, 26 bp, Homo sapiens
ctggcattgtccacggactcagaggg

SEQ ID NO: 61295 - DNA, 26 bp, Homo sapiens
tggcattgtccacggactcagagggc

SEQ ID NO: 61296 - DNA, 26 bp, Homo sapiens
ggcattgtccacggactcagagggcg

SEQ ID NO: 61297 - DNA, 26 bp, Homo sapiens
gcattgtccacggactcagagggcgc

SEQ ID NO: 61298 - DNA, 26 bp, Homo sapiens
cattgtccacggactcagagggcgcg

SEQ ID NO: 61299 - DNA, 26 bp, Homo sapiens
attgtccacggactcagagggcgcgt

SEQ ID NO: 61300 - DNA, 26 bp, Homo sapiens
ttgtccacggactcagagggcgcgtg

SEQ ID NO: 61301 - DNA, 26 bp, Homo sapiens
tgtccacggactcagagggcgcgtgc

SEQ ID NO: 61302 - DNA, 26 bp, Homo sapiens
gtccacggactcagagggcgcgtgct

SEQ ID NO: 61303 - DNA, 26 bp, Homo sapiens
tccacggactcagagggcgcgtgctg

SEQ ID NO: 61304 - DNA, 26 bp, Homo sapiens
ccacggactcagagggcgcgtgctgc

SEQ ID NO: 61305 - DNA, 26 bp, Homo sapiens
cacggactcagagggcgcgtgctgca

SEQ ID NO: 61306 - DNA, 26 bp, Homo sapiens
acggactcagagggcgcgtgctgcac

SEQ ID NO: 61307 - DNA, 26 bp, Homo sapiens
cggactcagagggcgcgtgctgcaca

SEQ ID NO: 61308 - DNA, 26 bp, Homo sapiens
ggactcagagggcgcgtgctgcacaa

SEQ ID NO: 61309 - DNA, 26 bp, Homo sapiens
gactcagagggcgcgtgctgcacaac

SEQ ID NO: 61310 - DNA, 26 bp, Homo sapiens
actcagagggcgcgtgctgcacaact

SEQ ID NO: 61311 - DNA, 26 bp, Homo sapiens
ctcagagggcgcgtgctgcacaactg

SEQ ID NO: 61312 - DNA, 26 bp, Homo sapiens
tcagagggcgcgtgctgcacaactgc

SEQ ID NO: 61313 - DNA, 26 bp, Homo sapiens
cagagggcgcgtgctgcacaactgcc

SEQ ID NO: 61314 - DNA, 26 bp, Homo sapiens
agagggcgcgtgctgcacaactgcca

SEQ ID NO: 61315 - DNA, 26 bp, Homo sapiens
gagggcgcgtgctgcacaactgccac

SEQ ID NO: 61316 - DNA, 26 bp, Homo sapiens
agggcgcgtgctgcacaactgccact

SEQ ID NO: 61317 - DNA, 26 bp, Homo sapiens
gggcgcgtgctgcacaactgccactc

SEQ ID NO: 61318 - DNA, 26 bp, Homo sapiens
ggcgcgtgctgcacaactgccactct

SEQ ID NO: 61319 - DNA, 26 bp, Homo sapiens
gcgcgtgctgcacaactgccactctg

SEQ ID NO: 61320 - DNA, 26 bp, Homo sapiens
cgcgtgctgcacaactgccactctgg

SEQ ID NO: 61321 - DNA, 26 bp, Homo sapiens
gcgtgctgcacaactgccactctggc

SEQ ID NO: 61322 - DNA, 26 bp, Homo sapiens
cgtgctgcacaactgccactctggcg

SEQ ID NO: 61323 - DNA, 26 bp, Homo sapiens
gtgctgcacaactgccactctggcga

SEQ ID NO: 61324 - DNA, 26 bp, Homo sapiens
tgctgcacaactgccactctggcgaa

SEQ ID NO: 61325 - DNA, 26 bp, Homo sapiens
gctgcacaactgccactctggcgaag

SEQ ID NO: 61326 - DNA, 26 bp, Homo sapiens
ctgcacaactgccactctggcgaagt

SEQ ID NO: 61327 - DNA, 26 bp, Homo sapiens
tgcacaactgccactctggcgaagtg

SEQ ID NO: 61328 - DNA, 26 bp, Homo sapiens
gcacaactgccactctggcgaagtgc

SEQ ID NO: 61329 - DNA, 26 bp, Homo sapiens
cacaactgccactctggcgaagtgct

SEQ ID NO: 61330 - DNA, 26 bp, Homo sapiens
acaactgccactctggcgaagtgctg

SEQ ID NO: 61331 - DNA, 26 bp, Homo sapiens
caactgccactctggcgaagtgctgg

SEQ ID NO: 61332 - DNA, 26 bp, Homo sapiens
aactgccactctggcgaagtgctggg

SEQ ID NO: 61333 - DNA, 26 bp, Homo sapiens
actgccactctggcgaagtgctggga

SEQ ID NO: 61334 - DNA, 26 bp, Homo sapiens
ctgccactctggcgaagtgctgggag

SEQ ID NO: 61335 - DNA, 26 bp, Homo sapiens
tgccactctggcgaagtgctgggagg

SEQ ID NO: 61336 - DNA, 26 bp, Homo sapiens
gccactctggcgaagtgctgggaggc

SEQ ID NO: 61337 - DNA, 26 bp, Homo sapiens
ccactctggcgaagtgctgggaggcc

SEQ ID NO: 61338 - DNA, 26 bp, Homo sapiens
cactctggcgaagtgctgggaggcct

SEQ ID NO: 61339 - DNA, 26 bp, Homo sapiens
actctggcgaagtgctgggaggcctt

SEQ ID NO: 61340 - DNA, 26 bp, Homo sapiens
ctctggcgaagtgctgggaggccttg

SEQ ID NO: 61341 - DNA, 26 bp, Homo sapiens
tctggcgaagtgctgggaggccttgg

SEQ ID NO: 61342 - DNA, 26 bp, Homo sapiens
ctggcgaagtgctgggaggccttggg

SEQ ID NO: 61343 - DNA, 26 bp, Homo sapiens
tggcgaagtgctgggaggccttggga

SEQ ID NO: 61344 - DNA, 26 bp, Homo sapiens
ggcgaagtgctgggaggccttgggat

SEQ ID NO: 61345 - DNA, 26 bp, Homo sapiens
gcgaagtgctgggaggccttgggatc

SEQ ID NO: 61346 - DNA, 26 bp, Homo sapiens
cgaagtgctgggaggccttgggatct

SEQ ID NO: 61347 - DNA, 26 bp, Homo sapiens
gaagtgctgggaggccttgggatctg

SEQ ID NO: 61348 - DNA, 26 bp, Homo sapiens
aagtgctgggaggccttgggatctgg

SEQ ID NO: 61349 - DNA, 26 bp, Homo sapiens
agtgctgggaggccttgggatctggg

SEQ ID NO: 61350 - DNA, 26 bp, Homo sapiens
gtgctgggaggccttgggatctgggc

SEQ ID NO: 61351 - DNA, 26 bp, Homo sapiens
tgctgggaggccttgggatctgggct

SEQ ID NO: 61352 - DNA, 26 bp, Homo sapiens
gctgggaggccttgggatctgggctc

SEQ ID NO: 61353 - DNA, 26 bp, Homo sapiens
ctgggaggccttgggatctgggctca

SEQ ID NO: 61354 - DNA, 26 bp, Homo sapiens
tgggaggccttgggatctgggctcat

SEQ ID NO: 61355 - DNA, 26 bp, Homo sapiens
gggaggccttgggatctgggctcatg

SEQ ID NO: 61356 - DNA, 26 bp, Homo sapiens
ggaggccttgggatctgggctcatgt

SEQ ID NO: 61357 - DNA, 26 bp, Homo sapiens
gaggccttgggatctgggctcatgtc

SEQ ID NO: 61358 - DNA, 26 bp, Homo sapiens
aggccttgggatctgggctcatgtcc

SEQ ID NO: 61359 - DNA, 26 bp, Homo sapiens
ggccttgggatctgggctcatgtcca

SEQ ID NO: 61360 - DNA, 26 bp, Homo sapiens
gccttgggatctgggctcatgtccag

SEQ ID NO: 61361 - DNA, 26 bp, Homo sapiens
ccttgggatctgggctcatgtccagt

SEQ ID NO: 61362 - DNA, 26 bp, Homo sapiens
cttgggatctgggctcatgtccagtt

SEQ ID NO: 61363 - DNA, 26 bp, Homo sapiens
ttgggatctgggctcatgtccagttg

SEQ ID NO: 61364 - DNA, 26 bp, Homo sapiens
tgggatctgggctcatgtccagttgt

SEQ ID NO: 61365 - DNA, 26 bp, Homo sapiens
gggatctgggctcatgtccagttgtc

SEQ ID NO: 61366 - DNA, 26 bp, Homo sapiens
ggatctgggctcatgtccagttgtct

SEQ ID NO: 61367 - DNA, 26 bp, Homo sapiens
gatctgggctcatgtccagttgtctg

SEQ ID NO: 61368 - DNA, 26 bp, Homo sapiens
atctgggctcatgtccagttgtctga

SEQ ID NO: 61369 - DNA, 26 bp, Homo sapiens
tctgggctcatgtccagttgtctgac

SEQ ID NO: 61370 - DNA, 26 bp, Homo sapiens
ctgggctcatgtccagttgtctgacc

SEQ ID NO: 61371 - DNA, 26 bp, Homo sapiens
tgggctcatgtccagttgtctgacca

SEQ ID NO: 61372 - DNA, 26 bp, Homo sapiens
gggctcatgtccagttgtctgaccag

SEQ ID NO: 61373 - DNA, 26 bp, Homo sapiens
ggctcatgtccagttgtctgaccagg

SEQ ID NO: 61374 - DNA, 26 bp, Homo sapiens
gctcatgtccagttgtctgaccaggt

SEQ ID NO: 61375 - DNA, 26 bp, Homo sapiens
ctcatgtccagttgtctgaccaggta

SEQ ID NO: 61376 - DNA, 26 bp, Homo sapiens
tcatgtccagttgtctgaccaggtac

SEQ ID NO: 61377 - DNA, 26 bp, Homo sapiens
catgtccagttgtctgaccaggtacg

SEQ ID NO: 61378 - DNA, 26 bp, Homo sapiens
atgtccagttgtctgaccaggtacgc

SEQ ID NO: 61379 - DNA, 26 bp, Homo sapiens
tgtccagttgtctgaccaggtacgct

SEQ ID NO: 61380 - DNA, 26 bp, Homo sapiens
gtccagttgtctgaccaggtacgcta

SEQ ID NO: 61381 - DNA, 26 bp, Homo sapiens
tccagttgtctgaccaggtacgctat

SEQ ID NO: 61382 - DNA, 26 bp, Homo sapiens
ccagttgtctgaccaggtacgctatg

SEQ ID NO: 61383 - DNA, 26 bp, Homo sapiens
cagttgtctgaccaggtacgctatgt

SEQ ID NO: 61384 - DNA, 26 bp, Homo sapiens
agttgtctgaccaggtacgctatgta

SEQ ID NO: 61385 - DNA, 26 bp, Homo sapiens
gttgtctgaccaggtacgctatgtac

SEQ ID NO: 61386 - DNA, 26 bp, Homo sapiens
ttgtctgaccaggtacgctatgtact

SEQ ID NO: 61387 - DNA, 26 bp, Homo sapiens
tgtctgaccaggtacgctatgtactt

SEQ ID NO: 61388 - DNA, 26 bp, Homo sapiens
gtctgaccaggtacgctatgtacttc

SEQ ID NO: 61389 - DNA, 26 bp, Homo sapiens
tctgaccaggtacgctatgtacttct

SEQ ID NO: 61390 - DNA, 26 bp, Homo sapiens
ctgaccaggtacgctatgtacttctt

SEQ ID NO: 61391 - DNA, 26 bp, Homo sapiens
tgaccaggtacgctatgtacttcttc

SEQ ID NO: 61392 - DNA, 26 bp, Homo sapiens
gaccaggtacgctatgtacttcttca

SEQ ID NO: 61393 - DNA, 26 bp, Homo sapiens
accaggtacgctatgtacttcttcat

SEQ ID NO: 61394 - DNA, 26 bp, Homo sapiens
ccaggtacgctatgtacttcttcatc

SEQ ID NO: 61395 - DNA, 26 bp, Homo sapiens
caggtacgctatgtacttcttcatct

SEQ ID NO: 61396 - DNA, 26 bp, Homo sapiens
aggtacgctatgtacttcttcatctc

SEQ ID NO: 61397 - DNA, 26 bp, Homo sapiens
ggtacgctatgtacttcttcatctca

SEQ ID NO: 61398 - DNA, 26 bp, Homo sapiens
gtacgctatgtacttcttcatctcat

SEQ ID NO: 61399 - DNA, 26 bp, Homo sapiens
tacgctatgtacttcttcatctcatt

SEQ ID NO: 61400 - DNA, 26 bp, Homo sapiens
acgctatgtacttcttcatctcattg

SEQ ID NO: 61401 - DNA, 26 bp, Homo sapiens
cgctatgtacttcttcatctcattga

SEQ ID NO: 61402 - DNA, 26 bp, Homo sapiens
gctatgtacttcttcatctcattgaa

SEQ ID NO: 61403 - DNA, 26 bp, Homo sapiens
ctatgtacttcttcatctcattgaac

SEQ ID NO: 61404 - DNA, 26 bp, Homo sapiens
tatgtacttcttcatctcattgaact

SEQ ID NO: 61405 - DNA, 26 bp, Homo sapiens
atgtacttcttcatctcattgaactg

SEQ ID NO: 61406 - DNA, 26 bp, Homo sapiens
tgtacttcttcatctcattgaactgg

SEQ ID NO: 61407 - DNA, 26 bp, Homo sapiens
gtacttcttcatctcattgaactgga

SEQ ID NO: 61408 - DNA, 26 bp, Homo sapiens
tacttcttcatctcattgaactggaa

SEQ ID NO: 61409 - DNA, 26 bp, Homo sapiens
acttcttcatctcattgaactggaac

SEQ ID NO: 61410 - DNA, 26 bp, Homo sapiens
cttcttcatctcattgaactggaaca

SEQ ID NO: 61411 - DNA, 26 bp, Homo sapiens
ttcttcatctcattgaactggaacag

SEQ ID NO: 61412 - DNA, 26 bp, Homo sapiens
tcttcatctcattgaactggaacagg

SEQ ID NO: 61413 - DNA, 26 bp, Homo sapiens
cttcatctcattgaactggaacaggg

SEQ ID NO: 61414 - DNA, 26 bp, Homo sapiens
ttcatctcattgaactggaacagggt

SEQ ID NO: 61415 - DNA, 26 bp, Homo sapiens
tcatctcattgaactggaacagggtg

SEQ ID NO: 61416 - DNA, 26 bp, Homo sapiens
catctcattgaactggaacagggtgg

SEQ ID NO: 61417 - DNA, 26 bp, Homo sapiens
atctcattgaactggaacagggtggt

SEQ ID NO: 61418 - DNA, 26 bp, Homo sapiens
tctcattgaactggaacagggtggtg

SEQ ID NO: 61419 - DNA, 26 bp, Homo sapiens
ctcattgaactggaacagggtggtgg

SEQ ID NO: 61420 - DNA, 26 bp, Homo sapiens
tcattgaactggaacagggtggtggt

SEQ ID NO: 61421 - DNA, 26 bp, Homo sapiens
cattgaactggaacagggtggtggtc

SEQ ID NO: 61422 - DNA, 26 bp, Homo sapiens
attgaactggaacagggtggtggtct

SEQ ID NO: 61423 - DNA, 26 bp, Homo sapiens
ttgaactggaacagggtggtggtctc

SEQ ID NO: 61424 - DNA, 26 bp, Homo sapiens
tgaactggaacagggtggtggtctca

SEQ ID NO: 61425 - DNA, 26 bp, Homo sapiens
gaactggaacagggtggtggtctcag

SEQ ID NO: 61426 - DNA, 26 bp, Homo sapiens
aactggaacagggtggtggtctcagc

SEQ ID NO: 61427 - DNA, 26 bp, Homo sapiens
actggaacagggtggtggtctcagcg

SEQ ID NO: 61428 - DNA, 26 bp, Homo sapiens
ctggaacagggtggtggtctcagcgc

SEQ ID NO: 61429 - DNA, 26 bp, Homo sapiens
tggaacagggtggtggtctcagcgct

SEQ ID NO: 61430 - DNA, 26 bp, Homo sapiens
ggaacagggtggtggtctcagcgctg

SEQ ID NO: 61431 - DNA, 26 bp, Homo sapiens
gaacagggtggtggtctcagcgctgt

SEQ ID NO: 61432 - DNA, 26 bp, Homo sapiens
aacagggtggtggtctcagcgctgtc

SEQ ID NO: 61433 - DNA, 26 bp, Homo sapiens
acagggtggtggtctcagcgctgtct

SEQ ID NO: 61434 - DNA, 26 bp, Homo sapiens
cagggtggtggtctcagcgctgtcta

SEQ ID NO: 61435 - DNA, 26 bp, Homo sapiens
agggtggtggtctcagcgctgtctaa

SEQ ID NO: 61436 - DNA, 26 bp, Homo sapiens
gggtggtggtctcagcgctgtctaag

SEQ ID NO: 61437 - DNA, 26 bp, Homo sapiens
ggtggtggtctcagcgctgtctaaga

SEQ ID NO: 61438 - DNA, 26 bp, Homo sapiens
gtggtggtctcagcgctgtctaagat

SEQ ID NO: 61439 - DNA, 26 bp, Homo sapiens
tggtggtctcagcgctgtctaagatg

SEQ ID NO: 61440 - DNA, 26 bp, Homo sapiens
ggtggtctcagcgctgtctaagatga

SEQ ID NO: 61441 - DNA, 26 bp, Homo sapiens
gtggtctcagcgctgtctaagatgaa

SEQ ID NO: 61442 - DNA, 26 bp, Homo sapiens
tggtctcagcgctgtctaagatgaaa

SEQ ID NO: 61443 - DNA, 26 bp, Homo sapiens
ggtctcagcgctgtctaagatgaaag

SEQ ID NO: 61444 - DNA, 26 bp, Homo sapiens
gtctcagcgctgtctaagatgaaagc

SEQ ID NO: 61445 - DNA, 26 bp, Homo sapiens
tctcagcgctgtctaagatgaaagcc

SEQ ID NO: 61446 - DNA, 26 bp, Homo sapiens
ctcagcgctgtctaagatgaaagcca

SEQ ID NO: 61447 - DNA, 26 bp, Homo sapiens
tcagcgctgtctaagatgaaagccat

SEQ ID NO: 61448 - DNA, 26 bp, Homo sapiens
cagcgctgtctaagatgaaagccatg

SEQ ID NO: 61449 - DNA, 26 bp, Homo sapiens
agcgctgtctaagatgaaagccatgt

SEQ ID NO: 61450 - DNA, 26 bp, Homo sapiens
gcgctgtctaagatgaaagccatgtc

SEQ ID NO: 61451 - DNA, 26 bp, Homo sapiens
cgctgtctaagatgaaagccatgtcg

SEQ ID NO: 61452 - DNA, 26 bp, Homo sapiens
gctgtctaagatgaaagccatgtcga

SEQ ID NO: 61453 - DNA, 26 bp, Homo sapiens
ctgtctaagatgaaagccatgtcgat

SEQ ID NO: 61454 - DNA, 26 bp, Homo sapiens
tgtctaagatgaaagccatgtcgatg

SEQ ID NO: 61455 - DNA, 26 bp, Homo sapiens
gtctaagatgaaagccatgtcgatgt

SEQ ID NO: 61456 - DNA, 26 bp, Homo sapiens
tctaagatgaaagccatgtcgatgtc

SEQ ID NO: 61457 - DNA, 26 bp, Homo sapiens
ctaagatgaaagccatgtcgatgtcc

SEQ ID NO: 61458 - DNA, 26 bp, Homo sapiens
taagatgaaagccatgtcgatgtcca

SEQ ID NO: 61459 - DNA, 26 bp, Homo sapiens
aagatgaaagccatgtcgatgtccac

SEQ ID NO: 61460 - DNA, 26 bp, Homo sapiens
agatgaaagccatgtcgatgtccaca

SEQ ID NO: 61461 - DNA, 26 bp, Homo sapiens
gatgaaagccatgtcgatgtccacat

SEQ ID NO: 61462 - DNA, 26 bp, Homo sapiens
atgaaagccatgtcgatgtccacatc

SEQ ID NO: 61463 - DNA, 26 bp, Homo sapiens
tgaaagccatgtcgatgtccacatcg

SEQ ID NO: 61464 - DNA, 26 bp, Homo sapiens
gaaagccatgtcgatgtccacatcgc

SEQ ID NO: 61465 - DNA, 26 bp, Homo sapiens
aaagccatgtcgatgtccacatcgct

SEQ ID NO: 61466 - DNA, 26 bp, Homo sapiens
aagccatgtcgatgtccacatcgctc

SEQ ID NO: 61467 - DNA, 26 bp, Homo sapiens
agccatgtcgatgtccacatcgctcc

SEQ ID NO: 61468 - DNA, 26 bp, Homo sapiens
gccatgtcgatgtccacatcgctccc

SEQ ID NO: 61469 - DNA, 26 bp, Homo sapiens
ccatgtcgatgtccacatcgctccct

SEQ ID NO: 61470 - DNA, 26 bp, Homo sapiens
catgtcgatgtccacatcgctccctg

SEQ ID NO: 61471 - DNA, 26 bp, Homo sapiens
atgtcgatgtccacatcgctccctgc

SEQ ID NO: 61472 - DNA, 26 bp, Homo sapiens
tgtcgatgtccacatcgctccctgcc

SEQ ID NO: 61473 - DNA, 26 bp, Homo sapiens
gtcgatgtccacatcgctccctgccg

SEQ ID NO: 61474 - DNA, 26 bp, Homo sapiens
tcgatgtccacatcgctccctgccgc

SEQ ID NO: 61475 - DNA, 26 bp, Homo sapiens
cgatgtccacatcgctccctgccgct

SEQ ID NO: 61476 - DNA, 26 bp, Homo sapiens
gatgtccacatcgctccctgccgctc

SEQ ID NO: 61477 - DNA, 26 bp, Homo sapiens
atgtccacatcgctccctgccgctct

SEQ ID NO: 61478 - DNA, 26 bp, Homo sapiens
tgtccacatcgctccctgccgctctc

SEQ ID NO: 61479 - DNA, 26 bp, Homo sapiens
gtccacatcgctccctgccgctctcc

SEQ ID NO: 61480 - DNA, 26 bp, Homo sapiens
tccacatcgctccctgccgctctcct

SEQ ID NO: 61481 - DNA, 26 bp, Homo sapiens
ccacatcgctccctgccgctctcctg

SEQ ID NO: 61482 - DNA, 26 bp, Homo sapiens
cacatcgctccctgccgctctcctgt

SEQ ID NO: 61483 - DNA, 26 bp, Homo sapiens
acatcgctccctgccgctctcctgtc

SEQ ID NO: 61484 - DNA, 26 bp, Homo sapiens
catcgctccctgccgctctcctgtcc

SEQ ID NO: 61485 - DNA, 26 bp, Homo sapiens
atcgctccctgccgctctcctgtccc

SEQ ID NO: 61486 - DNA, 26 bp, Homo sapiens
tcgctccctgccgctctcctgtccct

SEQ ID NO: 61487 - DNA, 26 bp, Homo sapiens
cgctccctgccgctctcctgtccctg

SEQ ID NO: 61488 - DNA, 26 bp, Homo sapiens
gctccctgccgctctcctgtccctga

SEQ ID NO: 61489 - DNA, 26 bp, Homo sapiens
ctccctgccgctctcctgtccctgaa

SEQ ID NO: 61490 - DNA, 26 bp, Homo sapiens
tccctgccgctctcctgtccctgaag

SEQ ID NO: 61491 - DNA, 26 bp, Homo sapiens
ccctgccgctctcctgtccctgaagg

SEQ ID NO: 61492 - DNA, 26 bp, Homo sapiens
cctgccgctctcctgtccctgaagga

SEQ ID NO: 61493 - DNA, 26 bp, Homo sapiens
ctgccgctctcctgtccctgaaggaa

SEQ ID NO: 61494 - DNA, 26 bp, Homo sapiens
tgccgctctcctgtccctgaaggaag

SEQ ID NO: 61495 - DNA, 26 bp, Homo sapiens
gccgctctcctgtccctgaaggaagg

SEQ ID NO: 61496 - DNA, 26 bp, Homo sapiens
ccgctctcctgtccctgaaggaaggc

SEQ ID NO: 61497 - DNA, 26 bp, Homo sapiens
cgctctcctgtccctgaaggaaggcc

SEQ ID NO: 61498 - DNA, 26 bp, Homo sapiens
gctctcctgtccctgaaggaaggcct

SEQ ID NO: 61499 - DNA, 26 bp, Homo sapiens
ctctcctgtccctgaaggaaggcctc

SEQ ID NO: 61500 - DNA, 26 bp, Homo sapiens
tctcctgtccctgaaggaaggcctcc

SEQ ID NO: 61501 - DNA, 26 bp, Homo sapiens
ctcctgtccctgaaggaaggcctcca

SEQ ID NO: 61502 - DNA, 26 bp, Homo sapiens
tcctgtccctgaaggaaggcctccaa

SEQ ID NO: 61503 - DNA, 26 bp, Homo sapiens
cctgtccctgaaggaaggcctccaac

SEQ ID NO: 61504 - DNA, 26 bp, Homo sapiens
ctgtccctgaaggaaggcctccaact

SEQ ID NO: 61505 - DNA, 26 bp, Homo sapiens
tgtccctgaaggaaggcctccaactg

SEQ ID NO: 61506 - DNA, 26 bp, Homo sapiens
gtccctgaaggaaggcctccaactgc

SEQ ID NO: 61507 - DNA, 26 bp, Homo sapiens
tccctgaaggaaggcctccaactgcc

SEQ ID NO: 61508 - DNA, 26 bp, Homo sapiens
ccctgaaggaaggcctccaactgcca

SEQ ID NO: 61509 - DNA, 26 bp, Homo sapiens
cctgaaggaaggcctccaactgccaa

SEQ ID NO: 61510 - DNA, 26 bp, Homo sapiens
ctgaaggaaggcctccaactgccaaa

SEQ ID NO: 61511 - DNA, 26 bp, Homo sapiens
tgaaggaaggcctccaactgccaaat

SEQ ID NO: 61512 - DNA, 26 bp, Homo sapiens
gaaggaaggcctccaactgccaaatc

SEQ ID NO: 61513 - DNA, 26 bp, Homo sapiens
aaggaaggcctccaactgccaaatcc

SEQ ID NO: 61514 - DNA, 26 bp, Homo sapiens
aggaaggcctccaactgccaaatcca

SEQ ID NO: 61515 - DNA, 26 bp, Homo sapiens
ggaaggcctccaactgccaaatccac

SEQ ID NO: 61516 - DNA, 26 bp, Homo sapiens
gaaggcctccaactgccaaatccaca

SEQ ID NO: 61517 - DNA, 26 bp, Homo sapiens
aaggcctccaactgccaaatccacag

SEQ ID NO: 61518 - DNA, 26 bp, Homo sapiens
aggcctccaactgccaaatccacagg

SEQ ID NO: 61519 - DNA, 26 bp, Homo sapiens
ggcctccaactgccaaatccacagga

SEQ ID NO: 61520 - DNA, 26 bp, Homo sapiens
gcctccaactgccaaatccacaggat

SEQ ID NO: 61521 - DNA, 26 bp, Homo sapiens
cctccaactgccaaatccacaggatg

SEQ ID NO: 61522 - DNA, 26 bp, Homo sapiens
ctccaactgccaaatccacaggatgg

SEQ ID NO: 61523 - DNA, 26 bp, Homo sapiens
tccaactgccaaatccacaggatggg

SEQ ID NO: 61524 - DNA, 26 bp, Homo sapiens
ccaactgccaaatccacaggatgggt

SEQ ID NO: 61525 - DNA, 26 bp, Homo sapiens
caactgccaaatccacaggatgggtc

SEQ ID NO: 61526 - DNA, 26 bp, Homo sapiens
aactgccaaatccacaggatgggtcg

SEQ ID NO: 61527 - DNA, 26 bp, Homo sapiens
actgccaaatccacaggatgggtcga

SEQ ID NO: 61528 - DNA, 26 bp, Homo sapiens
ctgccaaatccacaggatgggtcgat

SEQ ID NO: 61529 - DNA, 26 bp, Homo sapiens
tgccaaatccacaggatgggtcgatg

SEQ ID NO: 61530 - DNA, 26 bp, Homo sapiens
gccaaatccacaggatgggtcgatgt

SEQ ID NO: 61531 - DNA, 26 bp, Homo sapiens
ccaaatccacaggatgggtcgatgtt

SEQ ID NO: 61532 - DNA, 26 bp, Homo sapiens
caaatccacaggatgggtcgatgttg

SEQ ID NO: 61533 - DNA, 26 bp, Homo sapiens
aaatccacaggatgggtcgatgttgc

SEQ ID NO: 61534 - DNA, 26 bp, Homo sapiens
aatccacaggatgggtcgatgttgca

SEQ ID NO: 61535 - DNA, 26 bp, Homo sapiens
atccacaggatgggtcgatgttgcag

SEQ ID NO: 61536 - DNA, 26 bp, Homo sapiens
tccacaggatgggtcgatgttgcaga

SEQ ID NO: 61537 - DNA, 26 bp, Homo sapiens
ccacaggatgggtcgatgttgcagat

SEQ ID NO: 61538 - DNA, 26 bp, Homo sapiens
cacaggatgggtcgatgttgcagatg

SEQ ID NO: 61539 - DNA, 26 bp, Homo sapiens
acaggatgggtcgatgttgcagatgt

SEQ ID NO: 61540 - DNA, 26 bp, Homo sapiens
caggatgggtcgatgttgcagatgtc

SEQ ID NO: 61541 - DNA, 26 bp, Homo sapiens
aggatgggtcgatgttgcagatgtcc

SEQ ID NO: 61542 - DNA, 26 bp, Homo sapiens
ggatgggtcgatgttgcagatgtcca

SEQ ID NO: 61543 - DNA, 26 bp, Homo sapiens
gatgggtcgatgttgcagatgtccaa

SEQ ID NO: 61544 - DNA, 26 bp, Homo sapiens
atgggtcgatgttgcagatgtccaag

SEQ ID NO: 61545 - DNA, 26 bp, Homo sapiens
tgggtcgatgttgcagatgtccaagc

SEQ ID NO: 61546 - DNA, 26 bp, Homo sapiens
gggtcgatgttgcagatgtccaagca

SEQ ID NO: 61547 - DNA, 26 bp, Homo sapiens
ggtcgatgttgcagatgtccaagcaa

SEQ ID NO: 61548 - DNA, 26 bp, Homo sapiens
gtcgatgttgcagatgtccaagcaaa

SEQ ID NO: 61549 - DNA, 26 bp, Homo sapiens
tcgatgttgcagatgtccaagcaaac

SEQ ID NO: 61550 - DNA, 26 bp, Homo sapiens
cgatgttgcagatgtccaagcaaaca

SEQ ID NO: 61551 - DNA, 26 bp, Homo sapiens
gatgttgcagatgtccaagcaaacat

SEQ ID NO: 61552 - DNA, 26 bp, Homo sapiens
atgttgcagatgtccaagcaaacatg

SEQ ID NO: 61553 - DNA, 26 bp, Homo sapiens
tgttgcagatgtccaagcaaacatga

SEQ ID NO: 61554 - DNA, 26 bp, Homo sapiens
gttgcagatgtccaagcaaacatgac

SEQ ID NO: 61555 - DNA, 26 bp, Homo sapiens
ttgcagatgtccaagcaaacatgaca

SEQ ID NO: 61556 - DNA, 26 bp, Homo sapiens
tgcagatgtccaagcaaacatgacac

SEQ ID NO: 61557 - DNA, 26 bp, Homo sapiens
gcagatgtccaagcaaacatgacacg

SEQ ID NO: 61558 - DNA, 26 bp, Homo sapiens
cagatgtccaagcaaacatgacacgt

SEQ ID NO: 61559 - DNA, 26 bp, Homo sapiens
agatgtccaagcaaacatgacacgtg

SEQ ID NO: 61560 - DNA, 26 bp, Homo sapiens
gatgtccaagcaaacatgacacgtga

SEQ ID NO: 61561 - DNA, 26 bp, Homo sapiens
atgtccaagcaaacatgacacgtgag

SEQ ID NO: 61562 - DNA, 26 bp, Homo sapiens
tgtccaagcaaacatgacacgtgagg

SEQ ID NO: 61563 - DNA, 26 bp, Homo sapiens
gtccaagcaaacatgacacgtgagga

SEQ ID NO: 61564 - DNA, 26 bp, Homo sapiens
tccaagcaaacatgacacgtgaggac

SEQ ID NO: 61565 - DNA, 26 bp, Homo sapiens
ccaagcaaacatgacacgtgaggaca

SEQ ID NO: 61566 - DNA, 26 bp, Homo sapiens
caagcaaacatgacacgtgaggacat

SEQ ID NO: 61567 - DNA, 26 bp, Homo sapiens
aagcaaacatgacacgtgaggacatt

SEQ ID NO: 61568 - DNA, 26 bp, Homo sapiens
agcaaacatgacacgtgaggacattc

SEQ ID NO: 61569 - DNA, 26 bp, Homo sapiens
gcaaacatgacacgtgaggacattct

SEQ ID NO: 61570 - DNA, 26 bp, Homo sapiens
caaacatgacacgtgaggacattctc

SEQ ID NO: 61571 - DNA, 26 bp, Homo sapiens
aaacatgacacgtgaggacattctcc

SEQ ID NO: 61572 - DNA, 26 bp, Homo sapiens
aacatgacacgtgaggacattctcca

SEQ ID NO: 61573 - DNA, 26 bp, Homo sapiens
acatgacacgtgaggacattctccag

SEQ ID NO: 61574 - DNA, 26 bp, Homo sapiens
catgacacgtgaggacattctccagg

SEQ ID NO: 61575 - DNA, 26 bp, Homo sapiens
atgacacgtgaggacattctccagga

SEQ ID NO: 61576 - DNA, 26 bp, Homo sapiens
tgacacgtgaggacattctccaggaa

SEQ ID NO: 61577 - DNA, 26 bp, Homo sapiens
gacacgtgaggacattctccaggaag

SEQ ID NO: 61578 - DNA, 26 bp, Homo sapiens
acacgtgaggacattctccaggaagt

SEQ ID NO: 61579 - DNA, 26 bp, Homo sapiens
cacgtgaggacattctccaggaagtc

SEQ ID NO: 61580 - DNA, 26 bp, Homo sapiens
acgtgaggacattctccaggaagtct

SEQ ID NO: 61581 - DNA, 26 bp, Homo sapiens
cgtgaggacattctccaggaagtctg

SEQ ID NO: 61582 - DNA, 26 bp, Homo sapiens
gtgaggacattctccaggaagtctgt

SEQ ID NO: 61583 - DNA, 26 bp, Homo sapiens
tgaggacattctccaggaagtctgtg

SEQ ID NO: 61584 - DNA, 26 bp, Homo sapiens
gaggacattctccaggaagtctgtga

SEQ ID NO: 61585 - DNA, 26 bp, Homo sapiens
aggacattctccaggaagtctgtgag

SEQ ID NO: 61586 - DNA, 26 bp, Homo sapiens
ggacattctccaggaagtctgtgagg

SEQ ID NO: 61587 - DNA, 26 bp, Homo sapiens
gacattctccaggaagtctgtgaggt

SEQ ID NO: 61588 - DNA, 26 bp, Homo sapiens
acattctccaggaagtctgtgaggtc

SEQ ID NO: 61589 - DNA, 26 bp, Homo sapiens
cattctccaggaagtctgtgaggtct

SEQ ID NO: 61590 - DNA, 26 bp, Homo sapiens
attctccaggaagtctgtgaggtctc

SEQ ID NO: 61591 - DNA, 26 bp, Homo sapiens
ttctccaggaagtctgtgaggtctct

SEQ ID NO: 61592 - DNA, 26 bp, Homo sapiens
tctccaggaagtctgtgaggtctctc

SEQ ID NO: 61593 - DNA, 26 bp, Homo sapiens
ctccaggaagtctgtgaggtctctcc

SEQ ID NO: 61594 - DNA, 26 bp, Homo sapiens
tccaggaagtctgtgaggtctctccc

SEQ ID NO: 61595 - DNA, 26 bp, Homo sapiens
ccaggaagtctgtgaggtctctccct

SEQ ID NO: 61596 - DNA, 26 bp, Homo sapiens
caggaagtctgtgaggtctctccctg

SEQ ID NO: 61597 - DNA, 26 bp, Homo sapiens
aggaagtctgtgaggtctctccctgc

SEQ ID NO: 61598 - DNA, 26 bp, Homo sapiens
ggaagtctgtgaggtctctccctgca

SEQ ID NO: 61599 - DNA, 26 bp, Homo sapiens
gaagtctgtgaggtctctccctgcag

SEQ ID NO: 61600 - DNA, 26 bp, Homo sapiens
aagtctgtgaggtctctccctgcagg

SEQ ID NO: 61601 - DNA, 26 bp, Homo sapiens
agtctgtgaggtctctccctgcaggc

SEQ ID NO: 61602 - DNA, 26 bp, Homo sapiens
gtctgtgaggtctctccctgcaggca

SEQ ID NO: 61603 - DNA, 26 bp, Homo sapiens
tctgtgaggtctctccctgcaggcag

SEQ ID NO: 61604 - DNA, 26 bp, Homo sapiens
ctgtgaggtctctccctgcaggcagg

SEQ ID NO: 61605 - DNA, 26 bp, Homo sapiens
tgtgaggtctctccctgcaggcagga

SEQ ID NO: 61606 - DNA, 26 bp, Homo sapiens
gtgaggtctctccctgcaggcaggac

SEQ ID NO: 61607 - DNA, 26 bp, Homo sapiens
tgaggtctctccctgcaggcaggaca

SEQ ID NO: 61608 - DNA, 26 bp, Homo sapiens
gaggtctctccctgcaggcaggacaa

SEQ ID NO: 61609 - DNA, 26 bp, Homo sapiens
aggtctctccctgcaggcaggacaag

SEQ ID NO: 61610 - DNA, 26 bp, Homo sapiens
ggtctctccctgcaggcaggacaagc

SEQ ID NO: 61611 - DNA, 26 bp, Homo sapiens
gtctctccctgcaggcaggacaagcg

SEQ ID NO: 61612 - DNA, 26 bp, Homo sapiens
tctctccctgcaggcaggacaagcgc

SEQ ID NO: 61613 - DNA, 26 bp, Homo sapiens
ctctccctgcaggcaggacaagcgca

SEQ ID NO: 61614 - DNA, 26 bp, Homo sapiens
tctccctgcaggcaggacaagcgcat

SEQ ID NO: 61615 - DNA, 26 bp, Homo sapiens
ctccctgcaggcaggacaagcgcatg

SEQ ID NO: 61616 - DNA, 26 bp, Homo sapiens
tccctgcaggcaggacaagcgcatgc

SEQ ID NO: 61617 - DNA, 26 bp, Homo sapiens
ccctgcaggcaggacaagcgcatgcc

SEQ ID NO: 61618 - DNA, 26 bp, Homo sapiens
cctgcaggcaggacaagcgcatgccc

SEQ ID NO: 61619 - DNA, 26 bp, Homo sapiens
ctgcaggcaggacaagcgcatgcccc

SEQ ID NO: 61620 - DNA, 26 bp, Homo sapiens
tgcaggcaggacaagcgcatgcccca

SEQ ID NO: 61621 - DNA, 26 bp, Homo sapiens
gcaggcaggacaagcgcatgccccac

SEQ ID NO: 61622 - DNA, 26 bp, Homo sapiens
caggcaggacaagcgcatgccccact

SEQ ID NO: 61623 - DNA, 26 bp, Homo sapiens
aggcaggacaagcgcatgccccactg

SEQ ID NO: 61624 - DNA, 26 bp, Homo sapiens
ggcaggacaagcgcatgccccactgc

SEQ ID NO: 61625 - DNA, 26 bp, Homo sapiens
gcaggacaagcgcatgccccactgct

SEQ ID NO: 61626 - DNA, 26 bp, Homo sapiens
caggacaagcgcatgccccactgctg

SEQ ID NO: 61627 - DNA, 26 bp, Homo sapiens
aggacaagcgcatgccccactgctgt

SEQ ID NO: 61628 - DNA, 26 bp, Homo sapiens
ggacaagcgcatgccccactgctgtg

SEQ ID NO: 61629 - DNA, 26 bp, Homo sapiens
gacaagcgcatgccccactgctgtgt

SEQ ID NO: 61630 - DNA, 26 bp, Homo sapiens
acaagcgcatgccccactgctgtgtt

SEQ ID NO: 61631 - DNA, 26 bp, Homo sapiens
caagcgcatgccccactgctgtgtta

SEQ ID NO: 61632 - DNA, 26 bp, Homo sapiens
aagcgcatgccccactgctgtgttat

SEQ ID NO: 61633 - DNA, 26 bp, Homo sapiens
agcgcatgccccactgctgtgttatt

SEQ ID NO: 61634 - DNA, 26 bp, Homo sapiens
gcgcatgccccactgctgtgttattg

SEQ ID NO: 61635 - DNA, 26 bp, Homo sapiens
cgcatgccccactgctgtgttattga

SEQ ID NO: 61636 - DNA, 26 bp, Homo sapiens
gcatgccccactgctgtgttattgat

SEQ ID NO: 61637 - DNA, 26 bp, Homo sapiens
catgccccactgctgtgttattgatc

SEQ ID NO: 61638 - DNA, 26 bp, Homo sapiens
atgccccactgctgtgttattgatct

SEQ ID NO: 61639 - DNA, 26 bp, Homo sapiens
tgccccactgctgtgttattgatctg

SEQ ID NO: 61640 - DNA, 26 bp, Homo sapiens
gccccactgctgtgttattgatctgc

SEQ ID NO: 61641 - DNA, 26 bp, Homo sapiens
ccccactgctgtgttattgatctgca

SEQ ID NO: 61642 - DNA, 26 bp, Homo sapiens
cccactgctgtgttattgatctgcaa

SEQ ID NO: 61643 - DNA, 26 bp, Homo sapiens
ccactgctgtgttattgatctgcaaa

SEQ ID NO: 61644 - DNA, 26 bp, Homo sapiens
cactgctgtgttattgatctgcaaag

SEQ ID NO: 61645 - DNA, 26 bp, Homo sapiens
actgctgtgttattgatctgcaaagc

SEQ ID NO: 61646 - DNA, 26 bp, Homo sapiens
ctgctgtgttattgatctgcaaagcg

SEQ ID NO: 61647 - DNA, 26 bp, Homo sapiens
tgctgtgttattgatctgcaaagcgt

SEQ ID NO: 61648 - DNA, 26 bp, Homo sapiens
gctgtgttattgatctgcaaagcgtt

SEQ ID NO: 61649 - DNA, 26 bp, Homo sapiens
ctgtgttattgatctgcaaagcgttg

SEQ ID NO: 61650 - DNA, 26 bp, Homo sapiens
tgtgttattgatctgcaaagcgttga

SEQ ID NO: 61651 - DNA, 26 bp, Homo sapiens
gtgttattgatctgcaaagcgttgat

SEQ ID NO: 61652 - DNA, 26 bp, Homo sapiens
tgttattgatctgcaaagcgttgatg

SEQ ID NO: 61653 - DNA, 26 bp, Homo sapiens
gttattgatctgcaaagcgttgatga

SEQ ID NO: 61654 - DNA, 26 bp, Homo sapiens
ttattgatctgcaaagcgttgatgag

SEQ ID NO: 61655 - DNA, 26 bp, Homo sapiens
tattgatctgcaaagcgttgatgagc

SEQ ID NO: 61656 - DNA, 26 bp, Homo sapiens
attgatctgcaaagcgttgatgagct

SEQ ID NO: 61657 - DNA, 26 bp, Homo sapiens
ttgatctgcaaagcgttgatgagctg

SEQ ID NO: 61658 - DNA, 26 bp, Homo sapiens
tgatctgcaaagcgttgatgagctgc

SEQ ID NO: 61659 - DNA, 26 bp, Homo sapiens
gatctgcaaagcgttgatgagctgcc

SEQ ID NO: 61660 - DNA, 26 bp, Homo sapiens
atctgcaaagcgttgatgagctgccg

SEQ ID NO: 61661 - DNA, 26 bp, Homo sapiens
tctgcaaagcgttgatgagctgccgg

SEQ ID NO: 61662 - DNA, 26 bp, Homo sapiens
ctgcaaagcgttgatgagctgccggt

SEQ ID NO: 61663 - DNA, 26 bp, Homo sapiens
tgcaaagcgttgatgagctgccggtc

SEQ ID NO: 61664 - DNA, 26 bp, Homo sapiens
gcaaagcgttgatgagctgccggtct

SEQ ID NO: 61665 - DNA, 26 bp, Homo sapiens
caaagcgttgatgagctgccggtctt

SEQ ID NO: 61666 - DNA, 26 bp, Homo sapiens
aaagcgttgatgagctgccggtcttc

SEQ ID NO: 61667 - DNA, 26 bp, Homo sapiens
aagcgttgatgagctgccggtcttcc

SEQ ID NO: 61668 - DNA, 26 bp, Homo sapiens
agcgttgatgagctgccggtcttcct

SEQ ID NO: 61669 - DNA, 26 bp, Homo sapiens
gcgttgatgagctgccggtcttcctg

SEQ ID NO: 61670 - DNA, 26 bp, Homo sapiens
cgttgatgagctgccggtcttcctgc

SEQ ID NO: 61671 - DNA, 26 bp, Homo sapiens
gttgatgagctgccggtcttcctgcc

SEQ ID NO: 61672 - DNA, 26 bp, Homo sapiens
ttgatgagctgccggtcttcctgcct

SEQ ID NO: 61673 - DNA, 26 bp, Homo sapiens
tgatgagctgccggtcttcctgcctt

SEQ ID NO: 61674 - DNA, 26 bp, Homo sapiens
gatgagctgccggtcttcctgccttg

SEQ ID NO: 61675 - DNA, 26 bp, Homo sapiens
atgagctgccggtcttcctgccttgt

SEQ ID NO: 61676 - DNA, 26 bp, Homo sapiens
tgagctgccggtcttcctgccttgta

SEQ ID NO: 61677 - DNA, 26 bp, Homo sapiens
gagctgccggtcttcctgccttgtaa

SEQ ID NO: 61678 - DNA, 26 bp, Homo sapiens
agctgccggtcttcctgccttgtaag

SEQ ID NO: 61679 - DNA, 26 bp, Homo sapiens
gctgccggtcttcctgccttgtaagg

SEQ ID NO: 61680 - DNA, 26 bp, Homo sapiens
ctgccggtcttcctgccttgtaagga

SEQ ID NO: 61681 - DNA, 26 bp, Homo sapiens
tgccggtcttcctgccttgtaaggaa

SEQ ID NO: 61682 - DNA, 26 bp, Homo sapiens
gccggtcttcctgccttgtaaggaac

SEQ ID NO: 61683 - DNA, 26 bp, Homo sapiens
ccggtcttcctgccttgtaaggaaca

SEQ ID NO: 61684 - DNA, 26 bp, Homo sapiens
cggtcttcctgccttgtaaggaacaa

SEQ ID NO: 61685 - DNA, 26 bp, Homo sapiens
ggtcttcctgccttgtaaggaacaag

SEQ ID NO: 61686 - DNA, 26 bp, Homo sapiens
gtcttcctgccttgtaaggaacaagg

SEQ ID NO: 61687 - DNA, 26 bp, Homo sapiens
tcttcctgccttgtaaggaacaaggg

SEQ ID NO: 61688 - DNA, 26 bp, Homo sapiens
cttcctgccttgtaaggaacaagggg

SEQ ID NO: 61689 - DNA, 26 bp, Homo sapiens
ttcctgccttgtaaggaacaaggggg

SEQ ID NO: 61690 - DNA, 26 bp, Homo sapiens
tcctgccttgtaaggaacaagggggt

SEQ ID NO: 61691 - DNA, 26 bp, Homo sapiens
cctgccttgtaaggaacaagggggtg

SEQ ID NO: 61692 - DNA, 26 bp, Homo sapiens
ctgccttgtaaggaacaagggggtga

SEQ ID NO: 61693 - DNA, 26 bp, Homo sapiens
tgccttgtaaggaacaagggggtgat

SEQ ID NO: 61694 - DNA, 26 bp, Homo sapiens
gccttgtaaggaacaagggggtgatc

SEQ ID NO: 61695 - DNA, 26 bp, Homo sapiens
ccttgtaaggaacaagggggtgatcc

SEQ ID NO: 61696 - DNA, 26 bp, Homo sapiens
cttgtaaggaacaagggggtgatccc

SEQ ID NO: 61697 - DNA, 26 bp, Homo sapiens
ttgtaaggaacaagggggtgatcccc

SEQ ID NO: 61698 - DNA, 26 bp, Homo sapiens
tgtaaggaacaagggggtgatccccg

SEQ ID NO: 61699 - DNA, 26 bp, Homo sapiens
gtaaggaacaagggggtgatccccgc

SEQ ID NO: 61700 - DNA, 26 bp, Homo sapiens
taaggaacaagggggtgatccccgca

SEQ ID NO: 61701 - DNA, 26 bp, Homo sapiens
aaggaacaagggggtgatccccgcat

SEQ ID NO: 61702 - DNA, 26 bp, Homo sapiens
aggaacaagggggtgatccccgcatc

SEQ ID NO: 61703 - DNA, 26 bp, Homo sapiens
ggaacaagggggtgatccccgcatct

SEQ ID NO: 61704 - DNA, 26 bp, Homo sapiens
gaacaagggggtgatccccgcatctg

SEQ ID NO: 61705 - DNA, 26 bp, Homo sapiens
aacaagggggtgatccccgcatctga

SEQ ID NO: 61706 - DNA, 26 bp, Homo sapiens
acaagggggtgatccccgcatctgag

SEQ ID NO: 61707 - DNA, 26 bp, Homo sapiens
caagggggtgatccccgcatctgaga

SEQ ID NO: 61708 - DNA, 26 bp, Homo sapiens
aagggggtgatccccgcatctgagag

SEQ ID NO: 61709 - DNA, 26 bp, Homo sapiens
agggggtgatccccgcatctgagagc

SEQ ID NO: 61710 - DNA, 26 bp, Homo sapiens
gggggtgatccccgcatctgagagct

SEQ ID NO: 61711 - DNA, 26 bp, Homo sapiens
ggggtgatccccgcatctgagagctt

SEQ ID NO: 61712 - DNA, 26 bp, Homo sapiens
gggtgatccccgcatctgagagcttg

SEQ ID NO: 61713 - DNA, 26 bp, Homo sapiens
ggtgatccccgcatctgagagcttga

SEQ ID NO: 61714 - DNA, 26 bp, Homo sapiens
gtgatccccgcatctgagagcttgag

SEQ ID NO: 61715 - DNA, 26 bp, Homo sapiens
tgatccccgcatctgagagcttgagc

SEQ ID NO: 61716 - DNA, 26 bp, Homo sapiens
gatccccgcatctgagagcttgagca

SEQ ID NO: 61717 - DNA, 26 bp, Homo sapiens
atccccgcatctgagagcttgagcac

SEQ ID NO: 61718 - DNA, 26 bp, Homo sapiens
tccccgcatctgagagcttgagcaca

SEQ ID NO: 61719 - DNA, 26 bp, Homo sapiens
ccccgcatctgagagcttgagcacag

SEQ ID NO: 61720 - DNA, 26 bp, Homo sapiens
cccgcatctgagagcttgagcacagc

SEQ ID NO: 61721 - DNA, 26 bp, Homo sapiens
ccgcatctgagagcttgagcacagcc

SEQ ID NO: 61722 - DNA, 26 bp, Homo sapiens
cgcatctgagagcttgagcacagcct

SEQ ID NO: 61723 - DNA, 26 bp, Homo sapiens
gcatctgagagcttgagcacagcctc

SEQ ID NO: 61724 - DNA, 26 bp, Homo sapiens
catctgagagcttgagcacagcctct

SEQ ID NO: 61725 - DNA, 26 bp, Homo sapiens
atctgagagcttgagcacagcctctc

SEQ ID NO: 61726 - DNA, 26 bp, Homo sapiens
tctgagagcttgagcacagcctctct

SEQ ID NO: 61727 - DNA, 26 bp, Homo sapiens
ctgagagcttgagcacagcctctctg

SEQ ID NO: 61728 - DNA, 26 bp, Homo sapiens
tgagagcttgagcacagcctctctga

SEQ ID NO: 61729 - DNA, 26 bp, Homo sapiens
gagagcttgagcacagcctctctgag

SEQ ID NO: 61730 - DNA, 26 bp, Homo sapiens
agagcttgagcacagcctctctgagc

SEQ ID NO: 61731 - DNA, 26 bp, Homo sapiens
gagcttgagcacagcctctctgagct

SEQ ID NO: 61732 - DNA, 26 bp, Homo sapiens
agcttgagcacagcctctctgagctg

SEQ ID NO: 61733 - DNA, 26 bp, Homo sapiens
gcttgagcacagcctctctgagctgt

SEQ ID NO: 61734 - DNA, 26 bp, Homo sapiens
cttgagcacagcctctctgagctgtg

SEQ ID NO: 61735 - DNA, 26 bp, Homo sapiens
ttgagcacagcctctctgagctgtgg

SEQ ID NO: 61736 - DNA, 26 bp, Homo sapiens
tgagcacagcctctctgagctgtggg

SEQ ID NO: 61737 - DNA, 26 bp, Homo sapiens
gagcacagcctctctgagctgtgggg

SEQ ID NO: 61738 - DNA, 26 bp, Homo sapiens
agcacagcctctctgagctgtgggga

SEQ ID NO: 61739 - DNA, 26 bp, Homo sapiens
gcacagcctctctgagctgtggggat

SEQ ID NO: 61740 - DNA, 26 bp, Homo sapiens
cacagcctctctgagctgtggggatg

SEQ ID NO: 61741 - DNA, 26 bp, Homo sapiens
acagcctctctgagctgtggggatgc

SEQ ID NO: 61742 - DNA, 26 bp, Homo sapiens
cagcctctctgagctgtggggatgct

SEQ ID NO: 61743 - DNA, 26 bp, Homo sapiens
agcctctctgagctgtggggatgctc

SEQ ID NO: 61744 - DNA, 26 bp, Homo sapiens
gcctctctgagctgtggggatgctct

SEQ ID NO: 61745 - DNA, 26 bp, Homo sapiens
cctctctgagctgtggggatgctctt

SEQ ID NO: 61746 - DNA, 26 bp, Homo sapiens
ctctctgagctgtggggatgctcttg

SEQ ID NO: 61747 - DNA, 26 bp, Homo sapiens
tctctgagctgtggggatgctcttgt

SEQ ID NO: 61748 - DNA, 26 bp, Homo sapiens
ctctgagctgtggggatgctcttgtg

SEQ ID NO: 61749 - DNA, 26 bp, Homo sapiens
tctgagctgtggggatgctcttgtgg

SEQ ID NO: 61750 - DNA, 26 bp, Homo sapiens
ctgagctgtggggatgctcttgtggg

SEQ ID NO: 61751 - DNA, 26 bp, Homo sapiens
tgagctgtggggatgctcttgtgggt

SEQ ID NO: 61752 - DNA, 26 bp, Homo sapiens
gagctgtggggatgctcttgtgggtg

SEQ ID NO: 61753 - DNA, 26 bp, Homo sapiens
agctgtggggatgctcttgtgggtgt

SEQ ID NO: 61754 - DNA, 26 bp, Homo sapiens
gctgtggggatgctcttgtgggtgtg

SEQ ID NO: 61755 - DNA, 26 bp, Homo sapiens
ctgtggggatgctcttgtgggtgtgt

SEQ ID NO: 61756 - DNA, 26 bp, Homo sapiens
tgtggggatgctcttgtgggtgtgtt

SEQ ID NO: 61757 - DNA, 26 bp, Homo sapiens
gtggggatgctcttgtgggtgtgttg

SEQ ID NO: 61758 - DNA, 26 bp, Homo sapiens
tggggatgctcttgtgggtgtgttgc

SEQ ID NO: 61759 - DNA, 26 bp, Homo sapiens
ggggatgctcttgtgggtgtgttgct

SEQ ID NO: 61760 - DNA, 26 bp, Homo sapiens
gggatgctcttgtgggtgtgttgctg

SEQ ID NO: 61761 - DNA, 26 bp, Homo sapiens
ggatgctcttgtgggtgtgttgctga

SEQ ID NO: 61762 - DNA, 26 bp, Homo sapiens
gatgctcttgtgggtgtgttgctgaa

SEQ ID NO: 61763 - DNA, 26 bp, Homo sapiens
atgctcttgtgggtgtgttgctgaag

SEQ ID NO: 61764 - DNA, 26 bp, Homo sapiens
tgctcttgtgggtgtgttgctgaaga

SEQ ID NO: 61765 - DNA, 26 bp, Homo sapiens
gctcttgtgggtgtgttgctgaagaa

SEQ ID NO: 61766 - DNA, 26 bp, Homo sapiens
ctcttgtgggtgtgttgctgaagaaa

SEQ ID NO: 61767 - DNA, 26 bp, Homo sapiens
tcttgtgggtgtgttgctgaagaaaa

SEQ ID NO: 61768 - DNA, 26 bp, Homo sapiens
cttgtgggtgtgttgctgaagaaaac

SEQ ID NO: 61769 - DNA, 26 bp, Homo sapiens
ttgtgggtgtgttgctgaagaaaaca

SEQ ID NO: 61770 - DNA, 26 bp, Homo sapiens
tgtgggtgtgttgctgaagaaaacag

SEQ ID NO: 61771 - DNA, 26 bp, Homo sapiens
gtgggtgtgttgctgaagaaaacagc

SEQ ID NO: 61772 - DNA, 26 bp, Homo sapiens
tgggtgtgttgctgaagaaaacagcc

SEQ ID NO: 61773 - DNA, 26 bp, Homo sapiens
gggtgtgttgctgaagaaaacagcca

SEQ ID NO: 61774 - DNA, 26 bp, Homo sapiens
ggtgtgttgctgaagaaaacagccac

SEQ ID NO: 61775 - DNA, 26 bp, Homo sapiens
gtgtgttgctgaagaaaacagccact

SEQ ID NO: 61776 - DNA, 26 bp, Homo sapiens
tgtgttgctgaagaaaacagccactt

SEQ ID NO: 61777 - DNA, 26 bp, Homo sapiens
gtgttgctgaagaaaacagccacttt

SEQ ID NO: 61778 - DNA, 26 bp, Homo sapiens
tgttgctgaagaaaacagccactttc

SEQ ID NO: 61779 - DNA, 26 bp, Homo sapiens
gttgctgaagaaaacagccactttcc

SEQ ID NO: 61780 - DNA, 26 bp, Homo sapiens
ttgctgaagaaaacagccactttcct

SEQ ID NO: 61781 - DNA, 26 bp, Homo sapiens
tgctgaagaaaacagccactttcctc

SEQ ID NO: 61782 - DNA, 26 bp, Homo sapiens
gctgaagaaaacagccactttcctca

SEQ ID NO: 61783 - DNA, 26 bp, Homo sapiens
ctgaagaaaacagccactttcctcat

SEQ ID NO: 61784 - DNA, 26 bp, Homo sapiens
tgaagaaaacagccactttcctcatt

SEQ ID NO: 61785 - DNA, 26 bp, Homo sapiens
gaagaaaacagccactttcctcatta

SEQ ID NO: 61786 - DNA, 26 bp, Homo sapiens
aagaaaacagccactttcctcattag

SEQ ID NO: 61787 - DNA, 26 bp, Homo sapiens
agaaaacagccactttcctcattagg

SEQ ID NO: 61788 - DNA, 26 bp, Homo sapiens
gaaaacagccactttcctcattagga

SEQ ID NO: 61789 - DNA, 26 bp, Homo sapiens
aaaacagccactttcctcattaggaa

SEQ ID NO: 61790 - DNA, 26 bp, Homo sapiens
aaacagccactttcctcattaggaat

SEQ ID NO: 61791 - DNA, 26 bp, Homo sapiens
aacagccactttcctcattaggaatc

SEQ ID NO: 61792 - DNA, 26 bp, Homo sapiens
acagccactttcctcattaggaatcc

SEQ ID NO: 61793 - DNA, 26 bp, Homo sapiens
cagccactttcctcattaggaatccg

SEQ ID NO: 61794 - DNA, 26 bp, Homo sapiens
agccactttcctcattaggaatccgt

SEQ ID NO: 61795 - DNA, 26 bp, Homo sapiens
gccactttcctcattaggaatccgtt

SEQ ID NO: 61796 - DNA, 26 bp, Homo sapiens
ccactttcctcattaggaatccgttc

SEQ ID NO: 61797 - DNA, 26 bp, Homo sapiens
cactttcctcattaggaatccgttcc

SEQ ID NO: 61798 - DNA, 26 bp, Homo sapiens
actttcctcattaggaatccgttcct

SEQ ID NO: 61799 - DNA, 26 bp, Homo sapiens
ctttcctcattaggaatccgttcctc

SEQ ID NO: 61800 - DNA, 26 bp, Homo sapiens
tttcctcattaggaatccgttcctca

SEQ ID NO: 61801 - DNA, 26 bp, Homo sapiens
ttcctcattaggaatccgttcctcac

SEQ ID NO: 61802 - DNA, 26 bp, Homo sapiens
tcctcattaggaatccgttcctcaca

SEQ ID NO: 61803 - DNA, 26 bp, Homo sapiens
cctcattaggaatccgttcctcacac

SEQ ID NO: 61804 - DNA, 26 bp, Homo sapiens
ctcattaggaatccgttcctcacacg

SEQ ID NO: 61805 - DNA, 26 bp, Homo sapiens
tcattaggaatccgttcctcacacgc

SEQ ID NO: 61806 - DNA, 26 bp, Homo sapiens
cattaggaatccgttcctcacacgct

SEQ ID NO: 61807 - DNA, 26 bp, Homo sapiens
attaggaatccgttcctcacacgctt

SEQ ID NO: 61808 - DNA, 26 bp, Homo sapiens
ttaggaatccgttcctcacacgctta

SEQ ID NO: 61809 - DNA, 26 bp, Homo sapiens
taggaatccgttcctcacacgcttaa

SEQ ID NO: 61810 - DNA, 26 bp, Homo sapiens
aggaatccgttcctcacacgcttaaa

SEQ ID NO: 61811 - DNA, 26 bp, Homo sapiens
ggaatccgttcctcacacgcttaaat

SEQ ID NO: 61812 - DNA, 26 bp, Homo sapiens
gaatccgttcctcacacgcttaaatg

SEQ ID NO: 61813 - DNA, 26 bp, Homo sapiens
aatccgttcctcacacgcttaaatgt

SEQ ID NO: 61814 - DNA, 26 bp, Homo sapiens
atccgttcctcacacgcttaaatgtg

SEQ ID NO: 61815 - DNA, 26 bp, Homo sapiens
tccgttcctcacacgcttaaatgtgt

SEQ ID NO: 61816 - DNA, 26 bp, Homo sapiens
ccgttcctcacacgcttaaatgtgtt

SEQ ID NO: 61817 - DNA, 26 bp, Homo sapiens
cgttcctcacacgcttaaatgtgttc

SEQ ID NO: 61818 - DNA, 26 bp, Homo sapiens
gttcctcacacgcttaaatgtgttcc

SEQ ID NO: 61819 - DNA, 26 bp, Homo sapiens
ttcctcacacgcttaaatgtgttcct

SEQ ID NO: 61820 - DNA, 26 bp, Homo sapiens
tcctcacacgcttaaatgtgttcctg

SEQ ID NO: 61821 - DNA, 26 bp, Homo sapiens
cctcacacgcttaaatgtgttcctgg

SEQ ID NO: 61822 - DNA, 26 bp, Homo sapiens
ctcacacgcttaaatgtgttcctggc

SEQ ID NO: 61823 - DNA, 26 bp, Homo sapiens
tcacacgcttaaatgtgttcctggcc

SEQ ID NO: 61824 - DNA, 26 bp, Homo sapiens
cacacgcttaaatgtgttcctggcca

SEQ ID NO: 61825 - DNA, 26 bp, Homo sapiens
acacgcttaaatgtgttcctggccac

SEQ ID NO: 61826 - DNA, 26 bp, Homo sapiens
cacgcttaaatgtgttcctggccaca

SEQ ID NO: 61827 - DNA, 26 bp, Homo sapiens
acgcttaaatgtgttcctggccacaa

SEQ ID NO: 61828 - DNA, 26 bp, Homo sapiens
cgcttaaatgtgttcctggccacaaa

SEQ ID NO: 61829 - DNA, 26 bp, Homo sapiens
gcttaaatgtgttcctggccacaaac

SEQ ID NO: 61830 - DNA, 26 bp, Homo sapiens
cttaaatgtgttcctggccacaaacg

SEQ ID NO: 61831 - DNA, 26 bp, Homo sapiens
ttaaatgtgttcctggccacaaacga

SEQ ID NO: 61832 - DNA, 26 bp, Homo sapiens
taaatgtgttcctggccacaaacgac

SEQ ID NO: 61833 - DNA, 26 bp, Homo sapiens
aaatgtgttcctggccacaaacgaca

SEQ ID NO: 61834 - DNA, 26 bp, Homo sapiens
aatgtgttcctggccacaaacgacat

SEQ ID NO: 61835 - DNA, 26 bp, Homo sapiens
atgtgttcctggccacaaacgacatg

SEQ ID NO: 61836 - DNA, 26 bp, Homo sapiens
tgtgttcctggccacaaacgacatgg

SEQ ID NO: 61837 - DNA, 26 bp, Homo sapiens
gtgttcctggccacaaacgacatggc

SEQ ID NO: 61838 - DNA, 26 bp, Homo sapiens
tgttcctggccacaaacgacatggca

SEQ ID NO: 61839 - DNA, 26 bp, Homo sapiens
gttcctggccacaaacgacatggcag

SEQ ID NO: 61840 - DNA, 26 bp, Homo sapiens
ttcctggccacaaacgacatggcagt

SEQ ID NO: 61841 - DNA, 26 bp, Homo sapiens
tcctggccacaaacgacatggcagtc

SEQ ID NO: 61842 - DNA, 26 bp, Homo sapiens
cctggccacaaacgacatggcagtct

SEQ ID NO: 61843 - DNA, 26 bp, Homo sapiens
ctggccacaaacgacatggcagtctc

SEQ ID NO: 61844 - DNA, 26 bp, Homo sapiens
tggccacaaacgacatggcagtctcc

SEQ ID NO: 61845 - DNA, 26 bp, Homo sapiens
ggccacaaacgacatggcagtctcca

SEQ ID NO: 61846 - DNA, 26 bp, Homo sapiens
gccacaaacgacatggcagtctccag

SEQ ID NO: 61847 - DNA, 26 bp, Homo sapiens
ccacaaacgacatggcagtctccaga

SEQ ID NO: 61848 - DNA, 26 bp, Homo sapiens
cacaaacgacatggcagtctccagac

SEQ ID NO: 61849 - DNA, 26 bp, Homo sapiens
acaaacgacatggcagtctccagact

SEQ ID NO: 61850 - DNA, 26 bp, Homo sapiens
caaacgacatggcagtctccagactc

SEQ ID NO: 61851 - DNA, 26 bp, Homo sapiens
aaacgacatggcagtctccagactct

SEQ ID NO: 61852 - DNA, 26 bp, Homo sapiens
aacgacatggcagtctccagactctg

SEQ ID NO: 61853 - DNA, 26 bp, Homo sapiens
acgacatggcagtctccagactctgc

SEQ ID NO: 61854 - DNA, 26 bp, Homo sapiens
cgacatggcagtctccagactctgct

SEQ ID NO: 61855 - DNA, 26 bp, Homo sapiens
gacatggcagtctccagactctgctg

SEQ ID NO: 61856 - DNA, 26 bp, Homo sapiens
acatggcagtctccagactctgctgt

SEQ ID NO: 61857 - DNA, 26 bp, Homo sapiens
catggcagtctccagactctgctgtt

SEQ ID NO: 61858 - DNA, 26 bp, Homo sapiens
atggcagtctccagactctgctgttt

SEQ ID NO: 61859 - DNA, 26 bp, Homo sapiens
tggcagtctccagactctgctgtttg

SEQ ID NO: 61860 - DNA, 26 bp, Homo sapiens
ggcagtctccagactctgctgtttgg

SEQ ID NO: 61861 - DNA, 26 bp, Homo sapiens
gcagtctccagactctgctgtttgga

SEQ ID NO: 61862 - DNA, 26 bp, Homo sapiens
cagtctccagactctgctgtttggat

SEQ ID NO: 61863 - DNA, 26 bp, Homo sapiens
agtctccagactctgctgtttggatg

SEQ ID NO: 61864 - DNA, 26 bp, Homo sapiens
gtctccagactctgctgtttggatgt

SEQ ID NO: 61865 - DNA, 26 bp, Homo sapiens
tctccagactctgctgtttggatgtc

SEQ ID NO: 61866 - DNA, 26 bp, Homo sapiens
ctccagactctgctgtttggatgtca

SEQ ID NO: 61867 - DNA, 26 bp, Homo sapiens
tccagactctgctgtttggatgtcag

SEQ ID NO: 61868 - DNA, 26 bp, Homo sapiens
ccagactctgctgtttggatgtcaga

SEQ ID NO: 61869 - DNA, 26 bp, Homo sapiens
cagactctgctgtttggatgtcagag

SEQ ID NO: 61870 - DNA, 26 bp, Homo sapiens
agactctgctgtttggatgtcagagc

SEQ ID NO: 61871 - DNA, 26 bp, Homo sapiens
gactctgctgtttggatgtcagagcc

SEQ ID NO: 61872 - DNA, 26 bp, Homo sapiens
actctgctgtttggatgtcagagcca

SEQ ID NO: 61873 - DNA, 26 bp, Homo sapiens
ctctgctgtttggatgtcagagccac

SEQ ID NO: 61874 - DNA, 26 bp, Homo sapiens
tctgctgtttggatgtcagagccacc

SEQ ID NO: 61875 - DNA, 26 bp, Homo sapiens
ctgctgtttggatgtcagagccacct

SEQ ID NO: 61876 - DNA, 26 bp, Homo sapiens
tgctgtttggatgtcagagccacctg

SEQ ID NO: 61877 - DNA, 26 bp, Homo sapiens
gctgtttggatgtcagagccacctga

SEQ ID NO: 61878 - DNA, 26 bp, Homo sapiens
ctgtttggatgtcagagccacctgaa

SEQ ID NO: 61879 - DNA, 26 bp, Homo sapiens
tgtttggatgtcagagccacctgaag

SEQ ID NO: 61880 - DNA, 26 bp, Homo sapiens
gtttggatgtcagagccacctgaagg

SEQ ID NO: 61881 - DNA, 26 bp, Homo sapiens
tttggatgtcagagccacctgaaggt

SEQ ID NO: 61882 - DNA, 26 bp, Homo sapiens
ttggatgtcagagccacctgaaggtt

SEQ ID NO: 61883 - DNA, 26 bp, Homo sapiens
tggatgtcagagccacctgaaggttc

SEQ ID NO: 61884 - DNA, 26 bp, Homo sapiens
ggatgtcagagccacctgaaggttct

SEQ ID NO: 61885 - DNA, 26 bp, Homo sapiens
gatgtcagagccacctgaaggttctt

SEQ ID NO: 61886 - DNA, 26 bp, Homo sapiens
atgtcagagccacctgaaggttctta

SEQ ID NO: 61887 - DNA, 26 bp, Homo sapiens
tgtcagagccacctgaaggttcttaa

SEQ ID NO: 61888 - DNA, 26 bp, Homo sapiens
gtcagagccacctgaaggttcttaat

SEQ ID NO: 61889 - DNA, 26 bp, Homo sapiens
tcagagccacctgaaggttcttaatc

SEQ ID NO: 61890 - DNA, 26 bp, Homo sapiens
cagagccacctgaaggttcttaatct

SEQ ID NO: 61891 - DNA, 26 bp, Homo sapiens
agagccacctgaaggttcttaatctt

SEQ ID NO: 61892 - DNA, 26 bp, Homo sapiens
gagccacctgaaggttcttaatcttg

SEQ ID NO: 61893 - DNA, 26 bp, Homo sapiens
agccacctgaaggttcttaatcttgt

SEQ ID NO: 61894 - DNA, 26 bp, Homo sapiens
gccacctgaaggttcttaatcttgtc

SEQ ID NO: 61895 - DNA, 26 bp, Homo sapiens
ccacctgaaggttcttaatcttgtcc

SEQ ID NO: 61896 - DNA, 26 bp, Homo sapiens
cacctgaaggttcttaatcttgtcca

SEQ ID NO: 61897 - DNA, 26 bp, Homo sapiens
acctgaaggttcttaatcttgtccag

SEQ ID NO: 61898 - DNA, 26 bp, Homo sapiens
cctgaaggttcttaatcttgtccagg

SEQ ID NO: 61899 - DNA, 26 bp, Homo sapiens
ctgaaggttcttaatcttgtccagga

SEQ ID NO: 61900 - DNA, 26 bp, Homo sapiens
tgaaggttcttaatcttgtccaggag

SEQ ID NO: 61901 - DNA, 26 bp, Homo sapiens
gaaggttcttaatcttgtccaggagg

SEQ ID NO: 61902 - DNA, 26 bp, Homo sapiens
aaggttcttaatcttgtccaggagga

SEQ ID NO: 61903 - DNA, 26 bp, Homo sapiens
aggttcttaatcttgtccaggaggac

SEQ ID NO: 61904 - DNA, 26 bp, Homo sapiens
ggttcttaatcttgtccaggaggacc

SEQ ID NO: 61905 - DNA, 26 bp, Homo sapiens
gttcttaatcttgtccaggaggaccg

SEQ ID NO: 61906 - DNA, 26 bp, Homo sapiens
ttcttaatcttgtccaggaggaccga

SEQ ID NO: 61907 - DNA, 26 bp, Homo sapiens
tcttaatcttgtccaggaggaccgac

SEQ ID NO: 61908 - DNA, 26 bp, Homo sapiens
cttaatcttgtccaggaggaccgact

SEQ ID NO: 61909 - DNA, 26 bp, Homo sapiens
ttaatcttgtccaggaggaccgactt

SEQ ID NO: 61910 - DNA, 26 bp, Homo sapiens
taatcttgtccaggaggaccgacttc

SEQ ID NO: 61911 - DNA, 26 bp, Homo sapiens
aatcttgtccaggaggaccgacttcc

SEQ ID NO: 61912 - DNA, 26 bp, Homo sapiens
atcttgtccaggaggaccgacttcct

SEQ ID NO: 61913 - DNA, 26 bp, Homo sapiens
tcttgtccaggaggaccgacttcctc

SEQ ID NO: 61914 - DNA, 26 bp, Homo sapiens
cttgtccaggaggaccgacttcctct

SEQ ID NO: 61915 - DNA, 26 bp, Homo sapiens
ttgtccaggaggaccgacttcctctt

SEQ ID NO: 61916 - DNA, 26 bp, Homo sapiens
tgtccaggaggaccgacttcctcttg

SEQ ID NO: 61917 - DNA, 26 bp, Homo sapiens
gtccaggaggaccgacttcctcttgg

SEQ ID NO: 61918 - DNA, 26 bp, Homo sapiens
tccaggaggaccgacttcctcttgga

SEQ ID NO: 61919 - DNA, 26 bp, Homo sapiens
ccaggaggaccgacttcctcttggag

SEQ ID NO: 61920 - DNA, 26 bp, Homo sapiens
caggaggaccgacttcctcttggagt

SEQ ID NO: 61921 - DNA, 26 bp, Homo sapiens
aggaggaccgacttcctcttggagtc

SEQ ID NO: 61922 - DNA, 26 bp, Homo sapiens
ggaggaccgacttcctcttggagtca

SEQ ID NO: 61923 - DNA, 26 bp, Homo sapiens
gaggaccgacttcctcttggagtcag

SEQ ID NO: 61924 - DNA, 26 bp, Homo sapiens
aggaccgacttcctcttggagtcagc

SEQ ID NO: 61925 - DNA, 26 bp, Homo sapiens
ggaccgacttcctcttggagtcagca

SEQ ID NO: 61926 - DNA, 26 bp, Homo sapiens
gaccgacttcctcttggagtcagcaa

SEQ ID NO: 61927 - DNA, 26 bp, Homo sapiens
accgacttcctcttggagtcagcaaa

SEQ ID NO: 61928 - DNA, 26 bp, Homo sapiens
ccgacttcctcttggagtcagcaaac

SEQ ID NO: 61929 - DNA, 26 bp, Homo sapiens
cgacttcctcttggagtcagcaaacc

SEQ ID NO: 61930 - DNA, 26 bp, Homo sapiens
gacttcctcttggagtcagcaaaccg

SEQ ID NO: 61931 - DNA, 26 bp, Homo sapiens
acttcctcttggagtcagcaaaccgg

SEQ ID NO: 61932 - DNA, 26 bp, Homo sapiens
cttcctcttggagtcagcaaaccgga

SEQ ID NO: 61933 - DNA, 26 bp, Homo sapiens
ttcctcttggagtcagcaaaccggat

SEQ ID NO: 61934 - DNA, 26 bp, Homo sapiens
tcctcttggagtcagcaaaccggatc

SEQ ID NO: 61935 - DNA, 26 bp, Homo sapiens
cctcttggagtcagcaaaccggatct

SEQ ID NO: 61936 - DNA, 26 bp, Homo sapiens
ctcttggagtcagcaaaccggatctc

SEQ ID NO: 61937 - DNA, 26 bp, Homo sapiens
tcttggagtcagcaaaccggatctcc

SEQ ID NO: 61938 - DNA, 26 bp, Homo sapiens
cttggagtcagcaaaccggatctccg

SEQ ID NO: 61939 - DNA, 26 bp, Homo sapiens
ttggagtcagcaaaccggatctccgt

SEQ ID NO: 61940 - DNA, 26 bp, Homo sapiens
tggagtcagcaaaccggatctccgtg

SEQ ID NO: 61941 - DNA, 26 bp, Homo sapiens
ggagtcagcaaaccggatctccgtgg

SEQ ID NO: 61942 - DNA, 26 bp, Homo sapiens
gagtcagcaaaccggatctccgtggt

SEQ ID NO: 61943 - DNA, 26 bp, Homo sapiens
agtcagcaaaccggatctccgtggtc

SEQ ID NO: 61944 - DNA, 26 bp, Homo sapiens
gtcagcaaaccggatctccgtggtca

SEQ ID NO: 61945 - DNA, 26 bp, Homo sapiens
tcagcaaaccggatctccgtggtcac

SEQ ID NO: 61946 - DNA, 26 bp, Homo sapiens
cagcaaaccggatctccgtggtcacc

SEQ ID NO: 61947 - DNA, 26 bp, Homo sapiens
agcaaaccggatctccgtggtcacct

SEQ ID NO: 61948 - DNA, 26 bp, Homo sapiens
gcaaaccggatctccgtggtcacctc

SEQ ID NO: 61949 - DNA, 26 bp, Homo sapiens
caaaccggatctccgtggtcacctcg

SEQ ID NO: 61950 - DNA, 26 bp, Homo sapiens
aaaccggatctccgtggtcacctcgt

SEQ ID NO: 61951 - DNA, 26 bp, Homo sapiens
aaccggatctccgtggtcacctcgtt

SEQ ID NO: 61952 - DNA, 26 bp, Homo sapiens
accggatctccgtggtcacctcgttg

SEQ ID NO: 61953 - DNA, 26 bp, Homo sapiens
ccggatctccgtggtcacctcgttgt

SEQ ID NO: 61954 - DNA, 26 bp, Homo sapiens
cggatctccgtggtcacctcgttgtt

SEQ ID NO: 61955 - DNA, 26 bp, Homo sapiens
ggatctccgtggtcacctcgttgttg

SEQ ID NO: 61956 - DNA, 26 bp, Homo sapiens
gatctccgtggtcacctcgttgttgt

SEQ ID NO: 61957 - DNA, 26 bp, Homo sapiens
atctccgtggtcacctcgttgttgta

SEQ ID NO: 61958 - DNA, 26 bp, Homo sapiens
tctccgtggtcacctcgttgttgtag

SEQ ID NO: 61959 - DNA, 26 bp, Homo sapiens
ctccgtggtcacctcgttgttgtagg

SEQ ID NO: 61960 - DNA, 26 bp, Homo sapiens
tccgtggtcacctcgttgttgtaggt

SEQ ID NO: 61961 - DNA, 26 bp, Homo sapiens
ccgtggtcacctcgttgttgtaggtg

SEQ ID NO: 61962 - DNA, 26 bp, Homo sapiens
cgtggtcacctcgttgttgtaggtga

SEQ ID NO: 61963 - DNA, 26 bp, Homo sapiens
gtggtcacctcgttgttgtaggtgac

SEQ ID NO: 61964 - DNA, 26 bp, Homo sapiens
tggtcacctcgttgttgtaggtgacc

SEQ ID NO: 61965 - DNA, 26 bp, Homo sapiens
ggtcacctcgttgttgtaggtgacca

SEQ ID NO: 61966 - DNA, 26 bp, Homo sapiens
gtcacctcgttgttgtaggtgaccac

SEQ ID NO: 61967 - DNA, 26 bp, Homo sapiens
tcacctcgttgttgtaggtgaccaca

SEQ ID NO: 61968 - DNA, 26 bp, Homo sapiens
cacctcgttgttgtaggtgaccacag

SEQ ID NO: 61969 - DNA, 26 bp, Homo sapiens
acctcgttgttgtaggtgaccacagc

SEQ ID NO: 61970 - DNA, 26 bp, Homo sapiens
cctcgttgttgtaggtgaccacagcc

SEQ ID NO: 61971 - DNA, 26 bp, Homo sapiens
ctcgttgttgtaggtgaccacagcca

SEQ ID NO: 61972 - DNA, 26 bp, Homo sapiens
tcgttgttgtaggtgaccacagccac

SEQ ID NO: 61973 - DNA, 26 bp, Homo sapiens
cgttgttgtaggtgaccacagccacc

SEQ ID NO: 61974 - DNA, 26 bp, Homo sapiens
gttgttgtaggtgaccacagccaccc

SEQ ID NO: 61975 - DNA, 26 bp, Homo sapiens
ttgttgtaggtgaccacagccacccg

SEQ ID NO: 61976 - DNA, 26 bp, Homo sapiens
tgttgtaggtgaccacagccacccgg

SEQ ID NO: 61977 - DNA, 26 bp, Homo sapiens
gttgtaggtgaccacagccacccggg

SEQ ID NO: 61978 - DNA, 26 bp, Homo sapiens
ttgtaggtgaccacagccacccgggc

SEQ ID NO: 61979 - DNA, 26 bp, Homo sapiens
tgtaggtgaccacagccacccgggcc

SEQ ID NO: 61980 - DNA, 26 bp, Homo sapiens
gtaggtgaccacagccacccgggccc

SEQ ID NO: 61981 - DNA, 26 bp, Homo sapiens
taggtgaccacagccacccgggcccc

SEQ ID NO: 61982 - DNA, 26 bp, Homo sapiens
aggtgaccacagccacccgggccccc

SEQ ID NO: 61983 - DNA, 26 bp, Homo sapiens
ggtgaccacagccacccgggcccccc

SEQ ID NO: 61984 - DNA, 26 bp, Homo sapiens
gtgaccacagccacccgggccccccg

SEQ ID NO: 61985 - DNA, 26 bp, Homo sapiens
tgaccacagccacccgggccccccgt

SEQ ID NO: 61986 - DNA, 26 bp, Homo sapiens
gaccacagccacccgggccccccgtg

SEQ ID NO: 61987 - DNA, 26 bp, Homo sapiens
accacagccacccgggccccccgtgg

SEQ ID NO: 61988 - DNA, 26 bp, Homo sapiens
ccacagccacccgggccccccgtggg

SEQ ID NO: 61989 - DNA, 26 bp, Homo sapiens
cacagccacccgggccccccgtgggc

SEQ ID NO: 61990 - DNA, 26 bp, Homo sapiens
acagccacccgggccccccgtgggca

SEQ ID NO: 61991 - DNA, 26 bp, Homo sapiens
cagccacccgggccccccgtgggcag

SEQ ID NO: 61992 - DNA, 26 bp, Homo sapiens
agccacccgggccccccgtgggcagt

SEQ ID NO: 61993 - DNA, 26 bp, Homo sapiens
gccacccgggccccccgtgggcagtt

SEQ ID NO: 61994 - DNA, 26 bp, Homo sapiens
ccacccgggccccccgtgggcagttg

SEQ ID NO: 61995 - DNA, 26 bp, Homo sapiens
cacccgggccccccgtgggcagttgc

SEQ ID NO: 61996 - DNA, 26 bp, Homo sapiens
acccgggccccccgtgggcagttgct

SEQ ID NO: 61997 - DNA, 26 bp, Homo sapiens
cccgggccccccgtgggcagttgctc

SEQ ID NO: 61998 - DNA, 26 bp, Homo sapiens
ccgggccccccgtgggcagttgctct

SEQ ID NO: 61999 - DNA, 26 bp, Homo sapiens
cgggccccccgtgggcagttgctctc

SEQ ID NO: 62000 - DNA, 26 bp, Homo sapiens
gggccccccgtgggcagttgctctca

SEQ ID NO: 62001 - DNA, 26 bp, Homo sapiens
ggccccccgtgggcagttgctctcag

SEQ ID NO: 62002 - DNA, 26 bp, Homo sapiens
gccccccgtgggcagttgctctcagc

SEQ ID NO: 62003 - DNA, 26 bp, Homo sapiens
ccccccgtgggcagttgctctcagca

SEQ ID NO: 62004 - DNA, 26 bp, Homo sapiens
cccccgtgggcagttgctctcagcaa

SEQ ID NO: 62005 - DNA, 26 bp, Homo sapiens
ccccgtgggcagttgctctcagcaat

SEQ ID NO: 62006 - DNA, 26 bp, Homo sapiens
cccgtgggcagttgctctcagcaatg

SEQ ID NO: 62007 - DNA, 26 bp, Homo sapiens
ccgtgggcagttgctctcagcaatgg

SEQ ID NO: 62008 - DNA, 26 bp, Homo sapiens
cgtgggcagttgctctcagcaatggt

SEQ ID NO: 62009 - DNA, 26 bp, Homo sapiens
gtgggcagttgctctcagcaatggtc

SEQ ID NO: 62010 - DNA, 26 bp, Homo sapiens
tgggcagttgctctcagcaatggtca

SEQ ID NO: 62011 - DNA, 26 bp, Homo sapiens
gggcagttgctctcagcaatggtcag

SEQ ID NO: 62012 - DNA, 26 bp, Homo sapiens
ggcagttgctctcagcaatggtcagg

SEQ ID NO: 62013 - DNA, 26 bp, Homo sapiens
gcagttgctctcagcaatggtcaggt

SEQ ID NO: 62014 - DNA, 26 bp, Homo sapiens
cagttgctctcagcaatggtcaggtc

SEQ ID NO: 62015 - DNA, 26 bp, Homo sapiens
agttgctctcagcaatggtcaggtca

SEQ ID NO: 62016 - DNA, 26 bp, Homo sapiens
gttgctctcagcaatggtcaggtcat

SEQ ID NO: 62017 - DNA, 26 bp, Homo sapiens
ttgctctcagcaatggtcaggtcatt

SEQ ID NO: 62018 - DNA, 26 bp, Homo sapiens
tgctctcagcaatggtcaggtcattc

SEQ ID NO: 62019 - DNA, 26 bp, Homo sapiens
gctctcagcaatggtcaggtcattca

SEQ ID NO: 62020 - DNA, 26 bp, Homo sapiens
ctctcagcaatggtcaggtcattcac

SEQ ID NO: 62021 - DNA, 26 bp, Homo sapiens
tctcagcaatggtcaggtcattcaca

SEQ ID NO: 62022 - DNA, 26 bp, Homo sapiens
ctcagcaatggtcaggtcattcacaa

SEQ ID NO: 62023 - DNA, 26 bp, Homo sapiens
tcagcaatggtcaggtcattcacaat

SEQ ID NO: 62024 - DNA, 26 bp, Homo sapiens
cagcaatggtcaggtcattcacaata

SEQ ID NO: 62025 - DNA, 26 bp, Homo sapiens
agcaatggtcaggtcattcacaatac

SEQ ID NO: 62026 - DNA, 26 bp, Homo sapiens
gcaatggtcaggtcattcacaatact

SEQ ID NO: 62027 - DNA, 26 bp, Homo sapiens
caatggtcaggtcattcacaatactc

SEQ ID NO: 62028 - DNA, 26 bp, Homo sapiens
aatggtcaggtcattcacaatactca

SEQ ID NO: 62029 - DNA, 26 bp, Homo sapiens
atggtcaggtcattcacaatactcaa

SEQ ID NO: 62030 - DNA, 26 bp, Homo sapiens
tggtcaggtcattcacaatactcaag

SEQ ID NO: 62031 - DNA, 26 bp, Homo sapiens
ggtcaggtcattcacaatactcaaga

SEQ ID NO: 62032 - DNA, 26 bp, Homo sapiens
gtcaggtcattcacaatactcaagac

SEQ ID NO: 62033 - DNA, 26 bp, Homo sapiens
tcaggtcattcacaatactcaagacc

SEQ ID NO: 62034 - DNA, 26 bp, Homo sapiens
caggtcattcacaatactcaagacca

SEQ ID NO: 62035 - DNA, 26 bp, Homo sapiens
aggtcattcacaatactcaagaccac

SEQ ID NO: 62036 - DNA, 26 bp, Homo sapiens
ggtcattcacaatactcaagaccaca

SEQ ID NO: 62037 - DNA, 26 bp, Homo sapiens
gtcattcacaatactcaagaccacat

SEQ ID NO: 62038 - DNA, 26 bp, Homo sapiens
tcattcacaatactcaagaccacatc

SEQ ID NO: 62039 - DNA, 26 bp, Homo sapiens
cattcacaatactcaagaccacatct

SEQ ID NO: 62040 - DNA, 26 bp, Homo sapiens
attcacaatactcaagaccacatctc

SEQ ID NO: 62041 - DNA, 26 bp, Homo sapiens
ttcacaatactcaagaccacatctcg

SEQ ID NO: 62042 - DNA, 26 bp, Homo sapiens
tcacaatactcaagaccacatctcgc

SEQ ID NO: 62043 - DNA, 26 bp, Homo sapiens
cacaatactcaagaccacatctcgca

SEQ ID NO: 62044 - DNA, 26 bp, Homo sapiens
acaatactcaagaccacatctcgcat

SEQ ID NO: 62045 - DNA, 26 bp, Homo sapiens
caatactcaagaccacatctcgcatc

SEQ ID NO: 62046 - DNA, 26 bp, Homo sapiens
aatactcaagaccacatctcgcatcc

SEQ ID NO: 62047 - DNA, 26 bp, Homo sapiens
atactcaagaccacatctcgcatccg

SEQ ID NO: 62048 - DNA, 26 bp, Homo sapiens
tactcaagaccacatctcgcatccgg

SEQ ID NO: 62049 - DNA, 26 bp, Homo sapiens
actcaagaccacatctcgcatccggc

SEQ ID NO: 62050 - DNA, 26 bp, Homo sapiens
ctcaagaccacatctcgcatccggcc

SEQ ID NO: 62051 - DNA, 26 bp, Homo sapiens
tcaagaccacatctcgcatccggccg

SEQ ID NO: 62052 - DNA, 26 bp, Homo sapiens
caagaccacatctcgcatccggccga

SEQ ID NO: 62053 - DNA, 26 bp, Homo sapiens
aagaccacatctcgcatccggccgaa

SEQ ID NO: 62054 - DNA, 26 bp, Homo sapiens
agaccacatctcgcatccggccgaaa

SEQ ID NO: 62055 - DNA, 26 bp, Homo sapiens
gaccacatctcgcatccggccgaaag

SEQ ID NO: 62056 - DNA, 26 bp, Homo sapiens
accacatctcgcatccggccgaaagt

SEQ ID NO: 62057 - DNA, 26 bp, Homo sapiens
ccacatctcgcatccggccgaaagtg

SEQ ID NO: 62058 - DNA, 26 bp, Homo sapiens
cacatctcgcatccggccgaaagtgt

SEQ ID NO: 62059 - DNA, 26 bp, Homo sapiens
acatctcgcatccggccgaaagtgtc

SEQ ID NO: 62060 - DNA, 26 bp, Homo sapiens
catctcgcatccggccgaaagtgtct

SEQ ID NO: 62061 - DNA, 26 bp, Homo sapiens
atctcgcatccggccgaaagtgtctt

SEQ ID NO: 62062 - DNA, 26 bp, Homo sapiens
tctcgcatccggccgaaagtgtcttg

SEQ ID NO: 62063 - DNA, 26 bp, Homo sapiens
ctcgcatccggccgaaagtgtcttgg

SEQ ID NO: 62064 - DNA, 26 bp, Homo sapiens
tcgcatccggccgaaagtgtcttggt

SEQ ID NO: 62065 - DNA, 26 bp, Homo sapiens
cgcatccggccgaaagtgtcttggtt

SEQ ID NO: 62066 - DNA, 26 bp, Homo sapiens
gcatccggccgaaagtgtcttggttg

SEQ ID NO: 62067 - DNA, 26 bp, Homo sapiens
catccggccgaaagtgtcttggttga

SEQ ID NO: 62068 - DNA, 26 bp, Homo sapiens
atccggccgaaagtgtcttggttgac

SEQ ID NO: 62069 - DNA, 26 bp, Homo sapiens
tccggccgaaagtgtcttggttgact

SEQ ID NO: 62070 - DNA, 26 bp, Homo sapiens
ccggccgaaagtgtcttggttgactc

SEQ ID NO: 62071 - DNA, 26 bp, Homo sapiens
cggccgaaagtgtcttggttgactcc

SEQ ID NO: 62072 - DNA, 26 bp, Homo sapiens
ggccgaaagtgtcttggttgactccc

SEQ ID NO: 62073 - DNA, 26 bp, Homo sapiens
gccgaaagtgtcttggttgactccct

SEQ ID NO: 62074 - DNA, 26 bp, Homo sapiens
ccgaaagtgtcttggttgactccctc

SEQ ID NO: 62075 - DNA, 26 bp, Homo sapiens
cgaaagtgtcttggttgactccctca

SEQ ID NO: 62076 - DNA, 26 bp, Homo sapiens
gaaagtgtcttggttgactccctcag

SEQ ID NO: 62077 - DNA, 26 bp, Homo sapiens
aaagtgtcttggttgactccctcaga

SEQ ID NO: 62078 - DNA, 26 bp, Homo sapiens
aagtgtcttggttgactccctcagag

SEQ ID NO: 62079 - DNA, 26 bp, Homo sapiens
agtgtcttggttgactccctcagagg

SEQ ID NO: 62080 - DNA, 26 bp, Homo sapiens
gtgtcttggttgactccctcagaggt

SEQ ID NO: 62081 - DNA, 26 bp, Homo sapiens
tgtcttggttgactccctcagaggtg

SEQ ID NO: 62082 - DNA, 26 bp, Homo sapiens
gtcttggttgactccctcagaggtgt

SEQ ID NO: 62083 - DNA, 26 bp, Homo sapiens
tcttggttgactccctcagaggtgtc

SEQ ID NO: 62084 - DNA, 26 bp, Homo sapiens
cttggttgactccctcagaggtgtct

SEQ ID NO: 62085 - DNA, 26 bp, Homo sapiens
ttggttgactccctcagaggtgtcta

SEQ ID NO: 62086 - DNA, 26 bp, Homo sapiens
tggttgactccctcagaggtgtctaa

SEQ ID NO: 62087 - DNA, 26 bp, Homo sapiens
ggttgactccctcagaggtgtctaaa

SEQ ID NO: 62088 - DNA, 26 bp, Homo sapiens
gttgactccctcagaggtgtctaaag

SEQ ID NO: 62089 - DNA, 26 bp, Homo sapiens
ttgactccctcagaggtgtctaaagc

SEQ ID NO: 62090 - DNA, 26 bp, Homo sapiens
tgactccctcagaggtgtctaaagca

SEQ ID NO: 62091 - DNA, 26 bp, Homo sapiens
gactccctcagaggtgtctaaagcaa

SEQ ID NO: 62092 - DNA, 26 bp, Homo sapiens
actccctcagaggtgtctaaagcaaa

SEQ ID NO: 62093 - DNA, 26 bp, Homo sapiens
ctccctcagaggtgtctaaagcaaag

SEQ ID NO: 62094 - DNA, 26 bp, Homo sapiens
tccctcagaggtgtctaaagcaaagg

SEQ ID NO: 62095 - DNA, 26 bp, Homo sapiens
ccctcagaggtgtctaaagcaaaggc

SEQ ID NO: 62096 - DNA, 26 bp, Homo sapiens
cctcagaggtgtctaaagcaaaggct

SEQ ID NO: 62097 - DNA, 26 bp, Homo sapiens
ctcagaggtgtctaaagcaaaggcta

SEQ ID NO: 62098 - DNA, 26 bp, Homo sapiens
tcagaggtgtctaaagcaaaggctag

SEQ ID NO: 62099 - DNA, 26 bp, Homo sapiens
cagaggtgtctaaagcaaaggctagt

SEQ ID NO: 62100 - DNA, 26 bp, Homo sapiens
agaggtgtctaaagcaaaggctagtt

SEQ ID NO: 62101 - DNA, 26 bp, Homo sapiens
gaggtgtctaaagcaaaggctagttc

SEQ ID NO: 62102 - DNA, 26 bp, Homo sapiens
aggtgtctaaagcaaaggctagttct

SEQ ID NO: 62103 - DNA, 26 bp, Homo sapiens
ggtgtctaaagcaaaggctagttctg

SEQ ID NO: 62104 - DNA, 26 bp, Homo sapiens
gtgtctaaagcaaaggctagttctgt

SEQ ID NO: 62105 - DNA, 26 bp, Homo sapiens
tgtctaaagcaaaggctagttctgtt

SEQ ID NO: 62106 - DNA, 26 bp, Homo sapiens
gtctaaagcaaaggctagttctgttg

SEQ ID NO: 62107 - DNA, 26 bp, Homo sapiens
tctaaagcaaaggctagttctgttgg

SEQ ID NO: 62108 - DNA, 26 bp, Homo sapiens
ctaaagcaaaggctagttctgttggg

SEQ ID NO: 62109 - DNA, 26 bp, Homo sapiens
taaagcaaaggctagttctgttggga

SEQ ID NO: 62110 - DNA, 26 bp, Homo sapiens
aaagcaaaggctagttctgttgggaa

SEQ ID NO: 62111 - DNA, 26 bp, Homo sapiens
aagcaaaggctagttctgttgggaag

SEQ ID NO: 62112 - DNA, 26 bp, Homo sapiens
agcaaaggctagttctgttgggaaga

SEQ ID NO: 62113 - DNA, 26 bp, Homo sapiens
gcaaaggctagttctgttgggaagac

SEQ ID NO: 62114 - DNA, 26 bp, Homo sapiens
caaaggctagttctgttgggaagacg

SEQ ID NO: 62115 - DNA, 26 bp, Homo sapiens
aaaggctagttctgttgggaagacgg

SEQ ID NO: 62116 - DNA, 26 bp, Homo sapiens
aaggctagttctgttgggaagacggg

SEQ ID NO: 62117 - DNA, 26 bp, Homo sapiens
aggctagttctgttgggaagacgggg

SEQ ID NO: 62118 - DNA, 26 bp, Homo sapiens
ggctagttctgttgggaagacggggc

SEQ ID NO: 62119 - DNA, 26 bp, Homo sapiens
gctagttctgttgggaagacggggca

SEQ ID NO: 62120 - DNA, 26 bp, Homo sapiens
ctagttctgttgggaagacggggcac

SEQ ID NO: 62121 - DNA, 26 bp, Homo sapiens
tagttctgttgggaagacggggcact

SEQ ID NO: 62122 - DNA, 26 bp, Homo sapiens
agttctgttgggaagacggggcactc

SEQ ID NO: 62123 - DNA, 26 bp, Homo sapiens
gttctgttgggaagacggggcactcc

SEQ ID NO: 62124 - DNA, 26 bp, Homo sapiens
ttctgttgggaagacggggcactcca

SEQ ID NO: 62125 - DNA, 26 bp, Homo sapiens
tctgttgggaagacggggcactccag

SEQ ID NO: 62126 - DNA, 26 bp, Homo sapiens
ctgttgggaagacggggcactccagg

SEQ ID NO: 62127 - DNA, 26 bp, Homo sapiens
tgttgggaagacggggcactccaggg

SEQ ID NO: 62128 - DNA, 26 bp, Homo sapiens
gttgggaagacggggcactccagggg

SEQ ID NO: 62129 - DNA, 26 bp, Homo sapiens
ttgggaagacggggcactccaggggc

SEQ ID NO: 62130 - DNA, 26 bp, Homo sapiens
tgggaagacggggcactccaggggcc

SEQ ID NO: 62131 - DNA, 26 bp, Homo sapiens
gggaagacggggcactccaggggccc

SEQ ID NO: 62132 - DNA, 26 bp, Homo sapiens
ggaagacggggcactccaggggcccg

SEQ ID NO: 62133 - DNA, 26 bp, Homo sapiens
gaagacggggcactccaggggcccgt

SEQ ID NO: 62134 - DNA, 26 bp, Homo sapiens
aagacggggcactccaggggcccgta

SEQ ID NO: 62135 - DNA, 26 bp, Homo sapiens
agacggggcactccaggggcccgtaa

SEQ ID NO: 62136 - DNA, 26 bp, Homo sapiens
gacggggcactccaggggcccgtaac

SEQ ID NO: 62137 - DNA, 26 bp, Homo sapiens
acggggcactccaggggcccgtaaca

SEQ ID NO: 62138 - DNA, 26 bp, Homo sapiens
cggggcactccaggggcccgtaacag

SEQ ID NO: 62139 - DNA, 26 bp, Homo sapiens
ggggcactccaggggcccgtaacagc

SEQ ID NO: 62140 - DNA, 26 bp, Homo sapiens
gggcactccaggggcccgtaacagca

SEQ ID NO: 62141 - DNA, 26 bp, Homo sapiens
ggcactccaggggcccgtaacagcaa

SEQ ID NO: 62142 - DNA, 26 bp, Homo sapiens
gcactccaggggcccgtaacagcaag

SEQ ID NO: 62143 - DNA, 26 bp, Homo sapiens
cactccaggggcccgtaacagcaagg

SEQ ID NO: 62144 - DNA, 26 bp, Homo sapiens
actccaggggcccgtaacagcaaggg

SEQ ID NO: 62145 - DNA, 26 bp, Homo sapiens
ctccaggggcccgtaacagcaagggc

SEQ ID NO: 62146 - DNA, 26 bp, Homo sapiens
tccaggggcccgtaacagcaagggca

SEQ ID NO: 62147 - DNA, 26 bp, Homo sapiens
ccaggggcccgtaacagcaagggcat

SEQ ID NO: 62148 - DNA, 26 bp, Homo sapiens
caggggcccgtaacagcaagggcatt

SEQ ID NO: 62149 - DNA, 26 bp, Homo sapiens
aggggcccgtaacagcaagggcattt

SEQ ID NO: 62150 - DNA, 26 bp, Homo sapiens
ggggcccgtaacagcaagggcattta

SEQ ID NO: 62151 - DNA, 26 bp, Homo sapiens
gggcccgtaacagcaagggcatttat

SEQ ID NO: 62152 - DNA, 26 bp, Homo sapiens
ggcccgtaacagcaagggcatttatc

SEQ ID NO: 62153 - DNA, 26 bp, Homo sapiens
gcccgtaacagcaagggcatttatct

SEQ ID NO: 62154 - DNA, 26 bp, Homo sapiens
cccgtaacagcaagggcatttatctt

SEQ ID NO: 62155 - DNA, 26 bp, Homo sapiens
ccgtaacagcaagggcatttatcttt

SEQ ID NO: 62156 - DNA, 26 bp, Homo sapiens
cgtaacagcaagggcatttatctttg

SEQ ID NO: 62157 - DNA, 26 bp, Homo sapiens
gtaacagcaagggcatttatctttga

SEQ ID NO: 62158 - DNA, 26 bp, Homo sapiens
taacagcaagggcatttatctttgat

SEQ ID NO: 62159 - DNA, 26 bp, Homo sapiens
aacagcaagggcatttatctttgatg

SEQ ID NO: 62160 - DNA, 26 bp, Homo sapiens
acagcaagggcatttatctttgatgc

SEQ ID NO: 62161 - DNA, 26 bp, Homo sapiens
cagcaagggcatttatctttgatgct

SEQ ID NO: 62162 - DNA, 26 bp, Homo sapiens
agcaagggcatttatctttgatgctt

SEQ ID NO: 62163 - DNA, 26 bp, Homo sapiens
gcaagggcatttatctttgatgcttt

SEQ ID NO: 62164 - DNA, 26 bp, Homo sapiens
caagggcatttatctttgatgctttg

SEQ ID NO: 62165 - DNA, 26 bp, Homo sapiens
aagggcatttatctttgatgctttgg

SEQ ID NO: 62166 - DNA, 26 bp, Homo sapiens
agggcatttatctttgatgctttgga

SEQ ID NO: 62167 - DNA, 26 bp, Homo sapiens
gggcatttatctttgatgctttggat

SEQ ID NO: 62168 - DNA, 26 bp, Homo sapiens
ggcatttatctttgatgctttggatg

SEQ ID NO: 62169 - DNA, 26 bp, Homo sapiens
gcatttatctttgatgctttggatga

SEQ ID NO: 62170 - DNA, 26 bp, Homo sapiens
catttatctttgatgctttggatgag

SEQ ID NO: 62171 - DNA, 26 bp, Homo sapiens
atttatctttgatgctttggatgagg

SEQ ID NO: 62172 - DNA, 26 bp, Homo sapiens
tttatctttgatgctttggatgaggg

SEQ ID NO: 62173 - DNA, 26 bp, Homo sapiens
ttatctttgatgctttggatgagggc

SEQ ID NO: 62174 - DNA, 26 bp, Homo sapiens
tatctttgatgctttggatgagggca

SEQ ID NO: 62175 - DNA, 26 bp, Homo sapiens
atctttgatgctttggatgagggcac

SEQ ID NO: 62176 - DNA, 26 bp, Homo sapiens
tctttgatgctttggatgagggcaca

SEQ ID NO: 62177 - DNA, 26 bp, Homo sapiens
ctttgatgctttggatgagggcacat

SEQ ID NO: 62178 - DNA, 26 bp, Homo sapiens
tttgatgctttggatgagggcacatt

SEQ ID NO: 62179 - DNA, 26 bp, Homo sapiens
ttgatgctttggatgagggcacattg

SEQ ID NO: 62180 - DNA, 26 bp, Homo sapiens
tgatgctttggatgagggcacattga

SEQ ID NO: 62181 - DNA, 26 bp, Homo sapiens
gatgctttggatgagggcacattgat

SEQ ID NO: 62182 - DNA, 26 bp, Homo sapiens
atgctttggatgagggcacattgatc

SEQ ID NO: 62183 - DNA, 26 bp, Homo sapiens
tgctttggatgagggcacattgatcg

SEQ ID NO: 62184 - DNA, 26 bp, Homo sapiens
gctttggatgagggcacattgatcga

SEQ ID NO: 62185 - DNA, 26 bp, Homo sapiens
ctttggatgagggcacattgatcgat

SEQ ID NO: 62186 - DNA, 26 bp, Homo sapiens
tttggatgagggcacattgatcgatg

SEQ ID NO: 62187 - DNA, 26 bp, Homo sapiens
ttggatgagggcacattgatcgatgg

SEQ ID NO: 62188 - DNA, 26 bp, Homo sapiens
tggatgagggcacattgatcgatgga

SEQ ID NO: 62189 - DNA, 26 bp, Homo sapiens
ggatgagggcacattgatcgatggag

SEQ ID NO: 62190 - DNA, 26 bp, Homo sapiens
gatgagggcacattgatcgatggagt

SEQ ID NO: 62191 - DNA, 26 bp, Homo sapiens
atgagggcacattgatcgatggagtc

SEQ ID NO: 62192 - DNA, 26 bp, Homo sapiens
tgagggcacattgatcgatggagtcg

SEQ ID NO: 62193 - DNA, 26 bp, Homo sapiens
gagggcacattgatcgatggagtcgc

SEQ ID NO: 62194 - DNA, 26 bp, Homo sapiens
agggcacattgatcgatggagtcgcc

SEQ ID NO: 62195 - DNA, 26 bp, Homo sapiens
gggcacattgatcgatggagtcgccc

SEQ ID NO: 62196 - DNA, 26 bp, Homo sapiens
ggcacattgatcgatggagtcgcccc

SEQ ID NO: 62197 - DNA, 26 bp, Homo sapiens
gcacattgatcgatggagtcgcccct

SEQ ID NO: 62198 - DNA, 26 bp, Homo sapiens
cacattgatcgatggagtcgcccctg

SEQ ID NO: 62199 - DNA, 26 bp, Homo sapiens
acattgatcgatggagtcgcccctgt

SEQ ID NO: 62200 - DNA, 26 bp, Homo sapiens
cattgatcgatggagtcgcccctgtt

SEQ ID NO: 62201 - DNA, 26 bp, Homo sapiens
attgatcgatggagtcgcccctgttg

SEQ ID NO: 62202 - DNA, 26 bp, Homo sapiens
ttgatcgatggagtcgcccctgttgc

SEQ ID NO: 62203 - DNA, 26 bp, Homo sapiens
tgatcgatggagtcgcccctgttgcc

SEQ ID NO: 62204 - DNA, 26 bp, Homo sapiens
gatcgatggagtcgcccctgttgccc

SEQ ID NO: 62205 - DNA, 26 bp, Homo sapiens
atcgatggagtcgcccctgttgccct

SEQ ID NO: 62206 - DNA, 26 bp, Homo sapiens
tcgatggagtcgcccctgttgccctt

SEQ ID NO: 62207 - DNA, 26 bp, Homo sapiens
cgatggagtcgcccctgttgcccttg

SEQ ID NO: 62208 - DNA, 26 bp, Homo sapiens
gatggagtcgcccctgttgcccttgg

SEQ ID NO: 62209 - DNA, 26 bp, Homo sapiens
atggagtcgcccctgttgcccttggg

SEQ ID NO: 62210 - DNA, 26 bp, Homo sapiens
tggagtcgcccctgttgcccttggga

SEQ ID NO: 62211 - DNA, 26 bp, Homo sapiens
ggagtcgcccctgttgcccttgggac

SEQ ID NO: 62212 - DNA, 26 bp, Homo sapiens
gagtcgcccctgttgcccttgggacc

SEQ ID NO: 62213 - DNA, 26 bp, Homo sapiens
agtcgcccctgttgcccttgggacca

SEQ ID NO: 62214 - DNA, 26 bp, Homo sapiens
gtcgcccctgttgcccttgggaccag

SEQ ID NO: 62215 - DNA, 26 bp, Homo sapiens
tcgcccctgttgcccttgggaccagc

SEQ ID NO: 62216 - DNA, 26 bp, Homo sapiens
cgcccctgttgcccttgggaccagct

SEQ ID NO: 62217 - DNA, 26 bp, Homo sapiens
gcccctgttgcccttgggaccagctg

SEQ ID NO: 62218 - DNA, 26 bp, Homo sapiens
cccctgttgcccttgggaccagctgg

SEQ ID NO: 62219 - DNA, 26 bp, Homo sapiens
ccctgttgcccttgggaccagctggt

SEQ ID NO: 62220 - DNA, 26 bp, Homo sapiens
cctgttgcccttgggaccagctggtc

SEQ ID NO: 62221 - DNA, 26 bp, Homo sapiens
ctgttgcccttgggaccagctggtcc

SEQ ID NO: 62222 - DNA, 26 bp, Homo sapiens
tgttgcccttgggaccagctggtcct

SEQ ID NO: 62223 - DNA, 26 bp, Homo sapiens
gttgcccttgggaccagctggtcctg

SEQ ID NO: 62224 - DNA, 26 bp, Homo sapiens
ttgcccttgggaccagctggtcctgg

SEQ ID NO: 62225 - DNA, 26 bp, Homo sapiens
tgcccttgggaccagctggtcctggg

SEQ ID NO: 62226 - DNA, 26 bp, Homo sapiens
gcccttgggaccagctggtcctgggt

SEQ ID NO: 62227 - DNA, 26 bp, Homo sapiens
cccttgggaccagctggtcctgggta

SEQ ID NO: 62228 - DNA, 26 bp, Homo sapiens
ccttgggaccagctggtcctgggtag

SEQ ID NO: 62229 - DNA, 26 bp, Homo sapiens
cttgggaccagctggtcctgggtagc

SEQ ID NO: 62230 - DNA, 26 bp, Homo sapiens
ttgggaccagctggtcctgggtagcc

SEQ ID NO: 62231 - DNA, 26 bp, Homo sapiens
tgggaccagctggtcctgggtagcca

SEQ ID NO: 62232 - DNA, 26 bp, Homo sapiens
gggaccagctggtcctgggtagccag

SEQ ID NO: 62233 - DNA, 26 bp, Homo sapiens
ggaccagctggtcctgggtagccagg

SEQ ID NO: 62234 - DNA, 26 bp, Homo sapiens
gaccagctggtcctgggtagccaggg

SEQ ID NO: 62235 - DNA, 26 bp, Homo sapiens
accagctggtcctgggtagccagggt

SEQ ID NO: 62236 - DNA, 26 bp, Homo sapiens
ccagctggtcctgggtagccagggtc

SEQ ID NO: 62237 - DNA, 26 bp, Homo sapiens
cagctggtcctgggtagccagggtct

SEQ ID NO: 62238 - DNA, 26 bp, Homo sapiens
agctggtcctgggtagccagggtctc

SEQ ID NO: 62239 - DNA, 26 bp, Homo sapiens
gctggtcctgggtagccagggtctcc

SEQ ID NO: 62240 - DNA, 26 bp, Homo sapiens
ctggtcctgggtagccagggtctccc

SEQ ID NO: 62241 - DNA, 26 bp, Homo sapiens
tggtcctgggtagccagggtctccct

SEQ ID NO: 62242 - DNA, 26 bp, Homo sapiens
ggtcctgggtagccagggtctccctt

SEQ ID NO: 62243 - DNA, 26 bp, Homo sapiens
gtcctgggtagccagggtctcccttc

SEQ ID NO: 62244 - DNA, 26 bp, Homo sapiens
tcctgggtagccagggtctcccttct

SEQ ID NO: 62245 - DNA, 26 bp, Homo sapiens
cctgggtagccagggtctcccttctg

SEQ ID NO: 62246 - DNA, 26 bp, Homo sapiens
ctgggtagccagggtctcccttctgt

SEQ ID NO: 62247 - DNA, 26 bp, Homo sapiens
tgggtagccagggtctcccttctgtc

SEQ ID NO: 62248 - DNA, 26 bp, Homo sapiens
gggtagccagggtctcccttctgtcc

SEQ ID NO: 62249 - DNA, 26 bp, Homo sapiens
ggtagccagggtctcccttctgtcca

SEQ ID NO: 62250 - DNA, 26 bp, Homo sapiens
gtagccagggtctcccttctgtccaa

SEQ ID NO: 62251 - DNA, 26 bp, Homo sapiens
tagccagggtctcccttctgtccaac

SEQ ID NO: 62252 - DNA, 26 bp, Homo sapiens
agccagggtctcccttctgtccaact

SEQ ID NO: 62253 - DNA, 26 bp, Homo sapiens
gccagggtctcccttctgtccaacta

SEQ ID NO: 62254 - DNA, 26 bp, Homo sapiens
ccagggtctcccttctgtccaactat

SEQ ID NO: 62255 - DNA, 26 bp, Homo sapiens
cagggtctcccttctgtccaactatc

SEQ ID NO: 62256 - DNA, 26 bp, Homo sapiens
agggtctcccttctgtccaactatcc

SEQ ID NO: 62257 - DNA, 26 bp, Homo sapiens
gggtctcccttctgtccaactatccc

SEQ ID NO: 62258 - DNA, 26 bp, Homo sapiens
ggtctcccttctgtccaactatccct

SEQ ID NO: 62259 - DNA, 26 bp, Homo sapiens
gtctcccttctgtccaactatccctg

SEQ ID NO: 62260 - DNA, 26 bp, Homo sapiens
tctcccttctgtccaactatccctgg

SEQ ID NO: 62261 - DNA, 26 bp, Homo sapiens
ctcccttctgtccaactatccctgga

SEQ ID NO: 62262 - DNA, 26 bp, Homo sapiens
tcccttctgtccaactatccctggag

SEQ ID NO: 62263 - DNA, 26 bp, Homo sapiens
cccttctgtccaactatccctggagg

SEQ ID NO: 62264 - DNA, 26 bp, Homo sapiens
ccttctgtccaactatccctggaggt

SEQ ID NO: 62265 - DNA, 26 bp, Homo sapiens
cttctgtccaactatccctggaggtc

SEQ ID NO: 62266 - DNA, 26 bp, Homo sapiens
ttctgtccaactatccctggaggtcc

SEQ ID NO: 62267 - DNA, 26 bp, Homo sapiens
tctgtccaactatccctggaggtccc

SEQ ID NO: 62268 - DNA, 26 bp, Homo sapiens
ctgtccaactatccctggaggtcccg

SEQ ID NO: 62269 - DNA, 26 bp, Homo sapiens
tgtccaactatccctggaggtcccga

SEQ ID NO: 62270 - DNA, 26 bp, Homo sapiens
gtccaactatccctggaggtcccgaa

SEQ ID NO: 62271 - DNA, 26 bp, Homo sapiens
tccaactatccctggaggtcccgaat

SEQ ID NO: 62272 - DNA, 26 bp, Homo sapiens
ccaactatccctggaggtcccgaatt

SEQ ID NO: 62273 - DNA, 26 bp, Homo sapiens
caactatccctggaggtcccgaattt

SEQ ID NO: 62274 - DNA, 26 bp, Homo sapiens
aactatccctggaggtcccgaatttc

SEQ ID NO: 62275 - DNA, 26 bp, Homo sapiens
actatccctggaggtcccgaatttcc

SEQ ID NO: 62276 - DNA, 26 bp, Homo sapiens
ctatccctggaggtcccgaatttccc

SEQ ID NO: 62277 - DNA, 26 bp, Homo sapiens
tatccctggaggtcccgaatttcccc

SEQ ID NO: 62278 - DNA, 26 bp, Homo sapiens
atccctggaggtcccgaatttcccct

SEQ ID NO: 62279 - DNA, 26 bp, Homo sapiens
tccctggaggtcccgaatttcccctt

SEQ ID NO: 62280 - DNA, 26 bp, Homo sapiens
ccctggaggtcccgaatttccccttc

SEQ ID NO: 62281 - DNA, 26 bp, Homo sapiens
cctggaggtcccgaatttccccttcg

SEQ ID NO: 62282 - DNA, 26 bp, Homo sapiens
ctggaggtcccgaatttccccttcgg

SEQ ID NO: 62283 - DNA, 26 bp, Homo sapiens
tggaggtcccgaatttccccttcggc

SEQ ID NO: 62284 - DNA, 26 bp, Homo sapiens
ggaggtcccgaatttccccttcggcc

SEQ ID NO: 62285 - DNA, 26 bp, Homo sapiens
gaggtcccgaatttccccttcggcct

SEQ ID NO: 62286 - DNA, 26 bp, Homo sapiens
aggtcccgaatttccccttcggcctc

SEQ ID NO: 62287 - DNA, 26 bp, Homo sapiens
ggtcccgaatttccccttcggcctct

SEQ ID NO: 62288 - DNA, 26 bp, Homo sapiens
gtcccgaatttccccttcggcctctg

SEQ ID NO: 62289 - DNA, 26 bp, Homo sapiens
tcccgaatttccccttcggcctctga

SEQ ID NO: 62290 - DNA, 26 bp, Homo sapiens
cccgaatttccccttcggcctctgat

SEQ ID NO: 62291 - DNA, 26 bp, Homo sapiens
ccgaatttccccttcggcctctgatg

SEQ ID NO: 62292 - DNA, 26 bp, Homo sapiens
cgaatttccccttcggcctctgatgc

SEQ ID NO: 62293 - DNA, 26 bp, Homo sapiens
gaatttccccttcggcctctgatgcc

SEQ ID NO: 62294 - DNA, 26 bp, Homo sapiens
aatttccccttcggcctctgatgcct

SEQ ID NO: 62295 - DNA, 26 bp, Homo sapiens
atttccccttcggcctctgatgcctt

SEQ ID NO: 62296 - DNA, 26 bp, Homo sapiens
tttccccttcggcctctgatgccttt

SEQ ID NO: 62297 - DNA, 26 bp, Homo sapiens
ttccccttcggcctctgatgcctttg

SEQ ID NO: 62298 - DNA, 26 bp, Homo sapiens
tccccttcggcctctgatgcctttgg

SEQ ID NO: 62299 - DNA, 26 bp, Homo sapiens
ccccttcggcctctgatgcctttggg

SEQ ID NO: 62300 - DNA, 26 bp, Homo sapiens
cccttcggcctctgatgcctttgggt

SEQ ID NO: 62301 - DNA, 26 bp, Homo sapiens
ccttcggcctctgatgcctttgggtc

SEQ ID NO: 62302 - DNA, 26 bp, Homo sapiens
cttcggcctctgatgcctttgggtcc

SEQ ID NO: 62303 - DNA, 26 bp, Homo sapiens
ttcggcctctgatgcctttgggtcct

SEQ ID NO: 62304 - DNA, 26 bp, Homo sapiens
tcggcctctgatgcctttgggtcctg

SEQ ID NO: 62305 - DNA, 26 bp, Homo sapiens
cggcctctgatgcctttgggtcctgt

SEQ ID NO: 62306 - DNA, 26 bp, Homo sapiens
ggcctctgatgcctttgggtcctgtt

SEQ ID NO: 62307 - DNA, 26 bp, Homo sapiens
gcctctgatgcctttgggtcctgttg

SEQ ID NO: 62308 - DNA, 26 bp, Homo sapiens
cctctgatgcctttgggtcctgttgt

SEQ ID NO: 62309 - DNA, 26 bp, Homo sapiens
ctctgatgcctttgggtcctgttgtt

SEQ ID NO: 62310 - DNA, 26 bp, Homo sapiens
tctgatgcctttgggtcctgttgttc

SEQ ID NO: 62311 - DNA, 26 bp, Homo sapiens
ctgatgcctttgggtcctgttgttcc

SEQ ID NO: 62312 - DNA, 26 bp, Homo sapiens
tgatgcctttgggtcctgttgttcca

SEQ ID NO: 62313 - DNA, 26 bp, Homo sapiens
gatgcctttgggtcctgttgttccat

SEQ ID NO: 62314 - DNA, 26 bp, Homo sapiens
atgcctttgggtcctgttgttccatt

SEQ ID NO: 62315 - DNA, 26 bp, Homo sapiens
tgcctttgggtcctgttgttccattt

SEQ ID NO: 62316 - DNA, 26 bp, Homo sapiens
gcctttgggtcctgttgttccattta

SEQ ID NO: 62317 - DNA, 26 bp, Homo sapiens
cctttgggtcctgttgttccatttag

SEQ ID NO: 62318 - DNA, 26 bp, Homo sapiens
ctttgggtcctgttgttccatttagc

SEQ ID NO: 62319 - DNA, 26 bp, Homo sapiens
tttgggtcctgttgttccatttagcc

SEQ ID NO: 62320 - DNA, 26 bp, Homo sapiens
ttgggtcctgttgttccatttagccc

SEQ ID NO: 62321 - DNA, 26 bp, Homo sapiens
tgggtcctgttgttccatttagccca

SEQ ID NO: 62322 - DNA, 26 bp, Homo sapiens
gggtcctgttgttccatttagcccag

SEQ ID NO: 62323 - DNA, 26 bp, Homo sapiens
ggtcctgttgttccatttagcccagg

SEQ ID NO: 62324 - DNA, 26 bp, Homo sapiens
gtcctgttgttccatttagcccaggt

SEQ ID NO: 62325 - DNA, 26 bp, Homo sapiens
tcctgttgttccatttagcccaggtt

SEQ ID NO: 62326 - DNA, 26 bp, Homo sapiens
cctgttgttccatttagcccaggttc

SEQ ID NO: 62327 - DNA, 26 bp, Homo sapiens
ctgttgttccatttagcccaggttca

SEQ ID NO: 62328 - DNA, 26 bp, Homo sapiens
tgttgttccatttagcccaggttcac

SEQ ID NO: 62329 - DNA, 26 bp, Homo sapiens
gttgttccatttagcccaggttcacc

SEQ ID NO: 62330 - DNA, 26 bp, Homo sapiens
ttgttccatttagcccaggttcacct

SEQ ID NO: 62331 - DNA, 26 bp, Homo sapiens
tgttccatttagcccaggttcacctg

SEQ ID NO: 62332 - DNA, 26 bp, Homo sapiens
gttccatttagcccaggttcacctgg

SEQ ID NO: 62333 - DNA, 26 bp, Homo sapiens
ttccatttagcccaggttcacctggg

SEQ ID NO: 62334 - DNA, 26 bp, Homo sapiens
tccatttagcccaggttcacctgggt

SEQ ID NO: 62335 - DNA, 26 bp, Homo sapiens
ccatttagcccaggttcacctgggtt

SEQ ID NO: 62336 - DNA, 26 bp, Homo sapiens
catttagcccaggttcacctgggtta

SEQ ID NO: 62337 - DNA, 26 bp, Homo sapiens
atttagcccaggttcacctgggttac

SEQ ID NO: 62338 - DNA, 26 bp, Homo sapiens
tttagcccaggttcacctgggttacc

SEQ ID NO: 62339 - DNA, 26 bp, Homo sapiens
ttagcccaggttcacctgggttaccc

SEQ ID NO: 62340 - DNA, 26 bp, Homo sapiens
tagcccaggttcacctgggttaccct

SEQ ID NO: 62341 - DNA, 26 bp, Homo sapiens
agcccaggttcacctgggttaccctt

SEQ ID NO: 62342 - DNA, 26 bp, Homo sapiens
gcccaggttcacctgggttacccttt

SEQ ID NO: 62343 - DNA, 26 bp, Homo sapiens
cccaggttcacctgggttaccctttg

SEQ ID NO: 62344 - DNA, 26 bp, Homo sapiens
ccaggttcacctgggttaccctttgg

SEQ ID NO: 62345 - DNA, 26 bp, Homo sapiens
caggttcacctgggttaccctttggt

SEQ ID NO: 62346 - DNA, 26 bp, Homo sapiens
aggttcacctgggttaccctttggtc

SEQ ID NO: 62347 - DNA, 26 bp, Homo sapiens
ggttcacctgggttaccctttggtcc

SEQ ID NO: 62348 - DNA, 26 bp, Homo sapiens
gttcacctgggttaccctttggtcct

SEQ ID NO: 62349 - DNA, 26 bp, Homo sapiens
ttcacctgggttaccctttggtcctg

SEQ ID NO: 62350 - DNA, 26 bp, Homo sapiens
tcacctgggttaccctttggtcctgg

SEQ ID NO: 62351 - DNA, 26 bp, Homo sapiens
cacctgggttaccctttggtcctggg

SEQ ID NO: 62352 - DNA, 26 bp, Homo sapiens
acctgggttaccctttggtcctgggt

SEQ ID NO: 62353 - DNA, 26 bp, Homo sapiens
cctgggttaccctttggtcctgggta

SEQ ID NO: 62354 - DNA, 26 bp, Homo sapiens
ctgggttaccctttggtcctgggtat

SEQ ID NO: 62355 - DNA, 26 bp, Homo sapiens
tgggttaccctttggtcctgggtatc

SEQ ID NO: 62356 - DNA, 26 bp, Homo sapiens
gggttaccctttggtcctgggtatcc

SEQ ID NO: 62357 - DNA, 26 bp, Homo sapiens
ggttaccctttggtcctgggtatcca

SEQ ID NO: 62358 - DNA, 26 bp, Homo sapiens
gttaccctttggtcctgggtatccag

SEQ ID NO: 62359 - DNA, 26 bp, Homo sapiens
ttaccctttggtcctgggtatccagg

SEQ ID NO: 62360 - DNA, 26 bp, Homo sapiens
taccctttggtcctgggtatccaggg

SEQ ID NO: 62361 - DNA, 26 bp, Homo sapiens
accctttggtcctgggtatccaggga

SEQ ID NO: 62362 - DNA, 26 bp, Homo sapiens
ccctttggtcctgggtatccagggaa

SEQ ID NO: 62363 - DNA, 26 bp, Homo sapiens
cctttggtcctgggtatccagggaat

SEQ ID NO: 62364 - DNA, 26 bp, Homo sapiens
ctttggtcctgggtatccagggaatc

SEQ ID NO: 62365 - DNA, 26 bp, Homo sapiens
tttggtcctgggtatccagggaatcc

SEQ ID NO: 62366 - DNA, 26 bp, Homo sapiens
ttggtcctgggtatccagggaatcct

SEQ ID NO: 62367 - DNA, 26 bp, Homo sapiens
tggtcctgggtatccagggaatcctc

SEQ ID NO: 62368 - DNA, 26 bp, Homo sapiens
ggtcctgggtatccagggaatcctct

SEQ ID NO: 62369 - DNA, 26 bp, Homo sapiens
gtcctgggtatccagggaatcctctt

SEQ ID NO: 62370 - DNA, 26 bp, Homo sapiens
tcctgggtatccagggaatcctcttt

SEQ ID NO: 62371 - DNA, 26 bp, Homo sapiens
cctgggtatccagggaatcctctttc

SEQ ID NO: 62372 - DNA, 26 bp, Homo sapiens
ctgggtatccagggaatcctctttct

SEQ ID NO: 62373 - DNA, 26 bp, Homo sapiens
tgggtatccagggaatcctctttctc

SEQ ID NO: 62374 - DNA, 26 bp, Homo sapiens
gggtatccagggaatcctctttctcc

SEQ ID NO: 62375 - DNA, 26 bp, Homo sapiens
ggtatccagggaatcctctttctcct

SEQ ID NO: 62376 - DNA, 26 bp, Homo sapiens
gtatccagggaatcctctttctcctt

SEQ ID NO: 62377 - DNA, 26 bp, Homo sapiens
tatccagggaatcctctttctccttt

SEQ ID NO: 62378 - DNA, 26 bp, Homo sapiens
atccagggaatcctctttctcctttt

SEQ ID NO: 62379 - DNA, 26 bp, Homo sapiens
tccagggaatcctctttctccttttt

SEQ ID NO: 62380 - DNA, 26 bp, Homo sapiens
ccagggaatcctctttctcctttttt

SEQ ID NO: 62381 - DNA, 26 bp, Homo sapiens
cagggaatcctctttctccttttttg

SEQ ID NO: 62382 - DNA, 26 bp, Homo sapiens
agggaatcctctttctccttttttgc

SEQ ID NO: 62383 - DNA, 26 bp, Homo sapiens
gggaatcctctttctccttttttgcc

SEQ ID NO: 62384 - DNA, 26 bp, Homo sapiens
ggaatcctctttctccttttttgcct

SEQ ID NO: 62385 - DNA, 26 bp, Homo sapiens
gaatcctctttctccttttttgcctc

SEQ ID NO: 62386 - DNA, 26 bp, Homo sapiens
aatcctctttctccttttttgcctct

SEQ ID NO: 62387 - DNA, 26 bp, Homo sapiens
atcctctttctccttttttgcctctg

SEQ ID NO: 62388 - DNA, 26 bp, Homo sapiens
tcctctttctccttttttgcctctgc

SEQ ID NO: 62389 - DNA, 26 bp, Homo sapiens
cctctttctccttttttgcctctgcg

SEQ ID NO: 62390 - DNA, 26 bp, Homo sapiens
ctctttctccttttttgcctctgcgt

SEQ ID NO: 62391 - DNA, 26 bp, Homo sapiens
tctttctccttttttgcctctgcgtc

SEQ ID NO: 62392 - DNA, 26 bp, Homo sapiens
ctttctccttttttgcctctgcgtcc

SEQ ID NO: 62393 - DNA, 26 bp, Homo sapiens
tttctccttttttgcctctgcgtcct

SEQ ID NO: 62394 - DNA, 26 bp, Homo sapiens
ttctccttttttgcctctgcgtcctt

SEQ ID NO: 62395 - DNA, 26 bp, Homo sapiens
tctccttttttgcctctgcgtccttc

SEQ ID NO: 62396 - DNA, 26 bp, Homo sapiens
ctccttttttgcctctgcgtccttca

SEQ ID NO: 62397 - DNA, 26 bp, Homo sapiens
tccttttttgcctctgcgtccttcac

SEQ ID NO: 62398 - DNA, 26 bp, Homo sapiens
ccttttttgcctctgcgtccttcact

SEQ ID NO: 62399 - DNA, 26 bp, Homo sapiens
cttttttgcctctgcgtccttcactg

SEQ ID NO: 62400 - DNA, 26 bp, Homo sapiens
ttttttgcctctgcgtccttcactgc

SEQ ID NO: 62401 - DNA, 26 bp, Homo sapiens
tttttgcctctgcgtccttcactgcc

SEQ ID NO: 62402 - DNA, 26 bp, Homo sapiens
ttttgcctctgcgtccttcactgcca

SEQ ID NO: 62403 - DNA, 26 bp, Homo sapiens
tttgcctctgcgtccttcactgccaa

SEQ ID NO: 62404 - DNA, 26 bp, Homo sapiens
ttgcctctgcgtccttcactgccaac

SEQ ID NO: 62405 - DNA, 26 bp, Homo sapiens
tgcctctgcgtccttcactgccaact

SEQ ID NO: 62406 - DNA, 26 bp, Homo sapiens
gcctctgcgtccttcactgccaactc

SEQ ID NO: 62407 - DNA, 26 bp, Homo sapiens
cctctgcgtccttcactgccaactcc

SEQ ID NO: 62408 - DNA, 26 bp, Homo sapiens
ctctgcgtccttcactgccaactccg

SEQ ID NO: 62409 - DNA, 26 bp, Homo sapiens
tctgcgtccttcactgccaactccgt

SEQ ID NO: 62410 - DNA, 26 bp, Homo sapiens
ctgcgtccttcactgccaactccgtc

SEQ ID NO: 62411 - DNA, 26 bp, Homo sapiens
tgcgtccttcactgccaactccgtct

SEQ ID NO: 62412 - DNA, 26 bp, Homo sapiens
gcgtccttcactgccaactccgtctc

SEQ ID NO: 62413 - DNA, 26 bp, Homo sapiens
cgtccttcactgccaactccgtctct

SEQ ID NO: 62414 - DNA, 26 bp, Homo sapiens
gtccttcactgccaactccgtctctc

SEQ ID NO: 62415 - DNA, 26 bp, Homo sapiens
tccttcactgccaactccgtctctcc

SEQ ID NO: 62416 - DNA, 26 bp, Homo sapiens
ccttcactgccaactccgtctctccc

SEQ ID NO: 62417 - DNA, 26 bp, Homo sapiens
cttcactgccaactccgtctctcccg

SEQ ID NO: 62418 - DNA, 26 bp, Homo sapiens
ttcactgccaactccgtctctcccgt

SEQ ID NO: 62419 - DNA, 26 bp, Homo sapiens
tcactgccaactccgtctctcccgtc

SEQ ID NO: 62420 - DNA, 26 bp, Homo sapiens
cactgccaactccgtctctcccgtca

SEQ ID NO: 62421 - DNA, 26 bp, Homo sapiens
actgccaactccgtctctcccgtcat

SEQ ID NO: 62422 - DNA, 26 bp, Homo sapiens
ctgccaactccgtctctcccgtcatc

SEQ ID NO: 62423 - DNA, 26 bp, Homo sapiens
tgccaactccgtctctcccgtcatct

SEQ ID NO: 62424 - DNA, 26 bp, Homo sapiens
gccaactccgtctctcccgtcatctc

SEQ ID NO: 62425 - DNA, 26 bp, Homo sapiens
ccaactccgtctctcccgtcatctcc

SEQ ID NO: 62426 - DNA, 26 bp, Homo sapiens
caactccgtctctcccgtcatctccc

SEQ ID NO: 62427 - DNA, 26 bp, Homo sapiens
aactccgtctctcccgtcatctcccg

SEQ ID NO: 62428 - DNA, 26 bp, Homo sapiens
actccgtctctcccgtcatctcccgt

SEQ ID NO: 62429 - DNA, 26 bp, Homo sapiens
ctccgtctctcccgtcatctcccgtc

SEQ ID NO: 62430 - DNA, 26 bp, Homo sapiens
tccgtctctcccgtcatctcccgtct

SEQ ID NO: 62431 - DNA, 26 bp, Homo sapiens
ccgtctctcccgtcatctcccgtctc

SEQ ID NO: 62432 - DNA, 26 bp, Homo sapiens
cgtctctcccgtcatctcccgtctcc

SEQ ID NO: 62433 - DNA, 26 bp, Homo sapiens
gtctctcccgtcatctcccgtctccc

SEQ ID NO: 62434 - DNA, 26 bp, Homo sapiens
tctctcccgtcatctcccgtctcccc

SEQ ID NO: 62435 - DNA, 26 bp, Homo sapiens
ctctcccgtcatctcccgtctcccca

SEQ ID NO: 62436 - DNA, 26 bp, Homo sapiens
tctcccgtcatctcccgtctccccac

SEQ ID NO: 62437 - DNA, 26 bp, Homo sapiens
ctcccgtcatctcccgtctccccacg

SEQ ID NO: 62438 - DNA, 26 bp, Homo sapiens
tcccgtcatctcccgtctccccacga

SEQ ID NO: 62439 - DNA, 26 bp, Homo sapiens
cccgtcatctcccgtctccccacgag

SEQ ID NO: 62440 - DNA, 26 bp, Homo sapiens
ccgtcatctcccgtctccccacgagg

SEQ ID NO: 62441 - DNA, 26 bp, Homo sapiens
cgtcatctcccgtctccccacgaggg

SEQ ID NO: 62442 - DNA, 26 bp, Homo sapiens
gtcatctcccgtctccccacgagggc

SEQ ID NO: 62443 - DNA, 26 bp, Homo sapiens
tcatctcccgtctccccacgagggcc

SEQ ID NO: 62444 - DNA, 26 bp, Homo sapiens
catctcccgtctccccacgagggccc

SEQ ID NO: 62445 - DNA, 26 bp, Homo sapiens
atctcccgtctccccacgagggcccc

SEQ ID NO: 62446 - DNA, 26 bp, Homo sapiens
tctcccgtctccccacgagggccccg

SEQ ID NO: 62447 - DNA, 26 bp, Homo sapiens
ctcccgtctccccacgagggccccgg

SEQ ID NO: 62448 - DNA, 26 bp, Homo sapiens
tcccgtctccccacgagggccccggt

SEQ ID NO: 62449 - DNA, 26 bp, Homo sapiens
cccgtctccccacgagggccccggtt

SEQ ID NO: 62450 - DNA, 26 bp, Homo sapiens
ccgtctccccacgagggccccggttc

SEQ ID NO: 62451 - DNA, 26 bp, Homo sapiens
cgtctccccacgagggccccggttcc

SEQ ID NO: 62452 - DNA, 26 bp, Homo sapiens
gtctccccacgagggccccggttccc

SEQ ID NO: 62453 - DNA, 26 bp, Homo sapiens
tctccccacgagggccccggttcccg

SEQ ID NO: 62454 - DNA, 26 bp, Homo sapiens
ctccccacgagggccccggttcccga

SEQ ID NO: 62455 - DNA, 26 bp, Homo sapiens
tccccacgagggccccggttcccgat

SEQ ID NO: 62456 - DNA, 26 bp, Homo sapiens
ccccacgagggccccggttcccgatt

SEQ ID NO: 62457 - DNA, 26 bp, Homo sapiens
cccacgagggccccggttcccgattc

SEQ ID NO: 62458 - DNA, 26 bp, Homo sapiens
ccacgagggccccggttcccgattcc

SEQ ID NO: 62459 - DNA, 26 bp, Homo sapiens
cacgagggccccggttcccgattcct

SEQ ID NO: 62460 - DNA, 26 bp, Homo sapiens
acgagggccccggttcccgattcctc

SEQ ID NO: 62461 - DNA, 26 bp, Homo sapiens
cgagggccccggttcccgattcctcc

SEQ ID NO: 62462 - DNA, 26 bp, Homo sapiens
gagggccccggttcccgattcctcct

SEQ ID NO: 62463 - DNA, 26 bp, Homo sapiens
agggccccggttcccgattcctcctt

SEQ ID NO: 62464 - DNA, 26 bp, Homo sapiens
gggccccggttcccgattcctccttt

SEQ ID NO: 62465 - DNA, 26 bp, Homo sapiens
ggccccggttcccgattcctcctttt

SEQ ID NO: 62466 - DNA, 26 bp, Homo sapiens
gccccggttcccgattcctccttttg

SEQ ID NO: 62467 - DNA, 26 bp, Homo sapiens
ccccggttcccgattcctccttttgg

SEQ ID NO: 62468 - DNA, 26 bp, Homo sapiens
cccggttcccgattcctccttttggt

SEQ ID NO: 62469 - DNA, 26 bp, Homo sapiens
ccggttcccgattcctccttttggtc

SEQ ID NO: 62470 - DNA, 26 bp, Homo sapiens
cggttcccgattcctccttttggtcc

SEQ ID NO: 62471 - DNA, 26 bp, Homo sapiens
ggttcccgattcctccttttggtcct

SEQ ID NO: 62472 - DNA, 26 bp, Homo sapiens
gttcccgattcctccttttggtcctg

SEQ ID NO: 62473 - DNA, 26 bp, Homo sapiens
ttcccgattcctccttttggtcctgg

SEQ ID NO: 62474 - DNA, 26 bp, Homo sapiens
tcccgattcctccttttggtcctggc

SEQ ID NO: 62475 - DNA, 26 bp, Homo sapiens
cccgattcctccttttggtcctggct

SEQ ID NO: 62476 - DNA, 26 bp, Homo sapiens
ccgattcctccttttggtcctggctc

SEQ ID NO: 62477 - DNA, 26 bp, Homo sapiens
cgattcctccttttggtcctggctct

SEQ ID NO: 62478 - DNA, 26 bp, Homo sapiens
gattcctccttttggtcctggctctc

SEQ ID NO: 62479 - DNA, 26 bp, Homo sapiens
attcctccttttggtcctggctctcc

SEQ ID NO: 62480 - DNA, 26 bp, Homo sapiens
ttcctccttttggtcctggctctccg

SEQ ID NO: 62481 - DNA, 26 bp, Homo sapiens
tcctccttttggtcctggctctccgg

SEQ ID NO: 62482 - DNA, 26 bp, Homo sapiens
cctccttttggtcctggctctccggg

SEQ ID NO: 62483 - DNA, 26 bp, Homo sapiens
ctccttttggtcctggctctccgggc

SEQ ID NO: 62484 - DNA, 26 bp, Homo sapiens
tccttttggtcctggctctccgggct

SEQ ID NO: 62485 - DNA, 26 bp, Homo sapiens
ccttttggtcctggctctccgggctc

SEQ ID NO: 62486 - DNA, 26 bp, Homo sapiens
cttttggtcctggctctccgggctca

SEQ ID NO: 62487 - DNA, 26 bp, Homo sapiens
ttttggtcctggctctccgggctcac

SEQ ID NO: 62488 - DNA, 26 bp, Homo sapiens
tttggtcctggctctccgggctcacc

SEQ ID NO: 62489 - DNA, 26 bp, Homo sapiens
ttggtcctggctctccgggctcaccc

SEQ ID NO: 62490 - DNA, 26 bp, Homo sapiens
tggtcctggctctccgggctcaccct

SEQ ID NO: 62491 - DNA, 26 bp, Homo sapiens
ggtcctggctctccgggctcaccctt

SEQ ID NO: 62492 - DNA, 26 bp, Homo sapiens
gtcctggctctccgggctcacccttt

SEQ ID NO: 62493 - DNA, 26 bp, Homo sapiens
tcctggctctccgggctcaccctttc

SEQ ID NO: 62494 - DNA, 26 bp, Homo sapiens
cctggctctccgggctcaccctttct

SEQ ID NO: 62495 - DNA, 26 bp, Homo sapiens
ctggctctccgggctcaccctttctt

SEQ ID NO: 62496 - DNA, 26 bp, Homo sapiens
tggctctccgggctcaccctttcttc

SEQ ID NO: 62497 - DNA, 26 bp, Homo sapiens
ggctctccgggctcaccctttcttcc

SEQ ID NO: 62498 - DNA, 26 bp, Homo sapiens
gctctccgggctcaccctttcttccc

SEQ ID NO: 62499 - DNA, 26 bp, Homo sapiens
ctctccgggctcaccctttcttccca

SEQ ID NO: 62500 - DNA, 26 bp, Homo sapiens
tctccgggctcaccctttcttcccag

SEQ ID NO: 62501 - DNA, 26 bp, Homo sapiens
ctccgggctcaccctttcttcccagt

SEQ ID NO: 62502 - DNA, 26 bp, Homo sapiens
tccgggctcaccctttcttcccagtg

SEQ ID NO: 62503 - DNA, 26 bp, Homo sapiens
ccgggctcaccctttcttcccagtgg

SEQ ID NO: 62504 - DNA, 26 bp, Homo sapiens
cgggctcaccctttcttcccagtgga

SEQ ID NO: 62505 - DNA, 26 bp, Homo sapiens
gggctcaccctttcttcccagtggac

SEQ ID NO: 62506 - DNA, 26 bp, Homo sapiens
ggctcaccctttcttcccagtggacc

SEQ ID NO: 62507 - DNA, 26 bp, Homo sapiens
gctcaccctttcttcccagtggaccg

SEQ ID NO: 62508 - DNA, 26 bp, Homo sapiens
ctcaccctttcttcccagtggaccgg

SEQ ID NO: 62509 - DNA, 26 bp, Homo sapiens
tcaccctttcttcccagtggaccggt

SEQ ID NO: 62510 - DNA, 26 bp, Homo sapiens
caccctttcttcccagtggaccggtt

SEQ ID NO: 62511 - DNA, 26 bp, Homo sapiens
accctttcttcccagtggaccggttc

SEQ ID NO: 62512 - DNA, 26 bp, Homo sapiens
ccctttcttcccagtggaccggttct

SEQ ID NO: 62513 - DNA, 26 bp, Homo sapiens
cctttcttcccagtggaccggttctg

SEQ ID NO: 62514 - DNA, 26 bp, Homo sapiens
ctttcttcccagtggaccggttctgc

SEQ ID NO: 62515 - DNA, 26 bp, Homo sapiens
tttcttcccagtggaccggttctgcc

SEQ ID NO: 62516 - DNA, 26 bp, Homo sapiens
ttcttcccagtggaccggttctgcct

SEQ ID NO: 62517 - DNA, 26 bp, Homo sapiens
tcttcccagtggaccggttctgcctc

SEQ ID NO: 62518 - DNA, 26 bp, Homo sapiens
cttcccagtggaccggttctgcctcg

SEQ ID NO: 62519 - DNA, 26 bp, Homo sapiens
ttcccagtggaccggttctgcctcgt

SEQ ID NO: 62520 - DNA, 26 bp, Homo sapiens
tcccagtggaccggttctgcctcgtt

SEQ ID NO: 62521 - DNA, 26 bp, Homo sapiens
cccagtggaccggttctgcctcgttc

SEQ ID NO: 62522 - DNA, 26 bp, Homo sapiens
ccagtggaccggttctgcctcgttct

SEQ ID NO: 62523 - DNA, 26 bp, Homo sapiens
cagtggaccggttctgcctcgttctc

SEQ ID NO: 62524 - DNA, 26 bp, Homo sapiens
agtggaccggttctgcctcgttctcc

SEQ ID NO: 62525 - DNA, 26 bp, Homo sapiens
gtggaccggttctgcctcgttctcca

SEQ ID NO: 62526 - DNA, 26 bp, Homo sapiens
tggaccggttctgcctcgttctccag

SEQ ID NO: 62527 - DNA, 26 bp, Homo sapiens
ggaccggttctgcctcgttctccagg

SEQ ID NO: 62528 - DNA, 26 bp, Homo sapiens
gaccggttctgcctcgttctccagga

SEQ ID NO: 62529 - DNA, 26 bp, Homo sapiens
accggttctgcctcgttctccaggag

SEQ ID NO: 62530 - DNA, 26 bp, Homo sapiens
ccggttctgcctcgttctccaggagc

SEQ ID NO: 62531 - DNA, 26 bp, Homo sapiens
cggttctgcctcgttctccaggagca

SEQ ID NO: 62532 - DNA, 26 bp, Homo sapiens
ggttctgcctcgttctccaggagcac

SEQ ID NO: 62533 - DNA, 26 bp, Homo sapiens
gttctgcctcgttctccaggagcacc

SEQ ID NO: 62534 - DNA, 26 bp, Homo sapiens
ttctgcctcgttctccaggagcacca

SEQ ID NO: 62535 - DNA, 26 bp, Homo sapiens
tctgcctcgttctccaggagcaccag

SEQ ID NO: 62536 - DNA, 26 bp, Homo sapiens
ctgcctcgttctccaggagcaccagc

SEQ ID NO: 62537 - DNA, 26 bp, Homo sapiens
tgcctcgttctccaggagcaccagcg

SEQ ID NO: 62538 - DNA, 26 bp, Homo sapiens
gcctcgttctccaggagcaccagcgg

SEQ ID NO: 62539 - DNA, 26 bp, Homo sapiens
cctcgttctccaggagcaccagcggc

SEQ ID NO: 62540 - DNA, 26 bp, Homo sapiens
ctcgttctccaggagcaccagcggca

SEQ ID NO: 62541 - DNA, 26 bp, Homo sapiens
tcgttctccaggagcaccagcggcac

SEQ ID NO: 62542 - DNA, 26 bp, Homo sapiens
cgttctccaggagcaccagcggcacc

SEQ ID NO: 62543 - DNA, 26 bp, Homo sapiens
gttctccaggagcaccagcggcacct

SEQ ID NO: 62544 - DNA, 26 bp, Homo sapiens
ttctccaggagcaccagcggcacctc

SEQ ID NO: 62545 - DNA, 26 bp, Homo sapiens
tctccaggagcaccagcggcacctcc

SEQ ID NO: 62546 - DNA, 26 bp, Homo sapiens
ctccaggagcaccagcggcacctccg

SEQ ID NO: 62547 - DNA, 26 bp, Homo sapiens
tccaggagcaccagcggcacctccgc

SEQ ID NO: 62548 - DNA, 26 bp, Homo sapiens
ccaggagcaccagcggcacctccgct

SEQ ID NO: 62549 - DNA, 26 bp, Homo sapiens
caggagcaccagcggcacctccgctt

SEQ ID NO: 62550 - DNA, 26 bp, Homo sapiens
aggagcaccagcggcacctccgcttc

SEQ ID NO: 62551 - DNA, 26 bp, Homo sapiens
ggagcaccagcggcacctccgcttcc

SEQ ID NO: 62552 - DNA, 26 bp, Homo sapiens
gagcaccagcggcacctccgcttccc

SEQ ID NO: 62553 - DNA, 26 bp, Homo sapiens
agcaccagcggcacctccgcttcccc

SEQ ID NO: 62554 - DNA, 26 bp, Homo sapiens
gcaccagcggcacctccgcttccccg

SEQ ID NO: 62555 - DNA, 26 bp, Homo sapiens
caccagcggcacctccgcttccccga

SEQ ID NO: 62556 - DNA, 26 bp, Homo sapiens
accagcggcacctccgcttccccgag

SEQ ID NO: 62557 - DNA, 26 bp, Homo sapiens
ccagcggcacctccgcttccccgagg

SEQ ID NO: 62558 - DNA, 26 bp, Homo sapiens
cagcggcacctccgcttccccgaggt

SEQ ID NO: 62559 - DNA, 26 bp, Homo sapiens
agcggcacctccgcttccccgaggtc

SEQ ID NO: 62560 - DNA, 26 bp, Homo sapiens
gcggcacctccgcttccccgaggtcc

SEQ ID NO: 62561 - DNA, 26 bp, Homo sapiens
cggcacctccgcttccccgaggtcca

SEQ ID NO: 62562 - DNA, 26 bp, Homo sapiens
ggcacctccgcttccccgaggtccag

SEQ ID NO: 62563 - DNA, 26 bp, Homo sapiens
gcacctccgcttccccgaggtccaga

SEQ ID NO: 62564 - DNA, 26 bp, Homo sapiens
cacctccgcttccccgaggtccagaa

SEQ ID NO: 62565 - DNA, 26 bp, Homo sapiens
acctccgcttccccgaggtccagaaa

SEQ ID NO: 62566 - DNA, 26 bp, Homo sapiens
cctccgcttccccgaggtccagaaat

SEQ ID NO: 62567 - DNA, 26 bp, Homo sapiens
ctccgcttccccgaggtccagaaatg

SEQ ID NO: 62568 - DNA, 26 bp, Homo sapiens
tccgcttccccgaggtccagaaatgc

SEQ ID NO: 62569 - DNA, 26 bp, Homo sapiens
ccgcttccccgaggtccagaaatgcc

SEQ ID NO: 62570 - DNA, 26 bp, Homo sapiens
cgcttccccgaggtccagaaatgcct

SEQ ID NO: 62571 - DNA, 26 bp, Homo sapiens
gcttccccgaggtccagaaatgcctt

SEQ ID NO: 62572 - DNA, 26 bp, Homo sapiens
cttccccgaggtccagaaatgccttg

SEQ ID NO: 62573 - DNA, 26 bp, Homo sapiens
ttccccgaggtccagaaatgccttgt

SEQ ID NO: 62574 - DNA, 26 bp, Homo sapiens
tccccgaggtccagaaatgccttgtt

SEQ ID NO: 62575 - DNA, 26 bp, Homo sapiens
ccccgaggtccagaaatgccttgttc

SEQ ID NO: 62576 - DNA, 26 bp, Homo sapiens
cccgaggtccagaaatgccttgttct

SEQ ID NO: 62577 - DNA, 26 bp, Homo sapiens
ccgaggtccagaaatgccttgttctc

SEQ ID NO: 62578 - DNA, 26 bp, Homo sapiens
cgaggtccagaaatgccttgttctcc

SEQ ID NO: 62579 - DNA, 26 bp, Homo sapiens
gaggtccagaaatgccttgttctcct

SEQ ID NO: 62580 - DNA, 26 bp, Homo sapiens
aggtccagaaatgccttgttctccta

SEQ ID NO: 62581 - DNA, 26 bp, Homo sapiens
ggtccagaaatgccttgttctcctat

SEQ ID NO: 62582 - DNA, 26 bp, Homo sapiens
gtccagaaatgccttgttctcctatc

SEQ ID NO: 62583 - DNA, 26 bp, Homo sapiens
tccagaaatgccttgttctcctatca

SEQ ID NO: 62584 - DNA, 26 bp, Homo sapiens
ccagaaatgccttgttctcctatcag

SEQ ID NO: 62585 - DNA, 26 bp, Homo sapiens
cagaaatgccttgttctcctatcagc

SEQ ID NO: 62586 - DNA, 26 bp, Homo sapiens
agaaatgccttgttctcctatcagcc

SEQ ID NO: 62587 - DNA, 26 bp, Homo sapiens
gaaatgccttgttctcctatcagccc

SEQ ID NO: 62588 - DNA, 26 bp, Homo sapiens
aaatgccttgttctcctatcagccct

SEQ ID NO: 62589 - DNA, 26 bp, Homo sapiens
aatgccttgttctcctatcagccctg

SEQ ID NO: 62590 - DNA, 26 bp, Homo sapiens
atgccttgttctcctatcagccctgg

SEQ ID NO: 62591 - DNA, 26 bp, Homo sapiens
tgccttgttctcctatcagccctgga

SEQ ID NO: 62592 - DNA, 26 bp, Homo sapiens
gccttgttctcctatcagccctggag

SEQ ID NO: 62593 - DNA, 26 bp, Homo sapiens
ccttgttctcctatcagccctggagg

SEQ ID NO: 62594 - DNA, 26 bp, Homo sapiens
cttgttctcctatcagccctggagga

SEQ ID NO: 62595 - DNA, 26 bp, Homo sapiens
ttgttctcctatcagccctggaggac

SEQ ID NO: 62596 - DNA, 26 bp, Homo sapiens
tgttctcctatcagccctggaggacc

SEQ ID NO: 62597 - DNA, 26 bp, Homo sapiens
gttctcctatcagccctggaggacca

SEQ ID NO: 62598 - DNA, 26 bp, Homo sapiens
ttctcctatcagccctggaggaccag

SEQ ID NO: 62599 - DNA, 26 bp, Homo sapiens
tctcctatcagccctggaggaccagc

SEQ ID NO: 62600 - DNA, 26 bp, Homo sapiens
ctcctatcagccctggaggaccagca

SEQ ID NO: 62601 - DNA, 26 bp, Homo sapiens
tcctatcagccctggaggaccagcag

SEQ ID NO: 62602 - DNA, 26 bp, Homo sapiens
cctatcagccctggaggaccagcagg

SEQ ID NO: 62603 - DNA, 26 bp, Homo sapiens
ctatcagccctggaggaccagcagga

SEQ ID NO: 62604 - DNA, 26 bp, Homo sapiens
tatcagccctggaggaccagcaggac

SEQ ID NO: 62605 - DNA, 26 bp, Homo sapiens
atcagccctggaggaccagcaggacc

SEQ ID NO: 62606 - DNA, 26 bp, Homo sapiens
tcagccctggaggaccagcaggacca

SEQ ID NO: 62607 - DNA, 26 bp, Homo sapiens
cagccctggaggaccagcaggaccag

SEQ ID NO: 62608 - DNA, 26 bp, Homo sapiens
agccctggaggaccagcaggaccagc

SEQ ID NO: 62609 - DNA, 26 bp, Homo sapiens
gccctggaggaccagcaggaccagct

SEQ ID NO: 62610 - DNA, 26 bp, Homo sapiens
ccctggaggaccagcaggaccagctg

SEQ ID NO: 62611 - DNA, 26 bp, Homo sapiens
cctggaggaccagcaggaccagctgg

SEQ ID NO: 62612 - DNA, 26 bp, Homo sapiens
ctggaggaccagcaggaccagctggg

SEQ ID NO: 62613 - DNA, 26 bp, Homo sapiens
tggaggaccagcaggaccagctgggc

SEQ ID NO: 62614 - DNA, 26 bp, Homo sapiens
ggaggaccagcaggaccagctgggcc

SEQ ID NO: 62615 - DNA, 26 bp, Homo sapiens
gaggaccagcaggaccagctgggccc

SEQ ID NO: 62616 - DNA, 26 bp, Homo sapiens
aggaccagcaggaccagctgggccct

SEQ ID NO: 62617 - DNA, 26 bp, Homo sapiens
ggaccagcaggaccagctgggccctg

SEQ ID NO: 62618 - DNA, 26 bp, Homo sapiens
gaccagcaggaccagctgggccctgt

SEQ ID NO: 62619 - DNA, 26 bp, Homo sapiens
accagcaggaccagctgggccctgtg

SEQ ID NO: 62620 - DNA, 26 bp, Homo sapiens
ccagcaggaccagctgggccctgtgc

SEQ ID NO: 62621 - DNA, 26 bp, Homo sapiens
cagcaggaccagctgggccctgtgca

SEQ ID NO: 62622 - DNA, 26 bp, Homo sapiens
agcaggaccagctgggccctgtgcac

SEQ ID NO: 62623 - DNA, 26 bp, Homo sapiens
gcaggaccagctgggccctgtgcacc

SEQ ID NO: 62624 - DNA, 26 bp, Homo sapiens
caggaccagctgggccctgtgcacct

SEQ ID NO: 62625 - DNA, 26 bp, Homo sapiens
aggaccagctgggccctgtgcacctc

SEQ ID NO: 62626 - DNA, 26 bp, Homo sapiens
ggaccagctgggccctgtgcacctct

SEQ ID NO: 62627 - DNA, 26 bp, Homo sapiens
gaccagctgggccctgtgcacctctg

SEQ ID NO: 62628 - DNA, 26 bp, Homo sapiens
accagctgggccctgtgcacctctgg

SEQ ID NO: 62629 - DNA, 26 bp, Homo sapiens
ccagctgggccctgtgcacctctggt

SEQ ID NO: 62630 - DNA, 26 bp, Homo sapiens
cagctgggccctgtgcacctctggtc

SEQ ID NO: 62631 - DNA, 26 bp, Homo sapiens
agctgggccctgtgcacctctggtcc

SEQ ID NO: 62632 - DNA, 26 bp, Homo sapiens
gctgggccctgtgcacctctggtccc

SEQ ID NO: 62633 - DNA, 26 bp, Homo sapiens
ctgggccctgtgcacctctggtcccc

SEQ ID NO: 62634 - DNA, 26 bp, Homo sapiens
tgggccctgtgcacctctggtcccct

SEQ ID NO: 62635 - DNA, 26 bp, Homo sapiens
gggccctgtgcacctctggtcccctg

SEQ ID NO: 62636 - DNA, 26 bp, Homo sapiens
ggccctgtgcacctctggtcccctgc

SEQ ID NO: 62637 - DNA, 26 bp, Homo sapiens
gccctgtgcacctctggtcccctgct

SEQ ID NO: 62638 - DNA, 26 bp, Homo sapiens
ccctgtgcacctctggtcccctgctc

SEQ ID NO: 62639 - DNA, 26 bp, Homo sapiens
cctgtgcacctctggtcccctgctct

SEQ ID NO: 62640 - DNA, 26 bp, Homo sapiens
ctgtgcacctctggtcccctgctctc

SEQ ID NO: 62641 - DNA, 26 bp, Homo sapiens
tgtgcacctctggtcccctgctctcc

SEQ ID NO: 62642 - DNA, 26 bp, Homo sapiens
gtgcacctctggtcccctgctctccc

SEQ ID NO: 62643 - DNA, 26 bp, Homo sapiens
tgcacctctggtcccctgctctccct

SEQ ID NO: 62644 - DNA, 26 bp, Homo sapiens
gcacctctggtcccctgctctccctc

SEQ ID NO: 62645 - DNA, 26 bp, Homo sapiens
cacctctggtcccctgctctccctca

SEQ ID NO: 62646 - DNA, 26 bp, Homo sapiens
acctctggtcccctgctctccctcaa

SEQ ID NO: 62647 - DNA, 26 bp, Homo sapiens
cctctggtcccctgctctccctcaaa

SEQ ID NO: 62648 - DNA, 26 bp, Homo sapiens
ctctggtcccctgctctccctcaaag

SEQ ID NO: 62649 - DNA, 26 bp, Homo sapiens
tctggtcccctgctctccctcaaagc

SEQ ID NO: 62650 - DNA, 26 bp, Homo sapiens
ctggtcccctgctctccctcaaagcc

SEQ ID NO: 62651 - DNA, 26 bp, Homo sapiens
tggtcccctgctctccctcaaagccc

SEQ ID NO: 62652 - DNA, 26 bp, Homo sapiens
ggtcccctgctctccctcaaagcccg

SEQ ID NO: 62653 - DNA, 26 bp, Homo sapiens
gtcccctgctctccctcaaagcccgg

SEQ ID NO: 62654 - DNA, 26 bp, Homo sapiens
tcccctgctctccctcaaagcccggc

SEQ ID NO: 62655 - DNA, 26 bp, Homo sapiens
cccctgctctccctcaaagcccggct

SEQ ID NO: 62656 - DNA, 26 bp, Homo sapiens
ccctgctctccctcaaagcccggctg

SEQ ID NO: 62657 - DNA, 26 bp, Homo sapiens
cctgctctccctcaaagcccggctgg

SEQ ID NO: 62658 - DNA, 26 bp, Homo sapiens
ctgctctccctcaaagcccggctggc

SEQ ID NO: 62659 - DNA, 26 bp, Homo sapiens
tgctctccctcaaagcccggctggcc

SEQ ID NO: 62660 - DNA, 26 bp, Homo sapiens
gctctccctcaaagcccggctggcca

SEQ ID NO: 62661 - DNA, 26 bp, Homo sapiens
ctctccctcaaagcccggctggccag

SEQ ID NO: 62662 - DNA, 26 bp, Homo sapiens
tctccctcaaagcccggctggccagg

SEQ ID NO: 62663 - DNA, 26 bp, Homo sapiens
ctccctcaaagcccggctggccagga

SEQ ID NO: 62664 - DNA, 26 bp, Homo sapiens
tccctcaaagcccggctggccaggac

SEQ ID NO: 62665 - DNA, 26 bp, Homo sapiens
ccctcaaagcccggctggccaggacc

SEQ ID NO: 62666 - DNA, 26 bp, Homo sapiens
cctcaaagcccggctggccaggaccg

SEQ ID NO: 62667 - DNA, 26 bp, Homo sapiens
ctcaaagcccggctggccaggaccgc

SEQ ID NO: 62668 - DNA, 26 bp, Homo sapiens
tcaaagcccggctggccaggaccgcc

SEQ ID NO: 62669 - DNA, 26 bp, Homo sapiens
caaagcccggctggccaggaccgccc

SEQ ID NO: 62670 - DNA, 26 bp, Homo sapiens
aaagcccggctggccaggaccgccct

SEQ ID NO: 62671 - DNA, 26 bp, Homo sapiens
aagcccggctggccaggaccgccctt

SEQ ID NO: 62672 - DNA, 26 bp, Homo sapiens
agcccggctggccaggaccgcccttg

SEQ ID NO: 62673 - DNA, 26 bp, Homo sapiens
gcccggctggccaggaccgcccttgt

SEQ ID NO: 62674 - DNA, 26 bp, Homo sapiens
cccggctggccaggaccgcccttgtt

SEQ ID NO: 62675 - DNA, 26 bp, Homo sapiens
ccggctggccaggaccgcccttgttg

SEQ ID NO: 62676 - DNA, 26 bp, Homo sapiens
cggctggccaggaccgcccttgttgc

SEQ ID NO: 62677 - DNA, 26 bp, Homo sapiens
ggctggccaggaccgcccttgttgcc

SEQ ID NO: 62678 - DNA, 26 bp, Homo sapiens
gctggccaggaccgcccttgttgccc

SEQ ID NO: 62679 - DNA, 26 bp, Homo sapiens
ctggccaggaccgcccttgttgccct

SEQ ID NO: 62680 - DNA, 26 bp, Homo sapiens
tggccaggaccgcccttgttgccctt

SEQ ID NO: 62681 - DNA, 26 bp, Homo sapiens
ggccaggaccgcccttgttgccctta

SEQ ID NO: 62682 - DNA, 26 bp, Homo sapiens
gccaggaccgcccttgttgcccttag

SEQ ID NO: 62683 - DNA, 26 bp, Homo sapiens
ccaggaccgcccttgttgcccttagc

SEQ ID NO: 62684 - DNA, 26 bp, Homo sapiens
caggaccgcccttgttgcccttagct

SEQ ID NO: 62685 - DNA, 26 bp, Homo sapiens
aggaccgcccttgttgcccttagctc

SEQ ID NO: 62686 - DNA, 26 bp, Homo sapiens
ggaccgcccttgttgcccttagctcc

SEQ ID NO: 62687 - DNA, 26 bp, Homo sapiens
gaccgcccttgttgcccttagctccg

SEQ ID NO: 62688 - DNA, 26 bp, Homo sapiens
accgcccttgttgcccttagctccgg

SEQ ID NO: 62689 - DNA, 26 bp, Homo sapiens
ccgcccttgttgcccttagctccggg

SEQ ID NO: 62690 - DNA, 26 bp, Homo sapiens
cgcccttgttgcccttagctccgggg

SEQ ID NO: 62691 - DNA, 26 bp, Homo sapiens
gcccttgttgcccttagctccggggg

SEQ ID NO: 62692 - DNA, 26 bp, Homo sapiens
cccttgttgcccttagctccgggggg

SEQ ID NO: 62693 - DNA, 26 bp, Homo sapiens
ccttgttgcccttagctccggggggt

SEQ ID NO: 62694 - DNA, 26 bp, Homo sapiens
cttgttgcccttagctccggggggtc

SEQ ID NO: 62695 - DNA, 26 bp, Homo sapiens
ttgttgcccttagctccggggggtcc

SEQ ID NO: 62696 - DNA, 26 bp, Homo sapiens
tgttgcccttagctccggggggtccc

SEQ ID NO: 62697 - DNA, 26 bp, Homo sapiens
gttgcccttagctccggggggtcccc

SEQ ID NO: 62698 - DNA, 26 bp, Homo sapiens
ttgcccttagctccggggggtcccct

SEQ ID NO: 62699 - DNA, 26 bp, Homo sapiens
tgcccttagctccggggggtcccctt

SEQ ID NO: 62700 - DNA, 26 bp, Homo sapiens
gcccttagctccggggggtccccttc

SEQ ID NO: 62701 - DNA, 26 bp, Homo sapiens
cccttagctccggggggtccccttcg

SEQ ID NO: 62702 - DNA, 26 bp, Homo sapiens
ccttagctccggggggtccccttcgg

SEQ ID NO: 62703 - DNA, 26 bp, Homo sapiens
cttagctccggggggtccccttcggc

SEQ ID NO: 62704 - DNA, 26 bp, Homo sapiens
ttagctccggggggtccccttcggcc

SEQ ID NO: 62705 - DNA, 26 bp, Homo sapiens
tagctccggggggtccccttcggcca

SEQ ID NO: 62706 - DNA, 26 bp, Homo sapiens
agctccggggggtccccttcggccaa

SEQ ID NO: 62707 - DNA, 26 bp, Homo sapiens
gctccggggggtccccttcggccaaa

SEQ ID NO: 62708 - DNA, 26 bp, Homo sapiens
ctccggggggtccccttcggccaaag

SEQ ID NO: 62709 - DNA, 26 bp, Homo sapiens
tccggggggtccccttcggccaaagc

SEQ ID NO: 62710 - DNA, 26 bp, Homo sapiens
ccggggggtccccttcggccaaagcc

SEQ ID NO: 62711 - DNA, 26 bp, Homo sapiens
cggggggtccccttcggccaaagcca

SEQ ID NO: 62712 - DNA, 26 bp, Homo sapiens
ggggggtccccttcggccaaagccac

SEQ ID NO: 62713 - DNA, 26 bp, Homo sapiens
gggggtccccttcggccaaagccacc

SEQ ID NO: 62714 - DNA, 26 bp, Homo sapiens
ggggtccccttcggccaaagccacca

SEQ ID NO: 62715 - DNA, 26 bp, Homo sapiens
gggtccccttcggccaaagccaccat

SEQ ID NO: 62716 - DNA, 26 bp, Homo sapiens
ggtccccttcggccaaagccaccatt

SEQ ID NO: 62717 - DNA, 26 bp, Homo sapiens
gtccccttcggccaaagccaccattc

SEQ ID NO: 62718 - DNA, 26 bp, Homo sapiens
tccccttcggccaaagccaccattct

SEQ ID NO: 62719 - DNA, 26 bp, Homo sapiens
ccccttcggccaaagccaccattctt

SEQ ID NO: 62720 - DNA, 26 bp, Homo sapiens
cccttcggccaaagccaccattcttc

SEQ ID NO: 62721 - DNA, 26 bp, Homo sapiens
ccttcggccaaagccaccattcttcc

SEQ ID NO: 62722 - DNA, 26 bp, Homo sapiens
cttcggccaaagccaccattcttccc

SEQ ID NO: 62723 - DNA, 26 bp, Homo sapiens
ttcggccaaagccaccattcttccca

SEQ ID NO: 62724 - DNA, 26 bp, Homo sapiens
tcggccaaagccaccattcttcccag

SEQ ID NO: 62725 - DNA, 26 bp, Homo sapiens
cggccaaagccaccattcttcccagt

SEQ ID NO: 62726 - DNA, 26 bp, Homo sapiens
ggccaaagccaccattcttcccagtt

SEQ ID NO: 62727 - DNA, 26 bp, Homo sapiens
gccaaagccaccattcttcccagttt

SEQ ID NO: 62728 - DNA, 26 bp, Homo sapiens
ccaaagccaccattcttcccagtttc

SEQ ID NO: 62729 - DNA, 26 bp, Homo sapiens
caaagccaccattcttcccagtttct

SEQ ID NO: 62730 - DNA, 26 bp, Homo sapiens
aaagccaccattcttcccagtttctc

SEQ ID NO: 62731 - DNA, 26 bp, Homo sapiens
aagccaccattcttcccagtttctcc

SEQ ID NO: 62732 - DNA, 26 bp, Homo sapiens
agccaccattcttcccagtttctcca

SEQ ID NO: 62733 - DNA, 26 bp, Homo sapiens
gccaccattcttcccagtttctccag

SEQ ID NO: 62734 - DNA, 26 bp, Homo sapiens
ccaccattcttcccagtttctccagg

SEQ ID NO: 62735 - DNA, 26 bp, Homo sapiens
caccattcttcccagtttctccaggt

SEQ ID NO: 62736 - DNA, 26 bp, Homo sapiens
accattcttcccagtttctccaggtc

SEQ ID NO: 62737 - DNA, 26 bp, Homo sapiens
ccattcttcccagtttctccaggtcc

SEQ ID NO: 62738 - DNA, 26 bp, Homo sapiens
cattcttcccagtttctccaggtcct

SEQ ID NO: 62739 - DNA, 26 bp, Homo sapiens
attcttcccagtttctccaggtcctc

SEQ ID NO: 62740 - DNA, 26 bp, Homo sapiens
ttcttcccagtttctccaggtcctcc

SEQ ID NO: 62741 - DNA, 26 bp, Homo sapiens
tcttcccagtttctccaggtcctcca

SEQ ID NO: 62742 - DNA, 26 bp, Homo sapiens
cttcccagtttctccaggtcctccag

SEQ ID NO: 62743 - DNA, 26 bp, Homo sapiens
ttcccagtttctccaggtcctccagg

SEQ ID NO: 62744 - DNA, 26 bp, Homo sapiens
tcccagtttctccaggtcctccaggt

SEQ ID NO: 62745 - DNA, 26 bp, Homo sapiens
cccagtttctccaggtcctccaggta

SEQ ID NO: 62746 - DNA, 26 bp, Homo sapiens
ccagtttctccaggtcctccaggtac

SEQ ID NO: 62747 - DNA, 26 bp, Homo sapiens
cagtttctccaggtcctccaggtact

SEQ ID NO: 62748 - DNA, 26 bp, Homo sapiens
agtttctccaggtcctccaggtactc

SEQ ID NO: 62749 - DNA, 26 bp, Homo sapiens
gtttctccaggtcctccaggtactcc

SEQ ID NO: 62750 - DNA, 26 bp, Homo sapiens
tttctccaggtcctccaggtactcca

SEQ ID NO: 62751 - DNA, 26 bp, Homo sapiens
ttctccaggtcctccaggtactccat

SEQ ID NO: 62752 - DNA, 26 bp, Homo sapiens
tctccaggtcctccaggtactccatc

SEQ ID NO: 62753 - DNA, 26 bp, Homo sapiens
ctccaggtcctccaggtactccatct

SEQ ID NO: 62754 - DNA, 26 bp, Homo sapiens
tccaggtcctccaggtactccatctc

SEQ ID NO: 62755 - DNA, 26 bp, Homo sapiens
ccaggtcctccaggtactccatctct

SEQ ID NO: 62756 - DNA, 26 bp, Homo sapiens
caggtcctccaggtactccatctctc

SEQ ID NO: 62757 - DNA, 26 bp, Homo sapiens
aggtcctccaggtactccatctctcc

SEQ ID NO: 62758 - DNA, 26 bp, Homo sapiens
ggtcctccaggtactccatctctccc

SEQ ID NO: 62759 - DNA, 26 bp, Homo sapiens
gtcctccaggtactccatctctccct

SEQ ID NO: 62760 - DNA, 26 bp, Homo sapiens
tcctccaggtactccatctctccctg

SEQ ID NO: 62761 - DNA, 26 bp, Homo sapiens
cctccaggtactccatctctccctgg

SEQ ID NO: 62762 - DNA, 26 bp, Homo sapiens
ctccaggtactccatctctccctggg

SEQ ID NO: 62763 - DNA, 26 bp, Homo sapiens
tccaggtactccatctctccctggga

SEQ ID NO: 62764 - DNA, 26 bp, Homo sapiens
ccaggtactccatctctccctgggac

SEQ ID NO: 62765 - DNA, 26 bp, Homo sapiens
caggtactccatctctccctgggaca

SEQ ID NO: 62766 - DNA, 26 bp, Homo sapiens
aggtactccatctctccctgggacac

SEQ ID NO: 62767 - DNA, 26 bp, Homo sapiens
ggtactccatctctccctgggacacc

SEQ ID NO: 62768 - DNA, 26 bp, Homo sapiens
gtactccatctctccctgggacaccc

SEQ ID NO: 62769 - DNA, 26 bp, Homo sapiens
tactccatctctccctgggacaccca

SEQ ID NO: 62770 - DNA, 26 bp, Homo sapiens
actccatctctccctgggacacccat

SEQ ID NO: 62771 - DNA, 26 bp, Homo sapiens
ctccatctctccctgggacacccatg

SEQ ID NO: 62772 - DNA, 26 bp, Homo sapiens
tccatctctccctgggacacccatgg

SEQ ID NO: 62773 - DNA, 26 bp, Homo sapiens
ccatctctccctgggacacccatggg

SEQ ID NO: 62774 - DNA, 26 bp, Homo sapiens
catctctccctgggacacccatgggg

SEQ ID NO: 62775 - DNA, 26 bp, Homo sapiens
atctctccctgggacacccatggggc

SEQ ID NO: 62776 - DNA, 26 bp, Homo sapiens
tctctccctgggacacccatggggcc

SEQ ID NO: 62777 - DNA, 26 bp, Homo sapiens
ctctccctgggacacccatggggccg

SEQ ID NO: 62778 - DNA, 26 bp, Homo sapiens
tctccctgggacacccatggggccga

SEQ ID NO: 62779 - DNA, 26 bp, Homo sapiens
ctccctgggacacccatggggccgag

SEQ ID NO: 62780 - DNA, 26 bp, Homo sapiens
tccctgggacacccatggggccgagg

SEQ ID NO: 62781 - DNA, 26 bp, Homo sapiens
ccctgggacacccatggggccgaggt

SEQ ID NO: 62782 - DNA, 26 bp, Homo sapiens
cctgggacacccatggggccgaggtc

SEQ ID NO: 62783 - DNA, 26 bp, Homo sapiens
ctgggacacccatggggccgaggtca

SEQ ID NO: 62784 - DNA, 26 bp, Homo sapiens
tgggacacccatggggccgaggtcac

SEQ ID NO: 62785 - DNA, 26 bp, Homo sapiens
gggacacccatggggccgaggtcacc

SEQ ID NO: 62786 - DNA, 26 bp, Homo sapiens
ggacacccatggggccgaggtcaccg

SEQ ID NO: 62787 - DNA, 26 bp, Homo sapiens
gacacccatggggccgaggtcaccgg

SEQ ID NO: 62788 - DNA, 26 bp, Homo sapiens
acacccatggggccgaggtcaccggt

SEQ ID NO: 62789 - DNA, 26 bp, Homo sapiens
cacccatggggccgaggtcaccggtt

SEQ ID NO: 62790 - DNA, 26 bp, Homo sapiens
acccatggggccgaggtcaccggttt

SEQ ID NO: 62791 - DNA, 26 bp, Homo sapiens
cccatggggccgaggtcaccggtttc

SEQ ID NO: 62792 - DNA, 26 bp, Homo sapiens
ccatggggccgaggtcaccggtttct

SEQ ID NO: 62793 - DNA, 26 bp, Homo sapiens
catggggccgaggtcaccggtttctc

SEQ ID NO: 62794 - DNA, 26 bp, Homo sapiens
atggggccgaggtcaccggtttctcc

SEQ ID NO: 62795 - DNA, 26 bp, Homo sapiens
tggggccgaggtcaccggtttctcct

SEQ ID NO: 62796 - DNA, 26 bp, Homo sapiens
ggggccgaggtcaccggtttctcctt

SEQ ID NO: 62797 - DNA, 26 bp, Homo sapiens
gggccgaggtcaccggtttctccttt

SEQ ID NO: 62798 - DNA, 26 bp, Homo sapiens
ggccgaggtcaccggtttctcctttg

SEQ ID NO: 62799 - DNA, 26 bp, Homo sapiens
gccgaggtcaccggtttctcctttgg

SEQ ID NO: 62800 - DNA, 26 bp, Homo sapiens
ccgaggtcaccggtttctcctttggg

SEQ ID NO: 62801 - DNA, 26 bp, Homo sapiens
cgaggtcaccggtttctcctttgggt

SEQ ID NO: 62802 - DNA, 26 bp, Homo sapiens
gaggtcaccggtttctcctttgggtc

SEQ ID NO: 62803 - DNA, 26 bp, Homo sapiens
aggtcaccggtttctcctttgggtcc

SEQ ID NO: 62804 - DNA, 26 bp, Homo sapiens
ggtcaccggtttctcctttgggtcct

SEQ ID NO: 62805 - DNA, 26 bp, Homo sapiens
gtcaccggtttctcctttgggtcctc

SEQ ID NO: 62806 - DNA, 26 bp, Homo sapiens
tcaccggtttctcctttgggtcctct

SEQ ID NO: 62807 - DNA, 26 bp, Homo sapiens
caccggtttctcctttgggtcctctc

SEQ ID NO: 62808 - DNA, 26 bp, Homo sapiens
accggtttctcctttgggtcctctct

SEQ ID NO: 62809 - DNA, 26 bp, Homo sapiens
ccggtttctcctttgggtcctctctc

SEQ ID NO: 62810 - DNA, 26 bp, Homo sapiens
cggtttctcctttgggtcctctctcc

SEQ ID NO: 62811 - DNA, 26 bp, Homo sapiens
ggtttctcctttgggtcctctctcct

SEQ ID NO: 62812 - DNA, 26 bp, Homo sapiens
gtttctcctttgggtcctctctcctg

SEQ ID NO: 62813 - DNA, 26 bp, Homo sapiens
tttctcctttgggtcctctctcctgg

SEQ ID NO: 62814 - DNA, 26 bp, Homo sapiens
ttctcctttgggtcctctctcctggc

SEQ ID NO: 62815 - DNA, 26 bp, Homo sapiens
tctcctttgggtcctctctcctggct

SEQ ID NO: 62816 - DNA, 26 bp, Homo sapiens
ctcctttgggtcctctctcctggctg

SEQ ID NO: 62817 - DNA, 26 bp, Homo sapiens
tcctttgggtcctctctcctggctgt

SEQ ID NO: 62818 - DNA, 26 bp, Homo sapiens
cctttgggtcctctctcctggctgtc

SEQ ID NO: 62819 - DNA, 26 bp, Homo sapiens
ctttgggtcctctctcctggctgtct

SEQ ID NO: 62820 - DNA, 26 bp, Homo sapiens
tttgggtcctctctcctggctgtctt

SEQ ID NO: 62821 - DNA, 26 bp, Homo sapiens
ttgggtcctctctcctggctgtcttg

SEQ ID NO: 62822 - DNA, 26 bp, Homo sapiens
tgggtcctctctcctggctgtcttgt

SEQ ID NO: 62823 - DNA, 26 bp, Homo sapiens
gggtcctctctcctggctgtcttgtc

SEQ ID NO: 62824 - DNA, 26 bp, Homo sapiens
ggtcctctctcctggctgtcttgtcc

SEQ ID NO: 62825 - DNA, 26 bp, Homo sapiens
gtcctctctcctggctgtcttgtcct

SEQ ID NO: 62826 - DNA, 26 bp, Homo sapiens
tcctctctcctggctgtcttgtcctg

SEQ ID NO: 62827 - DNA, 26 bp, Homo sapiens
cctctctcctggctgtcttgtcctgg

SEQ ID NO: 62828 - DNA, 26 bp, Homo sapiens
ctctctcctggctgtcttgtcctggg

SEQ ID NO: 62829 - DNA, 26 bp, Homo sapiens
tctctcctggctgtcttgtcctgggt

SEQ ID NO: 62830 - DNA, 26 bp, Homo sapiens
ctctcctggctgtcttgtcctgggtt

SEQ ID NO: 62831 - DNA, 26 bp, Homo sapiens
tctcctggctgtcttgtcctgggtta

SEQ ID NO: 62832 - DNA, 26 bp, Homo sapiens
ctcctggctgtcttgtcctgggttac

SEQ ID NO: 62833 - DNA, 26 bp, Homo sapiens
tcctggctgtcttgtcctgggttacc

SEQ ID NO: 62834 - DNA, 26 bp, Homo sapiens
cctggctgtcttgtcctgggttaccc

SEQ ID NO: 62835 - DNA, 26 bp, Homo sapiens
ctggctgtcttgtcctgggttacccg

SEQ ID NO: 62836 - DNA, 26 bp, Homo sapiens
tggctgtcttgtcctgggttacccgg

SEQ ID NO: 62837 - DNA, 26 bp, Homo sapiens
ggctgtcttgtcctgggttacccggg

SEQ ID NO: 62838 - DNA, 26 bp, Homo sapiens
gctgtcttgtcctgggttacccgggt

SEQ ID NO: 62839 - DNA, 26 bp, Homo sapiens
ctgtcttgtcctgggttacccgggtc

SEQ ID NO: 62840 - DNA, 26 bp, Homo sapiens
tgtcttgtcctgggttacccgggtcc

SEQ ID NO: 62841 - DNA, 26 bp, Homo sapiens
gtcttgtcctgggttacccgggtccc

SEQ ID NO: 62842 - DNA, 26 bp, Homo sapiens
tcttgtcctgggttacccgggtcccc

SEQ ID NO: 62843 - DNA, 26 bp, Homo sapiens
cttgtcctgggttacccgggtcccct

SEQ ID NO: 62844 - DNA, 26 bp, Homo sapiens
ttgtcctgggttacccgggtcccctc

SEQ ID NO: 62845 - DNA, 26 bp, Homo sapiens
tgtcctgggttacccgggtcccctcg

SEQ ID NO: 62846 - DNA, 26 bp, Homo sapiens
gtcctgggttacccgggtcccctcga

SEQ ID NO: 62847 - DNA, 26 bp, Homo sapiens
tcctgggttacccgggtcccctcgaa

SEQ ID NO: 62848 - DNA, 26 bp, Homo sapiens
cctgggttacccgggtcccctcgaat

SEQ ID NO: 62849 - DNA, 26 bp, Homo sapiens
ctgggttacccgggtcccctcgaatc

SEQ ID NO: 62850 - DNA, 26 bp, Homo sapiens
tgggttacccgggtcccctcgaatcc

SEQ ID NO: 62851 - DNA, 26 bp, Homo sapiens
gggttacccgggtcccctcgaatccc

SEQ ID NO: 62852 - DNA, 26 bp, Homo sapiens
ggttacccgggtcccctcgaatccca

SEQ ID NO: 62853 - DNA, 26 bp, Homo sapiens
gttacccgggtcccctcgaatcccaa

SEQ ID NO: 62854 - DNA, 26 bp, Homo sapiens
ttacccgggtcccctcgaatcccaac

SEQ ID NO: 62855 - DNA, 26 bp, Homo sapiens
tacccgggtcccctcgaatcccaaca

SEQ ID NO: 62856 - DNA, 26 bp, Homo sapiens
acccgggtcccctcgaatcccaacat

SEQ ID NO: 62857 - DNA, 26 bp, Homo sapiens
cccgggtcccctcgaatcccaacatc

SEQ ID NO: 62858 - DNA, 26 bp, Homo sapiens
ccgggtcccctcgaatcccaacatct

SEQ ID NO: 62859 - DNA, 26 bp, Homo sapiens
cgggtcccctcgaatcccaacatctc

SEQ ID NO: 62860 - DNA, 26 bp, Homo sapiens
gggtcccctcgaatcccaacatctcc

SEQ ID NO: 62861 - DNA, 26 bp, Homo sapiens
ggtcccctcgaatcccaacatctcct

SEQ ID NO: 62862 - DNA, 26 bp, Homo sapiens
gtcccctcgaatcccaacatctcctc

SEQ ID NO: 62863 - DNA, 26 bp, Homo sapiens
tcccctcgaatcccaacatctcctct

SEQ ID NO: 62864 - DNA, 26 bp, Homo sapiens
cccctcgaatcccaacatctcctctt

SEQ ID NO: 62865 - DNA, 26 bp, Homo sapiens
ccctcgaatcccaacatctcctcttt

SEQ ID NO: 62866 - DNA, 26 bp, Homo sapiens
cctcgaatcccaacatctcctctttc

SEQ ID NO: 62867 - DNA, 26 bp, Homo sapiens
ctcgaatcccaacatctcctctttct

SEQ ID NO: 62868 - DNA, 26 bp, Homo sapiens
tcgaatcccaacatctcctctttctc

SEQ ID NO: 62869 - DNA, 26 bp, Homo sapiens
cgaatcccaacatctcctctttctcc

SEQ ID NO: 62870 - DNA, 26 bp, Homo sapiens
gaatcccaacatctcctctttctcct

SEQ ID NO: 62871 - DNA, 26 bp, Homo sapiens
aatcccaacatctcctctttctcctt

SEQ ID NO: 62872 - DNA, 26 bp, Homo sapiens
atcccaacatctcctctttctccttt

SEQ ID NO: 62873 - DNA, 26 bp, Homo sapiens
tcccaacatctcctctttctcctttc

SEQ ID NO: 62874 - DNA, 26 bp, Homo sapiens
cccaacatctcctctttctcctttct

SEQ ID NO: 62875 - DNA, 26 bp, Homo sapiens
ccaacatctcctctttctcctttctc

SEQ ID NO: 62876 - DNA, 26 bp, Homo sapiens
caacatctcctctttctcctttctct

SEQ ID NO: 62877 - DNA, 26 bp, Homo sapiens
aacatctcctctttctcctttctctc

SEQ ID NO: 62878 - DNA, 26 bp, Homo sapiens
acatctcctctttctcctttctctcc

SEQ ID NO: 62879 - DNA, 26 bp, Homo sapiens
catctcctctttctcctttctctcct

SEQ ID NO: 62880 - DNA, 26 bp, Homo sapiens
atctcctctttctcctttctctcctc

SEQ ID NO: 62881 - DNA, 26 bp, Homo sapiens
tctcctctttctcctttctctcctcg

SEQ ID NO: 62882 - DNA, 26 bp, Homo sapiens
ctcctctttctcctttctctcctcga

SEQ ID NO: 62883 - DNA, 26 bp, Homo sapiens
tcctctttctcctttctctcctcgag

SEQ ID NO: 62884 - DNA, 26 bp, Homo sapiens
cctctttctcctttctctcctcgagg

SEQ ID NO: 62885 - DNA, 26 bp, Homo sapiens
ctctttctcctttctctcctcgaggt

SEQ ID NO: 62886 - DNA, 26 bp, Homo sapiens
tctttctcctttctctcctcgaggtc

SEQ ID NO: 62887 - DNA, 26 bp, Homo sapiens
ctttctcctttctctcctcgaggtcc

SEQ ID NO: 62888 - DNA, 26 bp, Homo sapiens
tttctcctttctctcctcgaggtcct

SEQ ID NO: 62889 - DNA, 26 bp, Homo sapiens
ttctcctttctctcctcgaggtcctt

SEQ ID NO: 62890 - DNA, 26 bp, Homo sapiens
tctcctttctctcctcgaggtccttt

SEQ ID NO: 62891 - DNA, 26 bp, Homo sapiens
ctcctttctctcctcgaggtccttta

SEQ ID NO: 62892 - DNA, 26 bp, Homo sapiens
tcctttctctcctcgaggtcctttat

SEQ ID NO: 62893 - DNA, 26 bp, Homo sapiens
cctttctctcctcgaggtcctttatc

SEQ ID NO: 62894 - DNA, 26 bp, Homo sapiens
ctttctctcctcgaggtcctttatca

SEQ ID NO: 62895 - DNA, 26 bp, Homo sapiens
tttctctcctcgaggtcctttatcac

SEQ ID NO: 62896 - DNA, 26 bp, Homo sapiens
ttctctcctcgaggtcctttatcacc

SEQ ID NO: 62897 - DNA, 26 bp, Homo sapiens
tctctcctcgaggtcctttatcaccc

SEQ ID NO: 62898 - DNA, 26 bp, Homo sapiens
ctctcctcgaggtcctttatcacccc

SEQ ID NO: 62899 - DNA, 26 bp, Homo sapiens
tctcctcgaggtcctttatcacccct

SEQ ID NO: 62900 - DNA, 26 bp, Homo sapiens
ctcctcgaggtcctttatcacccctt

SEQ ID NO: 62901 - DNA, 26 bp, Homo sapiens
tcctcgaggtcctttatcaccccttc

SEQ ID NO: 62902 - DNA, 26 bp, Homo sapiens
cctcgaggtcctttatcaccccttct

SEQ ID NO: 62903 - DNA, 26 bp, Homo sapiens
ctcgaggtcctttatcaccccttctt

SEQ ID NO: 62904 - DNA, 26 bp, Homo sapiens
tcgaggtcctttatcaccccttcttc

SEQ ID NO: 62905 - DNA, 26 bp, Homo sapiens
cgaggtcctttatcaccccttcttcc

SEQ ID NO: 62906 - DNA, 26 bp, Homo sapiens
gaggtcctttatcaccccttcttcca

SEQ ID NO: 62907 - DNA, 26 bp, Homo sapiens
aggtcctttatcaccccttcttccag

SEQ ID NO: 62908 - DNA, 26 bp, Homo sapiens
ggtcctttatcaccccttcttccagg

SEQ ID NO: 62909 - DNA, 26 bp, Homo sapiens
gtcctttatcaccccttcttccagga

SEQ ID NO: 62910 - DNA, 26 bp, Homo sapiens
tcctttatcaccccttcttccaggat

SEQ ID NO: 62911 - DNA, 26 bp, Homo sapiens
cctttatcaccccttcttccaggatt

SEQ ID NO: 62912 - DNA, 26 bp, Homo sapiens
ctttatcaccccttcttccaggattc

SEQ ID NO: 62913 - DNA, 26 bp, Homo sapiens
tttatcaccccttcttccaggattcc

SEQ ID NO: 62914 - DNA, 26 bp, Homo sapiens
ttatcaccccttcttccaggattccc

SEQ ID NO: 62915 - DNA, 26 bp, Homo sapiens
tatcaccccttcttccaggattccct

SEQ ID NO: 62916 - DNA, 26 bp, Homo sapiens
atcaccccttcttccaggattccctt

SEQ ID NO: 62917 - DNA, 26 bp, Homo sapiens
tcaccccttcttccaggattcccttt

SEQ ID NO: 62918 - DNA, 26 bp, Homo sapiens
caccccttcttccaggattccctttc

SEQ ID NO: 62919 - DNA, 26 bp, Homo sapiens
accccttcttccaggattccctttct

SEQ ID NO: 62920 - DNA, 26 bp, Homo sapiens
ccccttcttccaggattccctttctc

SEQ ID NO: 62921 - DNA, 26 bp, Homo sapiens
cccttcttccaggattccctttctct

SEQ ID NO: 62922 - DNA, 26 bp, Homo sapiens
ccttcttccaggattccctttctctc

SEQ ID NO: 62923 - DNA, 26 bp, Homo sapiens
cttcttccaggattccctttctctcc

SEQ ID NO: 62924 - DNA, 26 bp, Homo sapiens
ttcttccaggattccctttctctcca

SEQ ID NO: 62925 - DNA, 26 bp, Homo sapiens
tcttccaggattccctttctctccag

SEQ ID NO: 62926 - DNA, 26 bp, Homo sapiens
cttccaggattccctttctctccaga

SEQ ID NO: 62927 - DNA, 26 bp, Homo sapiens
ttccaggattccctttctctccagaa

SEQ ID NO: 62928 - DNA, 26 bp, Homo sapiens
tccaggattccctttctctccagaag

SEQ ID NO: 62929 - DNA, 26 bp, Homo sapiens
ccaggattccctttctctccagaaga

SEQ ID NO: 62930 - DNA, 26 bp, Homo sapiens
caggattccctttctctccagaagaa

SEQ ID NO: 62931 - DNA, 26 bp, Homo sapiens
aggattccctttctctccagaagaac

SEQ ID NO: 62932 - DNA, 26 bp, Homo sapiens
ggattccctttctctccagaagaacc

SEQ ID NO: 62933 - DNA, 26 bp, Homo sapiens
gattccctttctctccagaagaacca

SEQ ID NO: 62934 - DNA, 26 bp, Homo sapiens
attccctttctctccagaagaaccag

SEQ ID NO: 62935 - DNA, 26 bp, Homo sapiens
ttccctttctctccagaagaaccagg

SEQ ID NO: 62936 - DNA, 26 bp, Homo sapiens
tccctttctctccagaagaaccaggc

SEQ ID NO: 62937 - DNA, 26 bp, Homo sapiens
ccctttctctccagaagaaccaggca

SEQ ID NO: 62938 - DNA, 26 bp, Homo sapiens
cctttctctccagaagaaccaggcaa

SEQ ID NO: 62939 - DNA, 26 bp, Homo sapiens
ctttctctccagaagaaccaggcaat

SEQ ID NO: 62940 - DNA, 26 bp, Homo sapiens
tttctctccagaagaaccaggcaatc

SEQ ID NO: 62941 - DNA, 26 bp, Homo sapiens
ttctctccagaagaaccaggcaatcc

SEQ ID NO: 62942 - DNA, 26 bp, Homo sapiens
tctctccagaagaaccaggcaatcct

SEQ ID NO: 62943 - DNA, 26 bp, Homo sapiens
ctctccagaagaaccaggcaatcctt

SEQ ID NO: 62944 - DNA, 26 bp, Homo sapiens
tctccagaagaaccaggcaatccttt

SEQ ID NO: 62945 - DNA, 26 bp, Homo sapiens
ctccagaagaaccaggcaatcctttg

SEQ ID NO: 62946 - DNA, 26 bp, Homo sapiens
tccagaagaaccaggcaatcctttgt

SEQ ID NO: 62947 - DNA, 26 bp, Homo sapiens
ccagaagaaccaggcaatcctttgtc

SEQ ID NO: 62948 - DNA, 26 bp, Homo sapiens
cagaagaaccaggcaatcctttgtct

SEQ ID NO: 62949 - DNA, 26 bp, Homo sapiens
agaagaaccaggcaatcctttgtctc

SEQ ID NO: 62950 - DNA, 26 bp, Homo sapiens
gaagaaccaggcaatcctttgtctcc

SEQ ID NO: 62951 - DNA, 26 bp, Homo sapiens
aagaaccaggcaatcctttgtctcca

SEQ ID NO: 62952 - DNA, 26 bp, Homo sapiens
agaaccaggcaatcctttgtctccat

SEQ ID NO: 62953 - DNA, 26 bp, Homo sapiens
gaaccaggcaatcctttgtctccatc

SEQ ID NO: 62954 - DNA, 26 bp, Homo sapiens
aaccaggcaatcctttgtctccatct

SEQ ID NO: 62955 - DNA, 26 bp, Homo sapiens
accaggcaatcctttgtctccatctt

SEQ ID NO: 62956 - DNA, 26 bp, Homo sapiens
ccaggcaatcctttgtctccatcttc

SEQ ID NO: 62957 - DNA, 26 bp, Homo sapiens
caggcaatcctttgtctccatcttca

SEQ ID NO: 62958 - DNA, 26 bp, Homo sapiens
aggcaatcctttgtctccatcttcac

SEQ ID NO: 62959 - DNA, 26 bp, Homo sapiens
ggcaatcctttgtctccatcttcacc

SEQ ID NO: 62960 - DNA, 26 bp, Homo sapiens
gcaatcctttgtctccatcttcacca

SEQ ID NO: 62961 - DNA, 26 bp, Homo sapiens
caatcctttgtctccatcttcaccat

SEQ ID NO: 62962 - DNA, 26 bp, Homo sapiens
aatcctttgtctccatcttcaccatc

SEQ ID NO: 62963 - DNA, 26 bp, Homo sapiens
atcctttgtctccatcttcaccatcc

SEQ ID NO: 62964 - DNA, 26 bp, Homo sapiens
tcctttgtctccatcttcaccatcca

SEQ ID NO: 62965 - DNA, 26 bp, Homo sapiens
cctttgtctccatcttcaccatccag

SEQ ID NO: 62966 - DNA, 26 bp, Homo sapiens
ctttgtctccatcttcaccatccaga

SEQ ID NO: 62967 - DNA, 26 bp, Homo sapiens
tttgtctccatcttcaccatccagac

SEQ ID NO: 62968 - DNA, 26 bp, Homo sapiens
ttgtctccatcttcaccatccagacc

SEQ ID NO: 62969 - DNA, 26 bp, Homo sapiens
tgtctccatcttcaccatccagacca

SEQ ID NO: 62970 - DNA, 26 bp, Homo sapiens
gtctccatcttcaccatccagaccat

SEQ ID NO: 62971 - DNA, 26 bp, Homo sapiens
tctccatcttcaccatccagaccatc

SEQ ID NO: 62972 - DNA, 26 bp, Homo sapiens
ctccatcttcaccatccagaccatcc

SEQ ID NO: 62973 - DNA, 26 bp, Homo sapiens
tccatcttcaccatccagaccatcca

SEQ ID NO: 62974 - DNA, 26 bp, Homo sapiens
ccatcttcaccatccagaccatccag

SEQ ID NO: 62975 - DNA, 26 bp, Homo sapiens
catcttcaccatccagaccatccagt

SEQ ID NO: 62976 - DNA, 26 bp, Homo sapiens
atcttcaccatccagaccatccagtc

SEQ ID NO: 62977 - DNA, 26 bp, Homo sapiens
tcttcaccatccagaccatccagtcc

SEQ ID NO: 62978 - DNA, 26 bp, Homo sapiens
cttcaccatccagaccatccagtcca

SEQ ID NO: 62979 - DNA, 26 bp, Homo sapiens
ttcaccatccagaccatccagtccaa

SEQ ID NO: 62980 - DNA, 26 bp, Homo sapiens
tcaccatccagaccatccagtccaat

SEQ ID NO: 62981 - DNA, 26 bp, Homo sapiens
caccatccagaccatccagtccaatt

SEQ ID NO: 62982 - DNA, 26 bp, Homo sapiens
accatccagaccatccagtccaattt

SEQ ID NO: 62983 - DNA, 26 bp, Homo sapiens
ccatccagaccatccagtccaatttc

SEQ ID NO: 62984 - DNA, 26 bp, Homo sapiens
catccagaccatccagtccaatttct

SEQ ID NO: 62985 - DNA, 26 bp, Homo sapiens
atccagaccatccagtccaatttctc

SEQ ID NO: 62986 - DNA, 26 bp, Homo sapiens
tccagaccatccagtccaatttctcc

SEQ ID NO: 62987 - DNA, 26 bp, Homo sapiens
ccagaccatccagtccaatttctcct

SEQ ID NO: 62988 - DNA, 26 bp, Homo sapiens
cagaccatccagtccaatttctccta

SEQ ID NO: 62989 - DNA, 26 bp, Homo sapiens
agaccatccagtccaatttctcctac

SEQ ID NO: 62990 - DNA, 26 bp, Homo sapiens
gaccatccagtccaatttctcctact

SEQ ID NO: 62991 - DNA, 26 bp, Homo sapiens
accatccagtccaatttctcctactt

SEQ ID NO: 62992 - DNA, 26 bp, Homo sapiens
ccatccagtccaatttctcctacttc

SEQ ID NO: 62993 - DNA, 26 bp, Homo sapiens
catccagtccaatttctcctacttcg

SEQ ID NO: 62994 - DNA, 26 bp, Homo sapiens
atccagtccaatttctcctacttcgc

SEQ ID NO: 62995 - DNA, 26 bp, Homo sapiens
tccagtccaatttctcctacttcgcc

SEQ ID NO: 62996 - DNA, 26 bp, Homo sapiens
ccagtccaatttctcctacttcgccc

SEQ ID NO: 62997 - DNA, 26 bp, Homo sapiens
cagtccaatttctcctacttcgccct

SEQ ID NO: 62998 - DNA, 26 bp, Homo sapiens
agtccaatttctcctacttcgccctt

SEQ ID NO: 62999 - DNA, 26 bp, Homo sapiens
gtccaatttctcctacttcgcccttc

SEQ ID NO: 63000 - DNA, 26 bp, Homo sapiens
tccaatttctcctacttcgcccttct

SEQ ID NO: 63001 - DNA, 26 bp, Homo sapiens
ccaatttctcctacttcgcccttctc

SEQ ID NO: 63002 - DNA, 26 bp, Homo sapiens
caatttctcctacttcgcccttctct

SEQ ID NO: 63003 - DNA, 26 bp, Homo sapiens
aatttctcctacttcgcccttctctc

SEQ ID NO: 63004 - DNA, 26 bp, Homo sapiens
atttctcctacttcgcccttctctcc

SEQ ID NO: 63005 - DNA, 26 bp, Homo sapiens
tttctcctacttcgcccttctctcct

SEQ ID NO: 63006 - DNA, 26 bp, Homo sapiens
ttctcctacttcgcccttctctcctg

SEQ ID NO: 63007 - DNA, 26 bp, Homo sapiens
tctcctacttcgcccttctctcctgg

SEQ ID NO: 63008 - DNA, 26 bp, Homo sapiens
ctcctacttcgcccttctctcctggg

SEQ ID NO: 63009 - DNA, 26 bp, Homo sapiens
tcctacttcgcccttctctcctggga

SEQ ID NO: 63010 - DNA, 26 bp, Homo sapiens
cctacttcgcccttctctcctgggaa

SEQ ID NO: 63011 - DNA, 26 bp, Homo sapiens
ctacttcgcccttctctcctgggaat

SEQ ID NO: 63012 - DNA, 26 bp, Homo sapiens
tacttcgcccttctctcctgggaatc

SEQ ID NO: 63013 - DNA, 26 bp, Homo sapiens
acttcgcccttctctcctgggaatcc

SEQ ID NO: 63014 - DNA, 26 bp, Homo sapiens
cttcgcccttctctcctgggaatccc

SEQ ID NO: 63015 - DNA, 26 bp, Homo sapiens
ttcgcccttctctcctgggaatcccc

SEQ ID NO: 63016 - DNA, 26 bp, Homo sapiens
tcgcccttctctcctgggaatccccg

SEQ ID NO: 63017 - DNA, 26 bp, Homo sapiens
cgcccttctctcctgggaatccccga

SEQ ID NO: 63018 - DNA, 26 bp, Homo sapiens
gcccttctctcctgggaatccccgag

SEQ ID NO: 63019 - DNA, 26 bp, Homo sapiens
cccttctctcctgggaatccccgaga

SEQ ID NO: 63020 - DNA, 26 bp, Homo sapiens
ccttctctcctgggaatccccgagag

SEQ ID NO: 63021 - DNA, 26 bp, Homo sapiens
cttctctcctgggaatccccgagagc

SEQ ID NO: 63022 - DNA, 26 bp, Homo sapiens
ttctctcctgggaatccccgagagcc

SEQ ID NO: 63023 - DNA, 26 bp, Homo sapiens
tctctcctgggaatccccgagagccc

SEQ ID NO: 63024 - DNA, 26 bp, Homo sapiens
ctctcctgggaatccccgagagccct

SEQ ID NO: 63025 - DNA, 26 bp, Homo sapiens
tctcctgggaatccccgagagccctt

SEQ ID NO: 63026 - DNA, 26 bp, Homo sapiens
ctcctgggaatccccgagagcccttt

SEQ ID NO: 63027 - DNA, 26 bp, Homo sapiens
tcctgggaatccccgagagcccttta

SEQ ID NO: 63028 - DNA, 26 bp, Homo sapiens
cctgggaatccccgagagccctttac

SEQ ID NO: 63029 - DNA, 26 bp, Homo sapiens
ctgggaatccccgagagccctttact

SEQ ID NO: 63030 - DNA, 26 bp, Homo sapiens
tgggaatccccgagagccctttactc

SEQ ID NO: 63031 - DNA, 26 bp, Homo sapiens
gggaatccccgagagccctttactcc

SEQ ID NO: 63032 - DNA, 26 bp, Homo sapiens
ggaatccccgagagccctttactcct

SEQ ID NO: 63033 - DNA, 26 bp, Homo sapiens
gaatccccgagagccctttactcctc

SEQ ID NO: 63034 - DNA, 26 bp, Homo sapiens
aatccccgagagccctttactcctct

SEQ ID NO: 63035 - DNA, 26 bp, Homo sapiens
atccccgagagccctttactcctctc

SEQ ID NO: 63036 - DNA, 26 bp, Homo sapiens
tccccgagagccctttactcctctct

SEQ ID NO: 63037 - DNA, 26 bp, Homo sapiens
ccccgagagccctttactcctctctg

SEQ ID NO: 63038 - DNA, 26 bp, Homo sapiens
cccgagagccctttactcctctctgg

SEQ ID NO: 63039 - DNA, 26 bp, Homo sapiens
ccgagagccctttactcctctctggc

SEQ ID NO: 63040 - DNA, 26 bp, Homo sapiens
cgagagccctttactcctctctggcc

SEQ ID NO: 63041 - DNA, 26 bp, Homo sapiens
gagagccctttactcctctctggccc

SEQ ID NO: 63042 - DNA, 26 bp, Homo sapiens
agagccctttactcctctctggcccg

SEQ ID NO: 63043 - DNA, 26 bp, Homo sapiens
gagccctttactcctctctggcccgg

SEQ ID NO: 63044 - DNA, 26 bp, Homo sapiens
agccctttactcctctctggcccggg

SEQ ID NO: 63045 - DNA, 26 bp, Homo sapiens
gccctttactcctctctggcccgggc

SEQ ID NO: 63046 - DNA, 26 bp, Homo sapiens
ccctttactcctctctggcccgggca

SEQ ID NO: 63047 - DNA, 26 bp, Homo sapiens
cctttactcctctctggcccgggcag

SEQ ID NO: 63048 - DNA, 26 bp, Homo sapiens
ctttactcctctctggcccgggcagc

SEQ ID NO: 63049 - DNA, 26 bp, Homo sapiens
tttactcctctctggcccgggcagcc

SEQ ID NO: 63050 - DNA, 26 bp, Homo sapiens
ttactcctctctggcccgggcagccc

SEQ ID NO: 63051 - DNA, 26 bp, Homo sapiens
tactcctctctggcccgggcagccct

SEQ ID NO: 63052 - DNA, 26 bp, Homo sapiens
actcctctctggcccgggcagccctg

SEQ ID NO: 63053 - DNA, 26 bp, Homo sapiens
ctcctctctggcccgggcagccctgg

SEQ ID NO: 63054 - DNA, 26 bp, Homo sapiens
tcctctctggcccgggcagccctgga

SEQ ID NO: 63055 - DNA, 26 bp, Homo sapiens
cctctctggcccgggcagccctggaa

SEQ ID NO: 63056 - DNA, 26 bp, Homo sapiens
ctctctggcccgggcagccctggaaa

SEQ ID NO: 63057 - DNA, 26 bp, Homo sapiens
tctctggcccgggcagccctggaaac

SEQ ID NO: 63058 - DNA, 26 bp, Homo sapiens
ctctggcccgggcagccctggaaacc

SEQ ID NO: 63059 - DNA, 26 bp, Homo sapiens
tctggcccgggcagccctggaaacct

SEQ ID NO: 63060 - DNA, 26 bp, Homo sapiens
ctggcccgggcagccctggaaacctt

SEQ ID NO: 63061 - DNA, 26 bp, Homo sapiens
tggcccgggcagccctggaaaccttg

SEQ ID NO: 63062 - DNA, 26 bp, Homo sapiens
ggcccgggcagccctggaaaccttga

SEQ ID NO: 63063 - DNA, 26 bp, Homo sapiens
gcccgggcagccctggaaaccttgag

SEQ ID NO: 63064 - DNA, 26 bp, Homo sapiens
cccgggcagccctggaaaccttgagt

SEQ ID NO: 63065 - DNA, 26 bp, Homo sapiens
ccgggcagccctggaaaccttgagtg

SEQ ID NO: 63066 - DNA, 26 bp, Homo sapiens
cgggcagccctggaaaccttgagtgc

SEQ ID NO: 63067 - DNA, 26 bp, Homo sapiens
gggcagccctggaaaccttgagtgcc

SEQ ID NO: 63068 - DNA, 26 bp, Homo sapiens
ggcagccctggaaaccttgagtgccg

SEQ ID NO: 63069 - DNA, 26 bp, Homo sapiens
gcagccctggaaaccttgagtgccgt

SEQ ID NO: 63070 - DNA, 26 bp, Homo sapiens
cagccctggaaaccttgagtgccgtt

SEQ ID NO: 63071 - DNA, 26 bp, Homo sapiens
agccctggaaaccttgagtgccgttc

SEQ ID NO: 63072 - DNA, 26 bp, Homo sapiens
gccctggaaaccttgagtgccgttca

SEQ ID NO: 63073 - DNA, 26 bp, Homo sapiens
ccctggaaaccttgagtgccgttcac

SEQ ID NO: 63074 - DNA, 26 bp, Homo sapiens
cctggaaaccttgagtgccgttcaca

SEQ ID NO: 63075 - DNA, 26 bp, Homo sapiens
ctggaaaccttgagtgccgttcacac

SEQ ID NO: 63076 - DNA, 26 bp, Homo sapiens
tggaaaccttgagtgccgttcacacc

SEQ ID NO: 63077 - DNA, 26 bp, Homo sapiens
ggaaaccttgagtgccgttcacacca

SEQ ID NO: 63078 - DNA, 26 bp, Homo sapiens
gaaaccttgagtgccgttcacaccag

SEQ ID NO: 63079 - DNA, 26 bp, Homo sapiens
aaaccttgagtgccgttcacaccagg

SEQ ID NO: 63080 - DNA, 26 bp, Homo sapiens
aaccttgagtgccgttcacaccaggc

SEQ ID NO: 63081 - DNA, 26 bp, Homo sapiens
accttgagtgccgttcacaccaggcg

SEQ ID NO: 63082 - DNA, 26 bp, Homo sapiens
ccttgagtgccgttcacaccaggcgg

SEQ ID NO: 63083 - DNA, 26 bp, Homo sapiens
cttgagtgccgttcacaccaggcgga

SEQ ID NO: 63084 - DNA, 26 bp, Homo sapiens
ttgagtgccgttcacaccaggcggac

SEQ ID NO: 63085 - DNA, 26 bp, Homo sapiens
tgagtgccgttcacaccaggcggacc

SEQ ID NO: 63086 - DNA, 26 bp, Homo sapiens
gagtgccgttcacaccaggcggacca

SEQ ID NO: 63087 - DNA, 26 bp, Homo sapiens
agtgccgttcacaccaggcggaccac

SEQ ID NO: 63088 - DNA, 26 bp, Homo sapiens
gtgccgttcacaccaggcggaccacg

SEQ ID NO: 63089 - DNA, 26 bp, Homo sapiens
tgccgttcacaccaggcggaccacgc

SEQ ID NO: 63090 - DNA, 26 bp, Homo sapiens
gccgttcacaccaggcggaccacgct

SEQ ID NO: 63091 - DNA, 26 bp, Homo sapiens
ccgttcacaccaggcggaccacgctc

SEQ ID NO: 63092 - DNA, 26 bp, Homo sapiens
cgttcacaccaggcggaccacgctca

SEQ ID NO: 63093 - DNA, 26 bp, Homo sapiens
gttcacaccaggcggaccacgctcac

SEQ ID NO: 63094 - DNA, 26 bp, Homo sapiens
ttcacaccaggcggaccacgctcacc

SEQ ID NO: 63095 - DNA, 26 bp, Homo sapiens
tcacaccaggcggaccacgctcaccg

SEQ ID NO: 63096 - DNA, 26 bp, Homo sapiens
cacaccaggcggaccacgctcaccgg

SEQ ID NO: 63097 - DNA, 26 bp, Homo sapiens
acaccaggcggaccacgctcaccggg

SEQ ID NO: 63098 - DNA, 26 bp, Homo sapiens
caccaggcggaccacgctcaccgggt

SEQ ID NO: 63099 - DNA, 26 bp, Homo sapiens
accaggcggaccacgctcaccgggtc

SEQ ID NO: 63100 - DNA, 26 bp, Homo sapiens
ccaggcggaccacgctcaccgggtcc

SEQ ID NO: 63101 - DNA, 26 bp, Homo sapiens
caggcggaccacgctcaccgggtcca

SEQ ID NO: 63102 - DNA, 26 bp, Homo sapiens
aggcggaccacgctcaccgggtccac

SEQ ID NO: 63103 - DNA, 26 bp, Homo sapiens
ggcggaccacgctcaccgggtccacc

SEQ ID NO: 63104 - DNA, 26 bp, Homo sapiens
gcggaccacgctcaccgggtccaccc

SEQ ID NO: 63105 - DNA, 26 bp, Homo sapiens
cggaccacgctcaccgggtccaccct

SEQ ID NO: 63106 - DNA, 26 bp, Homo sapiens
ggaccacgctcaccgggtccaccctc

SEQ ID NO: 63107 - DNA, 26 bp, Homo sapiens
gaccacgctcaccgggtccaccctca

SEQ ID NO: 63108 - DNA, 26 bp, Homo sapiens
accacgctcaccgggtccaccctcat

SEQ ID NO: 63109 - DNA, 26 bp, Homo sapiens
ccacgctcaccgggtccaccctcatc

SEQ ID NO: 63110 - DNA, 26 bp, Homo sapiens
cacgctcaccgggtccaccctcatca

SEQ ID NO: 63111 - DNA, 26 bp, Homo sapiens
acgctcaccgggtccaccctcatcac

SEQ ID NO: 63112 - DNA, 26 bp, Homo sapiens
cgctcaccgggtccaccctcatcacc

SEQ ID NO: 63113 - DNA, 26 bp, Homo sapiens
gctcaccgggtccaccctcatcacca

SEQ ID NO: 63114 - DNA, 26 bp, Homo sapiens
ctcaccgggtccaccctcatcaccag

SEQ ID NO: 63115 - DNA, 26 bp, Homo sapiens
tcaccgggtccaccctcatcaccagg

SEQ ID NO: 63116 - DNA, 26 bp, Homo sapiens
caccgggtccaccctcatcaccagga

SEQ ID NO: 63117 - DNA, 26 bp, Homo sapiens
accgggtccaccctcatcaccaggat

SEQ ID NO: 63118 - DNA, 26 bp, Homo sapiens
ccgggtccaccctcatcaccaggata

SEQ ID NO: 63119 - DNA, 26 bp, Homo sapiens
cgggtccaccctcatcaccaggatag

SEQ ID NO: 63120 - DNA, 26 bp, Homo sapiens
gggtccaccctcatcaccaggatagc

SEQ ID NO: 63121 - DNA, 26 bp, Homo sapiens
ggtccaccctcatcaccaggatagcc

SEQ ID NO: 63122 - DNA, 26 bp, Homo sapiens
gtccaccctcatcaccaggatagcct

SEQ ID NO: 63123 - DNA, 26 bp, Homo sapiens
tccaccctcatcaccaggatagcctc

SEQ ID NO: 63124 - DNA, 26 bp, Homo sapiens
ccaccctcatcaccaggatagcctcg

SEQ ID NO: 63125 - DNA, 26 bp, Homo sapiens
caccctcatcaccaggatagcctcgg

SEQ ID NO: 63126 - DNA, 26 bp, Homo sapiens
accctcatcaccaggatagcctcggt

SEQ ID NO: 63127 - DNA, 26 bp, Homo sapiens
ccctcatcaccaggatagcctcggta

SEQ ID NO: 63128 - DNA, 26 bp, Homo sapiens
cctcatcaccaggatagcctcggtag

SEQ ID NO: 63129 - DNA, 26 bp, Homo sapiens
ctcatcaccaggatagcctcggtagc

SEQ ID NO: 63130 - DNA, 26 bp, Homo sapiens
tcatcaccaggatagcctcggtagcc

SEQ ID NO: 63131 - DNA, 26 bp, Homo sapiens
catcaccaggatagcctcggtagccg

SEQ ID NO: 63132 - DNA, 26 bp, Homo sapiens
atcaccaggatagcctcggtagccgt

SEQ ID NO: 63133 - DNA, 26 bp, Homo sapiens
tcaccaggatagcctcggtagccgtc

SEQ ID NO: 63134 - DNA, 26 bp, Homo sapiens
caccaggatagcctcggtagccgtct

SEQ ID NO: 63135 - DNA, 26 bp, Homo sapiens
accaggatagcctcggtagccgtctt

SEQ ID NO: 63136 - DNA, 26 bp, Homo sapiens
ccaggatagcctcggtagccgtcttc

SEQ ID NO: 63137 - DNA, 26 bp, Homo sapiens
caggatagcctcggtagccgtcttct

SEQ ID NO: 63138 - DNA, 26 bp, Homo sapiens
aggatagcctcggtagccgtcttctc

SEQ ID NO: 63139 - DNA, 26 bp, Homo sapiens
ggatagcctcggtagccgtcttctcc

SEQ ID NO: 63140 - DNA, 26 bp, Homo sapiens
gatagcctcggtagccgtcttctcca

SEQ ID NO: 63141 - DNA, 26 bp, Homo sapiens
atagcctcggtagccgtcttctccag

SEQ ID NO: 63142 - DNA, 26 bp, Homo sapiens
tagcctcggtagccgtcttctccagg

SEQ ID NO: 63143 - DNA, 26 bp, Homo sapiens
agcctcggtagccgtcttctccagga

SEQ ID NO: 63144 - DNA, 26 bp, Homo sapiens
gcctcggtagccgtcttctccaggaa

SEQ ID NO: 63145 - DNA, 26 bp, Homo sapiens
cctcggtagccgtcttctccaggaat

SEQ ID NO: 63146 - DNA, 26 bp, Homo sapiens
ctcggtagccgtcttctccaggaata

SEQ ID NO: 63147 - DNA, 26 bp, Homo sapiens
tcggtagccgtcttctccaggaatac

SEQ ID NO: 63148 - DNA, 26 bp, Homo sapiens
cggtagccgtcttctccaggaatacc

SEQ ID NO: 63149 - DNA, 26 bp, Homo sapiens
ggtagccgtcttctccaggaataccc

SEQ ID NO: 63150 - DNA, 26 bp, Homo sapiens
gtagccgtcttctccaggaataccct

SEQ ID NO: 63151 - DNA, 26 bp, Homo sapiens
tagccgtcttctccaggaataccctt

SEQ ID NO: 63152 - DNA, 26 bp, Homo sapiens
agccgtcttctccaggaatacccttt

SEQ ID NO: 63153 - DNA, 26 bp, Homo sapiens
gccgtcttctccaggaataccctttg

SEQ ID NO: 63154 - DNA, 26 bp, Homo sapiens
ccgtcttctccaggaataccctttgg

SEQ ID NO: 63155 - DNA, 26 bp, Homo sapiens
cgtcttctccaggaataccctttggc

SEQ ID NO: 63156 - DNA, 26 bp, Homo sapiens
gtcttctccaggaataccctttggcc

SEQ ID NO: 63157 - DNA, 26 bp, Homo sapiens
tcttctccaggaataccctttggccc

SEQ ID NO: 63158 - DNA, 26 bp, Homo sapiens
cttctccaggaataccctttggcccg

SEQ ID NO: 63159 - DNA, 26 bp, Homo sapiens
ttctccaggaataccctttggcccga

SEQ ID NO: 63160 - DNA, 26 bp, Homo sapiens
tctccaggaataccctttggcccgat

SEQ ID NO: 63161 - DNA, 26 bp, Homo sapiens
ctccaggaataccctttggcccgatg

SEQ ID NO: 63162 - DNA, 26 bp, Homo sapiens
tccaggaataccctttggcccgatgc

SEQ ID NO: 63163 - DNA, 26 bp, Homo sapiens
ccaggaataccctttggcccgatgct

SEQ ID NO: 63164 - DNA, 26 bp, Homo sapiens
caggaataccctttggcccgatgctg

SEQ ID NO: 63165 - DNA, 26 bp, Homo sapiens
aggaataccctttggcccgatgctgc

SEQ ID NO: 63166 - DNA, 26 bp, Homo sapiens
ggaataccctttggcccgatgctgcc

SEQ ID NO: 63167 - DNA, 26 bp, Homo sapiens
gaataccctttggcccgatgctgccg

SEQ ID NO: 63168 - DNA, 26 bp, Homo sapiens
aataccctttggcccgatgctgccga

SEQ ID NO: 63169 - DNA, 26 bp, Homo sapiens
ataccctttggcccgatgctgccgat

SEQ ID NO: 63170 - DNA, 26 bp, Homo sapiens
taccctttggcccgatgctgccgatg

SEQ ID NO: 63171 - DNA, 26 bp, Homo sapiens
accctttggcccgatgctgccgatgg

SEQ ID NO: 63172 - DNA, 26 bp, Homo sapiens
ccctttggcccgatgctgccgatggg

SEQ ID NO: 63173 - DNA, 26 bp, Homo sapiens
cctttggcccgatgctgccgatgggc

SEQ ID NO: 63174 - DNA, 26 bp, Homo sapiens
ctttggcccgatgctgccgatgggcc

SEQ ID NO: 63175 - DNA, 26 bp, Homo sapiens
tttggcccgatgctgccgatgggccc

SEQ ID NO: 63176 - DNA, 26 bp, Homo sapiens
ttggcccgatgctgccgatgggcccg

SEQ ID NO: 63177 - DNA, 26 bp, Homo sapiens
tggcccgatgctgccgatgggcccgc

SEQ ID NO: 63178 - DNA, 26 bp, Homo sapiens
ggcccgatgctgccgatgggcccgcg

SEQ ID NO: 63179 - DNA, 26 bp, Homo sapiens
gcccgatgctgccgatgggcccgcgg

SEQ ID NO: 63180 - DNA, 26 bp, Homo sapiens
cccgatgctgccgatgggcccgcggt

SEQ ID NO: 63181 - DNA, 26 bp, Homo sapiens
ccgatgctgccgatgggcccgcggtc

SEQ ID NO: 63182 - DNA, 26 bp, Homo sapiens
cgatgctgccgatgggcccgcggtct

SEQ ID NO: 63183 - DNA, 26 bp, Homo sapiens
gatgctgccgatgggcccgcggtctc

SEQ ID NO: 63184 - DNA, 26 bp, Homo sapiens
atgctgccgatgggcccgcggtctcc

SEQ ID NO: 63185 - DNA, 26 bp, Homo sapiens
tgctgccgatgggcccgcggtctccc

SEQ ID NO: 63186 - DNA, 26 bp, Homo sapiens
gctgccgatgggcccgcggtctcccc

SEQ ID NO: 63187 - DNA, 26 bp, Homo sapiens
ctgccgatgggcccgcggtctcccct

SEQ ID NO: 63188 - DNA, 26 bp, Homo sapiens
tgccgatgggcccgcggtctcccctc

SEQ ID NO: 63189 - DNA, 26 bp, Homo sapiens
gccgatgggcccgcggtctcccctct

SEQ ID NO: 63190 - DNA, 26 bp, Homo sapiens
ccgatgggcccgcggtctcccctctg

SEQ ID NO: 63191 - DNA, 26 bp, Homo sapiens
cgatgggcccgcggtctcccctctgc

SEQ ID NO: 63192 - DNA, 26 bp, Homo sapiens
gatgggcccgcggtctcccctctgcc

SEQ ID NO: 63193 - DNA, 26 bp, Homo sapiens
atgggcccgcggtctcccctctgccc

SEQ ID NO: 63194 - DNA, 26 bp, Homo sapiens
tgggcccgcggtctcccctctgccca

SEQ ID NO: 63195 - DNA, 26 bp, Homo sapiens
gggcccgcggtctcccctctgcccag

SEQ ID NO: 63196 - DNA, 26 bp, Homo sapiens
ggcccgcggtctcccctctgcccaga

SEQ ID NO: 63197 - DNA, 26 bp, Homo sapiens
gcccgcggtctcccctctgcccagag

SEQ ID NO: 63198 - DNA, 26 bp, Homo sapiens
cccgcggtctcccctctgcccagagc

SEQ ID NO: 63199 - DNA, 26 bp, Homo sapiens
ccgcggtctcccctctgcccagagca

SEQ ID NO: 63200 - DNA, 26 bp, Homo sapiens
cgcggtctcccctctgcccagagcac

SEQ ID NO: 63201 - DNA, 26 bp, Homo sapiens
gcggtctcccctctgcccagagcact

SEQ ID NO: 63202 - DNA, 26 bp, Homo sapiens
cggtctcccctctgcccagagcactt

SEQ ID NO: 63203 - DNA, 26 bp, Homo sapiens
ggtctcccctctgcccagagcacttg

SEQ ID NO: 63204 - DNA, 26 bp, Homo sapiens
gtctcccctctgcccagagcacttgc

SEQ ID NO: 63205 - DNA, 26 bp, Homo sapiens
tctcccctctgcccagagcacttgca

SEQ ID NO: 63206 - DNA, 26 bp, Homo sapiens
ctcccctctgcccagagcacttgcag

SEQ ID NO: 63207 - DNA, 26 bp, Homo sapiens
tcccctctgcccagagcacttgcagg

SEQ ID NO: 63208 - DNA, 26 bp, Homo sapiens
cccctctgcccagagcacttgcaggg

SEQ ID NO: 63209 - DNA, 26 bp, Homo sapiens
ccctctgcccagagcacttgcaggga

SEQ ID NO: 63210 - DNA, 26 bp, Homo sapiens
cctctgcccagagcacttgcagggaa

SEQ ID NO: 63211 - DNA, 26 bp, Homo sapiens
ctctgcccagagcacttgcagggaac

SEQ ID NO: 63212 - DNA, 26 bp, Homo sapiens
tctgcccagagcacttgcagggaacc

SEQ ID NO: 63213 - DNA, 26 bp, Homo sapiens
ctgcccagagcacttgcagggaaccc

SEQ ID NO: 63214 - DNA, 26 bp, Homo sapiens
tgcccagagcacttgcagggaacccc

SEQ ID NO: 63215 - DNA, 26 bp, Homo sapiens
gcccagagcacttgcagggaacccca

SEQ ID NO: 63216 - DNA, 26 bp, Homo sapiens
cccagagcacttgcagggaaccccac

SEQ ID NO: 63217 - DNA, 26 bp, Homo sapiens
ccagagcacttgcagggaaccccaca

SEQ ID NO: 63218 - DNA, 26 bp, Homo sapiens
cagagcacttgcagggaaccccacag

SEQ ID NO: 63219 - DNA, 26 bp, Homo sapiens
agagcacttgcagggaaccccacagc

SEQ ID NO: 63220 - DNA, 26 bp, Homo sapiens
gagcacttgcagggaaccccacagca

SEQ ID NO: 63221 - DNA, 26 bp, Homo sapiens
agcacttgcagggaaccccacagcaa

SEQ ID NO: 63222 - DNA, 26 bp, Homo sapiens
gcacttgcagggaaccccacagcaag

SEQ ID NO: 63223 - DNA, 26 bp, Homo sapiens
cacttgcagggaaccccacagcaagc

SEQ ID NO: 63224 - DNA, 26 bp, Homo sapiens
acttgcagggaaccccacagcaagct

SEQ ID NO: 63225 - DNA, 26 bp, Homo sapiens
cttgcagggaaccccacagcaagctt

SEQ ID NO: 63226 - DNA, 26 bp, Homo sapiens
ttgcagggaaccccacagcaagcttt

SEQ ID NO: 63227 - DNA, 26 bp, Homo sapiens
tgcagggaaccccacagcaagctttc

SEQ ID NO: 63228 - DNA, 26 bp, Homo sapiens
gcagggaaccccacagcaagctttct

SEQ ID NO: 63229 - DNA, 26 bp, Homo sapiens
cagggaaccccacagcaagctttctc

SEQ ID NO: 63230 - DNA, 26 bp, Homo sapiens
agggaaccccacagcaagctttctcg

SEQ ID NO: 63231 - DNA, 26 bp, Homo sapiens
gggaaccccacagcaagctttctcgg

SEQ ID NO: 63232 - DNA, 26 bp, Homo sapiens
ggaaccccacagcaagctttctcggc

SEQ ID NO: 63233 - DNA, 26 bp, Homo sapiens
gaaccccacagcaagctttctcggca

SEQ ID NO: 63234 - DNA, 26 bp, Homo sapiens
aaccccacagcaagctttctcggcaa

SEQ ID NO: 63235 - DNA, 26 bp, Homo sapiens
accccacagcaagctttctcggcaat

SEQ ID NO: 63236 - DNA, 26 bp, Homo sapiens
ccccacagcaagctttctcggcaatg

SEQ ID NO: 63237 - DNA, 26 bp, Homo sapiens
cccacagcaagctttctcggcaatgt

SEQ ID NO: 63238 - DNA, 26 bp, Homo sapiens
ccacagcaagctttctcggcaatgtt

SEQ ID NO: 63239 - DNA, 26 bp, Homo sapiens
cacagcaagctttctcggcaatgttg

SEQ ID NO: 63240 - DNA, 26 bp, Homo sapiens
acagcaagctttctcggcaatgttgt

SEQ ID NO: 63241 - DNA, 26 bp, Homo sapiens
cagcaagctttctcggcaatgttgtc

SEQ ID NO: 63242 - DNA, 26 bp, Homo sapiens
agcaagctttctcggcaatgttgtca

SEQ ID NO: 63243 - DNA, 26 bp, Homo sapiens
gcaagctttctcggcaatgttgtcaa

SEQ ID NO: 63244 - DNA, 26 bp, Homo sapiens
caagctttctcggcaatgttgtcaag

SEQ ID NO: 63245 - DNA, 26 bp, Homo sapiens
aagctttctcggcaatgttgtcaagc

SEQ ID NO: 63246 - DNA, 26 bp, Homo sapiens
agctttctcggcaatgttgtcaagct

SEQ ID NO: 63247 - DNA, 26 bp, Homo sapiens
gctttctcggcaatgttgtcaagctg

SEQ ID NO: 63248 - DNA, 26 bp, Homo sapiens
ctttctcggcaatgttgtcaagctgc

SEQ ID NO: 63249 - DNA, 26 bp, Homo sapiens
tttctcggcaatgttgtcaagctgct

SEQ ID NO: 63250 - DNA, 26 bp, Homo sapiens
ttctcggcaatgttgtcaagctgctc

SEQ ID NO: 63251 - DNA, 26 bp, Homo sapiens
tctcggcaatgttgtcaagctgctcc

SEQ ID NO: 63252 - DNA, 26 bp, Homo sapiens
ctcggcaatgttgtcaagctgctccg

SEQ ID NO: 63253 - DNA, 26 bp, Homo sapiens
tcggcaatgttgtcaagctgctccgc

SEQ ID NO: 63254 - DNA, 26 bp, Homo sapiens
cggcaatgttgtcaagctgctccgct

SEQ ID NO: 63255 - DNA, 26 bp, Homo sapiens
ggcaatgttgtcaagctgctccgcta

SEQ ID NO: 63256 - DNA, 26 bp, Homo sapiens
gcaatgttgtcaagctgctccgctag

SEQ ID NO: 63257 - DNA, 26 bp, Homo sapiens
caatgttgtcaagctgctccgctagt

SEQ ID NO: 63258 - DNA, 26 bp, Homo sapiens
aatgttgtcaagctgctccgctagtt

SEQ ID NO: 63259 - DNA, 26 bp, Homo sapiens
atgttgtcaagctgctccgctagttc

SEQ ID NO: 63260 - DNA, 26 bp, Homo sapiens
tgttgtcaagctgctccgctagttca

SEQ ID NO: 63261 - DNA, 26 bp, Homo sapiens
gttgtcaagctgctccgctagttcat

SEQ ID NO: 63262 - DNA, 26 bp, Homo sapiens
ttgtcaagctgctccgctagttcata

SEQ ID NO: 63263 - DNA, 26 bp, Homo sapiens
tgtcaagctgctccgctagttcataa

SEQ ID NO: 63264 - DNA, 26 bp, Homo sapiens
gtcaagctgctccgctagttcataat

SEQ ID NO: 63265 - DNA, 26 bp, Homo sapiens
tcaagctgctccgctagttcataatc

SEQ ID NO: 63266 - DNA, 26 bp, Homo sapiens
caagctgctccgctagttcataatcc

SEQ ID NO: 63267 - DNA, 26 bp, Homo sapiens
aagctgctccgctagttcataatcca

SEQ ID NO: 63268 - DNA, 26 bp, Homo sapiens
agctgctccgctagttcataatccaa

SEQ ID NO: 63269 - DNA, 26 bp, Homo sapiens
gctgctccgctagttcataatccaag

SEQ ID NO: 63270 - DNA, 26 bp, Homo sapiens
ctgctccgctagttcataatccaagt

SEQ ID NO: 63271 - DNA, 26 bp, Homo sapiens
tgctccgctagttcataatccaagtc

SEQ ID NO: 63272 - DNA, 26 bp, Homo sapiens
gctccgctagttcataatccaagtcc

SEQ ID NO: 63273 - DNA, 26 bp, Homo sapiens
ctccgctagttcataatccaagtcca

SEQ ID NO: 63274 - DNA, 26 bp, Homo sapiens
tccgctagttcataatccaagtccag

SEQ ID NO: 63275 - DNA, 26 bp, Homo sapiens
ccgctagttcataatccaagtccagc

SEQ ID NO: 63276 - DNA, 26 bp, Homo sapiens
cgctagttcataatccaagtccagca

SEQ ID NO: 63277 - DNA, 26 bp, Homo sapiens
gctagttcataatccaagtccagcaa

SEQ ID NO: 63278 - DNA, 26 bp, Homo sapiens
ctagttcataatccaagtccagcaag

SEQ ID NO: 63279 - DNA, 26 bp, Homo sapiens
tagttcataatccaagtccagcaagt

SEQ ID NO: 63280 - DNA, 26 bp, Homo sapiens
agttcataatccaagtccagcaagtt

SEQ ID NO: 63281 - DNA, 26 bp, Homo sapiens
gttcataatccaagtccagcaagtta

SEQ ID NO: 63282 - DNA, 26 bp, Homo sapiens
ttcataatccaagtccagcaagttaa

SEQ ID NO: 63283 - DNA, 26 bp, Homo sapiens
tcataatccaagtccagcaagttaag

SEQ ID NO: 63284 - DNA, 26 bp, Homo sapiens
cataatccaagtccagcaagttaagc

SEQ ID NO: 63285 - DNA, 26 bp, Homo sapiens
ataatccaagtccagcaagttaagcc

SEQ ID NO: 63286 - DNA, 26 bp, Homo sapiens
taatccaagtccagcaagttaagcct

SEQ ID NO: 63287 - DNA, 26 bp, Homo sapiens
aatccaagtccagcaagttaagcctc

SEQ ID NO: 63288 - DNA, 26 bp, Homo sapiens
atccaagtccagcaagttaagcctca

SEQ ID NO: 63289 - DNA, 26 bp, Homo sapiens
tccaagtccagcaagttaagcctcag

SEQ ID NO: 63290 - DNA, 26 bp, Homo sapiens
ccaagtccagcaagttaagcctcagg

SEQ ID NO: 63291 - DNA, 26 bp, Homo sapiens
caagtccagcaagttaagcctcaggg

SEQ ID NO: 63292 - DNA, 26 bp, Homo sapiens
aagtccagcaagttaagcctcagggg

SEQ ID NO: 63293 - DNA, 26 bp, Homo sapiens
agtccagcaagttaagcctcaggggc

SEQ ID NO: 63294 - DNA, 26 bp, Homo sapiens
gtccagcaagttaagcctcaggggcc

SEQ ID NO: 63295 - DNA, 26 bp, Homo sapiens
tccagcaagttaagcctcaggggcct

SEQ ID NO: 63296 - DNA, 26 bp, Homo sapiens
ccagcaagttaagcctcaggggcctg

SEQ ID NO: 63297 - DNA, 26 bp, Homo sapiens
cagcaagttaagcctcaggggcctgt

SEQ ID NO: 63298 - DNA, 26 bp, Homo sapiens
agcaagttaagcctcaggggcctgtc

SEQ ID NO: 63299 - DNA, 26 bp, Homo sapiens
gcaagttaagcctcaggggcctgtca

SEQ ID NO: 63300 - DNA, 26 bp, Homo sapiens
caagttaagcctcaggggcctgtcat

SEQ ID NO: 63301 - DNA, 26 bp, Homo sapiens
aagttaagcctcaggggcctgtcata

SEQ ID NO: 63302 - DNA, 26 bp, Homo sapiens
agttaagcctcaggggcctgtcatac

SEQ ID NO: 63303 - DNA, 26 bp, Homo sapiens
gttaagcctcaggggcctgtcataca

SEQ ID NO: 63304 - DNA, 26 bp, Homo sapiens
ttaagcctcaggggcctgtcatacat

SEQ ID NO: 63305 - DNA, 26 bp, Homo sapiens
taagcctcaggggcctgtcatacata

SEQ ID NO: 63306 - DNA, 26 bp, Homo sapiens
aagcctcaggggcctgtcatacataa

SEQ ID NO: 63307 - DNA, 26 bp, Homo sapiens
agcctcaggggcctgtcatacataaa

SEQ ID NO: 63308 - DNA, 26 bp, Homo sapiens
gcctcaggggcctgtcatacataaac

SEQ ID NO: 63309 - DNA, 26 bp, Homo sapiens
cctcaggggcctgtcatacataaacc

SEQ ID NO: 63310 - DNA, 26 bp, Homo sapiens
ctcaggggcctgtcatacataaaccc

SEQ ID NO: 63311 - DNA, 26 bp, Homo sapiens
tcaggggcctgtcatacataaaccct

SEQ ID NO: 63312 - DNA, 26 bp, Homo sapiens
caggggcctgtcatacataaaccctc

SEQ ID NO: 63313 - DNA, 26 bp, Homo sapiens
aggggcctgtcatacataaaccctcg

SEQ ID NO: 63314 - DNA, 26 bp, Homo sapiens
ggggcctgtcatacataaaccctcgc

SEQ ID NO: 63315 - DNA, 26 bp, Homo sapiens
gggcctgtcatacataaaccctcgcc

SEQ ID NO: 63316 - DNA, 26 bp, Homo sapiens
ggcctgtcatacataaaccctcgccc

SEQ ID NO: 63317 - DNA, 26 bp, Homo sapiens
gcctgtcatacataaaccctcgccca

SEQ ID NO: 63318 - DNA, 26 bp, Homo sapiens
cctgtcatacataaaccctcgcccaa

SEQ ID NO: 63319 - DNA, 26 bp, Homo sapiens
ctgtcatacataaaccctcgcccaaa

SEQ ID NO: 63320 - DNA, 26 bp, Homo sapiens
tgtcatacataaaccctcgcccaaac

SEQ ID NO: 63321 - DNA, 26 bp, Homo sapiens
gtcatacataaaccctcgcccaaact

SEQ ID NO: 63322 - DNA, 26 bp, Homo sapiens
tcatacataaaccctcgcccaaactc

SEQ ID NO: 63323 - DNA, 26 bp, Homo sapiens
catacataaaccctcgcccaaactcc

SEQ ID NO: 63324 - DNA, 26 bp, Homo sapiens
atacataaaccctcgcccaaactcca

SEQ ID NO: 63325 - DNA, 26 bp, Homo sapiens
tacataaaccctcgcccaaactccag

SEQ ID NO: 63326 - DNA, 26 bp, Homo sapiens
acataaaccctcgcccaaactccaga

SEQ ID NO: 63327 - DNA, 26 bp, Homo sapiens
cataaaccctcgcccaaactccagat

SEQ ID NO: 63328 - DNA, 26 bp, Homo sapiens
ataaaccctcgcccaaactccagatg

SEQ ID NO: 63329 - DNA, 26 bp, Homo sapiens
taaaccctcgcccaaactccagatgc

SEQ ID NO: 63330 - DNA, 26 bp, Homo sapiens
aaaccctcgcccaaactccagatgca

SEQ ID NO: 63331 - DNA, 26 bp, Homo sapiens
aaccctcgcccaaactccagatgcat

SEQ ID NO: 63332 - DNA, 26 bp, Homo sapiens
accctcgcccaaactccagatgcatt

SEQ ID NO: 63333 - DNA, 26 bp, Homo sapiens
ccctcgcccaaactccagatgcatta

SEQ ID NO: 63334 - DNA, 26 bp, Homo sapiens
cctcgcccaaactccagatgcattag

SEQ ID NO: 63335 - DNA, 26 bp, Homo sapiens
ctcgcccaaactccagatgcattagc

SEQ ID NO: 63336 - DNA, 26 bp, Homo sapiens
tcgcccaaactccagatgcattagcc

SEQ ID NO: 63337 - DNA, 26 bp, Homo sapiens
cgcccaaactccagatgcattagccg

SEQ ID NO: 63338 - DNA, 26 bp, Homo sapiens
gcccaaactccagatgcattagccgc

SEQ ID NO: 63339 - DNA, 26 bp, Homo sapiens
cccaaactccagatgcattagccgct

SEQ ID NO: 63340 - DNA, 26 bp, Homo sapiens
ccaaactccagatgcattagccgctc

SEQ ID NO: 63341 - DNA, 26 bp, Homo sapiens
caaactccagatgcattagccgctcc

SEQ ID NO: 63342 - DNA, 26 bp, Homo sapiens
aaactccagatgcattagccgctcca

SEQ ID NO: 63343 - DNA, 26 bp, Homo sapiens
aactccagatgcattagccgctccaa

SEQ ID NO: 63344 - DNA, 26 bp, Homo sapiens
actccagatgcattagccgctccaag

SEQ ID NO: 63345 - DNA, 26 bp, Homo sapiens
ctccagatgcattagccgctccaagt

SEQ ID NO: 63346 - DNA, 26 bp, Homo sapiens
tccagatgcattagccgctccaagtt

SEQ ID NO: 63347 - DNA, 26 bp, Homo sapiens
ccagatgcattagccgctccaagttg

SEQ ID NO: 63348 - DNA, 26 bp, Homo sapiens
cagatgcattagccgctccaagttga

SEQ ID NO: 63349 - DNA, 26 bp, Homo sapiens
agatgcattagccgctccaagttgac

SEQ ID NO: 63350 - DNA, 26 bp, Homo sapiens
gatgcattagccgctccaagttgacc

SEQ ID NO: 63351 - DNA, 26 bp, Homo sapiens
atgcattagccgctccaagttgacca

SEQ ID NO: 63352 - DNA, 26 bp, Homo sapiens
tgcattagccgctccaagttgaccac

SEQ ID NO: 63353 - DNA, 26 bp, Homo sapiens
gcattagccgctccaagttgaccact

SEQ ID NO: 63354 - DNA, 26 bp, Homo sapiens
cattagccgctccaagttgaccactc

SEQ ID NO: 63355 - DNA, 26 bp, Homo sapiens
attagccgctccaagttgaccactcg

SEQ ID NO: 63356 - DNA, 26 bp, Homo sapiens
ttagccgctccaagttgaccactcgt

SEQ ID NO: 63357 - DNA, 26 bp, Homo sapiens
tagccgctccaagttgaccactcgtt

SEQ ID NO: 63358 - DNA, 26 bp, Homo sapiens
agccgctccaagttgaccactcgttc

SEQ ID NO: 63359 - DNA, 26 bp, Homo sapiens
gccgctccaagttgaccactcgttca

SEQ ID NO: 63360 - DNA, 26 bp, Homo sapiens
ccgctccaagttgaccactcgttcaa

SEQ ID NO: 63361 - DNA, 26 bp, Homo sapiens
cgctccaagttgaccactcgttcaag

SEQ ID NO: 63362 - DNA, 26 bp, Homo sapiens
gctccaagttgaccactcgttcaagg

SEQ ID NO: 63363 - DNA, 26 bp, Homo sapiens
ctccaagttgaccactcgttcaaggc

SEQ ID NO: 63364 - DNA, 26 bp, Homo sapiens
tccaagttgaccactcgttcaaggcc

SEQ ID NO: 63365 - DNA, 26 bp, Homo sapiens
ccaagttgaccactcgttcaaggccc

SEQ ID NO: 63366 - DNA, 26 bp, Homo sapiens
caagttgaccactcgttcaaggccca

SEQ ID NO: 63367 - DNA, 26 bp, Homo sapiens
aagttgaccactcgttcaaggcccac

SEQ ID NO: 63368 - DNA, 26 bp, Homo sapiens
agttgaccactcgttcaaggcccacc

SEQ ID NO: 63369 - DNA, 26 bp, Homo sapiens
gttgaccactcgttcaaggcccacca

SEQ ID NO: 63370 - DNA, 26 bp, Homo sapiens
ttgaccactcgttcaaggcccaccag

SEQ ID NO: 63371 - DNA, 26 bp, Homo sapiens
tgaccactcgttcaaggcccaccagg

SEQ ID NO: 63372 - DNA, 26 bp, Homo sapiens
gaccactcgttcaaggcccaccagga

SEQ ID NO: 63373 - DNA, 26 bp, Homo sapiens
accactcgttcaaggcccaccaggat

SEQ ID NO: 63374 - DNA, 26 bp, Homo sapiens
ccactcgttcaaggcccaccaggatc

SEQ ID NO: 63375 - DNA, 26 bp, Homo sapiens
cactcgttcaaggcccaccaggatca

SEQ ID NO: 63376 - DNA, 26 bp, Homo sapiens
actcgttcaaggcccaccaggatcaa

SEQ ID NO: 63377 - DNA, 26 bp, Homo sapiens
ctcgttcaaggcccaccaggatcaag

SEQ ID NO: 63378 - DNA, 26 bp, Homo sapiens
tcgttcaaggcccaccaggatcaagg

SEQ ID NO: 63379 - DNA, 26 bp, Homo sapiens
cgttcaaggcccaccaggatcaaggc

SEQ ID NO: 63380 - DNA, 26 bp, Homo sapiens
gttcaaggcccaccaggatcaaggca

SEQ ID NO: 63381 - DNA, 26 bp, Homo sapiens
ttcaaggcccaccaggatcaaggcac

SEQ ID NO: 63382 - DNA, 26 bp, Homo sapiens
tcaaggcccaccaggatcaaggcacg

SEQ ID NO: 63383 - DNA, 26 bp, Homo sapiens
caaggcccaccaggatcaaggcacgg

SEQ ID NO: 63384 - DNA, 26 bp, Homo sapiens
aaggcccaccaggatcaaggcacgga

SEQ ID NO: 63385 - DNA, 26 bp, Homo sapiens
aggcccaccaggatcaaggcacggac

SEQ ID NO: 63386 - DNA, 26 bp, Homo sapiens
ggcccaccaggatcaaggcacggact

SEQ ID NO: 63387 - DNA, 26 bp, Homo sapiens
gcccaccaggatcaaggcacggactc

SEQ ID NO: 63388 - DNA, 26 bp, Homo sapiens
cccaccaggatcaaggcacggactcc

SEQ ID NO: 63389 - DNA, 26 bp, Homo sapiens
ccaccaggatcaaggcacggactcct

SEQ ID NO: 63390 - DNA, 26 bp, Homo sapiens
caccaggatcaaggcacggactcctt

SEQ ID NO: 63391 - DNA, 26 bp, Homo sapiens
accaggatcaaggcacggactccttc

SEQ ID NO: 63392 - DNA, 26 bp, Homo sapiens
ccaggatcaaggcacggactccttct

SEQ ID NO: 63393 - DNA, 26 bp, Homo sapiens
caggatcaaggcacggactccttctt

SEQ ID NO: 63394 - DNA, 26 bp, Homo sapiens
aggatcaaggcacggactccttcttg

SEQ ID NO: 63395 - DNA, 26 bp, Homo sapiens
ggatcaaggcacggactccttcttgg

SEQ ID NO: 63396 - DNA, 26 bp, Homo sapiens
gatcaaggcacggactccttcttggc

SEQ ID NO: 63397 - DNA, 26 bp, Homo sapiens
atcaaggcacggactccttcttggcg

SEQ ID NO: 63398 - DNA, 26 bp, Homo sapiens
tcaaggcacggactccttcttggcgg

SEQ ID NO: 63399 - DNA, 26 bp, Homo sapiens
caaggcacggactccttcttggcgga

SEQ ID NO: 63400 - DNA, 26 bp, Homo sapiens
aaggcacggactccttcttggcggag

SEQ ID NO: 63401 - DNA, 26 bp, Homo sapiens
aggcacggactccttcttggcggagg

SEQ ID NO: 63402 - DNA, 26 bp, Homo sapiens
ggcacggactccttcttggcggaggt

SEQ ID NO: 63403 - DNA, 26 bp, Homo sapiens
gcacggactccttcttggcggaggtt

SEQ ID NO: 63404 - DNA, 26 bp, Homo sapiens
cacggactccttcttggcggaggttc

SEQ ID NO: 63405 - DNA, 26 bp, Homo sapiens
acggactccttcttggcggaggttct

SEQ ID NO: 63406 - DNA, 26 bp, Homo sapiens
cggactccttcttggcggaggttctc

SEQ ID NO: 63407 - DNA, 26 bp, Homo sapiens
ggactccttcttggcggaggttctca

SEQ ID NO: 63408 - DNA, 26 bp, Homo sapiens
gactccttcttggcggaggttctcag

SEQ ID NO: 63409 - DNA, 26 bp, Homo sapiens
actccttcttggcggaggttctcaga

SEQ ID NO: 63410 - DNA, 26 bp, Homo sapiens
ctccttcttggcggaggttctcagat

SEQ ID NO: 63411 - DNA, 26 bp, Homo sapiens
tccttcttggcggaggttctcagatg

SEQ ID NO: 63412 - DNA, 26 bp, Homo sapiens
ccttcttggcggaggttctcagatgc

SEQ ID NO: 63413 - DNA, 26 bp, Homo sapiens
cttcttggcggaggttctcagatgct

SEQ ID NO: 63414 - DNA, 26 bp, Homo sapiens
ttcttggcggaggttctcagatgctc

SEQ ID NO: 63415 - DNA, 26 bp, Homo sapiens
tcttggcggaggttctcagatgctct

SEQ ID NO: 63416 - DNA, 26 bp, Homo sapiens
cttggcggaggttctcagatgctctg

SEQ ID NO: 63417 - DNA, 26 bp, Homo sapiens
ttggcggaggttctcagatgctctgt

SEQ ID NO: 63418 - DNA, 26 bp, Homo sapiens
tggcggaggttctcagatgctctgtg

SEQ ID NO: 63419 - DNA, 26 bp, Homo sapiens
ggcggaggttctcagatgctctgtgt

SEQ ID NO: 63420 - DNA, 26 bp, Homo sapiens
gcggaggttctcagatgctctgtgta

SEQ ID NO: 63421 - DNA, 26 bp, Homo sapiens
cggaggttctcagatgctctgtgtaa

SEQ ID NO: 63422 - DNA, 26 bp, Homo sapiens
ggaggttctcagatgctctgtgtaaa

SEQ ID NO: 63423 - DNA, 26 bp, Homo sapiens
gaggttctcagatgctctgtgtaaat

SEQ ID NO: 63424 - DNA, 26 bp, Homo sapiens
aggttctcagatgctctgtgtaaatc

SEQ ID NO: 63425 - DNA, 26 bp, Homo sapiens
ggttctcagatgctctgtgtaaatca

SEQ ID NO: 63426 - DNA, 26 bp, Homo sapiens
gttctcagatgctctgtgtaaatcag

SEQ ID NO: 63427 - DNA, 26 bp, Homo sapiens
ttctcagatgctctgtgtaaatcagc

SEQ ID NO: 63428 - DNA, 26 bp, Homo sapiens
tctcagatgctctgtgtaaatcagcc

SEQ ID NO: 63429 - DNA, 26 bp, Homo sapiens
ctcagatgctctgtgtaaatcagcca

SEQ ID NO: 63430 - DNA, 26 bp, Homo sapiens
tcagatgctctgtgtaaatcagccag

SEQ ID NO: 63431 - DNA, 26 bp, Homo sapiens
cagatgctctgtgtaaatcagccaga

SEQ ID NO: 63432 - DNA, 26 bp, Homo sapiens
agatgctctgtgtaaatcagccagat

SEQ ID NO: 63433 - DNA, 26 bp, Homo sapiens
gatgctctgtgtaaatcagccagatc

SEQ ID NO: 63434 - DNA, 26 bp, Homo sapiens
atgctctgtgtaaatcagccagatct

SEQ ID NO: 63435 - DNA, 26 bp, Homo sapiens
tgctctgtgtaaatcagccagatctc

SEQ ID NO: 63436 - DNA, 26 bp, Homo sapiens
gctctgtgtaaatcagccagatctcc

SEQ ID NO: 63437 - DNA, 26 bp, Homo sapiens
ctctgtgtaaatcagccagatctccg

SEQ ID NO: 63438 - DNA, 26 bp, Homo sapiens
tctgtgtaaatcagccagatctccgt

SEQ ID NO: 63439 - DNA, 26 bp, Homo sapiens
ctgtgtaaatcagccagatctccgtc

SEQ ID NO: 63440 - DNA, 26 bp, Homo sapiens
tgtgtaaatcagccagatctccgtct

SEQ ID NO: 63441 - DNA, 26 bp, Homo sapiens
gtgtaaatcagccagatctccgtctg

SEQ ID NO: 63442 - DNA, 26 bp, Homo sapiens
tgtaaatcagccagatctccgtctgc

SEQ ID NO: 63443 - DNA, 26 bp, Homo sapiens
gtaaatcagccagatctccgtctgct

SEQ ID NO: 63444 - DNA, 26 bp, Homo sapiens
taaatcagccagatctccgtctgctc

SEQ ID NO: 63445 - DNA, 26 bp, Homo sapiens
aaatcagccagatctccgtctgctcc

SEQ ID NO: 63446 - DNA, 26 bp, Homo sapiens
aatcagccagatctccgtctgctcca

SEQ ID NO: 63447 - DNA, 26 bp, Homo sapiens
atcagccagatctccgtctgctccat

SEQ ID NO: 63448 - DNA, 26 bp, Homo sapiens
tcagccagatctccgtctgctccatc

SEQ ID NO: 63449 - DNA, 26 bp, Homo sapiens
cagccagatctccgtctgctccatca

SEQ ID NO: 63450 - DNA, 26 bp, Homo sapiens
agccagatctccgtctgctccatcag

SEQ ID NO: 63451 - DNA, 26 bp, Homo sapiens
gccagatctccgtctgctccatcagt

SEQ ID NO: 63452 - DNA, 26 bp, Homo sapiens
ccagatctccgtctgctccatcagta

SEQ ID NO: 63453 - DNA, 26 bp, Homo sapiens
cagatctccgtctgctccatcagtaa

SEQ ID NO: 63454 - DNA, 26 bp, Homo sapiens
agatctccgtctgctccatcagtaaa

SEQ ID NO: 63455 - DNA, 26 bp, Homo sapiens
gatctccgtctgctccatcagtaaaa

SEQ ID NO: 63456 - DNA, 26 bp, Homo sapiens
atctccgtctgctccatcagtaaaat

SEQ ID NO: 63457 - DNA, 26 bp, Homo sapiens
tctccgtctgctccatcagtaaaatg

SEQ ID NO: 63458 - DNA, 26 bp, Homo sapiens
ctccgtctgctccatcagtaaaatga

SEQ ID NO: 63459 - DNA, 26 bp, Homo sapiens
tccgtctgctccatcagtaaaatgaa

SEQ ID NO: 63460 - DNA, 26 bp, Homo sapiens
ccgtctgctccatcagtaaaatgaat

SEQ ID NO: 63461 - DNA, 26 bp, Homo sapiens
cgtctgctccatcagtaaaatgaatg

SEQ ID NO: 63462 - DNA, 26 bp, Homo sapiens
gtctgctccatcagtaaaatgaatga

SEQ ID NO: 63463 - DNA, 26 bp, Homo sapiens
tctgctccatcagtaaaatgaatgac

SEQ ID NO: 63464 - DNA, 26 bp, Homo sapiens
ctgctccatcagtaaaatgaatgacc

SEQ ID NO: 63465 - DNA, 26 bp, Homo sapiens
tgctccatcagtaaaatgaatgacca

SEQ ID NO: 63466 - DNA, 26 bp, Homo sapiens
gctccatcagtaaaatgaatgaccac

SEQ ID NO: 63467 - DNA, 26 bp, Homo sapiens
ctccatcagtaaaatgaatgaccacc

SEQ ID NO: 63468 - DNA, 26 bp, Homo sapiens
tccatcagtaaaatgaatgaccacct

SEQ ID NO: 63469 - DNA, 26 bp, Homo sapiens
ccatcagtaaaatgaatgaccacctt

SEQ ID NO: 63470 - DNA, 26 bp, Homo sapiens
catcagtaaaatgaatgaccaccttc

SEQ ID NO: 63471 - DNA, 26 bp, Homo sapiens
atcagtaaaatgaatgaccaccttca

SEQ ID NO: 63472 - DNA, 26 bp, Homo sapiens
tcagtaaaatgaatgaccaccttcac

SEQ ID NO: 63473 - DNA, 26 bp, Homo sapiens
cagtaaaatgaatgaccaccttcacg

SEQ ID NO: 63474 - DNA, 26 bp, Homo sapiens
agtaaaatgaatgaccaccttcacgc

SEQ ID NO: 63475 - DNA, 26 bp, Homo sapiens
gtaaaatgaatgaccaccttcacgct

SEQ ID NO: 63476 - DNA, 26 bp, Homo sapiens
taaaatgaatgaccaccttcacgctg

SEQ ID NO: 63477 - DNA, 26 bp, Homo sapiens
aaaatgaatgaccaccttcacgctgt

SEQ ID NO: 63478 - DNA, 26 bp, Homo sapiens
aaatgaatgaccaccttcacgctgtc

SEQ ID NO: 63479 - DNA, 26 bp, Homo sapiens
aatgaatgaccaccttcacgctgtcc

SEQ ID NO: 63480 - DNA, 26 bp, Homo sapiens
atgaatgaccaccttcacgctgtccg

SEQ ID NO: 63481 - DNA, 26 bp, Homo sapiens
tgaatgaccaccttcacgctgtccgg

SEQ ID NO: 63482 - DNA, 26 bp, Homo sapiens
gaatgaccaccttcacgctgtccggc

SEQ ID NO: 63483 - DNA, 26 bp, Homo sapiens
aatgaccaccttcacgctgtccggcg

SEQ ID NO: 63484 - DNA, 26 bp, Homo sapiens
atgaccaccttcacgctgtccggcga

SEQ ID NO: 63485 - DNA, 26 bp, Homo sapiens
tgaccaccttcacgctgtccggcgag

SEQ ID NO: 63486 - DNA, 26 bp, Homo sapiens
gaccaccttcacgctgtccggcgagg

SEQ ID NO: 63487 - DNA, 26 bp, Homo sapiens
accaccttcacgctgtccggcgagga

SEQ ID NO: 63488 - DNA, 26 bp, Homo sapiens
ccaccttcacgctgtccggcgaggac

SEQ ID NO: 63489 - DNA, 26 bp, Homo sapiens
caccttcacgctgtccggcgaggact

SEQ ID NO: 63490 - DNA, 26 bp, Homo sapiens
accttcacgctgtccggcgaggactg

SEQ ID NO: 63491 - DNA, 26 bp, Homo sapiens
ccttcacgctgtccggcgaggactgt

SEQ ID NO: 63492 - DNA, 26 bp, Homo sapiens
cttcacgctgtccggcgaggactgtc

SEQ ID NO: 63493 - DNA, 26 bp, Homo sapiens
ttcacgctgtccggcgaggactgtct

SEQ ID NO: 63494 - DNA, 26 bp, Homo sapiens
tcacgctgtccggcgaggactgtctg

SEQ ID NO: 63495 - DNA, 26 bp, Homo sapiens
cacgctgtccggcgaggactgtctga

SEQ ID NO: 63496 - DNA, 26 bp, Homo sapiens
acgctgtccggcgaggactgtctgaa

SEQ ID NO: 63497 - DNA, 26 bp, Homo sapiens
cgctgtccggcgaggactgtctgaac

SEQ ID NO: 63498 - DNA, 26 bp, Homo sapiens
gctgtccggcgaggactgtctgaact

SEQ ID NO: 63499 - DNA, 26 bp, Homo sapiens
ctgtccggcgaggactgtctgaactt

SEQ ID NO: 63500 - DNA, 26 bp, Homo sapiens
tgtccggcgaggactgtctgaacttg

SEQ ID NO: 63501 - DNA, 26 bp, Homo sapiens
gtccggcgaggactgtctgaacttgt

SEQ ID NO: 63502 - DNA, 26 bp, Homo sapiens
tccggcgaggactgtctgaacttgtt

SEQ ID NO: 63503 - DNA, 26 bp, Homo sapiens
ccggcgaggactgtctgaacttgttc

SEQ ID NO: 63504 - DNA, 26 bp, Homo sapiens
cggcgaggactgtctgaacttgttca

SEQ ID NO: 63505 - DNA, 26 bp, Homo sapiens
ggcgaggactgtctgaacttgttcag

SEQ ID NO: 63506 - DNA, 26 bp, Homo sapiens
gcgaggactgtctgaacttgttcagg

SEQ ID NO: 63507 - DNA, 26 bp, Homo sapiens
cgaggactgtctgaacttgttcaggt

SEQ ID NO: 63508 - DNA, 26 bp, Homo sapiens
gaggactgtctgaacttgttcaggta

SEQ ID NO: 63509 - DNA, 26 bp, Homo sapiens
aggactgtctgaacttgttcaggtag

SEQ ID NO: 63510 - DNA, 26 bp, Homo sapiens
ggactgtctgaacttgttcaggtaga

SEQ ID NO: 63511 - DNA, 26 bp, Homo sapiens
gactgtctgaacttgttcaggtagac

SEQ ID NO: 63512 - DNA, 26 bp, Homo sapiens
actgtctgaacttgttcaggtagacc

SEQ ID NO: 63513 - DNA, 26 bp, Homo sapiens
ctgtctgaacttgttcaggtagacct

SEQ ID NO: 63514 - DNA, 26 bp, Homo sapiens
tgtctgaacttgttcaggtagacctt

SEQ ID NO: 63515 - DNA, 26 bp, Homo sapiens
gtctgaacttgttcaggtagaccttc

SEQ ID NO: 63516 - DNA, 26 bp, Homo sapiens
tctgaacttgttcaggtagaccttca

SEQ ID NO: 63517 - DNA, 26 bp, Homo sapiens
ctgaacttgttcaggtagaccttcag

SEQ ID NO: 63518 - DNA, 26 bp, Homo sapiens
tgaacttgttcaggtagaccttcagg

SEQ ID NO: 63519 - DNA, 26 bp, Homo sapiens
gaacttgttcaggtagaccttcaggg

SEQ ID NO: 63520 - DNA, 26 bp, Homo sapiens
aacttgttcaggtagaccttcagggt

SEQ ID NO: 63521 - DNA, 26 bp, Homo sapiens
acttgttcaggtagaccttcagggtg

SEQ ID NO: 63522 - DNA, 26 bp, Homo sapiens
cttgttcaggtagaccttcagggtgt

SEQ ID NO: 63523 - DNA, 26 bp, Homo sapiens
ttgttcaggtagaccttcagggtgtc

SEQ ID NO: 63524 - DNA, 26 bp, Homo sapiens
tgttcaggtagaccttcagggtgtcc

SEQ ID NO: 63525 - DNA, 26 bp, Homo sapiens
gttcaggtagaccttcagggtgtcct

SEQ ID NO: 63526 - DNA, 26 bp, Homo sapiens
ttcaggtagaccttcagggtgtcctc

SEQ ID NO: 63527 - DNA, 26 bp, Homo sapiens
tcaggtagaccttcagggtgtcctcc

SEQ ID NO: 63528 - DNA, 26 bp, Homo sapiens
caggtagaccttcagggtgtcctccg

SEQ ID NO: 63529 - DNA, 26 bp, Homo sapiens
aggtagaccttcagggtgtcctccgt

SEQ ID NO: 63530 - DNA, 26 bp, Homo sapiens
ggtagaccttcagggtgtcctccgtg

SEQ ID NO: 63531 - DNA, 26 bp, Homo sapiens
gtagaccttcagggtgtcctccgtga

SEQ ID NO: 63532 - DNA, 26 bp, Homo sapiens
tagaccttcagggtgtcctccgtgag

SEQ ID NO: 63533 - DNA, 26 bp, Homo sapiens
agaccttcagggtgtcctccgtgagg

SEQ ID NO: 63534 - DNA, 26 bp, Homo sapiens
gaccttcagggtgtcctccgtgagga

SEQ ID NO: 63535 - DNA, 26 bp, Homo sapiens
accttcagggtgtcctccgtgaggac

SEQ ID NO: 63536 - DNA, 26 bp, Homo sapiens
ccttcagggtgtcctccgtgaggacg

SEQ ID NO: 63537 - DNA, 26 bp, Homo sapiens
cttcagggtgtcctccgtgaggacgt

SEQ ID NO: 63538 - DNA, 26 bp, Homo sapiens
ttcagggtgtcctccgtgaggacgta

SEQ ID NO: 63539 - DNA, 26 bp, Homo sapiens
tcagggtgtcctccgtgaggacgtag

SEQ ID NO: 63540 - DNA, 26 bp, Homo sapiens
cagggtgtcctccgtgaggacgtagg

SEQ ID NO: 63541 - DNA, 26 bp, Homo sapiens
agggtgtcctccgtgaggacgtaggg

SEQ ID NO: 63542 - DNA, 26 bp, Homo sapiens
gggtgtcctccgtgaggacgtagggg

SEQ ID NO: 63543 - DNA, 26 bp, Homo sapiens
ggtgtcctccgtgaggacgtaggggt

SEQ ID NO: 63544 - DNA, 26 bp, Homo sapiens
gtgtcctccgtgaggacgtaggggtg

SEQ ID NO: 63545 - DNA, 26 bp, Homo sapiens
tgtcctccgtgaggacgtaggggtgc

SEQ ID NO: 63546 - DNA, 26 bp, Homo sapiens
gtcctccgtgaggacgtaggggtgct

SEQ ID NO: 63547 - DNA, 26 bp, Homo sapiens
tcctccgtgaggacgtaggggtgctg

SEQ ID NO: 63548 - DNA, 26 bp, Homo sapiens
cctccgtgaggacgtaggggtgctgg

SEQ ID NO: 63549 - DNA, 26 bp, Homo sapiens
ctccgtgaggacgtaggggtgctggc

SEQ ID NO: 63550 - DNA, 26 bp, Homo sapiens
tccgtgaggacgtaggggtgctggct

SEQ ID NO: 63551 - DNA, 26 bp, Homo sapiens
ccgtgaggacgtaggggtgctggctg

SEQ ID NO: 63552 - DNA, 26 bp, Homo sapiens
cgtgaggacgtaggggtgctggctgc

SEQ ID NO: 63553 - DNA, 26 bp, Homo sapiens
gtgaggacgtaggggtgctggctgcg

SEQ ID NO: 63554 - DNA, 26 bp, Homo sapiens
tgaggacgtaggggtgctggctgcgc

SEQ ID NO: 63555 - DNA, 26 bp, Homo sapiens
gaggacgtaggggtgctggctgcgca

SEQ ID NO: 63556 - DNA, 26 bp, Homo sapiens
aggacgtaggggtgctggctgcgcat

SEQ ID NO: 63557 - DNA, 26 bp, Homo sapiens
ggacgtaggggtgctggctgcgcatg

SEQ ID NO: 63558 - DNA, 26 bp, Homo sapiens
gacgtaggggtgctggctgcgcatgt

SEQ ID NO: 63559 - DNA, 26 bp, Homo sapiens
acgtaggggtgctggctgcgcatgtt

SEQ ID NO: 63560 - DNA, 26 bp, Homo sapiens
cgtaggggtgctggctgcgcatgttc

SEQ ID NO: 63561 - DNA, 26 bp, Homo sapiens
gtaggggtgctggctgcgcatgttcc

SEQ ID NO: 63562 - DNA, 26 bp, Homo sapiens
taggggtgctggctgcgcatgttccg

SEQ ID NO: 63563 - DNA, 26 bp, Homo sapiens
aggggtgctggctgcgcatgttccgg

SEQ ID NO: 63564 - DNA, 26 bp, Homo sapiens
ggggtgctggctgcgcatgttccgga

SEQ ID NO: 63565 - DNA, 26 bp, Homo sapiens
gggtgctggctgcgcatgttccggaa

SEQ ID NO: 63566 - DNA, 26 bp, Homo sapiens
ggtgctggctgcgcatgttccggaac

SEQ ID NO: 63567 - DNA, 26 bp, Homo sapiens
gtgctggctgcgcatgttccggaact

SEQ ID NO: 63568 - DNA, 26 bp, Homo sapiens
tgctggctgcgcatgttccggaactt

SEQ ID NO: 63569 - DNA, 26 bp, Homo sapiens
gctggctgcgcatgttccggaacttc

SEQ ID NO: 63570 - DNA, 26 bp, Homo sapiens
ctggctgcgcatgttccggaacttct

SEQ ID NO: 63571 - DNA, 26 bp, Homo sapiens
tggctgcgcatgttccggaacttctc

SEQ ID NO: 63572 - DNA, 26 bp, Homo sapiens
ggctgcgcatgttccggaacttctcg

SEQ ID NO: 63573 - DNA, 26 bp, Homo sapiens
gctgcgcatgttccggaacttctcga

SEQ ID NO: 63574 - DNA, 26 bp, Homo sapiens
ctgcgcatgttccggaacttctcgag

SEQ ID NO: 63575 - DNA, 26 bp, Homo sapiens
tgcgcatgttccggaacttctcgagc

SEQ ID NO: 63576 - DNA, 26 bp, Homo sapiens
gcgcatgttccggaacttctcgagca

SEQ ID NO: 63577 - DNA, 26 bp, Homo sapiens
cgcatgttccggaacttctcgagcat

SEQ ID NO: 63578 - DNA, 26 bp, Homo sapiens
gcatgttccggaacttctcgagcatc

SEQ ID NO: 63579 - DNA, 26 bp, Homo sapiens
catgttccggaacttctcgagcatct

SEQ ID NO: 63580 - DNA, 26 bp, Homo sapiens
atgttccggaacttctcgagcatctc

SEQ ID NO: 63581 - DNA, 26 bp, Homo sapiens
tgttccggaacttctcgagcatctct

SEQ ID NO: 63582 - DNA, 26 bp, Homo sapiens
gttccggaacttctcgagcatctctg

SEQ ID NO: 63583 - DNA, 26 bp, Homo sapiens
ttccggaacttctcgagcatctctgg

SEQ ID NO: 63584 - DNA, 26 bp, Homo sapiens
tccggaacttctcgagcatctctggc

SEQ ID NO: 63585 - DNA, 26 bp, Homo sapiens
ccggaacttctcgagcatctctggct

SEQ ID NO: 63586 - DNA, 26 bp, Homo sapiens
cggaacttctcgagcatctctggctg

SEQ ID NO: 63587 - DNA, 26 bp, Homo sapiens
ggaacttctcgagcatctctggctgg

SEQ ID NO: 63588 - DNA, 26 bp, Homo sapiens
gaacttctcgagcatctctggctggt

SEQ ID NO: 63589 - DNA, 26 bp, Homo sapiens
aacttctcgagcatctctggctggta

SEQ ID NO: 63590 - DNA, 26 bp, Homo sapiens
acttctcgagcatctctggctggtac

SEQ ID NO: 63591 - DNA, 26 bp, Homo sapiens
cttctcgagcatctctggctggtact

SEQ ID NO: 63592 - DNA, 26 bp, Homo sapiens
ttctcgagcatctctggctggtactc

SEQ ID NO: 63593 - DNA, 26 bp, Homo sapiens
tctcgagcatctctggctggtactcg

SEQ ID NO: 63594 - DNA, 26 bp, Homo sapiens
ctcgagcatctctggctggtactcgt

SEQ ID NO: 63595 - DNA, 26 bp, Homo sapiens
tcgagcatctctggctggtactcgtc

SEQ ID NO: 63596 - DNA, 26 bp, Homo sapiens
cgagcatctctggctggtactcgtca

SEQ ID NO: 63597 - DNA, 26 bp, Homo sapiens
gagcatctctggctggtactcgtcaa

SEQ ID NO: 63598 - DNA, 26 bp, Homo sapiens
agcatctctggctggtactcgtcaaa

SEQ ID NO: 63599 - DNA, 26 bp, Homo sapiens
gcatctctggctggtactcgtcaaag

SEQ ID NO: 63600 - DNA, 26 bp, Homo sapiens
catctctggctggtactcgtcaaagt

SEQ ID NO: 63601 - DNA, 26 bp, Homo sapiens
atctctggctggtactcgtcaaagtc

SEQ ID NO: 63602 - DNA, 26 bp, Homo sapiens
tctctggctggtactcgtcaaagtca

SEQ ID NO: 63603 - DNA, 26 bp, Homo sapiens
ctctggctggtactcgtcaaagtcaa

SEQ ID NO: 63604 - DNA, 26 bp, Homo sapiens
tctggctggtactcgtcaaagtcaaa

SEQ ID NO: 63605 - DNA, 26 bp, Homo sapiens
ctggctggtactcgtcaaagtcaaag

SEQ ID NO: 63606 - DNA, 26 bp, Homo sapiens
tggctggtactcgtcaaagtcaaagg

SEQ ID NO: 63607 - DNA, 26 bp, Homo sapiens
ggctggtactcgtcaaagtcaaaggc

SEQ ID NO: 63608 - DNA, 26 bp, Homo sapiens
gctggtactcgtcaaagtcaaaggcc

SEQ ID NO: 63609 - DNA, 26 bp, Homo sapiens
ctggtactcgtcaaagtcaaaggcct

SEQ ID NO: 63610 - DNA, 26 bp, Homo sapiens
tggtactcgtcaaagtcaaaggcctc

SEQ ID NO: 63611 - DNA, 26 bp, Homo sapiens
ggtactcgtcaaagtcaaaggcctcc

SEQ ID NO: 63612 - DNA, 26 bp, Homo sapiens
gtactcgtcaaagtcaaaggcctcca

SEQ ID NO: 63613 - DNA, 26 bp, Homo sapiens
tactcgtcaaagtcaaaggcctccac

SEQ ID NO: 63614 - DNA, 26 bp, Homo sapiens
actcgtcaaagtcaaaggcctccacc

SEQ ID NO: 63615 - DNA, 26 bp, Homo sapiens
ctcgtcaaagtcaaaggcctccaccg

SEQ ID NO: 63616 - DNA, 26 bp, Homo sapiens
tcgtcaaagtcaaaggcctccaccgg

SEQ ID NO: 63617 - DNA, 26 bp, Homo sapiens
cgtcaaagtcaaaggcctccaccggg

SEQ ID NO: 63618 - DNA, 26 bp, Homo sapiens
gtcaaagtcaaaggcctccaccgggc

SEQ ID NO: 63619 - DNA, 26 bp, Homo sapiens
tcaaagtcaaaggcctccaccgggcc

SEQ ID NO: 63620 - DNA, 26 bp, Homo sapiens
caaagtcaaaggcctccaccgggccc

SEQ ID NO: 63621 - DNA, 26 bp, Homo sapiens
aaagtcaaaggcctccaccgggcccg

SEQ ID NO: 63622 - DNA, 26 bp, Homo sapiens
aagtcaaaggcctccaccgggcccga

SEQ ID NO: 63623 - DNA, 26 bp, Homo sapiens
agtcaaaggcctccaccgggcccgag

SEQ ID NO: 63624 - DNA, 26 bp, Homo sapiens
gtcaaaggcctccaccgggcccgagg

SEQ ID NO: 63625 - DNA, 26 bp, Homo sapiens
tcaaaggcctccaccgggcccgaggg

SEQ ID NO: 63626 - DNA, 26 bp, Homo sapiens
caaaggcctccaccgggcccgagggc

SEQ ID NO: 63627 - DNA, 26 bp, Homo sapiens
aaaggcctccaccgggcccgagggcg

SEQ ID NO: 63628 - DNA, 26 bp, Homo sapiens
aaggcctccaccgggcccgagggcgt

SEQ ID NO: 63629 - DNA, 26 bp, Homo sapiens
aggcctccaccgggcccgagggcgtg

SEQ ID NO: 63630 - DNA, 26 bp, Homo sapiens
ggcctccaccgggcccgagggcgtgt

SEQ ID NO: 63631 - DNA, 26 bp, Homo sapiens
gcctccaccgggcccgagggcgtgtt

SEQ ID NO: 63632 - DNA, 26 bp, Homo sapiens
cctccaccgggcccgagggcgtgttg

SEQ ID NO: 63633 - DNA, 26 bp, Homo sapiens
ctccaccgggcccgagggcgtgttgg

SEQ ID NO: 63634 - DNA, 26 bp, Homo sapiens
tccaccgggcccgagggcgtgttggc

SEQ ID NO: 63635 - DNA, 26 bp, Homo sapiens
ccaccgggcccgagggcgtgttggcc

SEQ ID NO: 63636 - DNA, 26 bp, Homo sapiens
caccgggcccgagggcgtgttggcca

SEQ ID NO: 63637 - DNA, 26 bp, Homo sapiens
accgggcccgagggcgtgttggccac

SEQ ID NO: 63638 - DNA, 26 bp, Homo sapiens
ccgggcccgagggcgtgttggccacc

SEQ ID NO: 63639 - DNA, 26 bp, Homo sapiens
cgggcccgagggcgtgttggccacca

SEQ ID NO: 63640 - DNA, 26 bp, Homo sapiens
gggcccgagggcgtgttggccaccac

SEQ ID NO: 63641 - DNA, 26 bp, Homo sapiens
ggcccgagggcgtgttggccaccact

SEQ ID NO: 63642 - DNA, 26 bp, Homo sapiens
gcccgagggcgtgttggccaccactg

SEQ ID NO: 63643 - DNA, 26 bp, Homo sapiens
cccgagggcgtgttggccaccactga

SEQ ID NO: 63644 - DNA, 26 bp, Homo sapiens
ccgagggcgtgttggccaccactgac

SEQ ID NO: 63645 - DNA, 26 bp, Homo sapiens
cgagggcgtgttggccaccactgaca

SEQ ID NO: 63646 - DNA, 26 bp, Homo sapiens
gagggcgtgttggccaccactgacac

SEQ ID NO: 63647 - DNA, 26 bp, Homo sapiens
agggcgtgttggccaccactgacaca

SEQ ID NO: 63648 - DNA, 26 bp, Homo sapiens
gggcgtgttggccaccactgacacac

SEQ ID NO: 63649 - DNA, 26 bp, Homo sapiens
ggcgtgttggccaccactgacacacg

SEQ ID NO: 63650 - DNA, 26 bp, Homo sapiens
gcgtgttggccaccactgacacacgc

SEQ ID NO: 63651 - DNA, 26 bp, Homo sapiens
cgtgttggccaccactgacacacgca

SEQ ID NO: 63652 - DNA, 26 bp, Homo sapiens
gtgttggccaccactgacacacgcac

SEQ ID NO: 63653 - DNA, 26 bp, Homo sapiens
tgttggccaccactgacacacgcacg

SEQ ID NO: 63654 - DNA, 26 bp, Homo sapiens
gttggccaccactgacacacgcacgg

SEQ ID NO: 63655 - DNA, 26 bp, Homo sapiens
ttggccaccactgacacacgcacggt

SEQ ID NO: 63656 - DNA, 26 bp, Homo sapiens
tggccaccactgacacacgcacggtg

SEQ ID NO: 63657 - DNA, 26 bp, Homo sapiens
ggccaccactgacacacgcacggtgg

SEQ ID NO: 63658 - DNA, 26 bp, Homo sapiens
gccaccactgacacacgcacggtggg

SEQ ID NO: 63659 - DNA, 26 bp, Homo sapiens
ccaccactgacacacgcacggtgggc

SEQ ID NO: 63660 - DNA, 26 bp, Homo sapiens
caccactgacacacgcacggtgggcg

SEQ ID NO: 63661 - DNA, 26 bp, Homo sapiens
accactgacacacgcacggtgggcga

SEQ ID NO: 63662 - DNA, 26 bp, Homo sapiens
ccactgacacacgcacggtgggcgag

SEQ ID NO: 63663 - DNA, 26 bp, Homo sapiens
cactgacacacgcacggtgggcgagc

SEQ ID NO: 63664 - DNA, 26 bp, Homo sapiens
actgacacacgcacggtgggcgagcg

SEQ ID NO: 63665 - DNA, 26 bp, Homo sapiens
ctgacacacgcacggtgggcgagcgg

SEQ ID NO: 63666 - DNA, 26 bp, Homo sapiens
tgacacacgcacggtgggcgagcggc

SEQ ID NO: 63667 - DNA, 26 bp, Homo sapiens
gacacacgcacggtgggcgagcggcc

SEQ ID NO: 63668 - DNA, 26 bp, Homo sapiens
acacacgcacggtgggcgagcggcca

SEQ ID NO: 63669 - DNA, 26 bp, Homo sapiens
cacacgcacggtgggcgagcggccac

SEQ ID NO: 63670 - DNA, 26 bp, Homo sapiens
acacgcacggtgggcgagcggccacc

SEQ ID NO: 63671 - DNA, 26 bp, Homo sapiens
cacgcacggtgggcgagcggccaccg

SEQ ID NO: 63672 - DNA, 26 bp, Homo sapiens
acgcacggtgggcgagcggccaccgc

SEQ ID NO: 63673 - DNA, 26 bp, Homo sapiens
cgcacggtgggcgagcggccaccgct

SEQ ID NO: 63674 - DNA, 26 bp, Homo sapiens
gcacggtgggcgagcggccaccgctg

SEQ ID NO: 63675 - DNA, 26 bp, Homo sapiens
cacggtgggcgagcggccaccgctgc

SEQ ID NO: 63676 - DNA, 26 bp, Homo sapiens
acggtgggcgagcggccaccgctgca

SEQ ID NO: 63677 - DNA, 26 bp, Homo sapiens
cggtgggcgagcggccaccgctgcag

SEQ ID NO: 63678 - DNA, 26 bp, Homo sapiens
ggtgggcgagcggccaccgctgcagc

SEQ ID NO: 63679 - DNA, 26 bp, Homo sapiens
gtgggcgagcggccaccgctgcagct

SEQ ID NO: 63680 - DNA, 26 bp, Homo sapiens
tgggcgagcggccaccgctgcagctg

SEQ ID NO: 63681 - DNA, 26 bp, Homo sapiens
gggcgagcggccaccgctgcagctga

SEQ ID NO: 63682 - DNA, 26 bp, Homo sapiens
ggcgagcggccaccgctgcagctgac

SEQ ID NO: 63683 - DNA, 26 bp, Homo sapiens
gcgagcggccaccgctgcagctgacc

SEQ ID NO: 63684 - DNA, 26 bp, Homo sapiens
cgagcggccaccgctgcagctgaccc

SEQ ID NO: 63685 - DNA, 26 bp, Homo sapiens
gagcggccaccgctgcagctgaccct

SEQ ID NO: 63686 - DNA, 26 bp, Homo sapiens
agcggccaccgctgcagctgaccctg

SEQ ID NO: 63687 - DNA, 26 bp, Homo sapiens
gcggccaccgctgcagctgaccctgt

SEQ ID NO: 63688 - DNA, 26 bp, Homo sapiens
cggccaccgctgcagctgaccctgtg

SEQ ID NO: 63689 - DNA, 26 bp, Homo sapiens
ggccaccgctgcagctgaccctgtgc

SEQ ID NO: 63690 - DNA, 26 bp, Homo sapiens
gccaccgctgcagctgaccctgtgca

SEQ ID NO: 63691 - DNA, 26 bp, Homo sapiens
ccaccgctgcagctgaccctgtgcat

SEQ ID NO: 63692 - DNA, 26 bp, Homo sapiens
caccgctgcagctgaccctgtgcatc

SEQ ID NO: 63693 - DNA, 26 bp, Homo sapiens
accgctgcagctgaccctgtgcatct

SEQ ID NO: 63694 - DNA, 26 bp, Homo sapiens
ccgctgcagctgaccctgtgcatctg

SEQ ID NO: 63695 - DNA, 26 bp, Homo sapiens
cgctgcagctgaccctgtgcatctgg

SEQ ID NO: 63696 - DNA, 26 bp, Homo sapiens
gctgcagctgaccctgtgcatctggc

SEQ ID NO: 63697 - DNA, 26 bp, Homo sapiens
ctgcagctgaccctgtgcatctggct

SEQ ID NO: 63698 - DNA, 26 bp, Homo sapiens
tgcagctgaccctgtgcatctggctg

SEQ ID NO: 63699 - DNA, 26 bp, Homo sapiens
gcagctgaccctgtgcatctggctga

SEQ ID NO: 63700 - DNA, 26 bp, Homo sapiens
cagctgaccctgtgcatctggctgat

SEQ ID NO: 63701 - DNA, 26 bp, Homo sapiens
agctgaccctgtgcatctggctgatt

SEQ ID NO: 63702 - DNA, 26 bp, Homo sapiens
gctgaccctgtgcatctggctgattc

SEQ ID NO: 63703 - DNA, 26 bp, Homo sapiens
ctgaccctgtgcatctggctgattct

SEQ ID NO: 63704 - DNA, 26 bp, Homo sapiens
tgaccctgtgcatctggctgattctg

SEQ ID NO: 63705 - DNA, 26 bp, Homo sapiens
gaccctgtgcatctggctgattctgt

SEQ ID NO: 63706 - DNA, 26 bp, Homo sapiens
accctgtgcatctggctgattctgtt

SEQ ID NO: 63707 - DNA, 26 bp, Homo sapiens
ccctgtgcatctggctgattctgttc

SEQ ID NO: 63708 - DNA, 26 bp, Homo sapiens
cctgtgcatctggctgattctgttca

SEQ ID NO: 63709 - DNA, 26 bp, Homo sapiens
ctgtgcatctggctgattctgttcaa

SEQ ID NO: 63710 - DNA, 26 bp, Homo sapiens
tgtgcatctggctgattctgttcaag

SEQ ID NO: 63711 - DNA, 26 bp, Homo sapiens
gtgcatctggctgattctgttcaaga

SEQ ID NO: 63712 - DNA, 26 bp, Homo sapiens
tgcatctggctgattctgttcaagat

SEQ ID NO: 63713 - DNA, 26 bp, Homo sapiens
gcatctggctgattctgttcaagatg

SEQ ID NO: 63714 - DNA, 26 bp, Homo sapiens
catctggctgattctgttcaagatgg

SEQ ID NO: 63715 - DNA, 26 bp, Homo sapiens
atctggctgattctgttcaagatggc

SEQ ID NO: 63716 - DNA, 26 bp, Homo sapiens
tctggctgattctgttcaagatggcg

SEQ ID NO: 63717 - DNA, 26 bp, Homo sapiens
ctggctgattctgttcaagatggcgt

SEQ ID NO: 63718 - DNA, 26 bp, Homo sapiens
tggctgattctgttcaagatggcgtc

SEQ ID NO: 63719 - DNA, 26 bp, Homo sapiens
ggctgattctgttcaagatggcgtcc

SEQ ID NO: 63720 - DNA, 26 bp, Homo sapiens
gctgattctgttcaagatggcgtcca

SEQ ID NO: 63721 - DNA, 26 bp, Homo sapiens
ctgattctgttcaagatggcgtccac

SEQ ID NO: 63722 - DNA, 26 bp, Homo sapiens
tgattctgttcaagatggcgtccacc

SEQ ID NO: 63723 - DNA, 26 bp, Homo sapiens
gattctgttcaagatggcgtccacct

SEQ ID NO: 63724 - DNA, 26 bp, Homo sapiens
attctgttcaagatggcgtccacctt

SEQ ID NO: 63725 - DNA, 26 bp, Homo sapiens
ttctgttcaagatggcgtccaccttg

SEQ ID NO: 63726 - DNA, 26 bp, Homo sapiens
tctgttcaagatggcgtccaccttgg

SEQ ID NO: 63727 - DNA, 26 bp, Homo sapiens
ctgttcaagatggcgtccaccttgga

SEQ ID NO: 63728 - DNA, 26 bp, Homo sapiens
tgttcaagatggcgtccaccttggac

SEQ ID NO: 63729 - DNA, 26 bp, Homo sapiens
gttcaagatggcgtccaccttggact

SEQ ID NO: 63730 - DNA, 26 bp, Homo sapiens
ttcaagatggcgtccaccttggactc

SEQ ID NO: 63731 - DNA, 26 bp, Homo sapiens
tcaagatggcgtccaccttggactcg

SEQ ID NO: 63732 - DNA, 26 bp, Homo sapiens
caagatggcgtccaccttggactcga

SEQ ID NO: 63733 - DNA, 26 bp, Homo sapiens
aagatggcgtccaccttggactcgaa

SEQ ID NO: 63734 - DNA, 26 bp, Homo sapiens
agatggcgtccaccttggactcgaag

SEQ ID NO: 63735 - DNA, 26 bp, Homo sapiens
gatggcgtccaccttggactcgaagc

SEQ ID NO: 63736 - DNA, 26 bp, Homo sapiens
atggcgtccaccttggactcgaagcc

SEQ ID NO: 63737 - DNA, 26 bp, Homo sapiens
tggcgtccaccttggactcgaagccc

SEQ ID NO: 63738 - DNA, 26 bp, Homo sapiens
ggcgtccaccttggactcgaagccct

SEQ ID NO: 63739 - DNA, 26 bp, Homo sapiens
gcgtccaccttggactcgaagccctt

SEQ ID NO: 63740 - DNA, 26 bp, Homo sapiens
cgtccaccttggactcgaagcccttc

SEQ ID NO: 63741 - DNA, 26 bp, Homo sapiens
gtccaccttggactcgaagcccttct

SEQ ID NO: 63742 - DNA, 26 bp, Homo sapiens
tccaccttggactcgaagcccttctg

SEQ ID NO: 63743 - DNA, 26 bp, Homo sapiens
ccaccttggactcgaagcccttctgg

SEQ ID NO: 63744 - DNA, 26 bp, Homo sapiens
caccttggactcgaagcccttctggg

SEQ ID NO: 63745 - DNA, 26 bp, Homo sapiens
accttggactcgaagcccttctgggc

SEQ ID NO: 63746 - DNA, 26 bp, Homo sapiens
ccttggactcgaagcccttctgggcc

SEQ ID NO: 63747 - DNA, 26 bp, Homo sapiens
cttggactcgaagcccttctgggcca

SEQ ID NO: 63748 - DNA, 26 bp, Homo sapiens
ttggactcgaagcccttctgggccac

SEQ ID NO: 63749 - DNA, 26 bp, Homo sapiens
tggactcgaagcccttctgggccaca

SEQ ID NO: 63750 - DNA, 26 bp, Homo sapiens
ggactcgaagcccttctgggccacaa

SEQ ID NO: 63751 - DNA, 26 bp, Homo sapiens
gactcgaagcccttctgggccacaaa

SEQ ID NO: 63752 - DNA, 26 bp, Homo sapiens
actcgaagcccttctgggccacaaaa

SEQ ID NO: 63753 - DNA, 26 bp, Homo sapiens
ctcgaagcccttctgggccacaaaaa

SEQ ID NO: 63754 - DNA, 26 bp, Homo sapiens
tcgaagcccttctgggccacaaaaac

SEQ ID NO: 63755 - DNA, 26 bp, Homo sapiens
cgaagcccttctgggccacaaaaaca

SEQ ID NO: 63756 - DNA, 26 bp, Homo sapiens
gaagcccttctgggccacaaaaacat

SEQ ID NO: 63757 - DNA, 26 bp, Homo sapiens
aagcccttctgggccacaaaaacatt

SEQ ID NO: 63758 - DNA, 26 bp, Homo sapiens
agcccttctgggccacaaaaacattc

SEQ ID NO: 63759 - DNA, 26 bp, Homo sapiens
gcccttctgggccacaaaaacattct

SEQ ID NO: 63760 - DNA, 26 bp, Homo sapiens
cccttctgggccacaaaaacattctg

SEQ ID NO: 63761 - DNA, 26 bp, Homo sapiens
ccttctgggccacaaaaacattctgg

SEQ ID NO: 63762 - DNA, 26 bp, Homo sapiens
cttctgggccacaaaaacattctggt

SEQ ID NO: 63763 - DNA, 26 bp, Homo sapiens
ttctgggccacaaaaacattctggtc

SEQ ID NO: 63764 - DNA, 26 bp, Homo sapiens
tctgggccacaaaaacattctggtct

SEQ ID NO: 63765 - DNA, 26 bp, Homo sapiens
ctgggccacaaaaacattctggtctc

SEQ ID NO: 63766 - DNA, 26 bp, Homo sapiens
tgggccacaaaaacattctggtctct

SEQ ID NO: 63767 - DNA, 26 bp, Homo sapiens
gggccacaaaaacattctggtctcta

SEQ ID NO: 63768 - DNA, 26 bp, Homo sapiens
ggccacaaaaacattctggtctctag

SEQ ID NO: 63769 - DNA, 26 bp, Homo sapiens
gccacaaaaacattctggtctctaga

SEQ ID NO: 63770 - DNA, 26 bp, Homo sapiens
ccacaaaaacattctggtctctagaa

SEQ ID NO: 63771 - DNA, 26 bp, Homo sapiens
cacaaaaacattctggtctctagaac

SEQ ID NO: 63772 - DNA, 26 bp, Homo sapiens
acaaaaacattctggtctctagaacc

SEQ ID NO: 63773 - DNA, 26 bp, Homo sapiens
caaaaacattctggtctctagaacca

SEQ ID NO: 63774 - DNA, 26 bp, Homo sapiens
aaaaacattctggtctctagaaccat

SEQ ID NO: 63775 - DNA, 26 bp, Homo sapiens
aaaacattctggtctctagaaccatc

SEQ ID NO: 63776 - DNA, 26 bp, Homo sapiens
aaacattctggtctctagaaccatca

SEQ ID NO: 63777 - DNA, 26 bp, Homo sapiens
aacattctggtctctagaaccatcaa

SEQ ID NO: 63778 - DNA, 26 bp, Homo sapiens
acattctggtctctagaaccatcaaa

SEQ ID NO: 63779 - DNA, 26 bp, Homo sapiens
cattctggtctctagaaccatcaaac

SEQ ID NO: 63780 - DNA, 26 bp, Homo sapiens
attctggtctctagaaccatcaaacc

SEQ ID NO: 63781 - DNA, 26 bp, Homo sapiens
ttctggtctctagaaccatcaaaccc

SEQ ID NO: 63782 - DNA, 26 bp, Homo sapiens
tctggtctctagaaccatcaaacccc

SEQ ID NO: 63783 - DNA, 26 bp, Homo sapiens
ctggtctctagaaccatcaaacccca

SEQ ID NO: 63784 - DNA, 26 bp, Homo sapiens
tggtctctagaaccatcaaaccccag

SEQ ID NO: 63785 - DNA, 26 bp, Homo sapiens
ggtctctagaaccatcaaaccccaga

SEQ ID NO: 63786 - DNA, 26 bp, Homo sapiens
gtctctagaaccatcaaaccccagaa

SEQ ID NO: 63787 - DNA, 26 bp, Homo sapiens
tctctagaaccatcaaaccccagaat

SEQ ID NO: 63788 - DNA, 26 bp, Homo sapiens
ctctagaaccatcaaaccccagaatc

SEQ ID NO: 63789 - DNA, 26 bp, Homo sapiens
tctagaaccatcaaaccccagaatca

SEQ ID NO: 63790 - DNA, 26 bp, Homo sapiens
ctagaaccatcaaaccccagaatcac

SEQ ID NO: 63791 - DNA, 26 bp, Homo sapiens
tagaaccatcaaaccccagaatcaca

SEQ ID NO: 63792 - DNA, 26 bp, Homo sapiens
agaaccatcaaaccccagaatcacat

SEQ ID NO: 63793 - DNA, 26 bp, Homo sapiens
gaaccatcaaaccccagaatcacatc

SEQ ID NO: 63794 - DNA, 26 bp, Homo sapiens
aaccatcaaaccccagaatcacatcc

SEQ ID NO: 63795 - DNA, 26 bp, Homo sapiens
accatcaaaccccagaatcacatcca

SEQ ID NO: 63796 - DNA, 26 bp, Homo sapiens
ccatcaaaccccagaatcacatccag

SEQ ID NO: 63797 - DNA, 26 bp, Homo sapiens
catcaaaccccagaatcacatccaga

SEQ ID NO: 63798 - DNA, 26 bp, Homo sapiens
atcaaaccccagaatcacatccagat

SEQ ID NO: 63799 - DNA, 26 bp, Homo sapiens
tcaaaccccagaatcacatccagatt

SEQ ID NO: 63800 - DNA, 26 bp, Homo sapiens
caaaccccagaatcacatccagatta

SEQ ID NO: 63801 - DNA, 26 bp, Homo sapiens
aaaccccagaatcacatccagattac

SEQ ID NO: 63802 - DNA, 26 bp, Homo sapiens
aaccccagaatcacatccagattaca

SEQ ID NO: 63803 - DNA, 26 bp, Homo sapiens
accccagaatcacatccagattacaa

SEQ ID NO: 63804 - DNA, 26 bp, Homo sapiens
ccccagaatcacatccagattacaag

SEQ ID NO: 63805 - DNA, 26 bp, Homo sapiens
cccagaatcacatccagattacaagc

SEQ ID NO: 63806 - DNA, 26 bp, Homo sapiens
ccagaatcacatccagattacaagct

SEQ ID NO: 63807 - DNA, 26 bp, Homo sapiens
cagaatcacatccagattacaagctt

SEQ ID NO: 63808 - DNA, 26 bp, Homo sapiens
agaatcacatccagattacaagcttt

SEQ ID NO: 63809 - DNA, 26 bp, Homo sapiens
gaatcacatccagattacaagctttg

SEQ ID NO: 63810 - DNA, 26 bp, Homo sapiens
aatcacatccagattacaagctttgg

SEQ ID NO: 63811 - DNA, 26 bp, Homo sapiens
atcacatccagattacaagctttggc

SEQ ID NO: 63812 - DNA, 26 bp, Homo sapiens
tcacatccagattacaagctttggca

SEQ ID NO: 63813 - DNA, 26 bp, Homo sapiens
cacatccagattacaagctttggcag

SEQ ID NO: 63814 - DNA, 26 bp, Homo sapiens
acatccagattacaagctttggcagc

SEQ ID NO: 63815 - DNA, 26 bp, Homo sapiens
catccagattacaagctttggcagca

SEQ ID NO: 63816 - DNA, 26 bp, Homo sapiens
atccagattacaagctttggcagcat

SEQ ID NO: 63817 - DNA, 26 bp, Homo sapiens
tccagattacaagctttggcagcatc

SEQ ID NO: 63818 - DNA, 26 bp, Homo sapiens
ccagattacaagctttggcagcatca

SEQ ID NO: 63819 - DNA, 26 bp, Homo sapiens
cagattacaagctttggcagcatcag

SEQ ID NO: 63820 - DNA, 26 bp, Homo sapiens
agattacaagctttggcagcatcagt

SEQ ID NO: 63821 - DNA, 26 bp, Homo sapiens
gattacaagctttggcagcatcagtt

SEQ ID NO: 63822 - DNA, 26 bp, Homo sapiens
attacaagctttggcagcatcagtta

SEQ ID NO: 63823 - DNA, 26 bp, Homo sapiens
ttacaagctttggcagcatcagttac

SEQ ID NO: 63824 - DNA, 26 bp, Homo sapiens
tacaagctttggcagcatcagttaca

SEQ ID NO: 63825 - DNA, 26 bp, Homo sapiens
acaagctttggcagcatcagttacac

SEQ ID NO: 63826 - DNA, 26 bp, Homo sapiens
caagctttggcagcatcagttacacc

SEQ ID NO: 63827 - DNA, 26 bp, Homo sapiens
aagctttggcagcatcagttacacca

SEQ ID NO: 63828 - DNA, 26 bp, Homo sapiens
agctttggcagcatcagttacaccag

SEQ ID NO: 63829 - DNA, 26 bp, Homo sapiens
gctttggcagcatcagttacaccagg

SEQ ID NO: 63830 - DNA, 26 bp, Homo sapiens
ctttggcagcatcagttacaccaggg

SEQ ID NO: 63831 - DNA, 26 bp, Homo sapiens
tttggcagcatcagttacaccagggc

SEQ ID NO: 63832 - DNA, 26 bp, Homo sapiens
ttggcagcatcagttacaccagggca

SEQ ID NO: 63833 - DNA, 26 bp, Homo sapiens
tggcagcatcagttacaccagggcaa

SEQ ID NO: 63834 - DNA, 26 bp, Homo sapiens
ggcagcatcagttacaccagggcaaa

SEQ ID NO: 63835 - DNA, 26 bp, Homo sapiens
gcagcatcagttacaccagggcaaag

SEQ ID NO: 63836 - DNA, 26 bp, Homo sapiens
cagcatcagttacaccagggcaaagg

SEQ ID NO: 63837 - DNA, 26 bp, Homo sapiens
agcatcagttacaccagggcaaaggg

SEQ ID NO: 63838 - DNA, 26 bp, Homo sapiens
gcatcagttacaccagggcaaagggt

SEQ ID NO: 63839 - DNA, 26 bp, Homo sapiens
catcagttacaccagggcaaagggtt

SEQ ID NO: 63840 - DNA, 26 bp, Homo sapiens
atcagttacaccagggcaaagggttt

SEQ ID NO: 63841 - DNA, 26 bp, Homo sapiens
tcagttacaccagggcaaagggtttc

SEQ ID NO: 63842 - DNA, 26 bp, Homo sapiens
cagttacaccagggcaaagggtttca

SEQ ID NO: 63843 - DNA, 26 bp, Homo sapiens
agttacaccagggcaaagggtttcat

SEQ ID NO: 63844 - DNA, 26 bp, Homo sapiens
gttacaccagggcaaagggtttcatg

SEQ ID NO: 63845 - DNA, 26 bp, Homo sapiens
ttacaccagggcaaagggtttcatgc

SEQ ID NO: 63846 - DNA, 26 bp, Homo sapiens
tacaccagggcaaagggtttcatgca

SEQ ID NO: 63847 - DNA, 26 bp, Homo sapiens
acaccagggcaaagggtttcatgcat

SEQ ID NO: 63848 - DNA, 26 bp, Homo sapiens
caccagggcaaagggtttcatgcatc

SEQ ID NO: 63849 - DNA, 26 bp, Homo sapiens
accagggcaaagggtttcatgcatcg

SEQ ID NO: 63850 - DNA, 26 bp, Homo sapiens
ccagggcaaagggtttcatgcatcgc

SEQ ID NO: 63851 - DNA, 26 bp, Homo sapiens
cagggcaaagggtttcatgcatcgca

SEQ ID NO: 63852 - DNA, 26 bp, Homo sapiens
agggcaaagggtttcatgcatcgcat

SEQ ID NO: 63853 - DNA, 26 bp, Homo sapiens
gggcaaagggtttcatgcatcgcatc

SEQ ID NO: 63854 - DNA, 26 bp, Homo sapiens
ggcaaagggtttcatgcatcgcatca

SEQ ID NO: 63855 - DNA, 26 bp, Homo sapiens
gcaaagggtttcatgcatcgcatcat

SEQ ID NO: 63856 - DNA, 26 bp, Homo sapiens
caaagggtttcatgcatcgcatcatg

SEQ ID NO: 63857 - DNA, 26 bp, Homo sapiens
aaagggtttcatgcatcgcatcatgc

SEQ ID NO: 63858 - DNA, 26 bp, Homo sapiens
aagggtttcatgcatcgcatcatgca

SEQ ID NO: 63859 - DNA, 26 bp, Homo sapiens
agggtttcatgcatcgcatcatgcaa

SEQ ID NO: 63860 - DNA, 26 bp, Homo sapiens
gggtttcatgcatcgcatcatgcaaa

SEQ ID NO: 63861 - DNA, 26 bp, Homo sapiens
ggtttcatgcatcgcatcatgcaaag

SEQ ID NO: 63862 - DNA, 26 bp, Homo sapiens
gtttcatgcatcgcatcatgcaaagt

SEQ ID NO: 63863 - DNA, 26 bp, Homo sapiens
tttcatgcatcgcatcatgcaaagtt

SEQ ID NO: 63864 - DNA, 26 bp, Homo sapiens
ttcatgcatcgcatcatgcaaagttt

SEQ ID NO: 63865 - DNA, 26 bp, Homo sapiens
tcatgcatcgcatcatgcaaagtttc

SEQ ID NO: 63866 - DNA, 26 bp, Homo sapiens
catgcatcgcatcatgcaaagtttcc

SEQ ID NO: 63867 - DNA, 26 bp, Homo sapiens
atgcatcgcatcatgcaaagtttcca

SEQ ID NO: 63868 - DNA, 26 bp, Homo sapiens
tgcatcgcatcatgcaaagtttccaa

SEQ ID NO: 63869 - DNA, 26 bp, Homo sapiens
gcatcgcatcatgcaaagtttccaaa

SEQ ID NO: 63870 - DNA, 26 bp, Homo sapiens
catcgcatcatgcaaagtttccaaaa

SEQ ID NO: 63871 - DNA, 26 bp, Homo sapiens
atcgcatcatgcaaagtttccaaaac

SEQ ID NO: 63872 - DNA, 26 bp, Homo sapiens
tcgcatcatgcaaagtttccaaaact

SEQ ID NO: 63873 - DNA, 26 bp, Homo sapiens
cgcatcatgcaaagtttccaaaactt

SEQ ID NO: 63874 - DNA, 26 bp, Homo sapiens
gcatcatgcaaagtttccaaaacttg

SEQ ID NO: 63875 - DNA, 26 bp, Homo sapiens
catcatgcaaagtttccaaaacttgc

SEQ ID NO: 63876 - DNA, 26 bp, Homo sapiens
atcatgcaaagtttccaaaacttgct

SEQ ID NO: 63877 - DNA, 26 bp, Homo sapiens
tcatgcaaagtttccaaaacttgctc

SEQ ID NO: 63878 - DNA, 26 bp, Homo sapiens
catgcaaagtttccaaaacttgctcg

SEQ ID NO: 63879 - DNA, 26 bp, Homo sapiens
atgcaaagtttccaaaacttgctcgc

SEQ ID NO: 63880 - DNA, 26 bp, Homo sapiens
tgcaaagtttccaaaacttgctcgct

SEQ ID NO: 63881 - DNA, 26 bp, Homo sapiens
gcaaagtttccaaaacttgctcgctc

SEQ ID NO: 63882 - DNA, 26 bp, Homo sapiens
caaagtttccaaaacttgctcgctca

SEQ ID NO: 63883 - DNA, 26 bp, Homo sapiens
aaagtttccaaaacttgctcgctcag

SEQ ID NO: 63884 - DNA, 26 bp, Homo sapiens
aagtttccaaaacttgctcgctcagt

SEQ ID NO: 63885 - DNA, 26 bp, Homo sapiens
agtttccaaaacttgctcgctcagtt

SEQ ID NO: 63886 - DNA, 26 bp, Homo sapiens
gtttccaaaacttgctcgctcagttc

SEQ ID NO: 63887 - DNA, 26 bp, Homo sapiens
tttccaaaacttgctcgctcagttcg

SEQ ID NO: 63888 - DNA, 26 bp, Homo sapiens
ttccaaaacttgctcgctcagttcgg

SEQ ID NO: 63889 - DNA, 26 bp, Homo sapiens
tccaaaacttgctcgctcagttcgga

SEQ ID NO: 63890 - DNA, 26 bp, Homo sapiens
ccaaaacttgctcgctcagttcggac

SEQ ID NO: 63891 - DNA, 26 bp, Homo sapiens
caaaacttgctcgctcagttcggaca

SEQ ID NO: 63892 - DNA, 26 bp, Homo sapiens
aaaacttgctcgctcagttcggacag

SEQ ID NO: 63893 - DNA, 26 bp, Homo sapiens
aaacttgctcgctcagttcggacagc

SEQ ID NO: 63894 - DNA, 26 bp, Homo sapiens
aacttgctcgctcagttcggacagct

SEQ ID NO: 63895 - DNA, 26 bp, Homo sapiens
acttgctcgctcagttcggacagctc

SEQ ID NO: 63896 - DNA, 26 bp, Homo sapiens
cttgctcgctcagttcggacagctcc

SEQ ID NO: 63897 - DNA, 26 bp, Homo sapiens
ttgctcgctcagttcggacagctcct

SEQ ID NO: 63898 - DNA, 26 bp, Homo sapiens
tgctcgctcagttcggacagctcctg

SEQ ID NO: 63899 - DNA, 26 bp, Homo sapiens
gctcgctcagttcggacagctcctgg

SEQ ID NO: 63900 - DNA, 26 bp, Homo sapiens
ctcgctcagttcggacagctcctgga

SEQ ID NO: 63901 - DNA, 26 bp, Homo sapiens
tcgctcagttcggacagctcctggac

SEQ ID NO: 63902 - DNA, 26 bp, Homo sapiens
cgctcagttcggacagctcctggacg

SEQ ID NO: 63903 - DNA, 26 bp, Homo sapiens
gctcagttcggacagctcctggacgt

SEQ ID NO: 63904 - DNA, 26 bp, Homo sapiens
ctcagttcggacagctcctggacgtt

SEQ ID NO: 63905 - DNA, 26 bp, Homo sapiens
tcagttcggacagctcctggacgttg

SEQ ID NO: 63906 - DNA, 26 bp, Homo sapiens
cagttcggacagctcctggacgttgc

SEQ ID NO: 63907 - DNA, 26 bp, Homo sapiens
agttcggacagctcctggacgttgcc

SEQ ID NO: 63908 - DNA, 26 bp, Homo sapiens
gttcggacagctcctggacgttgccc

SEQ ID NO: 63909 - DNA, 26 bp, Homo sapiens
ttcggacagctcctggacgttgccca

SEQ ID NO: 63910 - DNA, 26 bp, Homo sapiens
tcggacagctcctggacgttgcccac

SEQ ID NO: 63911 - DNA, 26 bp, Homo sapiens
cggacagctcctggacgttgcccacg

SEQ ID NO: 63912 - DNA, 26 bp, Homo sapiens
ggacagctcctggacgttgcccacgc

SEQ ID NO: 63913 - DNA, 26 bp, Homo sapiens
gacagctcctggacgttgcccacgcg

SEQ ID NO: 63914 - DNA, 26 bp, Homo sapiens
acagctcctggacgttgcccacgcgg

SEQ ID NO: 63915 - DNA, 26 bp, Homo sapiens
cagctcctggacgttgcccacgcgga

SEQ ID NO: 63916 - DNA, 26 bp, Homo sapiens
agctcctggacgttgcccacgcggaa

SEQ ID NO: 63917 - DNA, 26 bp, Homo sapiens
gctcctggacgttgcccacgcggaac

SEQ ID NO: 63918 - DNA, 26 bp, Homo sapiens
ctcctggacgttgcccacgcggaacg

SEQ ID NO: 63919 - DNA, 26 bp, Homo sapiens
tcctggacgttgcccacgcggaacgc

SEQ ID NO: 63920 - DNA, 26 bp, Homo sapiens
cctggacgttgcccacgcggaacgct

SEQ ID NO: 63921 - DNA, 26 bp, Homo sapiens
ctggacgttgcccacgcggaacgctg

SEQ ID NO: 63922 - DNA, 26 bp, Homo sapiens
tggacgttgcccacgcggaacgctgt

SEQ ID NO: 63923 - DNA, 26 bp, Homo sapiens
ggacgttgcccacgcggaacgctgtg

SEQ ID NO: 63924 - DNA, 26 bp, Homo sapiens
gacgttgcccacgcggaacgctgtgg

SEQ ID NO: 63925 - DNA, 26 bp, Homo sapiens
acgttgcccacgcggaacgctgtggc

SEQ ID NO: 63926 - DNA, 26 bp, Homo sapiens
cgttgcccacgcggaacgctgtggcg

SEQ ID NO: 63927 - DNA, 26 bp, Homo sapiens
gttgcccacgcggaacgctgtggcgc

SEQ ID NO: 63928 - DNA, 26 bp, Homo sapiens
ttgcccacgcggaacgctgtggcgct

SEQ ID NO: 63929 - DNA, 26 bp, Homo sapiens
tgcccacgcggaacgctgtggcgctg

SEQ ID NO: 63930 - DNA, 26 bp, Homo sapiens
gcccacgcggaacgctgtggcgctgt

SEQ ID NO: 63931 - DNA, 26 bp, Homo sapiens
cccacgcggaacgctgtggcgctgtt

SEQ ID NO: 63932 - DNA, 26 bp, Homo sapiens
ccacgcggaacgctgtggcgctgttg

SEQ ID NO: 63933 - DNA, 26 bp, Homo sapiens
cacgcggaacgctgtggcgctgttgg

SEQ ID NO: 63934 - DNA, 26 bp, Homo sapiens
acgcggaacgctgtggcgctgttgga

SEQ ID NO: 63935 - DNA, 26 bp, Homo sapiens
cgcggaacgctgtggcgctgttggac

SEQ ID NO: 63936 - DNA, 26 bp, Homo sapiens
gcggaacgctgtggcgctgttggacg

SEQ ID NO: 63937 - DNA, 26 bp, Homo sapiens
cggaacgctgtggcgctgttggacgc

SEQ ID NO: 63938 - DNA, 26 bp, Homo sapiens
ggaacgctgtggcgctgttggacgct

SEQ ID NO: 63939 - DNA, 26 bp, Homo sapiens
gaacgctgtggcgctgttggacgcta

SEQ ID NO: 63940 - DNA, 26 bp, Homo sapiens
aacgctgtggcgctgttggacgctat

SEQ ID NO: 63941 - DNA, 26 bp, Homo sapiens
acgctgtggcgctgttggacgctatc

SEQ ID NO: 63942 - DNA, 26 bp, Homo sapiens
cgctgtggcgctgttggacgctatct

SEQ ID NO: 63943 - DNA, 26 bp, Homo sapiens
gctgtggcgctgttggacgctatctt

SEQ ID NO: 63944 - DNA, 26 bp, Homo sapiens
ctgtggcgctgttggacgctatcttt

SEQ ID NO: 63945 - DNA, 26 bp, Homo sapiens
tgtggcgctgttggacgctatctttc

SEQ ID NO: 63946 - DNA, 26 bp, Homo sapiens
gtggcgctgttggacgctatctttcc

SEQ ID NO: 63947 - DNA, 26 bp, Homo sapiens
tggcgctgttggacgctatctttcca

SEQ ID NO: 63948 - DNA, 26 bp, Homo sapiens
ggcgctgttggacgctatctttccaa

SEQ ID NO: 63949 - DNA, 26 bp, Homo sapiens
gcgctgttggacgctatctttccaac

SEQ ID NO: 63950 - DNA, 26 bp, Homo sapiens
cgctgttggacgctatctttccaacc

SEQ ID NO: 63951 - DNA, 26 bp, Homo sapiens
gctgttggacgctatctttccaacct

SEQ ID NO: 63952 - DNA, 26 bp, Homo sapiens
ctgttggacgctatctttccaacctc

SEQ ID NO: 63953 - DNA, 26 bp, Homo sapiens
tgttggacgctatctttccaacctcc

SEQ ID NO: 63954 - DNA, 26 bp, Homo sapiens
gttggacgctatctttccaacctcct

SEQ ID NO: 63955 - DNA, 26 bp, Homo sapiens
ttggacgctatctttccaacctcctc

SEQ ID NO: 63956 - DNA, 26 bp, Homo sapiens
tggacgctatctttccaacctcctcc

SEQ ID NO: 63957 - DNA, 26 bp, Homo sapiens
ggacgctatctttccaacctcctccg

SEQ ID NO: 63958 - DNA, 26 bp, Homo sapiens
gacgctatctttccaacctcctccga

SEQ ID NO: 63959 - DNA, 26 bp, Homo sapiens
acgctatctttccaacctcctccgag

SEQ ID NO: 63960 - DNA, 26 bp, Homo sapiens
cgctatctttccaacctcctccgagt

SEQ ID NO: 63961 - DNA, 26 bp, Homo sapiens
gctatctttccaacctcctccgagtc

SEQ ID NO: 63962 - DNA, 26 bp, Homo sapiens
ctatctttccaacctcctccgagtcg

SEQ ID NO: 63963 - DNA, 26 bp, Homo sapiens
tatctttccaacctcctccgagtcga

SEQ ID NO: 63964 - DNA, 26 bp, Homo sapiens
atctttccaacctcctccgagtcgat

SEQ ID NO: 63965 - DNA, 26 bp, Homo sapiens
tctttccaacctcctccgagtcgata

SEQ ID NO: 63966 - DNA, 26 bp, Homo sapiens
ctttccaacctcctccgagtcgatat

SEQ ID NO: 63967 - DNA, 26 bp, Homo sapiens
tttccaacctcctccgagtcgatatt

SEQ ID NO: 63968 - DNA, 26 bp, Homo sapiens
ttccaacctcctccgagtcgatattc

SEQ ID NO: 63969 - DNA, 26 bp, Homo sapiens
tccaacctcctccgagtcgatattcc

SEQ ID NO: 63970 - DNA, 26 bp, Homo sapiens
ccaacctcctccgagtcgatattcct

SEQ ID NO: 63971 - DNA, 26 bp, Homo sapiens
caacctcctccgagtcgatattcctc

SEQ ID NO: 63972 - DNA, 26 bp, Homo sapiens
aacctcctccgagtcgatattcctca

SEQ ID NO: 63973 - DNA, 26 bp, Homo sapiens
acctcctccgagtcgatattcctcac

SEQ ID NO: 63974 - DNA, 26 bp, Homo sapiens
cctcctccgagtcgatattcctcact

SEQ ID NO: 63975 - DNA, 26 bp, Homo sapiens
ctcctccgagtcgatattcctcactc

SEQ ID NO: 63976 - DNA, 26 bp, Homo sapiens
tcctccgagtcgatattcctcactcc

SEQ ID NO: 63977 - DNA, 26 bp, Homo sapiens
cctccgagtcgatattcctcactcca

SEQ ID NO: 63978 - DNA, 26 bp, Homo sapiens
ctccgagtcgatattcctcactccaa

SEQ ID NO: 63979 - DNA, 26 bp, Homo sapiens
tccgagtcgatattcctcactccaac

SEQ ID NO: 63980 - DNA, 26 bp, Homo sapiens
ccgagtcgatattcctcactccaaca

SEQ ID NO: 63981 - DNA, 26 bp, Homo sapiens
cgagtcgatattcctcactccaacag

SEQ ID NO: 63982 - DNA, 26 bp, Homo sapiens
gagtcgatattcctcactccaacagc

SEQ ID NO: 63983 - DNA, 26 bp, Homo sapiens
agtcgatattcctcactccaacagca

SEQ ID NO: 63984 - DNA, 26 bp, Homo sapiens
gtcgatattcctcactccaacagcaa

SEQ ID NO: 63985 - DNA, 26 bp, Homo sapiens
tcgatattcctcactccaacagcaaa

SEQ ID NO: 63986 - DNA, 26 bp, Homo sapiens
cgatattcctcactccaacagcaaac

SEQ ID NO: 63987 - DNA, 26 bp, Homo sapiens
gatattcctcactccaacagcaaaca

SEQ ID NO: 63988 - DNA, 26 bp, Homo sapiens
atattcctcactccaacagcaaacac

SEQ ID NO: 63989 - DNA, 26 bp, Homo sapiens
tattcctcactccaacagcaaacact

SEQ ID NO: 63990 - DNA, 26 bp, Homo sapiens
attcctcactccaacagcaaacactt

SEQ ID NO: 63991 - DNA, 26 bp, Homo sapiens
ttcctcactccaacagcaaacacttt

SEQ ID NO: 63992 - DNA, 26 bp, Homo sapiens
tcctcactccaacagcaaacactttg

SEQ ID NO: 63993 - DNA, 26 bp, Homo sapiens
cctcactccaacagcaaacactttga

SEQ ID NO: 63994 - DNA, 26 bp, Homo sapiens
ctcactccaacagcaaacactttgac

SEQ ID NO: 63995 - DNA, 26 bp, Homo sapiens
tcactccaacagcaaacactttgacc

SEQ ID NO: 63996 - DNA, 26 bp, Homo sapiens
cactccaacagcaaacactttgaccc

SEQ ID NO: 63997 - DNA, 26 bp, Homo sapiens
actccaacagcaaacactttgacccc

SEQ ID NO: 63998 - DNA, 26 bp, Homo sapiens
ctccaacagcaaacactttgaccccc

SEQ ID NO: 63999 - DNA, 26 bp, Homo sapiens
tccaacagcaaacactttgacccccc

SEQ ID NO: 64000 - DNA, 26 bp, Homo sapiens
ccaacagcaaacactttgacccccct

SEQ ID NO: 64001 - DNA, 26 bp, Homo sapiens
caacagcaaacactttgacccccctc

SEQ ID NO: 64002 - DNA, 26 bp, Homo sapiens
aacagcaaacactttgacccccctct

SEQ ID NO: 64003 - DNA, 26 bp, Homo sapiens
acagcaaacactttgacccccctctg

SEQ ID NO: 64004 - DNA, 26 bp, Homo sapiens
cagcaaacactttgacccccctctgg

SEQ ID NO: 64005 - DNA, 26 bp, Homo sapiens
agcaaacactttgacccccctctggg

SEQ ID NO: 64006 - DNA, 26 bp, Homo sapiens
gcaaacactttgacccccctctgggt

SEQ ID NO: 64007 - DNA, 26 bp, Homo sapiens
caaacactttgacccccctctgggtg

SEQ ID NO: 64008 - DNA, 26 bp, Homo sapiens
aaacactttgacccccctctgggtga

SEQ ID NO: 64009 - DNA, 26 bp, Homo sapiens
aacactttgacccccctctgggtgag

SEQ ID NO: 64010 - DNA, 26 bp, Homo sapiens
acactttgacccccctctgggtgagg

SEQ ID NO: 64011 - DNA, 26 bp, Homo sapiens
cactttgacccccctctgggtgaggg

SEQ ID NO: 64012 - DNA, 26 bp, Homo sapiens
actttgacccccctctgggtgagggc

SEQ ID NO: 64013 - DNA, 26 bp, Homo sapiens
ctttgacccccctctgggtgagggcc

SEQ ID NO: 64014 - DNA, 26 bp, Homo sapiens
tttgacccccctctgggtgagggcca

SEQ ID NO: 64015 - DNA, 26 bp, Homo sapiens
ttgacccccctctgggtgagggccag

SEQ ID NO: 64016 - DNA, 26 bp, Homo sapiens
tgacccccctctgggtgagggccagg

SEQ ID NO: 64017 - DNA, 26 bp, Homo sapiens
gacccccctctgggtgagggccaggc

SEQ ID NO: 64018 - DNA, 26 bp, Homo sapiens
acccccctctgggtgagggccaggct

SEQ ID NO: 64019 - DNA, 26 bp, Homo sapiens
cccccctctgggtgagggccaggctc

SEQ ID NO: 64020 - DNA, 26 bp, Homo sapiens
ccccctctgggtgagggccaggctca

SEQ ID NO: 64021 - DNA, 26 bp, Homo sapiens
cccctctgggtgagggccaggctcac

SEQ ID NO: 64022 - DNA, 26 bp, Homo sapiens
ccctctgggtgagggccaggctcaca

SEQ ID NO: 64023 - DNA, 26 bp, Homo sapiens
cctctgggtgagggccaggctcacat

SEQ ID NO: 64024 - DNA, 26 bp, Homo sapiens
ctctgggtgagggccaggctcacatc

SEQ ID NO: 64025 - DNA, 26 bp, Homo sapiens
tctgggtgagggccaggctcacatcc

SEQ ID NO: 64026 - DNA, 26 bp, Homo sapiens
ctgggtgagggccaggctcacatcct

SEQ ID NO: 64027 - DNA, 26 bp, Homo sapiens
tgggtgagggccaggctcacatcctg

SEQ ID NO: 64028 - DNA, 26 bp, Homo sapiens
gggtgagggccaggctcacatcctgt

SEQ ID NO: 64029 - DNA, 26 bp, Homo sapiens
ggtgagggccaggctcacatcctgtg

SEQ ID NO: 64030 - DNA, 26 bp, Homo sapiens
gtgagggccaggctcacatcctgtgc

SEQ ID NO: 64031 - DNA, 26 bp, Homo sapiens
tgagggccaggctcacatcctgtgca

SEQ ID NO: 64032 - DNA, 26 bp, Homo sapiens
gagggccaggctcacatcctgtgcat

SEQ ID NO: 64033 - DNA, 26 bp, Homo sapiens
agggccaggctcacatcctgtgcatc

SEQ ID NO: 64034 - DNA, 26 bp, Homo sapiens
gggccaggctcacatcctgtgcatct

SEQ ID NO: 64035 - DNA, 26 bp, Homo sapiens
ggccaggctcacatcctgtgcatctt

SEQ ID NO: 64036 - DNA, 26 bp, Homo sapiens
gccaggctcacatcctgtgcatcttc

SEQ ID NO: 64037 - DNA, 26 bp, Homo sapiens
ccaggctcacatcctgtgcatcttcc

SEQ ID NO: 64038 - DNA, 26 bp, Homo sapiens
caggctcacatcctgtgcatcttcca

SEQ ID NO: 64039 - DNA, 26 bp, Homo sapiens
aggctcacatcctgtgcatcttccac

SEQ ID NO: 64040 - DNA, 26 bp, Homo sapiens
ggctcacatcctgtgcatcttccacc

SEQ ID NO: 64041 - DNA, 26 bp, Homo sapiens
gctcacatcctgtgcatcttccaccg

SEQ ID NO: 64042 - DNA, 26 bp, Homo sapiens
ctcacatcctgtgcatcttccaccga

SEQ ID NO: 64043 - DNA, 26 bp, Homo sapiens
tcacatcctgtgcatcttccaccgac

SEQ ID NO: 64044 - DNA, 26 bp, Homo sapiens
cacatcctgtgcatcttccaccgact

SEQ ID NO: 64045 - DNA, 26 bp, Homo sapiens
acatcctgtgcatcttccaccgactt

SEQ ID NO: 64046 - DNA, 26 bp, Homo sapiens
catcctgtgcatcttccaccgacttt

SEQ ID NO: 64047 - DNA, 26 bp, Homo sapiens
atcctgtgcatcttccaccgactttc

SEQ ID NO: 64048 - DNA, 26 bp, Homo sapiens
tcctgtgcatcttccaccgactttcc

SEQ ID NO: 64049 - DNA, 26 bp, Homo sapiens
cctgtgcatcttccaccgactttcct

SEQ ID NO: 64050 - DNA, 26 bp, Homo sapiens
ctgtgcatcttccaccgactttcctc

SEQ ID NO: 64051 - DNA, 26 bp, Homo sapiens
tgtgcatcttccaccgactttcctcc

SEQ ID NO: 64052 - DNA, 26 bp, Homo sapiens
gtgcatcttccaccgactttcctccc

SEQ ID NO: 64053 - DNA, 26 bp, Homo sapiens
tgcatcttccaccgactttcctcccg

SEQ ID NO: 64054 - DNA, 26 bp, Homo sapiens
gcatcttccaccgactttcctcccgt

SEQ ID NO: 64055 - DNA, 26 bp, Homo sapiens
catcttccaccgactttcctcccgtg

SEQ ID NO: 64056 - DNA, 26 bp, Homo sapiens
atcttccaccgactttcctcccgtga

SEQ ID NO: 64057 - DNA, 26 bp, Homo sapiens
tcttccaccgactttcctcccgtgat

SEQ ID NO: 64058 - DNA, 26 bp, Homo sapiens
cttccaccgactttcctcccgtgatc

SEQ ID NO: 64059 - DNA, 26 bp, Homo sapiens
ttccaccgactttcctcccgtgatca

SEQ ID NO: 64060 - DNA, 26 bp, Homo sapiens
tccaccgactttcctcccgtgatcac

SEQ ID NO: 64061 - DNA, 26 bp, Homo sapiens
ccaccgactttcctcccgtgatcaca

SEQ ID NO: 64062 - DNA, 26 bp, Homo sapiens
caccgactttcctcccgtgatcacaa

SEQ ID NO: 64063 - DNA, 26 bp, Homo sapiens
accgactttcctcccgtgatcacaaa

SEQ ID NO: 64064 - DNA, 26 bp, Homo sapiens
ccgactttcctcccgtgatcacaaag

SEQ ID NO: 64065 - DNA, 26 bp, Homo sapiens
cgactttcctcccgtgatcacaaagg

SEQ ID NO: 64066 - DNA, 26 bp, Homo sapiens
gactttcctcccgtgatcacaaaggc

SEQ ID NO: 64067 - DNA, 26 bp, Homo sapiens
actttcctcccgtgatcacaaaggca

SEQ ID NO: 64068 - DNA, 26 bp, Homo sapiens
ctttcctcccgtgatcacaaaggcaa

SEQ ID NO: 64069 - DNA, 26 bp, Homo sapiens
tttcctcccgtgatcacaaaggcaat

SEQ ID NO: 64070 - DNA, 26 bp, Homo sapiens
ttcctcccgtgatcacaaaggcaatc

SEQ ID NO: 64071 - DNA, 26 bp, Homo sapiens
tcctcccgtgatcacaaaggcaatct

SEQ ID NO: 64072 - DNA, 26 bp, Homo sapiens
cctcccgtgatcacaaaggcaatctg

SEQ ID NO: 64073 - DNA, 26 bp, Homo sapiens
ctcccgtgatcacaaaggcaatctga

SEQ ID NO: 64074 - DNA, 26 bp, Homo sapiens
tcccgtgatcacaaaggcaatctgag

SEQ ID NO: 64075 - DNA, 26 bp, Homo sapiens
cccgtgatcacaaaggcaatctgagg

SEQ ID NO: 64076 - DNA, 26 bp, Homo sapiens
ccgtgatcacaaaggcaatctgaggg

SEQ ID NO: 64077 - DNA, 26 bp, Homo sapiens
cgtgatcacaaaggcaatctgaggga

SEQ ID NO: 64078 - DNA, 26 bp, Homo sapiens
gtgatcacaaaggcaatctgagggac

SEQ ID NO: 64079 - DNA, 26 bp, Homo sapiens
tgatcacaaaggcaatctgagggacc

SEQ ID NO: 64080 - DNA, 26 bp, Homo sapiens
gatcacaaaggcaatctgagggaccc

SEQ ID NO: 64081 - DNA, 26 bp, Homo sapiens
atcacaaaggcaatctgagggacccg

SEQ ID NO: 64082 - DNA, 26 bp, Homo sapiens
tcacaaaggcaatctgagggacccgc

SEQ ID NO: 64083 - DNA, 26 bp, Homo sapiens
cacaaaggcaatctgagggacccgct

SEQ ID NO: 64084 - DNA, 26 bp, Homo sapiens
acaaaggcaatctgagggacccgctg

SEQ ID NO: 64085 - DNA, 26 bp, Homo sapiens
caaaggcaatctgagggacccgctgg

SEQ ID NO: 64086 - DNA, 26 bp, Homo sapiens
aaaggcaatctgagggacccgctggt

SEQ ID NO: 64087 - DNA, 26 bp, Homo sapiens
aaggcaatctgagggacccgctggtc

SEQ ID NO: 64088 - DNA, 26 bp, Homo sapiens
aggcaatctgagggacccgctggtcc

SEQ ID NO: 64089 - DNA, 26 bp, Homo sapiens
ggcaatctgagggacccgctggtcca

SEQ ID NO: 64090 - DNA, 26 bp, Homo sapiens
gcaatctgagggacccgctggtccag

SEQ ID NO: 64091 - DNA, 26 bp, Homo sapiens
caatctgagggacccgctggtccagg

SEQ ID NO: 64092 - DNA, 26 bp, Homo sapiens
aatctgagggacccgctggtccaggc

SEQ ID NO: 64093 - DNA, 26 bp, Homo sapiens
atctgagggacccgctggtccaggcg

SEQ ID NO: 64094 - DNA, 26 bp, Homo sapiens
tctgagggacccgctggtccaggcgg

SEQ ID NO: 64095 - DNA, 26 bp, Homo sapiens
ctgagggacccgctggtccaggcggc

SEQ ID NO: 64096 - DNA, 26 bp, Homo sapiens
tgagggacccgctggtccaggcggct

SEQ ID NO: 64097 - DNA, 26 bp, Homo sapiens
gagggacccgctggtccaggcggctg

SEQ ID NO: 64098 - DNA, 26 bp, Homo sapiens
agggacccgctggtccaggcggctgc

SEQ ID NO: 64099 - DNA, 26 bp, Homo sapiens
gggacccgctggtccaggcggctgcc

SEQ ID NO: 64100 - DNA, 26 bp, Homo sapiens
ggacccgctggtccaggcggctgcct

SEQ ID NO: 64101 - DNA, 26 bp, Homo sapiens
gacccgctggtccaggcggctgcctg

SEQ ID NO: 64102 - DNA, 26 bp, Homo sapiens
acccgctggtccaggcggctgcctgc

SEQ ID NO: 64103 - DNA, 26 bp, Homo sapiens
cccgctggtccaggcggctgcctgcc

SEQ ID NO: 64104 - DNA, 26 bp, Homo sapiens
ccgctggtccaggcggctgcctgcct

SEQ ID NO: 64105 - DNA, 26 bp, Homo sapiens
cgctggtccaggcggctgcctgcctc

SEQ ID NO: 64106 - DNA, 26 bp, Homo sapiens
gctggtccaggcggctgcctgcctca

SEQ ID NO: 64107 - DNA, 26 bp, Homo sapiens
ctggtccaggcggctgcctgcctcag

SEQ ID NO: 64108 - DNA, 26 bp, Homo sapiens
tggtccaggcggctgcctgcctcagg

SEQ ID NO: 64109 - DNA, 26 bp, Homo sapiens
ggtccaggcggctgcctgcctcaggc

SEQ ID NO: 64110 - DNA, 26 bp, Homo sapiens
gtccaggcggctgcctgcctcaggca

SEQ ID NO: 64111 - DNA, 26 bp, Homo sapiens
tccaggcggctgcctgcctcaggcac

SEQ ID NO: 64112 - DNA, 26 bp, Homo sapiens
ccaggcggctgcctgcctcaggcaca

SEQ ID NO: 64113 - DNA, 26 bp, Homo sapiens
caggcggctgcctgcctcaggcacaa

SEQ ID NO: 64114 - DNA, 26 bp, Homo sapiens
aggcggctgcctgcctcaggcacaaa

SEQ ID NO: 64115 - DNA, 26 bp, Homo sapiens
ggcggctgcctgcctcaggcacaaag

SEQ ID NO: 64116 - DNA, 26 bp, Homo sapiens
gcggctgcctgcctcaggcacaaagt

SEQ ID NO: 64117 - DNA, 26 bp, Homo sapiens
cggctgcctgcctcaggcacaaagtg

SEQ ID NO: 64118 - DNA, 26 bp, Homo sapiens
ggctgcctgcctcaggcacaaagtgg

SEQ ID NO: 64119 - DNA, 26 bp, Homo sapiens
gctgcctgcctcaggcacaaagtggt

SEQ ID NO: 64120 - DNA, 26 bp, Homo sapiens
ctgcctgcctcaggcacaaagtggtt

SEQ ID NO: 64121 - DNA, 26 bp, Homo sapiens
tgcctgcctcaggcacaaagtggttt

SEQ ID NO: 64122 - DNA, 26 bp, Homo sapiens
gcctgcctcaggcacaaagtggttta

SEQ ID NO: 64123 - DNA, 26 bp, Homo sapiens
cctgcctcaggcacaaagtggtttac

SEQ ID NO: 64124 - DNA, 26 bp, Homo sapiens
ctgcctcaggcacaaagtggtttacc

SEQ ID NO: 64125 - DNA, 26 bp, Homo sapiens
tgcctcaggcacaaagtggtttaccc

SEQ ID NO: 64126 - DNA, 26 bp, Homo sapiens
gcctcaggcacaaagtggtttacccg

SEQ ID NO: 64127 - DNA, 26 bp, Homo sapiens
cctcaggcacaaagtggtttacccgc

SEQ ID NO: 64128 - DNA, 26 bp, Homo sapiens
ctcaggcacaaagtggtttacccgca

SEQ ID NO: 64129 - DNA, 26 bp, Homo sapiens
tcaggcacaaagtggtttacccgcag

SEQ ID NO: 64130 - DNA, 26 bp, Homo sapiens
caggcacaaagtggtttacccgcagg

SEQ ID NO: 64131 - DNA, 26 bp, Homo sapiens
aggcacaaagtggtttacccgcaggt

SEQ ID NO: 64132 - DNA, 26 bp, Homo sapiens
ggcacaaagtggtttacccgcaggtg

SEQ ID NO: 64133 - DNA, 26 bp, Homo sapiens
gcacaaagtggtttacccgcaggtgc

SEQ ID NO: 64134 - DNA, 26 bp, Homo sapiens
cacaaagtggtttacccgcaggtgct

SEQ ID NO: 64135 - DNA, 26 bp, Homo sapiens
acaaagtggtttacccgcaggtgctc

SEQ ID NO: 64136 - DNA, 26 bp, Homo sapiens
caaagtggtttacccgcaggtgctca

SEQ ID NO: 64137 - DNA, 26 bp, Homo sapiens
aaagtggtttacccgcaggtgctcaa

SEQ ID NO: 64138 - DNA, 26 bp, Homo sapiens
aagtggtttacccgcaggtgctcaag

SEQ ID NO: 64139 - DNA, 26 bp, Homo sapiens
agtggtttacccgcaggtgctcaagg

SEQ ID NO: 64140 - DNA, 26 bp, Homo sapiens
gtggtttacccgcaggtgctcaaggc

SEQ ID NO: 64141 - DNA, 26 bp, Homo sapiens
tggtttacccgcaggtgctcaaggcc

SEQ ID NO: 64142 - DNA, 26 bp, Homo sapiens
ggtttacccgcaggtgctcaaggccc

SEQ ID NO: 64143 - DNA, 26 bp, Homo sapiens
gtttacccgcaggtgctcaaggccca

SEQ ID NO: 64144 - DNA, 26 bp, Homo sapiens
tttacccgcaggtgctcaaggcccac

SEQ ID NO: 64145 - DNA, 26 bp, Homo sapiens
ttacccgcaggtgctcaaggcccacc

SEQ ID NO: 64146 - DNA, 26 bp, Homo sapiens
tacccgcaggtgctcaaggcccacct

SEQ ID NO: 64147 - DNA, 26 bp, Homo sapiens
acccgcaggtgctcaaggcccacctt

SEQ ID NO: 64148 - DNA, 26 bp, Homo sapiens
cccgcaggtgctcaaggcccacctta

SEQ ID NO: 64149 - DNA, 26 bp, Homo sapiens
ccgcaggtgctcaaggcccaccttag

SEQ ID NO: 64150 - DNA, 26 bp, Homo sapiens
cgcaggtgctcaaggcccaccttagt

SEQ ID NO: 64151 - DNA, 26 bp, Homo sapiens
gcaggtgctcaaggcccaccttagtg

SEQ ID NO: 64152 - DNA, 26 bp, Homo sapiens
caggtgctcaaggcccaccttagtgt

SEQ ID NO: 64153 - DNA, 26 bp, Homo sapiens
aggtgctcaaggcccaccttagtgtt

SEQ ID NO: 64154 - DNA, 26 bp, Homo sapiens
ggtgctcaaggcccaccttagtgttg

SEQ ID NO: 64155 - DNA, 26 bp, Homo sapiens
gtgctcaaggcccaccttagtgttgg

SEQ ID NO: 64156 - DNA, 26 bp, Homo sapiens
tgctcaaggcccaccttagtgttggc

SEQ ID NO: 64157 - DNA, 26 bp, Homo sapiens
gctcaaggcccaccttagtgttggcg

SEQ ID NO: 64158 - DNA, 26 bp, Homo sapiens
ctcaaggcccaccttagtgttggcgt

SEQ ID NO: 64159 - DNA, 26 bp, Homo sapiens
tcaaggcccaccttagtgttggcgtg

SEQ ID NO: 64160 - DNA, 26 bp, Homo sapiens
caaggcccaccttagtgttggcgtgt

SEQ ID NO: 64161 - DNA, 26 bp, Homo sapiens
aaggcccaccttagtgttggcgtgtc

SEQ ID NO: 64162 - DNA, 26 bp, Homo sapiens
aggcccaccttagtgttggcgtgtct

SEQ ID NO: 64163 - DNA, 26 bp, Homo sapiens
ggcccaccttagtgttggcgtgtctt

SEQ ID NO: 64164 - DNA, 26 bp, Homo sapiens
gcccaccttagtgttggcgtgtcttc

SEQ ID NO: 64165 - DNA, 26 bp, Homo sapiens
cccaccttagtgttggcgtgtcttcc

SEQ ID NO: 64166 - DNA, 26 bp, Homo sapiens
ccaccttagtgttggcgtgtcttccc

SEQ ID NO: 64167 - DNA, 26 bp, Homo sapiens
caccttagtgttggcgtgtcttcccc

SEQ ID NO: 64168 - DNA, 26 bp, Homo sapiens
accttagtgttggcgtgtcttccccc

SEQ ID NO: 64169 - DNA, 26 bp, Homo sapiens
ccttagtgttggcgtgtcttccccct

SEQ ID NO: 64170 - DNA, 26 bp, Homo sapiens
cttagtgttggcgtgtcttccccctt

SEQ ID NO: 64171 - DNA, 26 bp, Homo sapiens
ttagtgttggcgtgtcttcccccttt

SEQ ID NO: 64172 - DNA, 26 bp, Homo sapiens
tagtgttggcgtgtcttccccctttg

SEQ ID NO: 64173 - DNA, 26 bp, Homo sapiens
agtgttggcgtgtcttccccctttgt

SEQ ID NO: 64174 - DNA, 26 bp, Homo sapiens
gtgttggcgtgtcttccccctttgta

SEQ ID NO: 64175 - DNA, 26 bp, Homo sapiens
tgttggcgtgtcttccccctttgtag

SEQ ID NO: 64176 - DNA, 26 bp, Homo sapiens
gttggcgtgtcttccccctttgtaga

SEQ ID NO: 64177 - DNA, 26 bp, Homo sapiens
ttggcgtgtcttccccctttgtagac

SEQ ID NO: 64178 - DNA, 26 bp, Homo sapiens
tggcgtgtcttccccctttgtagacc

SEQ ID NO: 64179 - DNA, 26 bp, Homo sapiens
ggcgtgtcttccccctttgtagacca

SEQ ID NO: 64180 - DNA, 26 bp, Homo sapiens
gcgtgtcttccccctttgtagaccac

SEQ ID NO: 64181 - DNA, 26 bp, Homo sapiens
cgtgtcttccccctttgtagaccact

SEQ ID NO: 64182 - DNA, 26 bp, Homo sapiens
gtgtcttccccctttgtagaccactt

SEQ ID NO: 64183 - DNA, 26 bp, Homo sapiens
tgtcttccccctttgtagaccacttt

SEQ ID NO: 64184 - DNA, 26 bp, Homo sapiens
gtcttccccctttgtagaccactttg

SEQ ID NO: 64185 - DNA, 26 bp, Homo sapiens
tcttccccctttgtagaccactttgt

SEQ ID NO: 64186 - DNA, 26 bp, Homo sapiens
cttccccctttgtagaccactttgtt

SEQ ID NO: 64187 - DNA, 26 bp, Homo sapiens
ttccccctttgtagaccactttgttg

SEQ ID NO: 64188 - DNA, 26 bp, Homo sapiens
tccccctttgtagaccactttgttga

SEQ ID NO: 64189 - DNA, 26 bp, Homo sapiens
ccccctttgtagaccactttgttgat

SEQ ID NO: 64190 - DNA, 26 bp, Homo sapiens
cccctttgtagaccactttgttgatg

SEQ ID NO: 64191 - DNA, 26 bp, Homo sapiens
ccctttgtagaccactttgttgatgg

SEQ ID NO: 64192 - DNA, 26 bp, Homo sapiens
cctttgtagaccactttgttgatggc

SEQ ID NO: 64193 - DNA, 26 bp, Homo sapiens
ctttgtagaccactttgttgatggcg

SEQ ID NO: 64194 - DNA, 26 bp, Homo sapiens
tttgtagaccactttgttgatggcgt

SEQ ID NO: 64195 - DNA, 26 bp, Homo sapiens
ttgtagaccactttgttgatggcgtc

SEQ ID NO: 64196 - DNA, 26 bp, Homo sapiens
tgtagaccactttgttgatggcgtca

SEQ ID NO: 64197 - DNA, 26 bp, Homo sapiens
gtagaccactttgttgatggcgtcaa

SEQ ID NO: 64198 - DNA, 26 bp, Homo sapiens
tagaccactttgttgatggcgtcaat

SEQ ID NO: 64199 - DNA, 26 bp, Homo sapiens
agaccactttgttgatggcgtcaata

SEQ ID NO: 64200 - DNA, 26 bp, Homo sapiens
gaccactttgttgatggcgtcaataa

SEQ ID NO: 64201 - DNA, 26 bp, Homo sapiens
accactttgttgatggcgtcaataat

SEQ ID NO: 64202 - DNA, 26 bp, Homo sapiens
ccactttgttgatggcgtcaataatc

SEQ ID NO: 64203 - DNA, 26 bp, Homo sapiens
cactttgttgatggcgtcaataatct

SEQ ID NO: 64204 - DNA, 26 bp, Homo sapiens
actttgttgatggcgtcaataatctg

SEQ ID NO: 64205 - DNA, 26 bp, Homo sapiens
ctttgttgatggcgtcaataatctgc

SEQ ID NO: 64206 - DNA, 26 bp, Homo sapiens
tttgttgatggcgtcaataatctgcc

SEQ ID NO: 64207 - DNA, 26 bp, Homo sapiens
ttgttgatggcgtcaataatctgcct

SEQ ID NO: 64208 - DNA, 26 bp, Homo sapiens
tgttgatggcgtcaataatctgcctc

SEQ ID NO: 64209 - DNA, 26 bp, Homo sapiens
gttgatggcgtcaataatctgcctct

SEQ ID NO: 64210 - DNA, 26 bp, Homo sapiens
ttgatggcgtcaataatctgcctctt

SEQ ID NO: 64211 - DNA, 26 bp, Homo sapiens
tgatggcgtcaataatctgcctcttg

SEQ ID NO: 64212 - DNA, 26 bp, Homo sapiens
gatggcgtcaataatctgcctcttgg

SEQ ID NO: 64213 - DNA, 26 bp, Homo sapiens
atggcgtcaataatctgcctcttggt

SEQ ID NO: 64214 - DNA, 26 bp, Homo sapiens
tggcgtcaataatctgcctcttggta

SEQ ID NO: 64215 - DNA, 26 bp, Homo sapiens
ggcgtcaataatctgcctcttggtag

SEQ ID NO: 64216 - DNA, 26 bp, Homo sapiens
gcgtcaataatctgcctcttggtaga

SEQ ID NO: 64217 - DNA, 26 bp, Homo sapiens
cgtcaataatctgcctcttggtagag

SEQ ID NO: 64218 - DNA, 26 bp, Homo sapiens
gtcaataatctgcctcttggtagaga

SEQ ID NO: 64219 - DNA, 26 bp, Homo sapiens
tcaataatctgcctcttggtagagaa

SEQ ID NO: 64220 - DNA, 26 bp, Homo sapiens
caataatctgcctcttggtagagaag

SEQ ID NO: 64221 - DNA, 26 bp, Homo sapiens
aataatctgcctcttggtagagaagt

SEQ ID NO: 64222 - DNA, 26 bp, Homo sapiens
ataatctgcctcttggtagagaagtc

SEQ ID NO: 64223 - DNA, 26 bp, Homo sapiens
taatctgcctcttggtagagaagtcc

SEQ ID NO: 64224 - DNA, 26 bp, Homo sapiens
aatctgcctcttggtagagaagtcct

SEQ ID NO: 64225 - DNA, 26 bp, Homo sapiens
atctgcctcttggtagagaagtcctt

SEQ ID NO: 64226 - DNA, 26 bp, Homo sapiens
tctgcctcttggtagagaagtccttc

SEQ ID NO: 64227 - DNA, 26 bp, Homo sapiens
ctgcctcttggtagagaagtccttca

SEQ ID NO: 64228 - DNA, 26 bp, Homo sapiens
tgcctcttggtagagaagtccttcag

SEQ ID NO: 64229 - DNA, 26 bp, Homo sapiens
gcctcttggtagagaagtccttcagg

SEQ ID NO: 64230 - DNA, 26 bp, Homo sapiens
cctcttggtagagaagtccttcagga

SEQ ID NO: 64231 - DNA, 26 bp, Homo sapiens
ctcttggtagagaagtccttcaggaa

SEQ ID NO: 64232 - DNA, 26 bp, Homo sapiens
tcttggtagagaagtccttcaggaag

SEQ ID NO: 64233 - DNA, 26 bp, Homo sapiens
cttggtagagaagtccttcaggaaga

SEQ ID NO: 64234 - DNA, 26 bp, Homo sapiens
ttggtagagaagtccttcaggaagaa

SEQ ID NO: 64235 - DNA, 26 bp, Homo sapiens
tggtagagaagtccttcaggaagaat

SEQ ID NO: 64236 - DNA, 26 bp, Homo sapiens
ggtagagaagtccttcaggaagaatt

SEQ ID NO: 64237 - DNA, 26 bp, Homo sapiens
gtagagaagtccttcaggaagaattc

SEQ ID NO: 64238 - DNA, 26 bp, Homo sapiens
tagagaagtccttcaggaagaattcg

SEQ ID NO: 64239 - DNA, 26 bp, Homo sapiens
agagaagtccttcaggaagaattcgt

SEQ ID NO: 64240 - DNA, 26 bp, Homo sapiens
gagaagtccttcaggaagaattcgtc

SEQ ID NO: 64241 - DNA, 26 bp, Homo sapiens
agaagtccttcaggaagaattcgtca

SEQ ID NO: 64242 - DNA, 26 bp, Homo sapiens
gaagtccttcaggaagaattcgtcag

SEQ ID NO: 64243 - DNA, 26 bp, Homo sapiens
aagtccttcaggaagaattcgtcagt

SEQ ID NO: 64244 - DNA, 26 bp, Homo sapiens
agtccttcaggaagaattcgtcagtg

SEQ ID NO: 64245 - DNA, 26 bp, Homo sapiens
gtccttcaggaagaattcgtcagtgg

SEQ ID NO: 64246 - DNA, 26 bp, Homo sapiens
tccttcaggaagaattcgtcagtggg

SEQ ID NO: 64247 - DNA, 26 bp, Homo sapiens
ccttcaggaagaattcgtcagtgggg

SEQ ID NO: 64248 - DNA, 26 bp, Homo sapiens
cttcaggaagaattcgtcagtggggt

SEQ ID NO: 64249 - DNA, 26 bp, Homo sapiens
ttcaggaagaattcgtcagtggggtc

SEQ ID NO: 64250 - DNA, 26 bp, Homo sapiens
tcaggaagaattcgtcagtggggtca

SEQ ID NO: 64251 - DNA, 26 bp, Homo sapiens
caggaagaattcgtcagtggggtcag

SEQ ID NO: 64252 - DNA, 26 bp, Homo sapiens
aggaagaattcgtcagtggggtcaga

SEQ ID NO: 64253 - DNA, 26 bp, Homo sapiens
ggaagaattcgtcagtggggtcagag

SEQ ID NO: 64254 - DNA, 26 bp, Homo sapiens
gaagaattcgtcagtggggtcagagt

SEQ ID NO: 64255 - DNA, 26 bp, Homo sapiens
aagaattcgtcagtggggtcagagtt

SEQ ID NO: 64256 - DNA, 26 bp, Homo sapiens
agaattcgtcagtggggtcagagttg

SEQ ID NO: 64257 - DNA, 26 bp, Homo sapiens
gaattcgtcagtggggtcagagttgt

SEQ ID NO: 64258 - DNA, 26 bp, Homo sapiens
aattcgtcagtggggtcagagttgta

SEQ ID NO: 64259 - DNA, 26 bp, Homo sapiens
attcgtcagtggggtcagagttgtac

SEQ ID NO: 64260 - DNA, 26 bp, Homo sapiens
ttcgtcagtggggtcagagttgtact

SEQ ID NO: 64261 - DNA, 26 bp, Homo sapiens
tcgtcagtggggtcagagttgtactg

SEQ ID NO: 64262 - DNA, 26 bp, Homo sapiens
cgtcagtggggtcagagttgtactgg

SEQ ID NO: 64263 - DNA, 26 bp, Homo sapiens
gtcagtggggtcagagttgtactgga

SEQ ID NO: 64264 - DNA, 26 bp, Homo sapiens
tcagtggggtcagagttgtactggac

SEQ ID NO: 64265 - DNA, 26 bp, Homo sapiens
cagtggggtcagagttgtactggaca

SEQ ID NO: 64266 - DNA, 26 bp, Homo sapiens
agtggggtcagagttgtactggacaa

SEQ ID NO: 64267 - DNA, 26 bp, Homo sapiens
gtggggtcagagttgtactggacaag

SEQ ID NO: 64268 - DNA, 26 bp, Homo sapiens
tggggtcagagttgtactggacaagc

SEQ ID NO: 64269 - DNA, 26 bp, Homo sapiens
ggggtcagagttgtactggacaagcc

SEQ ID NO: 64270 - DNA, 26 bp, Homo sapiens
gggtcagagttgtactggacaagccc

SEQ ID NO: 64271 - DNA, 26 bp, Homo sapiens
ggtcagagttgtactggacaagcccc

SEQ ID NO: 64272 - DNA, 26 bp, Homo sapiens
gtcagagttgtactggacaagcccca

SEQ ID NO: 64273 - DNA, 26 bp, Homo sapiens
tcagagttgtactggacaagccccac

SEQ ID NO: 64274 - DNA, 26 bp, Homo sapiens
cagagttgtactggacaagccccact

SEQ ID NO: 64275 - DNA, 26 bp, Homo sapiens
agagttgtactggacaagccccactt

SEQ ID NO: 64276 - DNA, 26 bp, Homo sapiens
gagttgtactggacaagccccacttg

SEQ ID NO: 64277 - DNA, 26 bp, Homo sapiens
agttgtactggacaagccccacttgg

SEQ ID NO: 64278 - DNA, 26 bp, Homo sapiens
gttgtactggacaagccccacttgga

SEQ ID NO: 64279 - DNA, 26 bp, Homo sapiens
ttgtactggacaagccccacttggat

SEQ ID NO: 64280 - DNA, 26 bp, Homo sapiens
tgtactggacaagccccacttggatg

SEQ ID NO: 64281 - DNA, 26 bp, Homo sapiens
gtactggacaagccccacttggatgg

SEQ ID NO: 64282 - DNA, 26 bp, Homo sapiens
tactggacaagccccacttggatgga

SEQ ID NO: 64283 - DNA, 26 bp, Homo sapiens
actggacaagccccacttggatggag

SEQ ID NO: 64284 - DNA, 26 bp, Homo sapiens
ctggacaagccccacttggatggagt

SEQ ID NO: 64285 - DNA, 26 bp, Homo sapiens
tggacaagccccacttggatggagtc

SEQ ID NO: 64286 - DNA, 26 bp, Homo sapiens
ggacaagccccacttggatggagtcg

SEQ ID NO: 64287 - DNA, 26 bp, Homo sapiens
gacaagccccacttggatggagtcgc

SEQ ID NO: 64288 - DNA, 26 bp, Homo sapiens
acaagccccacttggatggagtcgcc

SEQ ID NO: 64289 - DNA, 26 bp, Homo sapiens
caagccccacttggatggagtcgcca

SEQ ID NO: 64290 - DNA, 26 bp, Homo sapiens
aagccccacttggatggagtcgccat

SEQ ID NO: 64291 - DNA, 26 bp, Homo sapiens
agccccacttggatggagtcgccatc

SEQ ID NO: 64292 - DNA, 26 bp, Homo sapiens
gccccacttggatggagtcgccatct

SEQ ID NO: 64293 - DNA, 26 bp, Homo sapiens
ccccacttggatggagtcgccatctt

SEQ ID NO: 64294 - DNA, 26 bp, Homo sapiens
cccacttggatggagtcgccatcttc

SEQ ID NO: 64295 - DNA, 26 bp, Homo sapiens
ccacttggatggagtcgccatcttca

SEQ ID NO: 64296 - DNA, 26 bp, Homo sapiens
cacttggatggagtcgccatcttcat

SEQ ID NO: 64297 - DNA, 26 bp, Homo sapiens
acttggatggagtcgccatcttcata

SEQ ID NO: 64298 - DNA, 26 bp, Homo sapiens
cttggatggagtcgccatcttcataa

SEQ ID NO: 64299 - DNA, 26 bp, Homo sapiens
ttggatggagtcgccatcttcataaa

SEQ ID NO: 64300 - DNA, 26 bp, Homo sapiens
tggatggagtcgccatcttcataaac

SEQ ID NO: 64301 - DNA, 26 bp, Homo sapiens
ggatggagtcgccatcttcataaact

SEQ ID NO: 64302 - DNA, 26 bp, Homo sapiens
gatggagtcgccatcttcataaactg

SEQ ID NO: 64303 - DNA, 26 bp, Homo sapiens
atggagtcgccatcttcataaactgt

SEQ ID NO: 64304 - DNA, 26 bp, Homo sapiens
tggagtcgccatcttcataaactgtg

SEQ ID NO: 64305 - DNA, 26 bp, Homo sapiens
ggagtcgccatcttcataaactgtgt

SEQ ID NO: 64306 - DNA, 26 bp, Homo sapiens
gagtcgccatcttcataaactgtgtc

SEQ ID NO: 64307 - DNA, 26 bp, Homo sapiens
agtcgccatcttcataaactgtgtcc

SEQ ID NO: 64308 - DNA, 26 bp, Homo sapiens
gtcgccatcttcataaactgtgtcca

SEQ ID NO: 64309 - DNA, 26 bp, Homo sapiens
tcgccatcttcataaactgtgtccac

SEQ ID NO: 64310 - DNA, 26 bp, Homo sapiens
cgccatcttcataaactgtgtccact

SEQ ID NO: 64311 - DNA, 26 bp, Homo sapiens
gccatcttcataaactgtgtccacta

SEQ ID NO: 64312 - DNA, 26 bp, Homo sapiens
ccatcttcataaactgtgtccactat

SEQ ID NO: 64313 - DNA, 26 bp, Homo sapiens
catcttcataaactgtgtccactatt

SEQ ID NO: 64314 - DNA, 26 bp, Homo sapiens
atcttcataaactgtgtccactattt

SEQ ID NO: 64315 - DNA, 26 bp, Homo sapiens
tcttcataaactgtgtccactatttc

SEQ ID NO: 64316 - DNA, 26 bp, Homo sapiens
cttcataaactgtgtccactatttca

SEQ ID NO: 64317 - DNA, 26 bp, Homo sapiens
ttcataaactgtgtccactatttcag

SEQ ID NO: 64318 - DNA, 26 bp, Homo sapiens
tcataaactgtgtccactatttcaga

SEQ ID NO: 64319 - DNA, 26 bp, Homo sapiens
cataaactgtgtccactatttcagac

SEQ ID NO: 64320 - DNA, 26 bp, Homo sapiens
ataaactgtgtccactatttcagaca

SEQ ID NO: 64321 - DNA, 26 bp, Homo sapiens
taaactgtgtccactatttcagacac

SEQ ID NO: 64322 - DNA, 26 bp, Homo sapiens
aaactgtgtccactatttcagacaca

SEQ ID NO: 64323 - DNA, 26 bp, Homo sapiens
aactgtgtccactatttcagacacaa

SEQ ID NO: 64324 - DNA, 26 bp, Homo sapiens
actgtgtccactatttcagacacaaa

SEQ ID NO: 64325 - DNA, 26 bp, Homo sapiens
ctgtgtccactatttcagacacaaaa

SEQ ID NO: 64326 - DNA, 26 bp, Homo sapiens
tgtgtccactatttcagacacaaaac

SEQ ID NO: 64327 - DNA, 26 bp, Homo sapiens
gtgtccactatttcagacacaaaacg

SEQ ID NO: 64328 - DNA, 26 bp, Homo sapiens
tgtccactatttcagacacaaaacga

SEQ ID NO: 64329 - DNA, 26 bp, Homo sapiens
gtccactatttcagacacaaaacgaa

SEQ ID NO: 64330 - DNA, 26 bp, Homo sapiens
tccactatttcagacacaaaacgaag

SEQ ID NO: 64331 - DNA, 26 bp, Homo sapiens
ccactatttcagacacaaaacgaagc

SEQ ID NO: 64332 - DNA, 26 bp, Homo sapiens
cactatttcagacacaaaacgaagca

SEQ ID NO: 64333 - DNA, 26 bp, Homo sapiens
actatttcagacacaaaacgaagcac

SEQ ID NO: 64334 - DNA, 26 bp, Homo sapiens
ctatttcagacacaaaacgaagcact

SEQ ID NO: 64335 - DNA, 26 bp, Homo sapiens
tatttcagacacaaaacgaagcactt

SEQ ID NO: 64336 - DNA, 26 bp, Homo sapiens
atttcagacacaaaacgaagcacttc

SEQ ID NO: 64337 - DNA, 26 bp, Homo sapiens
tttcagacacaaaacgaagcacttcc

SEQ ID NO: 64338 - DNA, 26 bp, Homo sapiens
ttcagacacaaaacgaagcacttcct

SEQ ID NO: 64339 - DNA, 26 bp, Homo sapiens
tcagacacaaaacgaagcacttcctg

SEQ ID NO: 64340 - DNA, 26 bp, Homo sapiens
cagacacaaaacgaagcacttcctgg

SEQ ID NO: 64341 - DNA, 26 bp, Homo sapiens
agacacaaaacgaagcacttcctgga

SEQ ID NO: 64342 - DNA, 26 bp, Homo sapiens
gacacaaaacgaagcacttcctggaa

SEQ ID NO: 64343 - DNA, 26 bp, Homo sapiens
acacaaaacgaagcacttcctggaaa

SEQ ID NO: 64344 - DNA, 26 bp, Homo sapiens
cacaaaacgaagcacttcctggaaac

SEQ ID NO: 64345 - DNA, 26 bp, Homo sapiens
acaaaacgaagcacttcctggaaact

SEQ ID NO: 64346 - DNA, 26 bp, Homo sapiens
caaaacgaagcacttcctggaaactg

SEQ ID NO: 64347 - DNA, 26 bp, Homo sapiens
aaaacgaagcacttcctggaaactgt

SEQ ID NO: 64348 - DNA, 26 bp, Homo sapiens
aaacgaagcacttcctggaaactgtc

SEQ ID NO: 64349 - DNA, 26 bp, Homo sapiens
aacgaagcacttcctggaaactgtcc

SEQ ID NO: 64350 - DNA, 26 bp, Homo sapiens
acgaagcacttcctggaaactgtccc

SEQ ID NO: 64351 - DNA, 26 bp, Homo sapiens
cgaagcacttcctggaaactgtccct

SEQ ID NO: 64352 - DNA, 26 bp, Homo sapiens
gaagcacttcctggaaactgtccctc

SEQ ID NO: 64353 - DNA, 26 bp, Homo sapiens
aagcacttcctggaaactgtccctcc

SEQ ID NO: 64354 - DNA, 26 bp, Homo sapiens
agcacttcctggaaactgtccctcct

SEQ ID NO: 64355 - DNA, 26 bp, Homo sapiens
gcacttcctggaaactgtccctcctg

SEQ ID NO: 64356 - DNA, 26 bp, Homo sapiens
cacttcctggaaactgtccctcctga

SEQ ID NO: 64357 - DNA, 26 bp, Homo sapiens
acttcctggaaactgtccctcctgaa

SEQ ID NO: 64358 - DNA, 26 bp, Homo sapiens
cttcctggaaactgtccctcctgaag

SEQ ID NO: 64359 - DNA, 26 bp, Homo sapiens
ttcctggaaactgtccctcctgaagt

SEQ ID NO: 64360 - DNA, 26 bp, Homo sapiens
tcctggaaactgtccctcctgaagtt

SEQ ID NO: 64361 - DNA, 26 bp, Homo sapiens
cctggaaactgtccctcctgaagttg

SEQ ID NO: 64362 - DNA, 26 bp, Homo sapiens
ctggaaactgtccctcctgaagttga

SEQ ID NO: 64363 - DNA, 26 bp, Homo sapiens
tggaaactgtccctcctgaagttgat

SEQ ID NO: 64364 - DNA, 26 bp, Homo sapiens
ggaaactgtccctcctgaagttgatg

SEQ ID NO: 64365 - DNA, 26 bp, Homo sapiens
gaaactgtccctcctgaagttgatgg

SEQ ID NO: 64366 - DNA, 26 bp, Homo sapiens
aaactgtccctcctgaagttgatgga

SEQ ID NO: 64367 - DNA, 26 bp, Homo sapiens
aactgtccctcctgaagttgatggaa

SEQ ID NO: 64368 - DNA, 26 bp, Homo sapiens
actgtccctcctgaagttgatggaac

SEQ ID NO: 64369 - DNA, 26 bp, Homo sapiens
ctgtccctcctgaagttgatggaacc

SEQ ID NO: 64370 - DNA, 26 bp, Homo sapiens
tgtccctcctgaagttgatggaacca

SEQ ID NO: 64371 - DNA, 26 bp, Homo sapiens
gtccctcctgaagttgatggaaccat

SEQ ID NO: 64372 - DNA, 26 bp, Homo sapiens
tccctcctgaagttgatggaaccatc

SEQ ID NO: 64373 - DNA, 26 bp, Homo sapiens
ccctcctgaagttgatggaaccatcc

SEQ ID NO: 64374 - DNA, 26 bp, Homo sapiens
cctcctgaagttgatggaaccatcca

SEQ ID NO: 64375 - DNA, 26 bp, Homo sapiens
ctcctgaagttgatggaaccatccaa

SEQ ID NO: 64376 - DNA, 26 bp, Homo sapiens
tcctgaagttgatggaaccatccaac

SEQ ID NO: 64377 - DNA, 26 bp, Homo sapiens
cctgaagttgatggaaccatccaaca

SEQ ID NO: 64378 - DNA, 26 bp, Homo sapiens
ctgaagttgatggaaccatccaacag

SEQ ID NO: 64379 - DNA, 26 bp, Homo sapiens
tgaagttgatggaaccatccaacagg

SEQ ID NO: 64380 - DNA, 26 bp, Homo sapiens
gaagttgatggaaccatccaacagga

SEQ ID NO: 64381 - DNA, 26 bp, Homo sapiens
aagttgatggaaccatccaacaggaa

SEQ ID NO: 64382 - DNA, 26 bp, Homo sapiens
agttgatggaaccatccaacaggaac

SEQ ID NO: 64383 - DNA, 26 bp, Homo sapiens
gttgatggaaccatccaacaggaaca

SEQ ID NO: 64384 - DNA, 26 bp, Homo sapiens
ttgatggaaccatccaacaggaacac

SEQ ID NO: 64385 - DNA, 26 bp, Homo sapiens
tgatggaaccatccaacaggaacaca

SEQ ID NO: 64386 - DNA, 26 bp, Homo sapiens
gatggaaccatccaacaggaacacaa

SEQ ID NO: 64387 - DNA, 26 bp, Homo sapiens
atggaaccatccaacaggaacacaat

SEQ ID NO: 64388 - DNA, 26 bp, Homo sapiens
tggaaccatccaacaggaacacaatg

SEQ ID NO: 64389 - DNA, 26 bp, Homo sapiens
ggaaccatccaacaggaacacaatgt

SEQ ID NO: 64390 - DNA, 26 bp, Homo sapiens
gaaccatccaacaggaacacaatgtc

SEQ ID NO: 64391 - DNA, 26 bp, Homo sapiens
aaccatccaacaggaacacaatgtct

SEQ ID NO: 64392 - DNA, 26 bp, Homo sapiens
accatccaacaggaacacaatgtctg

SEQ ID NO: 64393 - DNA, 26 bp, Homo sapiens
ccatccaacaggaacacaatgtctgc

SEQ ID NO: 64394 - DNA, 26 bp, Homo sapiens
catccaacaggaacacaatgtctgct

SEQ ID NO: 64395 - DNA, 26 bp, Homo sapiens
atccaacaggaacacaatgtctgctt

SEQ ID NO: 64396 - DNA, 26 bp, Homo sapiens
tccaacaggaacacaatgtctgcttt

SEQ ID NO: 64397 - DNA, 26 bp, Homo sapiens
ccaacaggaacacaatgtctgctttc

SEQ ID NO: 64398 - DNA, 26 bp, Homo sapiens
caacaggaacacaatgtctgctttct

SEQ ID NO: 64399 - DNA, 26 bp, Homo sapiens
aacaggaacacaatgtctgctttctt

SEQ ID NO: 64400 - DNA, 26 bp, Homo sapiens
acaggaacacaatgtctgctttcttc

SEQ ID NO: 64401 - DNA, 26 bp, Homo sapiens
caggaacacaatgtctgctttcttct

SEQ ID NO: 64402 - DNA, 26 bp, Homo sapiens
aggaacacaatgtctgctttcttctt

SEQ ID NO: 64403 - DNA, 26 bp, Homo sapiens
ggaacacaatgtctgctttcttcttc

SEQ ID NO: 64404 - DNA, 26 bp, Homo sapiens
gaacacaatgtctgctttcttcttct

SEQ ID NO: 64405 - DNA, 26 bp, Homo sapiens
aacacaatgtctgctttcttcttctc

SEQ ID NO: 64406 - DNA, 26 bp, Homo sapiens
acacaatgtctgctttcttcttctct

SEQ ID NO: 64407 - DNA, 26 bp, Homo sapiens
cacaatgtctgctttcttcttctctg

SEQ ID NO: 64408 - DNA, 26 bp, Homo sapiens
acaatgtctgctttcttcttctctgg

SEQ ID NO: 64409 - DNA, 26 bp, Homo sapiens
caatgtctgctttcttcttctctggc

SEQ ID NO: 64410 - DNA, 26 bp, Homo sapiens
aatgtctgctttcttcttctctggcc

SEQ ID NO: 64411 - DNA, 26 bp, Homo sapiens
atgtctgctttcttcttctctggccg

SEQ ID NO: 64412 - DNA, 26 bp, Homo sapiens
tgtctgctttcttcttctctggccgt

SEQ ID NO: 64413 - DNA, 26 bp, Homo sapiens
gtctgctttcttcttctctggccgtg

SEQ ID NO: 64414 - DNA, 26 bp, Homo sapiens
tctgctttcttcttctctggccgtga

SEQ ID NO: 64415 - DNA, 26 bp, Homo sapiens
ctgctttcttcttctctggccgtgaa

SEQ ID NO: 64416 - DNA, 26 bp, Homo sapiens
tgctttcttcttctctggccgtgaag

SEQ ID NO: 64417 - DNA, 26 bp, Homo sapiens
gctttcttcttctctggccgtgaagg

SEQ ID NO: 64418 - DNA, 26 bp, Homo sapiens
ctttcttcttctctggccgtgaagga

SEQ ID NO: 64419 - DNA, 26 bp, Homo sapiens
tttcttcttctctggccgtgaaggag

SEQ ID NO: 64420 - DNA, 26 bp, Homo sapiens
ttcttcttctctggccgtgaaggagg

SEQ ID NO: 64421 - DNA, 26 bp, Homo sapiens
tcttcttctctggccgtgaaggagga

SEQ ID NO: 64422 - DNA, 26 bp, Homo sapiens
cttcttctctggccgtgaaggaggag

SEQ ID NO: 64423 - DNA, 26 bp, Homo sapiens
ttcttctctggccgtgaaggaggagg

SEQ ID NO: 64424 - DNA, 26 bp, Homo sapiens
tcttctctggccgtgaaggaggaggg

SEQ ID NO: 64425 - DNA, 26 bp, Homo sapiens
cttctctggccgtgaaggaggagggg

SEQ ID NO: 64426 - DNA, 26 bp, Homo sapiens
ttctctggccgtgaaggaggaggggt

SEQ ID NO: 64427 - DNA, 26 bp, Homo sapiens
tctctggccgtgaaggaggaggggtg

SEQ ID NO: 64428 - DNA, 26 bp, Homo sapiens
ctctggccgtgaaggaggaggggtgt

SEQ ID NO: 64429 - DNA, 26 bp, Homo sapiens
tctggccgtgaaggaggaggggtgtc

SEQ ID NO: 64430 - DNA, 26 bp, Homo sapiens
ctggccgtgaaggaggaggggtgtcc

SEQ ID NO: 64431 - DNA, 26 bp, Homo sapiens
tggccgtgaaggaggaggggtgtcca

SEQ ID NO: 64432 - DNA, 26 bp, Homo sapiens
ggccgtgaaggaggaggggtgtccac

SEQ ID NO: 64433 - DNA, 26 bp, Homo sapiens
gccgtgaaggaggaggggtgtccacc

SEQ ID NO: 64434 - DNA, 26 bp, Homo sapiens
ccgtgaaggaggaggggtgtccaccc

SEQ ID NO: 64435 - DNA, 26 bp, Homo sapiens
cgtgaaggaggaggggtgtccacccc

SEQ ID NO: 64436 - DNA, 26 bp, Homo sapiens
gtgaaggaggaggggtgtccacccct

SEQ ID NO: 64437 - DNA, 26 bp, Homo sapiens
tgaaggaggaggggtgtccacccctg

SEQ ID NO: 64438 - DNA, 26 bp, Homo sapiens
gaaggaggaggggtgtccacccctgg

SEQ ID NO: 64439 - DNA, 26 bp, Homo sapiens
aaggaggaggggtgtccacccctgga

SEQ ID NO: 64440 - DNA, 26 bp, Homo sapiens
aggaggaggggtgtccacccctggag

SEQ ID NO: 64441 - DNA, 26 bp, Homo sapiens
ggaggaggggtgtccacccctggagg

SEQ ID NO: 64442 - DNA, 26 bp, Homo sapiens
gaggaggggtgtccacccctggaggt

SEQ ID NO: 64443 - DNA, 26 bp, Homo sapiens
aggaggggtgtccacccctggaggtg

SEQ ID NO: 64444 - DNA, 26 bp, Homo sapiens
ggaggggtgtccacccctggaggtgc

SEQ ID NO: 64445 - DNA, 26 bp, Homo sapiens
gaggggtgtccacccctggaggtgca

SEQ ID NO: 64446 - DNA, 26 bp, Homo sapiens
aggggtgtccacccctggaggtgcag

SEQ ID NO: 64447 - DNA, 26 bp, Homo sapiens
ggggtgtccacccctggaggtgcagg

SEQ ID NO: 64448 - DNA, 26 bp, Homo sapiens
gggtgtccacccctggaggtgcagga

SEQ ID NO: 64449 - DNA, 26 bp, Homo sapiens
ggtgtccacccctggaggtgcaggag

SEQ ID NO: 64450 - DNA, 26 bp, Homo sapiens
gtgtccacccctggaggtgcaggagt

SEQ ID NO: 64451 - DNA, 26 bp, Homo sapiens
tgtccacccctggaggtgcaggagtg

SEQ ID NO: 64452 - DNA, 26 bp, Homo sapiens
gtccacccctggaggtgcaggagtgg

SEQ ID NO: 64453 - DNA, 26 bp, Homo sapiens
tccacccctggaggtgcaggagtggc

SEQ ID NO: 64454 - DNA, 26 bp, Homo sapiens
ccacccctggaggtgcaggagtggct

SEQ ID NO: 64455 - DNA, 26 bp, Homo sapiens
cacccctggaggtgcaggagtggctg

SEQ ID NO: 64456 - DNA, 26 bp, Homo sapiens
acccctggaggtgcaggagtggctgc

SEQ ID NO: 64457 - DNA, 26 bp, Homo sapiens
cccctggaggtgcaggagtggctgcg

SEQ ID NO: 64458 - DNA, 26 bp, Homo sapiens
ccctggaggtgcaggagtggctgcgg

SEQ ID NO: 64459 - DNA, 26 bp, Homo sapiens
cctggaggtgcaggagtggctgcgga

SEQ ID NO: 64460 - DNA, 26 bp, Homo sapiens
ctggaggtgcaggagtggctgcggag

SEQ ID NO: 64461 - DNA, 26 bp, Homo sapiens
tggaggtgcaggagtggctgcggagg

SEQ ID NO: 64462 - DNA, 26 bp, Homo sapiens
ggaggtgcaggagtggctgcggaggg

SEQ ID NO: 64463 - DNA, 26 bp, Homo sapiens
gaggtgcaggagtggctgcggagggt

SEQ ID NO: 64464 - DNA, 26 bp, Homo sapiens
aggtgcaggagtggctgcggagggtc

SEQ ID NO: 64465 - DNA, 26 bp, Homo sapiens
ggtgcaggagtggctgcggagggtcc

SEQ ID NO: 64466 - DNA, 26 bp, Homo sapiens
gtgcaggagtggctgcggagggtcca

SEQ ID NO: 64467 - DNA, 26 bp, Homo sapiens
tgcaggagtggctgcggagggtccaa

SEQ ID NO: 64468 - DNA, 26 bp, Homo sapiens
gcaggagtggctgcggagggtccaaa

SEQ ID NO: 64469 - DNA, 26 bp, Homo sapiens
caggagtggctgcggagggtccaaac

SEQ ID NO: 64470 - DNA, 26 bp, Homo sapiens
aggagtggctgcggagggtccaaacg

SEQ ID NO: 64471 - DNA, 26 bp, Homo sapiens
ggagtggctgcggagggtccaaacga

SEQ ID NO: 64472 - DNA, 26 bp, Homo sapiens
gagtggctgcggagggtccaaacgag

SEQ ID NO: 64473 - DNA, 26 bp, Homo sapiens
agtggctgcggagggtccaaacgagt

SEQ ID NO: 64474 - DNA, 26 bp, Homo sapiens
gtggctgcggagggtccaaacgagtt

SEQ ID NO: 64475 - DNA, 26 bp, Homo sapiens
tggctgcggagggtccaaacgagttc

SEQ ID NO: 64476 - DNA, 26 bp, Homo sapiens
ggctgcggagggtccaaacgagttca

SEQ ID NO: 64477 - DNA, 26 bp, Homo sapiens
gctgcggagggtccaaacgagttcat

SEQ ID NO: 64478 - DNA, 26 bp, Homo sapiens
ctgcggagggtccaaacgagttcatg

SEQ ID NO: 64479 - DNA, 26 bp, Homo sapiens
tgcggagggtccaaacgagttcatga

SEQ ID NO: 64480 - DNA, 26 bp, Homo sapiens
gcggagggtccaaacgagttcatgat

SEQ ID NO: 64481 - DNA, 26 bp, Homo sapiens
cggagggtccaaacgagttcatgatt

SEQ ID NO: 64482 - DNA, 26 bp, Homo sapiens
ggagggtccaaacgagttcatgattc

SEQ ID NO: 64483 - DNA, 26 bp, Homo sapiens
gagggtccaaacgagttcatgattct

SEQ ID NO: 64484 - DNA, 26 bp, Homo sapiens
agggtccaaacgagttcatgattctt

SEQ ID NO: 64485 - DNA, 26 bp, Homo sapiens
gggtccaaacgagttcatgattcttt

SEQ ID NO: 64486 - DNA, 26 bp, Homo sapiens
ggtccaaacgagttcatgattctttc

SEQ ID NO: 64487 - DNA, 26 bp, Homo sapiens
gtccaaacgagttcatgattctttct

SEQ ID NO: 64488 - DNA, 26 bp, Homo sapiens
tccaaacgagttcatgattctttctt

SEQ ID NO: 64489 - DNA, 26 bp, Homo sapiens
ccaaacgagttcatgattctttcttc

SEQ ID NO: 64490 - DNA, 26 bp, Homo sapiens
caaacgagttcatgattctttcttct

SEQ ID NO: 64491 - DNA, 26 bp, Homo sapiens
aaacgagttcatgattctttcttcta

SEQ ID NO: 64492 - DNA, 26 bp, Homo sapiens
aacgagttcatgattctttcttctat

SEQ ID NO: 64493 - DNA, 26 bp, Homo sapiens
acgagttcatgattctttcttctatg

SEQ ID NO: 64494 - DNA, 26 bp, Homo sapiens
cgagttcatgattctttcttctatgt

SEQ ID NO: 64495 - DNA, 26 bp, Homo sapiens
gagttcatgattctttcttctatgtt

SEQ ID NO: 64496 - DNA, 26 bp, Homo sapiens
agttcatgattctttcttctatgttg

SEQ ID NO: 64497 - DNA, 26 bp, Homo sapiens
gttcatgattctttcttctatgttgg

SEQ ID NO: 64498 - DNA, 26 bp, Homo sapiens
ttcatgattctttcttctatgttggg

SEQ ID NO: 64499 - DNA, 26 bp, Homo sapiens
tcatgattctttcttctatgttggga

SEQ ID NO: 64500 - DNA, 26 bp, Homo sapiens
catgattctttcttctatgttgggaa

SEQ ID NO: 64501 - DNA, 26 bp, Homo sapiens
atgattctttcttctatgttgggaag

SEQ ID NO: 64502 - DNA, 26 bp, Homo sapiens
tgattctttcttctatgttgggaagc

SEQ ID NO: 64503 - DNA, 26 bp, Homo sapiens
gattctttcttctatgttgggaagct

SEQ ID NO: 64504 - DNA, 26 bp, Homo sapiens
attctttcttctatgttgggaagctc

SEQ ID NO: 64505 - DNA, 26 bp, Homo sapiens
ttctttcttctatgttgggaagctct

SEQ ID NO: 64506 - DNA, 26 bp, Homo sapiens
tctttcttctatgttgggaagctctc

SEQ ID NO: 64507 - DNA, 26 bp, Homo sapiens
ctttcttctatgttgggaagctctct

SEQ ID NO: 64508 - DNA, 26 bp, Homo sapiens
tttcttctatgttgggaagctctctg

SEQ ID NO: 64509 - DNA, 26 bp, Homo sapiens
ttcttctatgttgggaagctctctga

SEQ ID NO: 64510 - DNA, 26 bp, Homo sapiens
tcttctatgttgggaagctctctgaa

SEQ ID NO: 64511 - DNA, 26 bp, Homo sapiens
cttctatgttgggaagctctctgaac

SEQ ID NO: 64512 - DNA, 26 bp, Homo sapiens
ttctatgttgggaagctctctgaact

SEQ ID NO: 64513 - DNA, 26 bp, Homo sapiens
tctatgttgggaagctctctgaactc

SEQ ID NO: 64514 - DNA, 26 bp, Homo sapiens
ctatgttgggaagctctctgaactct

SEQ ID NO: 64515 - DNA, 26 bp, Homo sapiens
tatgttgggaagctctctgaactctc

SEQ ID NO: 64516 - DNA, 26 bp, Homo sapiens
atgttgggaagctctctgaactctcg

SEQ ID NO: 64517 - DNA, 26 bp, Homo sapiens
tgttgggaagctctctgaactctcgc

SEQ ID NO: 64518 - DNA, 26 bp, Homo sapiens
gttgggaagctctctgaactctcgca

SEQ ID NO: 64519 - DNA, 26 bp, Homo sapiens
ttgggaagctctctgaactctcgcac

SEQ ID NO: 64520 - DNA, 26 bp, Homo sapiens
tgggaagctctctgaactctcgcact

SEQ ID NO: 64521 - DNA, 26 bp, Homo sapiens
gggaagctctctgaactctcgcactg

SEQ ID NO: 64522 - DNA, 26 bp, Homo sapiens
ggaagctctctgaactctcgcactgt

SEQ ID NO: 64523 - DNA, 26 bp, Homo sapiens
gaagctctctgaactctcgcactgtg

SEQ ID NO: 64524 - DNA, 26 bp, Homo sapiens
aagctctctgaactctcgcactgtga

SEQ ID NO: 64525 - DNA, 26 bp, Homo sapiens
agctctctgaactctcgcactgtgaa

SEQ ID NO: 64526 - DNA, 26 bp, Homo sapiens
gctctctgaactctcgcactgtgaag

SEQ ID NO: 64527 - DNA, 26 bp, Homo sapiens
ctctctgaactctcgcactgtgaaga

SEQ ID NO: 64528 - DNA, 26 bp, Homo sapiens
tctctgaactctcgcactgtgaagac

SEQ ID NO: 64529 - DNA, 26 bp, Homo sapiens
ctctgaactctcgcactgtgaagacc

SEQ ID NO: 64530 - DNA, 26 bp, Homo sapiens
tctgaactctcgcactgtgaagacca

SEQ ID NO: 64531 - DNA, 26 bp, Homo sapiens
ctgaactctcgcactgtgaagaccag

SEQ ID NO: 64532 - DNA, 26 bp, Homo sapiens
tgaactctcgcactgtgaagaccagt

SEQ ID NO: 64533 - DNA, 26 bp, Homo sapiens
gaactctcgcactgtgaagaccagtc

SEQ ID NO: 64534 - DNA, 26 bp, Homo sapiens
aactctcgcactgtgaagaccagtct

SEQ ID NO: 64535 - DNA, 26 bp, Homo sapiens
actctcgcactgtgaagaccagtctg

SEQ ID NO: 64536 - DNA, 26 bp, Homo sapiens
ctctcgcactgtgaagaccagtctgg

SEQ ID NO: 64537 - DNA, 26 bp, Homo sapiens
tctcgcactgtgaagaccagtctggg

SEQ ID NO: 64538 - DNA, 26 bp, Homo sapiens
ctcgcactgtgaagaccagtctgggg

SEQ ID NO: 64539 - DNA, 26 bp, Homo sapiens
tcgcactgtgaagaccagtctggggt

SEQ ID NO: 64540 - DNA, 26 bp, Homo sapiens
cgcactgtgaagaccagtctggggtc

SEQ ID NO: 64541 - DNA, 26 bp, Homo sapiens
gcactgtgaagaccagtctggggtca

SEQ ID NO: 64542 - DNA, 26 bp, Homo sapiens
cactgtgaagaccagtctggggtcat

SEQ ID NO: 64543 - DNA, 26 bp, Homo sapiens
actgtgaagaccagtctggggtcatt

SEQ ID NO: 64544 - DNA, 26 bp, Homo sapiens
ctgtgaagaccagtctggggtcattg

SEQ ID NO: 64545 - DNA, 26 bp, Homo sapiens
tgtgaagaccagtctggggtcattgg

SEQ ID NO: 64546 - DNA, 26 bp, Homo sapiens
gtgaagaccagtctggggtcattggt

SEQ ID NO: 64547 - DNA, 26 bp, Homo sapiens
tgaagaccagtctggggtcattggtg

SEQ ID NO: 64548 - DNA, 26 bp, Homo sapiens
gaagaccagtctggggtcattggtga

SEQ ID NO: 64549 - DNA, 26 bp, Homo sapiens
aagaccagtctggggtcattggtgat

SEQ ID NO: 64550 - DNA, 26 bp, Homo sapiens
agaccagtctggggtcattggtgatg

SEQ ID NO: 64551 - DNA, 26 bp, Homo sapiens
gaccagtctggggtcattggtgatgg

SEQ ID NO: 64552 - DNA, 26 bp, Homo sapiens
accagtctggggtcattggtgatggt

SEQ ID NO: 64553 - DNA, 26 bp, Homo sapiens
ccagtctggggtcattggtgatggtc

SEQ ID NO: 64554 - DNA, 26 bp, Homo sapiens
cagtctggggtcattggtgatggtct

SEQ ID NO: 64555 - DNA, 26 bp, Homo sapiens
agtctggggtcattggtgatggtctg

SEQ ID NO: 64556 - DNA, 26 bp, Homo sapiens
gtctggggtcattggtgatggtctgc

SEQ ID NO: 64557 - DNA, 26 bp, Homo sapiens
tctggggtcattggtgatggtctgca

SEQ ID NO: 64558 - DNA, 26 bp, Homo sapiens
ctggggtcattggtgatggtctgcag

SEQ ID NO: 64559 - DNA, 26 bp, Homo sapiens
tggggtcattggtgatggtctgcagc

SEQ ID NO: 64560 - DNA, 26 bp, Homo sapiens
ggggtcattggtgatggtctgcagct

SEQ ID NO: 64561 - DNA, 26 bp, Homo sapiens
gggtcattggtgatggtctgcagctc

SEQ ID NO: 64562 - DNA, 26 bp, Homo sapiens
ggtcattggtgatggtctgcagctct

SEQ ID NO: 64563 - DNA, 26 bp, Homo sapiens
gtcattggtgatggtctgcagctctg

SEQ ID NO: 64564 - DNA, 26 bp, Homo sapiens
tcattggtgatggtctgcagctctgt

SEQ ID NO: 64565 - DNA, 26 bp, Homo sapiens
cattggtgatggtctgcagctctgtt

SEQ ID NO: 64566 - DNA, 26 bp, Homo sapiens
attggtgatggtctgcagctctgttc

SEQ ID NO: 64567 - DNA, 26 bp, Homo sapiens
ttggtgatggtctgcagctctgttct

SEQ ID NO: 64568 - DNA, 26 bp, Homo sapiens
tggtgatggtctgcagctctgttctg

SEQ ID NO: 64569 - DNA, 26 bp, Homo sapiens
ggtgatggtctgcagctctgttctgt

SEQ ID NO: 64570 - DNA, 26 bp, Homo sapiens
gtgatggtctgcagctctgttctgtc

SEQ ID NO: 64571 - DNA, 26 bp, Homo sapiens
tgatggtctgcagctctgttctgtcg

SEQ ID NO: 64572 - DNA, 26 bp, Homo sapiens
gatggtctgcagctctgttctgtcga

SEQ ID NO: 64573 - DNA, 26 bp, Homo sapiens
atggtctgcagctctgttctgtcgat

SEQ ID NO: 64574 - DNA, 26 bp, Homo sapiens
tggtctgcagctctgttctgtcgatg

SEQ ID NO: 64575 - DNA, 26 bp, Homo sapiens
ggtctgcagctctgttctgtcgatgt

SEQ ID NO: 64576 - DNA, 26 bp, Homo sapiens
gtctgcagctctgttctgtcgatgtt

SEQ ID NO: 64577 - DNA, 26 bp, Homo sapiens
tctgcagctctgttctgtcgatgttc

SEQ ID NO: 64578 - DNA, 26 bp, Homo sapiens
ctgcagctctgttctgtcgatgttcc

SEQ ID NO: 64579 - DNA, 26 bp, Homo sapiens
tgcagctctgttctgtcgatgttccg

SEQ ID NO: 64580 - DNA, 26 bp, Homo sapiens
gcagctctgttctgtcgatgttccgg

SEQ ID NO: 64581 - DNA, 26 bp, Homo sapiens
cagctctgttctgtcgatgttccggt

SEQ ID NO: 64582 - DNA, 26 bp, Homo sapiens
agctctgttctgtcgatgttccggtc

SEQ ID NO: 64583 - DNA, 26 bp, Homo sapiens
gctctgttctgtcgatgttccggtct

SEQ ID NO: 64584 - DNA, 26 bp, Homo sapiens
ctctgttctgtcgatgttccggtctc

SEQ ID NO: 64585 - DNA, 26 bp, Homo sapiens
tctgttctgtcgatgttccggtctcc

SEQ ID NO: 64586 - DNA, 26 bp, Homo sapiens
ctgttctgtcgatgttccggtctcct

SEQ ID NO: 64587 - DNA, 26 bp, Homo sapiens
tgttctgtcgatgttccggtctccta

SEQ ID NO: 64588 - DNA, 26 bp, Homo sapiens
gttctgtcgatgttccggtctcctac

SEQ ID NO: 64589 - DNA, 26 bp, Homo sapiens
ttctgtcgatgttccggtctcctacc

SEQ ID NO: 64590 - DNA, 26 bp, Homo sapiens
tctgtcgatgttccggtctcctaccc

SEQ ID NO: 64591 - DNA, 26 bp, Homo sapiens
ctgtcgatgttccggtctcctacccc

SEQ ID NO: 64592 - DNA, 26 bp, Homo sapiens
tgtcgatgttccggtctcctacccct

SEQ ID NO: 64593 - DNA, 26 bp, Homo sapiens
gtcgatgttccggtctcctaccccta

SEQ ID NO: 64594 - DNA, 26 bp, Homo sapiens
tcgatgttccggtctcctacccctaa

SEQ ID NO: 64595 - DNA, 26 bp, Homo sapiens
cgatgttccggtctcctacccctaaa

SEQ ID NO: 64596 - DNA, 26 bp, Homo sapiens
gatgttccggtctcctacccctaaac

SEQ ID NO: 64597 - DNA, 26 bp, Homo sapiens
atgttccggtctcctacccctaaact

SEQ ID NO: 64598 - DNA, 26 bp, Homo sapiens
tgttccggtctcctacccctaaactc

SEQ ID NO: 64599 - DNA, 26 bp, Homo sapiens
gttccggtctcctacccctaaactca

SEQ ID NO: 64600 - DNA, 26 bp, Homo sapiens
ttccggtctcctacccctaaactcac

SEQ ID NO: 64601 - DNA, 26 bp, Homo sapiens
tccggtctcctacccctaaactcaca

SEQ ID NO: 64602 - DNA, 26 bp, Homo sapiens
ccggtctcctacccctaaactcacaa

SEQ ID NO: 64603 - DNA, 26 bp, Homo sapiens
cggtctcctacccctaaactcacaat

SEQ ID NO: 64604 - DNA, 26 bp, Homo sapiens
ggtctcctacccctaaactcacaatg

SEQ ID NO: 64605 - DNA, 26 bp, Homo sapiens
gtctcctacccctaaactcacaatgc

SEQ ID NO: 64606 - DNA, 26 bp, Homo sapiens
tctcctacccctaaactcacaatgcc

SEQ ID NO: 64607 - DNA, 26 bp, Homo sapiens
ctcctacccctaaactcacaatgccc

SEQ ID NO: 64608 - DNA, 26 bp, Homo sapiens
tcctacccctaaactcacaatgcccg

SEQ ID NO: 64609 - DNA, 26 bp, Homo sapiens
cctacccctaaactcacaatgcccga

SEQ ID NO: 64610 - DNA, 26 bp, Homo sapiens
ctacccctaaactcacaatgcccgag

SEQ ID NO: 64611 - DNA, 26 bp, Homo sapiens
tacccctaaactcacaatgcccgagg

SEQ ID NO: 64612 - DNA, 26 bp, Homo sapiens
acccctaaactcacaatgcccgagga

SEQ ID NO: 64613 - DNA, 26 bp, Homo sapiens
cccctaaactcacaatgcccgaggaa

SEQ ID NO: 64614 - DNA, 26 bp, Homo sapiens
ccctaaactcacaatgcccgaggaac

SEQ ID NO: 64615 - DNA, 26 bp, Homo sapiens
cctaaactcacaatgcccgaggaacg

SEQ ID NO: 64616 - DNA, 26 bp, Homo sapiens
ctaaactcacaatgcccgaggaacgg

SEQ ID NO: 64617 - DNA, 26 bp, Homo sapiens
taaactcacaatgcccgaggaacgga

SEQ ID NO: 64618 - DNA, 26 bp, Homo sapiens
aaactcacaatgcccgaggaacggat

SEQ ID NO: 64619 - DNA, 26 bp, Homo sapiens
aactcacaatgcccgaggaacggatc

SEQ ID NO: 64620 - DNA, 26 bp, Homo sapiens
actcacaatgcccgaggaacggatca

SEQ ID NO: 64621 - DNA, 26 bp, Homo sapiens
ctcacaatgcccgaggaacggatcac

SEQ ID NO: 64622 - DNA, 26 bp, Homo sapiens
tcacaatgcccgaggaacggatcacc

SEQ ID NO: 64623 - DNA, 26 bp, Homo sapiens
cacaatgcccgaggaacggatcacct

SEQ ID NO: 64624 - DNA, 26 bp, Homo sapiens
acaatgcccgaggaacggatcacctg

SEQ ID NO: 64625 - DNA, 26 bp, Homo sapiens
caatgcccgaggaacggatcacctgg

SEQ ID NO: 64626 - DNA, 26 bp, Homo sapiens
aatgcccgaggaacggatcacctggg

SEQ ID NO: 64627 - DNA, 26 bp, Homo sapiens
atgcccgaggaacggatcacctgggc

SEQ ID NO: 64628 - DNA, 26 bp, Homo sapiens
tgcccgaggaacggatcacctgggcg

SEQ ID NO: 64629 - DNA, 26 bp, Homo sapiens
gcccgaggaacggatcacctgggcga

SEQ ID NO: 64630 - DNA, 26 bp, Homo sapiens
cccgaggaacggatcacctgggcgaa

SEQ ID NO: 64631 - DNA, 26 bp, Homo sapiens
ccgaggaacggatcacctgggcgaac

SEQ ID NO: 64632 - DNA, 26 bp, Homo sapiens
cgaggaacggatcacctgggcgaacc

SEQ ID NO: 64633 - DNA, 26 bp, Homo sapiens
gaggaacggatcacctgggcgaacct

SEQ ID NO: 64634 - DNA, 26 bp, Homo sapiens
aggaacggatcacctgggcgaacctg

SEQ ID NO: 64635 - DNA, 26 bp, Homo sapiens
ggaacggatcacctgggcgaacctgg

SEQ ID NO: 64636 - DNA, 26 bp, Homo sapiens
gaacggatcacctgggcgaacctgga

SEQ ID NO: 64637 - DNA, 26 bp, Homo sapiens
aacggatcacctgggcgaacctggac

SEQ ID NO: 64638 - DNA, 26 bp, Homo sapiens
acggatcacctgggcgaacctggaca

SEQ ID NO: 64639 - DNA, 26 bp, Homo sapiens
cggatcacctgggcgaacctggacac

SEQ ID NO: 64640 - DNA, 26 bp, Homo sapiens
ggatcacctgggcgaacctggacaca

SEQ ID NO: 64641 - DNA, 26 bp, Homo sapiens
gatcacctgggcgaacctggacacat

SEQ ID NO: 64642 - DNA, 26 bp, Homo sapiens
atcacctgggcgaacctggacacatc

SEQ ID NO: 64643 - DNA, 26 bp, Homo sapiens
tcacctgggcgaacctggacacatcg

SEQ ID NO: 64644 - DNA, 26 bp, Homo sapiens
cacctgggcgaacctggacacatcgt

SEQ ID NO: 64645 - DNA, 26 bp, Homo sapiens
acctgggcgaacctggacacatcgtc

SEQ ID NO: 64646 - DNA, 26 bp, Homo sapiens
cctgggcgaacctggacacatcgtcc

SEQ ID NO: 64647 - DNA, 26 bp, Homo sapiens
ctgggcgaacctggacacatcgtcct

SEQ ID NO: 64648 - DNA, 26 bp, Homo sapiens
tgggcgaacctggacacatcgtcctg

SEQ ID NO: 64649 - DNA, 26 bp, Homo sapiens
gggcgaacctggacacatcgtcctgg

SEQ ID NO: 64650 - DNA, 26 bp, Homo sapiens
ggcgaacctggacacatcgtcctggg

SEQ ID NO: 64651 - DNA, 26 bp, Homo sapiens
gcgaacctggacacatcgtcctggga

SEQ ID NO: 64652 - DNA, 26 bp, Homo sapiens
cgaacctggacacatcgtcctgggat

SEQ ID NO: 64653 - DNA, 26 bp, Homo sapiens
gaacctggacacatcgtcctgggatt

SEQ ID NO: 64654 - DNA, 26 bp, Homo sapiens
aacctggacacatcgtcctgggattt

SEQ ID NO: 64655 - DNA, 26 bp, Homo sapiens
acctggacacatcgtcctgggatttt

SEQ ID NO: 64656 - DNA, 26 bp, Homo sapiens
cctggacacatcgtcctgggattttc

SEQ ID NO: 64657 - DNA, 26 bp, Homo sapiens
ctggacacatcgtcctgggattttcc

SEQ ID NO: 64658 - DNA, 26 bp, Homo sapiens
tggacacatcgtcctgggattttcca

SEQ ID NO: 64659 - DNA, 26 bp, Homo sapiens
ggacacatcgtcctgggattttccac

SEQ ID NO: 64660 - DNA, 26 bp, Homo sapiens
gacacatcgtcctgggattttccacc

SEQ ID NO: 64661 - DNA, 26 bp, Homo sapiens
acacatcgtcctgggattttccaccc

SEQ ID NO: 64662 - DNA, 26 bp, Homo sapiens
cacatcgtcctgggattttccaccca

SEQ ID NO: 64663 - DNA, 26 bp, Homo sapiens
acatcgtcctgggattttccacccag

SEQ ID NO: 64664 - DNA, 26 bp, Homo sapiens
catcgtcctgggattttccacccagg

SEQ ID NO: 64665 - DNA, 26 bp, Homo sapiens
atcgtcctgggattttccacccagga

SEQ ID NO: 64666 - DNA, 26 bp, Homo sapiens
tcgtcctgggattttccacccaggac

SEQ ID NO: 64667 - DNA, 26 bp, Homo sapiens
cgtcctgggattttccacccaggacc

SEQ ID NO: 64668 - DNA, 26 bp, Homo sapiens
gtcctgggattttccacccaggacca

SEQ ID NO: 64669 - DNA, 26 bp, Homo sapiens
tcctgggattttccacccaggaccag

SEQ ID NO: 64670 - DNA, 26 bp, Homo sapiens
cctgggattttccacccaggaccagg

SEQ ID NO: 64671 - DNA, 26 bp, Homo sapiens
ctgggattttccacccaggaccagga

SEQ ID NO: 64672 - DNA, 26 bp, Homo sapiens
tgggattttccacccaggaccaggac

SEQ ID NO: 64673 - DNA, 26 bp, Homo sapiens
gggattttccacccaggaccaggacc

SEQ ID NO: 64674 - DNA, 26 bp, Homo sapiens
ggattttccacccaggaccaggacca

SEQ ID NO: 64675 - DNA, 26 bp, Homo sapiens
gattttccacccaggaccaggaccag

SEQ ID NO: 64676 - DNA, 26 bp, Homo sapiens
attttccacccaggaccaggaccagg

SEQ ID NO: 64677 - DNA, 26 bp, Homo sapiens
ttttccacccaggaccaggaccaggt

SEQ ID NO: 64678 - DNA, 26 bp, Homo sapiens
tttccacccaggaccaggaccaggtg

SEQ ID NO: 64679 - DNA, 26 bp, Homo sapiens
ttccacccaggaccaggaccaggtgt

SEQ ID NO: 64680 - DNA, 26 bp, Homo sapiens
tccacccaggaccaggaccaggtgtt

SEQ ID NO: 64681 - DNA, 26 bp, Homo sapiens
ccacccaggaccaggaccaggtgttg

SEQ ID NO: 64682 - DNA, 26 bp, Homo sapiens
cacccaggaccaggaccaggtgttgg

SEQ ID NO: 64683 - DNA, 26 bp, Homo sapiens
acccaggaccaggaccaggtgttggg

SEQ ID NO: 64684 - DNA, 26 bp, Homo sapiens
cccaggaccaggaccaggtgttgggg

SEQ ID NO: 64685 - DNA, 26 bp, Homo sapiens
ccaggaccaggaccaggtgttggggc

SEQ ID NO: 64686 - DNA, 26 bp, Homo sapiens
caggaccaggaccaggtgttggggca

SEQ ID NO: 64687 - DNA, 26 bp, Homo sapiens
aggaccaggaccaggtgttggggcac

SEQ ID NO: 64688 - DNA, 26 bp, Homo sapiens
ggaccaggaccaggtgttggggcacc

SEQ ID NO: 64689 - DNA, 26 bp, Homo sapiens
gaccaggaccaggtgttggggcaccc

SEQ ID NO: 64690 - DNA, 26 bp, Homo sapiens
accaggaccaggtgttggggcacccc

SEQ ID NO: 64691 - DNA, 26 bp, Homo sapiens
ccaggaccaggtgttggggcaccccg

SEQ ID NO: 64692 - DNA, 26 bp, Homo sapiens
caggaccaggtgttggggcaccccgt

SEQ ID NO: 64693 - DNA, 26 bp, Homo sapiens
aggaccaggtgttggggcaccccgtc

SEQ ID NO: 64694 - DNA, 26 bp, Homo sapiens
ggaccaggtgttggggcaccccgtct

SEQ ID NO: 64695 - DNA, 26 bp, Homo sapiens
gaccaggtgttggggcaccccgtctt

SEQ ID NO: 64696 - DNA, 26 bp, Homo sapiens
accaggtgttggggcaccccgtcttc

SEQ ID NO: 64697 - DNA, 26 bp, Homo sapiens
ccaggtgttggggcaccccgtcttct

SEQ ID NO: 64698 - DNA, 26 bp, Homo sapiens
caggtgttggggcaccccgtcttcta

SEQ ID NO: 64699 - DNA, 26 bp, Homo sapiens
aggtgttggggcaccccgtcttctat

SEQ ID NO: 64700 - DNA, 26 bp, Homo sapiens
ggtgttggggcaccccgtcttctatg

SEQ ID NO: 64701 - DNA, 26 bp, Homo sapiens
gtgttggggcaccccgtcttctatgc

SEQ ID NO: 64702 - DNA, 26 bp, Homo sapiens
tgttggggcaccccgtcttctatgcg

SEQ ID NO: 64703 - DNA, 26 bp, Homo sapiens
gttggggcaccccgtcttctatgcga

SEQ ID NO: 64704 - DNA, 26 bp, Homo sapiens
ttggggcaccccgtcttctatgcgac

SEQ ID NO: 64705 - DNA, 26 bp, Homo sapiens
tggggcaccccgtcttctatgcgact

SEQ ID NO: 64706 - DNA, 26 bp, Homo sapiens
ggggcaccccgtcttctatgcgactc

SEQ ID NO: 64707 - DNA, 26 bp, Homo sapiens
gggcaccccgtcttctatgcgactcc

SEQ ID NO: 64708 - DNA, 26 bp, Homo sapiens
ggcaccccgtcttctatgcgactccc

SEQ ID NO: 64709 - DNA, 26 bp, Homo sapiens
gcaccccgtcttctatgcgactcccc

SEQ ID NO: 64710 - DNA, 26 bp, Homo sapiens
caccccgtcttctatgcgactccccg

SEQ ID NO: 64711 - DNA, 26 bp, Homo sapiens
accccgtcttctatgcgactccccgc

SEQ ID NO: 64712 - DNA, 26 bp, Homo sapiens
ccccgtcttctatgcgactccccgca

SEQ ID NO: 64713 - DNA, 26 bp, Homo sapiens
cccgtcttctatgcgactccccgcag

SEQ ID NO: 64714 - DNA, 26 bp, Homo sapiens
ccgtcttctatgcgactccccgcaga

SEQ ID NO: 64715 - DNA, 26 bp, Homo sapiens
cgtcttctatgcgactccccgcagac

SEQ ID NO: 64716 - DNA, 26 bp, Homo sapiens
gtcttctatgcgactccccgcagact

SEQ ID NO: 64717 - DNA, 26 bp, Homo sapiens
tcttctatgcgactccccgcagactt

SEQ ID NO: 64718 - DNA, 26 bp, Homo sapiens
cttctatgcgactccccgcagactta

SEQ ID NO: 64719 - DNA, 26 bp, Homo sapiens
ttctatgcgactccccgcagacttaa

SEQ ID NO: 64720 - DNA, 26 bp, Homo sapiens
tctatgcgactccccgcagacttaac

SEQ ID NO: 64721 - DNA, 26 bp, Homo sapiens
ctatgcgactccccgcagacttaaca

SEQ ID NO: 64722 - DNA, 26 bp, Homo sapiens
tatgcgactccccgcagacttaacaa

SEQ ID NO: 64723 - DNA, 26 bp, Homo sapiens
atgcgactccccgcagacttaacaaa

SEQ ID NO: 64724 - DNA, 26 bp, Homo sapiens
tgcgactccccgcagacttaacaaag

SEQ ID NO: 64725 - DNA, 26 bp, Homo sapiens
gcgactccccgcagacttaacaaaga

SEQ ID NO: 64726 - DNA, 26 bp, Homo sapiens
cgactccccgcagacttaacaaagag

SEQ ID NO: 64727 - DNA, 26 bp, Homo sapiens
gactccccgcagacttaacaaagagg

SEQ ID NO: 64728 - DNA, 26 bp, Homo sapiens
actccccgcagacttaacaaagaggt

SEQ ID NO: 64729 - DNA, 26 bp, Homo sapiens
ctccccgcagacttaacaaagaggtt

SEQ ID NO: 64730 - DNA, 26 bp, Homo sapiens
tccccgcagacttaacaaagaggttt

SEQ ID NO: 64731 - DNA, 26 bp, Homo sapiens
ccccgcagacttaacaaagaggtttc

SEQ ID NO: 64732 - DNA, 26 bp, Homo sapiens
cccgcagacttaacaaagaggtttct

SEQ ID NO: 64733 - DNA, 26 bp, Homo sapiens
ccgcagacttaacaaagaggtttctt

SEQ ID NO: 64734 - DNA, 26 bp, Homo sapiens
cgcagacttaacaaagaggtttcttg

SEQ ID NO: 64735 - DNA, 26 bp, Homo sapiens
gcagacttaacaaagaggtttcttgc

SEQ ID NO: 64736 - DNA, 26 bp, Homo sapiens
cagacttaacaaagaggtttcttgcc

SEQ ID NO: 64737 - DNA, 26 bp, Homo sapiens
agacttaacaaagaggtttcttgcca

SEQ ID NO: 64738 - DNA, 26 bp, Homo sapiens
gacttaacaaagaggtttcttgccac

SEQ ID NO: 64739 - DNA, 26 bp, Homo sapiens
acttaacaaagaggtttcttgccaca

SEQ ID NO: 64740 - DNA, 26 bp, Homo sapiens
cttaacaaagaggtttcttgccacaa

SEQ ID NO: 64741 - DNA, 26 bp, Homo sapiens
ttaacaaagaggtttcttgccacaaa

SEQ ID NO: 64742 - DNA, 26 bp, Homo sapiens
taacaaagaggtttcttgccacaaat

SEQ ID NO: 64743 - DNA, 26 bp, Homo sapiens
aacaaagaggtttcttgccacaaatt

SEQ ID NO: 64744 - DNA, 26 bp, Homo sapiens
acaaagaggtttcttgccacaaattc

SEQ ID NO: 64745 - DNA, 26 bp, Homo sapiens
caaagaggtttcttgccacaaattcg

SEQ ID NO: 64746 - DNA, 26 bp, Homo sapiens
aaagaggtttcttgccacaaattcga

SEQ ID NO: 64747 - DNA, 26 bp, Homo sapiens
aagaggtttcttgccacaaattcgag

SEQ ID NO: 64748 - DNA, 26 bp, Homo sapiens
agaggtttcttgccacaaattcgaga

SEQ ID NO: 64749 - DNA, 26 bp, Homo sapiens
gaggtttcttgccacaaattcgagag

SEQ ID NO: 64750 - DNA, 26 bp, Homo sapiens
aggtttcttgccacaaattcgagagc

SEQ ID NO: 64751 - DNA, 26 bp, Homo sapiens
ggtttcttgccacaaattcgagagcc

SEQ ID NO: 64752 - DNA, 26 bp, Homo sapiens
gtttcttgccacaaattcgagagcct

SEQ ID NO: 64753 - DNA, 26 bp, Homo sapiens
tttcttgccacaaattcgagagcctt

SEQ ID NO: 64754 - DNA, 26 bp, Homo sapiens
ttcttgccacaaattcgagagccttg

SEQ ID NO: 64755 - DNA, 26 bp, Homo sapiens
tcttgccacaaattcgagagccttgc

SEQ ID NO: 64756 - DNA, 26 bp, Homo sapiens
cttgccacaaattcgagagccttgcc

SEQ ID NO: 64757 - DNA, 26 bp, Homo sapiens
ttgccacaaattcgagagccttgcca

SEQ ID NO: 64758 - DNA, 26 bp, Homo sapiens
tgccacaaattcgagagccttgccag

SEQ ID NO: 64759 - DNA, 26 bp, Homo sapiens
gccacaaattcgagagccttgccagt

SEQ ID NO: 64760 - DNA, 26 bp, Homo sapiens
ccacaaattcgagagccttgccagtg

SEQ ID NO: 64761 - DNA, 26 bp, Homo sapiens
cacaaattcgagagccttgccagtgt

SEQ ID NO: 64762 - DNA, 26 bp, Homo sapiens
acaaattcgagagccttgccagtgtt

SEQ ID NO: 64763 - DNA, 26 bp, Homo sapiens
caaattcgagagccttgccagtgttc

SEQ ID NO: 64764 - DNA, 26 bp, Homo sapiens
aaattcgagagccttgccagtgttca

SEQ ID NO: 64765 - DNA, 26 bp, Homo sapiens
aattcgagagccttgccagtgttcag

SEQ ID NO: 64766 - DNA, 26 bp, Homo sapiens
attcgagagccttgccagtgttcagt

SEQ ID NO: 64767 - DNA, 26 bp, Homo sapiens
ttcgagagccttgccagtgttcagtg

SEQ ID NO: 64768 - DNA, 26 bp, Homo sapiens
tcgagagccttgccagtgttcagtgg

SEQ ID NO: 64769 - DNA, 26 bp, Homo sapiens
cgagagccttgccagtgttcagtggg

SEQ ID NO: 64770 - DNA, 26 bp, Homo sapiens
gagagccttgccagtgttcagtgggg

SEQ ID NO: 64771 - DNA, 26 bp, Homo sapiens
agagccttgccagtgttcagtgggga

SEQ ID NO: 64772 - DNA, 26 bp, Homo sapiens
gagccttgccagtgttcagtggggac

SEQ ID NO: 64773 - DNA, 26 bp, Homo sapiens
agccttgccagtgttcagtggggacc

SEQ ID NO: 64774 - DNA, 26 bp, Homo sapiens
gccttgccagtgttcagtggggaccc

SEQ ID NO: 64775 - DNA, 26 bp, Homo sapiens
ccttgccagtgttcagtggggacccc

SEQ ID NO: 64776 - DNA, 26 bp, Homo sapiens
cttgccagtgttcagtggggaccccc

SEQ ID NO: 64777 - DNA, 26 bp, Homo sapiens
ttgccagtgttcagtggggacccccc

SEQ ID NO: 64778 - DNA, 26 bp, Homo sapiens
tgccagtgttcagtggggacccccct

SEQ ID NO: 64779 - DNA, 26 bp, Homo sapiens
gccagtgttcagtggggacccccctc

SEQ ID NO: 64780 - DNA, 26 bp, Homo sapiens
ccagtgttcagtggggacccccctct

SEQ ID NO: 64781 - DNA, 26 bp, Homo sapiens
cagtgttcagtggggacccccctctg

SEQ ID NO: 64782 - DNA, 26 bp, Homo sapiens
agtgttcagtggggacccccctctga

SEQ ID NO: 64783 - DNA, 26 bp, Homo sapiens
gtgttcagtggggacccccctctgag

SEQ ID NO: 64784 - DNA, 26 bp, Homo sapiens
tgttcagtggggacccccctctgagc

SEQ ID NO: 64785 - DNA, 26 bp, Homo sapiens
gttcagtggggacccccctctgagcc

SEQ ID NO: 64786 - DNA, 26 bp, Homo sapiens
ttcagtggggacccccctctgagcct

SEQ ID NO: 64787 - DNA, 26 bp, Homo sapiens
tcagtggggacccccctctgagcctc

SEQ ID NO: 64788 - DNA, 26 bp, Homo sapiens
cagtggggacccccctctgagcctca

SEQ ID NO: 64789 - DNA, 26 bp, Homo sapiens
agtggggacccccctctgagcctcag

SEQ ID NO: 64790 - DNA, 26 bp, Homo sapiens
gtggggacccccctctgagcctcagg

SEQ ID NO: 64791 - DNA, 26 bp, Homo sapiens
tggggacccccctctgagcctcaggc

SEQ ID NO: 64792 - DNA, 26 bp, Homo sapiens
ggggacccccctctgagcctcaggcg

SEQ ID NO: 64793 - DNA, 26 bp, Homo sapiens
gggacccccctctgagcctcaggcgc

SEQ ID NO: 64794 - DNA, 26 bp, Homo sapiens
ggacccccctctgagcctcaggcgcc

SEQ ID NO: 64795 - DNA, 26 bp, Homo sapiens
gacccccctctgagcctcaggcgccg

SEQ ID NO: 64796 - DNA, 26 bp, Homo sapiens
acccccctctgagcctcaggcgccgt

SEQ ID NO: 64797 - DNA, 26 bp, Homo sapiens
cccccctctgagcctcaggcgccgta

SEQ ID NO: 64798 - DNA, 26 bp, Homo sapiens
ccccctctgagcctcaggcgccgtat

SEQ ID NO: 64799 - DNA, 26 bp, Homo sapiens
cccctctgagcctcaggcgccgtatg

SEQ ID NO: 64800 - DNA, 26 bp, Homo sapiens
ccctctgagcctcaggcgccgtatgg

SEQ ID NO: 64801 - DNA, 26 bp, Homo sapiens
cctctgagcctcaggcgccgtatggc

SEQ ID NO: 64802 - DNA, 26 bp, Homo sapiens
ctctgagcctcaggcgccgtatggcg

SEQ ID NO: 64803 - DNA, 26 bp, Homo sapiens
tctgagcctcaggcgccgtatggcgt

SEQ ID NO: 64804 - DNA, 26 bp, Homo sapiens
ctgagcctcaggcgccgtatggcgtc

SEQ ID NO: 64805 - DNA, 26 bp, Homo sapiens
tgagcctcaggcgccgtatggcgtcc

SEQ ID NO: 64806 - DNA, 26 bp, Homo sapiens
gagcctcaggcgccgtatggcgtcca

SEQ ID NO: 64807 - DNA, 26 bp, Homo sapiens
agcctcaggcgccgtatggcgtccag

SEQ ID NO: 64808 - DNA, 26 bp, Homo sapiens
gcctcaggcgccgtatggcgtccagc

SEQ ID NO: 64809 - DNA, 26 bp, Homo sapiens
cctcaggcgccgtatggcgtccagca

SEQ ID NO: 64810 - DNA, 26 bp, Homo sapiens
ctcaggcgccgtatggcgtccagcac

SEQ ID NO: 64811 - DNA, 26 bp, Homo sapiens
tcaggcgccgtatggcgtccagcacc

SEQ ID NO: 64812 - DNA, 26 bp, Homo sapiens
caggcgccgtatggcgtccagcaccg

SEQ ID NO: 64813 - DNA, 26 bp, Homo sapiens
aggcgccgtatggcgtccagcaccgg

SEQ ID NO: 64814 - DNA, 26 bp, Homo sapiens
ggcgccgtatggcgtccagcaccggg

SEQ ID NO: 64815 - DNA, 26 bp, Homo sapiens
gcgccgtatggcgtccagcaccgggg

SEQ ID NO: 64816 - DNA, 26 bp, Homo sapiens
cgccgtatggcgtccagcaccggggc

SEQ ID NO: 64817 - DNA, 26 bp, Homo sapiens
gccgtatggcgtccagcaccggggcc

SEQ ID NO: 64818 - DNA, 26 bp, Homo sapiens
ccgtatggcgtccagcaccggggcct

SEQ ID NO: 64819 - DNA, 26 bp, Homo sapiens
cgtatggcgtccagcaccggggcctg

SEQ ID NO: 64820 - DNA, 26 bp, Homo sapiens
gtatggcgtccagcaccggggcctgg

SEQ ID NO: 64821 - DNA, 26 bp, Homo sapiens
tatggcgtccagcaccggggcctggg

SEQ ID NO: 64822 - DNA, 26 bp, Homo sapiens
atggcgtccagcaccggggcctggga

SEQ ID NO: 64823 - DNA, 26 bp, Homo sapiens
tggcgtccagcaccggggcctgggat

SEQ ID NO: 64824 - DNA, 26 bp, Homo sapiens
ggcgtccagcaccggggcctgggatc

SEQ ID NO: 64825 - DNA, 26 bp, Homo sapiens
gcgtccagcaccggggcctgggatct

SEQ ID NO: 64826 - DNA, 26 bp, Homo sapiens
cgtccagcaccggggcctgggatctg

SEQ ID NO: 64827 - DNA, 26 bp, Homo sapiens
gtccagcaccggggcctgggatctgt

SEQ ID NO: 64828 - DNA, 26 bp, Homo sapiens
tccagcaccggggcctgggatctgta

SEQ ID NO: 64829 - DNA, 26 bp, Homo sapiens
ccagcaccggggcctgggatctgtag

SEQ ID NO: 64830 - DNA, 26 bp, Homo sapiens
cagcaccggggcctgggatctgtagg

SEQ ID NO: 64831 - DNA, 26 bp, Homo sapiens
agcaccggggcctgggatctgtaggt

SEQ ID NO: 64832 - DNA, 26 bp, Homo sapiens
gcaccggggcctgggatctgtaggtt

SEQ ID NO: 64833 - DNA, 26 bp, Homo sapiens
caccggggcctgggatctgtaggttt

SEQ ID NO: 64834 - DNA, 26 bp, Homo sapiens
accggggcctgggatctgtaggtttt

SEQ ID NO: 64835 - DNA, 26 bp, Homo sapiens
ccggggcctgggatctgtaggttttc

SEQ ID NO: 64836 - DNA, 26 bp, Homo sapiens
cggggcctgggatctgtaggttttca

SEQ ID NO: 64837 - DNA, 26 bp, Homo sapiens
ggggcctgggatctgtaggttttcag

SEQ ID NO: 64838 - DNA, 26 bp, Homo sapiens
gggcctgggatctgtaggttttcaga

SEQ ID NO: 64839 - DNA, 26 bp, Homo sapiens
ggcctgggatctgtaggttttcagat

SEQ ID NO: 64840 - DNA, 26 bp, Homo sapiens
gcctgggatctgtaggttttcagata

SEQ ID NO: 64841 - DNA, 26 bp, Homo sapiens
cctgggatctgtaggttttcagatag

SEQ ID NO: 64842 - DNA, 26 bp, Homo sapiens
ctgggatctgtaggttttcagataga

SEQ ID NO: 64843 - DNA, 26 bp, Homo sapiens
tgggatctgtaggttttcagatagaa

SEQ ID NO: 64844 - DNA, 26 bp, Homo sapiens
gggatctgtaggttttcagatagaat

SEQ ID NO: 64845 - DNA, 26 bp, Homo sapiens
ggatctgtaggttttcagatagaatt

SEQ ID NO: 64846 - DNA, 26 bp, Homo sapiens
gatctgtaggttttcagatagaattc

SEQ ID NO: 64847 - DNA, 26 bp, Homo sapiens
atctgtaggttttcagatagaattct

SEQ ID NO: 64848 - DNA, 26 bp, Homo sapiens
tctgtaggttttcagatagaattctg

SEQ ID NO: 64849 - DNA, 26 bp, Homo sapiens
ctgtaggttttcagatagaattctgg

SEQ ID NO: 64850 - DNA, 26 bp, Homo sapiens
tgtaggttttcagatagaattctggg

SEQ ID NO: 64851 - DNA, 26 bp, Homo sapiens
gtaggttttcagatagaattctggga

SEQ ID NO: 64852 - DNA, 26 bp, Homo sapiens
taggttttcagatagaattctgggaa

SEQ ID NO: 64853 - DNA, 26 bp, Homo sapiens
aggttttcagatagaattctgggaag

SEQ ID NO: 64854 - DNA, 26 bp, Homo sapiens
ggttttcagatagaattctgggaaga

SEQ ID NO: 64855 - DNA, 26 bp, Homo sapiens
gttttcagatagaattctgggaagac

SEQ ID NO: 64856 - DNA, 26 bp, Homo sapiens
ttttcagatagaattctgggaagaca

SEQ ID NO: 64857 - DNA, 26 bp, Homo sapiens
tttcagatagaattctgggaagacat

SEQ ID NO: 64858 - DNA, 26 bp, Homo sapiens
ttcagatagaattctgggaagacatc

SEQ ID NO: 64859 - DNA, 26 bp, Homo sapiens
tcagatagaattctgggaagacatca

SEQ ID NO: 64860 - DNA, 26 bp, Homo sapiens
cagatagaattctgggaagacatcat

SEQ ID NO: 64861 - DNA, 26 bp, Homo sapiens
agatagaattctgggaagacatcatt

SEQ ID NO: 64862 - DNA, 26 bp, Homo sapiens
gatagaattctgggaagacatcattg

SEQ ID NO: 64863 - DNA, 26 bp, Homo sapiens
atagaattctgggaagacatcattgc

SEQ ID NO: 64864 - DNA, 26 bp, Homo sapiens
tagaattctgggaagacatcattgct

SEQ ID NO: 64865 - DNA, 26 bp, Homo sapiens
agaattctgggaagacatcattgctg

SEQ ID NO: 64866 - DNA, 26 bp, Homo sapiens
gaattctgggaagacatcattgctga

SEQ ID NO: 64867 - DNA, 26 bp, Homo sapiens
aattctgggaagacatcattgctgaa

SEQ ID NO: 64868 - DNA, 26 bp, Homo sapiens
attctgggaagacatcattgctgaac

SEQ ID NO: 64869 - DNA, 26 bp, Homo sapiens
ttctgggaagacatcattgctgaact

SEQ ID NO: 64870 - DNA, 26 bp, Homo sapiens
tctgggaagacatcattgctgaactg

SEQ ID NO: 64871 - DNA, 26 bp, Homo sapiens
ctgggaagacatcattgctgaactgc

SEQ ID NO: 64872 - DNA, 26 bp, Homo sapiens
tgggaagacatcattgctgaactgca

SEQ ID NO: 64873 - DNA, 26 bp, Homo sapiens
gggaagacatcattgctgaactgcac

SEQ ID NO: 64874 - DNA, 26 bp, Homo sapiens
ggaagacatcattgctgaactgcacg

SEQ ID NO: 64875 - DNA, 26 bp, Homo sapiens
gaagacatcattgctgaactgcacga

SEQ ID NO: 64876 - DNA, 26 bp, Homo sapiens
aagacatcattgctgaactgcacgac

SEQ ID NO: 64877 - DNA, 26 bp, Homo sapiens
agacatcattgctgaactgcacgacc

SEQ ID NO: 64878 - DNA, 26 bp, Homo sapiens
gacatcattgctgaactgcacgaccc

SEQ ID NO: 64879 - DNA, 26 bp, Homo sapiens
acatcattgctgaactgcacgacccc

SEQ ID NO: 64880 - DNA, 26 bp, Homo sapiens
catcattgctgaactgcacgacccca

SEQ ID NO: 64881 - DNA, 26 bp, Homo sapiens
atcattgctgaactgcacgaccccaa

SEQ ID NO: 64882 - DNA, 26 bp, Homo sapiens
tcattgctgaactgcacgaccccaac

SEQ ID NO: 64883 - DNA, 26 bp, Homo sapiens
cattgctgaactgcacgaccccaact

SEQ ID NO: 64884 - DNA, 26 bp, Homo sapiens
attgctgaactgcacgaccccaactc

SEQ ID NO: 64885 - DNA, 26 bp, Homo sapiens
ttgctgaactgcacgaccccaactct

SEQ ID NO: 64886 - DNA, 26 bp, Homo sapiens
tgctgaactgcacgaccccaactctc

SEQ ID NO: 64887 - DNA, 26 bp, Homo sapiens
gctgaactgcacgaccccaactctca

SEQ ID NO: 64888 - DNA, 26 bp, Homo sapiens
ctgaactgcacgaccccaactctcac

SEQ ID NO: 64889 - DNA, 26 bp, Homo sapiens
tgaactgcacgaccccaactctcact

SEQ ID NO: 64890 - DNA, 26 bp, Homo sapiens
gaactgcacgaccccaactctcactt

SEQ ID NO: 64891 - DNA, 26 bp, Homo sapiens
aactgcacgaccccaactctcacttt

SEQ ID NO: 64892 - DNA, 26 bp, Homo sapiens
actgcacgaccccaactctcacttta

SEQ ID NO: 64893 - DNA, 26 bp, Homo sapiens
ctgcacgaccccaactctcactttac

SEQ ID NO: 64894 - DNA, 26 bp, Homo sapiens
tgcacgaccccaactctcactttact

SEQ ID NO: 64895 - DNA, 26 bp, Homo sapiens
gcacgaccccaactctcactttactg

SEQ ID NO: 64896 - DNA, 26 bp, Homo sapiens
cacgaccccaactctcactttactgg

SEQ ID NO: 64897 - DNA, 26 bp, Homo sapiens
acgaccccaactctcactttactggg

SEQ ID NO: 64898 - DNA, 26 bp, Homo sapiens
cgaccccaactctcactttactgggg

SEQ ID NO: 64899 - DNA, 26 bp, Homo sapiens
gaccccaactctcactttactggggc

SEQ ID NO: 64900 - DNA, 26 bp, Homo sapiens
accccaactctcactttactggggcc

SEQ ID NO: 64901 - DNA, 26 bp, Homo sapiens
ccccaactctcactttactggggccg

SEQ ID NO: 64902 - DNA, 26 bp, Homo sapiens
cccaactctcactttactggggccga

SEQ ID NO: 64903 - DNA, 26 bp, Homo sapiens
ccaactctcactttactggggccgat

SEQ ID NO: 64904 - DNA, 26 bp, Homo sapiens
caactctcactttactggggccgatg

SEQ ID NO: 64905 - DNA, 26 bp, Homo sapiens
aactctcactttactggggccgatgt

SEQ ID NO: 64906 - DNA, 26 bp, Homo sapiens
actctcactttactggggccgatgtt

SEQ ID NO: 64907 - DNA, 26 bp, Homo sapiens
ctctcactttactggggccgatgttg

SEQ ID NO: 64908 - DNA, 26 bp, Homo sapiens
tctcactttactggggccgatgttga

SEQ ID NO: 64909 - DNA, 26 bp, Homo sapiens
ctcactttactggggccgatgttgag

SEQ ID NO: 64910 - DNA, 26 bp, Homo sapiens
tcactttactggggccgatgttgagt

SEQ ID NO: 64911 - DNA, 26 bp, Homo sapiens
cactttactggggccgatgttgagtc

SEQ ID NO: 64912 - DNA, 26 bp, Homo sapiens
actttactggggccgatgttgagtct

SEQ ID NO: 64913 - DNA, 26 bp, Homo sapiens
ctttactggggccgatgttgagtctt

SEQ ID NO: 64914 - DNA, 26 bp, Homo sapiens
tttactggggccgatgttgagtcttc

SEQ ID NO: 64915 - DNA, 26 bp, Homo sapiens
ttactggggccgatgttgagtcttcg

SEQ ID NO: 64916 - DNA, 26 bp, Homo sapiens
tactggggccgatgttgagtcttcga

SEQ ID NO: 64917 - DNA, 26 bp, Homo sapiens
actggggccgatgttgagtcttcgaa

SEQ ID NO: 64918 - DNA, 26 bp, Homo sapiens
ctggggccgatgttgagtcttcgaac

SEQ ID NO: 64919 - DNA, 26 bp, Homo sapiens
tggggccgatgttgagtcttcgaaca

SEQ ID NO: 64920 - DNA, 26 bp, Homo sapiens
ggggccgatgttgagtcttcgaacaa

SEQ ID NO: 64921 - DNA, 26 bp, Homo sapiens
gggccgatgttgagtcttcgaacaat

SEQ ID NO: 64922 - DNA, 26 bp, Homo sapiens
ggccgatgttgagtcttcgaacaatc

SEQ ID NO: 64923 - DNA, 26 bp, Homo sapiens
gccgatgttgagtcttcgaacaatcc

SEQ ID NO: 64924 - DNA, 26 bp, Homo sapiens
ccgatgttgagtcttcgaacaatcct

SEQ ID NO: 64925 - DNA, 26 bp, Homo sapiens
cgatgttgagtcttcgaacaatcctg

SEQ ID NO: 64926 - DNA, 26 bp, Homo sapiens
gatgttgagtcttcgaacaatcctgc

SEQ ID NO: 64927 - DNA, 26 bp, Homo sapiens
atgttgagtcttcgaacaatcctgct

SEQ ID NO: 64928 - DNA, 26 bp, Homo sapiens
tgttgagtcttcgaacaatcctgcta

SEQ ID NO: 64929 - DNA, 26 bp, Homo sapiens
gttgagtcttcgaacaatcctgctaa

SEQ ID NO: 64930 - DNA, 26 bp, Homo sapiens
ttgagtcttcgaacaatcctgctaac

SEQ ID NO: 64931 - DNA, 26 bp, Homo sapiens
tgagtcttcgaacaatcctgctaaca

SEQ ID NO: 64932 - DNA, 26 bp, Homo sapiens
gagtcttcgaacaatcctgctaacaa

SEQ ID NO: 64933 - DNA, 26 bp, Homo sapiens
agtcttcgaacaatcctgctaacaaa

SEQ ID NO: 64934 - DNA, 26 bp, Homo sapiens
gtcttcgaacaatcctgctaacaaaa

SEQ ID NO: 64935 - DNA, 26 bp, Homo sapiens
tcttcgaacaatcctgctaacaaaat

SEQ ID NO: 64936 - DNA, 26 bp, Homo sapiens
cttcgaacaatcctgctaacaaaatc

SEQ ID NO: 64937 - DNA, 26 bp, Homo sapiens
ttcgaacaatcctgctaacaaaatct

SEQ ID NO: 64938 - DNA, 26 bp, Homo sapiens
tcgaacaatcctgctaacaaaatctc

SEQ ID NO: 64939 - DNA, 26 bp, Homo sapiens
cgaacaatcctgctaacaaaatctcg

SEQ ID NO: 64940 - DNA, 26 bp, Homo sapiens
gaacaatcctgctaacaaaatctcga

SEQ ID NO: 64941 - DNA, 26 bp, Homo sapiens
aacaatcctgctaacaaaatctcgaa

SEQ ID NO: 64942 - DNA, 26 bp, Homo sapiens
acaatcctgctaacaaaatctcgaat

SEQ ID NO: 64943 - DNA, 26 bp, Homo sapiens
caatcctgctaacaaaatctcgaata

SEQ ID NO: 64944 - DNA, 26 bp, Homo sapiens
aatcctgctaacaaaatctcgaatat

SEQ ID NO: 64945 - DNA, 26 bp, Homo sapiens
atcctgctaacaaaatctcgaatatg

SEQ ID NO: 64946 - DNA, 26 bp, Homo sapiens
tcctgctaacaaaatctcgaatatgt

SEQ ID NO: 64947 - DNA, 26 bp, Homo sapiens
cctgctaacaaaatctcgaatatgtg

SEQ ID NO: 64948 - DNA, 26 bp, Homo sapiens
ctgctaacaaaatctcgaatatgtgc

SEQ ID NO: 64949 - DNA, 26 bp, Homo sapiens
tgctaacaaaatctcgaatatgtgca

SEQ ID NO: 64950 - DNA, 26 bp, Homo sapiens
gctaacaaaatctcgaatatgtgcaa

SEQ ID NO: 64951 - DNA, 26 bp, Homo sapiens
ctaacaaaatctcgaatatgtgcaaa

SEQ ID NO: 64952 - DNA, 26 bp, Homo sapiens
taacaaaatctcgaatatgtgcaaag

SEQ ID NO: 64953 - DNA, 26 bp, Homo sapiens
aacaaaatctcgaatatgtgcaaagc

SEQ ID NO: 64954 - DNA, 26 bp, Homo sapiens
acaaaatctcgaatatgtgcaaagcc

SEQ ID NO: 64955 - DNA, 26 bp, Homo sapiens
caaaatctcgaatatgtgcaaagcca

SEQ ID NO: 64956 - DNA, 26 bp, Homo sapiens
aaaatctcgaatatgtgcaaagccat

SEQ ID NO: 64957 - DNA, 26 bp, Homo sapiens
aaatctcgaatatgtgcaaagccatc

SEQ ID NO: 64958 - DNA, 26 bp, Homo sapiens
aatctcgaatatgtgcaaagccatct

SEQ ID NO: 64959 - DNA, 26 bp, Homo sapiens
atctcgaatatgtgcaaagccatctg

SEQ ID NO: 64960 - DNA, 26 bp, Homo sapiens
tctcgaatatgtgcaaagccatctgg

SEQ ID NO: 64961 - DNA, 26 bp, Homo sapiens
ctcgaatatgtgcaaagccatctggc

SEQ ID NO: 64962 - DNA, 26 bp, Homo sapiens
tcgaatatgtgcaaagccatctggcc

SEQ ID NO: 64963 - DNA, 26 bp, Homo sapiens
cgaatatgtgcaaagccatctggcct

SEQ ID NO: 64964 - DNA, 26 bp, Homo sapiens
gaatatgtgcaaagccatctggccta

SEQ ID NO: 64965 - DNA, 26 bp, Homo sapiens
aatatgtgcaaagccatctggcctaa

SEQ ID NO: 64966 - DNA, 26 bp, Homo sapiens
atatgtgcaaagccatctggcctaac

SEQ ID NO: 64967 - DNA, 26 bp, Homo sapiens
tatgtgcaaagccatctggcctaact

SEQ ID NO: 64968 - DNA, 26 bp, Homo sapiens
atgtgcaaagccatctggcctaactc

SEQ ID NO: 64969 - DNA, 26 bp, Homo sapiens
tgtgcaaagccatctggcctaactcc

SEQ ID NO: 64970 - DNA, 26 bp, Homo sapiens
gtgcaaagccatctggcctaactccc

SEQ ID NO: 64971 - DNA, 26 bp, Homo sapiens
tgcaaagccatctggcctaactccct

SEQ ID NO: 64972 - DNA, 26 bp, Homo sapiens
gcaaagccatctggcctaactccctc

SEQ ID NO: 64973 - DNA, 26 bp, Homo sapiens
caaagccatctggcctaactccctca

SEQ ID NO: 64974 - DNA, 26 bp, Homo sapiens
aaagccatctggcctaactccctcag

SEQ ID NO: 64975 - DNA, 26 bp, Homo sapiens
aagccatctggcctaactccctcaga

SEQ ID NO: 64976 - DNA, 26 bp, Homo sapiens
agccatctggcctaactccctcagag

SEQ ID NO: 64977 - DNA, 26 bp, Homo sapiens
gccatctggcctaactccctcagagc

SEQ ID NO: 64978 - DNA, 26 bp, Homo sapiens
ccatctggcctaactccctcagagct

SEQ ID NO: 64979 - DNA, 26 bp, Homo sapiens
catctggcctaactccctcagagctg

SEQ ID NO: 64980 - DNA, 26 bp, Homo sapiens
atctggcctaactccctcagagctgt

SEQ ID NO: 64981 - DNA, 26 bp, Homo sapiens
tctggcctaactccctcagagctgtc

SEQ ID NO: 64982 - DNA, 26 bp, Homo sapiens
ctggcctaactccctcagagctgtcg

SEQ ID NO: 64983 - DNA, 26 bp, Homo sapiens
tggcctaactccctcagagctgtcga

SEQ ID NO: 64984 - DNA, 26 bp, Homo sapiens
ggcctaactccctcagagctgtcgat

SEQ ID NO: 64985 - DNA, 26 bp, Homo sapiens
gcctaactccctcagagctgtcgatc

SEQ ID NO: 64986 - DNA, 26 bp, Homo sapiens
cctaactccctcagagctgtcgatca

SEQ ID NO: 64987 - DNA, 26 bp, Homo sapiens
ctaactccctcagagctgtcgatcag

SEQ ID NO: 64988 - DNA, 26 bp, Homo sapiens
taactccctcagagctgtcgatcaga

SEQ ID NO: 64989 - DNA, 26 bp, Homo sapiens
aactccctcagagctgtcgatcagaa

SEQ ID NO: 64990 - DNA, 26 bp, Homo sapiens
actccctcagagctgtcgatcagaaa

SEQ ID NO: 64991 - DNA, 26 bp, Homo sapiens
ctccctcagagctgtcgatcagaaag

SEQ ID NO: 64992 - DNA, 26 bp, Homo sapiens
tccctcagagctgtcgatcagaaaga

SEQ ID NO: 64993 - DNA, 26 bp, Homo sapiens
ccctcagagctgtcgatcagaaagac

SEQ ID NO: 64994 - DNA, 26 bp, Homo sapiens
cctcagagctgtcgatcagaaagaca

SEQ ID NO: 64995 - DNA, 26 bp, Homo sapiens
ctcagagctgtcgatcagaaagacaa

SEQ ID NO: 64996 - DNA, 26 bp, Homo sapiens
tcagagctgtcgatcagaaagacaat

SEQ ID NO: 64997 - DNA, 26 bp, Homo sapiens
cagagctgtcgatcagaaagacaatg

SEQ ID NO: 64998 - DNA, 26 bp, Homo sapiens
agagctgtcgatcagaaagacaatgt

SEQ ID NO: 64999 - DNA, 26 bp, Homo sapiens
gagctgtcgatcagaaagacaatgtc

SEQ ID NO: 65000 - DNA, 26 bp, Homo sapiens
agctgtcgatcagaaagacaatgtct

SEQ ID NO: 65001 - DNA, 26 bp, Homo sapiens
gctgtcgatcagaaagacaatgtctg

SEQ ID NO: 65002 - DNA, 26 bp, Homo sapiens
ctgtcgatcagaaagacaatgtctgc

SEQ ID NO: 65003 - DNA, 26 bp, Homo sapiens
tgtcgatcagaaagacaatgtctgca

SEQ ID NO: 65004 - DNA, 26 bp, Homo sapiens
gtcgatcagaaagacaatgtctgcag

SEQ ID NO: 65005 - DNA, 26 bp, Homo sapiens
tcgatcagaaagacaatgtctgcagc

SEQ ID NO: 65006 - DNA, 26 bp, Homo sapiens
cgatcagaaagacaatgtctgcagca

SEQ ID NO: 65007 - DNA, 26 bp, Homo sapiens
gatcagaaagacaatgtctgcagcat

SEQ ID NO: 65008 - DNA, 26 bp, Homo sapiens
atcagaaagacaatgtctgcagcatc

SEQ ID NO: 65009 - DNA, 26 bp, Homo sapiens
tcagaaagacaatgtctgcagcatca

SEQ ID NO: 65010 - DNA, 26 bp, Homo sapiens
cagaaagacaatgtctgcagcatcac

SEQ ID NO: 65011 - DNA, 26 bp, Homo sapiens
agaaagacaatgtctgcagcatcact

SEQ ID NO: 65012 - DNA, 26 bp, Homo sapiens
gaaagacaatgtctgcagcatcactc

SEQ ID NO: 65013 - DNA, 26 bp, Homo sapiens
aaagacaatgtctgcagcatcactct

SEQ ID NO: 65014 - DNA, 26 bp, Homo sapiens
aagacaatgtctgcagcatcactctc

SEQ ID NO: 65015 - DNA, 26 bp, Homo sapiens
agacaatgtctgcagcatcactctca

SEQ ID NO: 65016 - DNA, 26 bp, Homo sapiens
gacaatgtctgcagcatcactctcaa

SEQ ID NO: 65017 - DNA, 26 bp, Homo sapiens
acaatgtctgcagcatcactctcaac

SEQ ID NO: 65018 - DNA, 26 bp, Homo sapiens
caatgtctgcagcatcactctcaact

SEQ ID NO: 65019 - DNA, 26 bp, Homo sapiens
aatgtctgcagcatcactctcaactg

SEQ ID NO: 65020 - DNA, 26 bp, Homo sapiens
atgtctgcagcatcactctcaactgc

SEQ ID NO: 65021 - DNA, 26 bp, Homo sapiens
tgtctgcagcatcactctcaactgct

SEQ ID NO: 65022 - DNA, 26 bp, Homo sapiens
gtctgcagcatcactctcaactgctg

SEQ ID NO: 65023 - DNA, 26 bp, Homo sapiens
tctgcagcatcactctcaactgctgg

SEQ ID NO: 65024 - DNA, 26 bp, Homo sapiens
ctgcagcatcactctcaactgctgga

SEQ ID NO: 65025 - DNA, 26 bp, Homo sapiens
tgcagcatcactctcaactgctggag

SEQ ID NO: 65026 - DNA, 26 bp, Homo sapiens
gcagcatcactctcaactgctggagg

SEQ ID NO: 65027 - DNA, 26 bp, Homo sapiens
cagcatcactctcaactgctggaggt

SEQ ID NO: 65028 - DNA, 26 bp, Homo sapiens
agcatcactctcaactgctggaggtg

SEQ ID NO: 65029 - DNA, 26 bp, Homo sapiens
gcatcactctcaactgctggaggtgg

SEQ ID NO: 65030 - DNA, 26 bp, Homo sapiens
catcactctcaactgctggaggtgga

SEQ ID NO: 65031 - DNA, 26 bp, Homo sapiens
atcactctcaactgctggaggtggat

SEQ ID NO: 65032 - DNA, 26 bp, Homo sapiens
tcactctcaactgctggaggtggata

SEQ ID NO: 65033 - DNA, 26 bp, Homo sapiens
cactctcaactgctggaggtggatag

SEQ ID NO: 65034 - DNA, 26 bp, Homo sapiens
actctcaactgctggaggtggatagc

SEQ ID NO: 65035 - DNA, 26 bp, Homo sapiens
ctctcaactgctggaggtggatagcg

SEQ ID NO: 65036 - DNA, 26 bp, Homo sapiens
tctcaactgctggaggtggatagcga

SEQ ID NO: 65037 - DNA, 26 bp, Homo sapiens
ctcaactgctggaggtggatagcgag

SEQ ID NO: 65038 - DNA, 26 bp, Homo sapiens
tcaactgctggaggtggatagcgagt

SEQ ID NO: 65039 - DNA, 26 bp, Homo sapiens
caactgctggaggtggatagcgagtg

SEQ ID NO: 65040 - DNA, 26 bp, Homo sapiens
aactgctggaggtggatagcgagtgc

SEQ ID NO: 65041 - DNA, 26 bp, Homo sapiens
actgctggaggtggatagcgagtgct

SEQ ID NO: 65042 - DNA, 26 bp, Homo sapiens
ctgctggaggtggatagcgagtgctg

SEQ ID NO: 65043 - DNA, 26 bp, Homo sapiens
tgctggaggtggatagcgagtgctgg

SEQ ID NO: 65044 - DNA, 26 bp, Homo sapiens
gctggaggtggatagcgagtgctggc

SEQ ID NO: 65045 - DNA, 26 bp, Homo sapiens
ctggaggtggatagcgagtgctggct

SEQ ID NO: 65046 - DNA, 26 bp, Homo sapiens
tggaggtggatagcgagtgctggcta

SEQ ID NO: 65047 - DNA, 26 bp, Homo sapiens
ggaggtggatagcgagtgctggctaa

SEQ ID NO: 65048 - DNA, 26 bp, Homo sapiens
gaggtggatagcgagtgctggctaag

SEQ ID NO: 65049 - DNA, 26 bp, Homo sapiens
aggtggatagcgagtgctggctaaga

SEQ ID NO: 65050 - DNA, 26 bp, Homo sapiens
ggtggatagcgagtgctggctaagag

SEQ ID NO: 65051 - DNA, 26 bp, Homo sapiens
gtggatagcgagtgctggctaagagc

SEQ ID NO: 65052 - DNA, 26 bp, Homo sapiens
tggatagcgagtgctggctaagagct

SEQ ID NO: 65053 - DNA, 26 bp, Homo sapiens
ggatagcgagtgctggctaagagctt

SEQ ID NO: 65054 - DNA, 26 bp, Homo sapiens
gatagcgagtgctggctaagagcttc

SEQ ID NO: 65055 - DNA, 26 bp, Homo sapiens
atagcgagtgctggctaagagcttct

SEQ ID NO: 65056 - DNA, 26 bp, Homo sapiens
tagcgagtgctggctaagagcttctg

SEQ ID NO: 65057 - DNA, 26 bp, Homo sapiens
agcgagtgctggctaagagcttctgg

SEQ ID NO: 65058 - DNA, 26 bp, Homo sapiens
gcgagtgctggctaagagcttctgga

SEQ ID NO: 65059 - DNA, 26 bp, Homo sapiens
cgagtgctggctaagagcttctggat

SEQ ID NO: 65060 - DNA, 26 bp, Homo sapiens
gagtgctggctaagagcttctggatc

SEQ ID NO: 65061 - DNA, 26 bp, Homo sapiens
agtgctggctaagagcttctggatct

SEQ ID NO: 65062 - DNA, 26 bp, Homo sapiens
gtgctggctaagagcttctggatctg

SEQ ID NO: 65063 - DNA, 26 bp, Homo sapiens
tgctggctaagagcttctggatctgc

SEQ ID NO: 65064 - DNA, 26 bp, Homo sapiens
gctggctaagagcttctggatctgct

SEQ ID NO: 65065 - DNA, 26 bp, Homo sapiens
ctggctaagagcttctggatctgctc

SEQ ID NO: 65066 - DNA, 26 bp, Homo sapiens
tggctaagagcttctggatctgctct

SEQ ID NO: 65067 - DNA, 26 bp, Homo sapiens
ggctaagagcttctggatctgctctg

SEQ ID NO: 65068 - DNA, 26 bp, Homo sapiens
gctaagagcttctggatctgctctga

SEQ ID NO: 65069 - DNA, 26 bp, Homo sapiens
ctaagagcttctggatctgctctgag

SEQ ID NO: 65070 - DNA, 26 bp, Homo sapiens
taagagcttctggatctgctctgagg

SEQ ID NO: 65071 - DNA, 26 bp, Homo sapiens
aagagcttctggatctgctctgaggt

SEQ ID NO: 65072 - DNA, 26 bp, Homo sapiens
agagcttctggatctgctctgaggtc

SEQ ID NO: 65073 - DNA, 26 bp, Homo sapiens
gagcttctggatctgctctgaggtca

SEQ ID NO: 65074 - DNA, 26 bp, Homo sapiens
agcttctggatctgctctgaggtcag

SEQ ID NO: 65075 - DNA, 26 bp, Homo sapiens
gcttctggatctgctctgaggtcagg

SEQ ID NO: 65076 - DNA, 26 bp, Homo sapiens
cttctggatctgctctgaggtcaggg

SEQ ID NO: 65077 - DNA, 26 bp, Homo sapiens
ttctggatctgctctgaggtcagggt

SEQ ID NO: 65078 - DNA, 26 bp, Homo sapiens
tctggatctgctctgaggtcagggtc

SEQ ID NO: 65079 - DNA, 26 bp, Homo sapiens
ctggatctgctctgaggtcagggtcg

SEQ ID NO: 65080 - DNA, 26 bp, Homo sapiens
tggatctgctctgaggtcagggtcgt

SEQ ID NO: 65081 - DNA, 26 bp, Homo sapiens
ggatctgctctgaggtcagggtcgtg

SEQ ID NO: 65082 - DNA, 26 bp, Homo sapiens
gatctgctctgaggtcagggtcgtga

SEQ ID NO: 65083 - DNA, 26 bp, Homo sapiens
atctgctctgaggtcagggtcgtgat

SEQ ID NO: 65084 - DNA, 26 bp, Homo sapiens
tctgctctgaggtcagggtcgtgatg

SEQ ID NO: 65085 - DNA, 26 bp, Homo sapiens
ctgctctgaggtcagggtcgtgatgg

SEQ ID NO: 65086 - DNA, 26 bp, Homo sapiens
tgctctgaggtcagggtcgtgatggg

SEQ ID NO: 65087 - DNA, 26 bp, Homo sapiens
gctctgaggtcagggtcgtgatgggc

SEQ ID NO: 65088 - DNA, 26 bp, Homo sapiens
ctctgaggtcagggtcgtgatgggcg

SEQ ID NO: 65089 - DNA, 26 bp, Homo sapiens
tctgaggtcagggtcgtgatgggcgt

SEQ ID NO: 65090 - DNA, 26 bp, Homo sapiens
ctgaggtcagggtcgtgatgggcgtc

SEQ ID NO: 65091 - DNA, 26 bp, Homo sapiens
tgaggtcagggtcgtgatgggcgtca

SEQ ID NO: 65092 - DNA, 26 bp, Homo sapiens
gaggtcagggtcgtgatgggcgtcag

SEQ ID NO: 65093 - DNA, 26 bp, Homo sapiens
aggtcagggtcgtgatgggcgtcagc

SEQ ID NO: 65094 - DNA, 26 bp, Homo sapiens
ggtcagggtcgtgatgggcgtcagca

SEQ ID NO: 65095 - DNA, 26 bp, Homo sapiens
gtcagggtcgtgatgggcgtcagcag

SEQ ID NO: 65096 - DNA, 26 bp, Homo sapiens
tcagggtcgtgatgggcgtcagcagt

SEQ ID NO: 65097 - DNA, 26 bp, Homo sapiens
cagggtcgtgatgggcgtcagcagtt

SEQ ID NO: 65098 - DNA, 26 bp, Homo sapiens
agggtcgtgatgggcgtcagcagttt

SEQ ID NO: 65099 - DNA, 26 bp, Homo sapiens
gggtcgtgatgggcgtcagcagtttc

SEQ ID NO: 65100 - DNA, 26 bp, Homo sapiens
ggtcgtgatgggcgtcagcagtttct

SEQ ID NO: 65101 - DNA, 26 bp, Homo sapiens
gtcgtgatgggcgtcagcagtttctg

SEQ ID NO: 65102 - DNA, 26 bp, Homo sapiens
tcgtgatgggcgtcagcagtttctgc

SEQ ID NO: 65103 - DNA, 26 bp, Homo sapiens
cgtgatgggcgtcagcagtttctgct

SEQ ID NO: 65104 - DNA, 26 bp, Homo sapiens
gtgatgggcgtcagcagtttctgctc

SEQ ID NO: 65105 - DNA, 26 bp, Homo sapiens
tgatgggcgtcagcagtttctgctcc

SEQ ID NO: 65106 - DNA, 26 bp, Homo sapiens
gatgggcgtcagcagtttctgctcca

SEQ ID NO: 65107 - DNA, 26 bp, Homo sapiens
atgggcgtcagcagtttctgctccag

SEQ ID NO: 65108 - DNA, 26 bp, Homo sapiens
tgggcgtcagcagtttctgctccagg

SEQ ID NO: 65109 - DNA, 26 bp, Homo sapiens
gggcgtcagcagtttctgctccaggc

SEQ ID NO: 65110 - DNA, 26 bp, Homo sapiens
ggcgtcagcagtttctgctccaggct

SEQ ID NO: 65111 - DNA, 26 bp, Homo sapiens
gcgtcagcagtttctgctccaggctg

SEQ ID NO: 65112 - DNA, 26 bp, Homo sapiens
cgtcagcagtttctgctccaggctgg

SEQ ID NO: 65113 - DNA, 26 bp, Homo sapiens
gtcagcagtttctgctccaggctggg

SEQ ID NO: 65114 - DNA, 26 bp, Homo sapiens
tcagcagtttctgctccaggctgggc

SEQ ID NO: 65115 - DNA, 26 bp, Homo sapiens
cagcagtttctgctccaggctgggca

SEQ ID NO: 65116 - DNA, 26 bp, Homo sapiens
agcagtttctgctccaggctgggcag

SEQ ID NO: 65117 - DNA, 26 bp, Homo sapiens
gcagtttctgctccaggctgggcagc

SEQ ID NO: 65118 - DNA, 26 bp, Homo sapiens
cagtttctgctccaggctgggcagct

SEQ ID NO: 65119 - DNA, 26 bp, Homo sapiens
agtttctgctccaggctgggcagctc

SEQ ID NO: 65120 - DNA, 26 bp, Homo sapiens
gtttctgctccaggctgggcagctcc

SEQ ID NO: 65121 - DNA, 26 bp, Homo sapiens
tttctgctccaggctgggcagctccc

SEQ ID NO: 65122 - DNA, 26 bp, Homo sapiens
ttctgctccaggctgggcagctcccg

SEQ ID NO: 65123 - DNA, 26 bp, Homo sapiens
tctgctccaggctgggcagctcccgg

SEQ ID NO: 65124 - DNA, 26 bp, Homo sapiens
ctgctccaggctgggcagctcccgga

SEQ ID NO: 65125 - DNA, 26 bp, Homo sapiens
tgctccaggctgggcagctcccggaa

SEQ ID NO: 65126 - DNA, 26 bp, Homo sapiens
gctccaggctgggcagctcccggaag

SEQ ID NO: 65127 - DNA, 26 bp, Homo sapiens
ctccaggctgggcagctcccggaagg

SEQ ID NO: 65128 - DNA, 26 bp, Homo sapiens
tccaggctgggcagctcccggaaggt

SEQ ID NO: 65129 - DNA, 26 bp, Homo sapiens
ccaggctgggcagctcccggaaggtg

SEQ ID NO: 65130 - DNA, 26 bp, Homo sapiens
caggctgggcagctcccggaaggtgc

SEQ ID NO: 65131 - DNA, 26 bp, Homo sapiens
aggctgggcagctcccggaaggtgct

SEQ ID NO: 65132 - DNA, 26 bp, Homo sapiens
ggctgggcagctcccggaaggtgctc

SEQ ID NO: 65133 - DNA, 26 bp, Homo sapiens
gctgggcagctcccggaaggtgctca

SEQ ID NO: 65134 - DNA, 26 bp, Homo sapiens
ctgggcagctcccggaaggtgctcac

SEQ ID NO: 65135 - DNA, 26 bp, Homo sapiens
tgggcagctcccggaaggtgctcacc

SEQ ID NO: 65136 - DNA, 26 bp, Homo sapiens
gggcagctcccggaaggtgctcaccg

SEQ ID NO: 65137 - DNA, 26 bp, Homo sapiens
ggcagctcccggaaggtgctcaccga

SEQ ID NO: 65138 - DNA, 26 bp, Homo sapiens
gcagctcccggaaggtgctcaccgag

SEQ ID NO: 65139 - DNA, 26 bp, Homo sapiens
cagctcccggaaggtgctcaccgaga

SEQ ID NO: 65140 - DNA, 26 bp, Homo sapiens
agctcccggaaggtgctcaccgagaa

SEQ ID NO: 65141 - DNA, 26 bp, Homo sapiens
gctcccggaaggtgctcaccgagaac

SEQ ID NO: 65142 - DNA, 26 bp, Homo sapiens
ctcccggaaggtgctcaccgagaaca

SEQ ID NO: 65143 - DNA, 26 bp, Homo sapiens
tcccggaaggtgctcaccgagaacac

SEQ ID NO: 65144 - DNA, 26 bp, Homo sapiens
cccggaaggtgctcaccgagaacaca

SEQ ID NO: 65145 - DNA, 26 bp, Homo sapiens
ccggaaggtgctcaccgagaacacat

SEQ ID NO: 65146 - DNA, 26 bp, Homo sapiens
cggaaggtgctcaccgagaacacata

SEQ ID NO: 65147 - DNA, 26 bp, Homo sapiens
ggaaggtgctcaccgagaacacatat

SEQ ID NO: 65148 - DNA, 26 bp, Homo sapiens
gaaggtgctcaccgagaacacatatt

SEQ ID NO: 65149 - DNA, 26 bp, Homo sapiens
aaggtgctcaccgagaacacatattc

SEQ ID NO: 65150 - DNA, 26 bp, Homo sapiens
aggtgctcaccgagaacacatattcg

SEQ ID NO: 65151 - DNA, 26 bp, Homo sapiens
ggtgctcaccgagaacacatattcgg

SEQ ID NO: 65152 - DNA, 26 bp, Homo sapiens
gtgctcaccgagaacacatattcggg

SEQ ID NO: 65153 - DNA, 26 bp, Homo sapiens
tgctcaccgagaacacatattcgggg

SEQ ID NO: 65154 - DNA, 26 bp, Homo sapiens
gctcaccgagaacacatattcggggc

SEQ ID NO: 65155 - DNA, 26 bp, Homo sapiens
ctcaccgagaacacatattcggggct

SEQ ID NO: 65156 - DNA, 26 bp, Homo sapiens
tcaccgagaacacatattcggggctc

SEQ ID NO: 65157 - DNA, 26 bp, Homo sapiens
caccgagaacacatattcggggctca

SEQ ID NO: 65158 - DNA, 26 bp, Homo sapiens
accgagaacacatattcggggctcag

SEQ ID NO: 65159 - DNA, 26 bp, Homo sapiens
ccgagaacacatattcggggctcagc

SEQ ID NO: 65160 - DNA, 26 bp, Homo sapiens
cgagaacacatattcggggctcagcg

SEQ ID NO: 65161 - DNA, 26 bp, Homo sapiens
gagaacacatattcggggctcagcga

SEQ ID NO: 65162 - DNA, 26 bp, Homo sapiens
agaacacatattcggggctcagcgag

SEQ ID NO: 65163 - DNA, 26 bp, Homo sapiens
gaacacatattcggggctcagcgaga

SEQ ID NO: 65164 - DNA, 26 bp, Homo sapiens
aacacatattcggggctcagcgagat

SEQ ID NO: 65165 - DNA, 26 bp, Homo sapiens
acacatattcggggctcagcgagatc

SEQ ID NO: 65166 - DNA, 26 bp, Homo sapiens
cacatattcggggctcagcgagatct

SEQ ID NO: 65167 - DNA, 26 bp, Homo sapiens
acatattcggggctcagcgagatctt

SEQ ID NO: 65168 - DNA, 26 bp, Homo sapiens
catattcggggctcagcgagatcttc

SEQ ID NO: 65169 - DNA, 26 bp, Homo sapiens
atattcggggctcagcgagatcttca

SEQ ID NO: 65170 - DNA, 26 bp, Homo sapiens
tattcggggctcagcgagatcttcac

SEQ ID NO: 65171 - DNA, 26 bp, Homo sapiens
attcggggctcagcgagatcttcacc

SEQ ID NO: 65172 - DNA, 26 bp, Homo sapiens
ttcggggctcagcgagatcttcacca

SEQ ID NO: 65173 - DNA, 26 bp, Homo sapiens
tcggggctcagcgagatcttcaccag

SEQ ID NO: 65174 - DNA, 26 bp, Homo sapiens
cggggctcagcgagatcttcaccagc

SEQ ID NO: 65175 - DNA, 26 bp, Homo sapiens
ggggctcagcgagatcttcaccagct

SEQ ID NO: 65176 - DNA, 26 bp, Homo sapiens
gggctcagcgagatcttcaccagctc

SEQ ID NO: 65177 - DNA, 26 bp, Homo sapiens
ggctcagcgagatcttcaccagctcc

SEQ ID NO: 65178 - DNA, 26 bp, Homo sapiens
gctcagcgagatcttcaccagctcct

SEQ ID NO: 65179 - DNA, 26 bp, Homo sapiens
ctcagcgagatcttcaccagctcctc

SEQ ID NO: 65180 - DNA, 26 bp, Homo sapiens
tcagcgagatcttcaccagctcctcc

SEQ ID NO: 65181 - DNA, 26 bp, Homo sapiens
cagcgagatcttcaccagctcctcct

SEQ ID NO: 65182 - DNA, 26 bp, Homo sapiens
agcgagatcttcaccagctcctcctg

SEQ ID NO: 65183 - DNA, 26 bp, Homo sapiens
gcgagatcttcaccagctcctcctgg

SEQ ID NO: 65184 - DNA, 26 bp, Homo sapiens
cgagatcttcaccagctcctcctggt

SEQ ID NO: 65185 - DNA, 26 bp, Homo sapiens
gagatcttcaccagctcctcctggtc

SEQ ID NO: 65186 - DNA, 26 bp, Homo sapiens
agatcttcaccagctcctcctggtct

SEQ ID NO: 65187 - DNA, 26 bp, Homo sapiens
gatcttcaccagctcctcctggtctg

SEQ ID NO: 65188 - DNA, 26 bp, Homo sapiens
atcttcaccagctcctcctggtctgc

SEQ ID NO: 65189 - DNA, 26 bp, Homo sapiens
tcttcaccagctcctcctggtctgcg

SEQ ID NO: 65190 - DNA, 26 bp, Homo sapiens
cttcaccagctcctcctggtctgcgt

SEQ ID NO: 65191 - DNA, 26 bp, Homo sapiens
ttcaccagctcctcctggtctgcgtt

SEQ ID NO: 65192 - DNA, 26 bp, Homo sapiens
tcaccagctcctcctggtctgcgttc

SEQ ID NO: 65193 - DNA, 26 bp, Homo sapiens
caccagctcctcctggtctgcgttcc

SEQ ID NO: 65194 - DNA, 26 bp, Homo sapiens
accagctcctcctggtctgcgttcct

SEQ ID NO: 65195 - DNA, 26 bp, Homo sapiens
ccagctcctcctggtctgcgttcctg

SEQ ID NO: 65196 - DNA, 26 bp, Homo sapiens
cagctcctcctggtctgcgttcctgg

SEQ ID NO: 65197 - DNA, 26 bp, Homo sapiens
agctcctcctggtctgcgttcctggc

SEQ ID NO: 65198 - DNA, 26 bp, Homo sapiens
gctcctcctggtctgcgttcctggcg

SEQ ID NO: 65199 - DNA, 26 bp, Homo sapiens
ctcctcctggtctgcgttcctggcga

SEQ ID NO: 65200 - DNA, 26 bp, Homo sapiens
tcctcctggtctgcgttcctggcgat

SEQ ID NO: 65201 - DNA, 26 bp, Homo sapiens
cctcctggtctgcgttcctggcgatc

SEQ ID NO: 65202 - DNA, 26 bp, Homo sapiens
ctcctggtctgcgttcctggcgatcg

SEQ ID NO: 65203 - DNA, 26 bp, Homo sapiens
tcctggtctgcgttcctggcgatcgt

SEQ ID NO: 65204 - DNA, 26 bp, Homo sapiens
cctggtctgcgttcctggcgatcgtg

SEQ ID NO: 65205 - DNA, 26 bp, Homo sapiens
ctggtctgcgttcctggcgatcgtga

SEQ ID NO: 65206 - DNA, 26 bp, Homo sapiens
tggtctgcgttcctggcgatcgtgaa

SEQ ID NO: 65207 - DNA, 26 bp, Homo sapiens
ggtctgcgttcctggcgatcgtgaaa

SEQ ID NO: 65208 - DNA, 26 bp, Homo sapiens
gtctgcgttcctggcgatcgtgaaag

SEQ ID NO: 65209 - DNA, 26 bp, Homo sapiens
tctgcgttcctggcgatcgtgaaagg

SEQ ID NO: 65210 - DNA, 26 bp, Homo sapiens
ctgcgttcctggcgatcgtgaaaggg

SEQ ID NO: 65211 - DNA, 26 bp, Homo sapiens
tgcgttcctggcgatcgtgaaagggg

SEQ ID NO: 65212 - DNA, 26 bp, Homo sapiens
gcgttcctggcgatcgtgaaaggggc

SEQ ID NO: 65213 - DNA, 26 bp, Homo sapiens
cgttcctggcgatcgtgaaaggggcc

SEQ ID NO: 65214 - DNA, 26 bp, Homo sapiens
gttcctggcgatcgtgaaaggggcca

SEQ ID NO: 65215 - DNA, 26 bp, Homo sapiens
ttcctggcgatcgtgaaaggggccac

SEQ ID NO: 65216 - DNA, 26 bp, Homo sapiens
tcctggcgatcgtgaaaggggccacg

SEQ ID NO: 65217 - DNA, 26 bp, Homo sapiens
cctggcgatcgtgaaaggggccacgc

SEQ ID NO: 65218 - DNA, 26 bp, Homo sapiens
ctggcgatcgtgaaaggggccacgcc

SEQ ID NO: 65219 - DNA, 26 bp, Homo sapiens
tggcgatcgtgaaaggggccacgcca

SEQ ID NO: 65220 - DNA, 26 bp, Homo sapiens
ggcgatcgtgaaaggggccacgccaa

SEQ ID NO: 65221 - DNA, 26 bp, Homo sapiens
gcgatcgtgaaaggggccacgccaaa

SEQ ID NO: 65222 - DNA, 26 bp, Homo sapiens
cgatcgtgaaaggggccacgccaaac

SEQ ID NO: 65223 - DNA, 26 bp, Homo sapiens
gatcgtgaaaggggccacgccaaact

SEQ ID NO: 65224 - DNA, 26 bp, Homo sapiens
atcgtgaaaggggccacgccaaactg

SEQ ID NO: 65225 - DNA, 26 bp, Homo sapiens
tcgtgaaaggggccacgccaaactgc

SEQ ID NO: 65226 - DNA, 26 bp, Homo sapiens
cgtgaaaggggccacgccaaactgct

SEQ ID NO: 65227 - DNA, 26 bp, Homo sapiens
gtgaaaggggccacgccaaactgctt

SEQ ID NO: 65228 - DNA, 26 bp, Homo sapiens
tgaaaggggccacgccaaactgcttg

SEQ ID NO: 65229 - DNA, 26 bp, Homo sapiens
gaaaggggccacgccaaactgcttga

SEQ ID NO: 65230 - DNA, 26 bp, Homo sapiens
aaaggggccacgccaaactgcttgag

SEQ ID NO: 65231 - DNA, 26 bp, Homo sapiens
aaggggccacgccaaactgcttgagc

SEQ ID NO: 65232 - DNA, 26 bp, Homo sapiens
aggggccacgccaaactgcttgagct

SEQ ID NO: 65233 - DNA, 26 bp, Homo sapiens
ggggccacgccaaactgcttgagctc

SEQ ID NO: 65234 - DNA, 26 bp, Homo sapiens
gggccacgccaaactgcttgagctcc

SEQ ID NO: 65235 - DNA, 26 bp, Homo sapiens
ggccacgccaaactgcttgagctcca

SEQ ID NO: 65236 - DNA, 26 bp, Homo sapiens
gccacgccaaactgcttgagctccac

SEQ ID NO: 65237 - DNA, 26 bp, Homo sapiens
ccacgccaaactgcttgagctccacc

SEQ ID NO: 65238 - DNA, 26 bp, Homo sapiens
cacgccaaactgcttgagctccaccg

SEQ ID NO: 65239 - DNA, 26 bp, Homo sapiens
acgccaaactgcttgagctccaccgc

SEQ ID NO: 65240 - DNA, 26 bp, Homo sapiens
cgccaaactgcttgagctccaccgcc

SEQ ID NO: 65241 - DNA, 26 bp, Homo sapiens
gccaaactgcttgagctccaccgccg

SEQ ID NO: 65242 - DNA, 26 bp, Homo sapiens
ccaaactgcttgagctccaccgccgg

SEQ ID NO: 65243 - DNA, 26 bp, Homo sapiens
caaactgcttgagctccaccgccggg

SEQ ID NO: 65244 - DNA, 26 bp, Homo sapiens
aaactgcttgagctccaccgccgggt

SEQ ID NO: 65245 - DNA, 26 bp, Homo sapiens
aactgcttgagctccaccgccgggtc

SEQ ID NO: 65246 - DNA, 26 bp, Homo sapiens
actgcttgagctccaccgccgggtcg

SEQ ID NO: 65247 - DNA, 26 bp, Homo sapiens
ctgcttgagctccaccgccgggtcgt

SEQ ID NO: 65248 - DNA, 26 bp, Homo sapiens
tgcttgagctccaccgccgggtcgtc

SEQ ID NO: 65249 - DNA, 26 bp, Homo sapiens
gcttgagctccaccgccgggtcgtcc

SEQ ID NO: 65250 - DNA, 26 bp, Homo sapiens
cttgagctccaccgccgggtcgtcca

SEQ ID NO: 65251 - DNA, 26 bp, Homo sapiens
ttgagctccaccgccgggtcgtccac

SEQ ID NO: 65252 - DNA, 26 bp, Homo sapiens
tgagctccaccgccgggtcgtccacc

SEQ ID NO: 65253 - DNA, 26 bp, Homo sapiens
gagctccaccgccgggtcgtccacct

SEQ ID NO: 65254 - DNA, 26 bp, Homo sapiens
agctccaccgccgggtcgtccacctc

SEQ ID NO: 65255 - DNA, 26 bp, Homo sapiens
gctccaccgccgggtcgtccacctca

SEQ ID NO: 65256 - DNA, 26 bp, Homo sapiens
ctccaccgccgggtcgtccacctcat

SEQ ID NO: 65257 - DNA, 26 bp, Homo sapiens
tccaccgccgggtcgtccacctcatc

SEQ ID NO: 65258 - DNA, 26 bp, Homo sapiens
ccaccgccgggtcgtccacctcatcg

SEQ ID NO: 65259 - DNA, 26 bp, Homo sapiens
caccgccgggtcgtccacctcatcgt

SEQ ID NO: 65260 - DNA, 26 bp, Homo sapiens
accgccgggtcgtccacctcatcgtc

SEQ ID NO: 65261 - DNA, 26 bp, Homo sapiens
ccgccgggtcgtccacctcatcgtca

SEQ ID NO: 65262 - DNA, 26 bp, Homo sapiens
cgccgggtcgtccacctcatcgtcag

SEQ ID NO: 65263 - DNA, 26 bp, Homo sapiens
gccgggtcgtccacctcatcgtcaga

SEQ ID NO: 65264 - DNA, 26 bp, Homo sapiens
ccgggtcgtccacctcatcgtcagac

SEQ ID NO: 65265 - DNA, 26 bp, Homo sapiens
cgggtcgtccacctcatcgtcagact

SEQ ID NO: 65266 - DNA, 26 bp, Homo sapiens
gggtcgtccacctcatcgtcagactt

SEQ ID NO: 65267 - DNA, 26 bp, Homo sapiens
ggtcgtccacctcatcgtcagacttt

SEQ ID NO: 65268 - DNA, 26 bp, Homo sapiens
gtcgtccacctcatcgtcagactttc

SEQ ID NO: 65269 - DNA, 26 bp, Homo sapiens
tcgtccacctcatcgtcagactttcc

SEQ ID NO: 65270 - DNA, 26 bp, Homo sapiens
cgtccacctcatcgtcagactttcca

SEQ ID NO: 65271 - DNA, 26 bp, Homo sapiens
gtccacctcatcgtcagactttccag

SEQ ID NO: 65272 - DNA, 26 bp, Homo sapiens
tccacctcatcgtcagactttccaga

SEQ ID NO: 65273 - DNA, 26 bp, Homo sapiens
ccacctcatcgtcagactttccagac

SEQ ID NO: 65274 - DNA, 26 bp, Homo sapiens
cacctcatcgtcagactttccagacg

SEQ ID NO: 65275 - DNA, 26 bp, Homo sapiens
acctcatcgtcagactttccagacga

SEQ ID NO: 65276 - DNA, 26 bp, Homo sapiens
cctcatcgtcagactttccagacgag

SEQ ID NO: 65277 - DNA, 26 bp, Homo sapiens
ctcatcgtcagactttccagacgaga

SEQ ID NO: 65278 - DNA, 26 bp, Homo sapiens
tcatcgtcagactttccagacgagat

SEQ ID NO: 65279 - DNA, 26 bp, Homo sapiens
catcgtcagactttccagacgagatg

SEQ ID NO: 65280 - DNA, 26 bp, Homo sapiens
atcgtcagactttccagacgagatga

SEQ ID NO: 65281 - DNA, 26 bp, Homo sapiens
tcgtcagactttccagacgagatgag

SEQ ID NO: 65282 - DNA, 26 bp, Homo sapiens
cgtcagactttccagacgagatgagg

SEQ ID NO: 65283 - DNA, 26 bp, Homo sapiens
gtcagactttccagacgagatgagga

SEQ ID NO: 65284 - DNA, 26 bp, Homo sapiens
tcagactttccagacgagatgaggac

SEQ ID NO: 65285 - DNA, 26 bp, Homo sapiens
cagactttccagacgagatgaggacc

SEQ ID NO: 65286 - DNA, 26 bp, Homo sapiens
agactttccagacgagatgaggacca

SEQ ID NO: 65287 - DNA, 26 bp, Homo sapiens
gactttccagacgagatgaggaccag

SEQ ID NO: 65288 - DNA, 26 bp, Homo sapiens
actttccagacgagatgaggaccagg

SEQ ID NO: 65289 - DNA, 26 bp, Homo sapiens
ctttccagacgagatgaggaccagga

SEQ ID NO: 65290 - DNA, 26 bp, Homo sapiens
tttccagacgagatgaggaccaggaa

SEQ ID NO: 65291 - DNA, 26 bp, Homo sapiens
ttccagacgagatgaggaccaggaac

SEQ ID NO: 65292 - DNA, 26 bp, Homo sapiens
tccagacgagatgaggaccaggaact

SEQ ID NO: 65293 - DNA, 26 bp, Homo sapiens
ccagacgagatgaggaccaggaactg

SEQ ID NO: 65294 - DNA, 26 bp, Homo sapiens
cagacgagatgaggaccaggaactgc

SEQ ID NO: 65295 - DNA, 26 bp, Homo sapiens
agacgagatgaggaccaggaactgcg

SEQ ID NO: 65296 - DNA, 26 bp, Homo sapiens
gacgagatgaggaccaggaactgcgg

SEQ ID NO: 65297 - DNA, 26 bp, Homo sapiens
acgagatgaggaccaggaactgcggg

SEQ ID NO: 65298 - DNA, 26 bp, Homo sapiens
cgagatgaggaccaggaactgcggga

SEQ ID NO: 65299 - DNA, 26 bp, Homo sapiens
gagatgaggaccaggaactgcgggac

SEQ ID NO: 65300 - DNA, 26 bp, Homo sapiens
agatgaggaccaggaactgcgggacg

SEQ ID NO: 65301 - DNA, 26 bp, Homo sapiens
gatgaggaccaggaactgcgggacgc

SEQ ID NO: 65302 - DNA, 26 bp, Homo sapiens
atgaggaccaggaactgcgggacgcc

SEQ ID NO: 65303 - DNA, 26 bp, Homo sapiens
tgaggaccaggaactgcgggacgccc

SEQ ID NO: 65304 - DNA, 26 bp, Homo sapiens
gaggaccaggaactgcgggacgccct

SEQ ID NO: 65305 - DNA, 26 bp, Homo sapiens
aggaccaggaactgcgggacgccctc

SEQ ID NO: 65306 - DNA, 26 bp, Homo sapiens
ggaccaggaactgcgggacgccctct

SEQ ID NO: 65307 - DNA, 26 bp, Homo sapiens
gaccaggaactgcgggacgccctctt

SEQ ID NO: 65308 - DNA, 26 bp, Homo sapiens
accaggaactgcgggacgccctcttc

SEQ ID NO: 65309 - DNA, 26 bp, Homo sapiens
ccaggaactgcgggacgccctcttca

SEQ ID NO: 65310 - DNA, 26 bp, Homo sapiens
caggaactgcgggacgccctcttcaa

SEQ ID NO: 65311 - DNA, 26 bp, Homo sapiens
aggaactgcgggacgccctcttcaat

SEQ ID NO: 65312 - DNA, 26 bp, Homo sapiens
ggaactgcgggacgccctcttcaatg

SEQ ID NO: 65313 - DNA, 26 bp, Homo sapiens
gaactgcgggacgccctcttcaatgc

SEQ ID NO: 65314 - DNA, 26 bp, Homo sapiens
aactgcgggacgccctcttcaatgcg

SEQ ID NO: 65315 - DNA, 26 bp, Homo sapiens
actgcgggacgccctcttcaatgcgg

SEQ ID NO: 65316 - DNA, 26 bp, Homo sapiens
ctgcgggacgccctcttcaatgcggc

SEQ ID NO: 65317 - DNA, 26 bp, Homo sapiens
tgcgggacgccctcttcaatgcggct

SEQ ID NO: 65318 - DNA, 26 bp, Homo sapiens
gcgggacgccctcttcaatgcggctc

SEQ ID NO: 65319 - DNA, 26 bp, Homo sapiens
cgggacgccctcttcaatgcggctcc

SEQ ID NO: 65320 - DNA, 26 bp, Homo sapiens
gggacgccctcttcaatgcggctccc

SEQ ID NO: 65321 - DNA, 26 bp, Homo sapiens
ggacgccctcttcaatgcggctcccc

SEQ ID NO: 65322 - DNA, 26 bp, Homo sapiens
gacgccctcttcaatgcggctcccca

SEQ ID NO: 65323 - DNA, 26 bp, Homo sapiens
acgccctcttcaatgcggctccccag

SEQ ID NO: 65324 - DNA, 26 bp, Homo sapiens
cgccctcttcaatgcggctccccagg

SEQ ID NO: 65325 - DNA, 26 bp, Homo sapiens
gccctcttcaatgcggctccccaggg

SEQ ID NO: 65326 - DNA, 26 bp, Homo sapiens
ccctcttcaatgcggctccccagggg

SEQ ID NO: 65327 - DNA, 26 bp, Homo sapiens
cctcttcaatgcggctccccaggggc

SEQ ID NO: 65328 - DNA, 26 bp, Homo sapiens
ctcttcaatgcggctccccaggggcc

SEQ ID NO: 65329 - DNA, 26 bp, Homo sapiens
tcttcaatgcggctccccaggggcct

SEQ ID NO: 65330 - DNA, 26 bp, Homo sapiens
cttcaatgcggctccccaggggcctc

SEQ ID NO: 65331 - DNA, 26 bp, Homo sapiens
ttcaatgcggctccccaggggcctct

SEQ ID NO: 65332 - DNA, 26 bp, Homo sapiens
tcaatgcggctccccaggggcctctt

SEQ ID NO: 65333 - DNA, 26 bp, Homo sapiens
caatgcggctccccaggggcctcttg

SEQ ID NO: 65334 - DNA, 26 bp, Homo sapiens
aatgcggctccccaggggcctcttga

SEQ ID NO: 65335 - DNA, 26 bp, Homo sapiens
atgcggctccccaggggcctcttgaa

SEQ ID NO: 65336 - DNA, 26 bp, Homo sapiens
tgcggctccccaggggcctcttgaag

SEQ ID NO: 65337 - DNA, 26 bp, Homo sapiens
gcggctccccaggggcctcttgaaga

SEQ ID NO: 65338 - DNA, 26 bp, Homo sapiens
cggctccccaggggcctcttgaagat

SEQ ID NO: 65339 - DNA, 26 bp, Homo sapiens
ggctccccaggggcctcttgaagatg

SEQ ID NO: 65340 - DNA, 26 bp, Homo sapiens
gctccccaggggcctcttgaagatgt

SEQ ID NO: 65341 - DNA, 26 bp, Homo sapiens
ctccccaggggcctcttgaagatgtt

SEQ ID NO: 65342 - DNA, 26 bp, Homo sapiens
tccccaggggcctcttgaagatgttc

SEQ ID NO: 65343 - DNA, 26 bp, Homo sapiens
ccccaggggcctcttgaagatgttcc

SEQ ID NO: 65344 - DNA, 26 bp, Homo sapiens
cccaggggcctcttgaagatgttcct

SEQ ID NO: 65345 - DNA, 26 bp, Homo sapiens
ccaggggcctcttgaagatgttcctg

SEQ ID NO: 65346 - DNA, 26 bp, Homo sapiens
caggggcctcttgaagatgttcctgg

SEQ ID NO: 65347 - DNA, 26 bp, Homo sapiens
aggggcctcttgaagatgttcctgga

SEQ ID NO: 65348 - DNA, 26 bp, Homo sapiens
ggggcctcttgaagatgttcctggac

SEQ ID NO: 65349 - DNA, 26 bp, Homo sapiens
gggcctcttgaagatgttcctggaca

SEQ ID NO: 65350 - DNA, 26 bp, Homo sapiens
ggcctcttgaagatgttcctggacac

SEQ ID NO: 65351 - DNA, 26 bp, Homo sapiens
gcctcttgaagatgttcctggacacg

SEQ ID NO: 65352 - DNA, 26 bp, Homo sapiens
cctcttgaagatgttcctggacacgt

SEQ ID NO: 65353 - DNA, 26 bp, Homo sapiens
ctcttgaagatgttcctggacacgta

SEQ ID NO: 65354 - DNA, 26 bp, Homo sapiens
tcttgaagatgttcctggacacgtac

SEQ ID NO: 65355 - DNA, 26 bp, Homo sapiens
cttgaagatgttcctggacacgtact

SEQ ID NO: 65356 - DNA, 26 bp, Homo sapiens
ttgaagatgttcctggacacgtactc

SEQ ID NO: 65357 - DNA, 26 bp, Homo sapiens
tgaagatgttcctggacacgtactcc

SEQ ID NO: 65358 - DNA, 26 bp, Homo sapiens
gaagatgttcctggacacgtactcca

SEQ ID NO: 65359 - DNA, 26 bp, Homo sapiens
aagatgttcctggacacgtactccag

SEQ ID NO: 65360 - DNA, 26 bp, Homo sapiens
agatgttcctggacacgtactccagg

SEQ ID NO: 65361 - DNA, 26 bp, Homo sapiens
gatgttcctggacacgtactccaggg

SEQ ID NO: 65362 - DNA, 26 bp, Homo sapiens
atgttcctggacacgtactccagggc

SEQ ID NO: 65363 - DNA, 26 bp, Homo sapiens
tgttcctggacacgtactccagggca

SEQ ID NO: 65364 - DNA, 26 bp, Homo sapiens
gttcctggacacgtactccagggcat

SEQ ID NO: 65365 - DNA, 26 bp, Homo sapiens
ttcctggacacgtactccagggcatt

SEQ ID NO: 65366 - DNA, 26 bp, Homo sapiens
tcctggacacgtactccagggcattg

SEQ ID NO: 65367 - DNA, 26 bp, Homo sapiens
cctggacacgtactccagggcattgc

SEQ ID NO: 65368 - DNA, 26 bp, Homo sapiens
ctggacacgtactccagggcattgcc

SEQ ID NO: 65369 - DNA, 26 bp, Homo sapiens
tggacacgtactccagggcattgccc

SEQ ID NO: 65370 - DNA, 26 bp, Homo sapiens
ggacacgtactccagggcattgccca

SEQ ID NO: 65371 - DNA, 26 bp, Homo sapiens
gacacgtactccagggcattgcccac

SEQ ID NO: 65372 - DNA, 26 bp, Homo sapiens
acacgtactccagggcattgcccacg

SEQ ID NO: 65373 - DNA, 26 bp, Homo sapiens
cacgtactccagggcattgcccacgt

SEQ ID NO: 65374 - DNA, 26 bp, Homo sapiens
acgtactccagggcattgcccacgtt

SEQ ID NO: 65375 - DNA, 26 bp, Homo sapiens
cgtactccagggcattgcccacgttg

SEQ ID NO: 65376 - DNA, 26 bp, Homo sapiens
gtactccagggcattgcccacgttga

SEQ ID NO: 65377 - DNA, 26 bp, Homo sapiens
tactccagggcattgcccacgttgat

SEQ ID NO: 65378 - DNA, 26 bp, Homo sapiens
actccagggcattgcccacgttgatc

SEQ ID NO: 65379 - DNA, 26 bp, Homo sapiens
ctccagggcattgcccacgttgatct

SEQ ID NO: 65380 - DNA, 26 bp, Homo sapiens
tccagggcattgcccacgttgatctg

SEQ ID NO: 65381 - DNA, 26 bp, Homo sapiens
ccagggcattgcccacgttgatctgc

SEQ ID NO: 65382 - DNA, 26 bp, Homo sapiens
cagggcattgcccacgttgatctgcc

SEQ ID NO: 65383 - DNA, 26 bp, Homo sapiens
agggcattgcccacgttgatctgccg

SEQ ID NO: 65384 - DNA, 26 bp, Homo sapiens
gggcattgcccacgttgatctgccgc

SEQ ID NO: 65385 - DNA, 26 bp, Homo sapiens
ggcattgcccacgttgatctgccgcc

SEQ ID NO: 65386 - DNA, 26 bp, Homo sapiens
gcattgcccacgttgatctgccgccc

SEQ ID NO: 65387 - DNA, 26 bp, Homo sapiens
cattgcccacgttgatctgccgccct

SEQ ID NO: 65388 - DNA, 26 bp, Homo sapiens
attgcccacgttgatctgccgccctc

SEQ ID NO: 65389 - DNA, 26 bp, Homo sapiens
ttgcccacgttgatctgccgccctcc

SEQ ID NO: 65390 - DNA, 26 bp, Homo sapiens
tgcccacgttgatctgccgccctccc

SEQ ID NO: 65391 - DNA, 26 bp, Homo sapiens
gcccacgttgatctgccgccctccct

SEQ ID NO: 65392 - DNA, 26 bp, Homo sapiens
cccacgttgatctgccgccctccctt

SEQ ID NO: 65393 - DNA, 26 bp, Homo sapiens
ccacgttgatctgccgccctcccttg

SEQ ID NO: 65394 - DNA, 26 bp, Homo sapiens
cacgttgatctgccgccctcccttgg

SEQ ID NO: 65395 - DNA, 26 bp, Homo sapiens
acgttgatctgccgccctcccttggg

SEQ ID NO: 65396 - DNA, 26 bp, Homo sapiens
cgttgatctgccgccctcccttgggc

SEQ ID NO: 65397 - DNA, 26 bp, Homo sapiens
gttgatctgccgccctcccttgggcc

SEQ ID NO: 65398 - DNA, 26 bp, Homo sapiens
ttgatctgccgccctcccttgggcct

SEQ ID NO: 65399 - DNA, 26 bp, Homo sapiens
tgatctgccgccctcccttgggcctc

SEQ ID NO: 65400 - DNA, 26 bp, Homo sapiens
gatctgccgccctcccttgggcctca

SEQ ID NO: 65401 - DNA, 26 bp, Homo sapiens
atctgccgccctcccttgggcctcag

SEQ ID NO: 65402 - DNA, 26 bp, Homo sapiens
tctgccgccctcccttgggcctcagc

SEQ ID NO: 65403 - DNA, 26 bp, Homo sapiens
ctgccgccctcccttgggcctcagcc

SEQ ID NO: 65404 - DNA, 26 bp, Homo sapiens
tgccgccctcccttgggcctcagccg

SEQ ID NO: 65405 - DNA, 26 bp, Homo sapiens
gccgccctcccttgggcctcagccgc

SEQ ID NO: 65406 - DNA, 26 bp, Homo sapiens
ccgccctcccttgggcctcagccgct

SEQ ID NO: 65407 - DNA, 26 bp, Homo sapiens
cgccctcccttgggcctcagccgctg

SEQ ID NO: 65408 - DNA, 26 bp, Homo sapiens
gccctcccttgggcctcagccgctgc

SEQ ID NO: 65409 - DNA, 26 bp, Homo sapiens
ccctcccttgggcctcagccgctgca

SEQ ID NO: 65410 - DNA, 26 bp, Homo sapiens
cctcccttgggcctcagccgctgcac

SEQ ID NO: 65411 - DNA, 26 bp, Homo sapiens
ctcccttgggcctcagccgctgcacc

SEQ ID NO: 65412 - DNA, 26 bp, Homo sapiens
tcccttgggcctcagccgctgcaccg

SEQ ID NO: 65413 - DNA, 26 bp, Homo sapiens
cccttgggcctcagccgctgcaccgc

SEQ ID NO: 65414 - DNA, 26 bp, Homo sapiens
ccttgggcctcagccgctgcaccgcg

SEQ ID NO: 65415 - DNA, 26 bp, Homo sapiens
cttgggcctcagccgctgcaccgcgt

SEQ ID NO: 65416 - DNA, 26 bp, Homo sapiens
ttgggcctcagccgctgcaccgcgtt

SEQ ID NO: 65417 - DNA, 26 bp, Homo sapiens
tgggcctcagccgctgcaccgcgttc

SEQ ID NO: 65418 - DNA, 26 bp, Homo sapiens
gggcctcagccgctgcaccgcgttct

SEQ ID NO: 65419 - DNA, 26 bp, Homo sapiens
ggcctcagccgctgcaccgcgttctg

SEQ ID NO: 65420 - DNA, 26 bp, Homo sapiens
gcctcagccgctgcaccgcgttctgc

SEQ ID NO: 65421 - DNA, 26 bp, Homo sapiens
cctcagccgctgcaccgcgttctgca

SEQ ID NO: 65422 - DNA, 26 bp, Homo sapiens
ctcagccgctgcaccgcgttctgcac

SEQ ID NO: 65423 - DNA, 26 bp, Homo sapiens
tcagccgctgcaccgcgttctgcact

SEQ ID NO: 65424 - DNA, 26 bp, Homo sapiens
cagccgctgcaccgcgttctgcactt

SEQ ID NO: 65425 - DNA, 26 bp, Homo sapiens
agccgctgcaccgcgttctgcacttc

SEQ ID NO: 65426 - DNA, 26 bp, Homo sapiens
gccgctgcaccgcgttctgcacttca

SEQ ID NO: 65427 - DNA, 26 bp, Homo sapiens
ccgctgcaccgcgttctgcacttcat

SEQ ID NO: 65428 - DNA, 26 bp, Homo sapiens
cgctgcaccgcgttctgcacttcatc

SEQ ID NO: 65429 - DNA, 26 bp, Homo sapiens
gctgcaccgcgttctgcacttcatcc

SEQ ID NO: 65430 - DNA, 26 bp, Homo sapiens
ctgcaccgcgttctgcacttcatcct

SEQ ID NO: 65431 - DNA, 26 bp, Homo sapiens
tgcaccgcgttctgcacttcatcctt

SEQ ID NO: 65432 - DNA, 26 bp, Homo sapiens
gcaccgcgttctgcacttcatccttg

SEQ ID NO: 65433 - DNA, 26 bp, Homo sapiens
caccgcgttctgcacttcatccttgc

SEQ ID NO: 65434 - DNA, 26 bp, Homo sapiens
accgcgttctgcacttcatccttgct

SEQ ID NO: 65435 - DNA, 26 bp, Homo sapiens
ccgcgttctgcacttcatccttgctg

SEQ ID NO: 65436 - DNA, 26 bp, Homo sapiens
cgcgttctgcacttcatccttgctgg

SEQ ID NO: 65437 - DNA, 26 bp, Homo sapiens
gcgttctgcacttcatccttgctgga

SEQ ID NO: 65438 - DNA, 26 bp, Homo sapiens
cgttctgcacttcatccttgctggaa

SEQ ID NO: 65439 - DNA, 26 bp, Homo sapiens
gttctgcacttcatccttgctggaat

SEQ ID NO: 65440 - DNA, 26 bp, Homo sapiens
ttctgcacttcatccttgctggaatg

SEQ ID NO: 65441 - DNA, 26 bp, Homo sapiens
tctgcacttcatccttgctggaatgg

SEQ ID NO: 65442 - DNA, 26 bp, Homo sapiens
ctgcacttcatccttgctggaatggg

SEQ ID NO: 65443 - DNA, 26 bp, Homo sapiens
tgcacttcatccttgctggaatgggc

SEQ ID NO: 65444 - DNA, 26 bp, Homo sapiens
gcacttcatccttgctggaatgggcg

SEQ ID NO: 65445 - DNA, 26 bp, Homo sapiens
cacttcatccttgctggaatgggcgt

SEQ ID NO: 65446 - DNA, 26 bp, Homo sapiens
acttcatccttgctggaatgggcgtt

SEQ ID NO: 65447 - DNA, 26 bp, Homo sapiens
cttcatccttgctggaatgggcgttc

SEQ ID NO: 65448 - DNA, 26 bp, Homo sapiens
ttcatccttgctggaatgggcgttca

SEQ ID NO: 65449 - DNA, 26 bp, Homo sapiens
tcatccttgctggaatgggcgttcag

SEQ ID NO: 65450 - DNA, 26 bp, Homo sapiens
catccttgctggaatgggcgttcagc

SEQ ID NO: 65451 - DNA, 26 bp, Homo sapiens
atccttgctggaatgggcgttcagca

SEQ ID NO: 65452 - DNA, 26 bp, Homo sapiens
tccttgctggaatgggcgttcagcag

SEQ ID NO: 65453 - DNA, 26 bp, Homo sapiens
ccttgctggaatgggcgttcagcagg

SEQ ID NO: 65454 - DNA, 26 bp, Homo sapiens
cttgctggaatgggcgttcagcagga

SEQ ID NO: 65455 - DNA, 26 bp, Homo sapiens
ttgctggaatgggcgttcagcaggaa

SEQ ID NO: 65456 - DNA, 26 bp, Homo sapiens
tgctggaatgggcgttcagcaggaac

SEQ ID NO: 65457 - DNA, 26 bp, Homo sapiens
gctggaatgggcgttcagcaggaact

SEQ ID NO: 65458 - DNA, 26 bp, Homo sapiens
ctggaatgggcgttcagcaggaactc

SEQ ID NO: 65459 - DNA, 26 bp, Homo sapiens
tggaatgggcgttcagcaggaactcc

SEQ ID NO: 65460 - DNA, 26 bp, Homo sapiens
ggaatgggcgttcagcaggaactcca

SEQ ID NO: 65461 - DNA, 26 bp, Homo sapiens
gaatgggcgttcagcaggaactccac

SEQ ID NO: 65462 - DNA, 26 bp, Homo sapiens
aatgggcgttcagcaggaactccacc

SEQ ID NO: 65463 - DNA, 26 bp, Homo sapiens
atgggcgttcagcaggaactccacct

SEQ ID NO: 65464 - DNA, 26 bp, Homo sapiens
tgggcgttcagcaggaactccacctt

SEQ ID NO: 65465 - DNA, 26 bp, Homo sapiens
gggcgttcagcaggaactccaccttg

SEQ ID NO: 65466 - DNA, 26 bp, Homo sapiens
ggcgttcagcaggaactccaccttgg

SEQ ID NO: 65467 - DNA, 26 bp, Homo sapiens
gcgttcagcaggaactccaccttggg

SEQ ID NO: 65468 - DNA, 26 bp, Homo sapiens
cgttcagcaggaactccaccttgggg

SEQ ID NO: 65469 - DNA, 26 bp, Homo sapiens
gttcagcaggaactccaccttggggt

SEQ ID NO: 65470 - DNA, 26 bp, Homo sapiens
ttcagcaggaactccaccttggggtc

SEQ ID NO: 65471 - DNA, 26 bp, Homo sapiens
tcagcaggaactccaccttggggtca

SEQ ID NO: 65472 - DNA, 26 bp, Homo sapiens
cagcaggaactccaccttggggtcat

SEQ ID NO: 65473 - DNA, 26 bp, Homo sapiens
agcaggaactccaccttggggtcatc

SEQ ID NO: 65474 - DNA, 26 bp, Homo sapiens
gcaggaactccaccttggggtcatcg

SEQ ID NO: 65475 - DNA, 26 bp, Homo sapiens
caggaactccaccttggggtcatcgc

SEQ ID NO: 65476 - DNA, 26 bp, Homo sapiens
aggaactccaccttggggtcatcgct

SEQ ID NO: 65477 - DNA, 26 bp, Homo sapiens
ggaactccaccttggggtcatcgctg

SEQ ID NO: 65478 - DNA, 26 bp, Homo sapiens
gaactccaccttggggtcatcgctga

SEQ ID NO: 65479 - DNA, 26 bp, Homo sapiens
aactccaccttggggtcatcgctgaa

SEQ ID NO: 65480 - DNA, 26 bp, Homo sapiens
actccaccttggggtcatcgctgaac

SEQ ID NO: 65481 - DNA, 26 bp, Homo sapiens
ctccaccttggggtcatcgctgaact

SEQ ID NO: 65482 - DNA, 26 bp, Homo sapiens
tccaccttggggtcatcgctgaactg

SEQ ID NO: 65483 - DNA, 26 bp, Homo sapiens
ccaccttggggtcatcgctgaactgg

SEQ ID NO: 65484 - DNA, 26 bp, Homo sapiens
caccttggggtcatcgctgaactgga

SEQ ID NO: 65485 - DNA, 26 bp, Homo sapiens
accttggggtcatcgctgaactggat

SEQ ID NO: 65486 - DNA, 26 bp, Homo sapiens
ccttggggtcatcgctgaactggatg

SEQ ID NO: 65487 - DNA, 26 bp, Homo sapiens
cttggggtcatcgctgaactggatga

SEQ ID NO: 65488 - DNA, 26 bp, Homo sapiens
ttggggtcatcgctgaactggatgac

SEQ ID NO: 65489 - DNA, 26 bp, Homo sapiens
tggggtcatcgctgaactggatgaca

SEQ ID NO: 65490 - DNA, 26 bp, Homo sapiens
ggggtcatcgctgaactggatgacag

SEQ ID NO: 65491 - DNA, 26 bp, Homo sapiens
gggtcatcgctgaactggatgacagc

SEQ ID NO: 65492 - DNA, 26 bp, Homo sapiens
ggtcatcgctgaactggatgacagcc

SEQ ID NO: 65493 - DNA, 26 bp, Homo sapiens
gtcatcgctgaactggatgacagcca

SEQ ID NO: 65494 - DNA, 26 bp, Homo sapiens
tcatcgctgaactggatgacagccac

SEQ ID NO: 65495 - DNA, 26 bp, Homo sapiens
catcgctgaactggatgacagccacc

SEQ ID NO: 65496 - DNA, 26 bp, Homo sapiens
atcgctgaactggatgacagccaccc

SEQ ID NO: 65497 - DNA, 26 bp, Homo sapiens
tcgctgaactggatgacagccacccg

SEQ ID NO: 65498 - DNA, 26 bp, Homo sapiens
cgctgaactggatgacagccacccgg

SEQ ID NO: 65499 - DNA, 26 bp, Homo sapiens
gctgaactggatgacagccacccggg

SEQ ID NO: 65500 - DNA, 26 bp, Homo sapiens
ctgaactggatgacagccacccgggt

SEQ ID NO: 65501 - DNA, 26 bp, Homo sapiens
tgaactggatgacagccacccgggtg

SEQ ID NO: 65502 - DNA, 26 bp, Homo sapiens
gaactggatgacagccacccgggtgg

SEQ ID NO: 65503 - DNA, 26 bp, Homo sapiens
aactggatgacagccacccgggtggt

SEQ ID NO: 65504 - DNA, 26 bp, Homo sapiens
actggatgacagccacccgggtggtg

SEQ ID NO: 65505 - DNA, 26 bp, Homo sapiens
ctggatgacagccacccgggtggtgt

SEQ ID NO: 65506 - DNA, 26 bp, Homo sapiens
tggatgacagccacccgggtggtgtc

SEQ ID NO: 65507 - DNA, 26 bp, Homo sapiens
ggatgacagccacccgggtggtgtca

SEQ ID NO: 65508 - DNA, 26 bp, Homo sapiens
gatgacagccacccgggtggtgtcaa

SEQ ID NO: 65509 - DNA, 26 bp, Homo sapiens
atgacagccacccgggtggtgtcaaa

SEQ ID NO: 65510 - DNA, 26 bp, Homo sapiens
tgacagccacccgggtggtgtcaaag

SEQ ID NO: 65511 - DNA, 26 bp, Homo sapiens
gacagccacccgggtggtgtcaaagc

SEQ ID NO: 65512 - DNA, 26 bp, Homo sapiens
acagccacccgggtggtgtcaaagcc

SEQ ID NO: 65513 - DNA, 26 bp, Homo sapiens
cagccacccgggtggtgtcaaagccc

SEQ ID NO: 65514 - DNA, 26 bp, Homo sapiens
agccacccgggtggtgtcaaagccca

SEQ ID NO: 65515 - DNA, 26 bp, Homo sapiens
gccacccgggtggtgtcaaagcccac

SEQ ID NO: 65516 - DNA, 26 bp, Homo sapiens
ccacccgggtggtgtcaaagcccacg

SEQ ID NO: 65517 - DNA, 26 bp, Homo sapiens
cacccgggtggtgtcaaagcccacgt

SEQ ID NO: 65518 - DNA, 26 bp, Homo sapiens
acccgggtggtgtcaaagcccacgtc

SEQ ID NO: 65519 - DNA, 26 bp, Homo sapiens
cccgggtggtgtcaaagcccacgtcc

SEQ ID NO: 65520 - DNA, 26 bp, Homo sapiens
ccgggtggtgtcaaagcccacgtcca

SEQ ID NO: 65521 - DNA, 26 bp, Homo sapiens
cgggtggtgtcaaagcccacgtccag

SEQ ID NO: 65522 - DNA, 26 bp, Homo sapiens
gggtggtgtcaaagcccacgtccagg

SEQ ID NO: 65523 - DNA, 26 bp, Homo sapiens
ggtggtgtcaaagcccacgtccaggt

SEQ ID NO: 65524 - DNA, 26 bp, Homo sapiens
gtggtgtcaaagcccacgtccaggta

SEQ ID NO: 65525 - DNA, 26 bp, Homo sapiens
tggtgtcaaagcccacgtccaggtag

SEQ ID NO: 65526 - DNA, 26 bp, Homo sapiens
ggtgtcaaagcccacgtccaggtagt

SEQ ID NO: 65527 - DNA, 26 bp, Homo sapiens
gtgtcaaagcccacgtccaggtagtc

SEQ ID NO: 65528 - DNA, 26 bp, Homo sapiens
tgtcaaagcccacgtccaggtagtca

SEQ ID NO: 65529 - DNA, 26 bp, Homo sapiens
gtcaaagcccacgtccaggtagtcaa

SEQ ID NO: 65530 - DNA, 26 bp, Homo sapiens
tcaaagcccacgtccaggtagtcaac

SEQ ID NO: 65531 - DNA, 26 bp, Homo sapiens
caaagcccacgtccaggtagtcaacc

SEQ ID NO: 65532 - DNA, 26 bp, Homo sapiens
aaagcccacgtccaggtagtcaacca

SEQ ID NO: 65533 - DNA, 26 bp, Homo sapiens
aagcccacgtccaggtagtcaaccag

SEQ ID NO: 65534 - DNA, 26 bp, Homo sapiens
agcccacgtccaggtagtcaaccagc

SEQ ID NO: 65535 - DNA, 26 bp, Homo sapiens
gcccacgtccaggtagtcaaccagcc

SEQ ID NO: 65536 - DNA, 26 bp, Homo sapiens
cccacgtccaggtagtcaaccagcct

SEQ ID NO: 65537 - DNA, 26 bp, Homo sapiens
ccacgtccaggtagtcaaccagcctc

SEQ ID NO: 65538 - DNA, 26 bp, Homo sapiens
cacgtccaggtagtcaaccagcctct

SEQ ID NO: 65539 - DNA, 26 bp, Homo sapiens
acgtccaggtagtcaaccagcctctc

SEQ ID NO: 65540 - DNA, 26 bp, Homo sapiens
cgtccaggtagtcaaccagcctctct

SEQ ID NO: 65541 - DNA, 26 bp, Homo sapiens
gtccaggtagtcaaccagcctctcta

SEQ ID NO: 65542 - DNA, 26 bp, Homo sapiens
tccaggtagtcaaccagcctctctat

SEQ ID NO: 65543 - DNA, 26 bp, Homo sapiens
ccaggtagtcaaccagcctctctatg

SEQ ID NO: 65544 - DNA, 26 bp, Homo sapiens
caggtagtcaaccagcctctctatga

SEQ ID NO: 65545 - DNA, 26 bp, Homo sapiens
aggtagtcaaccagcctctctatgag

SEQ ID NO: 65546 - DNA, 26 bp, Homo sapiens
ggtagtcaaccagcctctctatgagg

SEQ ID NO: 65547 - DNA, 26 bp, Homo sapiens
gtagtcaaccagcctctctatgaggg

SEQ ID NO: 65548 - DNA, 26 bp, Homo sapiens
tagtcaaccagcctctctatgagggt

SEQ ID NO: 65549 - DNA, 26 bp, Homo sapiens
agtcaaccagcctctctatgagggtg

SEQ ID NO: 65550 - DNA, 26 bp, Homo sapiens
gtcaaccagcctctctatgagggtgc

SEQ ID NO: 65551 - DNA, 26 bp, Homo sapiens
tcaaccagcctctctatgagggtgcg

SEQ ID NO: 65552 - DNA, 26 bp, Homo sapiens
caaccagcctctctatgagggtgcga

SEQ ID NO: 65553 - DNA, 26 bp, Homo sapiens
aaccagcctctctatgagggtgcgaa

SEQ ID NO: 65554 - DNA, 26 bp, Homo sapiens
accagcctctctatgagggtgcgaac

SEQ ID NO: 65555 - DNA, 26 bp, Homo sapiens
ccagcctctctatgagggtgcgaacg

SEQ ID NO: 65556 - DNA, 26 bp, Homo sapiens
cagcctctctatgagggtgcgaacgt

SEQ ID NO: 65557 - DNA, 26 bp, Homo sapiens
agcctctctatgagggtgcgaacgta

SEQ ID NO: 65558 - DNA, 26 bp, Homo sapiens
gcctctctatgagggtgcgaacgtac

SEQ ID NO: 65559 - DNA, 26 bp, Homo sapiens
cctctctatgagggtgcgaacgtact

SEQ ID NO: 65560 - DNA, 26 bp, Homo sapiens
ctctctatgagggtgcgaacgtactg

SEQ ID NO: 65561 - DNA, 26 bp, Homo sapiens
tctctatgagggtgcgaacgtactgg

SEQ ID NO: 65562 - DNA, 26 bp, Homo sapiens
ctctatgagggtgcgaacgtactgga

SEQ ID NO: 65563 - DNA, 26 bp, Homo sapiens
tctatgagggtgcgaacgtactggaa

SEQ ID NO: 65564 - DNA, 26 bp, Homo sapiens
ctatgagggtgcgaacgtactggaac

SEQ ID NO: 65565 - DNA, 26 bp, Homo sapiens
tatgagggtgcgaacgtactggaact

SEQ ID NO: 65566 - DNA, 26 bp, Homo sapiens
atgagggtgcgaacgtactggaactc

SEQ ID NO: 65567 - DNA, 26 bp, Homo sapiens
tgagggtgcgaacgtactggaactca

SEQ ID NO: 65568 - DNA, 26 bp, Homo sapiens
gagggtgcgaacgtactggaactcag

SEQ ID NO: 65569 - DNA, 26 bp, Homo sapiens
agggtgcgaacgtactggaactcagg

SEQ ID NO: 65570 - DNA, 26 bp, Homo sapiens
gggtgcgaacgtactggaactcaggc

SEQ ID NO: 65571 - DNA, 26 bp, Homo sapiens
ggtgcgaacgtactggaactcaggcc

SEQ ID NO: 65572 - DNA, 26 bp, Homo sapiens
gtgcgaacgtactggaactcaggccc

SEQ ID NO: 65573 - DNA, 26 bp, Homo sapiens
tgcgaacgtactggaactcaggcccg

SEQ ID NO: 65574 - DNA, 26 bp, Homo sapiens
gcgaacgtactggaactcaggcccgg

SEQ ID NO: 65575 - DNA, 26 bp, Homo sapiens
cgaacgtactggaactcaggcccggc

SEQ ID NO: 65576 - DNA, 26 bp, Homo sapiens
gaacgtactggaactcaggcccggca

SEQ ID NO: 65577 - DNA, 26 bp, Homo sapiens
aacgtactggaactcaggcccggcac

SEQ ID NO: 65578 - DNA, 26 bp, Homo sapiens
acgtactggaactcaggcccggcact

SEQ ID NO: 65579 - DNA, 26 bp, Homo sapiens
cgtactggaactcaggcccggcactt

SEQ ID NO: 65580 - DNA, 26 bp, Homo sapiens
gtactggaactcaggcccggcacttt

SEQ ID NO: 65581 - DNA, 26 bp, Homo sapiens
tactggaactcaggcccggcactttg

SEQ ID NO: 65582 - DNA, 26 bp, Homo sapiens
actggaactcaggcccggcactttgg

SEQ ID NO: 65583 - DNA, 26 bp, Homo sapiens
ctggaactcaggcccggcactttggg

SEQ ID NO: 65584 - DNA, 26 bp, Homo sapiens
tggaactcaggcccggcactttggga

SEQ ID NO: 65585 - DNA, 26 bp, Homo sapiens
ggaactcaggcccggcactttgggac

SEQ ID NO: 65586 - DNA, 26 bp, Homo sapiens
gaactcaggcccggcactttgggacc

SEQ ID NO: 65587 - DNA, 26 bp, Homo sapiens
aactcaggcccggcactttgggaccc

SEQ ID NO: 65588 - DNA, 26 bp, Homo sapiens
actcaggcccggcactttgggaccca

SEQ ID NO: 65589 - DNA, 26 bp, Homo sapiens
ctcaggcccggcactttgggacccat

SEQ ID NO: 65590 - DNA, 26 bp, Homo sapiens
tcaggcccggcactttgggacccatc

SEQ ID NO: 65591 - DNA, 26 bp, Homo sapiens
caggcccggcactttgggacccatcg

SEQ ID NO: 65592 - DNA, 26 bp, Homo sapiens
aggcccggcactttgggacccatcga

SEQ ID NO: 65593 - DNA, 26 bp, Homo sapiens
ggcccggcactttgggacccatcgat

SEQ ID NO: 65594 - DNA, 26 bp, Homo sapiens
gcccggcactttgggacccatcgatg

SEQ ID NO: 65595 - DNA, 26 bp, Homo sapiens
cccggcactttgggacccatcgatga

SEQ ID NO: 65596 - DNA, 26 bp, Homo sapiens
ccggcactttgggacccatcgatgag

SEQ ID NO: 65597 - DNA, 26 bp, Homo sapiens
cggcactttgggacccatcgatgaga

SEQ ID NO: 65598 - DNA, 26 bp, Homo sapiens
ggcactttgggacccatcgatgagaa

SEQ ID NO: 65599 - DNA, 26 bp, Homo sapiens
gcactttgggacccatcgatgagaaa

SEQ ID NO: 65600 - DNA, 26 bp, Homo sapiens
cactttgggacccatcgatgagaaag

SEQ ID NO: 65601 - DNA, 26 bp, Homo sapiens
actttgggacccatcgatgagaaaga

SEQ ID NO: 65602 - DNA, 26 bp, Homo sapiens
ctttgggacccatcgatgagaaagac

SEQ ID NO: 65603 - DNA, 26 bp, Homo sapiens
tttgggacccatcgatgagaaagacc

SEQ ID NO: 65604 - DNA, 26 bp, Homo sapiens
ttgggacccatcgatgagaaagacca

SEQ ID NO: 65605 - DNA, 26 bp, Homo sapiens
tgggacccatcgatgagaaagaccac

SEQ ID NO: 65606 - DNA, 26 bp, Homo sapiens
gggacccatcgatgagaaagaccacg

SEQ ID NO: 65607 - DNA, 26 bp, Homo sapiens
ggacccatcgatgagaaagaccacgt

SEQ ID NO: 65608 - DNA, 26 bp, Homo sapiens
gacccatcgatgagaaagaccacgtc

SEQ ID NO: 65609 - DNA, 26 bp, Homo sapiens
acccatcgatgagaaagaccacgtcc

SEQ ID NO: 65610 - DNA, 26 bp, Homo sapiens
cccatcgatgagaaagaccacgtccc

SEQ ID NO: 65611 - DNA, 26 bp, Homo sapiens
ccatcgatgagaaagaccacgtccct

SEQ ID NO: 65612 - DNA, 26 bp, Homo sapiens
catcgatgagaaagaccacgtccctc

SEQ ID NO: 65613 - DNA, 26 bp, Homo sapiens
atcgatgagaaagaccacgtccctct

SEQ ID NO: 65614 - DNA, 26 bp, Homo sapiens
tcgatgagaaagaccacgtccctctt

SEQ ID NO: 65615 - DNA, 26 bp, Homo sapiens
cgatgagaaagaccacgtccctcttg

SEQ ID NO: 65616 - DNA, 26 bp, Homo sapiens
gatgagaaagaccacgtccctcttgc

SEQ ID NO: 65617 - DNA, 26 bp, Homo sapiens
atgagaaagaccacgtccctcttgcc

SEQ ID NO: 65618 - DNA, 26 bp, Homo sapiens
tgagaaagaccacgtccctcttgcca

SEQ ID NO: 65619 - DNA, 26 bp, Homo sapiens
gagaaagaccacgtccctcttgccac

SEQ ID NO: 65620 - DNA, 26 bp, Homo sapiens
agaaagaccacgtccctcttgccacc

SEQ ID NO: 65621 - DNA, 26 bp, Homo sapiens
gaaagaccacgtccctcttgccacca

SEQ ID NO: 65622 - DNA, 26 bp, Homo sapiens
aaagaccacgtccctcttgccaccaa

SEQ ID NO: 65623 - DNA, 26 bp, Homo sapiens
aagaccacgtccctcttgccaccaac

SEQ ID NO: 65624 - DNA, 26 bp, Homo sapiens
agaccacgtccctcttgccaccaaca

SEQ ID NO: 65625 - DNA, 26 bp, Homo sapiens
gaccacgtccctcttgccaccaacac

SEQ ID NO: 65626 - DNA, 26 bp, Homo sapiens
accacgtccctcttgccaccaacacc

SEQ ID NO: 65627 - DNA, 26 bp, Homo sapiens
ccacgtccctcttgccaccaacacct

SEQ ID NO: 65628 - DNA, 26 bp, Homo sapiens
cacgtccctcttgccaccaacacctg

SEQ ID NO: 65629 - DNA, 26 bp, Homo sapiens
acgtccctcttgccaccaacacctgg

SEQ ID NO: 65630 - DNA, 26 bp, Homo sapiens
cgtccctcttgccaccaacacctggg

SEQ ID NO: 65631 - DNA, 26 bp, Homo sapiens
gtccctcttgccaccaacacctgggc

SEQ ID NO: 65632 - DNA, 26 bp, Homo sapiens
tccctcttgccaccaacacctgggct

SEQ ID NO: 65633 - DNA, 26 bp, Homo sapiens
ccctcttgccaccaacacctgggctc

SEQ ID NO: 65634 - DNA, 26 bp, Homo sapiens
cctcttgccaccaacacctgggctcg

SEQ ID NO: 65635 - DNA, 26 bp, Homo sapiens
ctcttgccaccaacacctgggctcgg

SEQ ID NO: 65636 - DNA, 26 bp, Homo sapiens
tcttgccaccaacacctgggctcggt

SEQ ID NO: 65637 - DNA, 26 bp, Homo sapiens
cttgccaccaacacctgggctcggta

SEQ ID NO: 65638 - DNA, 26 bp, Homo sapiens
ttgccaccaacacctgggctcggtag

SEQ ID NO: 65639 - DNA, 26 bp, Homo sapiens
tgccaccaacacctgggctcggtaga

SEQ ID NO: 65640 - DNA, 26 bp, Homo sapiens
gccaccaacacctgggctcggtagag

SEQ ID NO: 65641 - DNA, 26 bp, Homo sapiens
ccaccaacacctgggctcggtagagg

SEQ ID NO: 65642 - DNA, 26 bp, Homo sapiens
caccaacacctgggctcggtagaggc

SEQ ID NO: 65643 - DNA, 26 bp, Homo sapiens
accaacacctgggctcggtagaggct

SEQ ID NO: 65644 - DNA, 26 bp, Homo sapiens
ccaacacctgggctcggtagaggctg

SEQ ID NO: 65645 - DNA, 26 bp, Homo sapiens
caacacctgggctcggtagaggctgc

SEQ ID NO: 65646 - DNA, 26 bp, Homo sapiens
aacacctgggctcggtagaggctgca

SEQ ID NO: 65647 - DNA, 26 bp, Homo sapiens
acacctgggctcggtagaggctgcaa

SEQ ID NO: 65648 - DNA, 26 bp, Homo sapiens
cacctgggctcggtagaggctgcaac

SEQ ID NO: 65649 - DNA, 26 bp, Homo sapiens
acctgggctcggtagaggctgcaaca

SEQ ID NO: 65650 - DNA, 26 bp, Homo sapiens
cctgggctcggtagaggctgcaacac

SEQ ID NO: 65651 - DNA, 26 bp, Homo sapiens
ctgggctcggtagaggctgcaacacc

SEQ ID NO: 65652 - DNA, 26 bp, Homo sapiens
tgggctcggtagaggctgcaacaccg

SEQ ID NO: 65653 - DNA, 26 bp, Homo sapiens
gggctcggtagaggctgcaacaccgg

SEQ ID NO: 65654 - DNA, 26 bp, Homo sapiens
ggctcggtagaggctgcaacaccggc

SEQ ID NO: 65655 - DNA, 26 bp, Homo sapiens
gctcggtagaggctgcaacaccggct

SEQ ID NO: 65656 - DNA, 26 bp, Homo sapiens
ctcggtagaggctgcaacaccggctg

SEQ ID NO: 65657 - DNA, 26 bp, Homo sapiens
tcggtagaggctgcaacaccggctgc

SEQ ID NO: 65658 - DNA, 26 bp, Homo sapiens
cggtagaggctgcaacaccggctgca

SEQ ID NO: 65659 - DNA, 26 bp, Homo sapiens
ggtagaggctgcaacaccggctgcag

SEQ ID NO: 65660 - DNA, 26 bp, Homo sapiens
gtagaggctgcaacaccggctgcagc

SEQ ID NO: 65661 - DNA, 26 bp, Homo sapiens
tagaggctgcaacaccggctgcagcc

SEQ ID NO: 65662 - DNA, 26 bp, Homo sapiens
agaggctgcaacaccggctgcagcct

SEQ ID NO: 65663 - DNA, 26 bp, Homo sapiens
gaggctgcaacaccggctgcagcctg

SEQ ID NO: 65664 - DNA, 26 bp, Homo sapiens
aggctgcaacaccggctgcagcctgc

SEQ ID NO: 65665 - DNA, 26 bp, Homo sapiens
ggctgcaacaccggctgcagcctgct

SEQ ID NO: 65666 - DNA, 26 bp, Homo sapiens
gctgcaacaccggctgcagcctgctc

SEQ ID NO: 65667 - DNA, 26 bp, Homo sapiens
ctgcaacaccggctgcagcctgctca

SEQ ID NO: 65668 - DNA, 26 bp, Homo sapiens
tgcaacaccggctgcagcctgctcag

SEQ ID NO: 65669 - DNA, 26 bp, Homo sapiens
gcaacaccggctgcagcctgctcagc

SEQ ID NO: 65670 - DNA, 26 bp, Homo sapiens
caacaccggctgcagcctgctcagct

SEQ ID NO: 65671 - DNA, 26 bp, Homo sapiens
aacaccggctgcagcctgctcagctc

SEQ ID NO: 65672 - DNA, 26 bp, Homo sapiens
acaccggctgcagcctgctcagctcc

SEQ ID NO: 65673 - DNA, 26 bp, Homo sapiens
caccggctgcagcctgctcagctcct

SEQ ID NO: 65674 - DNA, 26 bp, Homo sapiens
accggctgcagcctgctcagctcctc

SEQ ID NO: 65675 - DNA, 26 bp, Homo sapiens
ccggctgcagcctgctcagctcctcg

SEQ ID NO: 65676 - DNA, 26 bp, Homo sapiens
cggctgcagcctgctcagctcctcgc

SEQ ID NO: 65677 - DNA, 26 bp, Homo sapiens
ggctgcagcctgctcagctcctcgcg

SEQ ID NO: 65678 - DNA, 26 bp, Homo sapiens
gctgcagcctgctcagctcctcgcgg

SEQ ID NO: 65679 - DNA, 26 bp, Homo sapiens
ctgcagcctgctcagctcctcgcggg

SEQ ID NO: 65680 - DNA, 26 bp, Homo sapiens
tgcagcctgctcagctcctcgcgggt

SEQ ID NO: 65681 - DNA, 26 bp, Homo sapiens
gcagcctgctcagctcctcgcgggtg

SEQ ID NO: 65682 - DNA, 26 bp, Homo sapiens
cagcctgctcagctcctcgcgggtga

SEQ ID NO: 65683 - DNA, 26 bp, Homo sapiens
agcctgctcagctcctcgcgggtgag

SEQ ID NO: 65684 - DNA, 26 bp, Homo sapiens
gcctgctcagctcctcgcgggtgagc

SEQ ID NO: 65685 - DNA, 26 bp, Homo sapiens
cctgctcagctcctcgcgggtgagct

SEQ ID NO: 65686 - DNA, 26 bp, Homo sapiens
ctgctcagctcctcgcgggtgagctg

SEQ ID NO: 65687 - DNA, 26 bp, Homo sapiens
tgctcagctcctcgcgggtgagctgg

SEQ ID NO: 65688 - DNA, 26 bp, Homo sapiens
gctcagctcctcgcgggtgagctggg

SEQ ID NO: 65689 - DNA, 26 bp, Homo sapiens
ctcagctcctcgcgggtgagctgggt

SEQ ID NO: 65690 - DNA, 26 bp, Homo sapiens
tcagctcctcgcgggtgagctgggtc

SEQ ID NO: 65691 - DNA, 26 bp, Homo sapiens
cagctcctcgcgggtgagctgggtca

SEQ ID NO: 65692 - DNA, 26 bp, Homo sapiens
agctcctcgcgggtgagctgggtcac

SEQ ID NO: 65693 - DNA, 26 bp, Homo sapiens
gctcctcgcgggtgagctgggtcacc

SEQ ID NO: 65694 - DNA, 26 bp, Homo sapiens
ctcctcgcgggtgagctgggtcaccc

SEQ ID NO: 65695 - DNA, 26 bp, Homo sapiens
tcctcgcgggtgagctgggtcaccct

SEQ ID NO: 65696 - DNA, 26 bp, Homo sapiens
cctcgcgggtgagctgggtcaccctc

SEQ ID NO: 65697 - DNA, 26 bp, Homo sapiens
ctcgcgggtgagctgggtcaccctct

SEQ ID NO: 65698 - DNA, 26 bp, Homo sapiens
tcgcgggtgagctgggtcaccctctc

SEQ ID NO: 65699 - DNA, 26 bp, Homo sapiens
cgcgggtgagctgggtcaccctctca

SEQ ID NO: 65700 - DNA, 26 bp, Homo sapiens
gcgggtgagctgggtcaccctctcag

SEQ ID NO: 65701 - DNA, 26 bp, Homo sapiens
cgggtgagctgggtcaccctctcaga

SEQ ID NO: 65702 - DNA, 26 bp, Homo sapiens
gggtgagctgggtcaccctctcagag

SEQ ID NO: 65703 - DNA, 26 bp, Homo sapiens
ggtgagctgggtcaccctctcagaga

SEQ ID NO: 65704 - DNA, 26 bp, Homo sapiens
gtgagctgggtcaccctctcagagat

SEQ ID NO: 65705 - DNA, 26 bp, Homo sapiens
tgagctgggtcaccctctcagagatg

SEQ ID NO: 65706 - DNA, 26 bp, Homo sapiens
gagctgggtcaccctctcagagatga

SEQ ID NO: 65707 - DNA, 26 bp, Homo sapiens
agctgggtcaccctctcagagatgac

SEQ ID NO: 65708 - DNA, 26 bp, Homo sapiens
gctgggtcaccctctcagagatgacc

SEQ ID NO: 65709 - DNA, 26 bp, Homo sapiens
ctgggtcaccctctcagagatgacct

SEQ ID NO: 65710 - DNA, 26 bp, Homo sapiens
tgggtcaccctctcagagatgacctg

SEQ ID NO: 65711 - DNA, 26 bp, Homo sapiens
gggtcaccctctcagagatgacctgt

SEQ ID NO: 65712 - DNA, 26 bp, Homo sapiens
ggtcaccctctcagagatgacctgtt

SEQ ID NO: 65713 - DNA, 26 bp, Homo sapiens
gtcaccctctcagagatgacctgttg

SEQ ID NO: 65714 - DNA, 26 bp, Homo sapiens
tcaccctctcagagatgacctgttgg

SEQ ID NO: 65715 - DNA, 26 bp, Homo sapiens
caccctctcagagatgacctgttgga

SEQ ID NO: 65716 - DNA, 26 bp, Homo sapiens
accctctcagagatgacctgttggac

SEQ ID NO: 65717 - DNA, 26 bp, Homo sapiens
ccctctcagagatgacctgttggacg

SEQ ID NO: 65718 - DNA, 26 bp, Homo sapiens
cctctcagagatgacctgttggacgg

SEQ ID NO: 65719 - DNA, 26 bp, Homo sapiens
ctctcagagatgacctgttggacggt

SEQ ID NO: 65720 - DNA, 26 bp, Homo sapiens
tctcagagatgacctgttggacggtc

SEQ ID NO: 65721 - DNA, 26 bp, Homo sapiens
ctcagagatgacctgttggacggtcc

SEQ ID NO: 65722 - DNA, 26 bp, Homo sapiens
tcagagatgacctgttggacggtccc

SEQ ID NO: 65723 - DNA, 26 bp, Homo sapiens
cagagatgacctgttggacggtcccc

SEQ ID NO: 65724 - DNA, 26 bp, Homo sapiens
agagatgacctgttggacggtcccca

SEQ ID NO: 65725 - DNA, 26 bp, Homo sapiens
gagatgacctgttggacggtccccag

SEQ ID NO: 65726 - DNA, 26 bp, Homo sapiens
agatgacctgttggacggtccccagc

SEQ ID NO: 65727 - DNA, 26 bp, Homo sapiens
gatgacctgttggacggtccccagct

SEQ ID NO: 65728 - DNA, 26 bp, Homo sapiens
atgacctgttggacggtccccagctg

SEQ ID NO: 65729 - DNA, 26 bp, Homo sapiens
tgacctgttggacggtccccagctgg

SEQ ID NO: 65730 - DNA, 26 bp, Homo sapiens
gacctgttggacggtccccagctggc

SEQ ID NO: 65731 - DNA, 26 bp, Homo sapiens
acctgttggacggtccccagctggcg

SEQ ID NO: 65732 - DNA, 26 bp, Homo sapiens
cctgttggacggtccccagctggcga

SEQ ID NO: 65733 - DNA, 26 bp, Homo sapiens
ctgttggacggtccccagctggcgaa

SEQ ID NO: 65734 - DNA, 26 bp, Homo sapiens
tgttggacggtccccagctggcgaaa

SEQ ID NO: 65735 - DNA, 26 bp, Homo sapiens
gttggacggtccccagctggcgaaag

SEQ ID NO: 65736 - DNA, 26 bp, Homo sapiens
ttggacggtccccagctggcgaaagg

SEQ ID NO: 65737 - DNA, 26 bp, Homo sapiens
tggacggtccccagctggcgaaaggt

SEQ ID NO: 65738 - DNA, 26 bp, Homo sapiens
ggacggtccccagctggcgaaaggtg

SEQ ID NO: 65739 - DNA, 26 bp, Homo sapiens
gacggtccccagctggcgaaaggtgg

SEQ ID NO: 65740 - DNA, 26 bp, Homo sapiens
acggtccccagctggcgaaaggtggg

SEQ ID NO: 65741 - DNA, 26 bp, Homo sapiens
cggtccccagctggcgaaaggtggga

SEQ ID NO: 65742 - DNA, 26 bp, Homo sapiens
ggtccccagctggcgaaaggtgggaa

SEQ ID NO: 65743 - DNA, 26 bp, Homo sapiens
gtccccagctggcgaaaggtgggaat

SEQ ID NO: 65744 - DNA, 26 bp, Homo sapiens
tccccagctggcgaaaggtgggaatg

SEQ ID NO: 65745 - DNA, 26 bp, Homo sapiens
ccccagctggcgaaaggtgggaatgg

SEQ ID NO: 65746 - DNA, 26 bp, Homo sapiens
cccagctggcgaaaggtgggaatggc

SEQ ID NO: 65747 - DNA, 26 bp, Homo sapiens
ccagctggcgaaaggtgggaatggcc

SEQ ID NO: 65748 - DNA, 26 bp, Homo sapiens
cagctggcgaaaggtgggaatggcca

SEQ ID NO: 65749 - DNA, 26 bp, Homo sapiens
agctggcgaaaggtgggaatggccac

SEQ ID NO: 65750 - DNA, 26 bp, Homo sapiens
gctggcgaaaggtgggaatggccacg

SEQ ID NO: 65751 - DNA, 26 bp, Homo sapiens
ctggcgaaaggtgggaatggccacgg

SEQ ID NO: 65752 - DNA, 26 bp, Homo sapiens
tggcgaaaggtgggaatggccacggc

SEQ ID NO: 65753 - DNA, 26 bp, Homo sapiens
ggcgaaaggtgggaatggccacggca

SEQ ID NO: 65754 - DNA, 26 bp, Homo sapiens
gcgaaaggtgggaatggccacggcaa

SEQ ID NO: 65755 - DNA, 26 bp, Homo sapiens
cgaaaggtgggaatggccacggcaaa

SEQ ID NO: 65756 - DNA, 26 bp, Homo sapiens
gaaaggtgggaatggccacggcaaag

SEQ ID NO: 65757 - DNA, 26 bp, Homo sapiens
aaaggtgggaatggccacggcaaagt

SEQ ID NO: 65758 - DNA, 26 bp, Homo sapiens
aaggtgggaatggccacggcaaagtc

SEQ ID NO: 65759 - DNA, 26 bp, Homo sapiens
aggtgggaatggccacggcaaagtcc

SEQ ID NO: 65760 - DNA, 26 bp, Homo sapiens
ggtgggaatggccacggcaaagtccg

SEQ ID NO: 65761 - DNA, 26 bp, Homo sapiens
gtgggaatggccacggcaaagtccgg

SEQ ID NO: 65762 - DNA, 26 bp, Homo sapiens
tgggaatggccacggcaaagtccggg

SEQ ID NO: 65763 - DNA, 26 bp, Homo sapiens
gggaatggccacggcaaagtccggga

SEQ ID NO: 65764 - DNA, 26 bp, Homo sapiens
ggaatggccacggcaaagtccgggat

SEQ ID NO: 65765 - DNA, 26 bp, Homo sapiens
gaatggccacggcaaagtccgggatg

SEQ ID NO: 65766 - DNA, 26 bp, Homo sapiens
aatggccacggcaaagtccgggatga

SEQ ID NO: 65767 - DNA, 26 bp, Homo sapiens
atggccacggcaaagtccgggatgaa

SEQ ID NO: 65768 - DNA, 26 bp, Homo sapiens
tggccacggcaaagtccgggatgaag

SEQ ID NO: 65769 - DNA, 26 bp, Homo sapiens
ggccacggcaaagtccgggatgaagg

SEQ ID NO: 65770 - DNA, 26 bp, Homo sapiens
gccacggcaaagtccgggatgaagga

SEQ ID NO: 65771 - DNA, 26 bp, Homo sapiens
ccacggcaaagtccgggatgaaggag

SEQ ID NO: 65772 - DNA, 26 bp, Homo sapiens
cacggcaaagtccgggatgaaggaga

SEQ ID NO: 65773 - DNA, 26 bp, Homo sapiens
acggcaaagtccgggatgaaggagat

SEQ ID NO: 65774 - DNA, 26 bp, Homo sapiens
cggcaaagtccgggatgaaggagatg

SEQ ID NO: 65775 - DNA, 26 bp, Homo sapiens
ggcaaagtccgggatgaaggagatgg

SEQ ID NO: 65776 - DNA, 26 bp, Homo sapiens
gcaaagtccgggatgaaggagatggt

SEQ ID NO: 65777 - DNA, 26 bp, Homo sapiens
caaagtccgggatgaaggagatggtc

SEQ ID NO: 65778 - DNA, 26 bp, Homo sapiens
aaagtccgggatgaaggagatggtct

SEQ ID NO: 65779 - DNA, 26 bp, Homo sapiens
aagtccgggatgaaggagatggtctg

SEQ ID NO: 65780 - DNA, 26 bp, Homo sapiens
agtccgggatgaaggagatggtctgc

SEQ ID NO: 65781 - DNA, 26 bp, Homo sapiens
gtccgggatgaaggagatggtctgca

SEQ ID NO: 65782 - DNA, 26 bp, Homo sapiens
tccgggatgaaggagatggtctgcat

SEQ ID NO: 65783 - DNA, 26 bp, Homo sapiens
ccgggatgaaggagatggtctgcatc

SEQ ID NO: 65784 - DNA, 26 bp, Homo sapiens
cgggatgaaggagatggtctgcatct

SEQ ID NO: 65785 - DNA, 26 bp, Homo sapiens
gggatgaaggagatggtctgcatctc

SEQ ID NO: 65786 - DNA, 26 bp, Homo sapiens
ggatgaaggagatggtctgcatctct

SEQ ID NO: 65787 - DNA, 26 bp, Homo sapiens
gatgaaggagatggtctgcatctctg

SEQ ID NO: 65788 - DNA, 26 bp, Homo sapiens
atgaaggagatggtctgcatctctgt

SEQ ID NO: 65789 - DNA, 26 bp, Homo sapiens
tgaaggagatggtctgcatctctgtg

SEQ ID NO: 65790 - DNA, 26 bp, Homo sapiens
gaaggagatggtctgcatctctgtga

SEQ ID NO: 65791 - DNA, 26 bp, Homo sapiens
aaggagatggtctgcatctctgtgat

SEQ ID NO: 65792 - DNA, 26 bp, Homo sapiens
aggagatggtctgcatctctgtgatg

SEQ ID NO: 65793 - DNA, 26 bp, Homo sapiens
ggagatggtctgcatctctgtgatgt

SEQ ID NO: 65794 - DNA, 26 bp, Homo sapiens
gagatggtctgcatctctgtgatgtc

SEQ ID NO: 65795 - DNA, 26 bp, Homo sapiens
agatggtctgcatctctgtgatgtca

SEQ ID NO: 65796 - DNA, 26 bp, Homo sapiens
gatggtctgcatctctgtgatgtcag

SEQ ID NO: 65797 - DNA, 26 bp, Homo sapiens
atggtctgcatctctgtgatgtcagc

SEQ ID NO: 65798 - DNA, 26 bp, Homo sapiens
tggtctgcatctctgtgatgtcagcg

SEQ ID NO: 65799 - DNA, 26 bp, Homo sapiens
ggtctgcatctctgtgatgtcagcgt

SEQ ID NO: 65800 - DNA, 26 bp, Homo sapiens
gtctgcatctctgtgatgtcagcgtt

SEQ ID NO: 65801 - DNA, 26 bp, Homo sapiens
tctgcatctctgtgatgtcagcgttc

SEQ ID NO: 65802 - DNA, 26 bp, Homo sapiens
ctgcatctctgtgatgtcagcgttcc

SEQ ID NO: 65803 - DNA, 26 bp, Homo sapiens
tgcatctctgtgatgtcagcgttccc

SEQ ID NO: 65804 - DNA, 26 bp, Homo sapiens
gcatctctgtgatgtcagcgttcccg

SEQ ID NO: 65805 - DNA, 26 bp, Homo sapiens
catctctgtgatgtcagcgttcccga

SEQ ID NO: 65806 - DNA, 26 bp, Homo sapiens
atctctgtgatgtcagcgttcccgat

SEQ ID NO: 65807 - DNA, 26 bp, Homo sapiens
tctctgtgatgtcagcgttcccgatg

SEQ ID NO: 65808 - DNA, 26 bp, Homo sapiens
ctctgtgatgtcagcgttcccgatgc

SEQ ID NO: 65809 - DNA, 26 bp, Homo sapiens
tctgtgatgtcagcgttcccgatgcc

SEQ ID NO: 65810 - DNA, 26 bp, Homo sapiens
ctgtgatgtcagcgttcccgatgcca

SEQ ID NO: 65811 - DNA, 26 bp, Homo sapiens
tgtgatgtcagcgttcccgatgccaa

SEQ ID NO: 65812 - DNA, 26 bp, Homo sapiens
gtgatgtcagcgttcccgatgccaat

SEQ ID NO: 65813 - DNA, 26 bp, Homo sapiens
tgatgtcagcgttcccgatgccaatg

SEQ ID NO: 65814 - DNA, 26 bp, Homo sapiens
gatgtcagcgttcccgatgccaatgc

SEQ ID NO: 65815 - DNA, 26 bp, Homo sapiens
atgtcagcgttcccgatgccaatgcc

SEQ ID NO: 65816 - DNA, 26 bp, Homo sapiens
tgtcagcgttcccgatgccaatgcca

SEQ ID NO: 65817 - DNA, 26 bp, Homo sapiens
gtcagcgttcccgatgccaatgccaa

SEQ ID NO: 65818 - DNA, 26 bp, Homo sapiens
tcagcgttcccgatgccaatgccaat

SEQ ID NO: 65819 - DNA, 26 bp, Homo sapiens
cagcgttcccgatgccaatgccaatg

SEQ ID NO: 65820 - DNA, 26 bp, Homo sapiens
agcgttcccgatgccaatgccaatgg

SEQ ID NO: 65821 - DNA, 26 bp, Homo sapiens
gcgttcccgatgccaatgccaatggg

SEQ ID NO: 65822 - DNA, 26 bp, Homo sapiens
cgttcccgatgccaatgccaatgggc

SEQ ID NO: 65823 - DNA, 26 bp, Homo sapiens
gttcccgatgccaatgccaatgggca

SEQ ID NO: 65824 - DNA, 26 bp, Homo sapiens
ttcccgatgccaatgccaatgggcac

SEQ ID NO: 65825 - DNA, 26 bp, Homo sapiens
tcccgatgccaatgccaatgggcaca

SEQ ID NO: 65826 - DNA, 26 bp, Homo sapiens
cccgatgccaatgccaatgggcacag

SEQ ID NO: 65827 - DNA, 26 bp, Homo sapiens
ccgatgccaatgccaatgggcacagc

SEQ ID NO: 65828 - DNA, 26 bp, Homo sapiens
cgatgccaatgccaatgggcacagcc

SEQ ID NO: 65829 - DNA, 26 bp, Homo sapiens
gatgccaatgccaatgggcacagccc

SEQ ID NO: 65830 - DNA, 26 bp, Homo sapiens
atgccaatgccaatgggcacagcccc

SEQ ID NO: 65831 - DNA, 26 bp, Homo sapiens
tgccaatgccaatgggcacagcccca

SEQ ID NO: 65832 - DNA, 26 bp, Homo sapiens
gccaatgccaatgggcacagccccac

SEQ ID NO: 65833 - DNA, 26 bp, Homo sapiens
ccaatgccaatgggcacagccccacc

SEQ ID NO: 65834 - DNA, 26 bp, Homo sapiens
caatgccaatgggcacagccccaccc

SEQ ID NO: 65835 - DNA, 26 bp, Homo sapiens
aatgccaatgggcacagccccacccc

SEQ ID NO: 65836 - DNA, 26 bp, Homo sapiens
atgccaatgggcacagccccacccct

SEQ ID NO: 65837 - DNA, 26 bp, Homo sapiens
tgccaatgggcacagccccacccctc

SEQ ID NO: 65838 - DNA, 26 bp, Homo sapiens
gccaatgggcacagccccacccctct

SEQ ID NO: 65839 - DNA, 26 bp, Homo sapiens
ccaatgggcacagccccacccctctt

SEQ ID NO: 65840 - DNA, 26 bp, Homo sapiens
caatgggcacagccccacccctcttc

SEQ ID NO: 65841 - DNA, 26 bp, Homo sapiens
aatgggcacagccccacccctcttca

SEQ ID NO: 65842 - DNA, 26 bp, Homo sapiens
atgggcacagccccacccctcttcac

SEQ ID NO: 65843 - DNA, 26 bp, Homo sapiens
tgggcacagccccacccctcttcacg

SEQ ID NO: 65844 - DNA, 26 bp, Homo sapiens
gggcacagccccacccctcttcacga

SEQ ID NO: 65845 - DNA, 26 bp, Homo sapiens
ggcacagccccacccctcttcacgac

SEQ ID NO: 65846 - DNA, 26 bp, Homo sapiens
gcacagccccacccctcttcacgacc

SEQ ID NO: 65847 - DNA, 26 bp, Homo sapiens
cacagccccacccctcttcacgacca

SEQ ID NO: 65848 - DNA, 26 bp, Homo sapiens
acagccccacccctcttcacgaccac

SEQ ID NO: 65849 - DNA, 26 bp, Homo sapiens
cagccccacccctcttcacgaccacg

SEQ ID NO: 65850 - DNA, 26 bp, Homo sapiens
agccccacccctcttcacgaccacgg

SEQ ID NO: 65851 - DNA, 26 bp, Homo sapiens
gccccacccctcttcacgaccacgga

SEQ ID NO: 65852 - DNA, 26 bp, Homo sapiens
ccccacccctcttcacgaccacggag

SEQ ID NO: 65853 - DNA, 26 bp, Homo sapiens
cccacccctcttcacgaccacggagg

SEQ ID NO: 65854 - DNA, 26 bp, Homo sapiens
ccacccctcttcacgaccacggaggg

SEQ ID NO: 65855 - DNA, 26 bp, Homo sapiens
cacccctcttcacgaccacggagggg

SEQ ID NO: 65856 - DNA, 26 bp, Homo sapiens
acccctcttcacgaccacggaggggt

SEQ ID NO: 65857 - DNA, 26 bp, Homo sapiens
cccctcttcacgaccacggaggggtt

SEQ ID NO: 65858 - DNA, 26 bp, Homo sapiens
ccctcttcacgaccacggaggggttc

SEQ ID NO: 65859 - DNA, 26 bp, Homo sapiens
cctcttcacgaccacggaggggttcc

SEQ ID NO: 65860 - DNA, 26 bp, Homo sapiens
ctcttcacgaccacggaggggttccg

SEQ ID NO: 65861 - DNA, 26 bp, Homo sapiens
tcttcacgaccacggaggggttccgc

SEQ ID NO: 65862 - DNA, 26 bp, Homo sapiens
cttcacgaccacggaggggttccgca

SEQ ID NO: 65863 - DNA, 26 bp, Homo sapiens
ttcacgaccacggaggggttccgcac

SEQ ID NO: 65864 - DNA, 26 bp, Homo sapiens
tcacgaccacggaggggttccgcaca

SEQ ID NO: 65865 - DNA, 26 bp, Homo sapiens
cacgaccacggaggggttccgcacat

SEQ ID NO: 65866 - DNA, 26 bp, Homo sapiens
acgaccacggaggggttccgcacatc

SEQ ID NO: 65867 - DNA, 26 bp, Homo sapiens
cgaccacggaggggttccgcacatca

SEQ ID NO: 65868 - DNA, 26 bp, Homo sapiens
gaccacggaggggttccgcacatcat

SEQ ID NO: 65869 - DNA, 26 bp, Homo sapiens
accacggaggggttccgcacatcatc

SEQ ID NO: 65870 - DNA, 26 bp, Homo sapiens
ccacggaggggttccgcacatcatcc

SEQ ID NO: 65871 - DNA, 26 bp, Homo sapiens
cacggaggggttccgcacatcatccc

SEQ ID NO: 65872 - DNA, 26 bp, Homo sapiens
acggaggggttccgcacatcatcccc

SEQ ID NO: 65873 - DNA, 26 bp, Homo sapiens
cggaggggttccgcacatcatcccca

SEQ ID NO: 65874 - DNA, 26 bp, Homo sapiens
ggaggggttccgcacatcatccccag

SEQ ID NO: 65875 - DNA, 26 bp, Homo sapiens
gaggggttccgcacatcatccccaga

SEQ ID NO: 65876 - DNA, 26 bp, Homo sapiens
aggggttccgcacatcatccccagac

SEQ ID NO: 65877 - DNA, 26 bp, Homo sapiens
ggggttccgcacatcatccccagacc

SEQ ID NO: 65878 - DNA, 26 bp, Homo sapiens
gggttccgcacatcatccccagacct

SEQ ID NO: 65879 - DNA, 26 bp, Homo sapiens
ggttccgcacatcatccccagacctg

SEQ ID NO: 65880 - DNA, 26 bp, Homo sapiens
gttccgcacatcatccccagacctgt

SEQ ID NO: 65881 - DNA, 26 bp, Homo sapiens
ttccgcacatcatccccagacctgtc

SEQ ID NO: 65882 - DNA, 26 bp, Homo sapiens
tccgcacatcatccccagacctgtcg

SEQ ID NO: 65883 - DNA, 26 bp, Homo sapiens
ccgcacatcatccccagacctgtcgg

SEQ ID NO: 65884 - DNA, 26 bp, Homo sapiens
cgcacatcatccccagacctgtcggc

SEQ ID NO: 65885 - DNA, 26 bp, Homo sapiens
gcacatcatccccagacctgtcggcc

SEQ ID NO: 65886 - DNA, 26 bp, Homo sapiens
cacatcatccccagacctgtcggccg

SEQ ID NO: 65887 - DNA, 26 bp, Homo sapiens
acatcatccccagacctgtcggccgt

SEQ ID NO: 65888 - DNA, 26 bp, Homo sapiens
catcatccccagacctgtcggccgtg

SEQ ID NO: 65889 - DNA, 26 bp, Homo sapiens
atcatccccagacctgtcggccgtga

SEQ ID NO: 65890 - DNA, 26 bp, Homo sapiens
tcatccccagacctgtcggccgtgag

SEQ ID NO: 65891 - DNA, 26 bp, Homo sapiens
catccccagacctgtcggccgtgagg

SEQ ID NO: 65892 - DNA, 26 bp, Homo sapiens
atccccagacctgtcggccgtgagga

SEQ ID NO: 65893 - DNA, 26 bp, Homo sapiens
tccccagacctgtcggccgtgaggac

SEQ ID NO: 65894 - DNA, 26 bp, Homo sapiens
ccccagacctgtcggccgtgaggacg

SEQ ID NO: 65895 - DNA, 26 bp, Homo sapiens
cccagacctgtcggccgtgaggacga

SEQ ID NO: 65896 - DNA, 26 bp, Homo sapiens
ccagacctgtcggccgtgaggacgat

SEQ ID NO: 65897 - DNA, 26 bp, Homo sapiens
cagacctgtcggccgtgaggacgatc

SEQ ID NO: 65898 - DNA, 26 bp, Homo sapiens
agacctgtcggccgtgaggacgatca

SEQ ID NO: 65899 - DNA, 26 bp, Homo sapiens
gacctgtcggccgtgaggacgatcag

SEQ ID NO: 65900 - DNA, 26 bp, Homo sapiens
acctgtcggccgtgaggacgatcagc

SEQ ID NO: 65901 - DNA, 26 bp, Homo sapiens
cctgtcggccgtgaggacgatcagca

SEQ ID NO: 65902 - DNA, 26 bp, Homo sapiens
ctgtcggccgtgaggacgatcagcag

SEQ ID NO: 65903 - DNA, 26 bp, Homo sapiens
tgtcggccgtgaggacgatcagcagc

SEQ ID NO: 65904 - DNA, 26 bp, Homo sapiens
gtcggccgtgaggacgatcagcagct

SEQ ID NO: 65905 - DNA, 26 bp, Homo sapiens
tcggccgtgaggacgatcagcagctg

SEQ ID NO: 65906 - DNA, 26 bp, Homo sapiens
cggccgtgaggacgatcagcagctgg

SEQ ID NO: 65907 - DNA, 26 bp, Homo sapiens
ggccgtgaggacgatcagcagctggg

SEQ ID NO: 65908 - DNA, 26 bp, Homo sapiens
gccgtgaggacgatcagcagctgggg

SEQ ID NO: 65909 - DNA, 26 bp, Homo sapiens
ccgtgaggacgatcagcagctggggc

SEQ ID NO: 65910 - DNA, 26 bp, Homo sapiens
cgtgaggacgatcagcagctggggca

SEQ ID NO: 65911 - DNA, 26 bp, Homo sapiens
gtgaggacgatcagcagctggggcac

SEQ ID NO: 65912 - DNA, 26 bp, Homo sapiens
tgaggacgatcagcagctggggcaca

SEQ ID NO: 65913 - DNA, 26 bp, Homo sapiens
gaggacgatcagcagctggggcacac

SEQ ID NO: 65914 - DNA, 26 bp, Homo sapiens
aggacgatcagcagctggggcacacc

SEQ ID NO: 65915 - DNA, 26 bp, Homo sapiens
ggacgatcagcagctggggcacacct

SEQ ID NO: 65916 - DNA, 26 bp, Homo sapiens
gacgatcagcagctggggcacacctt

SEQ ID NO: 65917 - DNA, 26 bp, Homo sapiens
acgatcagcagctggggcacaccttc

SEQ ID NO: 65918 - DNA, 26 bp, Homo sapiens
cgatcagcagctggggcacaccttct

SEQ ID NO: 65919 - DNA, 26 bp, Homo sapiens
gatcagcagctggggcacaccttctg

SEQ ID NO: 65920 - DNA, 26 bp, Homo sapiens
atcagcagctggggcacaccttctgt

SEQ ID NO: 65921 - DNA, 26 bp, Homo sapiens
tcagcagctggggcacaccttctgtt

SEQ ID NO: 65922 - DNA, 26 bp, Homo sapiens
cagcagctggggcacaccttctgtta

SEQ ID NO: 65923 - DNA, 26 bp, Homo sapiens
agcagctggggcacaccttctgttat

SEQ ID NO: 65924 - DNA, 26 bp, Homo sapiens
gcagctggggcacaccttctgttatc

SEQ ID NO: 65925 - DNA, 26 bp, Homo sapiens
cagctggggcacaccttctgttatcc

SEQ ID NO: 65926 - DNA, 26 bp, Homo sapiens
agctggggcacaccttctgttatcct

SEQ ID NO: 65927 - DNA, 26 bp, Homo sapiens
gctggggcacaccttctgttatcctg

SEQ ID NO: 65928 - DNA, 26 bp, Homo sapiens
ctggggcacaccttctgttatcctgc

SEQ ID NO: 65929 - DNA, 26 bp, Homo sapiens
tggggcacaccttctgttatcctgct

SEQ ID NO: 65930 - DNA, 26 bp, Homo sapiens
ggggcacaccttctgttatcctgctt

SEQ ID NO: 65931 - DNA, 26 bp, Homo sapiens
gggcacaccttctgttatcctgcttc

SEQ ID NO: 65932 - DNA, 26 bp, Homo sapiens
ggcacaccttctgttatcctgcttcc

SEQ ID NO: 65933 - DNA, 26 bp, Homo sapiens
gcacaccttctgttatcctgcttccc

SEQ ID NO: 65934 - DNA, 26 bp, Homo sapiens
cacaccttctgttatcctgcttcccg

SEQ ID NO: 65935 - DNA, 26 bp, Homo sapiens
acaccttctgttatcctgcttcccgc

SEQ ID NO: 65936 - DNA, 26 bp, Homo sapiens
caccttctgttatcctgcttcccgca

SEQ ID NO: 65937 - DNA, 26 bp, Homo sapiens
accttctgttatcctgcttcccgcag

SEQ ID NO: 65938 - DNA, 26 bp, Homo sapiens
ccttctgttatcctgcttcccgcaga

SEQ ID NO: 65939 - DNA, 26 bp, Homo sapiens
cttctgttatcctgcttcccgcagag

SEQ ID NO: 65940 - DNA, 26 bp, Homo sapiens
ttctgttatcctgcttcccgcagagc

SEQ ID NO: 65941 - DNA, 26 bp, Homo sapiens
tctgttatcctgcttcccgcagagct

SEQ ID NO: 65942 - DNA, 26 bp, Homo sapiens
ctgttatcctgcttcccgcagagctg

SEQ ID NO: 65943 - DNA, 26 bp, Homo sapiens
tgttatcctgcttcccgcagagctga

SEQ ID NO: 65944 - DNA, 26 bp, Homo sapiens
gttatcctgcttcccgcagagctgac

SEQ ID NO: 65945 - DNA, 26 bp, Homo sapiens
ttatcctgcttcccgcagagctgacc

SEQ ID NO: 65946 - DNA, 26 bp, Homo sapiens
tatcctgcttcccgcagagctgacca

SEQ ID NO: 65947 - DNA, 26 bp, Homo sapiens
atcctgcttcccgcagagctgaccag

SEQ ID NO: 65948 - DNA, 26 bp, Homo sapiens
tcctgcttcccgcagagctgaccagg

SEQ ID NO: 65949 - DNA, 26 bp, Homo sapiens
cctgcttcccgcagagctgaccagga

SEQ ID NO: 65950 - DNA, 26 bp, Homo sapiens
ctgcttcccgcagagctgaccaggat

SEQ ID NO: 65951 - DNA, 26 bp, Homo sapiens
tgcttcccgcagagctgaccaggatg

SEQ ID NO: 65952 - DNA, 26 bp, Homo sapiens
gcttcccgcagagctgaccaggatgt

SEQ ID NO: 65953 - DNA, 26 bp, Homo sapiens
cttcccgcagagctgaccaggatgtt

SEQ ID NO: 65954 - DNA, 26 bp, Homo sapiens
ttcccgcagagctgaccaggatgttc

SEQ ID NO: 65955 - DNA, 26 bp, Homo sapiens
tcccgcagagctgaccaggatgttcc

SEQ ID NO: 65956 - DNA, 26 bp, Homo sapiens
cccgcagagctgaccaggatgttcct

SEQ ID NO: 65957 - DNA, 26 bp, Homo sapiens
ccgcagagctgaccaggatgttcctc

SEQ ID NO: 65958 - DNA, 26 bp, Homo sapiens
cgcagagctgaccaggatgttcctca

SEQ ID NO: 65959 - DNA, 26 bp, Homo sapiens
gcagagctgaccaggatgttcctcag

SEQ ID NO: 65960 - DNA, 26 bp, Homo sapiens
cagagctgaccaggatgttcctcagg

SEQ ID NO: 65961 - DNA, 26 bp, Homo sapiens
agagctgaccaggatgttcctcagga

SEQ ID NO: 65962 - DNA, 26 bp, Homo sapiens
gagctgaccaggatgttcctcaggac

SEQ ID NO: 65963 - DNA, 26 bp, Homo sapiens
agctgaccaggatgttcctcaggaca

SEQ ID NO: 65964 - DNA, 26 bp, Homo sapiens
gctgaccaggatgttcctcaggacaa

SEQ ID NO: 65965 - DNA, 26 bp, Homo sapiens
ctgaccaggatgttcctcaggacaaa

SEQ ID NO: 65966 - DNA, 26 bp, Homo sapiens
tgaccaggatgttcctcaggacaaac

SEQ ID NO: 65967 - DNA, 26 bp, Homo sapiens
gaccaggatgttcctcaggacaaact

SEQ ID NO: 65968 - DNA, 26 bp, Homo sapiens
accaggatgttcctcaggacaaactc

SEQ ID NO: 65969 - DNA, 26 bp, Homo sapiens
ccaggatgttcctcaggacaaactcc

SEQ ID NO: 65970 - DNA, 26 bp, Homo sapiens
caggatgttcctcaggacaaactcca

SEQ ID NO: 65971 - DNA, 26 bp, Homo sapiens
aggatgttcctcaggacaaactccag

SEQ ID NO: 65972 - DNA, 26 bp, Homo sapiens
ggatgttcctcaggacaaactccagg

SEQ ID NO: 65973 - DNA, 26 bp, Homo sapiens
gatgttcctcaggacaaactccaggg

SEQ ID NO: 65974 - DNA, 26 bp, Homo sapiens
atgttcctcaggacaaactccagggc

SEQ ID NO: 65975 - DNA, 26 bp, Homo sapiens
tgttcctcaggacaaactccagggcg

SEQ ID NO: 65976 - DNA, 26 bp, Homo sapiens
gttcctcaggacaaactccagggcgg

SEQ ID NO: 65977 - DNA, 26 bp, Homo sapiens
ttcctcaggacaaactccagggcggc

SEQ ID NO: 65978 - DNA, 26 bp, Homo sapiens
tcctcaggacaaactccagggcggcc

SEQ ID NO: 65979 - DNA, 26 bp, Homo sapiens
cctcaggacaaactccagggcggccc

SEQ ID NO: 65980 - DNA, 26 bp, Homo sapiens
ctcaggacaaactccagggcggcccc

SEQ ID NO: 65981 - DNA, 26 bp, Homo sapiens
tcaggacaaactccagggcggccccg

SEQ ID NO: 65982 - DNA, 26 bp, Homo sapiens
caggacaaactccagggcggccccgg

SEQ ID NO: 65983 - DNA, 26 bp, Homo sapiens
aggacaaactccagggcggccccggt

SEQ ID NO: 65984 - DNA, 26 bp, Homo sapiens
ggacaaactccagggcggccccggtg

SEQ ID NO: 65985 - DNA, 26 bp, Homo sapiens
gacaaactccagggcggccccggtgt

SEQ ID NO: 65986 - DNA, 26 bp, Homo sapiens
acaaactccagggcggccccggtgtt

SEQ ID NO: 65987 - DNA, 26 bp, Homo sapiens
caaactccagggcggccccggtgttg

SEQ ID NO: 65988 - DNA, 26 bp, Homo sapiens
aaactccagggcggccccggtgttgg

SEQ ID NO: 65989 - DNA, 26 bp, Homo sapiens
aactccagggcggccccggtgttggg

SEQ ID NO: 65990 - DNA, 26 bp, Homo sapiens
actccagggcggccccggtgttgggg

SEQ ID NO: 65991 - DNA, 26 bp, Homo sapiens
ctccagggcggccccggtgttggggg

SEQ ID NO: 65992 - DNA, 26 bp, Homo sapiens
tccagggcggccccggtgttgggggt

SEQ ID NO: 65993 - DNA, 26 bp, Homo sapiens
ccagggcggccccggtgttgggggtc

SEQ ID NO: 65994 - DNA, 26 bp, Homo sapiens
cagggcggccccggtgttgggggtcg

SEQ ID NO: 65995 - DNA, 26 bp, Homo sapiens
agggcggccccggtgttgggggtcgg

SEQ ID NO: 65996 - DNA, 26 bp, Homo sapiens
gggcggccccggtgttgggggtcggc

SEQ ID NO: 65997 - DNA, 26 bp, Homo sapiens
ggcggccccggtgttgggggtcggcc

SEQ ID NO: 65998 - DNA, 26 bp, Homo sapiens
gcggccccggtgttgggggtcggccc

SEQ ID NO: 65999 - DNA, 26 bp, Homo sapiens
cggccccggtgttgggggtcggccct

SEQ ID NO: 66000 - DNA, 26 bp, Homo sapiens
ggccccggtgttgggggtcggccctc

SEQ ID NO: 66001 - DNA, 26 bp, Homo sapiens
gccccggtgttgggggtcggccctcc

SEQ ID NO: 66002 - DNA, 26 bp, Homo sapiens
ccccggtgttgggggtcggccctccc

SEQ ID NO: 66003 - DNA, 26 bp, Homo sapiens
cccggtgttgggggtcggccctccca

SEQ ID NO: 66004 - DNA, 26 bp, Homo sapiens
ccggtgttgggggtcggccctcccag

SEQ ID NO: 66005 - DNA, 26 bp, Homo sapiens
cggtgttgggggtcggccctcccagc

SEQ ID NO: 66006 - DNA, 26 bp, Homo sapiens
ggtgttgggggtcggccctcccagca

SEQ ID NO: 66007 - DNA, 26 bp, Homo sapiens
gtgttgggggtcggccctcccagcag

SEQ ID NO: 66008 - DNA, 26 bp, Homo sapiens
tgttgggggtcggccctcccagcagg

SEQ ID NO: 66009 - DNA, 26 bp, Homo sapiens
gttgggggtcggccctcccagcaggg

SEQ ID NO: 66010 - DNA, 26 bp, Homo sapiens
ttgggggtcggccctcccagcagggt

SEQ ID NO: 66011 - DNA, 26 bp, Homo sapiens
tgggggtcggccctcccagcagggtc

SEQ ID NO: 66012 - DNA, 26 bp, Homo sapiens
gggggtcggccctcccagcagggtca

SEQ ID NO: 66013 - DNA, 26 bp, Homo sapiens
ggggtcggccctcccagcagggtcag

SEQ ID NO: 66014 - DNA, 26 bp, Homo sapiens
gggtcggccctcccagcagggtcagc

SEQ ID NO: 66015 - DNA, 26 bp, Homo sapiens
ggtcggccctcccagcagggtcagct

SEQ ID NO: 66016 - DNA, 26 bp, Homo sapiens
gtcggccctcccagcagggtcagctg

SEQ ID NO: 66017 - DNA, 26 bp, Homo sapiens
tcggccctcccagcagggtcagctgg

SEQ ID NO: 66018 - DNA, 26 bp, Homo sapiens
cggccctcccagcagggtcagctggc

SEQ ID NO: 66019 - DNA, 26 bp, Homo sapiens
ggccctcccagcagggtcagctggcg

SEQ ID NO: 66020 - DNA, 26 bp, Homo sapiens
gccctcccagcagggtcagctggcgg

SEQ ID NO: 66021 - DNA, 26 bp, Homo sapiens
ccctcccagcagggtcagctggcgga

SEQ ID NO: 66022 - DNA, 26 bp, Homo sapiens
cctcccagcagggtcagctggcggac

SEQ ID NO: 66023 - DNA, 26 bp, Homo sapiens
ctcccagcagggtcagctggcggaca

SEQ ID NO: 66024 - DNA, 26 bp, Homo sapiens
tcccagcagggtcagctggcggacag

SEQ ID NO: 66025 - DNA, 26 bp, Homo sapiens
cccagcagggtcagctggcggacagc

SEQ ID NO: 66026 - DNA, 26 bp, Homo sapiens
ccagcagggtcagctggcggacagcg

SEQ ID NO: 66027 - DNA, 26 bp, Homo sapiens
cagcagggtcagctggcggacagcgt

SEQ ID NO: 66028 - DNA, 26 bp, Homo sapiens
agcagggtcagctggcggacagcgtt

SEQ ID NO: 66029 - DNA, 26 bp, Homo sapiens
gcagggtcagctggcggacagcgttg

SEQ ID NO: 66030 - DNA, 26 bp, Homo sapiens
cagggtcagctggcggacagcgttga

SEQ ID NO: 66031 - DNA, 26 bp, Homo sapiens
agggtcagctggcggacagcgttgac

SEQ ID NO: 66032 - DNA, 26 bp, Homo sapiens
gggtcagctggcggacagcgttgacg

SEQ ID NO: 66033 - DNA, 26 bp, Homo sapiens
ggtcagctggcggacagcgttgacga

SEQ ID NO: 66034 - DNA, 26 bp, Homo sapiens
gtcagctggcggacagcgttgacgac

SEQ ID NO: 66035 - DNA, 26 bp, Homo sapiens
tcagctggcggacagcgttgacgacg

SEQ ID NO: 66036 - DNA, 26 bp, Homo sapiens
cagctggcggacagcgttgacgacgt

SEQ ID NO: 66037 - DNA, 26 bp, Homo sapiens
agctggcggacagcgttgacgacgtc

SEQ ID NO: 66038 - DNA, 26 bp, Homo sapiens
gctggcggacagcgttgacgacgtcc

SEQ ID NO: 66039 - DNA, 26 bp, Homo sapiens
ctggcggacagcgttgacgacgtcct

SEQ ID NO: 66040 - DNA, 26 bp, Homo sapiens
tggcggacagcgttgacgacgtcctg

SEQ ID NO: 66041 - DNA, 26 bp, Homo sapiens
ggcggacagcgttgacgacgtcctgc

SEQ ID NO: 66042 - DNA, 26 bp, Homo sapiens
gcggacagcgttgacgacgtcctgct

SEQ ID NO: 66043 - DNA, 26 bp, Homo sapiens
cggacagcgttgacgacgtcctgctt

SEQ ID NO: 66044 - DNA, 26 bp, Homo sapiens
ggacagcgttgacgacgtcctgcttg

SEQ ID NO: 66045 - DNA, 26 bp, Homo sapiens
gacagcgttgacgacgtcctgcttgt

SEQ ID NO: 66046 - DNA, 26 bp, Homo sapiens
acagcgttgacgacgtcctgcttgtt

SEQ ID NO: 66047 - DNA, 26 bp, Homo sapiens
cagcgttgacgacgtcctgcttgttc

SEQ ID NO: 66048 - DNA, 26 bp, Homo sapiens
agcgttgacgacgtcctgcttgttca

SEQ ID NO: 66049 - DNA, 26 bp, Homo sapiens
gcgttgacgacgtcctgcttgttcat

SEQ ID NO: 66050 - DNA, 26 bp, Homo sapiens
cgttgacgacgtcctgcttgttcatg

SEQ ID NO: 66051 - DNA, 26 bp, Homo sapiens
gttgacgacgtcctgcttgttcatgt

SEQ ID NO: 66052 - DNA, 26 bp, Homo sapiens
ttgacgacgtcctgcttgttcatgta

SEQ ID NO: 66053 - DNA, 26 bp, Homo sapiens
tgacgacgtcctgcttgttcatgtat

SEQ ID NO: 66054 - DNA, 26 bp, Homo sapiens
gacgacgtcctgcttgttcatgtatg

SEQ ID NO: 66055 - DNA, 26 bp, Homo sapiens
acgacgtcctgcttgttcatgtatga

SEQ ID NO: 66056 - DNA, 26 bp, Homo sapiens
cgacgtcctgcttgttcatgtatgaa

SEQ ID NO: 66057 - DNA, 26 bp, Homo sapiens
gacgtcctgcttgttcatgtatgaat

SEQ ID NO: 66058 - DNA, 26 bp, Homo sapiens
acgtcctgcttgttcatgtatgaatt

SEQ ID NO: 66059 - DNA, 26 bp, Homo sapiens
cgtcctgcttgttcatgtatgaattc

SEQ ID NO: 66060 - DNA, 26 bp, Homo sapiens
gtcctgcttgttcatgtatgaattca

SEQ ID NO: 66061 - DNA, 26 bp, Homo sapiens
tcctgcttgttcatgtatgaattcag

SEQ ID NO: 66062 - DNA, 26 bp, Homo sapiens
cctgcttgttcatgtatgaattcagg

SEQ ID NO: 66063 - DNA, 26 bp, Homo sapiens
ctgcttgttcatgtatgaattcaggt

SEQ ID NO: 66064 - DNA, 26 bp, Homo sapiens
tgcttgttcatgtatgaattcaggta

SEQ ID NO: 66065 - DNA, 26 bp, Homo sapiens
gcttgttcatgtatgaattcaggtag

SEQ ID NO: 66066 - DNA, 26 bp, Homo sapiens
cttgttcatgtatgaattcaggtaga

SEQ ID NO: 66067 - DNA, 26 bp, Homo sapiens
ttgttcatgtatgaattcaggtagaa

SEQ ID NO: 66068 - DNA, 26 bp, Homo sapiens
tgttcatgtatgaattcaggtagaac

SEQ ID NO: 66069 - DNA, 26 bp, Homo sapiens
gttcatgtatgaattcaggtagaact

SEQ ID NO: 66070 - DNA, 26 bp, Homo sapiens
ttcatgtatgaattcaggtagaactc

SEQ ID NO: 66071 - DNA, 26 bp, Homo sapiens
tcatgtatgaattcaggtagaactcg

SEQ ID NO: 66072 - DNA, 26 bp, Homo sapiens
catgtatgaattcaggtagaactcgg

SEQ ID NO: 66073 - DNA, 26 bp, Homo sapiens
atgtatgaattcaggtagaactcggg

SEQ ID NO: 66074 - DNA, 26 bp, Homo sapiens
tgtatgaattcaggtagaactcgggc

SEQ ID NO: 66075 - DNA, 26 bp, Homo sapiens
gtatgaattcaggtagaactcgggcc

SEQ ID NO: 66076 - DNA, 26 bp, Homo sapiens
tatgaattcaggtagaactcgggcct

SEQ ID NO: 66077 - DNA, 26 bp, Homo sapiens
atgaattcaggtagaactcgggcctg

SEQ ID NO: 66078 - DNA, 26 bp, Homo sapiens
tgaattcaggtagaactcgggcctgg

SEQ ID NO: 66079 - DNA, 26 bp, Homo sapiens
gaattcaggtagaactcgggcctggt

SEQ ID NO: 66080 - DNA, 26 bp, Homo sapiens
aattcaggtagaactcgggcctggtc

SEQ ID NO: 66081 - DNA, 26 bp, Homo sapiens
attcaggtagaactcgggcctggtcc

SEQ ID NO: 66082 - DNA, 26 bp, Homo sapiens
ttcaggtagaactcgggcctggtccg

SEQ ID NO: 66083 - DNA, 26 bp, Homo sapiens
tcaggtagaactcgggcctggtccgg

SEQ ID NO: 66084 - DNA, 26 bp, Homo sapiens
caggtagaactcgggcctggtccggt

SEQ ID NO: 66085 - DNA, 26 bp, Homo sapiens
aggtagaactcgggcctggtccggtc

SEQ ID NO: 66086 - DNA, 26 bp, Homo sapiens
ggtagaactcgggcctggtccggtcg

SEQ ID NO: 66087 - DNA, 26 bp, Homo sapiens
gtagaactcgggcctggtccggtcgc

SEQ ID NO: 66088 - DNA, 26 bp, Homo sapiens
tagaactcgggcctggtccggtcgct

SEQ ID NO: 66089 - DNA, 26 bp, Homo sapiens
agaactcgggcctggtccggtcgctg

SEQ ID NO: 66090 - DNA, 26 bp, Homo sapiens
gaactcgggcctggtccggtcgctgt

SEQ ID NO: 66091 - DNA, 26 bp, Homo sapiens
aactcgggcctggtccggtcgctgta

SEQ ID NO: 66092 - DNA, 26 bp, Homo sapiens
actcgggcctggtccggtcgctgtac

SEQ ID NO: 66093 - DNA, 26 bp, Homo sapiens
ctcgggcctggtccggtcgctgtact

SEQ ID NO: 66094 - DNA, 26 bp, Homo sapiens
tcgggcctggtccggtcgctgtactg

SEQ ID NO: 66095 - DNA, 26 bp, Homo sapiens
cgggcctggtccggtcgctgtactgc

SEQ ID NO: 66096 - DNA, 26 bp, Homo sapiens
gggcctggtccggtcgctgtactgca

SEQ ID NO: 66097 - DNA, 26 bp, Homo sapiens
ggcctggtccggtcgctgtactgcac

SEQ ID NO: 66098 - DNA, 26 bp, Homo sapiens
gcctggtccggtcgctgtactgcacc

SEQ ID NO: 66099 - DNA, 26 bp, Homo sapiens
cctggtccggtcgctgtactgcacca

SEQ ID NO: 66100 - DNA, 26 bp, Homo sapiens
ctggtccggtcgctgtactgcaccac

SEQ ID NO: 66101 - DNA, 26 bp, Homo sapiens
tggtccggtcgctgtactgcaccacg

SEQ ID NO: 66102 - DNA, 26 bp, Homo sapiens
ggtccggtcgctgtactgcaccacgg

SEQ ID NO: 66103 - DNA, 26 bp, Homo sapiens
gtccggtcgctgtactgcaccacggc

SEQ ID NO: 66104 - DNA, 26 bp, Homo sapiens
tccggtcgctgtactgcaccacggcc

SEQ ID NO: 66105 - DNA, 26 bp, Homo sapiens
ccggtcgctgtactgcaccacggcca

SEQ ID NO: 66106 - DNA, 26 bp, Homo sapiens
cggtcgctgtactgcaccacggccac

SEQ ID NO: 66107 - DNA, 26 bp, Homo sapiens
ggtcgctgtactgcaccacggccacg

SEQ ID NO: 66108 - DNA, 26 bp, Homo sapiens
gtcgctgtactgcaccacggccacgc

SEQ ID NO: 66109 - DNA, 26 bp, Homo sapiens
tcgctgtactgcaccacggccacgcg

SEQ ID NO: 66110 - DNA, 26 bp, Homo sapiens
cgctgtactgcaccacggccacgcgg

SEQ ID NO: 66111 - DNA, 26 bp, Homo sapiens
gctgtactgcaccacggccacgcgga

SEQ ID NO: 66112 - DNA, 26 bp, Homo sapiens
ctgtactgcaccacggccacgcggac

SEQ ID NO: 66113 - DNA, 26 bp, Homo sapiens
tgtactgcaccacggccacgcggacc

SEQ ID NO: 66114 - DNA, 26 bp, Homo sapiens
gtactgcaccacggccacgcggaccc

SEQ ID NO: 66115 - DNA, 26 bp, Homo sapiens
tactgcaccacggccacgcggacccg

SEQ ID NO: 66116 - DNA, 26 bp, Homo sapiens
actgcaccacggccacgcggacccgg

SEQ ID NO: 66117 - DNA, 26 bp, Homo sapiens
ctgcaccacggccacgcggacccggt

SEQ ID NO: 66118 - DNA, 26 bp, Homo sapiens
tgcaccacggccacgcggacccggtc

SEQ ID NO: 66119 - DNA, 26 bp, Homo sapiens
gcaccacggccacgcggacccggtcc

SEQ ID NO: 66120 - DNA, 26 bp, Homo sapiens
caccacggccacgcggacccggtcct

SEQ ID NO: 66121 - DNA, 26 bp, Homo sapiens
accacggccacgcggacccggtcctg

SEQ ID NO: 66122 - DNA, 26 bp, Homo sapiens
ccacggccacgcggacccggtcctgg

SEQ ID NO: 66123 - DNA, 26 bp, Homo sapiens
cacggccacgcggacccggtcctggc

SEQ ID NO: 66124 - DNA, 26 bp, Homo sapiens
acggccacgcggacccggtcctggcc

SEQ ID NO: 66125 - DNA, 26 bp, Homo sapiens
cggccacgcggacccggtcctggccc

SEQ ID NO: 66126 - DNA, 26 bp, Homo sapiens
ggccacgcggacccggtcctggccca

SEQ ID NO: 66127 - DNA, 26 bp, Homo sapiens
gccacgcggacccggtcctggcccac

SEQ ID NO: 66128 - DNA, 26 bp, Homo sapiens
ccacgcggacccggtcctggcccaca

SEQ ID NO: 66129 - DNA, 26 bp, Homo sapiens
cacgcggacccggtcctggcccacat

SEQ ID NO: 66130 - DNA, 26 bp, Homo sapiens
acgcggacccggtcctggcccacatc

SEQ ID NO: 66131 - DNA, 26 bp, Homo sapiens
cgcggacccggtcctggcccacatcc

SEQ ID NO: 66132 - DNA, 26 bp, Homo sapiens
gcggacccggtcctggcccacatcca

SEQ ID NO: 66133 - DNA, 26 bp, Homo sapiens
cggacccggtcctggcccacatccag

SEQ ID NO: 66134 - DNA, 26 bp, Homo sapiens
ggacccggtcctggcccacatccagg

SEQ ID NO: 66135 - DNA, 26 bp, Homo sapiens
gacccggtcctggcccacatccaggc

SEQ ID NO: 66136 - DNA, 26 bp, Homo sapiens
acccggtcctggcccacatccaggct

SEQ ID NO: 66137 - DNA, 26 bp, Homo sapiens
cccggtcctggcccacatccaggctt

SEQ ID NO: 66138 - DNA, 26 bp, Homo sapiens
ccggtcctggcccacatccaggcttt

SEQ ID NO: 66139 - DNA, 26 bp, Homo sapiens
cggtcctggcccacatccaggctttc

SEQ ID NO: 66140 - DNA, 26 bp, Homo sapiens
ggtcctggcccacatccaggctttcc

SEQ ID NO: 66141 - DNA, 26 bp, Homo sapiens
gtcctggcccacatccaggctttcca

SEQ ID NO: 66142 - DNA, 26 bp, Homo sapiens
tcctggcccacatccaggctttccac

SEQ ID NO: 66143 - DNA, 26 bp, Homo sapiens
cctggcccacatccaggctttccacc

SEQ ID NO: 66144 - DNA, 26 bp, Homo sapiens
ctggcccacatccaggctttccacca

SEQ ID NO: 66145 - DNA, 26 bp, Homo sapiens
tggcccacatccaggctttccaccac

SEQ ID NO: 66146 - DNA, 26 bp, Homo sapiens
ggcccacatccaggctttccaccact

SEQ ID NO: 66147 - DNA, 26 bp, Homo sapiens
gcccacatccaggctttccaccactc

SEQ ID NO: 66148 - DNA, 26 bp, Homo sapiens
cccacatccaggctttccaccactct

SEQ ID NO: 66149 - DNA, 26 bp, Homo sapiens
ccacatccaggctttccaccactctc

SEQ ID NO: 66150 - DNA, 26 bp, Homo sapiens
cacatccaggctttccaccactctct

SEQ ID NO: 66151 - DNA, 26 bp, Homo sapiens
acatccaggctttccaccactctctg

SEQ ID NO: 66152 - DNA, 26 bp, Homo sapiens
catccaggctttccaccactctctgg

SEQ ID NO: 66153 - DNA, 26 bp, Homo sapiens
atccaggctttccaccactctctgga

SEQ ID NO: 66154 - DNA, 26 bp, Homo sapiens
tccaggctttccaccactctctggac

SEQ ID NO: 66155 - DNA, 26 bp, Homo sapiens
ccaggctttccaccactctctggaca

SEQ ID NO: 66156 - DNA, 26 bp, Homo sapiens
caggctttccaccactctctggacaa

SEQ ID NO: 66157 - DNA, 26 bp, Homo sapiens
aggctttccaccactctctggacaaa

SEQ ID NO: 66158 - DNA, 26 bp, Homo sapiens
ggctttccaccactctctggacaaac

SEQ ID NO: 66159 - DNA, 26 bp, Homo sapiens
gctttccaccactctctggacaaact

SEQ ID NO: 66160 - DNA, 26 bp, Homo sapiens
ctttccaccactctctggacaaactc

SEQ ID NO: 66161 - DNA, 26 bp, Homo sapiens
tttccaccactctctggacaaactct

SEQ ID NO: 66162 - DNA, 26 bp, Homo sapiens
ttccaccactctctggacaaactctt

SEQ ID NO: 66163 - DNA, 26 bp, Homo sapiens
tccaccactctctggacaaactcttt

SEQ ID NO: 66164 - DNA, 26 bp, Homo sapiens
ccaccactctctggacaaactctttc

SEQ ID NO: 66165 - DNA, 26 bp, Homo sapiens
caccactctctggacaaactctttca

SEQ ID NO: 66166 - DNA, 26 bp, Homo sapiens
accactctctggacaaactctttcaa

SEQ ID NO: 66167 - DNA, 26 bp, Homo sapiens
ccactctctggacaaactctttcaac

SEQ ID NO: 66168 - DNA, 26 bp, Homo sapiens
cactctctggacaaactctttcaaca

SEQ ID NO: 66169 - DNA, 26 bp, Homo sapiens
actctctggacaaactctttcaacag

SEQ ID NO: 66170 - DNA, 26 bp, Homo sapiens
ctctctggacaaactctttcaacaga

SEQ ID NO: 66171 - DNA, 26 bp, Homo sapiens
tctctggacaaactctttcaacagag

SEQ ID NO: 66172 - DNA, 26 bp, Homo sapiens
ctctggacaaactctttcaacagagg

SEQ ID NO: 66173 - DNA, 26 bp, Homo sapiens
tctggacaaactctttcaacagaggg

SEQ ID NO: 66174 - DNA, 26 bp, Homo sapiens
ctggacaaactctttcaacagaggga

SEQ ID NO: 66175 - DNA, 26 bp, Homo sapiens
tggacaaactctttcaacagagggaa

SEQ ID NO: 66176 - DNA, 26 bp, Homo sapiens
ggacaaactctttcaacagagggaag

SEQ ID NO: 66177 - DNA, 26 bp, Homo sapiens
gacaaactctttcaacagagggaagc

SEQ ID NO: 66178 - DNA, 26 bp, Homo sapiens
acaaactctttcaacagagggaagcc

SEQ ID NO: 66179 - DNA, 26 bp, Homo sapiens
caaactctttcaacagagggaagccg

SEQ ID NO: 66180 - DNA, 26 bp, Homo sapiens
aaactctttcaacagagggaagccgc

SEQ ID NO: 66181 - DNA, 26 bp, Homo sapiens
aactctttcaacagagggaagccgct

SEQ ID NO: 66182 - DNA, 26 bp, Homo sapiens
actctttcaacagagggaagccgctc

SEQ ID NO: 66183 - DNA, 26 bp, Homo sapiens
ctctttcaacagagggaagccgctcc

SEQ ID NO: 66184 - DNA, 26 bp, Homo sapiens
tctttcaacagagggaagccgctcct

SEQ ID NO: 66185 - DNA, 26 bp, Homo sapiens
ctttcaacagagggaagccgctcctg

SEQ ID NO: 66186 - DNA, 26 bp, Homo sapiens
tttcaacagagggaagccgctcctga

SEQ ID NO: 66187 - DNA, 26 bp, Homo sapiens
ttcaacagagggaagccgctcctgac

SEQ ID NO: 66188 - DNA, 26 bp, Homo sapiens
tcaacagagggaagccgctcctgacg

SEQ ID NO: 66189 - DNA, 26 bp, Homo sapiens
caacagagggaagccgctcctgacgc

SEQ ID NO: 66190 - DNA, 26 bp, Homo sapiens
aacagagggaagccgctcctgacgcc

SEQ ID NO: 66191 - DNA, 26 bp, Homo sapiens
acagagggaagccgctcctgacgccc

SEQ ID NO: 66192 - DNA, 26 bp, Homo sapiens
cagagggaagccgctcctgacgccct

SEQ ID NO: 66193 - DNA, 26 bp, Homo sapiens
agagggaagccgctcctgacgccctc

SEQ ID NO: 66194 - DNA, 26 bp, Homo sapiens
gagggaagccgctcctgacgccctca

SEQ ID NO: 66195 - DNA, 26 bp, Homo sapiens
agggaagccgctcctgacgccctcag

SEQ ID NO: 66196 - DNA, 26 bp, Homo sapiens
gggaagccgctcctgacgccctcaga

SEQ ID NO: 66197 - DNA, 26 bp, Homo sapiens
ggaagccgctcctgacgccctcagag

SEQ ID NO: 66198 - DNA, 26 bp, Homo sapiens
gaagccgctcctgacgccctcagagc

SEQ ID NO: 66199 - DNA, 26 bp, Homo sapiens
aagccgctcctgacgccctcagagcc

SEQ ID NO: 66200 - DNA, 26 bp, Homo sapiens
agccgctcctgacgccctcagagcca

SEQ ID NO: 66201 - DNA, 26 bp, Homo sapiens
gccgctcctgacgccctcagagccat

SEQ ID NO: 66202 - DNA, 26 bp, Homo sapiens
ccgctcctgacgccctcagagccatc

SEQ ID NO: 66203 - DNA, 26 bp, Homo sapiens
cgctcctgacgccctcagagccatca

SEQ ID NO: 66204 - DNA, 26 bp, Homo sapiens
gctcctgacgccctcagagccatcaa

SEQ ID NO: 66205 - DNA, 26 bp, Homo sapiens
ctcctgacgccctcagagccatcaag

SEQ ID NO: 66206 - DNA, 26 bp, Homo sapiens
tcctgacgccctcagagccatcaagc

SEQ ID NO: 66207 - DNA, 26 bp, Homo sapiens
cctgacgccctcagagccatcaagca

SEQ ID NO: 66208 - DNA, 26 bp, Homo sapiens
ctgacgccctcagagccatcaagcag

SEQ ID NO: 66209 - DNA, 26 bp, Homo sapiens
tgacgccctcagagccatcaagcaga

SEQ ID NO: 66210 - DNA, 26 bp, Homo sapiens
gacgccctcagagccatcaagcagaa

SEQ ID NO: 66211 - DNA, 26 bp, Homo sapiens
acgccctcagagccatcaagcagaaa

SEQ ID NO: 66212 - DNA, 26 bp, Homo sapiens
cgccctcagagccatcaagcagaaac

SEQ ID NO: 66213 - DNA, 26 bp, Homo sapiens
gccctcagagccatcaagcagaaaca

SEQ ID NO: 66214 - DNA, 26 bp, Homo sapiens
ccctcagagccatcaagcagaaacac

SEQ ID NO: 66215 - DNA, 26 bp, Homo sapiens
cctcagagccatcaagcagaaacacc

SEQ ID NO: 66216 - DNA, 26 bp, Homo sapiens
ctcagagccatcaagcagaaacacca

SEQ ID NO: 66217 - DNA, 26 bp, Homo sapiens
tcagagccatcaagcagaaacaccac

SEQ ID NO: 66218 - DNA, 26 bp, Homo sapiens
cagagccatcaagcagaaacaccacg

SEQ ID NO: 66219 - DNA, 26 bp, Homo sapiens
agagccatcaagcagaaacaccacgt

SEQ ID NO: 66220 - DNA, 26 bp, Homo sapiens
gagccatcaagcagaaacaccacgtc

SEQ ID NO: 66221 - DNA, 26 bp, Homo sapiens
agccatcaagcagaaacaccacgtcc

SEQ ID NO: 66222 - DNA, 26 bp, Homo sapiens
gccatcaagcagaaacaccacgtcct

SEQ ID NO: 66223 - DNA, 26 bp, Homo sapiens
ccatcaagcagaaacaccacgtcctt

SEQ ID NO: 66224 - DNA, 26 bp, Homo sapiens
catcaagcagaaacaccacgtccttt

SEQ ID NO: 66225 - DNA, 26 bp, Homo sapiens
atcaagcagaaacaccacgtcctttt

SEQ ID NO: 66226 - DNA, 26 bp, Homo sapiens
tcaagcagaaacaccacgtccttttc

SEQ ID NO: 66227 - DNA, 26 bp, Homo sapiens
caagcagaaacaccacgtccttttca

SEQ ID NO: 66228 - DNA, 26 bp, Homo sapiens
aagcagaaacaccacgtccttttcac

SEQ ID NO: 66229 - DNA, 26 bp, Homo sapiens
agcagaaacaccacgtccttttcacc

SEQ ID NO: 66230 - DNA, 26 bp, Homo sapiens
gcagaaacaccacgtccttttcacct

SEQ ID NO: 66231 - DNA, 26 bp, Homo sapiens
cagaaacaccacgtccttttcacctg

SEQ ID NO: 66232 - DNA, 26 bp, Homo sapiens
agaaacaccacgtccttttcacctga

SEQ ID NO: 66233 - DNA, 26 bp, Homo sapiens
gaaacaccacgtccttttcacctgaa

SEQ ID NO: 66234 - DNA, 26 bp, Homo sapiens
aaacaccacgtccttttcacctgaaa

SEQ ID NO: 66235 - DNA, 26 bp, Homo sapiens
aacaccacgtccttttcacctgaaac

SEQ ID NO: 66236 - DNA, 26 bp, Homo sapiens
acaccacgtccttttcacctgaaact

SEQ ID NO: 66237 - DNA, 26 bp, Homo sapiens
caccacgtccttttcacctgaaactg

SEQ ID NO: 66238 - DNA, 26 bp, Homo sapiens
accacgtccttttcacctgaaactgg

SEQ ID NO: 66239 - DNA, 26 bp, Homo sapiens
ccacgtccttttcacctgaaactggt

SEQ ID NO: 66240 - DNA, 26 bp, Homo sapiens
cacgtccttttcacctgaaactggtg

SEQ ID NO: 66241 - DNA, 26 bp, Homo sapiens
acgtccttttcacctgaaactggtgc

SEQ ID NO: 66242 - DNA, 26 bp, Homo sapiens
cgtccttttcacctgaaactggtgct

SEQ ID NO: 66243 - DNA, 26 bp, Homo sapiens
gtccttttcacctgaaactggtgctg

SEQ ID NO: 66244 - DNA, 26 bp, Homo sapiens
tccttttcacctgaaactggtgctgg

SEQ ID NO: 66245 - DNA, 26 bp, Homo sapiens
ccttttcacctgaaactggtgctggt

SEQ ID NO: 66246 - DNA, 26 bp, Homo sapiens
cttttcacctgaaactggtgctggtg

SEQ ID NO: 66247 - DNA, 26 bp, Homo sapiens
ttttcacctgaaactggtgctggtgc

SEQ ID NO: 66248 - DNA, 26 bp, Homo sapiens
tttcacctgaaactggtgctggtgct

SEQ ID NO: 66249 - DNA, 26 bp, Homo sapiens
ttcacctgaaactggtgctggtgctc

SEQ ID NO: 66250 - DNA, 26 bp, Homo sapiens
tcacctgaaactggtgctggtgctcc

SEQ ID NO: 66251 - DNA, 26 bp, Homo sapiens
cacctgaaactggtgctggtgctccg

SEQ ID NO: 66252 - DNA, 26 bp, Homo sapiens
acctgaaactggtgctggtgctccgt

SEQ ID NO: 66253 - DNA, 26 bp, Homo sapiens
cctgaaactggtgctggtgctccgtt

SEQ ID NO: 66254 - DNA, 26 bp, Homo sapiens
ctgaaactggtgctggtgctccgttg

SEQ ID NO: 66255 - DNA, 26 bp, Homo sapiens
tgaaactggtgctggtgctccgttgt

SEQ ID NO: 66256 - DNA, 26 bp, Homo sapiens
gaaactggtgctggtgctccgttgtg

SEQ ID NO: 66257 - DNA, 26 bp, Homo sapiens
aaactggtgctggtgctccgttgtgc

SEQ ID NO: 66258 - DNA, 26 bp, Homo sapiens
aactggtgctggtgctccgttgtgca

SEQ ID NO: 66259 - DNA, 26 bp, Homo sapiens
actggtgctggtgctccgttgtgcac

SEQ ID NO: 66260 - DNA, 26 bp, Homo sapiens
ctggtgctggtgctccgttgtgcact

SEQ ID NO: 66261 - DNA, 26 bp, Homo sapiens
tggtgctggtgctccgttgtgcactg

SEQ ID NO: 66262 - DNA, 26 bp, Homo sapiens
ggtgctggtgctccgttgtgcactga

SEQ ID NO: 66263 - DNA, 26 bp, Homo sapiens
gtgctggtgctccgttgtgcactgat

SEQ ID NO: 66264 - DNA, 26 bp, Homo sapiens
tgctggtgctccgttgtgcactgatt

SEQ ID NO: 66265 - DNA, 26 bp, Homo sapiens
gctggtgctccgttgtgcactgattt

SEQ ID NO: 66266 - DNA, 26 bp, Homo sapiens
ctggtgctccgttgtgcactgatttt

SEQ ID NO: 66267 - DNA, 26 bp, Homo sapiens
tggtgctccgttgtgcactgatttta

SEQ ID NO: 66268 - DNA, 26 bp, Homo sapiens
ggtgctccgttgtgcactgattttaa

SEQ ID NO: 66269 - DNA, 26 bp, Homo sapiens
gtgctccgttgtgcactgattttaag

SEQ ID NO: 66270 - DNA, 26 bp, Homo sapiens
tgctccgttgtgcactgattttaaga

SEQ ID NO: 66271 - DNA, 26 bp, Homo sapiens
gctccgttgtgcactgattttaagag

SEQ ID NO: 66272 - DNA, 26 bp, Homo sapiens
ctccgttgtgcactgattttaagaga

SEQ ID NO: 66273 - DNA, 26 bp, Homo sapiens
tccgttgtgcactgattttaagagat

SEQ ID NO: 66274 - DNA, 26 bp, Homo sapiens
ccgttgtgcactgattttaagagatt

SEQ ID NO: 66275 - DNA, 26 bp, Homo sapiens
cgttgtgcactgattttaagagattc

SEQ ID NO: 66276 - DNA, 26 bp, Homo sapiens
gttgtgcactgattttaagagattca

SEQ ID NO: 66277 - DNA, 26 bp, Homo sapiens
ttgtgcactgattttaagagattcac

SEQ ID NO: 66278 - DNA, 26 bp, Homo sapiens
tgtgcactgattttaagagattcact

SEQ ID NO: 66279 - DNA, 26 bp, Homo sapiens
gtgcactgattttaagagattcacta

SEQ ID NO: 66280 - DNA, 26 bp, Homo sapiens
tgcactgattttaagagattcactat

SEQ ID NO: 66281 - DNA, 26 bp, Homo sapiens
gcactgattttaagagattcactatc

SEQ ID NO: 66282 - DNA, 26 bp, Homo sapiens
cactgattttaagagattcactatct

SEQ ID NO: 66283 - DNA, 26 bp, Homo sapiens
actgattttaagagattcactatctg

SEQ ID NO: 66284 - DNA, 26 bp, Homo sapiens
ctgattttaagagattcactatctgt

SEQ ID NO: 66285 - DNA, 26 bp, Homo sapiens
tgattttaagagattcactatctgtg

SEQ ID NO: 66286 - DNA, 26 bp, Homo sapiens
gattttaagagattcactatctgtgg

SEQ ID NO: 66287 - DNA, 26 bp, Homo sapiens
attttaagagattcactatctgtgga

SEQ ID NO: 66288 - DNA, 26 bp, Homo sapiens
ttttaagagattcactatctgtggat

SEQ ID NO: 66289 - DNA, 26 bp, Homo sapiens
tttaagagattcactatctgtggatg

SEQ ID NO: 66290 - DNA, 26 bp, Homo sapiens
ttaagagattcactatctgtggatga

SEQ ID NO: 66291 - DNA, 26 bp, Homo sapiens
taagagattcactatctgtggatgaa

SEQ ID NO: 66292 - DNA, 26 bp, Homo sapiens
aagagattcactatctgtggatgaag

SEQ ID NO: 66293 - DNA, 26 bp, Homo sapiens
agagattcactatctgtggatgaaga

SEQ ID NO: 66294 - DNA, 26 bp, Homo sapiens
gagattcactatctgtggatgaagat

SEQ ID NO: 66295 - DNA, 26 bp, Homo sapiens
agattcactatctgtggatgaagatc

SEQ ID NO: 66296 - DNA, 26 bp, Homo sapiens
gattcactatctgtggatgaagatct

SEQ ID NO: 66297 - DNA, 26 bp, Homo sapiens
attcactatctgtggatgaagatctc

SEQ ID NO: 66298 - DNA, 26 bp, Homo sapiens
ttcactatctgtggatgaagatctcc

SEQ ID NO: 66299 - DNA, 26 bp, Homo sapiens
tcactatctgtggatgaagatctcca

SEQ ID NO: 66300 - DNA, 26 bp, Homo sapiens
cactatctgtggatgaagatctccaa

SEQ ID NO: 66301 - DNA, 26 bp, Homo sapiens
actatctgtggatgaagatctccaat

SEQ ID NO: 66302 - DNA, 26 bp, Homo sapiens
ctatctgtggatgaagatctccaatc

SEQ ID NO: 66303 - DNA, 26 bp, Homo sapiens
tatctgtggatgaagatctccaatct

SEQ ID NO: 66304 - DNA, 26 bp, Homo sapiens
atctgtggatgaagatctccaatctt

SEQ ID NO: 66305 - DNA, 26 bp, Homo sapiens
tctgtggatgaagatctccaatcttg

SEQ ID NO: 66306 - DNA, 26 bp, Homo sapiens
ctgtggatgaagatctccaatcttgg

SEQ ID NO: 66307 - DNA, 26 bp, Homo sapiens
tgtggatgaagatctccaatcttggg

SEQ ID NO: 66308 - DNA, 26 bp, Homo sapiens
gtggatgaagatctccaatcttggga

SEQ ID NO: 66309 - DNA, 26 bp, Homo sapiens
tggatgaagatctccaatcttgggaa

SEQ ID NO: 66310 - DNA, 26 bp, Homo sapiens
ggatgaagatctccaatcttgggaag

SEQ ID NO: 66311 - DNA, 26 bp, Homo sapiens
gatgaagatctccaatcttgggaagc

SEQ ID NO: 66312 - DNA, 26 bp, Homo sapiens
atgaagatctccaatcttgggaagcg

SEQ ID NO: 66313 - DNA, 26 bp, Homo sapiens
tgaagatctccaatcttgggaagcga

SEQ ID NO: 66314 - DNA, 26 bp, Homo sapiens
gaagatctccaatcttgggaagcgac

SEQ ID NO: 66315 - DNA, 26 bp, Homo sapiens
aagatctccaatcttgggaagcgact

SEQ ID NO: 66316 - DNA, 26 bp, Homo sapiens
agatctccaatcttgggaagcgactc

SEQ ID NO: 66317 - DNA, 26 bp, Homo sapiens
gatctccaatcttgggaagcgactct

SEQ ID NO: 66318 - DNA, 26 bp, Homo sapiens
atctccaatcttgggaagcgactctg

SEQ ID NO: 66319 - DNA, 26 bp, Homo sapiens
tctccaatcttgggaagcgactctgc

SEQ ID NO: 66320 - DNA, 26 bp, Homo sapiens
ctccaatcttgggaagcgactctgca

SEQ ID NO: 66321 - DNA, 26 bp, Homo sapiens
tccaatcttgggaagcgactctgcag

SEQ ID NO: 66322 - DNA, 26 bp, Homo sapiens
ccaatcttgggaagcgactctgcagc

SEQ ID NO: 66323 - DNA, 26 bp, Homo sapiens
caatcttgggaagcgactctgcagcc

SEQ ID NO: 66324 - DNA, 26 bp, Homo sapiens
aatcttgggaagcgactctgcagcca

SEQ ID NO: 66325 - DNA, 26 bp, Homo sapiens
atcttgggaagcgactctgcagccag

SEQ ID NO: 66326 - DNA, 26 bp, Homo sapiens
tcttgggaagcgactctgcagccagg

SEQ ID NO: 66327 - DNA, 26 bp, Homo sapiens
cttgggaagcgactctgcagccagga

SEQ ID NO: 66328 - DNA, 26 bp, Homo sapiens
ttgggaagcgactctgcagccaggat

SEQ ID NO: 66329 - DNA, 26 bp, Homo sapiens
tgggaagcgactctgcagccaggata

SEQ ID NO: 66330 - DNA, 26 bp, Homo sapiens
gggaagcgactctgcagccaggataa

SEQ ID NO: 66331 - DNA, 26 bp, Homo sapiens
ggaagcgactctgcagccaggataaa

SEQ ID NO: 66332 - DNA, 26 bp, Homo sapiens
gaagcgactctgcagccaggataaac

SEQ ID NO: 66333 - DNA, 26 bp, Homo sapiens
aagcgactctgcagccaggataaacg

SEQ ID NO: 66334 - DNA, 26 bp, Homo sapiens
agcgactctgcagccaggataaacgc

SEQ ID NO: 66335 - DNA, 26 bp, Homo sapiens
gcgactctgcagccaggataaacgct

SEQ ID NO: 66336 - DNA, 26 bp, Homo sapiens
cgactctgcagccaggataaacgctg

SEQ ID NO: 66337 - DNA, 26 bp, Homo sapiens
gactctgcagccaggataaacgctgg

SEQ ID NO: 66338 - DNA, 26 bp, Homo sapiens
actctgcagccaggataaacgctgga

SEQ ID NO: 66339 - DNA, 26 bp, Homo sapiens
ctctgcagccaggataaacgctggag

SEQ ID NO: 66340 - DNA, 26 bp, Homo sapiens
tctgcagccaggataaacgctggaga

SEQ ID NO: 66341 - DNA, 26 bp, Homo sapiens
ctgcagccaggataaacgctggagac

SEQ ID NO: 66342 - DNA, 26 bp, Homo sapiens
tgcagccaggataaacgctggagaca

SEQ ID NO: 66343 - DNA, 26 bp, Homo sapiens
gcagccaggataaacgctggagacag

SEQ ID NO: 66344 - DNA, 26 bp, Homo sapiens
cagccaggataaacgctggagacagc

SEQ ID NO: 66345 - DNA, 26 bp, Homo sapiens
agccaggataaacgctggagacagca

SEQ ID NO: 66346 - DNA, 26 bp, Homo sapiens
gccaggataaacgctggagacagcac

SEQ ID NO: 66347 - DNA, 26 bp, Homo sapiens
ccaggataaacgctggagacagcacg

SEQ ID NO: 66348 - DNA, 26 bp, Homo sapiens
caggataaacgctggagacagcacga

SEQ ID NO: 66349 - DNA, 26 bp, Homo sapiens
aggataaacgctggagacagcacgat

SEQ ID NO: 66350 - DNA, 26 bp, Homo sapiens
ggataaacgctggagacagcacgatc

SEQ ID NO: 66351 - DNA, 26 bp, Homo sapiens
gataaacgctggagacagcacgatct

SEQ ID NO: 66352 - DNA, 26 bp, Homo sapiens
ataaacgctggagacagcacgatctg

SEQ ID NO: 66353 - DNA, 26 bp, Homo sapiens
taaacgctggagacagcacgatctgc

SEQ ID NO: 66354 - DNA, 26 bp, Homo sapiens
aaacgctggagacagcacgatctgct

SEQ ID NO: 66355 - DNA, 26 bp, Homo sapiens
aacgctggagacagcacgatctgctc

SEQ ID NO: 66356 - DNA, 26 bp, Homo sapiens
acgctggagacagcacgatctgctct

SEQ ID NO: 66357 - DNA, 26 bp, Homo sapiens
cgctggagacagcacgatctgctcta

SEQ ID NO: 66358 - DNA, 26 bp, Homo sapiens
gctggagacagcacgatctgctctaa

SEQ ID NO: 66359 - DNA, 26 bp, Homo sapiens
ctggagacagcacgatctgctctaac

SEQ ID NO: 66360 - DNA, 26 bp, Homo sapiens
tggagacagcacgatctgctctaact

SEQ ID NO: 66361 - DNA, 26 bp, Homo sapiens
ggagacagcacgatctgctctaactc

SEQ ID NO: 66362 - DNA, 26 bp, Homo sapiens
gagacagcacgatctgctctaactca

SEQ ID NO: 66363 - DNA, 26 bp, Homo sapiens
agacagcacgatctgctctaactcag

SEQ ID NO: 66364 - DNA, 26 bp, Homo sapiens
gacagcacgatctgctctaactcagc

SEQ ID NO: 66365 - DNA, 26 bp, Homo sapiens
acagcacgatctgctctaactcagca

SEQ ID NO: 66366 - DNA, 26 bp, Homo sapiens
cagcacgatctgctctaactcagcag

SEQ ID NO: 66367 - DNA, 26 bp, Homo sapiens
agcacgatctgctctaactcagcagg

SEQ ID NO: 66368 - DNA, 26 bp, Homo sapiens
gcacgatctgctctaactcagcaggg

SEQ ID NO: 66369 - DNA, 26 bp, Homo sapiens
cacgatctgctctaactcagcagggt

SEQ ID NO: 66370 - DNA, 26 bp, Homo sapiens
acgatctgctctaactcagcagggtc

SEQ ID NO: 66371 - DNA, 26 bp, Homo sapiens
cgatctgctctaactcagcagggtct

SEQ ID NO: 66372 - DNA, 26 bp, Homo sapiens
gatctgctctaactcagcagggtctg

SEQ ID NO: 66373 - DNA, 26 bp, Homo sapiens
atctgctctaactcagcagggtctgc

SEQ ID NO: 66374 - DNA, 26 bp, Homo sapiens
tctgctctaactcagcagggtctgcg

SEQ ID NO: 66375 - DNA, 26 bp, Homo sapiens
ctgctctaactcagcagggtctgcgt

SEQ ID NO: 66376 - DNA, 26 bp, Homo sapiens
tgctctaactcagcagggtctgcgtt

SEQ ID NO: 66377 - DNA, 26 bp, Homo sapiens
gctctaactcagcagggtctgcgttc

SEQ ID NO: 66378 - DNA, 26 bp, Homo sapiens
ctctaactcagcagggtctgcgttct

SEQ ID NO: 66379 - DNA, 26 bp, Homo sapiens
tctaactcagcagggtctgcgttctt

SEQ ID NO: 66380 - DNA, 26 bp, Homo sapiens
ctaactcagcagggtctgcgttcttg

SEQ ID NO: 66381 - DNA, 26 bp, Homo sapiens
taactcagcagggtctgcgttcttgg

SEQ ID NO: 66382 - DNA, 26 bp, Homo sapiens
aactcagcagggtctgcgttcttggc

SEQ ID NO: 66383 - DNA, 26 bp, Homo sapiens
actcagcagggtctgcgttcttggct

SEQ ID NO: 66384 - DNA, 26 bp, Homo sapiens
ctcagcagggtctgcgttcttggctt

SEQ ID NO: 66385 - DNA, 26 bp, Homo sapiens
tcagcagggtctgcgttcttggcttg

SEQ ID NO: 66386 - DNA, 26 bp, Homo sapiens
cagcagggtctgcgttcttggcttgg

SEQ ID NO: 66387 - DNA, 26 bp, Homo sapiens
agcagggtctgcgttcttggcttgga

SEQ ID NO: 66388 - DNA, 26 bp, Homo sapiens
gcagggtctgcgttcttggcttggaa

SEQ ID NO: 66389 - DNA, 26 bp, Homo sapiens
cagggtctgcgttcttggcttggaag

SEQ ID NO: 66390 - DNA, 26 bp, Homo sapiens
agggtctgcgttcttggcttggaaga

SEQ ID NO: 66391 - DNA, 26 bp, Homo sapiens
gggtctgcgttcttggcttggaagat

SEQ ID NO: 66392 - DNA, 26 bp, Homo sapiens
ggtctgcgttcttggcttggaagatg

SEQ ID NO: 66393 - DNA, 26 bp, Homo sapiens
gtctgcgttcttggcttggaagatga

SEQ ID NO: 66394 - DNA, 26 bp, Homo sapiens
tctgcgttcttggcttggaagatgaa

SEQ ID NO: 66395 - DNA, 26 bp, Homo sapiens
ctgcgttcttggcttggaagatgaaa

SEQ ID NO: 66396 - DNA, 26 bp, Homo sapiens
tgcgttcttggcttggaagatgaaag

SEQ ID NO: 66397 - DNA, 26 bp, Homo sapiens
gcgttcttggcttggaagatgaaagg

SEQ ID NO: 66398 - DNA, 26 bp, Homo sapiens
cgttcttggcttggaagatgaaaggc

SEQ ID NO: 66399 - DNA, 26 bp, Homo sapiens
gttcttggcttggaagatgaaaggca

SEQ ID NO: 66400 - DNA, 26 bp, Homo sapiens
ttcttggcttggaagatgaaaggcac

SEQ ID NO: 66401 - DNA, 26 bp, Homo sapiens
tcttggcttggaagatgaaaggcaca

SEQ ID NO: 66402 - DNA, 26 bp, Homo sapiens
cttggcttggaagatgaaaggcacaa

SEQ ID NO: 66403 - DNA, 26 bp, Homo sapiens
ttggcttggaagatgaaaggcacaac

SEQ ID NO: 66404 - DNA, 26 bp, Homo sapiens
tggcttggaagatgaaaggcacaacc

SEQ ID NO: 66405 - DNA, 26 bp, Homo sapiens
ggcttggaagatgaaaggcacaaccc

SEQ ID NO: 66406 - DNA, 26 bp, Homo sapiens
gcttggaagatgaaaggcacaacccc

SEQ ID NO: 66407 - DNA, 26 bp, Homo sapiens
cttggaagatgaaaggcacaacccca

SEQ ID NO: 66408 - DNA, 26 bp, Homo sapiens
ttggaagatgaaaggcacaaccccac

SEQ ID NO: 66409 - DNA, 26 bp, Homo sapiens
tggaagatgaaaggcacaaccccact

SEQ ID NO: 66410 - DNA, 26 bp, Homo sapiens
ggaagatgaaaggcacaaccccactc

SEQ ID NO: 66411 - DNA, 26 bp, Homo sapiens
gaagatgaaaggcacaaccccactct

SEQ ID NO: 66412 - DNA, 26 bp, Homo sapiens
aagatgaaaggcacaaccccactctg

SEQ ID NO: 66413 - DNA, 26 bp, Homo sapiens
agatgaaaggcacaaccccactctgc

SEQ ID NO: 66414 - DNA, 26 bp, Homo sapiens
gatgaaaggcacaaccccactctgct

SEQ ID NO: 66415 - DNA, 26 bp, Homo sapiens
atgaaaggcacaaccccactctgctt

SEQ ID NO: 66416 - DNA, 26 bp, Homo sapiens
tgaaaggcacaaccccactctgcttc

SEQ ID NO: 66417 - DNA, 26 bp, Homo sapiens
gaaaggcacaaccccactctgcttca

SEQ ID NO: 66418 - DNA, 26 bp, Homo sapiens
aaaggcacaaccccactctgcttcag

SEQ ID NO: 66419 - DNA, 26 bp, Homo sapiens
aaggcacaaccccactctgcttcagg

SEQ ID NO: 66420 - DNA, 26 bp, Homo sapiens
aggcacaaccccactctgcttcaggt

SEQ ID NO: 66421 - DNA, 26 bp, Homo sapiens
ggcacaaccccactctgcttcaggtt

SEQ ID NO: 66422 - DNA, 26 bp, Homo sapiens
gcacaaccccactctgcttcaggtta

SEQ ID NO: 66423 - DNA, 26 bp, Homo sapiens
cacaaccccactctgcttcaggttac

SEQ ID NO: 66424 - DNA, 26 bp, Homo sapiens
acaaccccactctgcttcaggttact

SEQ ID NO: 66425 - DNA, 26 bp, Homo sapiens
caaccccactctgcttcaggttactt

SEQ ID NO: 66426 - DNA, 26 bp, Homo sapiens
aaccccactctgcttcaggttacttg

SEQ ID NO: 66427 - DNA, 26 bp, Homo sapiens
accccactctgcttcaggttacttgc

SEQ ID NO: 66428 - DNA, 26 bp, Homo sapiens
ccccactctgcttcaggttacttgct

SEQ ID NO: 66429 - DNA, 26 bp, Homo sapiens
cccactctgcttcaggttacttgctg

SEQ ID NO: 66430 - DNA, 26 bp, Homo sapiens
ccactctgcttcaggttacttgctgg

SEQ ID NO: 66431 - DNA, 26 bp, Homo sapiens
cactctgcttcaggttacttgctggc

SEQ ID NO: 66432 - DNA, 26 bp, Homo sapiens
actctgcttcaggttacttgctggcc

SEQ ID NO: 66433 - DNA, 26 bp, Homo sapiens
ctctgcttcaggttacttgctggccc

SEQ ID NO: 66434 - DNA, 26 bp, Homo sapiens
tctgcttcaggttacttgctggccca

SEQ ID NO: 66435 - DNA, 26 bp, Homo sapiens
ctgcttcaggttacttgctggcccat

SEQ ID NO: 66436 - DNA, 26 bp, Homo sapiens
tgcttcaggttacttgctggcccatc

SEQ ID NO: 66437 - DNA, 26 bp, Homo sapiens
gcttcaggttacttgctggcccatcc

SEQ ID NO: 66438 - DNA, 26 bp, Homo sapiens
cttcaggttacttgctggcccatcca

SEQ ID NO: 66439 - DNA, 26 bp, Homo sapiens
ttcaggttacttgctggcccatccac

SEQ ID NO: 66440 - DNA, 26 bp, Homo sapiens
tcaggttacttgctggcccatccaca

SEQ ID NO: 66441 - DNA, 26 bp, Homo sapiens
caggttacttgctggcccatccacac

SEQ ID NO: 66442 - DNA, 26 bp, Homo sapiens
aggttacttgctggcccatccacacg

SEQ ID NO: 66443 - DNA, 26 bp, Homo sapiens
ggttacttgctggcccatccacacgg

SEQ ID NO: 66444 - DNA, 26 bp, Homo sapiens
gttacttgctggcccatccacacggt

SEQ ID NO: 66445 - DNA, 26 bp, Homo sapiens
ttacttgctggcccatccacacggtc

SEQ ID NO: 66446 - DNA, 26 bp, Homo sapiens
tacttgctggcccatccacacggtca

SEQ ID NO: 66447 - DNA, 26 bp, Homo sapiens
acttgctggcccatccacacggtcag

SEQ ID NO: 66448 - DNA, 26 bp, Homo sapiens
cttgctggcccatccacacggtcaga

SEQ ID NO: 66449 - DNA, 26 bp, Homo sapiens
ttgctggcccatccacacggtcagat

SEQ ID NO: 66450 - DNA, 26 bp, Homo sapiens
tgctggcccatccacacggtcagatg

SEQ ID NO: 66451 - DNA, 26 bp, Homo sapiens
gctggcccatccacacggtcagatga

SEQ ID NO: 66452 - DNA, 26 bp, Homo sapiens
ctggcccatccacacggtcagatgac

SEQ ID NO: 66453 - DNA, 26 bp, Homo sapiens
tggcccatccacacggtcagatgacc

SEQ ID NO: 66454 - DNA, 26 bp, Homo sapiens
ggcccatccacacggtcagatgacct

SEQ ID NO: 66455 - DNA, 26 bp, Homo sapiens
gcccatccacacggtcagatgacctt

SEQ ID NO: 66456 - DNA, 26 bp, Homo sapiens
cccatccacacggtcagatgaccttc

SEQ ID NO: 66457 - DNA, 26 bp, Homo sapiens
ccatccacacggtcagatgaccttcc

SEQ ID NO: 66458 - DNA, 26 bp, Homo sapiens
catccacacggtcagatgaccttcct

SEQ ID NO: 66459 - DNA, 26 bp, Homo sapiens
atccacacggtcagatgaccttcctg

SEQ ID NO: 66460 - DNA, 26 bp, Homo sapiens
tccacacggtcagatgaccttcctgc

SEQ ID NO: 66461 - DNA, 26 bp, Homo sapiens
ccacacggtcagatgaccttcctgcg

SEQ ID NO: 66462 - DNA, 26 bp, Homo sapiens
cacacggtcagatgaccttcctgcga

SEQ ID NO: 66463 - DNA, 26 bp, Homo sapiens
acacggtcagatgaccttcctgcgac

SEQ ID NO: 66464 - DNA, 26 bp, Homo sapiens
cacggtcagatgaccttcctgcgacc

SEQ ID NO: 66465 - DNA, 26 bp, Homo sapiens
acggtcagatgaccttcctgcgacca

SEQ ID NO: 66466 - DNA, 26 bp, Homo sapiens
cggtcagatgaccttcctgcgaccag

SEQ ID NO: 66467 - DNA, 26 bp, Homo sapiens
ggtcagatgaccttcctgcgaccagc

SEQ ID NO: 66468 - DNA, 26 bp, Homo sapiens
gtcagatgaccttcctgcgaccagca

SEQ ID NO: 66469 - DNA, 26 bp, Homo sapiens
tcagatgaccttcctgcgaccagcag

SEQ ID NO: 66470 - DNA, 26 bp, Homo sapiens
cagatgaccttcctgcgaccagcagc

SEQ ID NO: 66471 - DNA, 26 bp, Homo sapiens
agatgaccttcctgcgaccagcagca

SEQ ID NO: 66472 - DNA, 26 bp, Homo sapiens
gatgaccttcctgcgaccagcagcac

SEQ ID NO: 66473 - DNA, 26 bp, Homo sapiens
atgaccttcctgcgaccagcagcacc

SEQ ID NO: 66474 - DNA, 26 bp, Homo sapiens
tgaccttcctgcgaccagcagcacca

SEQ ID NO: 66475 - DNA, 26 bp, Homo sapiens
gaccttcctgcgaccagcagcaccag

SEQ ID NO: 66476 - DNA, 26 bp, Homo sapiens
accttcctgcgaccagcagcaccagg

SEQ ID NO: 66477 - DNA, 26 bp, Homo sapiens
ccttcctgcgaccagcagcaccagga

SEQ ID NO: 66478 - DNA, 26 bp, Homo sapiens
cttcctgcgaccagcagcaccaggaa

SEQ ID NO: 66479 - DNA, 26 bp, Homo sapiens
ttcctgcgaccagcagcaccaggaac

SEQ ID NO: 66480 - DNA, 26 bp, Homo sapiens
tcctgcgaccagcagcaccaggaact

SEQ ID NO: 66481 - DNA, 26 bp, Homo sapiens
cctgcgaccagcagcaccaggaactg

SEQ ID NO: 66482 - DNA, 26 bp, Homo sapiens
ctgcgaccagcagcaccaggaactga

SEQ ID NO: 66483 - DNA, 26 bp, Homo sapiens
tgcgaccagcagcaccaggaactgaa

SEQ ID NO: 66484 - DNA, 26 bp, Homo sapiens
gcgaccagcagcaccaggaactgaag

SEQ ID NO: 66485 - DNA, 26 bp, Homo sapiens
cgaccagcagcaccaggaactgaagc

SEQ ID NO: 66486 - DNA, 26 bp, Homo sapiens
gaccagcagcaccaggaactgaagca

SEQ ID NO: 66487 - DNA, 26 bp, Homo sapiens
accagcagcaccaggaactgaagcac

SEQ ID NO: 66488 - DNA, 26 bp, Homo sapiens
ccagcagcaccaggaactgaagcact

SEQ ID NO: 66489 - DNA, 26 bp, Homo sapiens
cagcagcaccaggaactgaagcactc

SEQ ID NO: 66490 - DNA, 26 bp, Homo sapiens
agcagcaccaggaactgaagcactcc

SEQ ID NO: 66491 - DNA, 26 bp, Homo sapiens
gcagcaccaggaactgaagcactcca

SEQ ID NO: 66492 - DNA, 26 bp, Homo sapiens
cagcaccaggaactgaagcactccat

SEQ ID NO: 66493 - DNA, 26 bp, Homo sapiens
agcaccaggaactgaagcactccatc

SEQ ID NO: 66494 - DNA, 26 bp, Homo sapiens
gcaccaggaactgaagcactccatcc

SEQ ID NO: 66495 - DNA, 26 bp, Homo sapiens
caccaggaactgaagcactccatcct

SEQ ID NO: 66496 - DNA, 26 bp, Homo sapiens
accaggaactgaagcactccatcctc

SEQ ID NO: 66497 - DNA, 26 bp, Homo sapiens
ccaggaactgaagcactccatcctcg

SEQ ID NO: 66498 - DNA, 26 bp, Homo sapiens
caggaactgaagcactccatcctcga

SEQ ID NO: 66499 - DNA, 26 bp, Homo sapiens
aggaactgaagcactccatcctcgat

SEQ ID NO: 66500 - DNA, 26 bp, Homo sapiens
ggaactgaagcactccatcctcgatc

SEQ ID NO: 66501 - DNA, 26 bp, Homo sapiens
gaactgaagcactccatcctcgatcc

SEQ ID NO: 66502 - DNA, 26 bp, Homo sapiens
aactgaagcactccatcctcgatccg

SEQ ID NO: 66503 - DNA, 26 bp, Homo sapiens
actgaagcactccatcctcgatccgg

SEQ ID NO: 66504 - DNA, 26 bp, Homo sapiens
ctgaagcactccatcctcgatccggc

SEQ ID NO: 66505 - DNA, 26 bp, Homo sapiens
tgaagcactccatcctcgatccggct

SEQ ID NO: 66506 - DNA, 26 bp, Homo sapiens
gaagcactccatcctcgatccggctg

SEQ ID NO: 66507 - DNA, 26 bp, Homo sapiens
aagcactccatcctcgatccggctgc

SEQ ID NO: 66508 - DNA, 26 bp, Homo sapiens
agcactccatcctcgatccggctgcc

SEQ ID NO: 66509 - DNA, 26 bp, Homo sapiens
gcactccatcctcgatccggctgcca

SEQ ID NO: 66510 - DNA, 26 bp, Homo sapiens
cactccatcctcgatccggctgccag

SEQ ID NO: 66511 - DNA, 26 bp, Homo sapiens
actccatcctcgatccggctgccagc

SEQ ID NO: 66512 - DNA, 26 bp, Homo sapiens
ctccatcctcgatccggctgccagca

SEQ ID NO: 66513 - DNA, 26 bp, Homo sapiens
tccatcctcgatccggctgccagcag

SEQ ID NO: 66514 - DNA, 26 bp, Homo sapiens
ccatcctcgatccggctgccagcaga

SEQ ID NO: 66515 - DNA, 26 bp, Homo sapiens
catcctcgatccggctgccagcagac

SEQ ID NO: 66516 - DNA, 26 bp, Homo sapiens
atcctcgatccggctgccagcagact

SEQ ID NO: 66517 - DNA, 26 bp, Homo sapiens
tcctcgatccggctgccagcagactt

SEQ ID NO: 66518 - DNA, 26 bp, Homo sapiens
cctcgatccggctgccagcagacttc

SEQ ID NO: 66519 - DNA, 26 bp, Homo sapiens
ctcgatccggctgccagcagacttca

SEQ ID NO: 66520 - DNA, 26 bp, Homo sapiens
tcgatccggctgccagcagacttcac

SEQ ID NO: 66521 - DNA, 26 bp, Homo sapiens
cgatccggctgccagcagacttcaca

SEQ ID NO: 66522 - DNA, 26 bp, Homo sapiens
gatccggctgccagcagacttcacaa

SEQ ID NO: 66523 - DNA, 26 bp, Homo sapiens
atccggctgccagcagacttcacaaa

SEQ ID NO: 66524 - DNA, 26 bp, Homo sapiens
tccggctgccagcagacttcacaaaa

SEQ ID NO: 66525 - DNA, 26 bp, Homo sapiens
ccggctgccagcagacttcacaaaaa

SEQ ID NO: 66526 - DNA, 26 bp, Homo sapiens
cggctgccagcagacttcacaaaaat

SEQ ID NO: 66527 - DNA, 26 bp, Homo sapiens
ggctgccagcagacttcacaaaaatg

SEQ ID NO: 66528 - DNA, 26 bp, Homo sapiens
gctgccagcagacttcacaaaaatgt

SEQ ID NO: 66529 - DNA, 26 bp, Homo sapiens
ctgccagcagacttcacaaaaatgta

SEQ ID NO: 66530 - DNA, 26 bp, Homo sapiens
tgccagcagacttcacaaaaatgtac

SEQ ID NO: 66531 - DNA, 26 bp, Homo sapiens
gccagcagacttcacaaaaatgtacc

SEQ ID NO: 66532 - DNA, 26 bp, Homo sapiens
ccagcagacttcacaaaaatgtacct

SEQ ID NO: 66533 - DNA, 26 bp, Homo sapiens
cagcagacttcacaaaaatgtacctc

SEQ ID NO: 66534 - DNA, 26 bp, Homo sapiens
agcagacttcacaaaaatgtacctct

SEQ ID NO: 66535 - DNA, 26 bp, Homo sapiens
gcagacttcacaaaaatgtacctctg

SEQ ID NO: 66536 - DNA, 26 bp, Homo sapiens
cagacttcacaaaaatgtacctctgt

SEQ ID NO: 66537 - DNA, 26 bp, Homo sapiens
agacttcacaaaaatgtacctctgtg

SEQ ID NO: 66538 - DNA, 26 bp, Homo sapiens
gacttcacaaaaatgtacctctgtgc

SEQ ID NO: 66539 - DNA, 26 bp, Homo sapiens
acttcacaaaaatgtacctctgtgca

SEQ ID NO: 66540 - DNA, 26 bp, Homo sapiens
cttcacaaaaatgtacctctgtgcat

SEQ ID NO: 66541 - DNA, 26 bp, Homo sapiens
ttcacaaaaatgtacctctgtgcata

SEQ ID NO: 66542 - DNA, 26 bp, Homo sapiens
tcacaaaaatgtacctctgtgcatag

SEQ ID NO: 66543 - DNA, 26 bp, Homo sapiens
cacaaaaatgtacctctgtgcatagt

SEQ ID NO: 66544 - DNA, 26 bp, Homo sapiens
acaaaaatgtacctctgtgcatagtc

SEQ ID NO: 66545 - DNA, 26 bp, Homo sapiens
caaaaatgtacctctgtgcatagtcc

SEQ ID NO: 66546 - DNA, 26 bp, Homo sapiens
aaaaatgtacctctgtgcatagtcca

SEQ ID NO: 66547 - DNA, 26 bp, Homo sapiens
aaaatgtacctctgtgcatagtccag

SEQ ID NO: 66548 - DNA, 26 bp, Homo sapiens
aaatgtacctctgtgcatagtccagc

SEQ ID NO: 66549 - DNA, 26 bp, Homo sapiens
aatgtacctctgtgcatagtccagcg

SEQ ID NO: 66550 - DNA, 26 bp, Homo sapiens
atgtacctctgtgcatagtccagcgc

SEQ ID NO: 66551 - DNA, 26 bp, Homo sapiens
tgtacctctgtgcatagtccagcgcg

SEQ ID NO: 66552 - DNA, 26 bp, Homo sapiens
gtacctctgtgcatagtccagcgcgt

SEQ ID NO: 66553 - DNA, 26 bp, Homo sapiens
tacctctgtgcatagtccagcgcgta

SEQ ID NO: 66554 - DNA, 26 bp, Homo sapiens
acctctgtgcatagtccagcgcgtag

SEQ ID NO: 66555 - DNA, 26 bp, Homo sapiens
cctctgtgcatagtccagcgcgtagc

SEQ ID NO: 66556 - DNA, 26 bp, Homo sapiens
ctctgtgcatagtccagcgcgtagcc

SEQ ID NO: 66557 - DNA, 26 bp, Homo sapiens
tctgtgcatagtccagcgcgtagccc

SEQ ID NO: 66558 - DNA, 26 bp, Homo sapiens
ctgtgcatagtccagcgcgtagccca

SEQ ID NO: 66559 - DNA, 26 bp, Homo sapiens
tgtgcatagtccagcgcgtagcccag

SEQ ID NO: 66560 - DNA, 26 bp, Homo sapiens
gtgcatagtccagcgcgtagcccagg

SEQ ID NO: 66561 - DNA, 26 bp, Homo sapiens
tgcatagtccagcgcgtagcccaggt

SEQ ID NO: 66562 - DNA, 26 bp, Homo sapiens
gcatagtccagcgcgtagcccaggtt

SEQ ID NO: 66563 - DNA, 26 bp, Homo sapiens
catagtccagcgcgtagcccaggttg

SEQ ID NO: 66564 - DNA, 26 bp, Homo sapiens
atagtccagcgcgtagcccaggttga

SEQ ID NO: 66565 - DNA, 26 bp, Homo sapiens
tagtccagcgcgtagcccaggttgag

SEQ ID NO: 66566 - DNA, 26 bp, Homo sapiens
agtccagcgcgtagcccaggttgagg

SEQ ID NO: 66567 - DNA, 26 bp, Homo sapiens
gtccagcgcgtagcccaggttgaggg

SEQ ID NO: 66568 - DNA, 26 bp, Homo sapiens
tccagcgcgtagcccaggttgagggc

SEQ ID NO: 66569 - DNA, 26 bp, Homo sapiens
ccagcgcgtagcccaggttgagggct

SEQ ID NO: 66570 - DNA, 26 bp, Homo sapiens
cagcgcgtagcccaggttgagggctt

SEQ ID NO: 66571 - DNA, 26 bp, Homo sapiens
agcgcgtagcccaggttgagggcttt

SEQ ID NO: 66572 - DNA, 26 bp, Homo sapiens
gcgcgtagcccaggttgagggctttg

SEQ ID NO: 66573 - DNA, 26 bp, Homo sapiens
cgcgtagcccaggttgagggctttgc

SEQ ID NO: 66574 - DNA, 26 bp, Homo sapiens
gcgtagcccaggttgagggctttgcc

SEQ ID NO: 66575 - DNA, 26 bp, Homo sapiens
cgtagcccaggttgagggctttgccc

SEQ ID NO: 66576 - DNA, 26 bp, Homo sapiens
gtagcccaggttgagggctttgcccg

SEQ ID NO: 66577 - DNA, 26 bp, Homo sapiens
tagcccaggttgagggctttgcccgt

SEQ ID NO: 66578 - DNA, 26 bp, Homo sapiens
agcccaggttgagggctttgcccgtc

SEQ ID NO: 66579 - DNA, 26 bp, Homo sapiens
gcccaggttgagggctttgcccgtct

SEQ ID NO: 66580 - DNA, 26 bp, Homo sapiens
cccaggttgagggctttgcccgtctt

SEQ ID NO: 66581 - DNA, 26 bp, Homo sapiens
ccaggttgagggctttgcccgtcttg

SEQ ID NO: 66582 - DNA, 26 bp, Homo sapiens
caggttgagggctttgcccgtcttga

SEQ ID NO: 66583 - DNA, 26 bp, Homo sapiens
aggttgagggctttgcccgtcttgat

SEQ ID NO: 66584 - DNA, 26 bp, Homo sapiens
ggttgagggctttgcccgtcttgatc

SEQ ID NO: 66585 - DNA, 26 bp, Homo sapiens
gttgagggctttgcccgtcttgatct

SEQ ID NO: 66586 - DNA, 26 bp, Homo sapiens
ttgagggctttgcccgtcttgatctt

SEQ ID NO: 66587 - DNA, 26 bp, Homo sapiens
tgagggctttgcccgtcttgatcttc

SEQ ID NO: 66588 - DNA, 26 bp, Homo sapiens
gagggctttgcccgtcttgatcttca

SEQ ID NO: 66589 - DNA, 26 bp, Homo sapiens
agggctttgcccgtcttgatcttcat

SEQ ID NO: 66590 - DNA, 26 bp, Homo sapiens
gggctttgcccgtcttgatcttcatt

SEQ ID NO: 66591 - DNA, 26 bp, Homo sapiens
ggctttgcccgtcttgatcttcattc

SEQ ID NO: 66592 - DNA, 26 bp, Homo sapiens
gctttgcccgtcttgatcttcattct

SEQ ID NO: 66593 - DNA, 26 bp, Homo sapiens
ctttgcccgtcttgatcttcattctc

SEQ ID NO: 66594 - DNA, 26 bp, Homo sapiens
tttgcccgtcttgatcttcattctct

SEQ ID NO: 66595 - DNA, 26 bp, Homo sapiens
ttgcccgtcttgatcttcattctctt

SEQ ID NO: 66596 - DNA, 26 bp, Homo sapiens
tgcccgtcttgatcttcattctcttc

SEQ ID NO: 66597 - DNA, 26 bp, Homo sapiens
gcccgtcttgatcttcattctcttca

SEQ ID NO: 66598 - DNA, 26 bp, Homo sapiens
cccgtcttgatcttcattctcttcac

SEQ ID NO: 66599 - DNA, 26 bp, Homo sapiens
ccgtcttgatcttcattctcttcaca

SEQ ID NO: 66600 - DNA, 26 bp, Homo sapiens
cgtcttgatcttcattctcttcacaa

SEQ ID NO: 66601 - DNA, 26 bp, Homo sapiens
gtcttgatcttcattctcttcacaag

SEQ ID NO: 66602 - DNA, 26 bp, Homo sapiens
tcttgatcttcattctcttcacaaga

SEQ ID NO: 66603 - DNA, 26 bp, Homo sapiens
cttgatcttcattctcttcacaagat

SEQ ID NO: 66604 - DNA, 26 bp, Homo sapiens
ttgatcttcattctcttcacaagatt

SEQ ID NO: 66605 - DNA, 26 bp, Homo sapiens
tgatcttcattctcttcacaagattc

SEQ ID NO: 66606 - DNA, 26 bp, Homo sapiens
gatcttcattctcttcacaagattca

SEQ ID NO: 66607 - DNA, 26 bp, Homo sapiens
atcttcattctcttcacaagattcag

SEQ ID NO: 66608 - DNA, 26 bp, Homo sapiens
tcttcattctcttcacaagattcagg

SEQ ID NO: 66609 - DNA, 26 bp, Homo sapiens
cttcattctcttcacaagattcagga

SEQ ID NO: 66610 - DNA, 26 bp, Homo sapiens
ttcattctcttcacaagattcaggat

SEQ ID NO: 66611 - DNA, 26 bp, Homo sapiens
tcattctcttcacaagattcaggatc

SEQ ID NO: 66612 - DNA, 26 bp, Homo sapiens
cattctcttcacaagattcaggatct

SEQ ID NO: 66613 - DNA, 26 bp, Homo sapiens
attctcttcacaagattcaggatctc

SEQ ID NO: 66614 - DNA, 26 bp, Homo sapiens
ttctcttcacaagattcaggatctca

SEQ ID NO: 66615 - DNA, 26 bp, Homo sapiens
tctcttcacaagattcaggatctcag

SEQ ID NO: 66616 - DNA, 26 bp, Homo sapiens
ctcttcacaagattcaggatctcagg

SEQ ID NO: 66617 - DNA, 26 bp, Homo sapiens
tcttcacaagattcaggatctcaggc

SEQ ID NO: 66618 - DNA, 26 bp, Homo sapiens
cttcacaagattcaggatctcaggct

SEQ ID NO: 66619 - DNA, 26 bp, Homo sapiens
ttcacaagattcaggatctcaggctt

SEQ ID NO: 66620 - DNA, 26 bp, Homo sapiens
tcacaagattcaggatctcaggctta

SEQ ID NO: 66621 - DNA, 26 bp, Homo sapiens
cacaagattcaggatctcaggcttac

SEQ ID NO: 66622 - DNA, 26 bp, Homo sapiens
acaagattcaggatctcaggcttact

SEQ ID NO: 66623 - DNA, 26 bp, Homo sapiens
caagattcaggatctcaggcttactc

SEQ ID NO: 66624 - DNA, 26 bp, Homo sapiens
aagattcaggatctcaggcttactct

SEQ ID NO: 66625 - DNA, 26 bp, Homo sapiens
agattcaggatctcaggcttactctg

SEQ ID NO: 66626 - DNA, 26 bp, Homo sapiens
gattcaggatctcaggcttactctgg

SEQ ID NO: 66627 - DNA, 26 bp, Homo sapiens
attcaggatctcaggcttactctggt

SEQ ID NO: 66628 - DNA, 26 bp, Homo sapiens
ttcaggatctcaggcttactctggtg

SEQ ID NO: 66629 - DNA, 26 bp, Homo sapiens
tcaggatctcaggcttactctggtgc

SEQ ID NO: 66630 - DNA, 26 bp, Homo sapiens
caggatctcaggcttactctggtgct

SEQ ID NO: 66631 - DNA, 26 bp, Homo sapiens
aggatctcaggcttactctggtgctc

SEQ ID NO: 66632 - DNA, 26 bp, Homo sapiens
ggatctcaggcttactctggtgctca

SEQ ID NO: 66633 - DNA, 26 bp, Homo sapiens
gatctcaggcttactctggtgctcat

SEQ ID NO: 66634 - DNA, 26 bp, Homo sapiens
atctcaggcttactctggtgctcatc

SEQ ID NO: 66635 - DNA, 26 bp, Homo sapiens
tctcaggcttactctggtgctcatca

SEQ ID NO: 66636 - DNA, 26 bp, Homo sapiens
ctcaggcttactctggtgctcatcaa

SEQ ID NO: 66637 - DNA, 26 bp, Homo sapiens
tcaggcttactctggtgctcatcaaa

SEQ ID NO: 66638 - DNA, 26 bp, Homo sapiens
caggcttactctggtgctcatcaaaa

SEQ ID NO: 66639 - DNA, 26 bp, Homo sapiens
aggcttactctggtgctcatcaaaac

SEQ ID NO: 66640 - DNA, 26 bp, Homo sapiens
ggcttactctggtgctcatcaaaacg

SEQ ID NO: 66641 - DNA, 26 bp, Homo sapiens
gcttactctggtgctcatcaaaacgg

SEQ ID NO: 66642 - DNA, 26 bp, Homo sapiens
cttactctggtgctcatcaaaacggg

SEQ ID NO: 66643 - DNA, 26 bp, Homo sapiens
ttactctggtgctcatcaaaacggga

SEQ ID NO: 66644 - DNA, 26 bp, Homo sapiens
tactctggtgctcatcaaaacgggac

SEQ ID NO: 66645 - DNA, 26 bp, Homo sapiens
actctggtgctcatcaaaacgggact

SEQ ID NO: 66646 - DNA, 26 bp, Homo sapiens
ctctggtgctcatcaaaacgggactc

SEQ ID NO: 66647 - DNA, 26 bp, Homo sapiens
tctggtgctcatcaaaacgggactcc

SEQ ID NO: 66648 - DNA, 26 bp, Homo sapiens
ctggtgctcatcaaaacgggactcca

SEQ ID NO: 66649 - DNA, 26 bp, Homo sapiens
tggtgctcatcaaaacgggactccac

SEQ ID NO: 66650 - DNA, 26 bp, Homo sapiens
ggtgctcatcaaaacgggactccacc

SEQ ID NO: 66651 - DNA, 26 bp, Homo sapiens
gtgctcatcaaaacgggactccacct

SEQ ID NO: 66652 - DNA, 26 bp, Homo sapiens
tgctcatcaaaacgggactccacctt

SEQ ID NO: 66653 - DNA, 26 bp, Homo sapiens
gctcatcaaaacgggactccaccttg

SEQ ID NO: 66654 - DNA, 26 bp, Homo sapiens
ctcatcaaaacgggactccaccttga

SEQ ID NO: 66655 - DNA, 26 bp, Homo sapiens
tcatcaaaacgggactccaccttgac

SEQ ID NO: 66656 - DNA, 26 bp, Homo sapiens
catcaaaacgggactccaccttgaca

SEQ ID NO: 66657 - DNA, 26 bp, Homo sapiens
atcaaaacgggactccaccttgacat

SEQ ID NO: 66658 - DNA, 26 bp, Homo sapiens
tcaaaacgggactccaccttgacatc

SEQ ID NO: 66659 - DNA, 26 bp, Homo sapiens
caaaacgggactccaccttgacatca

SEQ ID NO: 66660 - DNA, 26 bp, Homo sapiens
aaaacgggactccaccttgacatcat

SEQ ID NO: 66661 - DNA, 26 bp, Homo sapiens
aaacgggactccaccttgacatcatc

SEQ ID NO: 66662 - DNA, 26 bp, Homo sapiens
aacgggactccaccttgacatcatcg

SEQ ID NO: 66663 - DNA, 26 bp, Homo sapiens
acgggactccaccttgacatcatcgc

SEQ ID NO: 66664 - DNA, 26 bp, Homo sapiens
cgggactccaccttgacatcatcgct

SEQ ID NO: 66665 - DNA, 26 bp, Homo sapiens
gggactccaccttgacatcatcgctg

SEQ ID NO: 66666 - DNA, 26 bp, Homo sapiens
ggactccaccttgacatcatcgctgt

SEQ ID NO: 66667 - DNA, 26 bp, Homo sapiens
gactccaccttgacatcatcgctgta

SEQ ID NO: 66668 - DNA, 26 bp, Homo sapiens
actccaccttgacatcatcgctgtac

SEQ ID NO: 66669 - DNA, 26 bp, Homo sapiens
ctccaccttgacatcatcgctgtact

SEQ ID NO: 66670 - DNA, 26 bp, Homo sapiens
tccaccttgacatcatcgctgtactg

SEQ ID NO: 66671 - DNA, 26 bp, Homo sapiens
ccaccttgacatcatcgctgtactga

SEQ ID NO: 66672 - DNA, 26 bp, Homo sapiens
caccttgacatcatcgctgtactgag

SEQ ID NO: 66673 - DNA, 26 bp, Homo sapiens
accttgacatcatcgctgtactgagc

SEQ ID NO: 66674 - DNA, 26 bp, Homo sapiens
ccttgacatcatcgctgtactgagcc

SEQ ID NO: 66675 - DNA, 26 bp, Homo sapiens
cttgacatcatcgctgtactgagcca

SEQ ID NO: 66676 - DNA, 26 bp, Homo sapiens
ttgacatcatcgctgtactgagccac

SEQ ID NO: 66677 - DNA, 26 bp, Homo sapiens
tgacatcatcgctgtactgagccacc

SEQ ID NO: 66678 - DNA, 26 bp, Homo sapiens
gacatcatcgctgtactgagccaccg

SEQ ID NO: 66679 - DNA, 26 bp, Homo sapiens
acatcatcgctgtactgagccaccgc

SEQ ID NO: 66680 - DNA, 26 bp, Homo sapiens
catcatcgctgtactgagccaccgca

SEQ ID NO: 66681 - DNA, 26 bp, Homo sapiens
atcatcgctgtactgagccaccgcaa

SEQ ID NO: 66682 - DNA, 26 bp, Homo sapiens
tcatcgctgtactgagccaccgcaat

SEQ ID NO: 66683 - DNA, 26 bp, Homo sapiens
catcgctgtactgagccaccgcaatt

SEQ ID NO: 66684 - DNA, 26 bp, Homo sapiens
atcgctgtactgagccaccgcaattc

SEQ ID NO: 66685 - DNA, 26 bp, Homo sapiens
tcgctgtactgagccaccgcaattcg

SEQ ID NO: 66686 - DNA, 26 bp, Homo sapiens
cgctgtactgagccaccgcaattcgg

SEQ ID NO: 66687 - DNA, 26 bp, Homo sapiens
gctgtactgagccaccgcaattcggg

SEQ ID NO: 66688 - DNA, 26 bp, Homo sapiens
ctgtactgagccaccgcaattcgggt

SEQ ID NO: 66689 - DNA, 26 bp, Homo sapiens
tgtactgagccaccgcaattcgggtc

SEQ ID NO: 66690 - DNA, 26 bp, Homo sapiens
gtactgagccaccgcaattcgggtcc

SEQ ID NO: 66691 - DNA, 26 bp, Homo sapiens
tactgagccaccgcaattcgggtccc

SEQ ID NO: 66692 - DNA, 26 bp, Homo sapiens
actgagccaccgcaattcgggtcccc

SEQ ID NO: 66693 - DNA, 26 bp, Homo sapiens
ctgagccaccgcaattcgggtcccct

SEQ ID NO: 66694 - DNA, 26 bp, Homo sapiens
tgagccaccgcaattcgggtcccctc

SEQ ID NO: 66695 - DNA, 26 bp, Homo sapiens
gagccaccgcaattcgggtcccctct

SEQ ID NO: 66696 - DNA, 26 bp, Homo sapiens
agccaccgcaattcgggtcccctctg

SEQ ID NO: 66697 - DNA, 26 bp, Homo sapiens
gccaccgcaattcgggtcccctctgg

SEQ ID NO: 66698 - DNA, 26 bp, Homo sapiens
ccaccgcaattcgggtcccctctggc

SEQ ID NO: 66699 - DNA, 26 bp, Homo sapiens
caccgcaattcgggtcccctctggct

SEQ ID NO: 66700 - DNA, 26 bp, Homo sapiens
accgcaattcgggtcccctctggctt

SEQ ID NO: 66701 - DNA, 26 bp, Homo sapiens
ccgcaattcgggtcccctctggcttc

SEQ ID NO: 66702 - DNA, 26 bp, Homo sapiens
cgcaattcgggtcccctctggcttca

SEQ ID NO: 66703 - DNA, 26 bp, Homo sapiens
gcaattcgggtcccctctggcttcac

SEQ ID NO: 66704 - DNA, 26 bp, Homo sapiens
caattcgggtcccctctggcttcaca

SEQ ID NO: 66705 - DNA, 26 bp, Homo sapiens
aattcgggtcccctctggcttcacat

SEQ ID NO: 66706 - DNA, 26 bp, Homo sapiens
attcgggtcccctctggcttcacatt

SEQ ID NO: 66707 - DNA, 26 bp, Homo sapiens
ttcgggtcccctctggcttcacattg

SEQ ID NO: 66708 - DNA, 26 bp, Homo sapiens
tcgggtcccctctggcttcacattga

SEQ ID NO: 66709 - DNA, 26 bp, Homo sapiens
cgggtcccctctggcttcacattgag

SEQ ID NO: 66710 - DNA, 26 bp, Homo sapiens
gggtcccctctggcttcacattgagc

SEQ ID NO: 66711 - DNA, 26 bp, Homo sapiens
ggtcccctctggcttcacattgagct

SEQ ID NO: 66712 - DNA, 26 bp, Homo sapiens
gtcccctctggcttcacattgagctc

SEQ ID NO: 66713 - DNA, 26 bp, Homo sapiens
tcccctctggcttcacattgagctca

SEQ ID NO: 66714 - DNA, 26 bp, Homo sapiens
cccctctggcttcacattgagctcat

SEQ ID NO: 66715 - DNA, 26 bp, Homo sapiens
ccctctggcttcacattgagctcatc

SEQ ID NO: 66716 - DNA, 26 bp, Homo sapiens
cctctggcttcacattgagctcatcg

SEQ ID NO: 66717 - DNA, 26 bp, Homo sapiens
ctctggcttcacattgagctcatcga

SEQ ID NO: 66718 - DNA, 26 bp, Homo sapiens
tctggcttcacattgagctcatcgat

SEQ ID NO: 66719 - DNA, 26 bp, Homo sapiens
ctggcttcacattgagctcatcgata

SEQ ID NO: 66720 - DNA, 26 bp, Homo sapiens
tggcttcacattgagctcatcgataa

SEQ ID NO: 66721 - DNA, 26 bp, Homo sapiens
ggcttcacattgagctcatcgataat

SEQ ID NO: 66722 - DNA, 26 bp, Homo sapiens
gcttcacattgagctcatcgataatc

SEQ ID NO: 66723 - DNA, 26 bp, Homo sapiens
cttcacattgagctcatcgataatct

SEQ ID NO: 66724 - DNA, 26 bp, Homo sapiens
ttcacattgagctcatcgataatctt

SEQ ID NO: 66725 - DNA, 26 bp, Homo sapiens
tcacattgagctcatcgataatcttg

SEQ ID NO: 66726 - DNA, 26 bp, Homo sapiens
cacattgagctcatcgataatcttgt

SEQ ID NO: 66727 - DNA, 26 bp, Homo sapiens
acattgagctcatcgataatcttgta

SEQ ID NO: 66728 - DNA, 26 bp, Homo sapiens
cattgagctcatcgataatcttgtag

SEQ ID NO: 66729 - DNA, 26 bp, Homo sapiens
attgagctcatcgataatcttgtaga

SEQ ID NO: 66730 - DNA, 26 bp, Homo sapiens
ttgagctcatcgataatcttgtagag

SEQ ID NO: 66731 - DNA, 26 bp, Homo sapiens
tgagctcatcgataatcttgtagaga

SEQ ID NO: 66732 - DNA, 26 bp, Homo sapiens
gagctcatcgataatcttgtagagaa

SEQ ID NO: 66733 - DNA, 26 bp, Homo sapiens
agctcatcgataatcttgtagagaaa

SEQ ID NO: 66734 - DNA, 26 bp, Homo sapiens
gctcatcgataatcttgtagagaaag

SEQ ID NO: 66735 - DNA, 26 bp, Homo sapiens
ctcatcgataatcttgtagagaaagt

SEQ ID NO: 66736 - DNA, 26 bp, Homo sapiens
tcatcgataatcttgtagagaaagtc

SEQ ID NO: 66737 - DNA, 26 bp, Homo sapiens
catcgataatcttgtagagaaagtca

SEQ ID NO: 66738 - DNA, 26 bp, Homo sapiens
atcgataatcttgtagagaaagtcac

SEQ ID NO: 66739 - DNA, 26 bp, Homo sapiens
tcgataatcttgtagagaaagtcacg

SEQ ID NO: 66740 - DNA, 26 bp, Homo sapiens
cgataatcttgtagagaaagtcacgg

SEQ ID NO: 66741 - DNA, 26 bp, Homo sapiens
gataatcttgtagagaaagtcacgga

SEQ ID NO: 66742 - DNA, 26 bp, Homo sapiens
ataatcttgtagagaaagtcacggac

SEQ ID NO: 66743 - DNA, 26 bp, Homo sapiens
taatcttgtagagaaagtcacggaca

SEQ ID NO: 66744 - DNA, 26 bp, Homo sapiens
aatcttgtagagaaagtcacggacaa

SEQ ID NO: 66745 - DNA, 26 bp, Homo sapiens
atcttgtagagaaagtcacggacaac

SEQ ID NO: 66746 - DNA, 26 bp, Homo sapiens
tcttgtagagaaagtcacggacaaca

SEQ ID NO: 66747 - DNA, 26 bp, Homo sapiens
cttgtagagaaagtcacggacaacag

SEQ ID NO: 66748 - DNA, 26 bp, Homo sapiens
ttgtagagaaagtcacggacaacagg

SEQ ID NO: 66749 - DNA, 26 bp, Homo sapiens
tgtagagaaagtcacggacaacaggg

SEQ ID NO: 66750 - DNA, 26 bp, Homo sapiens
gtagagaaagtcacggacaacaggga

SEQ ID NO: 66751 - DNA, 26 bp, Homo sapiens
tagagaaagtcacggacaacagggaa

SEQ ID NO: 66752 - DNA, 26 bp, Homo sapiens
agagaaagtcacggacaacagggaac

SEQ ID NO: 66753 - DNA, 26 bp, Homo sapiens
gagaaagtcacggacaacagggaact

SEQ ID NO: 66754 - DNA, 26 bp, Homo sapiens
agaaagtcacggacaacagggaactg

SEQ ID NO: 66755 - DNA, 26 bp, Homo sapiens
gaaagtcacggacaacagggaactgg

SEQ ID NO: 66756 - DNA, 26 bp, Homo sapiens
aaagtcacggacaacagggaactggc

SEQ ID NO: 66757 - DNA, 26 bp, Homo sapiens
aagtcacggacaacagggaactggcc

SEQ ID NO: 66758 - DNA, 26 bp, Homo sapiens
agtcacggacaacagggaactggccc

SEQ ID NO: 66759 - DNA, 26 bp, Homo sapiens
gtcacggacaacagggaactggccca

SEQ ID NO: 66760 - DNA, 26 bp, Homo sapiens
tcacggacaacagggaactggcccac

SEQ ID NO: 66761 - DNA, 26 bp, Homo sapiens
cacggacaacagggaactggcccaca

SEQ ID NO: 66762 - DNA, 26 bp, Homo sapiens
acggacaacagggaactggcccacaa

SEQ ID NO: 66763 - DNA, 26 bp, Homo sapiens
cggacaacagggaactggcccacaag

SEQ ID NO: 66764 - DNA, 26 bp, Homo sapiens
ggacaacagggaactggcccacaaga

SEQ ID NO: 66765 - DNA, 26 bp, Homo sapiens
gacaacagggaactggcccacaagat

SEQ ID NO: 66766 - DNA, 26 bp, Homo sapiens
acaacagggaactggcccacaagatt

SEQ ID NO: 66767 - DNA, 26 bp, Homo sapiens
caacagggaactggcccacaagattg

SEQ ID NO: 66768 - DNA, 26 bp, Homo sapiens
aacagggaactggcccacaagattgg

SEQ ID NO: 66769 - DNA, 26 bp, Homo sapiens
acagggaactggcccacaagattggc

SEQ ID NO: 66770 - DNA, 26 bp, Homo sapiens
cagggaactggcccacaagattggct

SEQ ID NO: 66771 - DNA, 26 bp, Homo sapiens
agggaactggcccacaagattggctg

SEQ ID NO: 66772 - DNA, 26 bp, Homo sapiens
gggaactggcccacaagattggctga

SEQ ID NO: 66773 - DNA, 26 bp, Homo sapiens
ggaactggcccacaagattggctgag

SEQ ID NO: 66774 - DNA, 26 bp, Homo sapiens
gaactggcccacaagattggctgagc

SEQ ID NO: 66775 - DNA, 26 bp, Homo sapiens
aactggcccacaagattggctgagcc

SEQ ID NO: 66776 - DNA, 26 bp, Homo sapiens
actggcccacaagattggctgagccg

SEQ ID NO: 66777 - DNA, 26 bp, Homo sapiens
ctggcccacaagattggctgagccgt

SEQ ID NO: 66778 - DNA, 26 bp, Homo sapiens
tggcccacaagattggctgagccgtc

SEQ ID NO: 66779 - DNA, 26 bp, Homo sapiens
ggcccacaagattggctgagccgtca

SEQ ID NO: 66780 - DNA, 26 bp, Homo sapiens
gcccacaagattggctgagccgtcaa

SEQ ID NO: 66781 - DNA, 26 bp, Homo sapiens
cccacaagattggctgagccgtcaaa

SEQ ID NO: 66782 - DNA, 26 bp, Homo sapiens
ccacaagattggctgagccgtcaaag

SEQ ID NO: 66783 - DNA, 26 bp, Homo sapiens
cacaagattggctgagccgtcaaaga

SEQ ID NO: 66784 - DNA, 26 bp, Homo sapiens
acaagattggctgagccgtcaaagag

SEQ ID NO: 66785 - DNA, 26 bp, Homo sapiens
caagattggctgagccgtcaaagagg

SEQ ID NO: 66786 - DNA, 26 bp, Homo sapiens
aagattggctgagccgtcaaagagga

SEQ ID NO: 66787 - DNA, 26 bp, Homo sapiens
agattggctgagccgtcaaagaggaa

SEQ ID NO: 66788 - DNA, 26 bp, Homo sapiens
gattggctgagccgtcaaagaggaac

SEQ ID NO: 66789 - DNA, 26 bp, Homo sapiens
attggctgagccgtcaaagaggaaca

SEQ ID NO: 66790 - DNA, 26 bp, Homo sapiens
ttggctgagccgtcaaagaggaacag

SEQ ID NO: 66791 - DNA, 26 bp, Homo sapiens
tggctgagccgtcaaagaggaacaga

SEQ ID NO: 66792 - DNA, 26 bp, Homo sapiens
ggctgagccgtcaaagaggaacagaa

SEQ ID NO: 66793 - DNA, 26 bp, Homo sapiens
gctgagccgtcaaagaggaacagaat

SEQ ID NO: 66794 - DNA, 26 bp, Homo sapiens
ctgagccgtcaaagaggaacagaatg

SEQ ID NO: 66795 - DNA, 26 bp, Homo sapiens
tgagccgtcaaagaggaacagaatgt

SEQ ID NO: 66796 - DNA, 26 bp, Homo sapiens
gagccgtcaaagaggaacagaatgtc

SEQ ID NO: 66797 - DNA, 26 bp, Homo sapiens
agccgtcaaagaggaacagaatgtct

SEQ ID NO: 66798 - DNA, 26 bp, Homo sapiens
gccgtcaaagaggaacagaatgtctc

SEQ ID NO: 66799 - DNA, 26 bp, Homo sapiens
ccgtcaaagaggaacagaatgtctcg

SEQ ID NO: 66800 - DNA, 26 bp, Homo sapiens
cgtcaaagaggaacagaatgtctcgc

SEQ ID NO: 66801 - DNA, 26 bp, Homo sapiens
gtcaaagaggaacagaatgtctcgct

SEQ ID NO: 66802 - DNA, 26 bp, Homo sapiens
tcaaagaggaacagaatgtctcgctt

SEQ ID NO: 66803 - DNA, 26 bp, Homo sapiens
caaagaggaacagaatgtctcgcttg

SEQ ID NO: 66804 - DNA, 26 bp, Homo sapiens
aaagaggaacagaatgtctcgcttgc

SEQ ID NO: 66805 - DNA, 26 bp, Homo sapiens
aagaggaacagaatgtctcgcttgct

SEQ ID NO: 66806 - DNA, 26 bp, Homo sapiens
agaggaacagaatgtctcgcttgctc

SEQ ID NO: 66807 - DNA, 26 bp, Homo sapiens
gaggaacagaatgtctcgcttgctct

SEQ ID NO: 66808 - DNA, 26 bp, Homo sapiens
aggaacagaatgtctcgcttgctctc

SEQ ID NO: 66809 - DNA, 26 bp, Homo sapiens
ggaacagaatgtctcgcttgctctct

SEQ ID NO: 66810 - DNA, 26 bp, Homo sapiens
gaacagaatgtctcgcttgctctctg

SEQ ID NO: 66811 - DNA, 26 bp, Homo sapiens
aacagaatgtctcgcttgctctctgg

SEQ ID NO: 66812 - DNA, 26 bp, Homo sapiens
acagaatgtctcgcttgctctctggc

SEQ ID NO: 66813 - DNA, 26 bp, Homo sapiens
cagaatgtctcgcttgctctctggct

SEQ ID NO: 66814 - DNA, 26 bp, Homo sapiens
agaatgtctcgcttgctctctggctg

SEQ ID NO: 66815 - DNA, 26 bp, Homo sapiens
gaatgtctcgcttgctctctggctga

SEQ ID NO: 66816 - DNA, 26 bp, Homo sapiens
aatgtctcgcttgctctctggctgag

SEQ ID NO: 66817 - DNA, 26 bp, Homo sapiens
atgtctcgcttgctctctggctgagc

SEQ ID NO: 66818 - DNA, 26 bp, Homo sapiens
tgtctcgcttgctctctggctgagcg

SEQ ID NO: 66819 - DNA, 26 bp, Homo sapiens
gtctcgcttgctctctggctgagcga

SEQ ID NO: 66820 - DNA, 26 bp, Homo sapiens
tctcgcttgctctctggctgagcgag

SEQ ID NO: 66821 - DNA, 26 bp, Homo sapiens
ctcgcttgctctctggctgagcgagt

SEQ ID NO: 66822 - DNA, 26 bp, Homo sapiens
tcgcttgctctctggctgagcgagtg

SEQ ID NO: 66823 - DNA, 26 bp, Homo sapiens
cgcttgctctctggctgagcgagtgg

SEQ ID NO: 66824 - DNA, 26 bp, Homo sapiens
gcttgctctctggctgagcgagtggt

SEQ ID NO: 66825 - DNA, 26 bp, Homo sapiens
cttgctctctggctgagcgagtggta

SEQ ID NO: 66826 - DNA, 26 bp, Homo sapiens
ttgctctctggctgagcgagtggtac

SEQ ID NO: 66827 - DNA, 26 bp, Homo sapiens
tgctctctggctgagcgagtggtact

SEQ ID NO: 66828 - DNA, 26 bp, Homo sapiens
gctctctggctgagcgagtggtactt

SEQ ID NO: 66829 - DNA, 26 bp, Homo sapiens
ctctctggctgagcgagtggtacttc

SEQ ID NO: 66830 - DNA, 26 bp, Homo sapiens
tctctggctgagcgagtggtacttcc

SEQ ID NO: 66831 - DNA, 26 bp, Homo sapiens
ctctggctgagcgagtggtacttcct

SEQ ID NO: 66832 - DNA, 26 bp, Homo sapiens
tctggctgagcgagtggtacttcctc

SEQ ID NO: 66833 - DNA, 26 bp, Homo sapiens
ctggctgagcgagtggtacttcctcc

SEQ ID NO: 66834 - DNA, 26 bp, Homo sapiens
tggctgagcgagtggtacttcctcca

SEQ ID NO: 66835 - DNA, 26 bp, Homo sapiens
ggctgagcgagtggtacttcctccac

SEQ ID NO: 66836 - DNA, 26 bp, Homo sapiens
gctgagcgagtggtacttcctccaca

SEQ ID NO: 66837 - DNA, 26 bp, Homo sapiens
ctgagcgagtggtacttcctccacac

SEQ ID NO: 66838 - DNA, 26 bp, Homo sapiens
tgagcgagtggtacttcctccacacc

SEQ ID NO: 66839 - DNA, 26 bp, Homo sapiens
gagcgagtggtacttcctccacacct

SEQ ID NO: 66840 - DNA, 26 bp, Homo sapiens
agcgagtggtacttcctccacacctc

SEQ ID NO: 66841 - DNA, 26 bp, Homo sapiens
gcgagtggtacttcctccacacctcc

SEQ ID NO: 66842 - DNA, 26 bp, Homo sapiens
cgagtggtacttcctccacacctcca

SEQ ID NO: 66843 - DNA, 26 bp, Homo sapiens
gagtggtacttcctccacacctccac

SEQ ID NO: 66844 - DNA, 26 bp, Homo sapiens
agtggtacttcctccacacctccact

SEQ ID NO: 66845 - DNA, 26 bp, Homo sapiens
gtggtacttcctccacacctccacta

SEQ ID NO: 66846 - DNA, 26 bp, Homo sapiens
tggtacttcctccacacctccactaa

SEQ ID NO: 66847 - DNA, 26 bp, Homo sapiens
ggtacttcctccacacctccactaac

SEQ ID NO: 66848 - DNA, 26 bp, Homo sapiens
gtacttcctccacacctccactaaca

SEQ ID NO: 66849 - DNA, 26 bp, Homo sapiens
tacttcctccacacctccactaacat

SEQ ID NO: 66850 - DNA, 26 bp, Homo sapiens
acttcctccacacctccactaacata

SEQ ID NO: 66851 - DNA, 26 bp, Homo sapiens
cttcctccacacctccactaacatat

SEQ ID NO: 66852 - DNA, 26 bp, Homo sapiens
ttcctccacacctccactaacatatg

SEQ ID NO: 66853 - DNA, 26 bp, Homo sapiens
tcctccacacctccactaacatatgt

SEQ ID NO: 66854 - DNA, 26 bp, Homo sapiens
cctccacacctccactaacatatgtg

SEQ ID NO: 66855 - DNA, 26 bp, Homo sapiens
ctccacacctccactaacatatgtgg

SEQ ID NO: 66856 - DNA, 26 bp, Homo sapiens
tccacacctccactaacatatgtggt

SEQ ID NO: 66857 - DNA, 26 bp, Homo sapiens
ccacacctccactaacatatgtggtt

SEQ ID NO: 66858 - DNA, 26 bp, Homo sapiens
cacacctccactaacatatgtggtta

SEQ ID NO: 66859 - DNA, 26 bp, Homo sapiens
acacctccactaacatatgtggttag

SEQ ID NO: 66860 - DNA, 26 bp, Homo sapiens
cacctccactaacatatgtggttagg

SEQ ID NO: 66861 - DNA, 26 bp, Homo sapiens
acctccactaacatatgtggttaggg

SEQ ID NO: 66862 - DNA, 26 bp, Homo sapiens
cctccactaacatatgtggttagggg

SEQ ID NO: 66863 - DNA, 26 bp, Homo sapiens
ctccactaacatatgtggttaggggc

SEQ ID NO: 66864 - DNA, 26 bp, Homo sapiens
tccactaacatatgtggttaggggct

SEQ ID NO: 66865 - DNA, 26 bp, Homo sapiens
ccactaacatatgtggttaggggctg

SEQ ID NO: 66866 - DNA, 26 bp, Homo sapiens
cactaacatatgtggttaggggctga

SEQ ID NO: 66867 - DNA, 26 bp, Homo sapiens
actaacatatgtggttaggggctgaa

SEQ ID NO: 66868 - DNA, 26 bp, Homo sapiens
ctaacatatgtggttaggggctgaat

SEQ ID NO: 66869 - DNA, 26 bp, Homo sapiens
taacatatgtggttaggggctgaatc

SEQ ID NO: 66870 - DNA, 26 bp, Homo sapiens
aacatatgtggttaggggctgaatca

SEQ ID NO: 66871 - DNA, 26 bp, Homo sapiens
acatatgtggttaggggctgaatcag

SEQ ID NO: 66872 - DNA, 26 bp, Homo sapiens
catatgtggttaggggctgaatcagc

SEQ ID NO: 66873 - DNA, 26 bp, Homo sapiens
atatgtggttaggggctgaatcagct

SEQ ID NO: 66874 - DNA, 26 bp, Homo sapiens
tatgtggttaggggctgaatcagctg

SEQ ID NO: 66875 - DNA, 26 bp, Homo sapiens
atgtggttaggggctgaatcagctgc

SEQ ID NO: 66876 - DNA, 26 bp, Homo sapiens
tgtggttaggggctgaatcagctgct

SEQ ID NO: 66877 - DNA, 26 bp, Homo sapiens
gtggttaggggctgaatcagctgctg

SEQ ID NO: 66878 - DNA, 26 bp, Homo sapiens
tggttaggggctgaatcagctgctga

SEQ ID NO: 66879 - DNA, 26 bp, Homo sapiens
ggttaggggctgaatcagctgctgag

SEQ ID NO: 66880 - DNA, 26 bp, Homo sapiens
gttaggggctgaatcagctgctgagg

SEQ ID NO: 66881 - DNA, 26 bp, Homo sapiens
ttaggggctgaatcagctgctgaggc

SEQ ID NO: 66882 - DNA, 26 bp, Homo sapiens
taggggctgaatcagctgctgaggca

SEQ ID NO: 66883 - DNA, 26 bp, Homo sapiens
aggggctgaatcagctgctgaggcaa

SEQ ID NO: 66884 - DNA, 26 bp, Homo sapiens
ggggctgaatcagctgctgaggcaaa

SEQ ID NO: 66885 - DNA, 26 bp, Homo sapiens
gggctgaatcagctgctgaggcaaag

SEQ ID NO: 66886 - DNA, 26 bp, Homo sapiens
ggctgaatcagctgctgaggcaaagc

SEQ ID NO: 66887 - DNA, 26 bp, Homo sapiens
gctgaatcagctgctgaggcaaagct

SEQ ID NO: 66888 - DNA, 26 bp, Homo sapiens
ctgaatcagctgctgaggcaaagctg

SEQ ID NO: 66889 - DNA, 26 bp, Homo sapiens
tgaatcagctgctgaggcaaagctgg

SEQ ID NO: 66890 - DNA, 26 bp, Homo sapiens
gaatcagctgctgaggcaaagctggc

SEQ ID NO: 66891 - DNA, 26 bp, Homo sapiens
aatcagctgctgaggcaaagctggca

SEQ ID NO: 66892 - DNA, 26 bp, Homo sapiens
atcagctgctgaggcaaagctggcag

SEQ ID NO: 66893 - DNA, 26 bp, Homo sapiens
tcagctgctgaggcaaagctggcagg

SEQ ID NO: 66894 - DNA, 26 bp, Homo sapiens
cagctgctgaggcaaagctggcaggg

SEQ ID NO: 66895 - DNA, 26 bp, Homo sapiens
agctgctgaggcaaagctggcaggga

SEQ ID NO: 66896 - DNA, 26 bp, Homo sapiens
gctgctgaggcaaagctggcagggag

SEQ ID NO: 66897 - DNA, 26 bp, Homo sapiens
ctgctgaggcaaagctggcagggagc

SEQ ID NO: 66898 - DNA, 26 bp, Homo sapiens
tgctgaggcaaagctggcagggagct

SEQ ID NO: 66899 - DNA, 26 bp, Homo sapiens
gctgaggcaaagctggcagggagctg

SEQ ID NO: 66900 - DNA, 26 bp, Homo sapiens
ctgaggcaaagctggcagggagctga

SEQ ID NO: 66901 - DNA, 26 bp, Homo sapiens
tgaggcaaagctggcagggagctgaa

SEQ ID NO: 66902 - DNA, 26 bp, Homo sapiens
gaggcaaagctggcagggagctgaaa

SEQ ID NO: 66903 - DNA, 26 bp, Homo sapiens
aggcaaagctggcagggagctgaaat

SEQ ID NO: 66904 - DNA, 26 bp, Homo sapiens
ggcaaagctggcagggagctgaaatc

SEQ ID NO: 66905 - DNA, 26 bp, Homo sapiens
gcaaagctggcagggagctgaaatca

SEQ ID NO: 66906 - DNA, 26 bp, Homo sapiens
caaagctggcagggagctgaaatcat

SEQ ID NO: 66907 - DNA, 26 bp, Homo sapiens
aaagctggcagggagctgaaatcatc

SEQ ID NO: 66908 - DNA, 26 bp, Homo sapiens
aagctggcagggagctgaaatcatcc

SEQ ID NO: 66909 - DNA, 26 bp, Homo sapiens
agctggcagggagctgaaatcatcca

SEQ ID NO: 66910 - DNA, 26 bp, Homo sapiens
gctggcagggagctgaaatcatccat

SEQ ID NO: 66911 - DNA, 26 bp, Homo sapiens
ctggcagggagctgaaatcatccatg

SEQ ID NO: 66912 - DNA, 26 bp, Homo sapiens
tggcagggagctgaaatcatccatga

SEQ ID NO: 66913 - DNA, 26 bp, Homo sapiens
ggcagggagctgaaatcatccatgag

SEQ ID NO: 66914 - DNA, 26 bp, Homo sapiens
gcagggagctgaaatcatccatgaga

SEQ ID NO: 66915 - DNA, 26 bp, Homo sapiens
cagggagctgaaatcatccatgagat

SEQ ID NO: 66916 - DNA, 26 bp, Homo sapiens
agggagctgaaatcatccatgagata

SEQ ID NO: 66917 - DNA, 26 bp, Homo sapiens
gggagctgaaatcatccatgagatac

SEQ ID NO: 66918 - DNA, 26 bp, Homo sapiens
ggagctgaaatcatccatgagataca

SEQ ID NO: 66919 - DNA, 26 bp, Homo sapiens
gagctgaaatcatccatgagatacac

SEQ ID NO: 66920 - DNA, 26 bp, Homo sapiens
agctgaaatcatccatgagatacacc

SEQ ID NO: 66921 - DNA, 26 bp, Homo sapiens
gctgaaatcatccatgagatacacca

SEQ ID NO: 66922 - DNA, 26 bp, Homo sapiens
ctgaaatcatccatgagatacaccag

SEQ ID NO: 66923 - DNA, 26 bp, Homo sapiens
tgaaatcatccatgagatacaccagg

SEQ ID NO: 66924 - DNA, 26 bp, Homo sapiens
gaaatcatccatgagatacaccaggc

SEQ ID NO: 66925 - DNA, 26 bp, Homo sapiens
aaatcatccatgagatacaccaggct

SEQ ID NO: 66926 - DNA, 26 bp, Homo sapiens
aatcatccatgagatacaccaggctt

SEQ ID NO: 66927 - DNA, 26 bp, Homo sapiens
atcatccatgagatacaccaggcttg

SEQ ID NO: 66928 - DNA, 26 bp, Homo sapiens
tcatccatgagatacaccaggcttgg

SEQ ID NO: 66929 - DNA, 26 bp, Homo sapiens
catccatgagatacaccaggcttggg

SEQ ID NO: 66930 - DNA, 26 bp, Homo sapiens
atccatgagatacaccaggcttgggt

SEQ ID NO: 66931 - DNA, 26 bp, Homo sapiens
tccatgagatacaccaggcttgggtt

SEQ ID NO: 66932 - DNA, 26 bp, Homo sapiens
ccatgagatacaccaggcttgggtta

SEQ ID NO: 66933 - DNA, 26 bp, Homo sapiens
catgagatacaccaggcttgggttaa

SEQ ID NO: 66934 - DNA, 26 bp, Homo sapiens
atgagatacaccaggcttgggttaaa

SEQ ID NO: 66935 - DNA, 26 bp, Homo sapiens
tgagatacaccaggcttgggttaaaa

SEQ ID NO: 66936 - DNA, 26 bp, Homo sapiens
gagatacaccaggcttgggttaaaag

SEQ ID NO: 66937 - DNA, 26 bp, Homo sapiens
agatacaccaggcttgggttaaaagc

SEQ ID NO: 66938 - DNA, 26 bp, Homo sapiens
gatacaccaggcttgggttaaaagca

SEQ ID NO: 66939 - DNA, 26 bp, Homo sapiens
atacaccaggcttgggttaaaagcaa

SEQ ID NO: 66940 - DNA, 26 bp, Homo sapiens
tacaccaggcttgggttaaaagcaat

SEQ ID NO: 66941 - DNA, 26 bp, Homo sapiens
acaccaggcttgggttaaaagcaatc

SEQ ID NO: 66942 - DNA, 26 bp, Homo sapiens
caccaggcttgggttaaaagcaatct

SEQ ID NO: 66943 - DNA, 26 bp, Homo sapiens
accaggcttgggttaaaagcaatctg

SEQ ID NO: 66944 - DNA, 26 bp, Homo sapiens
ccaggcttgggttaaaagcaatctgc

SEQ ID NO: 66945 - DNA, 26 bp, Homo sapiens
caggcttgggttaaaagcaatctgct

SEQ ID NO: 66946 - DNA, 26 bp, Homo sapiens
aggcttgggttaaaagcaatctgctc

SEQ ID NO: 66947 - DNA, 26 bp, Homo sapiens
ggcttgggttaaaagcaatctgctca

SEQ ID NO: 66948 - DNA, 26 bp, Homo sapiens
gcttgggttaaaagcaatctgctcaa

SEQ ID NO: 66949 - DNA, 26 bp, Homo sapiens
cttgggttaaaagcaatctgctcaag

SEQ ID NO: 66950 - DNA, 26 bp, Homo sapiens
ttgggttaaaagcaatctgctcaagc

SEQ ID NO: 66951 - DNA, 26 bp, Homo sapiens
tgggttaaaagcaatctgctcaagct

SEQ ID NO: 66952 - DNA, 26 bp, Homo sapiens
gggttaaaagcaatctgctcaagctc

SEQ ID NO: 66953 - DNA, 26 bp, Homo sapiens
ggttaaaagcaatctgctcaagctct

SEQ ID NO: 66954 - DNA, 26 bp, Homo sapiens
gttaaaagcaatctgctcaagctctg

SEQ ID NO: 66955 - DNA, 26 bp, Homo sapiens
ttaaaagcaatctgctcaagctctgc

SEQ ID NO: 66956 - DNA, 26 bp, Homo sapiens
taaaagcaatctgctcaagctctgcc

SEQ ID NO: 66957 - DNA, 26 bp, Homo sapiens
aaaagcaatctgctcaagctctgcct

SEQ ID NO: 66958 - DNA, 26 bp, Homo sapiens
aaagcaatctgctcaagctctgcctt

SEQ ID NO: 66959 - DNA, 26 bp, Homo sapiens
aagcaatctgctcaagctctgcctta

SEQ ID NO: 66960 - DNA, 26 bp, Homo sapiens
agcaatctgctcaagctctgccttat

SEQ ID NO: 66961 - DNA, 26 bp, Homo sapiens
gcaatctgctcaagctctgccttatt

SEQ ID NO: 66962 - DNA, 26 bp, Homo sapiens
caatctgctcaagctctgccttattc

SEQ ID NO: 66963 - DNA, 26 bp, Homo sapiens
aatctgctcaagctctgccttattcg

SEQ ID NO: 66964 - DNA, 26 bp, Homo sapiens
atctgctcaagctctgccttattcgc

SEQ ID NO: 66965 - DNA, 26 bp, Homo sapiens
tctgctcaagctctgccttattcgcc

SEQ ID NO: 66966 - DNA, 26 bp, Homo sapiens
ctgctcaagctctgccttattcgcct

SEQ ID NO: 66967 - DNA, 26 bp, Homo sapiens
tgctcaagctctgccttattcgcctg

SEQ ID NO: 66968 - DNA, 26 bp, Homo sapiens
gctcaagctctgccttattcgcctgg

SEQ ID NO: 66969 - DNA, 26 bp, Homo sapiens
ctcaagctctgccttattcgcctggc

SEQ ID NO: 66970 - DNA, 26 bp, Homo sapiens
tcaagctctgccttattcgcctggct

SEQ ID NO: 66971 - DNA, 26 bp, Homo sapiens
caagctctgccttattcgcctggcta

SEQ ID NO: 66972 - DNA, 26 bp, Homo sapiens
aagctctgccttattcgcctggctag

SEQ ID NO: 66973 - DNA, 26 bp, Homo sapiens
agctctgccttattcgcctggctagc

SEQ ID NO: 66974 - DNA, 26 bp, Homo sapiens
gctctgccttattcgcctggctagct

SEQ ID NO: 66975 - DNA, 26 bp, Homo sapiens
ctctgccttattcgcctggctagctc

SEQ ID NO: 66976 - DNA, 26 bp, Homo sapiens
tctgccttattcgcctggctagctcc

SEQ ID NO: 66977 - DNA, 26 bp, Homo sapiens
ctgccttattcgcctggctagctccc

SEQ ID NO: 66978 - DNA, 26 bp, Homo sapiens
tgccttattcgcctggctagctccca

SEQ ID NO: 66979 - DNA, 26 bp, Homo sapiens
gccttattcgcctggctagctcccac

SEQ ID NO: 66980 - DNA, 26 bp, Homo sapiens
ccttattcgcctggctagctcccaca

SEQ ID NO: 66981 - DNA, 26 bp, Homo sapiens
cttattcgcctggctagctcccacac

SEQ ID NO: 66982 - DNA, 26 bp, Homo sapiens
ttattcgcctggctagctcccacaca

SEQ ID NO: 66983 - DNA, 26 bp, Homo sapiens
tattcgcctggctagctcccacacaa

SEQ ID NO: 66984 - DNA, 26 bp, Homo sapiens
attcgcctggctagctcccacacaaa

SEQ ID NO: 66985 - DNA, 26 bp, Homo sapiens
ttcgcctggctagctcccacacaaaa

SEQ ID NO: 66986 - DNA, 26 bp, Homo sapiens
tcgcctggctagctcccacacaaaaa

SEQ ID NO: 66987 - DNA, 26 bp, Homo sapiens
cgcctggctagctcccacacaaaaag

SEQ ID NO: 66988 - DNA, 26 bp, Homo sapiens
gcctggctagctcccacacaaaaagt

SEQ ID NO: 66989 - DNA, 26 bp, Homo sapiens
cctggctagctcccacacaaaaagtc

SEQ ID NO: 66990 - DNA, 26 bp, Homo sapiens
ctggctagctcccacacaaaaagtca

SEQ ID NO: 66991 - DNA, 26 bp, Homo sapiens
tggctagctcccacacaaaaagtcag

SEQ ID NO: 66992 - DNA, 26 bp, Homo sapiens
ggctagctcccacacaaaaagtcagg

SEQ ID NO: 66993 - DNA, 26 bp, Homo sapiens
gctagctcccacacaaaaagtcagga

SEQ ID NO: 66994 - DNA, 26 bp, Homo sapiens
ctagctcccacacaaaaagtcaggat

SEQ ID NO: 66995 - DNA, 26 bp, Homo sapiens
tagctcccacacaaaaagtcaggatg

SEQ ID NO: 66996 - DNA, 26 bp, Homo sapiens
agctcccacacaaaaagtcaggatgc

SEQ ID NO: 66997 - DNA, 26 bp, Homo sapiens
gctcccacacaaaaagtcaggatgcc

SEQ ID NO: 66998 - DNA, 26 bp, Homo sapiens
ctcccacacaaaaagtcaggatgccc

SEQ ID NO: 66999 - DNA, 26 bp, Homo sapiens
tcccacacaaaaagtcaggatgcccg

SEQ ID NO: 67000 - DNA, 26 bp, Homo sapiens
cccacacaaaaagtcaggatgcccgc

SEQ ID NO: 67001 - DNA, 26 bp, Homo sapiens
ccacacaaaaagtcaggatgcccgcg

SEQ ID NO: 67002 - DNA, 26 bp, Homo sapiens
cacacaaaaagtcaggatgcccgcgc

SEQ ID NO: 67003 - DNA, 26 bp, Homo sapiens
acacaaaaagtcaggatgcccgcgcg

SEQ ID NO: 67004 - DNA, 26 bp, Homo sapiens
cacaaaaagtcaggatgcccgcgcgt

SEQ ID NO: 67005 - DNA, 26 bp, Homo sapiens
acaaaaagtcaggatgcccgcgcgtg

SEQ ID NO: 67006 - DNA, 26 bp, Homo sapiens
caaaaagtcaggatgcccgcgcgtgt

SEQ ID NO: 67007 - DNA, 26 bp, Homo sapiens
aaaaagtcaggatgcccgcgcgtgtc

SEQ ID NO: 67008 - DNA, 26 bp, Homo sapiens
aaaagtcaggatgcccgcgcgtgtca

SEQ ID NO: 67009 - DNA, 26 bp, Homo sapiens
aaagtcaggatgcccgcgcgtgtcaa

SEQ ID NO: 67010 - DNA, 26 bp, Homo sapiens
aagtcaggatgcccgcgcgtgtcaag

SEQ ID NO: 67011 - DNA, 26 bp, Homo sapiens
agtcaggatgcccgcgcgtgtcaagg

SEQ ID NO: 67012 - DNA, 26 bp, Homo sapiens
gtcaggatgcccgcgcgtgtcaaggc

SEQ ID NO: 67013 - DNA, 26 bp, Homo sapiens
tcaggatgcccgcgcgtgtcaaggcg

SEQ ID NO: 67014 - DNA, 26 bp, Homo sapiens
caggatgcccgcgcgtgtcaaggcgt

SEQ ID NO: 67015 - DNA, 26 bp, Homo sapiens
aggatgcccgcgcgtgtcaaggcgtt

SEQ ID NO: 67016 - DNA, 26 bp, Homo sapiens
ggatgcccgcgcgtgtcaaggcgttg

SEQ ID NO: 67017 - DNA, 26 bp, Homo sapiens
gatgcccgcgcgtgtcaaggcgttgg

SEQ ID NO: 67018 - DNA, 26 bp, Homo sapiens
atgcccgcgcgtgtcaaggcgttggc

SEQ ID NO: 67019 - DNA, 26 bp, Homo sapiens
tgcccgcgcgtgtcaaggcgttggca

SEQ ID NO: 67020 - DNA, 26 bp, Homo sapiens
gcccgcgcgtgtcaaggcgttggcag

SEQ ID NO: 67021 - DNA, 26 bp, Homo sapiens
cccgcgcgtgtcaaggcgttggcagc

SEQ ID NO: 67022 - DNA, 26 bp, Homo sapiens
ccgcgcgtgtcaaggcgttggcagct

SEQ ID NO: 67023 - DNA, 26 bp, Homo sapiens
cgcgcgtgtcaaggcgttggcagctt

SEQ ID NO: 67024 - DNA, 26 bp, Homo sapiens
gcgcgtgtcaaggcgttggcagcttg

SEQ ID NO: 67025 - DNA, 26 bp, Homo sapiens
cgcgtgtcaaggcgttggcagcttgc

SEQ ID NO: 67026 - DNA, 26 bp, Homo sapiens
gcgtgtcaaggcgttggcagcttgca

SEQ ID NO: 67027 - DNA, 26 bp, Homo sapiens
cgtgtcaaggcgttggcagcttgcaa

SEQ ID NO: 67028 - DNA, 26 bp, Homo sapiens
gtgtcaaggcgttggcagcttgcaaa

SEQ ID NO: 67029 - DNA, 26 bp, Homo sapiens
tgtcaaggcgttggcagcttgcaaat

SEQ ID NO: 67030 - DNA, 26 bp, Homo sapiens
gtcaaggcgttggcagcttgcaaata

SEQ ID NO: 67031 - DNA, 26 bp, Homo sapiens
tcaaggcgttggcagcttgcaaatag

SEQ ID NO: 67032 - DNA, 26 bp, Homo sapiens
caaggcgttggcagcttgcaaatagg

SEQ ID NO: 67033 - DNA, 26 bp, Homo sapiens
aaggcgttggcagcttgcaaatagga

SEQ ID NO: 67034 - DNA, 26 bp, Homo sapiens
aggcgttggcagcttgcaaataggag

SEQ ID NO: 67035 - DNA, 26 bp, Homo sapiens
ggcgttggcagcttgcaaataggagt

SEQ ID NO: 67036 - DNA, 26 bp, Homo sapiens
gcgttggcagcttgcaaataggagtc

SEQ ID NO: 67037 - DNA, 26 bp, Homo sapiens
cgttggcagcttgcaaataggagtcc

SEQ ID NO: 67038 - DNA, 26 bp, Homo sapiens
gttggcagcttgcaaataggagtcct

SEQ ID NO: 67039 - DNA, 26 bp, Homo sapiens
ttggcagcttgcaaataggagtcctc

SEQ ID NO: 67040 - DNA, 26 bp, Homo sapiens
tggcagcttgcaaataggagtcctca

SEQ ID NO: 67041 - DNA, 26 bp, Homo sapiens
ggcagcttgcaaataggagtcctcag

SEQ ID NO: 67042 - DNA, 26 bp, Homo sapiens
gcagcttgcaaataggagtcctcaga

SEQ ID NO: 67043 - DNA, 26 bp, Homo sapiens
cagcttgcaaataggagtcctcagac

SEQ ID NO: 67044 - DNA, 26 bp, Homo sapiens
agcttgcaaataggagtcctcagact

SEQ ID NO: 67045 - DNA, 26 bp, Homo sapiens
gcttgcaaataggagtcctcagactg

SEQ ID NO: 67046 - DNA, 26 bp, Homo sapiens
cttgcaaataggagtcctcagactgc

SEQ ID NO: 67047 - DNA, 26 bp, Homo sapiens
ttgcaaataggagtcctcagactgcc

SEQ ID NO: 67048 - DNA, 26 bp, Homo sapiens
tgcaaataggagtcctcagactgccc

SEQ ID NO: 67049 - DNA, 26 bp, Homo sapiens
gcaaataggagtcctcagactgccca

SEQ ID NO: 67050 - DNA, 26 bp, Homo sapiens
caaataggagtcctcagactgcccag

SEQ ID NO: 67051 - DNA, 26 bp, Homo sapiens
aaataggagtcctcagactgcccagc

SEQ ID NO: 67052 - DNA, 26 bp, Homo sapiens
aataggagtcctcagactgcccagct

SEQ ID NO: 67053 - DNA, 26 bp, Homo sapiens
ataggagtcctcagactgcccagctg

SEQ ID NO: 67054 - DNA, 26 bp, Homo sapiens
taggagtcctcagactgcccagctgt

SEQ ID NO: 67055 - DNA, 26 bp, Homo sapiens
aggagtcctcagactgcccagctgtg

SEQ ID NO: 67056 - DNA, 26 bp, Homo sapiens
ggagtcctcagactgcccagctgtga

SEQ ID NO: 67057 - DNA, 26 bp, Homo sapiens
gagtcctcagactgcccagctgtgag

SEQ ID NO: 67058 - DNA, 26 bp, Homo sapiens
agtcctcagactgcccagctgtgagc

SEQ ID NO: 67059 - DNA, 26 bp, Homo sapiens
gtcctcagactgcccagctgtgagca

SEQ ID NO: 67060 - DNA, 26 bp, Homo sapiens
tcctcagactgcccagctgtgagcag

SEQ ID NO: 67061 - DNA, 26 bp, Homo sapiens
cctcagactgcccagctgtgagcaga

SEQ ID NO: 67062 - DNA, 26 bp, Homo sapiens
ctcagactgcccagctgtgagcagaa

SEQ ID NO: 67063 - DNA, 26 bp, Homo sapiens
tcagactgcccagctgtgagcagaag

SEQ ID NO: 67064 - DNA, 26 bp, Homo sapiens
cagactgcccagctgtgagcagaagc

SEQ ID NO: 67065 - DNA, 26 bp, Homo sapiens
agactgcccagctgtgagcagaagca

SEQ ID NO: 67066 - DNA, 26 bp, Homo sapiens
gactgcccagctgtgagcagaagcag

SEQ ID NO: 67067 - DNA, 26 bp, Homo sapiens
actgcccagctgtgagcagaagcagg

SEQ ID NO: 67068 - DNA, 26 bp, Homo sapiens
ctgcccagctgtgagcagaagcagga

SEQ ID NO: 67069 - DNA, 26 bp, Homo sapiens
tgcccagctgtgagcagaagcaggag

SEQ ID NO: 67070 - DNA, 26 bp, Homo sapiens
gcccagctgtgagcagaagcaggagc

SEQ ID NO: 67071 - DNA, 26 bp, Homo sapiens
cccagctgtgagcagaagcaggagct

SEQ ID NO: 67072 - DNA, 26 bp, Homo sapiens
ccagctgtgagcagaagcaggagctg

SEQ ID NO: 67073 - DNA, 26 bp, Homo sapiens
cagctgtgagcagaagcaggagctgc

SEQ ID NO: 67074 - DNA, 26 bp, Homo sapiens
agctgtgagcagaagcaggagctgcg

SEQ ID NO: 67075 - DNA, 26 bp, Homo sapiens
gctgtgagcagaagcaggagctgcgg

SEQ ID NO: 67076 - DNA, 26 bp, Homo sapiens
ctgtgagcagaagcaggagctgcggc

SEQ ID NO: 67077 - DNA, 26 bp, Homo sapiens
tgtgagcagaagcaggagctgcggca

SEQ ID NO: 67078 - DNA, 26 bp, Homo sapiens
gtgagcagaagcaggagctgcggcac

SEQ ID NO: 67079 - DNA, 26 bp, Homo sapiens
tgagcagaagcaggagctgcggcacg

SEQ ID NO: 67080 - DNA, 26 bp, Homo sapiens
gagcagaagcaggagctgcggcacgt

SEQ ID NO: 67081 - DNA, 26 bp, Homo sapiens
agcagaagcaggagctgcggcacgtg

SEQ ID NO: 67082 - DNA, 26 bp, Homo sapiens
gcagaagcaggagctgcggcacgtgt

SEQ ID NO: 67083 - DNA, 26 bp, Homo sapiens
cagaagcaggagctgcggcacgtgtt

SEQ ID NO: 67084 - DNA, 26 bp, Homo sapiens
agaagcaggagctgcggcacgtgttc

SEQ ID NO: 67085 - DNA, 26 bp, Homo sapiens
gaagcaggagctgcggcacgtgttca

SEQ ID NO: 67086 - DNA, 26 bp, Homo sapiens
aagcaggagctgcggcacgtgttcac

SEQ ID NO: 67087 - DNA, 26 bp, Homo sapiens
agcaggagctgcggcacgtgttcacg

SEQ ID NO: 67088 - DNA, 26 bp, Homo sapiens
gcaggagctgcggcacgtgttcacgg

SEQ ID NO: 67089 - DNA, 26 bp, Homo sapiens
caggagctgcggcacgtgttcacgga

SEQ ID NO: 67090 - DNA, 26 bp, Homo sapiens
aggagctgcggcacgtgttcacggat

SEQ ID NO: 67091 - DNA, 26 bp, Homo sapiens
ggagctgcggcacgtgttcacggatc

SEQ ID NO: 67092 - DNA, 26 bp, Homo sapiens
gagctgcggcacgtgttcacggatcc

SEQ ID NO: 67093 - DNA, 26 bp, Homo sapiens
agctgcggcacgtgttcacggatcct

SEQ ID NO: 67094 - DNA, 26 bp, Homo sapiens
gctgcggcacgtgttcacggatcctg

SEQ ID NO: 67095 - DNA, 26 bp, Homo sapiens
ctgcggcacgtgttcacggatcctgc

SEQ ID NO: 67096 - DNA, 26 bp, Homo sapiens
tgcggcacgtgttcacggatcctgct

SEQ ID NO: 67097 - DNA, 26 bp, Homo sapiens
gcggcacgtgttcacggatcctgctg

SEQ ID NO: 67098 - DNA, 26 bp, Homo sapiens
cggcacgtgttcacggatcctgctgc

SEQ ID NO: 67099 - DNA, 26 bp, Homo sapiens
ggcacgtgttcacggatcctgctgcc

SEQ ID NO: 67100 - DNA, 26 bp, Homo sapiens
gcacgtgttcacggatcctgctgccg

SEQ ID NO: 67101 - DNA, 26 bp, Homo sapiens
cacgtgttcacggatcctgctgccgc

SEQ ID NO: 67102 - DNA, 26 bp, Homo sapiens
acgtgttcacggatcctgctgccgcc

SEQ ID NO: 67103 - DNA, 26 bp, Homo sapiens
cgtgttcacggatcctgctgccgcca

SEQ ID NO: 67104 - DNA, 26 bp, Homo sapiens
gtgttcacggatcctgctgccgccag

SEQ ID NO: 67105 - DNA, 26 bp, Homo sapiens
tgttcacggatcctgctgccgccagc

SEQ ID NO: 67106 - DNA, 26 bp, Homo sapiens
gttcacggatcctgctgccgccagct

SEQ ID NO: 67107 - DNA, 26 bp, Homo sapiens
ttcacggatcctgctgccgccagctt

SEQ ID NO: 67108 - DNA, 26 bp, Homo sapiens
tcacggatcctgctgccgccagcttc

SEQ ID NO: 67109 - DNA, 26 bp, Homo sapiens
cacggatcctgctgccgccagcttcc

SEQ ID NO: 67110 - DNA, 26 bp, Homo sapiens
acggatcctgctgccgccagcttccg

SEQ ID NO: 67111 - DNA, 26 bp, Homo sapiens
cggatcctgctgccgccagcttccgt

SEQ ID NO: 67112 - DNA, 26 bp, Homo sapiens
ggatcctgctgccgccagcttccgtg

SEQ ID NO: 67113 - DNA, 26 bp, Homo sapiens
gatcctgctgccgccagcttccgtga

SEQ ID NO: 67114 - DNA, 26 bp, Homo sapiens
atcctgctgccgccagcttccgtgaa

SEQ ID NO: 67115 - DNA, 26 bp, Homo sapiens
tcctgctgccgccagcttccgtgaag

SEQ ID NO: 67116 - DNA, 26 bp, Homo sapiens
cctgctgccgccagcttccgtgaagt

SEQ ID NO: 67117 - DNA, 26 bp, Homo sapiens
ctgctgccgccagcttccgtgaagtg

SEQ ID NO: 67118 - DNA, 26 bp, Homo sapiens
tgctgccgccagcttccgtgaagtgg

SEQ ID NO: 67119 - DNA, 26 bp, Homo sapiens
gctgccgccagcttccgtgaagtggt

SEQ ID NO: 67120 - DNA, 26 bp, Homo sapiens
ctgccgccagcttccgtgaagtggtt

SEQ ID NO: 67121 - DNA, 26 bp, Homo sapiens
tgccgccagcttccgtgaagtggttg

SEQ ID NO: 67122 - DNA, 26 bp, Homo sapiens
gccgccagcttccgtgaagtggttgg

SEQ ID NO: 67123 - DNA, 26 bp, Homo sapiens
ccgccagcttccgtgaagtggttggc

SEQ ID NO: 67124 - DNA, 26 bp, Homo sapiens
cgccagcttccgtgaagtggttggca

SEQ ID NO: 67125 - DNA, 26 bp, Homo sapiens
gccagcttccgtgaagtggttggcat

SEQ ID NO: 67126 - DNA, 26 bp, Homo sapiens
ccagcttccgtgaagtggttggcata

SEQ ID NO: 67127 - DNA, 26 bp, Homo sapiens
cagcttccgtgaagtggttggcatag

SEQ ID NO: 67128 - DNA, 26 bp, Homo sapiens
agcttccgtgaagtggttggcataga

SEQ ID NO: 67129 - DNA, 26 bp, Homo sapiens
gcttccgtgaagtggttggcatagac

SEQ ID NO: 67130 - DNA, 26 bp, Homo sapiens
cttccgtgaagtggttggcatagaca

SEQ ID NO: 67131 - DNA, 26 bp, Homo sapiens
ttccgtgaagtggttggcatagacat

SEQ ID NO: 67132 - DNA, 26 bp, Homo sapiens
tccgtgaagtggttggcatagacata

SEQ ID NO: 67133 - DNA, 26 bp, Homo sapiens
ccgtgaagtggttggcatagacatag

SEQ ID NO: 67134 - DNA, 26 bp, Homo sapiens
cgtgaagtggttggcatagacatagc

SEQ ID NO: 67135 - DNA, 26 bp, Homo sapiens
gtgaagtggttggcatagacatagct

SEQ ID NO: 67136 - DNA, 26 bp, Homo sapiens
tgaagtggttggcatagacatagctt

SEQ ID NO: 67137 - DNA, 26 bp, Homo sapiens
gaagtggttggcatagacatagctta

SEQ ID NO: 67138 - DNA, 26 bp, Homo sapiens
aagtggttggcatagacatagcttag

SEQ ID NO: 67139 - DNA, 26 bp, Homo sapiens
agtggttggcatagacatagcttagg

SEQ ID NO: 67140 - DNA, 26 bp, Homo sapiens
gtggttggcatagacatagcttaggg

SEQ ID NO: 67141 - DNA, 26 bp, Homo sapiens
tggttggcatagacatagcttagggc

SEQ ID NO: 67142 - DNA, 26 bp, Homo sapiens
ggttggcatagacatagcttagggct

SEQ ID NO: 67143 - DNA, 26 bp, Homo sapiens
gttggcatagacatagcttagggctg

SEQ ID NO: 67144 - DNA, 26 bp, Homo sapiens
ttggcatagacatagcttagggctga

SEQ ID NO: 67145 - DNA, 26 bp, Homo sapiens
tggcatagacatagcttagggctgag

SEQ ID NO: 67146 - DNA, 26 bp, Homo sapiens
ggcatagacatagcttagggctgagc

SEQ ID NO: 67147 - DNA, 26 bp, Homo sapiens
gcatagacatagcttagggctgagcc

SEQ ID NO: 67148 - DNA, 26 bp, Homo sapiens
catagacatagcttagggctgagcct

SEQ ID NO: 67149 - DNA, 26 bp, Homo sapiens
atagacatagcttagggctgagcctg

SEQ ID NO: 67150 - DNA, 26 bp, Homo sapiens
tagacatagcttagggctgagcctgt

SEQ ID NO: 67151 - DNA, 26 bp, Homo sapiens
agacatagcttagggctgagcctgtg

SEQ ID NO: 67152 - DNA, 26 bp, Homo sapiens
gacatagcttagggctgagcctgtgt

SEQ ID NO: 67153 - DNA, 26 bp, Homo sapiens
acatagcttagggctgagcctgtgtt

SEQ ID NO: 67154 - DNA, 26 bp, Homo sapiens
catagcttagggctgagcctgtgttc

SEQ ID NO: 67155 - DNA, 26 bp, Homo sapiens
atagcttagggctgagcctgtgttca

SEQ ID NO: 67156 - DNA, 26 bp, Homo sapiens
tagcttagggctgagcctgtgttcag

SEQ ID NO: 67157 - DNA, 26 bp, Homo sapiens
agcttagggctgagcctgtgttcagg

SEQ ID NO: 67158 - DNA, 26 bp, Homo sapiens
gcttagggctgagcctgtgttcaggc

SEQ ID NO: 67159 - DNA, 26 bp, Homo sapiens
cttagggctgagcctgtgttcaggcc

SEQ ID NO: 67160 - DNA, 26 bp, Homo sapiens
ttagggctgagcctgtgttcaggccc

SEQ ID NO: 67161 - DNA, 26 bp, Homo sapiens
tagggctgagcctgtgttcaggcccg

SEQ ID NO: 67162 - DNA, 26 bp, Homo sapiens
agggctgagcctgtgttcaggcccga

SEQ ID NO: 67163 - DNA, 26 bp, Homo sapiens
gggctgagcctgtgttcaggcccgaa

SEQ ID NO: 67164 - DNA, 26 bp, Homo sapiens
ggctgagcctgtgttcaggcccgaac

SEQ ID NO: 67165 - DNA, 26 bp, Homo sapiens
gctgagcctgtgttcaggcccgaacc

SEQ ID NO: 67166 - DNA, 26 bp, Homo sapiens
ctgagcctgtgttcaggcccgaacct

SEQ ID NO: 67167 - DNA, 26 bp, Homo sapiens
tgagcctgtgttcaggcccgaacctc

SEQ ID NO: 67168 - DNA, 26 bp, Homo sapiens
gagcctgtgttcaggcccgaacctcc

SEQ ID NO: 67169 - DNA, 26 bp, Homo sapiens
agcctgtgttcaggcccgaacctccc

SEQ ID NO: 67170 - DNA, 26 bp, Homo sapiens
gcctgtgttcaggcccgaacctccct

SEQ ID NO: 67171 - DNA, 26 bp, Homo sapiens
cctgtgttcaggcccgaacctccctg

SEQ ID NO: 67172 - DNA, 26 bp, Homo sapiens
ctgtgttcaggcccgaacctccctgg

SEQ ID NO: 67173 - DNA, 26 bp, Homo sapiens
tgtgttcaggcccgaacctccctgga

SEQ ID NO: 67174 - DNA, 26 bp, Homo sapiens
gtgttcaggcccgaacctccctggag

SEQ ID NO: 67175 - DNA, 26 bp, Homo sapiens
tgttcaggcccgaacctccctggagc

SEQ ID NO: 67176 - DNA, 26 bp, Homo sapiens
gttcaggcccgaacctccctggagct

SEQ ID NO: 67177 - DNA, 26 bp, Homo sapiens
ttcaggcccgaacctccctggagctg

SEQ ID NO: 67178 - DNA, 26 bp, Homo sapiens
tcaggcccgaacctccctggagctgc

SEQ ID NO: 67179 - DNA, 26 bp, Homo sapiens
caggcccgaacctccctggagctgca

SEQ ID NO: 67180 - DNA, 26 bp, Homo sapiens
aggcccgaacctccctggagctgcag

SEQ ID NO: 67181 - DNA, 26 bp, Homo sapiens
ggcccgaacctccctggagctgcagc

SEQ ID NO: 67182 - DNA, 26 bp, Homo sapiens
gcccgaacctccctggagctgcagct

SEQ ID NO: 67183 - DNA, 26 bp, Homo sapiens
cccgaacctccctggagctgcagctg

SEQ ID NO: 67184 - DNA, 26 bp, Homo sapiens
ccgaacctccctggagctgcagctgc

SEQ ID NO: 67185 - DNA, 26 bp, Homo sapiens
cgaacctccctggagctgcagctgcc

SEQ ID NO: 67186 - DNA, 26 bp, Homo sapiens
gaacctccctggagctgcagctgcct

SEQ ID NO: 67187 - DNA, 26 bp, Homo sapiens
aacctccctggagctgcagctgcctc

SEQ ID NO: 67188 - DNA, 26 bp, Homo sapiens
acctccctggagctgcagctgcctca

SEQ ID NO: 67189 - DNA, 26 bp, Homo sapiens
cctccctggagctgcagctgcctcag

SEQ ID NO: 67190 - DNA, 26 bp, Homo sapiens
ctccctggagctgcagctgcctcaga

SEQ ID NO: 67191 - DNA, 26 bp, Homo sapiens
tccctggagctgcagctgcctcagat

SEQ ID NO: 67192 - DNA, 26 bp, Homo sapiens
ccctggagctgcagctgcctcagatg

SEQ ID NO: 67193 - DNA, 26 bp, Homo sapiens
cctggagctgcagctgcctcagatga

SEQ ID NO: 67194 - DNA, 26 bp, Homo sapiens
ctggagctgcagctgcctcagatgac

SEQ ID NO: 67195 - DNA, 26 bp, Homo sapiens
tggagctgcagctgcctcagatgacc

SEQ ID NO: 67196 - DNA, 26 bp, Homo sapiens
ggagctgcagctgcctcagatgacca

SEQ ID NO: 67197 - DNA, 26 bp, Homo sapiens
gagctgcagctgcctcagatgaccaa

SEQ ID NO: 67198 - DNA, 26 bp, Homo sapiens
agctgcagctgcctcagatgaccaag

SEQ ID NO: 67199 - DNA, 26 bp, Homo sapiens
gctgcagctgcctcagatgaccaagg

SEQ ID NO: 67200 - DNA, 26 bp, Homo sapiens
ctgcagctgcctcagatgaccaagga

SEQ ID NO: 67201 - DNA, 26 bp, Homo sapiens
tgcagctgcctcagatgaccaaggat

SEQ ID NO: 67202 - DNA, 26 bp, Homo sapiens
gcagctgcctcagatgaccaaggata

SEQ ID NO: 67203 - DNA, 26 bp, Homo sapiens
cagctgcctcagatgaccaaggatat

SEQ ID NO: 67204 - DNA, 26 bp, Homo sapiens
agctgcctcagatgaccaaggatatc

SEQ ID NO: 67205 - DNA, 26 bp, Homo sapiens
gctgcctcagatgaccaaggatatct

SEQ ID NO: 67206 - DNA, 26 bp, Homo sapiens
ctgcctcagatgaccaaggatatctg

SEQ ID NO: 67207 - DNA, 26 bp, Homo sapiens
tgcctcagatgaccaaggatatctga

SEQ ID NO: 67208 - DNA, 26 bp, Homo sapiens
gcctcagatgaccaaggatatctgac

SEQ ID NO: 67209 - DNA, 26 bp, Homo sapiens
cctcagatgaccaaggatatctgact

SEQ ID NO: 67210 - DNA, 26 bp, Homo sapiens
ctcagatgaccaaggatatctgactt

SEQ ID NO: 67211 - DNA, 26 bp, Homo sapiens
tcagatgaccaaggatatctgacttg

SEQ ID NO: 67212 - DNA, 26 bp, Homo sapiens
cagatgaccaaggatatctgacttgg

SEQ ID NO: 67213 - DNA, 26 bp, Homo sapiens
agatgaccaaggatatctgacttggt

SEQ ID NO: 67214 - DNA, 26 bp, Homo sapiens
gatgaccaaggatatctgacttggtc

SEQ ID NO: 67215 - DNA, 26 bp, Homo sapiens
atgaccaaggatatctgacttggtct

SEQ ID NO: 67216 - DNA, 26 bp, Homo sapiens
tgaccaaggatatctgacttggtctg

SEQ ID NO: 67217 - DNA, 26 bp, Homo sapiens
gaccaaggatatctgacttggtctgg

SEQ ID NO: 67218 - DNA, 26 bp, Homo sapiens
accaaggatatctgacttggtctggt

SEQ ID NO: 67219 - DNA, 26 bp, Homo sapiens
ccaaggatatctgacttggtctggta

SEQ ID NO: 67220 - DNA, 26 bp, Homo sapiens
caaggatatctgacttggtctggtat

SEQ ID NO: 67221 - DNA, 26 bp, Homo sapiens
aaggatatctgacttggtctggtatg

SEQ ID NO: 67222 - DNA, 26 bp, Homo sapiens
aggatatctgacttggtctggtatgt

SEQ ID NO: 67223 - DNA, 26 bp, Homo sapiens
ggatatctgacttggtctggtatgtg

SEQ ID NO: 67224 - DNA, 26 bp, Homo sapiens
gatatctgacttggtctggtatgtgt

SEQ ID NO: 67225 - DNA, 26 bp, Homo sapiens
atatctgacttggtctggtatgtgtt

SEQ ID NO: 67226 - DNA, 26 bp, Homo sapiens
tatctgacttggtctggtatgtgttt

SEQ ID NO: 67227 - DNA, 26 bp, Homo sapiens
atctgacttggtctggtatgtgttta

SEQ ID NO: 67228 - DNA, 26 bp, Homo sapiens
tctgacttggtctggtatgtgtttaa

SEQ ID NO: 67229 - DNA, 26 bp, Homo sapiens
ctgacttggtctggtatgtgtttaaa

SEQ ID NO: 67230 - DNA, 26 bp, Homo sapiens
tgacttggtctggtatgtgtttaaag

SEQ ID NO: 67231 - DNA, 26 bp, Homo sapiens
gacttggtctggtatgtgtttaaaga

SEQ ID NO: 67232 - DNA, 26 bp, Homo sapiens
acttggtctggtatgtgtttaaagag

SEQ ID NO: 67233 - DNA, 26 bp, Homo sapiens
cttggtctggtatgtgtttaaagaga

SEQ ID NO: 67234 - DNA, 26 bp, Homo sapiens
ttggtctggtatgtgtttaaagagaa

SEQ ID NO: 67235 - DNA, 26 bp, Homo sapiens
tggtctggtatgtgtttaaagagaac

SEQ ID NO: 67236 - DNA, 26 bp, Homo sapiens
ggtctggtatgtgtttaaagagaact

SEQ ID NO: 67237 - DNA, 26 bp, Homo sapiens
gtctggtatgtgtttaaagagaactc

SEQ ID NO: 67238 - DNA, 26 bp, Homo sapiens
tctggtatgtgtttaaagagaactcc

SEQ ID NO: 67239 - DNA, 26 bp, Homo sapiens
ctggtatgtgtttaaagagaactccg

SEQ ID NO: 67240 - DNA, 26 bp, Homo sapiens
tggtatgtgtttaaagagaactccgt

SEQ ID NO: 67241 - DNA, 26 bp, Homo sapiens
ggtatgtgtttaaagagaactccgtt

SEQ ID NO: 67242 - DNA, 26 bp, Homo sapiens
gtatgtgtttaaagagaactccgtta

SEQ ID NO: 67243 - DNA, 26 bp, Homo sapiens
tatgtgtttaaagagaactccgttac

SEQ ID NO: 67244 - DNA, 26 bp, Homo sapiens
atgtgtttaaagagaactccgttaca

SEQ ID NO: 67245 - DNA, 26 bp, Homo sapiens
tgtgtttaaagagaactccgttacag

SEQ ID NO: 67246 - DNA, 26 bp, Homo sapiens
gtgtttaaagagaactccgttacagg

SEQ ID NO: 67247 - DNA, 26 bp, Homo sapiens
tgtttaaagagaactccgttacagga

SEQ ID NO: 67248 - DNA, 26 bp, Homo sapiens
gtttaaagagaactccgttacaggag

SEQ ID NO: 67249 - DNA, 26 bp, Homo sapiens
tttaaagagaactccgttacaggagt

SEQ ID NO: 67250 - DNA, 26 bp, Homo sapiens
ttaaagagaactccgttacaggagtg

SEQ ID NO: 67251 - DNA, 26 bp, Homo sapiens
taaagagaactccgttacaggagtgt

SEQ ID NO: 67252 - DNA, 26 bp, Homo sapiens
aaagagaactccgttacaggagtgtc

SEQ ID NO: 67253 - DNA, 26 bp, Homo sapiens
aagagaactccgttacaggagtgtca

SEQ ID NO: 67254 - DNA, 26 bp, Homo sapiens
agagaactccgttacaggagtgtcac

SEQ ID NO: 67255 - DNA, 26 bp, Homo sapiens
gagaactccgttacaggagtgtcact

SEQ ID NO: 67256 - DNA, 26 bp, Homo sapiens
agaactccgttacaggagtgtcacta

SEQ ID NO: 67257 - DNA, 26 bp, Homo sapiens
gaactccgttacaggagtgtcactaa

SEQ ID NO: 67258 - DNA, 26 bp, Homo sapiens
aactccgttacaggagtgtcactaaa

SEQ ID NO: 67259 - DNA, 26 bp, Homo sapiens
actccgttacaggagtgtcactaaat

SEQ ID NO: 67260 - DNA, 26 bp, Homo sapiens
ctccgttacaggagtgtcactaaatt

SEQ ID NO: 67261 - DNA, 26 bp, Homo sapiens
tccgttacaggagtgtcactaaattg

SEQ ID NO: 67262 - DNA, 26 bp, Homo sapiens
ccgttacaggagtgtcactaaattgc

SEQ ID NO: 67263 - DNA, 26 bp, Homo sapiens
cgttacaggagtgtcactaaattgca

SEQ ID NO: 67264 - DNA, 26 bp, Homo sapiens
gttacaggagtgtcactaaattgcac

SEQ ID NO: 67265 - DNA, 26 bp, Homo sapiens
ttacaggagtgtcactaaattgcact

SEQ ID NO: 67266 - DNA, 26 bp, Homo sapiens
tacaggagtgtcactaaattgcacta

SEQ ID NO: 67267 - DNA, 26 bp, Homo sapiens
acaggagtgtcactaaattgcactaa

SEQ ID NO: 67268 - DNA, 26 bp, Homo sapiens
caggagtgtcactaaattgcactaaa

SEQ ID NO: 67269 - DNA, 26 bp, Homo sapiens
aggagtgtcactaaattgcactaaac

SEQ ID NO: 67270 - DNA, 26 bp, Homo sapiens
ggagtgtcactaaattgcactaaacc

SEQ ID NO: 67271 - DNA, 26 bp, Homo sapiens
gagtgtcactaaattgcactaaacca

SEQ ID NO: 67272 - DNA, 26 bp, Homo sapiens
agtgtcactaaattgcactaaaccaa

SEQ ID NO: 67273 - DNA, 26 bp, Homo sapiens
gtgtcactaaattgcactaaaccaac

SEQ ID NO: 67274 - DNA, 26 bp, Homo sapiens
tgtcactaaattgcactaaaccaaca

SEQ ID NO: 67275 - DNA, 26 bp, Homo sapiens
gtcactaaattgcactaaaccaacac

SEQ ID NO: 67276 - DNA, 26 bp, Homo sapiens
tcactaaattgcactaaaccaacacg

SEQ ID NO: 67277 - DNA, 26 bp, Homo sapiens
cactaaattgcactaaaccaacacga

SEQ ID NO: 67278 - DNA, 26 bp, Homo sapiens
actaaattgcactaaaccaacacgaa

SEQ ID NO: 67279 - DNA, 26 bp, Homo sapiens
ctaaattgcactaaaccaacacgaat

SEQ ID NO: 67280 - DNA, 26 bp, Homo sapiens
taaattgcactaaaccaacacgaata

SEQ ID NO: 67281 - DNA, 26 bp, Homo sapiens
aaattgcactaaaccaacacgaatat

SEQ ID NO: 67282 - DNA, 26 bp, Homo sapiens
aattgcactaaaccaacacgaatatt

SEQ ID NO: 67283 - DNA, 26 bp, Homo sapiens
attgcactaaaccaacacgaatattg

SEQ ID NO: 67284 - DNA, 26 bp, Homo sapiens
ttgcactaaaccaacacgaatattgt

SEQ ID NO: 67285 - DNA, 26 bp, Homo sapiens
tgcactaaaccaacacgaatattgtc

SEQ ID NO: 67286 - DNA, 26 bp, Homo sapiens
gcactaaaccaacacgaatattgtca

SEQ ID NO: 67287 - DNA, 26 bp, Homo sapiens
cactaaaccaacacgaatattgtcat

SEQ ID NO: 67288 - DNA, 26 bp, Homo sapiens
actaaaccaacacgaatattgtcatt

SEQ ID NO: 67289 - DNA, 26 bp, Homo sapiens
ctaaaccaacacgaatattgtcattt

SEQ ID NO: 67290 - DNA, 26 bp, Homo sapiens
taaaccaacacgaatattgtcatttc

SEQ ID NO: 67291 - DNA, 26 bp, Homo sapiens
aaaccaacacgaatattgtcatttcc

SEQ ID NO: 67292 - DNA, 26 bp, Homo sapiens
aaccaacacgaatattgtcatttcca

SEQ ID NO: 67293 - DNA, 26 bp, Homo sapiens
accaacacgaatattgtcatttccaa

SEQ ID NO: 67294 - DNA, 26 bp, Homo sapiens
ccaacacgaatattgtcatttccaat

SEQ ID NO: 67295 - DNA, 26 bp, Homo sapiens
caacacgaatattgtcatttccaata

SEQ ID NO: 67296 - DNA, 26 bp, Homo sapiens
aacacgaatattgtcatttccaatat

SEQ ID NO: 67297 - DNA, 26 bp, Homo sapiens
acacgaatattgtcatttccaatatc

SEQ ID NO: 67298 - DNA, 26 bp, Homo sapiens
cacgaatattgtcatttccaatatca

SEQ ID NO: 67299 - DNA, 26 bp, Homo sapiens
acgaatattgtcatttccaatatcaa

SEQ ID NO: 67300 - DNA, 26 bp, Homo sapiens
cgaatattgtcatttccaatatcaag

SEQ ID NO: 67301 - DNA, 26 bp, Homo sapiens
gaatattgtcatttccaatatcaagg

SEQ ID NO: 67302 - DNA, 26 bp, Homo sapiens
aatattgtcatttccaatatcaaggc

SEQ ID NO: 67303 - DNA, 26 bp, Homo sapiens
atattgtcatttccaatatcaaggct

SEQ ID NO: 67304 - DNA, 26 bp, Homo sapiens
tattgtcatttccaatatcaaggctg

SEQ ID NO: 67305 - DNA, 26 bp, Homo sapiens
attgtcatttccaatatcaaggctgt

SEQ ID NO: 67306 - DNA, 26 bp, Homo sapiens
ttgtcatttccaatatcaaggctgtt

SEQ ID NO: 67307 - DNA, 26 bp, Homo sapiens
tgtcatttccaatatcaaggctgtta

SEQ ID NO: 67308 - DNA, 26 bp, Homo sapiens
gtcatttccaatatcaaggctgttaa

SEQ ID NO: 67309 - DNA, 26 bp, Homo sapiens
tcatttccaatatcaaggctgttaac

SEQ ID NO: 67310 - DNA, 26 bp, Homo sapiens
catttccaatatcaaggctgttaact

SEQ ID NO: 67311 - DNA, 26 bp, Homo sapiens
atttccaatatcaaggctgttaacta

SEQ ID NO: 67312 - DNA, 26 bp, Homo sapiens
tttccaatatcaaggctgttaactag

SEQ ID NO: 67313 - DNA, 26 bp, Homo sapiens
ttccaatatcaaggctgttaactagg

SEQ ID NO: 67314 - DNA, 26 bp, Homo sapiens
tccaatatcaaggctgttaactaggt

SEQ ID NO: 67315 - DNA, 26 bp, Homo sapiens
ccaatatcaaggctgttaactaggtt

SEQ ID NO: 67316 - DNA, 26 bp, Homo sapiens
caatatcaaggctgttaactaggttc

SEQ ID NO: 67317 - DNA, 26 bp, Homo sapiens
aatatcaaggctgttaactaggttca

SEQ ID NO: 67318 - DNA, 26 bp, Homo sapiens
atatcaaggctgttaactaggttcat

SEQ ID NO: 67319 - DNA, 26 bp, Homo sapiens
tatcaaggctgttaactaggttcatt

SEQ ID NO: 67320 - DNA, 26 bp, Homo sapiens
atcaaggctgttaactaggttcatta

SEQ ID NO: 67321 - DNA, 26 bp, Homo sapiens
tcaaggctgttaactaggttcattac

SEQ ID NO: 67322 - DNA, 26 bp, Homo sapiens
caaggctgttaactaggttcattaca

SEQ ID NO: 67323 - DNA, 26 bp, Homo sapiens
aaggctgttaactaggttcattacaa

SEQ ID NO: 67324 - DNA, 26 bp, Homo sapiens
aggctgttaactaggttcattacaaa

SEQ ID NO: 67325 - DNA, 26 bp, Homo sapiens
ggctgttaactaggttcattacaaag

SEQ ID NO: 67326 - DNA, 26 bp, Homo sapiens
gctgttaactaggttcattacaaagt

SEQ ID NO: 67327 - DNA, 26 bp, Homo sapiens
ctgttaactaggttcattacaaagtc

SEQ ID NO: 67328 - DNA, 26 bp, Homo sapiens
tgttaactaggttcattacaaagtcg

SEQ ID NO: 67329 - DNA, 26 bp, Homo sapiens
gttaactaggttcattacaaagtcgc

SEQ ID NO: 67330 - DNA, 26 bp, Homo sapiens
ttaactaggttcattacaaagtcgcg

SEQ ID NO: 67331 - DNA, 26 bp, Homo sapiens
taactaggttcattacaaagtcgcgc

SEQ ID NO: 67332 - DNA, 26 bp, Homo sapiens
aactaggttcattacaaagtcgcgca

SEQ ID NO: 67333 - DNA, 26 bp, Homo sapiens
actaggttcattacaaagtcgcgcac

SEQ ID NO: 67334 - DNA, 26 bp, Homo sapiens
ctaggttcattacaaagtcgcgcaca

SEQ ID NO: 67335 - DNA, 26 bp, Homo sapiens
taggttcattacaaagtcgcgcacat

SEQ ID NO: 67336 - DNA, 26 bp, Homo sapiens
aggttcattacaaagtcgcgcacata

SEQ ID NO: 67337 - DNA, 26 bp, Homo sapiens
ggttcattacaaagtcgcgcacataa

SEQ ID NO: 67338 - DNA, 26 bp, Homo sapiens
gttcattacaaagtcgcgcacataag

SEQ ID NO: 67339 - DNA, 26 bp, Homo sapiens
ttcattacaaagtcgcgcacataagg

SEQ ID NO: 67340 - DNA, 26 bp, Homo sapiens
tcattacaaagtcgcgcacataaggg

SEQ ID NO: 67341 - DNA, 26 bp, Homo sapiens
cattacaaagtcgcgcacataaggga

SEQ ID NO: 67342 - DNA, 26 bp, Homo sapiens
attacaaagtcgcgcacataagggaa

SEQ ID NO: 67343 - DNA, 26 bp, Homo sapiens
ttacaaagtcgcgcacataagggaaa

SEQ ID NO: 67344 - DNA, 26 bp, Homo sapiens
tacaaagtcgcgcacataagggaaat

SEQ ID NO: 67345 - DNA, 26 bp, Homo sapiens
acaaagtcgcgcacataagggaaatt

SEQ ID NO: 67346 - DNA, 26 bp, Homo sapiens
caaagtcgcgcacataagggaaattg

SEQ ID NO: 67347 - DNA, 26 bp, Homo sapiens
aaagtcgcgcacataagggaaattgg

SEQ ID NO: 67348 - DNA, 26 bp, Homo sapiens
aagtcgcgcacataagggaaattggt

SEQ ID NO: 67349 - DNA, 26 bp, Homo sapiens
agtcgcgcacataagggaaattggtt

SEQ ID NO: 67350 - DNA, 26 bp, Homo sapiens
gtcgcgcacataagggaaattggttt

SEQ ID NO: 67351 - DNA, 26 bp, Homo sapiens
tcgcgcacataagggaaattggtttt

SEQ ID NO: 67352 - DNA, 26 bp, Homo sapiens
cgcgcacataagggaaattggttttt

SEQ ID NO: 67353 - DNA, 26 bp, Homo sapiens
gcgcacataagggaaattggtttttc

SEQ ID NO: 67354 - DNA, 26 bp, Homo sapiens
cgcacataagggaaattggtttttcc

SEQ ID NO: 67355 - DNA, 26 bp, Homo sapiens
gcacataagggaaattggtttttcca

SEQ ID NO: 67356 - DNA, 26 bp, Homo sapiens
cacataagggaaattggtttttccaa

SEQ ID NO: 67357 - DNA, 26 bp, Homo sapiens
acataagggaaattggtttttccaac

SEQ ID NO: 67358 - DNA, 26 bp, Homo sapiens
cataagggaaattggtttttccaacg

SEQ ID NO: 67359 - DNA, 26 bp, Homo sapiens
ataagggaaattggtttttccaacgt

SEQ ID NO: 67360 - DNA, 26 bp, Homo sapiens
taagggaaattggtttttccaacgtt

SEQ ID NO: 67361 - DNA, 26 bp, Homo sapiens
aagggaaattggtttttccaacgttg

SEQ ID NO: 67362 - DNA, 26 bp, Homo sapiens
agggaaattggtttttccaacgttgg

SEQ ID NO: 67363 - DNA, 26 bp, Homo sapiens
gggaaattggtttttccaacgttggc

SEQ ID NO: 67364 - DNA, 26 bp, Homo sapiens
ggaaattggtttttccaacgttggct

SEQ ID NO: 67365 - DNA, 26 bp, Homo sapiens
gaaattggtttttccaacgttggctg

SEQ ID NO: 67366 - DNA, 26 bp, Homo sapiens
aaattggtttttccaacgttggctga

SEQ ID NO: 67367 - DNA, 26 bp, Homo sapiens
aattggtttttccaacgttggctgat

SEQ ID NO: 67368 - DNA, 26 bp, Homo sapiens
attggtttttccaacgttggctgatc

SEQ ID NO: 67369 - DNA, 26 bp, Homo sapiens
ttggtttttccaacgttggctgatcc

SEQ ID NO: 67370 - DNA, 26 bp, Homo sapiens
tggtttttccaacgttggctgatcca

SEQ ID NO: 67371 - DNA, 26 bp, Homo sapiens
ggtttttccaacgttggctgatccat

SEQ ID NO: 67372 - DNA, 26 bp, Homo sapiens
gtttttccaacgttggctgatccatc

SEQ ID NO: 67373 - DNA, 26 bp, Homo sapiens
tttttccaacgttggctgatccatcc

SEQ ID NO: 67374 - DNA, 26 bp, Homo sapiens
ttttccaacgttggctgatccatcca

SEQ ID NO: 67375 - DNA, 26 bp, Homo sapiens
tttccaacgttggctgatccatccaa

SEQ ID NO: 67376 - DNA, 26 bp, Homo sapiens
ttccaacgttggctgatccatccaaa

SEQ ID NO: 67377 - DNA, 26 bp, Homo sapiens
tccaacgttggctgatccatccaaaa

SEQ ID NO: 67378 - DNA, 26 bp, Homo sapiens
ccaacgttggctgatccatccaaaag

SEQ ID NO: 67379 - DNA, 26 bp, Homo sapiens
caacgttggctgatccatccaaaaga

SEQ ID NO: 67380 - DNA, 26 bp, Homo sapiens
aacgttggctgatccatccaaaagaa

SEQ ID NO: 67381 - DNA, 26 bp, Homo sapiens
acgttggctgatccatccaaaagaaa

SEQ ID NO: 67382 - DNA, 26 bp, Homo sapiens
cgttggctgatccatccaaaagaaag

SEQ ID NO: 67383 - DNA, 26 bp, Homo sapiens
gttggctgatccatccaaaagaaaga

SEQ ID NO: 67384 - DNA, 26 bp, Homo sapiens
ttggctgatccatccaaaagaaagat

SEQ ID NO: 67385 - DNA, 26 bp, Homo sapiens
tggctgatccatccaaaagaaagatg

SEQ ID NO: 67386 - DNA, 26 bp, Homo sapiens
ggctgatccatccaaaagaaagatga

SEQ ID NO: 67387 - DNA, 26 bp, Homo sapiens
gctgatccatccaaaagaaagatgat

SEQ ID NO: 67388 - DNA, 26 bp, Homo sapiens
ctgatccatccaaaagaaagatgata

SEQ ID NO: 67389 - DNA, 26 bp, Homo sapiens
tgatccatccaaaagaaagatgatat

SEQ ID NO: 67390 - DNA, 26 bp, Homo sapiens
gatccatccaaaagaaagatgatatc

SEQ ID NO: 67391 - DNA, 26 bp, Homo sapiens
atccatccaaaagaaagatgatatcc

SEQ ID NO: 67392 - DNA, 26 bp, Homo sapiens
tccatccaaaagaaagatgatatccc

SEQ ID NO: 67393 - DNA, 26 bp, Homo sapiens
ccatccaaaagaaagatgatatccct

SEQ ID NO: 67394 - DNA, 26 bp, Homo sapiens
catccaaaagaaagatgatatccctt

SEQ ID NO: 67395 - DNA, 26 bp, Homo sapiens
atccaaaagaaagatgatatcccttt

SEQ ID NO: 67396 - DNA, 26 bp, Homo sapiens
tccaaaagaaagatgatatccctttt

SEQ ID NO: 67397 - DNA, 26 bp, Homo sapiens
ccaaaagaaagatgatatcccttttg

SEQ ID NO: 67398 - DNA, 26 bp, Homo sapiens
caaaagaaagatgatatcccttttgt

SEQ ID NO: 67399 - DNA, 26 bp, Homo sapiens
aaaagaaagatgatatcccttttgtt

SEQ ID NO: 67400 - DNA, 26 bp, Homo sapiens
aaagaaagatgatatcccttttgttt

SEQ ID NO: 67401 - DNA, 26 bp, Homo sapiens
aagaaagatgatatcccttttgtttg

SEQ ID NO: 67402 - DNA, 26 bp, Homo sapiens
agaaagatgatatcccttttgtttga

SEQ ID NO: 67403 - DNA, 26 bp, Homo sapiens
gaaagatgatatcccttttgtttgag

SEQ ID NO: 67404 - DNA, 26 bp, Homo sapiens
aaagatgatatcccttttgtttgagt

SEQ ID NO: 67405 - DNA, 26 bp, Homo sapiens
aagatgatatcccttttgtttgagtg

SEQ ID NO: 67406 - DNA, 26 bp, Homo sapiens
agatgatatcccttttgtttgagtga

SEQ ID NO: 67407 - DNA, 26 bp, Homo sapiens
gatgatatcccttttgtttgagtgaa

SEQ ID NO: 67408 - DNA, 26 bp, Homo sapiens
atgatatcccttttgtttgagtgaac

SEQ ID NO: 67409 - DNA, 26 bp, Homo sapiens
tgatatcccttttgtttgagtgaact

SEQ ID NO: 67410 - DNA, 26 bp, Homo sapiens
gatatcccttttgtttgagtgaactt

SEQ ID NO: 67411 - DNA, 26 bp, Homo sapiens
atatcccttttgtttgagtgaacttc

SEQ ID NO: 67412 - DNA, 26 bp, Homo sapiens
tatcccttttgtttgagtgaacttca

SEQ ID NO: 67413 - DNA, 26 bp, Homo sapiens
atcccttttgtttgagtgaacttcag

SEQ ID NO: 67414 - DNA, 26 bp, Homo sapiens
tcccttttgtttgagtgaacttcagg

SEQ ID NO: 67415 - DNA, 26 bp, Homo sapiens
cccttttgtttgagtgaacttcaggg

SEQ ID NO: 67416 - DNA, 26 bp, Homo sapiens
ccttttgtttgagtgaacttcagggg

SEQ ID NO: 67417 - DNA, 26 bp, Homo sapiens
cttttgtttgagtgaacttcaggggt

SEQ ID NO: 67418 - DNA, 26 bp, Homo sapiens
ttttgtttgagtgaacttcaggggtt

SEQ ID NO: 67419 - DNA, 26 bp, Homo sapiens
tttgtttgagtgaacttcaggggttc

SEQ ID NO: 67420 - DNA, 26 bp, Homo sapiens
ttgtttgagtgaacttcaggggttcc

SEQ ID NO: 67421 - DNA, 26 bp, Homo sapiens
tgtttgagtgaacttcaggggttcca

SEQ ID NO: 67422 - DNA, 26 bp, Homo sapiens
gtttgagtgaacttcaggggttccag

SEQ ID NO: 67423 - DNA, 26 bp, Homo sapiens
tttgagtgaacttcaggggttccaga

SEQ ID NO: 67424 - DNA, 26 bp, Homo sapiens
ttgagtgaacttcaggggttccagag

SEQ ID NO: 67425 - DNA, 26 bp, Homo sapiens
tgagtgaacttcaggggttccagaga

SEQ ID NO: 67426 - DNA, 26 bp, Homo sapiens
gagtgaacttcaggggttccagagag

SEQ ID NO: 67427 - DNA, 26 bp, Homo sapiens
agtgaacttcaggggttccagagagg

SEQ ID NO: 67428 - DNA, 26 bp, Homo sapiens
gtgaacttcaggggttccagagaggg

SEQ ID NO: 67429 - DNA, 26 bp, Homo sapiens
tgaacttcaggggttccagagagggt

SEQ ID NO: 67430 - DNA, 26 bp, Homo sapiens
gaacttcaggggttccagagagggtc

SEQ ID NO: 67431 - DNA, 26 bp, Homo sapiens
aacttcaggggttccagagagggtcc

SEQ ID NO: 67432 - DNA, 26 bp, Homo sapiens
acttcaggggttccagagagggtcct

SEQ ID NO: 67433 - DNA, 26 bp, Homo sapiens
cttcaggggttccagagagggtcctg

SEQ ID NO: 67434 - DNA, 26 bp, Homo sapiens
ttcaggggttccagagagggtcctga

SEQ ID NO: 67435 - DNA, 26 bp, Homo sapiens
tcaggggttccagagagggtcctgag

SEQ ID NO: 67436 - DNA, 26 bp, Homo sapiens
caggggttccagagagggtcctgaga

SEQ ID NO: 67437 - DNA, 26 bp, Homo sapiens
aggggttccagagagggtcctgagag

SEQ ID NO: 67438 - DNA, 26 bp, Homo sapiens
ggggttccagagagggtcctgagagg

SEQ ID NO: 67439 - DNA, 26 bp, Homo sapiens
gggttccagagagggtcctgagaggt

SEQ ID NO: 67440 - DNA, 26 bp, Homo sapiens
ggttccagagagggtcctgagaggtg

SEQ ID NO: 67441 - DNA, 26 bp, Homo sapiens
gttccagagagggtcctgagaggtgc

SEQ ID NO: 67442 - DNA, 26 bp, Homo sapiens
ttccagagagggtcctgagaggtgcc

SEQ ID NO: 67443 - DNA, 26 bp, Homo sapiens
tccagagagggtcctgagaggtgcca

SEQ ID NO: 67444 - DNA, 26 bp, Homo sapiens
ccagagagggtcctgagaggtgccag

SEQ ID NO: 67445 - DNA, 26 bp, Homo sapiens
cagagagggtcctgagaggtgccagc

SEQ ID NO: 67446 - DNA, 26 bp, Homo sapiens
agagagggtcctgagaggtgccagca

SEQ ID NO: 67447 - DNA, 26 bp, Homo sapiens
gagagggtcctgagaggtgccagcaa

SEQ ID NO: 67448 - DNA, 26 bp, Homo sapiens
agagggtcctgagaggtgccagcaag

SEQ ID NO: 67449 - DNA, 26 bp, Homo sapiens
gagggtcctgagaggtgccagcaagc

SEQ ID NO: 67450 - DNA, 26 bp, Homo sapiens
agggtcctgagaggtgccagcaagcc

SEQ ID NO: 67451 - DNA, 26 bp, Homo sapiens
gggtcctgagaggtgccagcaagcca

SEQ ID NO: 67452 - DNA, 26 bp, Homo sapiens
ggtcctgagaggtgccagcaagccag

SEQ ID NO: 67453 - DNA, 26 bp, Homo sapiens
gtcctgagaggtgccagcaagccagg

SEQ ID NO: 67454 - DNA, 26 bp, Homo sapiens
tcctgagaggtgccagcaagccaggc

SEQ ID NO: 67455 - DNA, 26 bp, Homo sapiens
cctgagaggtgccagcaagccaggca

SEQ ID NO: 67456 - DNA, 26 bp, Homo sapiens
ctgagaggtgccagcaagccaggcag

SEQ ID NO: 67457 - DNA, 26 bp, Homo sapiens
tgagaggtgccagcaagccaggcagc

SEQ ID NO: 67458 - DNA, 26 bp, Homo sapiens
gagaggtgccagcaagccaggcagca

SEQ ID NO: 67459 - DNA, 26 bp, Homo sapiens
agaggtgccagcaagccaggcagcat

SEQ ID NO: 67460 - DNA, 26 bp, Homo sapiens
gaggtgccagcaagccaggcagcatg

SEQ ID NO: 67461 - DNA, 26 bp, Homo sapiens
aggtgccagcaagccaggcagcatgc

SEQ ID NO: 67462 - DNA, 26 bp, Homo sapiens
ggtgccagcaagccaggcagcatgcc

SEQ ID NO: 67463 - DNA, 26 bp, Homo sapiens
gtgccagcaagccaggcagcatgcct

SEQ ID NO: 67464 - DNA, 26 bp, Homo sapiens
tgccagcaagccaggcagcatgcctt

SEQ ID NO: 67465 - DNA, 26 bp, Homo sapiens
gccagcaagccaggcagcatgccttg

SEQ ID NO: 67466 - DNA, 26 bp, Homo sapiens
ccagcaagccaggcagcatgccttgc

SEQ ID NO: 67467 - DNA, 26 bp, Homo sapiens
cagcaagccaggcagcatgccttgca

SEQ ID NO: 67468 - DNA, 26 bp, Homo sapiens
agcaagccaggcagcatgccttgcaa

SEQ ID NO: 67469 - DNA, 26 bp, Homo sapiens
gcaagccaggcagcatgccttgcaat

SEQ ID NO: 67470 - DNA, 26 bp, Homo sapiens
caagccaggcagcatgccttgcaatg

SEQ ID NO: 67471 - DNA, 26 bp, Homo sapiens
aagccaggcagcatgccttgcaatgg

SEQ ID NO: 67472 - DNA, 26 bp, Homo sapiens
agccaggcagcatgccttgcaatggg

SEQ ID NO: 67473 - DNA, 26 bp, Homo sapiens
gccaggcagcatgccttgcaatgggg

SEQ ID NO: 67474 - DNA, 26 bp, Homo sapiens
ccaggcagcatgccttgcaatggggc

SEQ ID NO: 67475 - DNA, 26 bp, Homo sapiens
caggcagcatgccttgcaatggggcg

SEQ ID NO: 67476 - DNA, 26 bp, Homo sapiens
aggcagcatgccttgcaatggggcgg

SEQ ID NO: 67477 - DNA, 26 bp, Homo sapiens
ggcagcatgccttgcaatggggcggc

SEQ ID NO: 67478 - DNA, 26 bp, Homo sapiens
gcagcatgccttgcaatggggcggct

SEQ ID NO: 67479 - DNA, 26 bp, Homo sapiens
cagcatgccttgcaatggggcggctc

SEQ ID NO: 67480 - DNA, 26 bp, Homo sapiens
agcatgccttgcaatggggcggctcg

SEQ ID NO: 67481 - DNA, 26 bp, Homo sapiens
gcatgccttgcaatggggcggctcgg

SEQ ID NO: 67482 - DNA, 26 bp, Homo sapiens
catgccttgcaatggggcggctcgga

SEQ ID NO: 67483 - DNA, 26 bp, Homo sapiens
atgccttgcaatggggcggctcggaa

SEQ ID NO: 67484 - DNA, 26 bp, Homo sapiens
tgccttgcaatggggcggctcggaac

SEQ ID NO: 67485 - DNA, 26 bp, Homo sapiens
gccttgcaatggggcggctcggaact

SEQ ID NO: 67486 - DNA, 26 bp, Homo sapiens
ccttgcaatggggcggctcggaactc

SEQ ID NO: 67487 - DNA, 26 bp, Homo sapiens
cttgcaatggggcggctcggaactca

SEQ ID NO: 67488 - DNA, 26 bp, Homo sapiens
ttgcaatggggcggctcggaactcag

SEQ ID NO: 67489 - DNA, 26 bp, Homo sapiens
tgcaatggggcggctcggaactcagc

SEQ ID NO: 67490 - DNA, 26 bp, Homo sapiens
gcaatggggcggctcggaactcagct

SEQ ID NO: 67491 - DNA, 26 bp, Homo sapiens
caatggggcggctcggaactcagctg

SEQ ID NO: 67492 - DNA, 26 bp, Homo sapiens
aatggggcggctcggaactcagctgg

SEQ ID NO: 67493 - DNA, 26 bp, Homo sapiens
atggggcggctcggaactcagctggg

SEQ ID NO: 67494 - DNA, 26 bp, Homo sapiens
tggggcggctcggaactcagctggga

SEQ ID NO: 67495 - DNA, 26 bp, Homo sapiens
ggggcggctcggaactcagctgggat

SEQ ID NO: 67496 - DNA, 26 bp, Homo sapiens
gggcggctcggaactcagctgggatg

SEQ ID NO: 67497 - DNA, 26 bp, Homo sapiens
ggcggctcggaactcagctgggatga

SEQ ID NO: 67498 - DNA, 26 bp, Homo sapiens
gcggctcggaactcagctgggatgaa

SEQ ID NO: 67499 - DNA, 26 bp, Homo sapiens
cggctcggaactcagctgggatgaac

SEQ ID NO: 67500 - DNA, 26 bp, Homo sapiens
ggctcggaactcagctgggatgaaca

SEQ ID NO: 67501 - DNA, 26 bp, Homo sapiens
gctcggaactcagctgggatgaacac

SEQ ID NO: 67502 - DNA, 26 bp, Homo sapiens
ctcggaactcagctgggatgaacacc

SEQ ID NO: 67503 - DNA, 26 bp, Homo sapiens
tcggaactcagctgggatgaacacca

SEQ ID NO: 67504 - DNA, 26 bp, Homo sapiens
cggaactcagctgggatgaacaccag

SEQ ID NO: 67505 - DNA, 26 bp, Homo sapiens
ggaactcagctgggatgaacaccagg

SEQ ID NO: 67506 - DNA, 26 bp, Homo sapiens
gaactcagctgggatgaacaccaggg

SEQ ID NO: 67507 - DNA, 26 bp, Homo sapiens
aactcagctgggatgaacaccaggga

SEQ ID NO: 67508 - DNA, 26 bp, Homo sapiens
actcagctgggatgaacaccagggag

SEQ ID NO: 67509 - DNA, 26 bp, Homo sapiens
ctcagctgggatgaacaccagggagg

SEQ ID NO: 67510 - DNA, 26 bp, Homo sapiens
tcagctgggatgaacaccagggagga

SEQ ID NO: 67511 - DNA, 26 bp, Homo sapiens
cagctgggatgaacaccagggaggag

SEQ ID NO: 67512 - DNA, 26 bp, Homo sapiens
agctgggatgaacaccagggaggagt

SEQ ID NO: 67513 - DNA, 26 bp, Homo sapiens
gctgggatgaacaccagggaggagtc

SEQ ID NO: 67514 - DNA, 26 bp, Homo sapiens
ctgggatgaacaccagggaggagtcg

SEQ ID NO: 67515 - DNA, 26 bp, Homo sapiens
tgggatgaacaccagggaggagtcga

SEQ ID NO: 67516 - DNA, 26 bp, Homo sapiens
gggatgaacaccagggaggagtcgaa

SEQ ID NO: 67517 - DNA, 26 bp, Homo sapiens
ggatgaacaccagggaggagtcgaaa

SEQ ID NO: 67518 - DNA, 26 bp, Homo sapiens
gatgaacaccagggaggagtcgaaag

SEQ ID NO: 67519 - DNA, 26 bp, Homo sapiens
atgaacaccagggaggagtcgaaagc

SEQ ID NO: 67520 - DNA, 26 bp, Homo sapiens
tgaacaccagggaggagtcgaaagcg

SEQ ID NO: 67521 - DNA, 26 bp, Homo sapiens
gaacaccagggaggagtcgaaagcga

SEQ ID NO: 67522 - DNA, 26 bp, Homo sapiens
aacaccagggaggagtcgaaagcgat

SEQ ID NO: 67523 - DNA, 26 bp, Homo sapiens
acaccagggaggagtcgaaagcgatc

SEQ ID NO: 67524 - DNA, 26 bp, Homo sapiens
caccagggaggagtcgaaagcgatct

SEQ ID NO: 67525 - DNA, 26 bp, Homo sapiens
accagggaggagtcgaaagcgatctc

SEQ ID NO: 67526 - DNA, 26 bp, Homo sapiens
ccagggaggagtcgaaagcgatctct

SEQ ID NO: 67527 - DNA, 26 bp, Homo sapiens
cagggaggagtcgaaagcgatctctt

SEQ ID NO: 67528 - DNA, 26 bp, Homo sapiens
agggaggagtcgaaagcgatctcttc

SEQ ID NO: 67529 - DNA, 26 bp, Homo sapiens
gggaggagtcgaaagcgatctcttcc

SEQ ID NO: 67530 - DNA, 26 bp, Homo sapiens
ggaggagtcgaaagcgatctcttcca

SEQ ID NO: 67531 - DNA, 26 bp, Homo sapiens
gaggagtcgaaagcgatctcttccag

SEQ ID NO: 67532 - DNA, 26 bp, Homo sapiens
aggagtcgaaagcgatctcttccagc

SEQ ID NO: 67533 - DNA, 26 bp, Homo sapiens
ggagtcgaaagcgatctcttccagct

SEQ ID NO: 67534 - DNA, 26 bp, Homo sapiens
gagtcgaaagcgatctcttccagctc

SEQ ID NO: 67535 - DNA, 26 bp, Homo sapiens
agtcgaaagcgatctcttccagctca

SEQ ID NO: 67536 - DNA, 26 bp, Homo sapiens
gtcgaaagcgatctcttccagctcag

SEQ ID NO: 67537 - DNA, 26 bp, Homo sapiens
tcgaaagcgatctcttccagctcagc

SEQ ID NO: 67538 - DNA, 26 bp, Homo sapiens
cgaaagcgatctcttccagctcagcc

SEQ ID NO: 67539 - DNA, 26 bp, Homo sapiens
gaaagcgatctcttccagctcagcct

SEQ ID NO: 67540 - DNA, 26 bp, Homo sapiens
aaagcgatctcttccagctcagcctg

SEQ ID NO: 67541 - DNA, 26 bp, Homo sapiens
aagcgatctcttccagctcagcctga

SEQ ID NO: 67542 - DNA, 26 bp, Homo sapiens
agcgatctcttccagctcagcctgat

SEQ ID NO: 67543 - DNA, 26 bp, Homo sapiens
gcgatctcttccagctcagcctgatc

SEQ ID NO: 67544 - DNA, 26 bp, Homo sapiens
cgatctcttccagctcagcctgatcg

SEQ ID NO: 67545 - DNA, 26 bp, Homo sapiens
gatctcttccagctcagcctgatcgg

SEQ ID NO: 67546 - DNA, 26 bp, Homo sapiens
atctcttccagctcagcctgatcggc

SEQ ID NO: 67547 - DNA, 26 bp, Homo sapiens
tctcttccagctcagcctgatcggca

SEQ ID NO: 67548 - DNA, 26 bp, Homo sapiens
ctcttccagctcagcctgatcggcac

SEQ ID NO: 67549 - DNA, 26 bp, Homo sapiens
tcttccagctcagcctgatcggcacc

SEQ ID NO: 67550 - DNA, 26 bp, Homo sapiens
cttccagctcagcctgatcggcaccc

SEQ ID NO: 67551 - DNA, 26 bp, Homo sapiens
ttccagctcagcctgatcggcaccct

SEQ ID NO: 67552 - DNA, 26 bp, Homo sapiens
tccagctcagcctgatcggcaccctt

SEQ ID NO: 67553 - DNA, 26 bp, Homo sapiens
ccagctcagcctgatcggcacccttg

SEQ ID NO: 67554 - DNA, 26 bp, Homo sapiens
cagctcagcctgatcggcacccttgt

SEQ ID NO: 67555 - DNA, 26 bp, Homo sapiens
agctcagcctgatcggcacccttgtt

SEQ ID NO: 67556 - DNA, 26 bp, Homo sapiens
gctcagcctgatcggcacccttgttc

SEQ ID NO: 67557 - DNA, 26 bp, Homo sapiens
ctcagcctgatcggcacccttgttcc

SEQ ID NO: 67558 - DNA, 26 bp, Homo sapiens
tcagcctgatcggcacccttgttccc

SEQ ID NO: 67559 - DNA, 26 bp, Homo sapiens
cagcctgatcggcacccttgttccca

SEQ ID NO: 67560 - DNA, 26 bp, Homo sapiens
agcctgatcggcacccttgttcccaa

SEQ ID NO: 67561 - DNA, 26 bp, Homo sapiens
gcctgatcggcacccttgttcccaat

SEQ ID NO: 67562 - DNA, 26 bp, Homo sapiens
cctgatcggcacccttgttcccaatg

SEQ ID NO: 67563 - DNA, 26 bp, Homo sapiens
ctgatcggcacccttgttcccaatgg

SEQ ID NO: 67564 - DNA, 26 bp, Homo sapiens
tgatcggcacccttgttcccaatggc

SEQ ID NO: 67565 - DNA, 26 bp, Homo sapiens
gatcggcacccttgttcccaatggca

SEQ ID NO: 67566 - DNA, 26 bp, Homo sapiens
atcggcacccttgttcccaatggcaa

SEQ ID NO: 67567 - DNA, 26 bp, Homo sapiens
tcggcacccttgttcccaatggcaaa

SEQ ID NO: 67568 - DNA, 26 bp, Homo sapiens
cggcacccttgttcccaatggcaaag

SEQ ID NO: 67569 - DNA, 26 bp, Homo sapiens
ggcacccttgttcccaatggcaaagg

SEQ ID NO: 67570 - DNA, 26 bp, Homo sapiens
gcacccttgttcccaatggcaaaggc

SEQ ID NO: 67571 - DNA, 26 bp, Homo sapiens
cacccttgttcccaatggcaaaggcc

SEQ ID NO: 67572 - DNA, 26 bp, Homo sapiens
acccttgttcccaatggcaaaggcca

SEQ ID NO: 67573 - DNA, 26 bp, Homo sapiens
cccttgttcccaatggcaaaggccat

SEQ ID NO: 67574 - DNA, 26 bp, Homo sapiens
ccttgttcccaatggcaaaggccatt

SEQ ID NO: 67575 - DNA, 26 bp, Homo sapiens
cttgttcccaatggcaaaggccatta

SEQ ID NO: 67576 - DNA, 26 bp, Homo sapiens
ttgttcccaatggcaaaggccattat

SEQ ID NO: 67577 - DNA, 26 bp, Homo sapiens
tgttcccaatggcaaaggccattatg

SEQ ID NO: 67578 - DNA, 26 bp, Homo sapiens
gttcccaatggcaaaggccattatgc

SEQ ID NO: 67579 - DNA, 26 bp, Homo sapiens
ttcccaatggcaaaggccattatgct

SEQ ID NO: 67580 - DNA, 26 bp, Homo sapiens
tcccaatggcaaaggccattatgctg

SEQ ID NO: 67581 - DNA, 26 bp, Homo sapiens
cccaatggcaaaggccattatgctgc

SEQ ID NO: 67582 - DNA, 26 bp, Homo sapiens
ccaatggcaaaggccattatgctgct

SEQ ID NO: 67583 - DNA, 26 bp, Homo sapiens
caatggcaaaggccattatgctgctt

SEQ ID NO: 67584 - DNA, 26 bp, Homo sapiens
aatggcaaaggccattatgctgcttc

SEQ ID NO: 67585 - DNA, 26 bp, Homo sapiens
atggcaaaggccattatgctgcttct

SEQ ID NO: 67586 - DNA, 26 bp, Homo sapiens
tggcaaaggccattatgctgcttctc

SEQ ID NO: 67587 - DNA, 26 bp, Homo sapiens
ggcaaaggccattatgctgcttctct

SEQ ID NO: 67588 - DNA, 26 bp, Homo sapiens
gcaaaggccattatgctgcttctctt

SEQ ID NO: 67589 - DNA, 26 bp, Homo sapiens
caaaggccattatgctgcttctcttc

SEQ ID NO: 67590 - DNA, 26 bp, Homo sapiens
aaaggccattatgctgcttctcttca

SEQ ID NO: 67591 - DNA, 26 bp, Homo sapiens
aaggccattatgctgcttctcttcag

SEQ ID NO: 67592 - DNA, 26 bp, Homo sapiens
aggccattatgctgcttctcttcagc

SEQ ID NO: 67593 - DNA, 26 bp, Homo sapiens
ggccattatgctgcttctcttcagct

SEQ ID NO: 67594 - DNA, 26 bp, Homo sapiens
gccattatgctgcttctcttcagctc

SEQ ID NO: 67595 - DNA, 26 bp, Homo sapiens
ccattatgctgcttctcttcagctcc

SEQ ID NO: 67596 - DNA, 26 bp, Homo sapiens
cattatgctgcttctcttcagctcct

SEQ ID NO: 67597 - DNA, 26 bp, Homo sapiens
attatgctgcttctcttcagctcctg

SEQ ID NO: 67598 - DNA, 26 bp, Homo sapiens
ttatgctgcttctcttcagctcctgg

SEQ ID NO: 67599 - DNA, 26 bp, Homo sapiens
tatgctgcttctcttcagctcctggg

SEQ ID NO: 67600 - DNA, 26 bp, Homo sapiens
atgctgcttctcttcagctcctgggc

SEQ ID NO: 67601 - DNA, 26 bp, Homo sapiens
tgctgcttctcttcagctcctgggca

SEQ ID NO: 67602 - DNA, 26 bp, Homo sapiens
gctgcttctcttcagctcctgggcag

SEQ ID NO: 67603 - DNA, 26 bp, Homo sapiens
ctgcttctcttcagctcctgggcagg

SEQ ID NO: 67604 - DNA, 26 bp, Homo sapiens
tgcttctcttcagctcctgggcaggc

SEQ ID NO: 67605 - DNA, 26 bp, Homo sapiens
gcttctcttcagctcctgggcaggct

SEQ ID NO: 67606 - DNA, 26 bp, Homo sapiens
cttctcttcagctcctgggcaggctg

SEQ ID NO: 67607 - DNA, 26 bp, Homo sapiens
ttctcttcagctcctgggcaggctgg

SEQ ID NO: 67608 - DNA, 26 bp, Homo sapiens
tctcttcagctcctgggcaggctggc

SEQ ID NO: 67609 - DNA, 26 bp, Homo sapiens
ctcttcagctcctgggcaggctggct

SEQ ID NO: 67610 - DNA, 26 bp, Homo sapiens
tcttcagctcctgggcaggctggctg

SEQ ID NO: 67611 - DNA, 26 bp, Homo sapiens
cttcagctcctgggcaggctggctga

SEQ ID NO: 67612 - DNA, 26 bp, Homo sapiens
ttcagctcctgggcaggctggctgat

SEQ ID NO: 67613 - DNA, 26 bp, Homo sapiens
tcagctcctgggcaggctggctgatt

SEQ ID NO: 67614 - DNA, 26 bp, Homo sapiens
cagctcctgggcaggctggctgattt

SEQ ID NO: 67615 - DNA, 26 bp, Homo sapiens
agctcctgggcaggctggctgatttc

SEQ ID NO: 67616 - DNA, 26 bp, Homo sapiens
gctcctgggcaggctggctgatttca

SEQ ID NO: 67617 - DNA, 26 bp, Homo sapiens
ctcctgggcaggctggctgatttcat

SEQ ID NO: 67618 - DNA, 26 bp, Homo sapiens
tcctgggcaggctggctgatttcatc

SEQ ID NO: 67619 - DNA, 26 bp, Homo sapiens
cctgggcaggctggctgatttcatct

SEQ ID NO: 67620 - DNA, 26 bp, Homo sapiens
ctgggcaggctggctgatttcatcta

SEQ ID NO: 67621 - DNA, 26 bp, Homo sapiens
tgggcaggctggctgatttcatctag

SEQ ID NO: 67622 - DNA, 26 bp, Homo sapiens
gggcaggctggctgatttcatctagg

SEQ ID NO: 67623 - DNA, 26 bp, Homo sapiens
ggcaggctggctgatttcatctaggg

SEQ ID NO: 67624 - DNA, 26 bp, Homo sapiens
gcaggctggctgatttcatctaggga

SEQ ID NO: 67625 - DNA, 26 bp, Homo sapiens
caggctggctgatttcatctagggac

SEQ ID NO: 67626 - DNA, 26 bp, Homo sapiens
aggctggctgatttcatctagggact

SEQ ID NO: 67627 - DNA, 26 bp, Homo sapiens
ggctggctgatttcatctagggactt

SEQ ID NO: 67628 - DNA, 26 bp, Homo sapiens
gctggctgatttcatctagggactta

SEQ ID NO: 67629 - DNA, 26 bp, Homo sapiens
ctggctgatttcatctagggacttac

SEQ ID NO: 67630 - DNA, 26 bp, Homo sapiens
tggctgatttcatctagggacttacc

SEQ ID NO: 67631 - DNA, 26 bp, Homo sapiens
ggctgatttcatctagggacttacca

SEQ ID NO: 67632 - DNA, 26 bp, Homo sapiens
gctgatttcatctagggacttaccac

SEQ ID NO: 67633 - DNA, 26 bp, Homo sapiens
ctgatttcatctagggacttaccacc

SEQ ID NO: 67634 - DNA, 26 bp, Homo sapiens
tgatttcatctagggacttaccacct

SEQ ID NO: 67635 - DNA, 26 bp, Homo sapiens
gatttcatctagggacttaccacctg

SEQ ID NO: 67636 - DNA, 26 bp, Homo sapiens
atttcatctagggacttaccacctgt

SEQ ID NO: 67637 - DNA, 26 bp, Homo sapiens
tttcatctagggacttaccacctgtg

SEQ ID NO: 67638 - DNA, 26 bp, Homo sapiens
ttcatctagggacttaccacctgtga

SEQ ID NO: 67639 - DNA, 26 bp, Homo sapiens
tcatctagggacttaccacctgtgat

SEQ ID NO: 67640 - DNA, 26 bp, Homo sapiens
catctagggacttaccacctgtgatc

SEQ ID NO: 67641 - DNA, 26 bp, Homo sapiens
atctagggacttaccacctgtgatca

SEQ ID NO: 67642 - DNA, 26 bp, Homo sapiens
tctagggacttaccacctgtgatcag

SEQ ID NO: 67643 - DNA, 26 bp, Homo sapiens
ctagggacttaccacctgtgatcagc

SEQ ID NO: 67644 - DNA, 26 bp, Homo sapiens
tagggacttaccacctgtgatcagca

SEQ ID NO: 67645 - DNA, 26 bp, Homo sapiens
agggacttaccacctgtgatcagcac

SEQ ID NO: 67646 - DNA, 26 bp, Homo sapiens
gggacttaccacctgtgatcagcacc

SEQ ID NO: 67647 - DNA, 26 bp, Homo sapiens
ggacttaccacctgtgatcagcacca

SEQ ID NO: 67648 - DNA, 26 bp, Homo sapiens
gacttaccacctgtgatcagcaccaa

SEQ ID NO: 67649 - DNA, 26 bp, Homo sapiens
acttaccacctgtgatcagcaccaaa

SEQ ID NO: 67650 - DNA, 26 bp, Homo sapiens
cttaccacctgtgatcagcaccaaaa

SEQ ID NO: 67651 - DNA, 26 bp, Homo sapiens
ttaccacctgtgatcagcaccaaaag

SEQ ID NO: 67652 - DNA, 26 bp, Homo sapiens
taccacctgtgatcagcaccaaaagc

SEQ ID NO: 67653 - DNA, 26 bp, Homo sapiens
accacctgtgatcagcaccaaaagct

SEQ ID NO: 67654 - DNA, 26 bp, Homo sapiens
ccacctgtgatcagcaccaaaagctt

SEQ ID NO: 67655 - DNA, 26 bp, Homo sapiens
cacctgtgatcagcaccaaaagctta

SEQ ID NO: 67656 - DNA, 26 bp, Homo sapiens
acctgtgatcagcaccaaaagcttag

SEQ ID NO: 67657 - DNA, 26 bp, Homo sapiens
cctgtgatcagcaccaaaagcttagg

SEQ ID NO: 67658 - DNA, 26 bp, Homo sapiens
ctgtgatcagcaccaaaagcttagga

SEQ ID NO: 67659 - DNA, 26 bp, Homo sapiens
tgtgatcagcaccaaaagcttaggaa

SEQ ID NO: 67660 - DNA, 26 bp, Homo sapiens
gtgatcagcaccaaaagcttaggaat

SEQ ID NO: 67661 - DNA, 26 bp, Homo sapiens
tgatcagcaccaaaagcttaggaatc

SEQ ID NO: 67662 - DNA, 26 bp, Homo sapiens
gatcagcaccaaaagcttaggaatcc

SEQ ID NO: 67663 - DNA, 26 bp, Homo sapiens
atcagcaccaaaagcttaggaatccc

SEQ ID NO: 67664 - DNA, 26 bp, Homo sapiens
tcagcaccaaaagcttaggaatcccc

SEQ ID NO: 67665 - DNA, 26 bp, Homo sapiens
cagcaccaaaagcttaggaatcccct

SEQ ID NO: 67666 - DNA, 26 bp, Homo sapiens
agcaccaaaagcttaggaatcccctc

SEQ ID NO: 67667 - DNA, 26 bp, Homo sapiens
gcaccaaaagcttaggaatcccctcg

SEQ ID NO: 67668 - DNA, 26 bp, Homo sapiens
caccaaaagcttaggaatcccctcgg

SEQ ID NO: 67669 - DNA, 26 bp, Homo sapiens
accaaaagcttaggaatcccctcggc

SEQ ID NO: 67670 - DNA, 26 bp, Homo sapiens
ccaaaagcttaggaatcccctcggca

SEQ ID NO: 67671 - DNA, 26 bp, Homo sapiens
caaaagcttaggaatcccctcggcag

SEQ ID NO: 67672 - DNA, 26 bp, Homo sapiens
aaaagcttaggaatcccctcggcagc

SEQ ID NO: 67673 - DNA, 26 bp, Homo sapiens
aaagcttaggaatcccctcggcagcc

SEQ ID NO: 67674 - DNA, 26 bp, Homo sapiens
aagcttaggaatcccctcggcagccc

SEQ ID NO: 67675 - DNA, 26 bp, Homo sapiens
agcttaggaatcccctcggcagcccg

SEQ ID NO: 67676 - DNA, 26 bp, Homo sapiens
gcttaggaatcccctcggcagcccgg

SEQ ID NO: 67677 - DNA, 26 bp, Homo sapiens
cttaggaatcccctcggcagcccggt

SEQ ID NO: 67678 - DNA, 26 bp, Homo sapiens
ttaggaatcccctcggcagcccggta

SEQ ID NO: 67679 - DNA, 26 bp, Homo sapiens
taggaatcccctcggcagcccggtag

SEQ ID NO: 67680 - DNA, 26 bp, Homo sapiens
aggaatcccctcggcagcccggtagc

SEQ ID NO: 67681 - DNA, 26 bp, Homo sapiens
ggaatcccctcggcagcccggtagcc

SEQ ID NO: 67682 - DNA, 26 bp, Homo sapiens
gaatcccctcggcagcccggtagccg

SEQ ID NO: 67683 - DNA, 26 bp, Homo sapiens
aatcccctcggcagcccggtagccgg

SEQ ID NO: 67684 - DNA, 26 bp, Homo sapiens
atcccctcggcagcccggtagccggc

SEQ ID NO: 67685 - DNA, 26 bp, Homo sapiens
tcccctcggcagcccggtagccggct

SEQ ID NO: 67686 - DNA, 26 bp, Homo sapiens
cccctcggcagcccggtagccggctg

SEQ ID NO: 67687 - DNA, 26 bp, Homo sapiens
ccctcggcagcccggtagccggctga

SEQ ID NO: 67688 - DNA, 26 bp, Homo sapiens
cctcggcagcccggtagccggctgaa

SEQ ID NO: 67689 - DNA, 26 bp, Homo sapiens
ctcggcagcccggtagccggctgaac

SEQ ID NO: 67690 - DNA, 26 bp, Homo sapiens
tcggcagcccggtagccggctgaact

SEQ ID NO: 67691 - DNA, 26 bp, Homo sapiens
cggcagcccggtagccggctgaactc

SEQ ID NO: 67692 - DNA, 26 bp, Homo sapiens
ggcagcccggtagccggctgaactcg

SEQ ID NO: 67693 - DNA, 26 bp, Homo sapiens
gcagcccggtagccggctgaactcgt

SEQ ID NO: 67694 - DNA, 26 bp, Homo sapiens
cagcccggtagccggctgaactcgtg

SEQ ID NO: 67695 - DNA, 26 bp, Homo sapiens
agcccggtagccggctgaactcgtga

SEQ ID NO: 67696 - DNA, 26 bp, Homo sapiens
gcccggtagccggctgaactcgtgaa

SEQ ID NO: 67697 - DNA, 26 bp, Homo sapiens
cccggtagccggctgaactcgtgaat

SEQ ID NO: 67698 - DNA, 26 bp, Homo sapiens
ccggtagccggctgaactcgtgaata

SEQ ID NO: 67699 - DNA, 26 bp, Homo sapiens
cggtagccggctgaactcgtgaatag

SEQ ID NO: 67700 - DNA, 26 bp, Homo sapiens
ggtagccggctgaactcgtgaatagg

SEQ ID NO: 67701 - DNA, 26 bp, Homo sapiens
gtagccggctgaactcgtgaataggt

SEQ ID NO: 67702 - DNA, 26 bp, Homo sapiens
tagccggctgaactcgtgaataggtt

SEQ ID NO: 67703 - DNA, 26 bp, Homo sapiens
agccggctgaactcgtgaataggttg

SEQ ID NO: 67704 - DNA, 26 bp, Homo sapiens
gccggctgaactcgtgaataggttgt

SEQ ID NO: 67705 - DNA, 26 bp, Homo sapiens
ccggctgaactcgtgaataggttgtt

SEQ ID NO: 67706 - DNA, 26 bp, Homo sapiens
cggctgaactcgtgaataggttgtta

SEQ ID NO: 67707 - DNA, 26 bp, Homo sapiens
ggctgaactcgtgaataggttgttac

SEQ ID NO: 67708 - DNA, 26 bp, Homo sapiens
gctgaactcgtgaataggttgttacg

SEQ ID NO: 67709 - DNA, 26 bp, Homo sapiens
ctgaactcgtgaataggttgttacga

SEQ ID NO: 67710 - DNA, 26 bp, Homo sapiens
tgaactcgtgaataggttgttacgaa

SEQ ID NO: 67711 - DNA, 26 bp, Homo sapiens
gaactcgtgaataggttgttacgaac

SEQ ID NO: 67712 - DNA, 26 bp, Homo sapiens
aactcgtgaataggttgttacgaaca

SEQ ID NO: 67713 - DNA, 26 bp, Homo sapiens
actcgtgaataggttgttacgaacaa

SEQ ID NO: 67714 - DNA, 26 bp, Homo sapiens
ctcgtgaataggttgttacgaacaaa

SEQ ID NO: 67715 - DNA, 26 bp, Homo sapiens
tcgtgaataggttgttacgaacaaag

SEQ ID NO: 67716 - DNA, 26 bp, Homo sapiens
cgtgaataggttgttacgaacaaagt

SEQ ID NO: 67717 - DNA, 26 bp, Homo sapiens
gtgaataggttgttacgaacaaagtc

SEQ ID NO: 67718 - DNA, 26 bp, Homo sapiens
tgaataggttgttacgaacaaagtct

SEQ ID NO: 67719 - DNA, 26 bp, Homo sapiens
gaataggttgttacgaacaaagtcta

SEQ ID NO: 67720 - DNA, 26 bp, Homo sapiens
aataggttgttacgaacaaagtctag

SEQ ID NO: 67721 - DNA, 26 bp, Homo sapiens
ataggttgttacgaacaaagtctaga

SEQ ID NO: 67722 - DNA, 26 bp, Homo sapiens
taggttgttacgaacaaagtctagag

SEQ ID NO: 67723 - DNA, 26 bp, Homo sapiens
aggttgttacgaacaaagtctagagc

SEQ ID NO: 67724 - DNA, 26 bp, Homo sapiens
ggttgttacgaacaaagtctagagca

SEQ ID NO: 67725 - DNA, 26 bp, Homo sapiens
gttgttacgaacaaagtctagagcag

SEQ ID NO: 67726 - DNA, 26 bp, Homo sapiens
ttgttacgaacaaagtctagagcaga

SEQ ID NO: 67727 - DNA, 26 bp, Homo sapiens
tgttacgaacaaagtctagagcagag

SEQ ID NO: 67728 - DNA, 26 bp, Homo sapiens
gttacgaacaaagtctagagcagagc

SEQ ID NO: 67729 - DNA, 26 bp, Homo sapiens
ttacgaacaaagtctagagcagagcc

SEQ ID NO: 67730 - DNA, 26 bp, Homo sapiens
tacgaacaaagtctagagcagagccc

SEQ ID NO: 67731 - DNA, 26 bp, Homo sapiens
acgaacaaagtctagagcagagcccg

SEQ ID NO: 67732 - DNA, 26 bp, Homo sapiens
cgaacaaagtctagagcagagcccgt

SEQ ID NO: 67733 - DNA, 26 bp, Homo sapiens
gaacaaagtctagagcagagcccgtg

SEQ ID NO: 67734 - DNA, 26 bp, Homo sapiens
aacaaagtctagagcagagcccgtgt

SEQ ID NO: 67735 - DNA, 26 bp, Homo sapiens
acaaagtctagagcagagcccgtgta

SEQ ID NO: 67736 - DNA, 26 bp, Homo sapiens
caaagtctagagcagagcccgtgtac

SEQ ID NO: 67737 - DNA, 26 bp, Homo sapiens
aaagtctagagcagagcccgtgtaca

SEQ ID NO: 67738 - DNA, 26 bp, Homo sapiens
aagtctagagcagagcccgtgtacag

SEQ ID NO: 67739 - DNA, 26 bp, Homo sapiens
agtctagagcagagcccgtgtacagg

SEQ ID NO: 67740 - DNA, 26 bp, Homo sapiens
gtctagagcagagcccgtgtacaggg

SEQ ID NO: 67741 - DNA, 26 bp, Homo sapiens
tctagagcagagcccgtgtacagggc

SEQ ID NO: 67742 - DNA, 26 bp, Homo sapiens
ctagagcagagcccgtgtacagggcc

SEQ ID NO: 67743 - DNA, 26 bp, Homo sapiens
tagagcagagcccgtgtacagggccg

SEQ ID NO: 67744 - DNA, 26 bp, Homo sapiens
agagcagagcccgtgtacagggccga

SEQ ID NO: 67745 - DNA, 26 bp, Homo sapiens
gagcagagcccgtgtacagggccgag

SEQ ID NO: 67746 - DNA, 26 bp, Homo sapiens
agcagagcccgtgtacagggccgagc

SEQ ID NO: 67747 - DNA, 26 bp, Homo sapiens
gcagagcccgtgtacagggccgagcc

SEQ ID NO: 67748 - DNA, 26 bp, Homo sapiens
cagagcccgtgtacagggccgagccg

SEQ ID NO: 67749 - DNA, 26 bp, Homo sapiens
agagcccgtgtacagggccgagccgt

SEQ ID NO: 67750 - DNA, 26 bp, Homo sapiens
gagcccgtgtacagggccgagccgtc

SEQ ID NO: 67751 - DNA, 26 bp, Homo sapiens
agcccgtgtacagggccgagccgtcc

SEQ ID NO: 67752 - DNA, 26 bp, Homo sapiens
gcccgtgtacagggccgagccgtcca

SEQ ID NO: 67753 - DNA, 26 bp, Homo sapiens
cccgtgtacagggccgagccgtccag

SEQ ID NO: 67754 - DNA, 26 bp, Homo sapiens
ccgtgtacagggccgagccgtccagg

SEQ ID NO: 67755 - DNA, 26 bp, Homo sapiens
cgtgtacagggccgagccgtccaggg

SEQ ID NO: 67756 - DNA, 26 bp, Homo sapiens
gtgtacagggccgagccgtccagggg

SEQ ID NO: 67757 - DNA, 26 bp, Homo sapiens
tgtacagggccgagccgtccaggggc

SEQ ID NO: 67758 - DNA, 26 bp, Homo sapiens
gtacagggccgagccgtccaggggct

SEQ ID NO: 67759 - DNA, 26 bp, Homo sapiens
tacagggccgagccgtccaggggctt

SEQ ID NO: 67760 - DNA, 26 bp, Homo sapiens
acagggccgagccgtccaggggcttc

SEQ ID NO: 67761 - DNA, 26 bp, Homo sapiens
cagggccgagccgtccaggggcttca

SEQ ID NO: 67762 - DNA, 26 bp, Homo sapiens
agggccgagccgtccaggggcttcat

SEQ ID NO: 67763 - DNA, 26 bp, Homo sapiens
gggccgagccgtccaggggcttcatt

SEQ ID NO: 67764 - DNA, 26 bp, Homo sapiens
ggccgagccgtccaggggcttcattt

SEQ ID NO: 67765 - DNA, 26 bp, Homo sapiens
gccgagccgtccaggggcttcatttt

SEQ ID NO: 67766 - DNA, 26 bp, Homo sapiens
ccgagccgtccaggggcttcattttc

SEQ ID NO: 67767 - DNA, 26 bp, Homo sapiens
cgagccgtccaggggcttcattttcc

SEQ ID NO: 67768 - DNA, 26 bp, Homo sapiens
gagccgtccaggggcttcattttccg

SEQ ID NO: 67769 - DNA, 26 bp, Homo sapiens
agccgtccaggggcttcattttccgc

SEQ ID NO: 67770 - DNA, 26 bp, Homo sapiens
gccgtccaggggcttcattttccgca

SEQ ID NO: 67771 - DNA, 26 bp, Homo sapiens
ccgtccaggggcttcattttccgcac

SEQ ID NO: 67772 - DNA, 26 bp, Homo sapiens
cgtccaggggcttcattttccgcaca

SEQ ID NO: 67773 - DNA, 26 bp, Homo sapiens
gtccaggggcttcattttccgcacag

SEQ ID NO: 67774 - DNA, 26 bp, Homo sapiens
tccaggggcttcattttccgcacagc

SEQ ID NO: 67775 - DNA, 26 bp, Homo sapiens
ccaggggcttcattttccgcacagcg

SEQ ID NO: 67776 - DNA, 26 bp, Homo sapiens
caggggcttcattttccgcacagcgg

SEQ ID NO: 67777 - DNA, 26 bp, Homo sapiens
aggggcttcattttccgcacagcggt

SEQ ID NO: 67778 - DNA, 26 bp, Homo sapiens
ggggcttcattttccgcacagcggtt

SEQ ID NO: 67779 - DNA, 26 bp, Homo sapiens
gggcttcattttccgcacagcggtta

SEQ ID NO: 67780 - DNA, 26 bp, Homo sapiens
ggcttcattttccgcacagcggttat

SEQ ID NO: 67781 - DNA, 26 bp, Homo sapiens
gcttcattttccgcacagcggttatg

SEQ ID NO: 67782 - DNA, 26 bp, Homo sapiens
cttcattttccgcacagcggttatga

SEQ ID NO: 67783 - DNA, 26 bp, Homo sapiens
ttcattttccgcacagcggttatgac

SEQ ID NO: 67784 - DNA, 26 bp, Homo sapiens
tcattttccgcacagcggttatgact

SEQ ID NO: 67785 - DNA, 26 bp, Homo sapiens
cattttccgcacagcggttatgactt

SEQ ID NO: 67786 - DNA, 26 bp, Homo sapiens
attttccgcacagcggttatgacttc

SEQ ID NO: 67787 - DNA, 26 bp, Homo sapiens
ttttccgcacagcggttatgacttcc

SEQ ID NO: 67788 - DNA, 26 bp, Homo sapiens
tttccgcacagcggttatgacttccc

SEQ ID NO: 67789 - DNA, 26 bp, Homo sapiens
ttccgcacagcggttatgacttccct

SEQ ID NO: 67790 - DNA, 26 bp, Homo sapiens
tccgcacagcggttatgacttccctt

SEQ ID NO: 67791 - DNA, 26 bp, Homo sapiens
ccgcacagcggttatgacttcccttt

SEQ ID NO: 67792 - DNA, 26 bp, Homo sapiens
cgcacagcggttatgacttccctttt

SEQ ID NO: 67793 - DNA, 26 bp, Homo sapiens
gcacagcggttatgacttcccttttt

SEQ ID NO: 67794 - DNA, 26 bp, Homo sapiens
cacagcggttatgacttccctttttg

SEQ ID NO: 67795 - DNA, 26 bp, Homo sapiens
acagcggttatgacttccctttttgt

SEQ ID NO: 67796 - DNA, 26 bp, Homo sapiens
cagcggttatgacttccctttttgtt

SEQ ID NO: 67797 - DNA, 26 bp, Homo sapiens
agcggttatgacttccctttttgttg

SEQ ID NO: 67798 - DNA, 26 bp, Homo sapiens
gcggttatgacttccctttttgttgg

SEQ ID NO: 67799 - DNA, 26 bp, Homo sapiens
cggttatgacttccctttttgttgga

SEQ ID NO: 67800 - DNA, 26 bp, Homo sapiens
ggttatgacttccctttttgttggat

SEQ ID NO: 67801 - DNA, 26 bp, Homo sapiens
gttatgacttccctttttgttggatg

SEQ ID NO: 67802 - DNA, 26 bp, Homo sapiens
ttatgacttccctttttgttggatgg

SEQ ID NO: 67803 - DNA, 26 bp, Homo sapiens
tatgacttccctttttgttggatggg

SEQ ID NO: 67804 - DNA, 26 bp, Homo sapiens
atgacttccctttttgttggatgggt

SEQ ID NO: 67805 - DNA, 26 bp, Homo sapiens
tgacttccctttttgttggatgggta

SEQ ID NO: 67806 - DNA, 26 bp, Homo sapiens
gacttccctttttgttggatgggtat

SEQ ID NO: 67807 - DNA, 26 bp, Homo sapiens
acttccctttttgttggatgggtatt

SEQ ID NO: 67808 - DNA, 26 bp, Homo sapiens
cttccctttttgttggatgggtattg

SEQ ID NO: 67809 - DNA, 26 bp, Homo sapiens
ttccctttttgttggatgggtattga

SEQ ID NO: 67810 - DNA, 26 bp, Homo sapiens
tccctttttgttggatgggtattgaa

SEQ ID NO: 67811 - DNA, 26 bp, Homo sapiens
ccctttttgttggatgggtattgaaa

SEQ ID NO: 67812 - DNA, 26 bp, Homo sapiens
cctttttgttggatgggtattgaaat

SEQ ID NO: 67813 - DNA, 26 bp, Homo sapiens
ctttttgttggatgggtattgaaata

SEQ ID NO: 67814 - DNA, 26 bp, Homo sapiens
tttttgttggatgggtattgaaataa

SEQ ID NO: 67815 - DNA, 26 bp, Homo sapiens
ttttgttggatgggtattgaaataaa

SEQ ID NO: 67816 - DNA, 26 bp, Homo sapiens
tttgttggatgggtattgaaataaaa

SEQ ID NO: 67817 - DNA, 26 bp, Homo sapiens
ttgttggatgggtattgaaataaaat

SEQ ID NO: 67818 - DNA, 26 bp, Homo sapiens
tgttggatgggtattgaaataaaatt

SEQ ID NO: 67819 - DNA, 26 bp, Homo sapiens
gttggatgggtattgaaataaaattc

SEQ ID NO: 67820 - DNA, 26 bp, Homo sapiens
ttggatgggtattgaaataaaattca

SEQ ID NO: 67821 - DNA, 26 bp, Homo sapiens
tggatgggtattgaaataaaattcag

SEQ ID NO: 67822 - DNA, 26 bp, Homo sapiens
ggatgggtattgaaataaaattcagg

SEQ ID NO: 67823 - DNA, 26 bp, Homo sapiens
gatgggtattgaaataaaattcaggc

SEQ ID NO: 67824 - DNA, 26 bp, Homo sapiens
atgggtattgaaataaaattcaggcc

SEQ ID NO: 67825 - DNA, 26 bp, Homo sapiens
tgggtattgaaataaaattcaggcct

SEQ ID NO: 67826 - DNA, 26 bp, Homo sapiens
gggtattgaaataaaattcaggcctc

SEQ ID NO: 67827 - DNA, 26 bp, Homo sapiens
ggtattgaaataaaattcaggcctca

SEQ ID NO: 67828 - DNA, 26 bp, Homo sapiens
gtattgaaataaaattcaggcctcac

SEQ ID NO: 67829 - DNA, 26 bp, Homo sapiens
tattgaaataaaattcaggcctcaca

SEQ ID NO: 67830 - DNA, 26 bp, Homo sapiens
attgaaataaaattcaggcctcacag

SEQ ID NO: 67831 - DNA, 26 bp, Homo sapiens
ttgaaataaaattcaggcctcacagt

SEQ ID NO: 67832 - DNA, 26 bp, Homo sapiens
tgaaataaaattcaggcctcacagtg

SEQ ID NO: 67833 - DNA, 26 bp, Homo sapiens
gaaataaaattcaggcctcacagtgt

SEQ ID NO: 67834 - DNA, 26 bp, Homo sapiens
aaataaaattcaggcctcacagtgtc

SEQ ID NO: 67835 - DNA, 26 bp, Homo sapiens
aataaaattcaggcctcacagtgtct

SEQ ID NO: 67836 - DNA, 26 bp, Homo sapiens
ataaaattcaggcctcacagtgtctg

SEQ ID NO: 67837 - DNA, 26 bp, Homo sapiens
taaaattcaggcctcacagtgtctgc

SEQ ID NO: 67838 - DNA, 26 bp, Homo sapiens
aaaattcaggcctcacagtgtctgca

SEQ ID NO: 67839 - DNA, 26 bp, Homo sapiens
aaattcaggcctcacagtgtctgcat

SEQ ID NO: 67840 - DNA, 26 bp, Homo sapiens
aattcaggcctcacagtgtctgcata

SEQ ID NO: 67841 - DNA, 26 bp, Homo sapiens
attcaggcctcacagtgtctgcatac

SEQ ID NO: 67842 - DNA, 26 bp, Homo sapiens
ttcaggcctcacagtgtctgcatact

SEQ ID NO: 67843 - DNA, 26 bp, Homo sapiens
tcaggcctcacagtgtctgcatactg

SEQ ID NO: 67844 - DNA, 26 bp, Homo sapiens
caggcctcacagtgtctgcatactgg

SEQ ID NO: 67845 - DNA, 26 bp, Homo sapiens
aggcctcacagtgtctgcatactggg

SEQ ID NO: 67846 - DNA, 26 bp, Homo sapiens
ggcctcacagtgtctgcatactgggc

SEQ ID NO: 67847 - DNA, 26 bp, Homo sapiens
gcctcacagtgtctgcatactgggcc

SEQ ID NO: 67848 - DNA, 26 bp, Homo sapiens
cctcacagtgtctgcatactgggcca

SEQ ID NO: 67849 - DNA, 26 bp, Homo sapiens
ctcacagtgtctgcatactgggccac

SEQ ID NO: 67850 - DNA, 26 bp, Homo sapiens
tcacagtgtctgcatactgggccact

SEQ ID NO: 67851 - DNA, 26 bp, Homo sapiens
cacagtgtctgcatactgggccactg

SEQ ID NO: 67852 - DNA, 26 bp, Homo sapiens
acagtgtctgcatactgggccactgc

SEQ ID NO: 67853 - DNA, 26 bp, Homo sapiens
cagtgtctgcatactgggccactgcc

SEQ ID NO: 67854 - DNA, 26 bp, Homo sapiens
agtgtctgcatactgggccactgcca

SEQ ID NO: 67855 - DNA, 26 bp, Homo sapiens
gtgtctgcatactgggccactgccac

SEQ ID NO: 67856 - DNA, 26 bp, Homo sapiens
tgtctgcatactgggccactgccacc

SEQ ID NO: 67857 - DNA, 26 bp, Homo sapiens
gtctgcatactgggccactgccacct

SEQ ID NO: 67858 - DNA, 26 bp, Homo sapiens
tctgcatactgggccactgccacctg

SEQ ID NO: 67859 - DNA, 26 bp, Homo sapiens
ctgcatactgggccactgccacctgg

SEQ ID NO: 67860 - DNA, 26 bp, Homo sapiens
tgcatactgggccactgccacctgga

SEQ ID NO: 67861 - DNA, 26 bp, Homo sapiens
gcatactgggccactgccacctggat

SEQ ID NO: 67862 - DNA, 26 bp, Homo sapiens
catactgggccactgccacctggata

SEQ ID NO: 67863 - DNA, 26 bp, Homo sapiens
atactgggccactgccacctggataa

SEQ ID NO: 67864 - DNA, 26 bp, Homo sapiens
tactgggccactgccacctggataag

SEQ ID NO: 67865 - DNA, 26 bp, Homo sapiens
actgggccactgccacctggataaga

SEQ ID NO: 67866 - DNA, 26 bp, Homo sapiens
ctgggccactgccacctggataagat

SEQ ID NO: 67867 - DNA, 26 bp, Homo sapiens
tgggccactgccacctggataagatc

SEQ ID NO: 67868 - DNA, 26 bp, Homo sapiens
gggccactgccacctggataagatcc

SEQ ID NO: 67869 - DNA, 26 bp, Homo sapiens
ggccactgccacctggataagatcct

SEQ ID NO: 67870 - DNA, 26 bp, Homo sapiens
gccactgccacctggataagatcctg

SEQ ID NO: 67871 - DNA, 26 bp, Homo sapiens
ccactgccacctggataagatcctgt

SEQ ID NO: 67872 - DNA, 26 bp, Homo sapiens
cactgccacctggataagatcctgtc

SEQ ID NO: 67873 - DNA, 26 bp, Homo sapiens
actgccacctggataagatcctgtcc

SEQ ID NO: 67874 - DNA, 26 bp, Homo sapiens
ctgccacctggataagatcctgtccg

SEQ ID NO: 67875 - DNA, 26 bp, Homo sapiens
tgccacctggataagatcctgtccga

SEQ ID NO: 67876 - DNA, 26 bp, Homo sapiens
gccacctggataagatcctgtccgat

SEQ ID NO: 67877 - DNA, 26 bp, Homo sapiens
ccacctggataagatcctgtccgatt

SEQ ID NO: 67878 - DNA, 26 bp, Homo sapiens
cacctggataagatcctgtccgattt

SEQ ID NO: 67879 - DNA, 26 bp, Homo sapiens
acctggataagatcctgtccgatttc

SEQ ID NO: 67880 - DNA, 26 bp, Homo sapiens
cctggataagatcctgtccgatttcc

SEQ ID NO: 67881 - DNA, 26 bp, Homo sapiens
ctggataagatcctgtccgatttcca

SEQ ID NO: 67882 - DNA, 26 bp, Homo sapiens
tggataagatcctgtccgatttccag

SEQ ID NO: 67883 - DNA, 26 bp, Homo sapiens
ggataagatcctgtccgatttccagc

SEQ ID NO: 67884 - DNA, 26 bp, Homo sapiens
gataagatcctgtccgatttccagcc

SEQ ID NO: 67885 - DNA, 26 bp, Homo sapiens
ataagatcctgtccgatttccagcct

SEQ ID NO: 67886 - DNA, 26 bp, Homo sapiens
taagatcctgtccgatttccagcctc

SEQ ID NO: 67887 - DNA, 26 bp, Homo sapiens
aagatcctgtccgatttccagcctct

SEQ ID NO: 67888 - DNA, 26 bp, Homo sapiens
agatcctgtccgatttccagcctctg

SEQ ID NO: 67889 - DNA, 26 bp, Homo sapiens
gatcctgtccgatttccagcctctgg

SEQ ID NO: 67890 - DNA, 26 bp, Homo sapiens
atcctgtccgatttccagcctctgga

SEQ ID NO: 67891 - DNA, 26 bp, Homo sapiens
tcctgtccgatttccagcctctggat

SEQ ID NO: 67892 - DNA, 26 bp, Homo sapiens
cctgtccgatttccagcctctggatg

SEQ ID NO: 67893 - DNA, 26 bp, Homo sapiens
ctgtccgatttccagcctctggatga

SEQ ID NO: 67894 - DNA, 26 bp, Homo sapiens
tgtccgatttccagcctctggatgac

SEQ ID NO: 67895 - DNA, 26 bp, Homo sapiens
gtccgatttccagcctctggatgact

SEQ ID NO: 67896 - DNA, 26 bp, Homo sapiens
tccgatttccagcctctggatgactt

SEQ ID NO: 67897 - DNA, 26 bp, Homo sapiens
ccgatttccagcctctggatgacttt

SEQ ID NO: 67898 - DNA, 26 bp, Homo sapiens
cgatttccagcctctggatgacttta

SEQ ID NO: 67899 - DNA, 26 bp, Homo sapiens
gatttccagcctctggatgactttag

SEQ ID NO: 67900 - DNA, 26 bp, Homo sapiens
atttccagcctctggatgactttagc

SEQ ID NO: 67901 - DNA, 26 bp, Homo sapiens
tttccagcctctggatgactttagca

SEQ ID NO: 67902 - DNA, 26 bp, Homo sapiens
ttccagcctctggatgactttagcaa

SEQ ID NO: 67903 - DNA, 26 bp, Homo sapiens
tccagcctctggatgactttagcaat

SEQ ID NO: 67904 - DNA, 26 bp, Homo sapiens
ccagcctctggatgactttagcaatg

SEQ ID NO: 67905 - DNA, 26 bp, Homo sapiens
cagcctctggatgactttagcaatga

SEQ ID NO: 67906 - DNA, 26 bp, Homo sapiens
agcctctggatgactttagcaatgaa

SEQ ID NO: 67907 - DNA, 26 bp, Homo sapiens
gcctctggatgactttagcaatgaag

SEQ ID NO: 67908 - DNA, 26 bp, Homo sapiens
cctctggatgactttagcaatgaagt

SEQ ID NO: 67909 - DNA, 26 bp, Homo sapiens
ctctggatgactttagcaatgaagtc

SEQ ID NO: 67910 - DNA, 26 bp, Homo sapiens
tctggatgactttagcaatgaagtct

SEQ ID NO: 67911 - DNA, 26 bp, Homo sapiens
ctggatgactttagcaatgaagtctc

SEQ ID NO: 67912 - DNA, 26 bp, Homo sapiens
tggatgactttagcaatgaagtctcg

SEQ ID NO: 67913 - DNA, 26 bp, Homo sapiens
ggatgactttagcaatgaagtctcgg

SEQ ID NO: 67914 - DNA, 26 bp, Homo sapiens
gatgactttagcaatgaagtctcgga

SEQ ID NO: 67915 - DNA, 26 bp, Homo sapiens
atgactttagcaatgaagtctcggat

SEQ ID NO: 67916 - DNA, 26 bp, Homo sapiens
tgactttagcaatgaagtctcggatg

SEQ ID NO: 67917 - DNA, 26 bp, Homo sapiens
gactttagcaatgaagtctcggatgg

SEQ ID NO: 67918 - DNA, 26 bp, Homo sapiens
actttagcaatgaagtctcggatggc

SEQ ID NO: 67919 - DNA, 26 bp, Homo sapiens
ctttagcaatgaagtctcggatggca

SEQ ID NO: 67920 - DNA, 26 bp, Homo sapiens
tttagcaatgaagtctcggatggcat

SEQ ID NO: 67921 - DNA, 26 bp, Homo sapiens
ttagcaatgaagtctcggatggcatt

SEQ ID NO: 67922 - DNA, 26 bp, Homo sapiens
tagcaatgaagtctcggatggcattg

SEQ ID NO: 67923 - DNA, 26 bp, Homo sapiens
agcaatgaagtctcggatggcattga

SEQ ID NO: 67924 - DNA, 26 bp, Homo sapiens
gcaatgaagtctcggatggcattgaa

SEQ ID NO: 67925 - DNA, 26 bp, Homo sapiens
caatgaagtctcggatggcattgaag

SEQ ID NO: 67926 - DNA, 26 bp, Homo sapiens
aatgaagtctcggatggcattgaagt

SEQ ID NO: 67927 - DNA, 26 bp, Homo sapiens
atgaagtctcggatggcattgaagtt

SEQ ID NO: 67928 - DNA, 26 bp, Homo sapiens
tgaagtctcggatggcattgaagttg

SEQ ID NO: 67929 - DNA, 26 bp, Homo sapiens
gaagtctcggatggcattgaagttgg

SEQ ID NO: 67930 - DNA, 26 bp, Homo sapiens
aagtctcggatggcattgaagttggc

SEQ ID NO: 67931 - DNA, 26 bp, Homo sapiens
agtctcggatggcattgaagttggcc

SEQ ID NO: 67932 - DNA, 26 bp, Homo sapiens
gtctcggatggcattgaagttggcca

SEQ ID NO: 67933 - DNA, 26 bp, Homo sapiens
tctcggatggcattgaagttggccag

SEQ ID NO: 67934 - DNA, 26 bp, Homo sapiens
ctcggatggcattgaagttggccagt

SEQ ID NO: 67935 - DNA, 26 bp, Homo sapiens
tcggatggcattgaagttggccagtc

SEQ ID NO: 67936 - DNA, 26 bp, Homo sapiens
cggatggcattgaagttggccagtcc

SEQ ID NO: 67937 - DNA, 26 bp, Homo sapiens
ggatggcattgaagttggccagtccc

SEQ ID NO: 67938 - DNA, 26 bp, Homo sapiens
gatggcattgaagttggccagtccca

SEQ ID NO: 67939 - DNA, 26 bp, Homo sapiens
atggcattgaagttggccagtcccag

SEQ ID NO: 67940 - DNA, 26 bp, Homo sapiens
tggcattgaagttggccagtcccagt

SEQ ID NO: 67941 - DNA, 26 bp, Homo sapiens
ggcattgaagttggccagtcccagtg

SEQ ID NO: 67942 - DNA, 26 bp, Homo sapiens
gcattgaagttggccagtcccagtgc

SEQ ID NO: 67943 - DNA, 26 bp, Homo sapiens
cattgaagttggccagtcccagtgca

SEQ ID NO: 67944 - DNA, 26 bp, Homo sapiens
attgaagttggccagtcccagtgcag

SEQ ID NO: 67945 - DNA, 26 bp, Homo sapiens
ttgaagttggccagtcccagtgcaga

SEQ ID NO: 67946 - DNA, 26 bp, Homo sapiens
tgaagttggccagtcccagtgcagat

SEQ ID NO: 67947 - DNA, 26 bp, Homo sapiens
gaagttggccagtcccagtgcagatg

SEQ ID NO: 67948 - DNA, 26 bp, Homo sapiens
aagttggccagtcccagtgcagatga

SEQ ID NO: 67949 - DNA, 26 bp, Homo sapiens
agttggccagtcccagtgcagatgag

SEQ ID NO: 67950 - DNA, 26 bp, Homo sapiens
gttggccagtcccagtgcagatgagc

SEQ ID NO: 67951 - DNA, 26 bp, Homo sapiens
ttggccagtcccagtgcagatgagcc

SEQ ID NO: 67952 - DNA, 26 bp, Homo sapiens
tggccagtcccagtgcagatgagcca

SEQ ID NO: 67953 - DNA, 26 bp, Homo sapiens
ggccagtcccagtgcagatgagccat

SEQ ID NO: 67954 - DNA, 26 bp, Homo sapiens
gccagtcccagtgcagatgagccatc

SEQ ID NO: 67955 - DNA, 26 bp, Homo sapiens
ccagtcccagtgcagatgagccatcc

SEQ ID NO: 67956 - DNA, 26 bp, Homo sapiens
cagtcccagtgcagatgagccatcca

SEQ ID NO: 67957 - DNA, 26 bp, Homo sapiens
agtcccagtgcagatgagccatccac

SEQ ID NO: 67958 - DNA, 26 bp, Homo sapiens
gtcccagtgcagatgagccatccacc

SEQ ID NO: 67959 - DNA, 26 bp, Homo sapiens
tcccagtgcagatgagccatccacca

SEQ ID NO: 67960 - DNA, 26 bp, Homo sapiens
cccagtgcagatgagccatccaccag

SEQ ID NO: 67961 - DNA, 26 bp, Homo sapiens
ccagtgcagatgagccatccaccagg

SEQ ID NO: 67962 - DNA, 26 bp, Homo sapiens
cagtgcagatgagccatccaccagga

SEQ ID NO: 67963 - DNA, 26 bp, Homo sapiens
agtgcagatgagccatccaccaggaa

SEQ ID NO: 67964 - DNA, 26 bp, Homo sapiens
gtgcagatgagccatccaccaggaag

SEQ ID NO: 67965 - DNA, 26 bp, Homo sapiens
tgcagatgagccatccaccaggaaga

SEQ ID NO: 67966 - DNA, 26 bp, Homo sapiens
gcagatgagccatccaccaggaagac

SEQ ID NO: 67967 - DNA, 26 bp, Homo sapiens
cagatgagccatccaccaggaagact

SEQ ID NO: 67968 - DNA, 26 bp, Homo sapiens
agatgagccatccaccaggaagacta

SEQ ID NO: 67969 - DNA, 26 bp, Homo sapiens
gatgagccatccaccaggaagactat

SEQ ID NO: 67970 - DNA, 26 bp, Homo sapiens
atgagccatccaccaggaagactatg

SEQ ID NO: 67971 - DNA, 26 bp, Homo sapiens
tgagccatccaccaggaagactatgt

SEQ ID NO: 67972 - DNA, 26 bp, Homo sapiens
gagccatccaccaggaagactatgtc

SEQ ID NO: 67973 - DNA, 26 bp, Homo sapiens
agccatccaccaggaagactatgtct

SEQ ID NO: 67974 - DNA, 26 bp, Homo sapiens
gccatccaccaggaagactatgtctc

SEQ ID NO: 67975 - DNA, 26 bp, Homo sapiens
ccatccaccaggaagactatgtctct

SEQ ID NO: 67976 - DNA, 26 bp, Homo sapiens
catccaccaggaagactatgtctctc

SEQ ID NO: 67977 - DNA, 26 bp, Homo sapiens
atccaccaggaagactatgtctctct

SEQ ID NO: 67978 - DNA, 26 bp, Homo sapiens
tccaccaggaagactatgtctctctt

SEQ ID NO: 67979 - DNA, 26 bp, Homo sapiens
ccaccaggaagactatgtctctcttg

SEQ ID NO: 67980 - DNA, 26 bp, Homo sapiens
caccaggaagactatgtctctcttgt

SEQ ID NO: 67981 - DNA, 26 bp, Homo sapiens
accaggaagactatgtctctcttgtt

SEQ ID NO: 67982 - DNA, 26 bp, Homo sapiens
ccaggaagactatgtctctcttgttg

SEQ ID NO: 67983 - DNA, 26 bp, Homo sapiens
caggaagactatgtctctcttgttga

SEQ ID NO: 67984 - DNA, 26 bp, Homo sapiens
aggaagactatgtctctcttgttgac

SEQ ID NO: 67985 - DNA, 26 bp, Homo sapiens
ggaagactatgtctctcttgttgact

SEQ ID NO: 67986 - DNA, 26 bp, Homo sapiens
gaagactatgtctctcttgttgactt

SEQ ID NO: 67987 - DNA, 26 bp, Homo sapiens
aagactatgtctctcttgttgacttc

SEQ ID NO: 67988 - DNA, 26 bp, Homo sapiens
agactatgtctctcttgttgacttca

SEQ ID NO: 67989 - DNA, 26 bp, Homo sapiens
gactatgtctctcttgttgacttcaa

SEQ ID NO: 67990 - DNA, 26 bp, Homo sapiens
actatgtctctcttgttgacttcaat

SEQ ID NO: 67991 - DNA, 26 bp, Homo sapiens
ctatgtctctcttgttgacttcaatg

SEQ ID NO: 67992 - DNA, 26 bp, Homo sapiens
tatgtctctcttgttgacttcaatga

SEQ ID NO: 67993 - DNA, 26 bp, Homo sapiens
atgtctctcttgttgacttcaatgac

SEQ ID NO: 67994 - DNA, 26 bp, Homo sapiens
tgtctctcttgttgacttcaatgact

SEQ ID NO: 67995 - DNA, 26 bp, Homo sapiens
gtctctcttgttgacttcaatgactt

SEQ ID NO: 67996 - DNA, 26 bp, Homo sapiens
tctctcttgttgacttcaatgacttg

SEQ ID NO: 67997 - DNA, 26 bp, Homo sapiens
ctctcttgttgacttcaatgacttgt

SEQ ID NO: 67998 - DNA, 26 bp, Homo sapiens
tctcttgttgacttcaatgacttgtg

SEQ ID NO: 67999 - DNA, 26 bp, Homo sapiens
ctcttgttgacttcaatgacttgtgt

SEQ ID NO: 68000 - DNA, 26 bp, Homo sapiens
tcttgttgacttcaatgacttgtgtg

SEQ ID NO: 68001 - DNA, 26 bp, Homo sapiens
cttgttgacttcaatgacttgtgtga

SEQ ID NO: 68002 - DNA, 26 bp, Homo sapiens
ttgttgacttcaatgacttgtgtgac

SEQ ID NO: 68003 - DNA, 26 bp, Homo sapiens
tgttgacttcaatgacttgtgtgaca

SEQ ID NO: 68004 - DNA, 26 bp, Homo sapiens
gttgacttcaatgacttgtgtgacaa

SEQ ID NO: 68005 - DNA, 26 bp, Homo sapiens
ttgacttcaatgacttgtgtgacaat

SEQ ID NO: 68006 - DNA, 26 bp, Homo sapiens
tgacttcaatgacttgtgtgacaatg

SEQ ID NO: 68007 - DNA, 26 bp, Homo sapiens
gacttcaatgacttgtgtgacaatgg

SEQ ID NO: 68008 - DNA, 26 bp, Homo sapiens
acttcaatgacttgtgtgacaatggt

SEQ ID NO: 68009 - DNA, 26 bp, Homo sapiens
cttcaatgacttgtgtgacaatggtt

SEQ ID NO: 68010 - DNA, 26 bp, Homo sapiens
ttcaatgacttgtgtgacaatggttg

SEQ ID NO: 68011 - DNA, 26 bp, Homo sapiens
tcaatgacttgtgtgacaatggttgg

SEQ ID NO: 68012 - DNA, 26 bp, Homo sapiens
caatgacttgtgtgacaatggttggc

SEQ ID NO: 68013 - DNA, 26 bp, Homo sapiens
aatgacttgtgtgacaatggttggcg

SEQ ID NO: 68014 - DNA, 26 bp, Homo sapiens
atgacttgtgtgacaatggttggcgg

SEQ ID NO: 68015 - DNA, 26 bp, Homo sapiens
tgacttgtgtgacaatggttggcggt

SEQ ID NO: 68016 - DNA, 26 bp, Homo sapiens
gacttgtgtgacaatggttggcggtt

SEQ ID NO: 68017 - DNA, 26 bp, Homo sapiens
acttgtgtgacaatggttggcggttt

SEQ ID NO: 68018 - DNA, 26 bp, Homo sapiens
cttgtgtgacaatggttggcggtttc

SEQ ID NO: 68019 - DNA, 26 bp, Homo sapiens
ttgtgtgacaatggttggcggtttca

SEQ ID NO: 68020 - DNA, 26 bp, Homo sapiens
tgtgtgacaatggttggcggtttcaa

SEQ ID NO: 68021 - DNA, 26 bp, Homo sapiens
gtgtgacaatggttggcggtttcaag

SEQ ID NO: 68022 - DNA, 26 bp, Homo sapiens
tgtgacaatggttggcggtttcaaga

SEQ ID NO: 68023 - DNA, 26 bp, Homo sapiens
gtgacaatggttggcggtttcaagac

SEQ ID NO: 68024 - DNA, 26 bp, Homo sapiens
tgacaatggttggcggtttcaagaca

SEQ ID NO: 68025 - DNA, 26 bp, Homo sapiens
gacaatggttggcggtttcaagacaa

SEQ ID NO: 68026 - DNA, 26 bp, Homo sapiens
acaatggttggcggtttcaagacaat

SEQ ID NO: 68027 - DNA, 26 bp, Homo sapiens
caatggttggcggtttcaagacaatg

SEQ ID NO: 68028 - DNA, 26 bp, Homo sapiens
aatggttggcggtttcaagacaatgt

SEQ ID NO: 68029 - DNA, 26 bp, Homo sapiens
atggttggcggtttcaagacaatgtg

SEQ ID NO: 68030 - DNA, 26 bp, Homo sapiens
tggttggcggtttcaagacaatgtgc

SEQ ID NO: 68031 - DNA, 26 bp, Homo sapiens
ggttggcggtttcaagacaatgtgcc

SEQ ID NO: 68032 - DNA, 26 bp, Homo sapiens
gttggcggtttcaagacaatgtgcct

SEQ ID NO: 68033 - DNA, 26 bp, Homo sapiens
ttggcggtttcaagacaatgtgcctt

SEQ ID NO: 68034 - DNA, 26 bp, Homo sapiens
tggcggtttcaagacaatgtgccttt

SEQ ID NO: 68035 - DNA, 26 bp, Homo sapiens
ggcggtttcaagacaatgtgcctttg

SEQ ID NO: 68036 - DNA, 26 bp, Homo sapiens
gcggtttcaagacaatgtgcctttgg

SEQ ID NO: 68037 - DNA, 26 bp, Homo sapiens
cggtttcaagacaatgtgcctttggg

SEQ ID NO: 68038 - DNA, 26 bp, Homo sapiens
ggtttcaagacaatgtgcctttgggc

SEQ ID NO: 68039 - DNA, 26 bp, Homo sapiens
gtttcaagacaatgtgcctttgggcc

SEQ ID NO: 68040 - DNA, 26 bp, Homo sapiens
tttcaagacaatgtgcctttgggcca

SEQ ID NO: 68041 - DNA, 26 bp, Homo sapiens
ttcaagacaatgtgcctttgggccac

SEQ ID NO: 68042 - DNA, 26 bp, Homo sapiens
tcaagacaatgtgcctttgggccacg

SEQ ID NO: 68043 - DNA, 26 bp, Homo sapiens
caagacaatgtgcctttgggccacgc

SEQ ID NO: 68044 - DNA, 26 bp, Homo sapiens
aagacaatgtgcctttgggccacgcc

SEQ ID NO: 68045 - DNA, 26 bp, Homo sapiens
agacaatgtgcctttgggccacgcca

SEQ ID NO: 68046 - DNA, 26 bp, Homo sapiens
gacaatgtgcctttgggccacgccaa

SEQ ID NO: 68047 - DNA, 26 bp, Homo sapiens
acaatgtgcctttgggccacgccaac

SEQ ID NO: 68048 - DNA, 26 bp, Homo sapiens
caatgtgcctttgggccacgccaaca

SEQ ID NO: 68049 - DNA, 26 bp, Homo sapiens
aatgtgcctttgggccacgccaacaa

SEQ ID NO: 68050 - DNA, 26 bp, Homo sapiens
atgtgcctttgggccacgccaacaat

SEQ ID NO: 68051 - DNA, 26 bp, Homo sapiens
tgtgcctttgggccacgccaacaatg

SEQ ID NO: 68052 - DNA, 26 bp, Homo sapiens
gtgcctttgggccacgccaacaatgt

SEQ ID NO: 68053 - DNA, 26 bp, Homo sapiens
tgcctttgggccacgccaacaatgta

SEQ ID NO: 68054 - DNA, 26 bp, Homo sapiens
gcctttgggccacgccaacaatgtac

SEQ ID NO: 68055 - DNA, 26 bp, Homo sapiens
cctttgggccacgccaacaatgtacg

SEQ ID NO: 68056 - DNA, 26 bp, Homo sapiens
ctttgggccacgccaacaatgtacgg

SEQ ID NO: 68057 - DNA, 26 bp, Homo sapiens
tttgggccacgccaacaatgtacggc

SEQ ID NO: 68058 - DNA, 26 bp, Homo sapiens
ttgggccacgccaacaatgtacggca

SEQ ID NO: 68059 - DNA, 26 bp, Homo sapiens
tgggccacgccaacaatgtacggcag

SEQ ID NO: 68060 - DNA, 26 bp, Homo sapiens
gggccacgccaacaatgtacggcagt

SEQ ID NO: 68061 - DNA, 26 bp, Homo sapiens
ggccacgccaacaatgtacggcagta

SEQ ID NO: 68062 - DNA, 26 bp, Homo sapiens
gccacgccaacaatgtacggcagtaa

SEQ ID NO: 68063 - DNA, 26 bp, Homo sapiens
ccacgccaacaatgtacggcagtaat

SEQ ID NO: 68064 - DNA, 26 bp, Homo sapiens
cacgccaacaatgtacggcagtaatt

SEQ ID NO: 68065 - DNA, 26 bp, Homo sapiens
acgccaacaatgtacggcagtaattt

SEQ ID NO: 68066 - DNA, 26 bp, Homo sapiens
cgccaacaatgtacggcagtaatttc

SEQ ID NO: 68067 - DNA, 26 bp, Homo sapiens
gccaacaatgtacggcagtaatttct

SEQ ID NO: 68068 - DNA, 26 bp, Homo sapiens
ccaacaatgtacggcagtaatttctc

SEQ ID NO: 68069 - DNA, 26 bp, Homo sapiens
caacaatgtacggcagtaatttctcc

SEQ ID NO: 68070 - DNA, 26 bp, Homo sapiens
aacaatgtacggcagtaatttctcct

SEQ ID NO: 68071 - DNA, 26 bp, Homo sapiens
acaatgtacggcagtaatttctcctg

SEQ ID NO: 68072 - DNA, 26 bp, Homo sapiens
caatgtacggcagtaatttctcctgg

SEQ ID NO: 68073 - DNA, 26 bp, Homo sapiens
aatgtacggcagtaatttctcctgga

SEQ ID NO: 68074 - DNA, 26 bp, Homo sapiens
atgtacggcagtaatttctcctggag

SEQ ID NO: 68075 - DNA, 26 bp, Homo sapiens
tgtacggcagtaatttctcctggagg

SEQ ID NO: 68076 - DNA, 26 bp, Homo sapiens
gtacggcagtaatttctcctggaggt

SEQ ID NO: 68077 - DNA, 26 bp, Homo sapiens
tacggcagtaatttctcctggaggtc

SEQ ID NO: 68078 - DNA, 26 bp, Homo sapiens
acggcagtaatttctcctggaggtcc

SEQ ID NO: 68079 - DNA, 26 bp, Homo sapiens
cggcagtaatttctcctggaggtccc

SEQ ID NO: 68080 - DNA, 26 bp, Homo sapiens
ggcagtaatttctcctggaggtcccc

SEQ ID NO: 68081 - DNA, 26 bp, Homo sapiens
gcagtaatttctcctggaggtcccca

SEQ ID NO: 68082 - DNA, 26 bp, Homo sapiens
cagtaatttctcctggaggtccccaa

SEQ ID NO: 68083 - DNA, 26 bp, Homo sapiens
agtaatttctcctggaggtccccaaa

SEQ ID NO: 68084 - DNA, 26 bp, Homo sapiens
gtaatttctcctggaggtccccaaag

SEQ ID NO: 68085 - DNA, 26 bp, Homo sapiens
taatttctcctggaggtccccaaagc

SEQ ID NO: 68086 - DNA, 26 bp, Homo sapiens
aatttctcctggaggtccccaaagct

SEQ ID NO: 68087 - DNA, 26 bp, Homo sapiens
atttctcctggaggtccccaaagcta

SEQ ID NO: 68088 - DNA, 26 bp, Homo sapiens
tttctcctggaggtccccaaagctac

SEQ ID NO: 68089 - DNA, 26 bp, Homo sapiens
ttctcctggaggtccccaaagctacg

SEQ ID NO: 68090 - DNA, 26 bp, Homo sapiens
tctcctggaggtccccaaagctacgg

SEQ ID NO: 68091 - DNA, 26 bp, Homo sapiens
ctcctggaggtccccaaagctacgga

SEQ ID NO: 68092 - DNA, 26 bp, Homo sapiens
tcctggaggtccccaaagctacggaa

SEQ ID NO: 68093 - DNA, 26 bp, Homo sapiens
cctggaggtccccaaagctacggaat

SEQ ID NO: 68094 - DNA, 26 bp, Homo sapiens
ctggaggtccccaaagctacggaatt

SEQ ID NO: 68095 - DNA, 26 bp, Homo sapiens
tggaggtccccaaagctacggaattc

SEQ ID NO: 68096 - DNA, 26 bp, Homo sapiens
ggaggtccccaaagctacggaattcc

SEQ ID NO: 68097 - DNA, 26 bp, Homo sapiens
gaggtccccaaagctacggaattccg

SEQ ID NO: 68098 - DNA, 26 bp, Homo sapiens
aggtccccaaagctacggaattccgg

SEQ ID NO: 68099 - DNA, 26 bp, Homo sapiens
ggtccccaaagctacggaattccggg

SEQ ID NO: 68100 - DNA, 26 bp, Homo sapiens
gtccccaaagctacggaattccggga

SEQ ID NO: 68101 - DNA, 26 bp, Homo sapiens
tccccaaagctacggaattccgggac

SEQ ID NO: 68102 - DNA, 26 bp, Homo sapiens
ccccaaagctacggaattccgggaca

SEQ ID NO: 68103 - DNA, 26 bp, Homo sapiens
cccaaagctacggaattccgggacag

SEQ ID NO: 68104 - DNA, 26 bp, Homo sapiens
ccaaagctacggaattccgggacagt

SEQ ID NO: 68105 - DNA, 26 bp, Homo sapiens
caaagctacggaattccgggacagta

SEQ ID NO: 68106 - DNA, 26 bp, Homo sapiens
aaagctacggaattccgggacagtaa

SEQ ID NO: 68107 - DNA, 26 bp, Homo sapiens
aagctacggaattccgggacagtaaa

SEQ ID NO: 68108 - DNA, 26 bp, Homo sapiens
agctacggaattccgggacagtaaac

SEQ ID NO: 68109 - DNA, 26 bp, Homo sapiens
gctacggaattccgggacagtaaaca

SEQ ID NO: 68110 - DNA, 26 bp, Homo sapiens
ctacggaattccgggacagtaaacac

SEQ ID NO: 68111 - DNA, 26 bp, Homo sapiens
tacggaattccgggacagtaaacacc

SEQ ID NO: 68112 - DNA, 26 bp, Homo sapiens
acggaattccgggacagtaaacacca

SEQ ID NO: 68113 - DNA, 26 bp, Homo sapiens
cggaattccgggacagtaaacaccaa

SEQ ID NO: 68114 - DNA, 26 bp, Homo sapiens
ggaattccgggacagtaaacaccaag

SEQ ID NO: 68115 - DNA, 26 bp, Homo sapiens
gaattccgggacagtaaacaccaagt

SEQ ID NO: 68116 - DNA, 26 bp, Homo sapiens
aattccgggacagtaaacaccaagtt

SEQ ID NO: 68117 - DNA, 26 bp, Homo sapiens
attccgggacagtaaacaccaagttg

SEQ ID NO: 68118 - DNA, 26 bp, Homo sapiens
ttccgggacagtaaacaccaagttgt

SEQ ID NO: 68119 - DNA, 26 bp, Homo sapiens
tccgggacagtaaacaccaagttgtc

SEQ ID NO: 68120 - DNA, 26 bp, Homo sapiens
ccgggacagtaaacaccaagttgtca

SEQ ID NO: 68121 - DNA, 26 bp, Homo sapiens
cgggacagtaaacaccaagttgtcat

SEQ ID NO: 68122 - DNA, 26 bp, Homo sapiens
gggacagtaaacaccaagttgtcatc

SEQ ID NO: 68123 - DNA, 26 bp, Homo sapiens
ggacagtaaacaccaagttgtcatcg

SEQ ID NO: 68124 - DNA, 26 bp, Homo sapiens
gacagtaaacaccaagttgtcatcgg

SEQ ID NO: 68125 - DNA, 26 bp, Homo sapiens
acagtaaacaccaagttgtcatcggt

SEQ ID NO: 68126 - DNA, 26 bp, Homo sapiens
cagtaaacaccaagttgtcatcggta

SEQ ID NO: 68127 - DNA, 26 bp, Homo sapiens
agtaaacaccaagttgtcatcggtag

SEQ ID NO: 68128 - DNA, 26 bp, Homo sapiens
gtaaacaccaagttgtcatcggtagc

SEQ ID NO: 68129 - DNA, 26 bp, Homo sapiens
taaacaccaagttgtcatcggtagct

SEQ ID NO: 68130 - DNA, 26 bp, Homo sapiens
aaacaccaagttgtcatcggtagcta

SEQ ID NO: 68131 - DNA, 26 bp, Homo sapiens
aacaccaagttgtcatcggtagctat

SEQ ID NO: 68132 - DNA, 26 bp, Homo sapiens
acaccaagttgtcatcggtagctatg

SEQ ID NO: 68133 - DNA, 26 bp, Homo sapiens
caccaagttgtcatcggtagctatgt

SEQ ID NO: 68134 - DNA, 26 bp, Homo sapiens
accaagttgtcatcggtagctatgtg

SEQ ID NO: 68135 - DNA, 26 bp, Homo sapiens
ccaagttgtcatcggtagctatgtgc

SEQ ID NO: 68136 - DNA, 26 bp, Homo sapiens
caagttgtcatcggtagctatgtgct

SEQ ID NO: 68137 - DNA, 26 bp, Homo sapiens
aagttgtcatcggtagctatgtgctg

SEQ ID NO: 68138 - DNA, 26 bp, Homo sapiens
agttgtcatcggtagctatgtgctga

SEQ ID NO: 68139 - DNA, 26 bp, Homo sapiens
gttgtcatcggtagctatgtgctgaa

SEQ ID NO: 68140 - DNA, 26 bp, Homo sapiens
ttgtcatcggtagctatgtgctgaag

SEQ ID NO: 68141 - DNA, 26 bp, Homo sapiens
tgtcatcggtagctatgtgctgaagc

SEQ ID NO: 68142 - DNA, 26 bp, Homo sapiens
gtcatcggtagctatgtgctgaagct

SEQ ID NO: 68143 - DNA, 26 bp, Homo sapiens
tcatcggtagctatgtgctgaagctc

SEQ ID NO: 68144 - DNA, 26 bp, Homo sapiens
catcggtagctatgtgctgaagctct

SEQ ID NO: 68145 - DNA, 26 bp, Homo sapiens
atcggtagctatgtgctgaagctctg

SEQ ID NO: 68146 - DNA, 26 bp, Homo sapiens
tcggtagctatgtgctgaagctctgc

SEQ ID NO: 68147 - DNA, 26 bp, Homo sapiens
cggtagctatgtgctgaagctctgcc

SEQ ID NO: 68148 - DNA, 26 bp, Homo sapiens
ggtagctatgtgctgaagctctgccc

SEQ ID NO: 68149 - DNA, 26 bp, Homo sapiens
gtagctatgtgctgaagctctgccct

SEQ ID NO: 68150 - DNA, 26 bp, Homo sapiens
tagctatgtgctgaagctctgccctg

SEQ ID NO: 68151 - DNA, 26 bp, Homo sapiens
agctatgtgctgaagctctgccctgg

SEQ ID NO: 68152 - DNA, 26 bp, Homo sapiens
gctatgtgctgaagctctgccctgga

SEQ ID NO: 68153 - DNA, 26 bp, Homo sapiens
ctatgtgctgaagctctgccctggag

SEQ ID NO: 68154 - DNA, 26 bp, Homo sapiens
tatgtgctgaagctctgccctggagg

SEQ ID NO: 68155 - DNA, 26 bp, Homo sapiens
atgtgctgaagctctgccctggaggc

SEQ ID NO: 68156 - DNA, 26 bp, Homo sapiens
tgtgctgaagctctgccctggaggcg

SEQ ID NO: 68157 - DNA, 26 bp, Homo sapiens
gtgctgaagctctgccctggaggcgg

SEQ ID NO: 68158 - DNA, 26 bp, Homo sapiens
tgctgaagctctgccctggaggcggc

SEQ ID NO: 68159 - DNA, 26 bp, Homo sapiens
gctgaagctctgccctggaggcggcc

SEQ ID NO: 68160 - DNA, 26 bp, Homo sapiens
ctgaagctctgccctggaggcggcct

SEQ ID NO: 68161 - DNA, 26 bp, Homo sapiens
tgaagctctgccctggaggcggcctg

SEQ ID NO: 68162 - DNA, 26 bp, Homo sapiens
gaagctctgccctggaggcggcctgg

SEQ ID NO: 68163 - DNA, 26 bp, Homo sapiens
aagctctgccctggaggcggcctggg

SEQ ID NO: 68164 - DNA, 26 bp, Homo sapiens
agctctgccctggaggcggcctgggc

SEQ ID NO: 68165 - DNA, 26 bp, Homo sapiens
gctctgccctggaggcggcctgggct

SEQ ID NO: 68166 - DNA, 26 bp, Homo sapiens
ctctgccctggaggcggcctgggctc

SEQ ID NO: 68167 - DNA, 26 bp, Homo sapiens
tctgccctggaggcggcctgggctcc

SEQ ID NO: 68168 - DNA, 26 bp, Homo sapiens
ctgccctggaggcggcctgggctcca

SEQ ID NO: 68169 - DNA, 26 bp, Homo sapiens
tgccctggaggcggcctgggctccaa

SEQ ID NO: 68170 - DNA, 26 bp, Homo sapiens
gccctggaggcggcctgggctccaag

SEQ ID NO: 68171 - DNA, 26 bp, Homo sapiens
ccctggaggcggcctgggctccaagg

SEQ ID NO: 68172 - DNA, 26 bp, Homo sapiens
cctggaggcggcctgggctccaaggc

SEQ ID NO: 68173 - DNA, 26 bp, Homo sapiens
ctggaggcggcctgggctccaaggcc

SEQ ID NO: 68174 - DNA, 26 bp, Homo sapiens
tggaggcggcctgggctccaaggccg

SEQ ID NO: 68175 - DNA, 26 bp, Homo sapiens
ggaggcggcctgggctccaaggccga

SEQ ID NO: 68176 - DNA, 26 bp, Homo sapiens
gaggcggcctgggctccaaggccgaa

SEQ ID NO: 68177 - DNA, 26 bp, Homo sapiens
aggcggcctgggctccaaggccgaat

SEQ ID NO: 68178 - DNA, 26 bp, Homo sapiens
ggcggcctgggctccaaggccgaatg

SEQ ID NO: 68179 - DNA, 26 bp, Homo sapiens
gcggcctgggctccaaggccgaatga

SEQ ID NO: 68180 - DNA, 26 bp, Homo sapiens
cggcctgggctccaaggccgaatgag

SEQ ID NO: 68181 - DNA, 26 bp, Homo sapiens
ggcctgggctccaaggccgaatgaga

SEQ ID NO: 68182 - DNA, 26 bp, Homo sapiens
gcctgggctccaaggccgaatgagaa

SEQ ID NO: 68183 - DNA, 26 bp, Homo sapiens
cctgggctccaaggccgaatgagaac

SEQ ID NO: 68184 - DNA, 26 bp, Homo sapiens
ctgggctccaaggccgaatgagaaca

SEQ ID NO: 68185 - DNA, 26 bp, Homo sapiens
tgggctccaaggccgaatgagaacac

SEQ ID NO: 68186 - DNA, 26 bp, Homo sapiens
gggctccaaggccgaatgagaacacg

SEQ ID NO: 68187 - DNA, 26 bp, Homo sapiens
ggctccaaggccgaatgagaacacgc

SEQ ID NO: 68188 - DNA, 26 bp, Homo sapiens
gctccaaggccgaatgagaacacgct

SEQ ID NO: 68189 - DNA, 26 bp, Homo sapiens
ctccaaggccgaatgagaacacgcta

SEQ ID NO: 68190 - DNA, 26 bp, Homo sapiens
tccaaggccgaatgagaacacgctag

SEQ ID NO: 68191 - DNA, 26 bp, Homo sapiens
ccaaggccgaatgagaacacgctagc

SEQ ID NO: 68192 - DNA, 26 bp, Homo sapiens
caaggccgaatgagaacacgctagcc

SEQ ID NO: 68193 - DNA, 26 bp, Homo sapiens
aaggccgaatgagaacacgctagcct

SEQ ID NO: 68194 - DNA, 26 bp, Homo sapiens
aggccgaatgagaacacgctagcctg

SEQ ID NO: 68195 - DNA, 26 bp, Homo sapiens
ggccgaatgagaacacgctagcctgc

SEQ ID NO: 68196 - DNA, 26 bp, Homo sapiens
gccgaatgagaacacgctagcctgct

SEQ ID NO: 68197 - DNA, 26 bp, Homo sapiens
ccgaatgagaacacgctagcctgctt

SEQ ID NO: 68198 - DNA, 26 bp, Homo sapiens
cgaatgagaacacgctagcctgcttc

SEQ ID NO: 68199 - DNA, 26 bp, Homo sapiens
gaatgagaacacgctagcctgcttca

SEQ ID NO: 68200 - DNA, 26 bp, Homo sapiens
aatgagaacacgctagcctgcttcag

SEQ ID NO: 68201 - DNA, 26 bp, Homo sapiens
atgagaacacgctagcctgcttcagt

SEQ ID NO: 68202 - DNA, 26 bp, Homo sapiens
tgagaacacgctagcctgcttcagtg

SEQ ID NO: 68203 - DNA, 26 bp, Homo sapiens
gagaacacgctagcctgcttcagtgc

SEQ ID NO: 68204 - DNA, 26 bp, Homo sapiens
agaacacgctagcctgcttcagtgct

SEQ ID NO: 68205 - DNA, 26 bp, Homo sapiens
gaacacgctagcctgcttcagtgcta

SEQ ID NO: 68206 - DNA, 26 bp, Homo sapiens
aacacgctagcctgcttcagtgctac

SEQ ID NO: 68207 - DNA, 26 bp, Homo sapiens
acacgctagcctgcttcagtgctacc

SEQ ID NO: 68208 - DNA, 26 bp, Homo sapiens
cacgctagcctgcttcagtgctacca

SEQ ID NO: 68209 - DNA, 26 bp, Homo sapiens
acgctagcctgcttcagtgctaccac

SEQ ID NO: 68210 - DNA, 26 bp, Homo sapiens
cgctagcctgcttcagtgctaccacc

SEQ ID NO: 68211 - DNA, 26 bp, Homo sapiens
gctagcctgcttcagtgctaccaccc

SEQ ID NO: 68212 - DNA, 26 bp, Homo sapiens
ctagcctgcttcagtgctaccacccc

SEQ ID NO: 68213 - DNA, 26 bp, Homo sapiens
tagcctgcttcagtgctaccaccccg

SEQ ID NO: 68214 - DNA, 26 bp, Homo sapiens
agcctgcttcagtgctaccaccccgt

SEQ ID NO: 68215 - DNA, 26 bp, Homo sapiens
gcctgcttcagtgctaccaccccgta

SEQ ID NO: 68216 - DNA, 26 bp, Homo sapiens
cctgcttcagtgctaccaccccgtag

SEQ ID NO: 68217 - DNA, 26 bp, Homo sapiens
ctgcttcagtgctaccaccccgtagc

SEQ ID NO: 68218 - DNA, 26 bp, Homo sapiens
tgcttcagtgctaccaccccgtagcg

SEQ ID NO: 68219 - DNA, 26 bp, Homo sapiens
gcttcagtgctaccaccccgtagcga

SEQ ID NO: 68220 - DNA, 26 bp, Homo sapiens
cttcagtgctaccaccccgtagcgaa

SEQ ID NO: 68221 - DNA, 26 bp, Homo sapiens
ttcagtgctaccaccccgtagcgaat

SEQ ID NO: 68222 - DNA, 26 bp, Homo sapiens
tcagtgctaccaccccgtagcgaatc

SEQ ID NO: 68223 - DNA, 26 bp, Homo sapiens
cagtgctaccaccccgtagcgaatct

SEQ ID NO: 68224 - DNA, 26 bp, Homo sapiens
agtgctaccaccccgtagcgaatctc

SEQ ID NO: 68225 - DNA, 26 bp, Homo sapiens
gtgctaccaccccgtagcgaatctcg

SEQ ID NO: 68226 - DNA, 26 bp, Homo sapiens
tgctaccaccccgtagcgaatctcgt

SEQ ID NO: 68227 - DNA, 26 bp, Homo sapiens
gctaccaccccgtagcgaatctcgtc

SEQ ID NO: 68228 - DNA, 26 bp, Homo sapiens
ctaccaccccgtagcgaatctcgtca

SEQ ID NO: 68229 - DNA, 26 bp, Homo sapiens
taccaccccgtagcgaatctcgtcac

SEQ ID NO: 68230 - DNA, 26 bp, Homo sapiens
accaccccgtagcgaatctcgtcact

SEQ ID NO: 68231 - DNA, 26 bp, Homo sapiens
ccaccccgtagcgaatctcgtcacta

SEQ ID NO: 68232 - DNA, 26 bp, Homo sapiens
caccccgtagcgaatctcgtcactag

SEQ ID NO: 68233 - DNA, 26 bp, Homo sapiens
accccgtagcgaatctcgtcactaga

SEQ ID NO: 68234 - DNA, 26 bp, Homo sapiens
ccccgtagcgaatctcgtcactagaa

SEQ ID NO: 68235 - DNA, 26 bp, Homo sapiens
cccgtagcgaatctcgtcactagaag

SEQ ID NO: 68236 - DNA, 26 bp, Homo sapiens
ccgtagcgaatctcgtcactagaagg

SEQ ID NO: 68237 - DNA, 26 bp, Homo sapiens
cgtagcgaatctcgtcactagaaggc

SEQ ID NO: 68238 - DNA, 26 bp, Homo sapiens
gtagcgaatctcgtcactagaaggcc

SEQ ID NO: 68239 - DNA, 26 bp, Homo sapiens
tagcgaatctcgtcactagaaggccc

SEQ ID NO: 68240 - DNA, 26 bp, Homo sapiens
agcgaatctcgtcactagaaggcccg

SEQ ID NO: 68241 - DNA, 26 bp, Homo sapiens
gcgaatctcgtcactagaaggcccgg

SEQ ID NO: 68242 - DNA, 26 bp, Homo sapiens
cgaatctcgtcactagaaggcccggc

SEQ ID NO: 68243 - DNA, 26 bp, Homo sapiens
gaatctcgtcactagaaggcccggca

SEQ ID NO: 68244 - DNA, 26 bp, Homo sapiens
aatctcgtcactagaaggcccggcac

SEQ ID NO: 68245 - DNA, 26 bp, Homo sapiens
atctcgtcactagaaggcccggcact

SEQ ID NO: 68246 - DNA, 26 bp, Homo sapiens
tctcgtcactagaaggcccggcactt

SEQ ID NO: 68247 - DNA, 26 bp, Homo sapiens
ctcgtcactagaaggcccggcactta

SEQ ID NO: 68248 - DNA, 26 bp, Homo sapiens
tcgtcactagaaggcccggcacttat

SEQ ID NO: 68249 - DNA, 26 bp, Homo sapiens
cgtcactagaaggcccggcacttatg

SEQ ID NO: 68250 - DNA, 26 bp, Homo sapiens
gtcactagaaggcccggcacttatga

SEQ ID NO: 68251 - DNA, 26 bp, Homo sapiens
tcactagaaggcccggcacttatgag

SEQ ID NO: 68252 - DNA, 26 bp, Homo sapiens
cactagaaggcccggcacttatgagg

SEQ ID NO: 68253 - DNA, 26 bp, Homo sapiens
actagaaggcccggcacttatgagga

SEQ ID NO: 68254 - DNA, 26 bp, Homo sapiens
ctagaaggcccggcacttatgaggac

SEQ ID NO: 68255 - DNA, 26 bp, Homo sapiens
tagaaggcccggcacttatgaggacc

SEQ ID NO: 68256 - DNA, 26 bp, Homo sapiens
agaaggcccggcacttatgaggacca

SEQ ID NO: 68257 - DNA, 26 bp, Homo sapiens
gaaggcccggcacttatgaggaccag

SEQ ID NO: 68258 - DNA, 26 bp, Homo sapiens
aaggcccggcacttatgaggaccagc

SEQ ID NO: 68259 - DNA, 26 bp, Homo sapiens
aggcccggcacttatgaggaccagca

SEQ ID NO: 68260 - DNA, 26 bp, Homo sapiens
ggcccggcacttatgaggaccagcac

SEQ ID NO: 68261 - DNA, 26 bp, Homo sapiens
gcccggcacttatgaggaccagcacc

SEQ ID NO: 68262 - DNA, 26 bp, Homo sapiens
cccggcacttatgaggaccagcacct

SEQ ID NO: 68263 - DNA, 26 bp, Homo sapiens
ccggcacttatgaggaccagcacctg

SEQ ID NO: 68264 - DNA, 26 bp, Homo sapiens
cggcacttatgaggaccagcacctgg

SEQ ID NO: 68265 - DNA, 26 bp, Homo sapiens
ggcacttatgaggaccagcacctggg

SEQ ID NO: 68266 - DNA, 26 bp, Homo sapiens
gcacttatgaggaccagcacctgggg

SEQ ID NO: 68267 - DNA, 26 bp, Homo sapiens
cacttatgaggaccagcacctgggga

SEQ ID NO: 68268 - DNA, 26 bp, Homo sapiens
acttatgaggaccagcacctggggaa

SEQ ID NO: 68269 - DNA, 26 bp, Homo sapiens
cttatgaggaccagcacctggggaac

SEQ ID NO: 68270 - DNA, 26 bp, Homo sapiens
ttatgaggaccagcacctggggaacc

SEQ ID NO: 68271 - DNA, 26 bp, Homo sapiens
tatgaggaccagcacctggggaaccc

SEQ ID NO: 68272 - DNA, 26 bp, Homo sapiens
atgaggaccagcacctggggaacccc

SEQ ID NO: 68273 - DNA, 26 bp, Homo sapiens
tgaggaccagcacctggggaacccct

SEQ ID NO: 68274 - DNA, 26 bp, Homo sapiens
gaggaccagcacctggggaacccctt

SEQ ID NO: 68275 - DNA, 26 bp, Homo sapiens
aggaccagcacctggggaaccccttc

SEQ ID NO: 68276 - DNA, 26 bp, Homo sapiens
ggaccagcacctggggaaccccttcc

SEQ ID NO: 68277 - DNA, 26 bp, Homo sapiens
gaccagcacctggggaaccccttcct

SEQ ID NO: 68278 - DNA, 26 bp, Homo sapiens
accagcacctggggaaccccttcctc

SEQ ID NO: 68279 - DNA, 26 bp, Homo sapiens
ccagcacctggggaaccccttcctcc

SEQ ID NO: 68280 - DNA, 26 bp, Homo sapiens
cagcacctggggaaccccttcctcca

SEQ ID NO: 68281 - DNA, 26 bp, Homo sapiens
agcacctggggaaccccttcctccac

SEQ ID NO: 68282 - DNA, 26 bp, Homo sapiens
gcacctggggaaccccttcctccacg

SEQ ID NO: 68283 - DNA, 26 bp, Homo sapiens
cacctggggaaccccttcctccacgc

SEQ ID NO: 68284 - DNA, 26 bp, Homo sapiens
acctggggaaccccttcctccacgcg

SEQ ID NO: 68285 - DNA, 26 bp, Homo sapiens
cctggggaaccccttcctccacgcgg

SEQ ID NO: 68286 - DNA, 26 bp, Homo sapiens
ctggggaaccccttcctccacgcggc

SEQ ID NO: 68287 - DNA, 26 bp, Homo sapiens
tggggaaccccttcctccacgcggct

SEQ ID NO: 68288 - DNA, 26 bp, Homo sapiens
ggggaaccccttcctccacgcggctg

SEQ ID NO: 68289 - DNA, 26 bp, Homo sapiens
gggaaccccttcctccacgcggctgc

SEQ ID NO: 68290 - DNA, 26 bp, Homo sapiens
ggaaccccttcctccacgcggctgcc

SEQ ID NO: 68291 - DNA, 26 bp, Homo sapiens
gaaccccttcctccacgcggctgccc

SEQ ID NO: 68292 - DNA, 26 bp, Homo sapiens
aaccccttcctccacgcggctgcccc

SEQ ID NO: 68293 - DNA, 26 bp, Homo sapiens
accccttcctccacgcggctgccccc

SEQ ID NO: 68294 - DNA, 26 bp, Homo sapiens
ccccttcctccacgcggctgccccct

SEQ ID NO: 68295 - DNA, 26 bp, Homo sapiens
cccttcctccacgcggctgccccctg

SEQ ID NO: 68296 - DNA, 26 bp, Homo sapiens
ccttcctccacgcggctgccccctgc

SEQ ID NO: 68297 - DNA, 26 bp, Homo sapiens
cttcctccacgcggctgccccctgcc

SEQ ID NO: 68298 - DNA, 26 bp, Homo sapiens
ttcctccacgcggctgccccctgccc

SEQ ID NO: 68299 - DNA, 26 bp, Homo sapiens
tcctccacgcggctgccccctgcccg

SEQ ID NO: 68300 - DNA, 26 bp, Homo sapiens
cctccacgcggctgccccctgcccgg

SEQ ID NO: 68301 - DNA, 26 bp, Homo sapiens
ctccacgcggctgccccctgcccggg

SEQ ID NO: 68302 - DNA, 26 bp, Homo sapiens
tccacgcggctgccccctgcccgggt

SEQ ID NO: 68303 - DNA, 26 bp, Homo sapiens
ccacgcggctgccccctgcccgggtg

SEQ ID NO: 68304 - DNA, 26 bp, Homo sapiens
cacgcggctgccccctgcccgggtga

SEQ ID NO: 68305 - DNA, 26 bp, Homo sapiens
acgcggctgccccctgcccgggtgaa

SEQ ID NO: 68306 - DNA, 26 bp, Homo sapiens
cgcggctgccccctgcccgggtgaag

SEQ ID NO: 68307 - DNA, 26 bp, Homo sapiens
gcggctgccccctgcccgggtgaagt

SEQ ID NO: 68308 - DNA, 26 bp, Homo sapiens
cggctgccccctgcccgggtgaagtg

SEQ ID NO: 68309 - DNA, 26 bp, Homo sapiens
ggctgccccctgcccgggtgaagtgg

SEQ ID NO: 68310 - DNA, 26 bp, Homo sapiens
gctgccccctgcccgggtgaagtggt

SEQ ID NO: 68311 - DNA, 26 bp, Homo sapiens
ctgccccctgcccgggtgaagtggtt

SEQ ID NO: 68312 - DNA, 26 bp, Homo sapiens
tgccccctgcccgggtgaagtggttc

SEQ ID NO: 68313 - DNA, 26 bp, Homo sapiens
gccccctgcccgggtgaagtggttct

SEQ ID NO: 68314 - DNA, 26 bp, Homo sapiens
ccccctgcccgggtgaagtggttctc

SEQ ID NO: 68315 - DNA, 26 bp, Homo sapiens
cccctgcccgggtgaagtggttctcc

SEQ ID NO: 68316 - DNA, 26 bp, Homo sapiens
ccctgcccgggtgaagtggttctcca

SEQ ID NO: 68317 - DNA, 26 bp, Homo sapiens
cctgcccgggtgaagtggttctccac

SEQ ID NO: 68318 - DNA, 26 bp, Homo sapiens
ctgcccgggtgaagtggttctccacc

SEQ ID NO: 68319 - DNA, 26 bp, Homo sapiens
tgcccgggtgaagtggttctccacca

SEQ ID NO: 68320 - DNA, 26 bp, Homo sapiens
gcccgggtgaagtggttctccaccac

SEQ ID NO: 68321 - DNA, 26 bp, Homo sapiens
cccgggtgaagtggttctccaccacg

SEQ ID NO: 68322 - DNA, 26 bp, Homo sapiens
ccgggtgaagtggttctccaccacga

SEQ ID NO: 68323 - DNA, 26 bp, Homo sapiens
cgggtgaagtggttctccaccacgaa

SEQ ID NO: 68324 - DNA, 26 bp, Homo sapiens
gggtgaagtggttctccaccacgaaa

SEQ ID NO: 68325 - DNA, 26 bp, Homo sapiens
ggtgaagtggttctccaccacgaaat

SEQ ID NO: 68326 - DNA, 26 bp, Homo sapiens
gtgaagtggttctccaccacgaaatc

SEQ ID NO: 68327 - DNA, 26 bp, Homo sapiens
tgaagtggttctccaccacgaaatca

SEQ ID NO: 68328 - DNA, 26 bp, Homo sapiens
gaagtggttctccaccacgaaatcaa

SEQ ID NO: 68329 - DNA, 26 bp, Homo sapiens
aagtggttctccaccacgaaatcaag

SEQ ID NO: 68330 - DNA, 26 bp, Homo sapiens
agtggttctccaccacgaaatcaagg

SEQ ID NO: 68331 - DNA, 26 bp, Homo sapiens
gtggttctccaccacgaaatcaaggg

SEQ ID NO: 68332 - DNA, 26 bp, Homo sapiens
tggttctccaccacgaaatcaagggc

SEQ ID NO: 68333 - DNA, 26 bp, Homo sapiens
ggttctccaccacgaaatcaagggcg

SEQ ID NO: 68334 - DNA, 26 bp, Homo sapiens
gttctccaccacgaaatcaagggcga

SEQ ID NO: 68335 - DNA, 26 bp, Homo sapiens
ttctccaccacgaaatcaagggcgag

SEQ ID NO: 68336 - DNA, 26 bp, Homo sapiens
tctccaccacgaaatcaagggcgagg

SEQ ID NO: 68337 - DNA, 26 bp, Homo sapiens
ctccaccacgaaatcaagggcgaggc

SEQ ID NO: 68338 - DNA, 26 bp, Homo sapiens
tccaccacgaaatcaagggcgaggcc

SEQ ID NO: 68339 - DNA, 26 bp, Homo sapiens
ccaccacgaaatcaagggcgaggccg

SEQ ID NO: 68340 - DNA, 26 bp, Homo sapiens
caccacgaaatcaagggcgaggccga

SEQ ID NO: 68341 - DNA, 26 bp, Homo sapiens
accacgaaatcaagggcgaggccgat

SEQ ID NO: 68342 - DNA, 26 bp, Homo sapiens
ccacgaaatcaagggcgaggccgata

SEQ ID NO: 68343 - DNA, 26 bp, Homo sapiens
cacgaaatcaagggcgaggccgatat

SEQ ID NO: 68344 - DNA, 26 bp, Homo sapiens
acgaaatcaagggcgaggccgatatt

SEQ ID NO: 68345 - DNA, 26 bp, Homo sapiens
cgaaatcaagggcgaggccgatattg

SEQ ID NO: 68346 - DNA, 26 bp, Homo sapiens
gaaatcaagggcgaggccgatattgg

SEQ ID NO: 68347 - DNA, 26 bp, Homo sapiens
aaatcaagggcgaggccgatattggc

SEQ ID NO: 68348 - DNA, 26 bp, Homo sapiens
aatcaagggcgaggccgatattggcc

SEQ ID NO: 68349 - DNA, 26 bp, Homo sapiens
atcaagggcgaggccgatattggcca

SEQ ID NO: 68350 - DNA, 26 bp, Homo sapiens
tcaagggcgaggccgatattggccaa

SEQ ID NO: 68351 - DNA, 26 bp, Homo sapiens
caagggcgaggccgatattggccaac

SEQ ID NO: 68352 - DNA, 26 bp, Homo sapiens
aagggcgaggccgatattggccaact

SEQ ID NO: 68353 - DNA, 26 bp, Homo sapiens
agggcgaggccgatattggccaactc

SEQ ID NO: 68354 - DNA, 26 bp, Homo sapiens
gggcgaggccgatattggccaactcc

SEQ ID NO: 68355 - DNA, 26 bp, Homo sapiens
ggcgaggccgatattggccaactccc

SEQ ID NO: 68356 - DNA, 26 bp, Homo sapiens
gcgaggccgatattggccaactcccc

SEQ ID NO: 68357 - DNA, 26 bp, Homo sapiens
cgaggccgatattggccaactcccca

SEQ ID NO: 68358 - DNA, 26 bp, Homo sapiens
gaggccgatattggccaactccccac

SEQ ID NO: 68359 - DNA, 26 bp, Homo sapiens
aggccgatattggccaactccccacc

SEQ ID NO: 68360 - DNA, 26 bp, Homo sapiens
ggccgatattggccaactccccacca

SEQ ID NO: 68361 - DNA, 26 bp, Homo sapiens
gccgatattggccaactccccaccag

SEQ ID NO: 68362 - DNA, 26 bp, Homo sapiens
ccgatattggccaactccccaccagc

SEQ ID NO: 68363 - DNA, 26 bp, Homo sapiens
cgatattggccaactccccaccagca

SEQ ID NO: 68364 - DNA, 26 bp, Homo sapiens
gatattggccaactccccaccagcaa

SEQ ID NO: 68365 - DNA, 26 bp, Homo sapiens
atattggccaactccccaccagcaaa

SEQ ID NO: 68366 - DNA, 26 bp, Homo sapiens
tattggccaactccccaccagcaaac

SEQ ID NO: 68367 - DNA, 26 bp, Homo sapiens
attggccaactccccaccagcaaacc

SEQ ID NO: 68368 - DNA, 26 bp, Homo sapiens
ttggccaactccccaccagcaaaccc

SEQ ID NO: 68369 - DNA, 26 bp, Homo sapiens
tggccaactccccaccagcaaacccg

SEQ ID NO: 68370 - DNA, 26 bp, Homo sapiens
ggccaactccccaccagcaaacccga

SEQ ID NO: 68371 - DNA, 26 bp, Homo sapiens
gccaactccccaccagcaaacccgag

SEQ ID NO: 68372 - DNA, 26 bp, Homo sapiens
ccaactccccaccagcaaacccgagg

SEQ ID NO: 68373 - DNA, 26 bp, Homo sapiens
caactccccaccagcaaacccgaggg

SEQ ID NO: 68374 - DNA, 26 bp, Homo sapiens
aactccccaccagcaaacccgagggc

SEQ ID NO: 68375 - DNA, 26 bp, Homo sapiens
actccccaccagcaaacccgagggct

SEQ ID NO: 68376 - DNA, 26 bp, Homo sapiens
ctccccaccagcaaacccgagggctt

SEQ ID NO: 68377 - DNA, 26 bp, Homo sapiens
tccccaccagcaaacccgagggcttt

SEQ ID NO: 68378 - DNA, 26 bp, Homo sapiens
ccccaccagcaaacccgagggctttc

SEQ ID NO: 68379 - DNA, 26 bp, Homo sapiens
cccaccagcaaacccgagggctttca

SEQ ID NO: 68380 - DNA, 26 bp, Homo sapiens
ccaccagcaaacccgagggctttcac

SEQ ID NO: 68381 - DNA, 26 bp, Homo sapiens
caccagcaaacccgagggctttcact

SEQ ID NO: 68382 - DNA, 26 bp, Homo sapiens
accagcaaacccgagggctttcactg

SEQ ID NO: 68383 - DNA, 26 bp, Homo sapiens
ccagcaaacccgagggctttcactgc

SEQ ID NO: 68384 - DNA, 26 bp, Homo sapiens
cagcaaacccgagggctttcactgca

SEQ ID NO: 68385 - DNA, 26 bp, Homo sapiens
agcaaacccgagggctttcactgcac

SEQ ID NO: 68386 - DNA, 26 bp, Homo sapiens
gcaaacccgagggctttcactgcacc

SEQ ID NO: 68387 - DNA, 26 bp, Homo sapiens
caaacccgagggctttcactgcaccc

SEQ ID NO: 68388 - DNA, 26 bp, Homo sapiens
aaacccgagggctttcactgcaccca

SEQ ID NO: 68389 - DNA, 26 bp, Homo sapiens
aacccgagggctttcactgcacccag

SEQ ID NO: 68390 - DNA, 26 bp, Homo sapiens
acccgagggctttcactgcacccaga

SEQ ID NO: 68391 - DNA, 26 bp, Homo sapiens
cccgagggctttcactgcacccagaa

SEQ ID NO: 68392 - DNA, 26 bp, Homo sapiens
ccgagggctttcactgcacccagaac

SEQ ID NO: 68393 - DNA, 26 bp, Homo sapiens
cgagggctttcactgcacccagaacc

SEQ ID NO: 68394 - DNA, 26 bp, Homo sapiens
gagggctttcactgcacccagaacct

SEQ ID NO: 68395 - DNA, 26 bp, Homo sapiens
agggctttcactgcacccagaacctg

SEQ ID NO: 68396 - DNA, 26 bp, Homo sapiens
gggctttcactgcacccagaacctgg

SEQ ID NO: 68397 - DNA, 26 bp, Homo sapiens
ggctttcactgcacccagaacctggg

SEQ ID NO: 68398 - DNA, 26 bp, Homo sapiens
gctttcactgcacccagaacctgggc

SEQ ID NO: 68399 - DNA, 26 bp, Homo sapiens
ctttcactgcacccagaacctgggcc

SEQ ID NO: 68400 - DNA, 26 bp, Homo sapiens
tttcactgcacccagaacctgggcct

SEQ ID NO: 68401 - DNA, 26 bp, Homo sapiens
ttcactgcacccagaacctgggcctt

SEQ ID NO: 68402 - DNA, 26 bp, Homo sapiens
tcactgcacccagaacctgggccttg

SEQ ID NO: 68403 - DNA, 26 bp, Homo sapiens
cactgcacccagaacctgggccttgg

SEQ ID NO: 68404 - DNA, 26 bp, Homo sapiens
actgcacccagaacctgggccttggt

SEQ ID NO: 68405 - DNA, 26 bp, Homo sapiens
ctgcacccagaacctgggccttggtg

SEQ ID NO: 68406 - DNA, 26 bp, Homo sapiens
tgcacccagaacctgggccttggtgg

SEQ ID NO: 68407 - DNA, 26 bp, Homo sapiens
gcacccagaacctgggccttggtgga

SEQ ID NO: 68408 - DNA, 26 bp, Homo sapiens
cacccagaacctgggccttggtggag

SEQ ID NO: 68409 - DNA, 26 bp, Homo sapiens
acccagaacctgggccttggtggagt

SEQ ID NO: 68410 - DNA, 26 bp, Homo sapiens
cccagaacctgggccttggtggagta

SEQ ID NO: 68411 - DNA, 26 bp, Homo sapiens
ccagaacctgggccttggtggagtag

SEQ ID NO: 68412 - DNA, 26 bp, Homo sapiens
cagaacctgggccttggtggagtagg

SEQ ID NO: 68413 - DNA, 26 bp, Homo sapiens
agaacctgggccttggtggagtaggt

SEQ ID NO: 68414 - DNA, 26 bp, Homo sapiens
gaacctgggccttggtggagtaggtg

SEQ ID NO: 68415 - DNA, 26 bp, Homo sapiens
aacctgggccttggtggagtaggtgt

SEQ ID NO: 68416 - DNA, 26 bp, Homo sapiens
acctgggccttggtggagtaggtgtc

SEQ ID NO: 68417 - DNA, 26 bp, Homo sapiens
cctgggccttggtggagtaggtgtcc

SEQ ID NO: 68418 - DNA, 26 bp, Homo sapiens
ctgggccttggtggagtaggtgtcca

SEQ ID NO: 68419 - DNA, 26 bp, Homo sapiens
tgggccttggtggagtaggtgtccaa

SEQ ID NO: 68420 - DNA, 26 bp, Homo sapiens
gggccttggtggagtaggtgtccaag

SEQ ID NO: 68421 - DNA, 26 bp, Homo sapiens
ggccttggtggagtaggtgtccaagg

SEQ ID NO: 68422 - DNA, 26 bp, Homo sapiens
gccttggtggagtaggtgtccaagga

SEQ ID NO: 68423 - DNA, 26 bp, Homo sapiens
ccttggtggagtaggtgtccaaggag

SEQ ID NO: 68424 - DNA, 26 bp, Homo sapiens
cttggtggagtaggtgtccaaggaga

SEQ ID NO: 68425 - DNA, 26 bp, Homo sapiens
ttggtggagtaggtgtccaaggagaa

SEQ ID NO: 68426 - DNA, 26 bp, Homo sapiens
tggtggagtaggtgtccaaggagaac

SEQ ID NO: 68427 - DNA, 26 bp, Homo sapiens
ggtggagtaggtgtccaaggagaaca

SEQ ID NO: 68428 - DNA, 26 bp, Homo sapiens
gtggagtaggtgtccaaggagaacat

SEQ ID NO: 68429 - DNA, 26 bp, Homo sapiens
tggagtaggtgtccaaggagaacatg

SEQ ID NO: 68430 - DNA, 26 bp, Homo sapiens
ggagtaggtgtccaaggagaacatgg

SEQ ID NO: 68431 - DNA, 26 bp, Homo sapiens
gagtaggtgtccaaggagaacatggt

SEQ ID NO: 68432 - DNA, 26 bp, Homo sapiens
agtaggtgtccaaggagaacatggtt

SEQ ID NO: 68433 - DNA, 26 bp, Homo sapiens
gtaggtgtccaaggagaacatggttc

SEQ ID NO: 68434 - DNA, 26 bp, Homo sapiens
taggtgtccaaggagaacatggttct

SEQ ID NO: 68435 - DNA, 26 bp, Homo sapiens
aggtgtccaaggagaacatggttctg

SEQ ID NO: 68436 - DNA, 26 bp, Homo sapiens
ggtgtccaaggagaacatggttctgg

SEQ ID NO: 68437 - DNA, 26 bp, Homo sapiens
gtgtccaaggagaacatggttctggg

SEQ ID NO: 68438 - DNA, 26 bp, Homo sapiens
tgtccaaggagaacatggttctgggc

SEQ ID NO: 68439 - DNA, 26 bp, Homo sapiens
gtccaaggagaacatggttctgggct

SEQ ID NO: 68440 - DNA, 26 bp, Homo sapiens
tccaaggagaacatggttctgggctc

SEQ ID NO: 68441 - DNA, 26 bp, Homo sapiens
ccaaggagaacatggttctgggctca

SEQ ID NO: 68442 - DNA, 26 bp, Homo sapiens
caaggagaacatggttctgggctcat

SEQ ID NO: 68443 - DNA, 26 bp, Homo sapiens
aaggagaacatggttctgggctcatc

SEQ ID NO: 68444 - DNA, 26 bp, Homo sapiens
aggagaacatggttctgggctcatcg

SEQ ID NO: 68445 - DNA, 26 bp, Homo sapiens
ggagaacatggttctgggctcatcgc

SEQ ID NO: 68446 - DNA, 26 bp, Homo sapiens
gagaacatggttctgggctcatcgct

SEQ ID NO: 68447 - DNA, 26 bp, Homo sapiens
agaacatggttctgggctcatcgcta

SEQ ID NO: 68448 - DNA, 26 bp, Homo sapiens
gaacatggttctgggctcatcgctaa

SEQ ID NO: 68449 - DNA, 26 bp, Homo sapiens
aacatggttctgggctcatcgctaaa

SEQ ID NO: 68450 - DNA, 26 bp, Homo sapiens
acatggttctgggctcatcgctaaac

SEQ ID NO: 68451 - DNA, 26 bp, Homo sapiens
catggttctgggctcatcgctaaact

SEQ ID NO: 68452 - DNA, 26 bp, Homo sapiens
atggttctgggctcatcgctaaactg

SEQ ID NO: 68453 - DNA, 26 bp, Homo sapiens
tggttctgggctcatcgctaaactgg

SEQ ID NO: 68454 - DNA, 26 bp, Homo sapiens
ggttctgggctcatcgctaaactgga

SEQ ID NO: 68455 - DNA, 26 bp, Homo sapiens
gttctgggctcatcgctaaactggac

SEQ ID NO: 68456 - DNA, 26 bp, Homo sapiens
ttctgggctcatcgctaaactggacc

SEQ ID NO: 68457 - DNA, 26 bp, Homo sapiens
tctgggctcatcgctaaactggacca

SEQ ID NO: 68458 - DNA, 26 bp, Homo sapiens
ctgggctcatcgctaaactggaccac

SEQ ID NO: 68459 - DNA, 26 bp, Homo sapiens
tgggctcatcgctaaactggaccacc

SEQ ID NO: 68460 - DNA, 26 bp, Homo sapiens
gggctcatcgctaaactggaccaccc

SEQ ID NO: 68461 - DNA, 26 bp, Homo sapiens
ggctcatcgctaaactggaccacccc

SEQ ID NO: 68462 - DNA, 26 bp, Homo sapiens
gctcatcgctaaactggaccaccccc

SEQ ID NO: 68463 - DNA, 26 bp, Homo sapiens
ctcatcgctaaactggaccaccccca

SEQ ID NO: 68464 - DNA, 26 bp, Homo sapiens
tcatcgctaaactggaccacccccac

SEQ ID NO: 68465 - DNA, 26 bp, Homo sapiens
catcgctaaactggaccacccccact

SEQ ID NO: 68466 - DNA, 26 bp, Homo sapiens
atcgctaaactggaccacccccactc

SEQ ID NO: 68467 - DNA, 26 bp, Homo sapiens
tcgctaaactggaccacccccactcg

SEQ ID NO: 68468 - DNA, 26 bp, Homo sapiens
cgctaaactggaccacccccactcgg

SEQ ID NO: 68469 - DNA, 26 bp, Homo sapiens
gctaaactggaccacccccactcgga

SEQ ID NO: 68470 - DNA, 26 bp, Homo sapiens
ctaaactggaccacccccactcggat

SEQ ID NO: 68471 - DNA, 26 bp, Homo sapiens
taaactggaccacccccactcggatc

SEQ ID NO: 68472 - DNA, 26 bp, Homo sapiens
aaactggaccacccccactcggatct

SEQ ID NO: 68473 - DNA, 26 bp, Homo sapiens
aactggaccacccccactcggatctg

SEQ ID NO: 68474 - DNA, 26 bp, Homo sapiens
actggaccacccccactcggatctgc

SEQ ID NO: 68475 - DNA, 26 bp, Homo sapiens
ctggaccacccccactcggatctgct

SEQ ID NO: 68476 - DNA, 26 bp, Homo sapiens
tggaccacccccactcggatctgctg

SEQ ID NO: 68477 - DNA, 26 bp, Homo sapiens
ggaccacccccactcggatctgctga

SEQ ID NO: 68478 - DNA, 26 bp, Homo sapiens
gaccacccccactcggatctgctgag

SEQ ID NO: 68479 - DNA, 26 bp, Homo sapiens
accacccccactcggatctgctgagt

SEQ ID NO: 68480 - DNA, 26 bp, Homo sapiens
ccacccccactcggatctgctgagtt

SEQ ID NO: 68481 - DNA, 26 bp, Homo sapiens
cacccccactcggatctgctgagttc

SEQ ID NO: 68482 - DNA, 26 bp, Homo sapiens
acccccactcggatctgctgagttcc

SEQ ID NO: 68483 - DNA, 26 bp, Homo sapiens
cccccactcggatctgctgagttcca

SEQ ID NO: 68484 - DNA, 26 bp, Homo sapiens
ccccactcggatctgctgagttccaa

SEQ ID NO: 68485 - DNA, 26 bp, Homo sapiens
cccactcggatctgctgagttccaat

SEQ ID NO: 68486 - DNA, 26 bp, Homo sapiens
ccactcggatctgctgagttccaatt

SEQ ID NO: 68487 - DNA, 26 bp, Homo sapiens
cactcggatctgctgagttccaattg

SEQ ID NO: 68488 - DNA, 26 bp, Homo sapiens
actcggatctgctgagttccaattgg

SEQ ID NO: 68489 - DNA, 26 bp, Homo sapiens
ctcggatctgctgagttccaattggg

SEQ ID NO: 68490 - DNA, 26 bp, Homo sapiens
tcggatctgctgagttccaattggga

SEQ ID NO: 68491 - DNA, 26 bp, Homo sapiens
cggatctgctgagttccaattgggag

SEQ ID NO: 68492 - DNA, 26 bp, Homo sapiens
ggatctgctgagttccaattgggagt

SEQ ID NO: 68493 - DNA, 26 bp, Homo sapiens
gatctgctgagttccaattgggagtt

SEQ ID NO: 68494 - DNA, 26 bp, Homo sapiens
atctgctgagttccaattgggagttt

SEQ ID NO: 68495 - DNA, 26 bp, Homo sapiens
tctgctgagttccaattgggagtttc

SEQ ID NO: 68496 - DNA, 26 bp, Homo sapiens
ctgctgagttccaattgggagtttct

SEQ ID NO: 68497 - DNA, 26 bp, Homo sapiens
tgctgagttccaattgggagtttctc

SEQ ID NO: 68498 - DNA, 26 bp, Homo sapiens
gctgagttccaattgggagtttctca

SEQ ID NO: 68499 - DNA, 26 bp, Homo sapiens
ctgagttccaattgggagtttctcaa

SEQ ID NO: 68500 - DNA, 26 bp, Homo sapiens
tgagttccaattgggagtttctcaag

SEQ ID NO: 68501 - DNA, 26 bp, Homo sapiens
gagttccaattgggagtttctcaagg

SEQ ID NO: 68502 - DNA, 26 bp, Homo sapiens
agttccaattgggagtttctcaagga

SEQ ID NO: 68503 - DNA, 26 bp, Homo sapiens
gttccaattgggagtttctcaaggag

SEQ ID NO: 68504 - DNA, 26 bp, Homo sapiens
ttccaattgggagtttctcaaggaga

SEQ ID NO: 68505 - DNA, 26 bp, Homo sapiens
tccaattgggagtttctcaaggagat

SEQ ID NO: 68506 - DNA, 26 bp, Homo sapiens
ccaattgggagtttctcaaggagatt

SEQ ID NO: 68507 - DNA, 26 bp, Homo sapiens
caattgggagtttctcaaggagattt

SEQ ID NO: 68508 - DNA, 26 bp, Homo sapiens
aattgggagtttctcaaggagattta

SEQ ID NO: 68509 - DNA, 26 bp, Homo sapiens
attgggagtttctcaaggagatttac

SEQ ID NO: 68510 - DNA, 26 bp, Homo sapiens
ttgggagtttctcaaggagatttaca

SEQ ID NO: 68511 - DNA, 26 bp, Homo sapiens
tgggagtttctcaaggagatttacaa

SEQ ID NO: 68512 - DNA, 26 bp, Homo sapiens
gggagtttctcaaggagatttacaag

SEQ ID NO: 68513 - DNA, 26 bp, Homo sapiens
ggagtttctcaaggagatttacaagg

SEQ ID NO: 68514 - DNA, 26 bp, Homo sapiens
gagtttctcaaggagatttacaagga

SEQ ID NO: 68515 - DNA, 26 bp, Homo sapiens
agtttctcaaggagatttacaaggaa

SEQ ID NO: 68516 - DNA, 26 bp, Homo sapiens
gtttctcaaggagatttacaaggaag

SEQ ID NO: 68517 - DNA, 26 bp, Homo sapiens
tttctcaaggagatttacaaggaagt

SEQ ID NO: 68518 - DNA, 26 bp, Homo sapiens
ttctcaaggagatttacaaggaagtc

SEQ ID NO: 68519 - DNA, 26 bp, Homo sapiens
tctcaaggagatttacaaggaagtcg

SEQ ID NO: 68520 - DNA, 26 bp, Homo sapiens
ctcaaggagatttacaaggaagtcga

SEQ ID NO: 68521 - DNA, 26 bp, Homo sapiens
tcaaggagatttacaaggaagtcgag

SEQ ID NO: 68522 - DNA, 26 bp, Homo sapiens
caaggagatttacaaggaagtcgaga

SEQ ID NO: 68523 - DNA, 26 bp, Homo sapiens
aaggagatttacaaggaagtcgagaa

SEQ ID NO: 68524 - DNA, 26 bp, Homo sapiens
aggagatttacaaggaagtcgagaat

SEQ ID NO: 68525 - DNA, 26 bp, Homo sapiens
ggagatttacaaggaagtcgagaatg

SEQ ID NO: 68526 - DNA, 26 bp, Homo sapiens
gagatttacaaggaagtcgagaatga

SEQ ID NO: 68527 - DNA, 26 bp, Homo sapiens
agatttacaaggaagtcgagaatgac

SEQ ID NO: 68528 - DNA, 26 bp, Homo sapiens
gatttacaaggaagtcgagaatgact

SEQ ID NO: 68529 - DNA, 26 bp, Homo sapiens
atttacaaggaagtcgagaatgactg

SEQ ID NO: 68530 - DNA, 26 bp, Homo sapiens
tttacaaggaagtcgagaatgactgc

SEQ ID NO: 68531 - DNA, 26 bp, Homo sapiens
ttacaaggaagtcgagaatgactgcg

SEQ ID NO: 68532 - DNA, 26 bp, Homo sapiens
tacaaggaagtcgagaatgactgcga

SEQ ID NO: 68533 - DNA, 26 bp, Homo sapiens
acaaggaagtcgagaatgactgcgaa

SEQ ID NO: 68534 - DNA, 26 bp, Homo sapiens
caaggaagtcgagaatgactgcgaaa

SEQ ID NO: 68535 - DNA, 26 bp, Homo sapiens
aaggaagtcgagaatgactgcgaaat

SEQ ID NO: 68536 - DNA, 26 bp, Homo sapiens
aggaagtcgagaatgactgcgaaatt

SEQ ID NO: 68537 - DNA, 26 bp, Homo sapiens
ggaagtcgagaatgactgcgaaattg

SEQ ID NO: 68538 - DNA, 26 bp, Homo sapiens
gaagtcgagaatgactgcgaaattga

SEQ ID NO: 68539 - DNA, 26 bp, Homo sapiens
aagtcgagaatgactgcgaaattgac

SEQ ID NO: 68540 - DNA, 26 bp, Homo sapiens
agtcgagaatgactgcgaaattgaca

SEQ ID NO: 68541 - DNA, 26 bp, Homo sapiens
gtcgagaatgactgcgaaattgacac

SEQ ID NO: 68542 - DNA, 26 bp, Homo sapiens
tcgagaatgactgcgaaattgacact

SEQ ID NO: 68543 - DNA, 26 bp, Homo sapiens
cgagaatgactgcgaaattgacactt

SEQ ID NO: 68544 - DNA, 26 bp, Homo sapiens
gagaatgactgcgaaattgacacttc

SEQ ID NO: 68545 - DNA, 26 bp, Homo sapiens
agaatgactgcgaaattgacacttcc

SEQ ID NO: 68546 - DNA, 26 bp, Homo sapiens
gaatgactgcgaaattgacacttccg

SEQ ID NO: 68547 - DNA, 26 bp, Homo sapiens
aatgactgcgaaattgacacttccgg

SEQ ID NO: 68548 - DNA, 26 bp, Homo sapiens
atgactgcgaaattgacacttccggt

SEQ ID NO: 68549 - DNA, 26 bp, Homo sapiens
tgactgcgaaattgacacttccggtg

SEQ ID NO: 68550 - DNA, 26 bp, Homo sapiens
gactgcgaaattgacacttccggtgt

SEQ ID NO: 68551 - DNA, 26 bp, Homo sapiens
actgcgaaattgacacttccggtgtt

SEQ ID NO: 68552 - DNA, 26 bp, Homo sapiens
ctgcgaaattgacacttccggtgttg

SEQ ID NO: 68553 - DNA, 26 bp, Homo sapiens
tgcgaaattgacacttccggtgttgt

SEQ ID NO: 68554 - DNA, 26 bp, Homo sapiens
gcgaaattgacacttccggtgttgtt

SEQ ID NO: 68555 - DNA, 26 bp, Homo sapiens
cgaaattgacacttccggtgttgttt

SEQ ID NO: 68556 - DNA, 26 bp, Homo sapiens
gaaattgacacttccggtgttgtttg

SEQ ID NO: 68557 - DNA, 26 bp, Homo sapiens
aaattgacacttccggtgttgtttga

SEQ ID NO: 68558 - DNA, 26 bp, Homo sapiens
aattgacacttccggtgttgtttgat

SEQ ID NO: 68559 - DNA, 26 bp, Homo sapiens
attgacacttccggtgttgtttgatc

SEQ ID NO: 68560 - DNA, 26 bp, Homo sapiens
ttgacacttccggtgttgtttgatcc

SEQ ID NO: 68561 - DNA, 26 bp, Homo sapiens
tgacacttccggtgttgtttgatcca

SEQ ID NO: 68562 - DNA, 26 bp, Homo sapiens
gacacttccggtgttgtttgatccat

SEQ ID NO: 68563 - DNA, 26 bp, Homo sapiens
acacttccggtgttgtttgatccatc

SEQ ID NO: 68564 - DNA, 26 bp, Homo sapiens
cacttccggtgttgtttgatccatca

SEQ ID NO: 68565 - DNA, 26 bp, Homo sapiens
acttccggtgttgtttgatccatcaa

SEQ ID NO: 68566 - DNA, 26 bp, Homo sapiens
cttccggtgttgtttgatccatcaat

SEQ ID NO: 68567 - DNA, 26 bp, Homo sapiens
ttccggtgttgtttgatccatcaata

SEQ ID NO: 68568 - DNA, 26 bp, Homo sapiens
tccggtgttgtttgatccatcaataa

SEQ ID NO: 68569 - DNA, 26 bp, Homo sapiens
ccggtgttgtttgatccatcaataag

SEQ ID NO: 68570 - DNA, 26 bp, Homo sapiens
cggtgttgtttgatccatcaataagg

SEQ ID NO: 68571 - DNA, 26 bp, Homo sapiens
ggtgttgtttgatccatcaataagga

SEQ ID NO: 68572 - DNA, 26 bp, Homo sapiens
gtgttgtttgatccatcaataaggaa

SEQ ID NO: 68573 - DNA, 26 bp, Homo sapiens
tgttgtttgatccatcaataaggaaa

SEQ ID NO: 68574 - DNA, 26 bp, Homo sapiens
gttgtttgatccatcaataaggaaaa

SEQ ID NO: 68575 - DNA, 26 bp, Homo sapiens
ttgtttgatccatcaataaggaaaat

SEQ ID NO: 68576 - DNA, 26 bp, Homo sapiens
tgtttgatccatcaataaggaaaata

SEQ ID NO: 68577 - DNA, 26 bp, Homo sapiens
gtttgatccatcaataaggaaaataa

SEQ ID NO: 68578 - DNA, 26 bp, Homo sapiens
tttgatccatcaataaggaaaataat

SEQ ID NO: 68579 - DNA, 26 bp, Homo sapiens
ttgatccatcaataaggaaaataatg

SEQ ID NO: 68580 - DNA, 26 bp, Homo sapiens
tgatccatcaataaggaaaataatgt

SEQ ID NO: 68581 - DNA, 26 bp, Homo sapiens
gatccatcaataaggaaaataatgtc

SEQ ID NO: 68582 - DNA, 26 bp, Homo sapiens
atccatcaataaggaaaataatgtca

SEQ ID NO: 68583 - DNA, 26 bp, Homo sapiens
tccatcaataaggaaaataatgtcag

SEQ ID NO: 68584 - DNA, 26 bp, Homo sapiens
ccatcaataaggaaaataatgtcagc

SEQ ID NO: 68585 - DNA, 26 bp, Homo sapiens
catcaataaggaaaataatgtcagca

SEQ ID NO: 68586 - DNA, 26 bp, Homo sapiens
atcaataaggaaaataatgtcagcag

SEQ ID NO: 68587 - DNA, 26 bp, Homo sapiens
tcaataaggaaaataatgtcagcaga

SEQ ID NO: 68588 - DNA, 26 bp, Homo sapiens
caataaggaaaataatgtcagcagag

SEQ ID NO: 68589 - DNA, 26 bp, Homo sapiens
aataaggaaaataatgtcagcagagt

SEQ ID NO: 68590 - DNA, 26 bp, Homo sapiens
ataaggaaaataatgtcagcagagtc

SEQ ID NO: 68591 - DNA, 26 bp, Homo sapiens
taaggaaaataatgtcagcagagtct

SEQ ID NO: 68592 - DNA, 26 bp, Homo sapiens
aaggaaaataatgtcagcagagtctt

SEQ ID NO: 68593 - DNA, 26 bp, Homo sapiens
aggaaaataatgtcagcagagtcttg

SEQ ID NO: 68594 - DNA, 26 bp, Homo sapiens
ggaaaataatgtcagcagagtcttgt

SEQ ID NO: 68595 - DNA, 26 bp, Homo sapiens
gaaaataatgtcagcagagtcttgtg

SEQ ID NO: 68596 - DNA, 26 bp, Homo sapiens
aaaataatgtcagcagagtcttgtgc

SEQ ID NO: 68597 - DNA, 26 bp, Homo sapiens
aaataatgtcagcagagtcttgtgct

SEQ ID NO: 68598 - DNA, 26 bp, Homo sapiens
aataatgtcagcagagtcttgtgctg

SEQ ID NO: 68599 - DNA, 26 bp, Homo sapiens
ataatgtcagcagagtcttgtgctgt

SEQ ID NO: 68600 - DNA, 26 bp, Homo sapiens
taatgtcagcagagtcttgtgctgtg

SEQ ID NO: 68601 - DNA, 26 bp, Homo sapiens
aatgtcagcagagtcttgtgctgtga

SEQ ID NO: 68602 - DNA, 26 bp, Homo sapiens
atgtcagcagagtcttgtgctgtgat

SEQ ID NO: 68603 - DNA, 26 bp, Homo sapiens
tgtcagcagagtcttgtgctgtgatg

SEQ ID NO: 68604 - DNA, 26 bp, Homo sapiens
gtcagcagagtcttgtgctgtgatgt

SEQ ID NO: 68605 - DNA, 26 bp, Homo sapiens
tcagcagagtcttgtgctgtgatgtc

SEQ ID NO: 68606 - DNA, 26 bp, Homo sapiens
cagcagagtcttgtgctgtgatgtct

SEQ ID NO: 68607 - DNA, 26 bp, Homo sapiens
agcagagtcttgtgctgtgatgtctt

SEQ ID NO: 68608 - DNA, 26 bp, Homo sapiens
gcagagtcttgtgctgtgatgtcttt

SEQ ID NO: 68609 - DNA, 26 bp, Homo sapiens
cagagtcttgtgctgtgatgtcttta

SEQ ID NO: 68610 - DNA, 26 bp, Homo sapiens
agagtcttgtgctgtgatgtctttaa

SEQ ID NO: 68611 - DNA, 26 bp, Homo sapiens
gagtcttgtgctgtgatgtctttaag

SEQ ID NO: 68612 - DNA, 26 bp, Homo sapiens
agtcttgtgctgtgatgtctttaagg

SEQ ID NO: 68613 - DNA, 26 bp, Homo sapiens
gtcttgtgctgtgatgtctttaaggg

SEQ ID NO: 68614 - DNA, 26 bp, Homo sapiens
tcttgtgctgtgatgtctttaagggt

SEQ ID NO: 68615 - DNA, 26 bp, Homo sapiens
cttgtgctgtgatgtctttaagggtt

SEQ ID NO: 68616 - DNA, 26 bp, Homo sapiens
ttgtgctgtgatgtctttaagggttt

SEQ ID NO: 68617 - DNA, 26 bp, Homo sapiens
tgtgctgtgatgtctttaagggtttc

SEQ ID NO: 68618 - DNA, 26 bp, Homo sapiens
gtgctgtgatgtctttaagggtttcc

SEQ ID NO: 68619 - DNA, 26 bp, Homo sapiens
tgctgtgatgtctttaagggtttccg

SEQ ID NO: 68620 - DNA, 26 bp, Homo sapiens
gctgtgatgtctttaagggtttccgt

SEQ ID NO: 68621 - DNA, 26 bp, Homo sapiens
ctgtgatgtctttaagggtttccgtg

SEQ ID NO: 68622 - DNA, 26 bp, Homo sapiens
tgtgatgtctttaagggtttccgtgt

SEQ ID NO: 68623 - DNA, 26 bp, Homo sapiens
gtgatgtctttaagggtttccgtgtc

SEQ ID NO: 68624 - DNA, 26 bp, Homo sapiens
tgatgtctttaagggtttccgtgtcc

SEQ ID NO: 68625 - DNA, 26 bp, Homo sapiens
gatgtctttaagggtttccgtgtccc

SEQ ID NO: 68626 - DNA, 26 bp, Homo sapiens
atgtctttaagggtttccgtgtcccc

SEQ ID NO: 68627 - DNA, 26 bp, Homo sapiens
tgtctttaagggtttccgtgtcccca

SEQ ID NO: 68628 - DNA, 26 bp, Homo sapiens
gtctttaagggtttccgtgtccccag

SEQ ID NO: 68629 - DNA, 26 bp, Homo sapiens
tctttaagggtttccgtgtccccagc

SEQ ID NO: 68630 - DNA, 26 bp, Homo sapiens
ctttaagggtttccgtgtccccagcc

SEQ ID NO: 68631 - DNA, 26 bp, Homo sapiens
tttaagggtttccgtgtccccagccc

SEQ ID NO: 68632 - DNA, 26 bp, Homo sapiens
ttaagggtttccgtgtccccagccct

SEQ ID NO: 68633 - DNA, 26 bp, Homo sapiens
taagggtttccgtgtccccagccctt

SEQ ID NO: 68634 - DNA, 26 bp, Homo sapiens
aagggtttccgtgtccccagcccttt

SEQ ID NO: 68635 - DNA, 26 bp, Homo sapiens
agggtttccgtgtccccagccctttc

SEQ ID NO: 68636 - DNA, 26 bp, Homo sapiens
gggtttccgtgtccccagccctttct

SEQ ID NO: 68637 - DNA, 26 bp, Homo sapiens
ggtttccgtgtccccagccctttctg

SEQ ID NO: 68638 - DNA, 26 bp, Homo sapiens
gtttccgtgtccccagccctttctgg

SEQ ID NO: 68639 - DNA, 26 bp, Homo sapiens
tttccgtgtccccagccctttctgga

SEQ ID NO: 68640 - DNA, 26 bp, Homo sapiens
ttccgtgtccccagccctttctggac

SEQ ID NO: 68641 - DNA, 26 bp, Homo sapiens
tccgtgtccccagccctttctggact

SEQ ID NO: 68642 - DNA, 26 bp, Homo sapiens
ccgtgtccccagccctttctggactc

SEQ ID NO: 68643 - DNA, 26 bp, Homo sapiens
cgtgtccccagccctttctggactca

SEQ ID NO: 68644 - DNA, 26 bp, Homo sapiens
gtgtccccagccctttctggactcac

SEQ ID NO: 68645 - DNA, 26 bp, Homo sapiens
tgtccccagccctttctggactcacg

SEQ ID NO: 68646 - DNA, 26 bp, Homo sapiens
gtccccagccctttctggactcacgg

SEQ ID NO: 68647 - DNA, 26 bp, Homo sapiens
tccccagccctttctggactcacgga

SEQ ID NO: 68648 - DNA, 26 bp, Homo sapiens
ccccagccctttctggactcacggat

SEQ ID NO: 68649 - DNA, 26 bp, Homo sapiens
cccagccctttctggactcacggatg

SEQ ID NO: 68650 - DNA, 26 bp, Homo sapiens
ccagccctttctggactcacggatga

SEQ ID NO: 68651 - DNA, 26 bp, Homo sapiens
cagccctttctggactcacggatgaa

SEQ ID NO: 68652 - DNA, 26 bp, Homo sapiens
agccctttctggactcacggatgaat

SEQ ID NO: 68653 - DNA, 26 bp, Homo sapiens
gccctttctggactcacggatgaatg

SEQ ID NO: 68654 - DNA, 26 bp, Homo sapiens
ccctttctggactcacggatgaatgc

SEQ ID NO: 68655 - DNA, 26 bp, Homo sapiens
cctttctggactcacggatgaatgca

SEQ ID NO: 68656 - DNA, 26 bp, Homo sapiens
ctttctggactcacggatgaatgcac

SEQ ID NO: 68657 - DNA, 26 bp, Homo sapiens
tttctggactcacggatgaatgcaca

SEQ ID NO: 68658 - DNA, 26 bp, Homo sapiens
ttctggactcacggatgaatgcacac

SEQ ID NO: 68659 - DNA, 26 bp, Homo sapiens
tctggactcacggatgaatgcacaca

SEQ ID NO: 68660 - DNA, 26 bp, Homo sapiens
ctggactcacggatgaatgcacacag

SEQ ID NO: 68661 - DNA, 26 bp, Homo sapiens
tggactcacggatgaatgcacacagg

SEQ ID NO: 68662 - DNA, 26 bp, Homo sapiens
ggactcacggatgaatgcacacagga

SEQ ID NO: 68663 - DNA, 26 bp, Homo sapiens
gactcacggatgaatgcacacaggac

SEQ ID NO: 68664 - DNA, 26 bp, Homo sapiens
actcacggatgaatgcacacaggaca

SEQ ID NO: 68665 - DNA, 26 bp, Homo sapiens
ctcacggatgaatgcacacaggacac

SEQ ID NO: 68666 - DNA, 26 bp, Homo sapiens
tcacggatgaatgcacacaggacact

SEQ ID NO: 68667 - DNA, 26 bp, Homo sapiens
cacggatgaatgcacacaggacacta

SEQ ID NO: 68668 - DNA, 26 bp, Homo sapiens
acggatgaatgcacacaggacactaa

SEQ ID NO: 68669 - DNA, 26 bp, Homo sapiens
cggatgaatgcacacaggacactaag

SEQ ID NO: 68670 - DNA, 26 bp, Homo sapiens
ggatgaatgcacacaggacactaagt

SEQ ID NO: 68671 - DNA, 26 bp, Homo sapiens
gatgaatgcacacaggacactaagtt

SEQ ID NO: 68672 - DNA, 26 bp, Homo sapiens
atgaatgcacacaggacactaagttt

SEQ ID NO: 68673 - DNA, 26 bp, Homo sapiens
tgaatgcacacaggacactaagtttc

SEQ ID NO: 68674 - DNA, 26 bp, Homo sapiens
gaatgcacacaggacactaagtttcc

SEQ ID NO: 68675 - DNA, 26 bp, Homo sapiens
aatgcacacaggacactaagtttcct

SEQ ID NO: 68676 - DNA, 26 bp, Homo sapiens
atgcacacaggacactaagtttccta

SEQ ID NO: 68677 - DNA, 26 bp, Homo sapiens
tgcacacaggacactaagtttcctac

SEQ ID NO: 68678 - DNA, 26 bp, Homo sapiens
gcacacaggacactaagtttcctact

SEQ ID NO: 68679 - DNA, 26 bp, Homo sapiens
cacacaggacactaagtttcctacta

SEQ ID NO: 68680 - DNA, 26 bp, Homo sapiens
acacaggacactaagtttcctactat

SEQ ID NO: 68681 - DNA, 26 bp, Homo sapiens
cacaggacactaagtttcctactatg

SEQ ID NO: 68682 - DNA, 26 bp, Homo sapiens
acaggacactaagtttcctactatgt

SEQ ID NO: 68683 - DNA, 26 bp, Homo sapiens
caggacactaagtttcctactatgtc

SEQ ID NO: 68684 - DNA, 26 bp, Homo sapiens
aggacactaagtttcctactatgtca

SEQ ID NO: 68685 - DNA, 26 bp, Homo sapiens
ggacactaagtttcctactatgtcat

SEQ ID NO: 68686 - DNA, 26 bp, Homo sapiens
gacactaagtttcctactatgtcatg

SEQ ID NO: 68687 - DNA, 26 bp, Homo sapiens
acactaagtttcctactatgtcatga

SEQ ID NO: 68688 - DNA, 26 bp, Homo sapiens
cactaagtttcctactatgtcatgaa

SEQ ID NO: 68689 - DNA, 26 bp, Homo sapiens
actaagtttcctactatgtcatgaag

SEQ ID NO: 68690 - DNA, 26 bp, Homo sapiens
ctaagtttcctactatgtcatgaagt

SEQ ID NO: 68691 - DNA, 26 bp, Homo sapiens
taagtttcctactatgtcatgaagtg

SEQ ID NO: 68692 - DNA, 26 bp, Homo sapiens
aagtttcctactatgtcatgaagtga

SEQ ID NO: 68693 - DNA, 26 bp, Homo sapiens
agtttcctactatgtcatgaagtgag

SEQ ID NO: 68694 - DNA, 26 bp, Homo sapiens
gtttcctactatgtcatgaagtgagg

SEQ ID NO: 68695 - DNA, 26 bp, Homo sapiens
tttcctactatgtcatgaagtgaggt

SEQ ID NO: 68696 - DNA, 26 bp, Homo sapiens
ttcctactatgtcatgaagtgaggta

SEQ ID NO: 68697 - DNA, 26 bp, Homo sapiens
tcctactatgtcatgaagtgaggtaa

SEQ ID NO: 68698 - DNA, 26 bp, Homo sapiens
cctactatgtcatgaagtgaggtaaa

SEQ ID NO: 68699 - DNA, 26 bp, Homo sapiens
ctactatgtcatgaagtgaggtaaaa

SEQ ID NO: 68700 - DNA, 26 bp, Homo sapiens
tactatgtcatgaagtgaggtaaaat

SEQ ID NO: 68701 - DNA, 26 bp, Homo sapiens
actatgtcatgaagtgaggtaaaatt

SEQ ID NO: 68702 - DNA, 26 bp, Homo sapiens
ctatgtcatgaagtgaggtaaaattc

SEQ ID NO: 68703 - DNA, 26 bp, Homo sapiens
tatgtcatgaagtgaggtaaaattct

SEQ ID NO: 68704 - DNA, 26 bp, Homo sapiens
atgtcatgaagtgaggtaaaattctc

SEQ ID NO: 68705 - DNA, 26 bp, Homo sapiens
tgtcatgaagtgaggtaaaattctct

SEQ ID NO: 68706 - DNA, 26 bp, Homo sapiens
gtcatgaagtgaggtaaaattctcta

SEQ ID NO: 68707 - DNA, 26 bp, Homo sapiens
tcatgaagtgaggtaaaattctctag

SEQ ID NO: 68708 - DNA, 26 bp, Homo sapiens
catgaagtgaggtaaaattctctagg

SEQ ID NO: 68709 - DNA, 26 bp, Homo sapiens
atgaagtgaggtaaaattctctaggt

SEQ ID NO: 68710 - DNA, 26 bp, Homo sapiens
tgaagtgaggtaaaattctctaggtt

SEQ ID NO: 68711 - DNA, 26 bp, Homo sapiens
gaagtgaggtaaaattctctaggttg

SEQ ID NO: 68712 - DNA, 26 bp, Homo sapiens
aagtgaggtaaaattctctaggttga

SEQ ID NO: 68713 - DNA, 26 bp, Homo sapiens
agtgaggtaaaattctctaggttgaa

SEQ ID NO: 68714 - DNA, 26 bp, Homo sapiens
gtgaggtaaaattctctaggttgaac

SEQ ID NO: 68715 - DNA, 26 bp, Homo sapiens
tgaggtaaaattctctaggttgaaca

SEQ ID NO: 68716 - DNA, 26 bp, Homo sapiens
gaggtaaaattctctaggttgaacat

SEQ ID NO: 68717 - DNA, 26 bp, Homo sapiens
aggtaaaattctctaggttgaacata

SEQ ID NO: 68718 - DNA, 26 bp, Homo sapiens
ggtaaaattctctaggttgaacatat

SEQ ID NO: 68719 - DNA, 26 bp, Homo sapiens
gtaaaattctctaggttgaacatatg

SEQ ID NO: 68720 - DNA, 26 bp, Homo sapiens
taaaattctctaggttgaacatatgc

SEQ ID NO: 68721 - DNA, 26 bp, Homo sapiens
aaaattctctaggttgaacatatgca

SEQ ID NO: 68722 - DNA, 26 bp, Homo sapiens
aaattctctaggttgaacatatgcat

SEQ ID NO: 68723 - DNA, 26 bp, Homo sapiens
aattctctaggttgaacatatgcata

SEQ ID NO: 68724 - DNA, 26 bp, Homo sapiens
attctctaggttgaacatatgcatat

SEQ ID NO: 68725 - DNA, 26 bp, Homo sapiens
ttctctaggttgaacatatgcatatt

SEQ ID NO: 68726 - DNA, 26 bp, Homo sapiens
tctctaggttgaacatatgcatattg

SEQ ID NO: 68727 - DNA, 26 bp, Homo sapiens
ctctaggttgaacatatgcatattga

SEQ ID NO: 68728 - DNA, 26 bp, Homo sapiens
tctaggttgaacatatgcatattgag

SEQ ID NO: 68729 - DNA, 26 bp, Homo sapiens
ctaggttgaacatatgcatattgagc

SEQ ID NO: 68730 - DNA, 26 bp, Homo sapiens
taggttgaacatatgcatattgagcg

SEQ ID NO: 68731 - DNA, 26 bp, Homo sapiens
aggttgaacatatgcatattgagcgg

SEQ ID NO: 68732 - DNA, 26 bp, Homo sapiens
ggttgaacatatgcatattgagcggt

SEQ ID NO: 68733 - DNA, 26 bp, Homo sapiens
gttgaacatatgcatattgagcggtt

SEQ ID NO: 68734 - DNA, 26 bp, Homo sapiens
ttgaacatatgcatattgagcggttc

SEQ ID NO: 68735 - DNA, 26 bp, Homo sapiens
tgaacatatgcatattgagcggttca

SEQ ID NO: 68736 - DNA, 26 bp, Homo sapiens
gaacatatgcatattgagcggttcac

SEQ ID NO: 68737 - DNA, 26 bp, Homo sapiens
aacatatgcatattgagcggttcact

SEQ ID NO: 68738 - DNA, 26 bp, Homo sapiens
acatatgcatattgagcggttcactt

SEQ ID NO: 68739 - DNA, 26 bp, Homo sapiens
catatgcatattgagcggttcacttg

SEQ ID NO: 68740 - DNA, 26 bp, Homo sapiens
atatgcatattgagcggttcacttgc

SEQ ID NO: 68741 - DNA, 26 bp, Homo sapiens
tatgcatattgagcggttcacttgct

SEQ ID NO: 68742 - DNA, 26 bp, Homo sapiens
atgcatattgagcggttcacttgcta

SEQ ID NO: 68743 - DNA, 26 bp, Homo sapiens
tgcatattgagcggttcacttgctat

SEQ ID NO: 68744 - DNA, 26 bp, Homo sapiens
gcatattgagcggttcacttgctatt

SEQ ID NO: 68745 - DNA, 26 bp, Homo sapiens
catattgagcggttcacttgctattt

SEQ ID NO: 68746 - DNA, 26 bp, Homo sapiens
atattgagcggttcacttgctatttc

SEQ ID NO: 68747 - DNA, 26 bp, Homo sapiens
tattgagcggttcacttgctatttct

SEQ ID NO: 68748 - DNA, 26 bp, Homo sapiens
attgagcggttcacttgctatttctt

SEQ ID NO: 68749 - DNA, 26 bp, Homo sapiens
ttgagcggttcacttgctatttcttt

SEQ ID NO: 68750 - DNA, 26 bp, Homo sapiens
tgagcggttcacttgctatttctttt

SEQ ID NO: 68751 - DNA, 26 bp, Homo sapiens
gagcggttcacttgctatttctttta

SEQ ID NO: 68752 - DNA, 26 bp, Homo sapiens
agcggttcacttgctatttcttttaa

SEQ ID NO: 68753 - DNA, 26 bp, Homo sapiens
gcggttcacttgctatttcttttaac

SEQ ID NO: 68754 - DNA, 26 bp, Homo sapiens
cggttcacttgctatttcttttaacg

SEQ ID NO: 68755 - DNA, 26 bp, Homo sapiens
ggttcacttgctatttcttttaacgc

SEQ ID NO: 68756 - DNA, 26 bp, Homo sapiens
gttcacttgctatttcttttaacgct

SEQ ID NO: 68757 - DNA, 26 bp, Homo sapiens
ttcacttgctatttcttttaacgctc

SEQ ID NO: 68758 - DNA, 26 bp, Homo sapiens
tcacttgctatttcttttaacgctcc

SEQ ID NO: 68759 - DNA, 26 bp, Homo sapiens
cacttgctatttcttttaacgctcct

SEQ ID NO: 68760 - DNA, 26 bp, Homo sapiens
acttgctatttcttttaacgctcctt

SEQ ID NO: 68761 - DNA, 26 bp, Homo sapiens
cttgctatttcttttaacgctccttc

SEQ ID NO: 68762 - DNA, 26 bp, Homo sapiens
ttgctatttcttttaacgctccttca

SEQ ID NO: 68763 - DNA, 26 bp, Homo sapiens
tgctatttcttttaacgctccttcat

SEQ ID NO: 68764 - DNA, 26 bp, Homo sapiens
gctatttcttttaacgctccttcatc

SEQ ID NO: 68765 - DNA, 26 bp, Homo sapiens
ctatttcttttaacgctccttcatct

SEQ ID NO: 68766 - DNA, 26 bp, Homo sapiens
tatttcttttaacgctccttcatctg

SEQ ID NO: 68767 - DNA, 26 bp, Homo sapiens
atttcttttaacgctccttcatctgc

SEQ ID NO: 68768 - DNA, 26 bp, Homo sapiens
tttcttttaacgctccttcatctgca

SEQ ID NO: 68769 - DNA, 26 bp, Homo sapiens
ttcttttaacgctccttcatctgcat

SEQ ID NO: 68770 - DNA, 26 bp, Homo sapiens
tcttttaacgctccttcatctgcatc

SEQ ID NO: 68771 - DNA, 26 bp, Homo sapiens
cttttaacgctccttcatctgcatcc

SEQ ID NO: 68772 - DNA, 26 bp, Homo sapiens
ttttaacgctccttcatctgcatcct

SEQ ID NO: 68773 - DNA, 26 bp, Homo sapiens
tttaacgctccttcatctgcatcctc

SEQ ID NO: 68774 - DNA, 26 bp, Homo sapiens
ttaacgctccttcatctgcatcctca

SEQ ID NO: 68775 - DNA, 26 bp, Homo sapiens
taacgctccttcatctgcatcctcaa

SEQ ID NO: 68776 - DNA, 26 bp, Homo sapiens
aacgctccttcatctgcatcctcaac

SEQ ID NO: 68777 - DNA, 26 bp, Homo sapiens
acgctccttcatctgcatcctcaact

SEQ ID NO: 68778 - DNA, 26 bp, Homo sapiens
cgctccttcatctgcatcctcaactc

SEQ ID NO: 68779 - DNA, 26 bp, Homo sapiens
gctccttcatctgcatcctcaactcc

SEQ ID NO: 68780 - DNA, 26 bp, Homo sapiens
ctccttcatctgcatcctcaactcca

SEQ ID NO: 68781 - DNA, 26 bp, Homo sapiens
tccttcatctgcatcctcaactccaa

SEQ ID NO: 68782 - DNA, 26 bp, Homo sapiens
ccttcatctgcatcctcaactccaat

SEQ ID NO: 68783 - DNA, 26 bp, Homo sapiens
cttcatctgcatcctcaactccaatt

SEQ ID NO: 68784 - DNA, 26 bp, Homo sapiens
ttcatctgcatcctcaactccaattg

SEQ ID NO: 68785 - DNA, 26 bp, Homo sapiens
tcatctgcatcctcaactccaattgc

SEQ ID NO: 68786 - DNA, 26 bp, Homo sapiens
catctgcatcctcaactccaattgca

SEQ ID NO: 68787 - DNA, 26 bp, Homo sapiens
atctgcatcctcaactccaattgcaa

SEQ ID NO: 68788 - DNA, 26 bp, Homo sapiens
tctgcatcctcaactccaattgcaaa

SEQ ID NO: 68789 - DNA, 26 bp, Homo sapiens
ctgcatcctcaactccaattgcaaac

SEQ ID NO: 68790 - DNA, 26 bp, Homo sapiens
tgcatcctcaactccaattgcaaaca

SEQ ID NO: 68791 - DNA, 26 bp, Homo sapiens
gcatcctcaactccaattgcaaacac

SEQ ID NO: 68792 - DNA, 26 bp, Homo sapiens
catcctcaactccaattgcaaacacg

SEQ ID NO: 68793 - DNA, 26 bp, Homo sapiens
atcctcaactccaattgcaaacacgt

SEQ ID NO: 68794 - DNA, 26 bp, Homo sapiens
tcctcaactccaattgcaaacacgtt

SEQ ID NO: 68795 - DNA, 26 bp, Homo sapiens
cctcaactccaattgcaaacacgtta

SEQ ID NO: 68796 - DNA, 26 bp, Homo sapiens
ctcaactccaattgcaaacacgttaa

SEQ ID NO: 68797 - DNA, 26 bp, Homo sapiens
tcaactccaattgcaaacacgttaac

SEQ ID NO: 68798 - DNA, 26 bp, Homo sapiens
caactccaattgcaaacacgttaaca

SEQ ID NO: 68799 - DNA, 26 bp, Homo sapiens
aactccaattgcaaacacgttaacat

SEQ ID NO: 68800 - DNA, 26 bp, Homo sapiens
actccaattgcaaacacgttaacatc

SEQ ID NO: 68801 - DNA, 26 bp, Homo sapiens
ctccaattgcaaacacgttaacatca

SEQ ID NO: 68802 - DNA, 26 bp, Homo sapiens
tccaattgcaaacacgttaacatcag

SEQ ID NO: 68803 - DNA, 26 bp, Homo sapiens
ccaattgcaaacacgttaacatcagc

SEQ ID NO: 68804 - DNA, 26 bp, Homo sapiens
caattgcaaacacgttaacatcagca

SEQ ID NO: 68805 - DNA, 26 bp, Homo sapiens
aattgcaaacacgttaacatcagcag

SEQ ID NO: 68806 - DNA, 26 bp, Homo sapiens
attgcaaacacgttaacatcagcaga

SEQ ID NO: 68807 - DNA, 26 bp, Homo sapiens
ttgcaaacacgttaacatcagcagac

SEQ ID NO: 68808 - DNA, 26 bp, Homo sapiens
tgcaaacacgttaacatcagcagact

SEQ ID NO: 68809 - DNA, 26 bp, Homo sapiens
gcaaacacgttaacatcagcagactt

SEQ ID NO: 68810 - DNA, 26 bp, Homo sapiens
caaacacgttaacatcagcagactta

SEQ ID NO: 68811 - DNA, 26 bp, Homo sapiens
aaacacgttaacatcagcagacttaa

SEQ ID NO: 68812 - DNA, 26 bp, Homo sapiens
aacacgttaacatcagcagacttaag

SEQ ID NO: 68813 - DNA, 26 bp, Homo sapiens
acacgttaacatcagcagacttaagt

SEQ ID NO: 68814 - DNA, 26 bp, Homo sapiens
cacgttaacatcagcagacttaagtt

SEQ ID NO: 68815 - DNA, 26 bp, Homo sapiens
acgttaacatcagcagacttaagttc

SEQ ID NO: 68816 - DNA, 26 bp, Homo sapiens
cgttaacatcagcagacttaagttcc

SEQ ID NO: 68817 - DNA, 26 bp, Homo sapiens
gttaacatcagcagacttaagttccg

SEQ ID NO: 68818 - DNA, 26 bp, Homo sapiens
ttaacatcagcagacttaagttccgc

SEQ ID NO: 68819 - DNA, 26 bp, Homo sapiens
taacatcagcagacttaagttccgct

SEQ ID NO: 68820 - DNA, 26 bp, Homo sapiens
aacatcagcagacttaagttccgctg

SEQ ID NO: 68821 - DNA, 26 bp, Homo sapiens
acatcagcagacttaagttccgctga

SEQ ID NO: 68822 - DNA, 26 bp, Homo sapiens
catcagcagacttaagttccgctgag

SEQ ID NO: 68823 - DNA, 26 bp, Homo sapiens
atcagcagacttaagttccgctgagg

SEQ ID NO: 68824 - DNA, 26 bp, Homo sapiens
tcagcagacttaagttccgctgaggg

SEQ ID NO: 68825 - DNA, 26 bp, Homo sapiens
cagcagacttaagttccgctgagggc

SEQ ID NO: 68826 - DNA, 26 bp, Homo sapiens
agcagacttaagttccgctgagggca

SEQ ID NO: 68827 - DNA, 26 bp, Homo sapiens
gcagacttaagttccgctgagggcag

SEQ ID NO: 68828 - DNA, 26 bp, Homo sapiens
cagacttaagttccgctgagggcaga

SEQ ID NO: 68829 - DNA, 26 bp, Homo sapiens
agacttaagttccgctgagggcagag

SEQ ID NO: 68830 - DNA, 26 bp, Homo sapiens
gacttaagttccgctgagggcagagc

SEQ ID NO: 68831 - DNA, 26 bp, Homo sapiens
acttaagttccgctgagggcagagca

SEQ ID NO: 68832 - DNA, 26 bp, Homo sapiens
cttaagttccgctgagggcagagcaa

SEQ ID NO: 68833 - DNA, 26 bp, Homo sapiens
ttaagttccgctgagggcagagcaag

SEQ ID NO: 68834 - DNA, 26 bp, Homo sapiens
taagttccgctgagggcagagcaagg

SEQ ID NO: 68835 - DNA, 26 bp, Homo sapiens
aagttccgctgagggcagagcaaggc

SEQ ID NO: 68836 - DNA, 26 bp, Homo sapiens
agttccgctgagggcagagcaaggcc

SEQ ID NO: 68837 - DNA, 26 bp, Homo sapiens
gttccgctgagggcagagcaaggcca

SEQ ID NO: 68838 - DNA, 26 bp, Homo sapiens
ttccgctgagggcagagcaaggccat

SEQ ID NO: 68839 - DNA, 26 bp, Homo sapiens
tccgctgagggcagagcaaggccatc

SEQ ID NO: 68840 - DNA, 26 bp, Homo sapiens
ccgctgagggcagagcaaggccatcc

SEQ ID NO: 68841 - DNA, 26 bp, Homo sapiens
cgctgagggcagagcaaggccatcct

SEQ ID NO: 68842 - DNA, 26 bp, Homo sapiens
gctgagggcagagcaaggccatcctt

SEQ ID NO: 68843 - DNA, 26 bp, Homo sapiens
ctgagggcagagcaaggccatccttc

SEQ ID NO: 68844 - DNA, 26 bp, Homo sapiens
tgagggcagagcaaggccatccttcg

SEQ ID NO: 68845 - DNA, 26 bp, Homo sapiens
gagggcagagcaaggccatccttcga

SEQ ID NO: 68846 - DNA, 26 bp, Homo sapiens
agggcagagcaaggccatccttcgag

SEQ ID NO: 68847 - DNA, 26 bp, Homo sapiens
gggcagagcaaggccatccttcgagt

SEQ ID NO: 68848 - DNA, 26 bp, Homo sapiens
ggcagagcaaggccatccttcgagtg

SEQ ID NO: 68849 - DNA, 26 bp, Homo sapiens
gcagagcaaggccatccttcgagtgt

SEQ ID NO: 68850 - DNA, 26 bp, Homo sapiens
cagagcaaggccatccttcgagtgtc

SEQ ID NO: 68851 - DNA, 26 bp, Homo sapiens
agagcaaggccatccttcgagtgtcc

SEQ ID NO: 68852 - DNA, 26 bp, Homo sapiens
gagcaaggccatccttcgagtgtcca

SEQ ID NO: 68853 - DNA, 26 bp, Homo sapiens
agcaaggccatccttcgagtgtccat

SEQ ID NO: 68854 - DNA, 26 bp, Homo sapiens
gcaaggccatccttcgagtgtccatc

SEQ ID NO: 68855 - DNA, 26 bp, Homo sapiens
caaggccatccttcgagtgtccatca

SEQ ID NO: 68856 - DNA, 26 bp, Homo sapiens
aaggccatccttcgagtgtccatcag

SEQ ID NO: 68857 - DNA, 26 bp, Homo sapiens
aggccatccttcgagtgtccatcagt

SEQ ID NO: 68858 - DNA, 26 bp, Homo sapiens
ggccatccttcgagtgtccatcagtt

SEQ ID NO: 68859 - DNA, 26 bp, Homo sapiens
gccatccttcgagtgtccatcagtta

SEQ ID NO: 68860 - DNA, 26 bp, Homo sapiens
ccatccttcgagtgtccatcagttaa

SEQ ID NO: 68861 - DNA, 26 bp, Homo sapiens
catccttcgagtgtccatcagttaac

SEQ ID NO: 68862 - DNA, 26 bp, Homo sapiens
atccttcgagtgtccatcagttaaca

SEQ ID NO: 68863 - DNA, 26 bp, Homo sapiens
tccttcgagtgtccatcagttaacac

SEQ ID NO: 68864 - DNA, 26 bp, Homo sapiens
ccttcgagtgtccatcagttaacact

SEQ ID NO: 68865 - DNA, 26 bp, Homo sapiens
cttcgagtgtccatcagttaacacta

SEQ ID NO: 68866 - DNA, 26 bp, Homo sapiens
ttcgagtgtccatcagttaacactac

SEQ ID NO: 68867 - DNA, 26 bp, Homo sapiens
tcgagtgtccatcagttaacactacg

SEQ ID NO: 68868 - DNA, 26 bp, Homo sapiens
cgagtgtccatcagttaacactacga

SEQ ID NO: 68869 - DNA, 26 bp, Homo sapiens
gagtgtccatcagttaacactacgat

SEQ ID NO: 68870 - DNA, 26 bp, Homo sapiens
agtgtccatcagttaacactacgata

SEQ ID NO: 68871 - DNA, 26 bp, Homo sapiens
gtgtccatcagttaacactacgataa

SEQ ID NO: 68872 - DNA, 26 bp, Homo sapiens
tgtccatcagttaacactacgataac

SEQ ID NO: 68873 - DNA, 26 bp, Homo sapiens
gtccatcagttaacactacgataacc

SEQ ID NO: 68874 - DNA, 26 bp, Homo sapiens
tccatcagttaacactacgataacct

SEQ ID NO: 68875 - DNA, 26 bp, Homo sapiens
ccatcagttaacactacgataacctg

SEQ ID NO: 68876 - DNA, 26 bp, Homo sapiens
catcagttaacactacgataacctga

SEQ ID NO: 68877 - DNA, 26 bp, Homo sapiens
atcagttaacactacgataacctgag

SEQ ID NO: 68878 - DNA, 26 bp, Homo sapiens
tcagttaacactacgataacctgagg

SEQ ID NO: 68879 - DNA, 26 bp, Homo sapiens
cagttaacactacgataacctgaggg

SEQ ID NO: 68880 - DNA, 26 bp, Homo sapiens
agttaacactacgataacctgaggga

SEQ ID NO: 68881 - DNA, 26 bp, Homo sapiens
gttaacactacgataacctgagggac

SEQ ID NO: 68882 - DNA, 26 bp, Homo sapiens
ttaacactacgataacctgagggact

SEQ ID NO: 68883 - DNA, 26 bp, Homo sapiens
taacactacgataacctgagggactc

SEQ ID NO: 68884 - DNA, 26 bp, Homo sapiens
aacactacgataacctgagggactcc

SEQ ID NO: 68885 - DNA, 26 bp, Homo sapiens
acactacgataacctgagggactccg

SEQ ID NO: 68886 - DNA, 26 bp, Homo sapiens
cactacgataacctgagggactccgt

SEQ ID NO: 68887 - DNA, 26 bp, Homo sapiens
actacgataacctgagggactccgtc

SEQ ID NO: 68888 - DNA, 26 bp, Homo sapiens
ctacgataacctgagggactccgtca

SEQ ID NO: 68889 - DNA, 26 bp, Homo sapiens
tacgataacctgagggactccgtcac

SEQ ID NO: 68890 - DNA, 26 bp, Homo sapiens
acgataacctgagggactccgtcacc

SEQ ID NO: 68891 - DNA, 26 bp, Homo sapiens
cgataacctgagggactccgtcaccg

SEQ ID NO: 68892 - DNA, 26 bp, Homo sapiens
gataacctgagggactccgtcaccgg

SEQ ID NO: 68893 - DNA, 26 bp, Homo sapiens
ataacctgagggactccgtcaccggc

SEQ ID NO: 68894 - DNA, 26 bp, Homo sapiens
taacctgagggactccgtcaccggcc

SEQ ID NO: 68895 - DNA, 26 bp, Homo sapiens
aacctgagggactccgtcaccggccc

SEQ ID NO: 68896 - DNA, 26 bp, Homo sapiens
acctgagggactccgtcaccggcccg

SEQ ID NO: 68897 - DNA, 26 bp, Homo sapiens
cctgagggactccgtcaccggcccgg

SEQ ID NO: 68898 - DNA, 26 bp, Homo sapiens
ctgagggactccgtcaccggcccggc

SEQ ID NO: 68899 - DNA, 26 bp, Homo sapiens
tgagggactccgtcaccggcccggct

SEQ ID NO: 68900 - DNA, 26 bp, Homo sapiens
gagggactccgtcaccggcccggctt

SEQ ID NO: 68901 - DNA, 26 bp, Homo sapiens
agggactccgtcaccggcccggcttc

SEQ ID NO: 68902 - DNA, 26 bp, Homo sapiens
gggactccgtcaccggcccggcttcc

SEQ ID NO: 68903 - DNA, 26 bp, Homo sapiens
ggactccgtcaccggcccggcttcca

SEQ ID NO: 68904 - DNA, 26 bp, Homo sapiens
gactccgtcaccggcccggcttccag

SEQ ID NO: 68905 - DNA, 26 bp, Homo sapiens
actccgtcaccggcccggcttccagc

SEQ ID NO: 68906 - DNA, 26 bp, Homo sapiens
ctccgtcaccggcccggcttccagca

SEQ ID NO: 68907 - DNA, 26 bp, Homo sapiens
tccgtcaccggcccggcttccagcag

SEQ ID NO: 68908 - DNA, 26 bp, Homo sapiens
ccgtcaccggcccggcttccagcagc

SEQ ID NO: 68909 - DNA, 26 bp, Homo sapiens
cgtcaccggcccggcttccagcagcc

SEQ ID NO: 68910 - DNA, 26 bp, Homo sapiens
gtcaccggcccggcttccagcagcct

SEQ ID NO: 68911 - DNA, 26 bp, Homo sapiens
tcaccggcccggcttccagcagcctt

SEQ ID NO: 68912 - DNA, 26 bp, Homo sapiens
caccggcccggcttccagcagccttg

SEQ ID NO: 68913 - DNA, 26 bp, Homo sapiens
accggcccggcttccagcagccttgg

SEQ ID NO: 68914 - DNA, 26 bp, Homo sapiens
ccggcccggcttccagcagccttggt

SEQ ID NO: 68915 - DNA, 26 bp, Homo sapiens
cggcccggcttccagcagccttggtg

SEQ ID NO: 68916 - DNA, 26 bp, Homo sapiens
ggcccggcttccagcagccttggtga

SEQ ID NO: 68917 - DNA, 26 bp, Homo sapiens
gcccggcttccagcagccttggtgag

SEQ ID NO: 68918 - DNA, 26 bp, Homo sapiens
cccggcttccagcagccttggtgagg

SEQ ID NO: 68919 - DNA, 26 bp, Homo sapiens
ccggcttccagcagccttggtgaggt

SEQ ID NO: 68920 - DNA, 26 bp, Homo sapiens
cggcttccagcagccttggtgaggtg

SEQ ID NO: 68921 - DNA, 26 bp, Homo sapiens
ggcttccagcagccttggtgaggtgg

SEQ ID NO: 68922 - DNA, 26 bp, Homo sapiens
gcttccagcagccttggtgaggtggc

SEQ ID NO: 68923 - DNA, 26 bp, Homo sapiens
cttccagcagccttggtgaggtggct

SEQ ID NO: 68924 - DNA, 26 bp, Homo sapiens
ttccagcagccttggtgaggtggctt

SEQ ID NO: 68925 - DNA, 26 bp, Homo sapiens
tccagcagccttggtgaggtggcttt

SEQ ID NO: 68926 - DNA, 26 bp, Homo sapiens
ccagcagccttggtgaggtggctttg

SEQ ID NO: 68927 - DNA, 26 bp, Homo sapiens
cagcagccttggtgaggtggctttgc

SEQ ID NO: 68928 - DNA, 26 bp, Homo sapiens
agcagccttggtgaggtggctttgca

SEQ ID NO: 68929 - DNA, 26 bp, Homo sapiens
gcagccttggtgaggtggctttgcat

SEQ ID NO: 68930 - DNA, 26 bp, Homo sapiens
cagccttggtgaggtggctttgcatt

SEQ ID NO: 68931 - DNA, 26 bp, Homo sapiens
agccttggtgaggtggctttgcatta

SEQ ID NO: 68932 - DNA, 26 bp, Homo sapiens
gccttggtgaggtggctttgcattat

SEQ ID NO: 68933 - DNA, 26 bp, Homo sapiens
ccttggtgaggtggctttgcattatg

SEQ ID NO: 68934 - DNA, 26 bp, Homo sapiens
cttggtgaggtggctttgcattatgt

SEQ ID NO: 68935 - DNA, 26 bp, Homo sapiens
ttggtgaggtggctttgcattatgta

SEQ ID NO: 68936 - DNA, 26 bp, Homo sapiens
tggtgaggtggctttgcattatgtat

SEQ ID NO: 68937 - DNA, 26 bp, Homo sapiens
ggtgaggtggctttgcattatgtatt

SEQ ID NO: 68938 - DNA, 26 bp, Homo sapiens
gtgaggtggctttgcattatgtattc

SEQ ID NO: 68939 - DNA, 26 bp, Homo sapiens
tgaggtggctttgcattatgtattct

SEQ ID NO: 68940 - DNA, 26 bp, Homo sapiens
gaggtggctttgcattatgtattcta

SEQ ID NO: 68941 - DNA, 26 bp, Homo sapiens
aggtggctttgcattatgtattctaa

SEQ ID NO: 68942 - DNA, 26 bp, Homo sapiens
ggtggctttgcattatgtattctaat

SEQ ID NO: 68943 - DNA, 26 bp, Homo sapiens
gtggctttgcattatgtattctaatc

SEQ ID NO: 68944 - DNA, 26 bp, Homo sapiens
tggctttgcattatgtattctaatcc

SEQ ID NO: 68945 - DNA, 26 bp, Homo sapiens
ggctttgcattatgtattctaatcct

SEQ ID NO: 68946 - DNA, 26 bp, Homo sapiens
gctttgcattatgtattctaatcctt

SEQ ID NO: 68947 - DNA, 26 bp, Homo sapiens
ctttgcattatgtattctaatccttt

SEQ ID NO: 68948 - DNA, 26 bp, Homo sapiens
tttgcattatgtattctaatcctttt

SEQ ID NO: 68949 - DNA, 26 bp, Homo sapiens
ttgcattatgtattctaatccttttc

SEQ ID NO: 68950 - DNA, 26 bp, Homo sapiens
tgcattatgtattctaatccttttcc

SEQ ID NO: 68951 - DNA, 26 bp, Homo sapiens
gcattatgtattctaatccttttcca

SEQ ID NO: 68952 - DNA, 26 bp, Homo sapiens
cattatgtattctaatccttttccag

SEQ ID NO: 68953 - DNA, 26 bp, Homo sapiens
attatgtattctaatccttttccagt

SEQ ID NO: 68954 - DNA, 26 bp, Homo sapiens
ttatgtattctaatccttttccagtc

SEQ ID NO: 68955 - DNA, 26 bp, Homo sapiens
tatgtattctaatccttttccagtct

SEQ ID NO: 68956 - DNA, 26 bp, Homo sapiens
atgtattctaatccttttccagtctg

SEQ ID NO: 68957 - DNA, 26 bp, Homo sapiens
tgtattctaatccttttccagtctga

SEQ ID NO: 68958 - DNA, 26 bp, Homo sapiens
gtattctaatccttttccagtctgat

SEQ ID NO: 68959 - DNA, 26 bp, Homo sapiens
tattctaatccttttccagtctgatt

SEQ ID NO: 68960 - DNA, 26 bp, Homo sapiens
attctaatccttttccagtctgattg

SEQ ID NO: 68961 - DNA, 26 bp, Homo sapiens
ttctaatccttttccagtctgattgg

SEQ ID NO: 68962 - DNA, 26 bp, Homo sapiens
tctaatccttttccagtctgattggt

SEQ ID NO: 68963 - DNA, 26 bp, Homo sapiens
ctaatccttttccagtctgattggtt

SEQ ID NO: 68964 - DNA, 26 bp, Homo sapiens
taatccttttccagtctgattggttc

SEQ ID NO: 68965 - DNA, 26 bp, Homo sapiens
aatccttttccagtctgattggttcc

SEQ ID NO: 68966 - DNA, 26 bp, Homo sapiens
atccttttccagtctgattggttccc

SEQ ID NO: 68967 - DNA, 26 bp, Homo sapiens
tccttttccagtctgattggttcccc

SEQ ID NO: 68968 - DNA, 26 bp, Homo sapiens
ccttttccagtctgattggttccccc

SEQ ID NO: 68969 - DNA, 26 bp, Homo sapiens
cttttccagtctgattggttccccca

SEQ ID NO: 68970 - DNA, 26 bp, Homo sapiens
ttttccagtctgattggttcccccaa

SEQ ID NO: 68971 - DNA, 26 bp, Homo sapiens
tttccagtctgattggttcccccaat

SEQ ID NO: 68972 - DNA, 26 bp, Homo sapiens
ttccagtctgattggttcccccaata

SEQ ID NO: 68973 - DNA, 26 bp, Homo sapiens
tccagtctgattggttcccccaatat

SEQ ID NO: 68974 - DNA, 26 bp, Homo sapiens
ccagtctgattggttcccccaatata

SEQ ID NO: 68975 - DNA, 26 bp, Homo sapiens
cagtctgattggttcccccaatataa

SEQ ID NO: 68976 - DNA, 26 bp, Homo sapiens
agtctgattggttcccccaatataag

SEQ ID NO: 68977 - DNA, 26 bp, Homo sapiens
gtctgattggttcccccaatataaga

SEQ ID NO: 68978 - DNA, 26 bp, Homo sapiens
tctgattggttcccccaatataagac

SEQ ID NO: 68979 - DNA, 26 bp, Homo sapiens
ctgattggttcccccaatataagaca

SEQ ID NO: 68980 - DNA, 26 bp, Homo sapiens
tgattggttcccccaatataagacat

SEQ ID NO: 68981 - DNA, 26 bp, Homo sapiens
gattggttcccccaatataagacatg

SEQ ID NO: 68982 - DNA, 26 bp, Homo sapiens
attggttcccccaatataagacatgt

SEQ ID NO: 68983 - DNA, 26 bp, Homo sapiens
ttggttcccccaatataagacatgtt

SEQ ID NO: 68984 - DNA, 26 bp, Homo sapiens
tggttcccccaatataagacatgttg

SEQ ID NO: 68985 - DNA, 26 bp, Homo sapiens
ggttcccccaatataagacatgttgg

SEQ ID NO: 68986 - DNA, 26 bp, Homo sapiens
gttcccccaatataagacatgttgga

SEQ ID NO: 68987 - DNA, 26 bp, Homo sapiens
ttcccccaatataagacatgttggaa

SEQ ID NO: 68988 - DNA, 26 bp, Homo sapiens
tcccccaatataagacatgttggaaa

SEQ ID NO: 68989 - DNA, 26 bp, Homo sapiens
cccccaatataagacatgttggaaat

SEQ ID NO: 68990 - DNA, 26 bp, Homo sapiens
ccccaatataagacatgttggaaata

SEQ ID NO: 68991 - DNA, 26 bp, Homo sapiens
cccaatataagacatgttggaaatat

SEQ ID NO: 68992 - DNA, 26 bp, Homo sapiens
ccaatataagacatgttggaaatatg

SEQ ID NO: 68993 - DNA, 26 bp, Homo sapiens
caatataagacatgttggaaatatga

SEQ ID NO: 68994 - DNA, 26 bp, Homo sapiens
aatataagacatgttggaaatatgag

SEQ ID NO: 68995 - DNA, 26 bp, Homo sapiens
atataagacatgttggaaatatgaga

SEQ ID NO: 68996 - DNA, 26 bp, Homo sapiens
tataagacatgttggaaatatgagaa

SEQ ID NO: 68997 - DNA, 26 bp, Homo sapiens
ataagacatgttggaaatatgagaaa

SEQ ID NO: 68998 - DNA, 26 bp, Homo sapiens
taagacatgttggaaatatgagaaag

SEQ ID NO: 68999 - DNA, 26 bp, Homo sapiens
aagacatgttggaaatatgagaaagg

SEQ ID NO: 69000 - DNA, 26 bp, Homo sapiens
agacatgttggaaatatgagaaagga

SEQ ID NO: 69001 - DNA, 26 bp, Homo sapiens
gacatgttggaaatatgagaaaggac

SEQ ID NO: 69002 - DNA, 26 bp, Homo sapiens
acatgttggaaatatgagaaaggact

SEQ ID NO: 69003 - DNA, 26 bp, Homo sapiens
catgttggaaatatgagaaaggactt

SEQ ID NO: 69004 - DNA, 26 bp, Homo sapiens
atgttggaaatatgagaaaggacttc

SEQ ID NO: 69005 - DNA, 26 bp, Homo sapiens
tgttggaaatatgagaaaggacttct

SEQ ID NO: 69006 - DNA, 26 bp, Homo sapiens
gttggaaatatgagaaaggacttctt

SEQ ID NO: 69007 - DNA, 26 bp, Homo sapiens
ttggaaatatgagaaaggacttcttg

SEQ ID NO: 69008 - DNA, 26 bp, Homo sapiens
tggaaatatgagaaaggacttcttgt

SEQ ID NO: 69009 - DNA, 26 bp, Homo sapiens
ggaaatatgagaaaggacttcttgtt

SEQ ID NO: 69010 - DNA, 26 bp, Homo sapiens
gaaatatgagaaaggacttcttgttt

SEQ ID NO: 69011 - DNA, 26 bp, Homo sapiens
aaatatgagaaaggacttcttgttta

SEQ ID NO: 69012 - DNA, 26 bp, Homo sapiens
aatatgagaaaggacttcttgtttag

SEQ ID NO: 69013 - DNA, 26 bp, Homo sapiens
atatgagaaaggacttcttgtttagt

SEQ ID NO: 69014 - DNA, 26 bp, Homo sapiens
tatgagaaaggacttcttgtttagta

SEQ ID NO: 69015 - DNA, 26 bp, Homo sapiens
atgagaaaggacttcttgtttagtac

SEQ ID NO: 69016 - DNA, 26 bp, Homo sapiens
tgagaaaggacttcttgtttagtacg

SEQ ID NO: 69017 - DNA, 26 bp, Homo sapiens
gagaaaggacttcttgtttagtacga

SEQ ID NO: 69018 - DNA, 26 bp, Homo sapiens
agaaaggacttcttgtttagtacgat

SEQ ID NO: 69019 - DNA, 26 bp, Homo sapiens
gaaaggacttcttgtttagtacgata

SEQ ID NO: 69020 - DNA, 26 bp, Homo sapiens
aaaggacttcttgtttagtacgatac

SEQ ID NO: 69021 - DNA, 26 bp, Homo sapiens
aaggacttcttgtttagtacgatacg

SEQ ID NO: 69022 - DNA, 26 bp, Homo sapiens
aggacttcttgtttagtacgatacgt

SEQ ID NO: 69023 - DNA, 26 bp, Homo sapiens
ggacttcttgtttagtacgatacgta

SEQ ID NO: 69024 - DNA, 26 bp, Homo sapiens
gacttcttgtttagtacgatacgtat

SEQ ID NO: 69025 - DNA, 26 bp, Homo sapiens
acttcttgtttagtacgatacgtatt

SEQ ID NO: 69026 - DNA, 26 bp, Homo sapiens
cttcttgtttagtacgatacgtattt

SEQ ID NO: 69027 - DNA, 26 bp, Homo sapiens
ttcttgtttagtacgatacgtattta

SEQ ID NO: 69028 - DNA, 26 bp, Homo sapiens
tcttgtttagtacgatacgtatttaa

SEQ ID NO: 69029 - DNA, 26 bp, Homo sapiens
cttgtttagtacgatacgtatttaac

SEQ ID NO: 69030 - DNA, 26 bp, Homo sapiens
ttgtttagtacgatacgtatttaaca

SEQ ID NO: 69031 - DNA, 26 bp, Homo sapiens
tgtttagtacgatacgtatttaacag

SEQ ID NO: 69032 - DNA, 26 bp, Homo sapiens
gtttagtacgatacgtatttaacagg

SEQ ID NO: 69033 - DNA, 26 bp, Homo sapiens
tttagtacgatacgtatttaacagga

SEQ ID NO: 69034 - DNA, 26 bp, Homo sapiens
ttagtacgatacgtatttaacaggaa

SEQ ID NO: 69035 - DNA, 26 bp, Homo sapiens
tagtacgatacgtatttaacaggaac

SEQ ID NO: 69036 - DNA, 26 bp, Homo sapiens
agtacgatacgtatttaacaggaact

SEQ ID NO: 69037 - DNA, 26 bp, Homo sapiens
gtacgatacgtatttaacaggaactc

SEQ ID NO: 69038 - DNA, 26 bp, Homo sapiens
tacgatacgtatttaacaggaactcg

SEQ ID NO: 69039 - DNA, 26 bp, Homo sapiens
acgatacgtatttaacaggaactcgg

SEQ ID NO: 69040 - DNA, 26 bp, Homo sapiens
cgatacgtatttaacaggaactcggt

SEQ ID NO: 69041 - DNA, 26 bp, Homo sapiens
gatacgtatttaacaggaactcggta

SEQ ID NO: 69042 - DNA, 26 bp, Homo sapiens
atacgtatttaacaggaactcggtat

SEQ ID NO: 69043 - DNA, 26 bp, Homo sapiens
tacgtatttaacaggaactcggtatg

SEQ ID NO: 69044 - DNA, 26 bp, Homo sapiens
acgtatttaacaggaactcggtatgt

SEQ ID NO: 69045 - DNA, 26 bp, Homo sapiens
cgtatttaacaggaactcggtatgtg

SEQ ID NO: 69046 - DNA, 26 bp, Homo sapiens
gtatttaacaggaactcggtatgtgg

SEQ ID NO: 69047 - DNA, 26 bp, Homo sapiens
tatttaacaggaactcggtatgtggg

SEQ ID NO: 69048 - DNA, 26 bp, Homo sapiens
atttaacaggaactcggtatgtgggt

SEQ ID NO: 69049 - DNA, 26 bp, Homo sapiens
tttaacaggaactcggtatgtgggtt

SEQ ID NO: 69050 - DNA, 26 bp, Homo sapiens
ttaacaggaactcggtatgtgggttt

SEQ ID NO: 69051 - DNA, 26 bp, Homo sapiens
taacaggaactcggtatgtgggtttc

SEQ ID NO: 69052 - DNA, 26 bp, Homo sapiens
aacaggaactcggtatgtgggtttcc

SEQ ID NO: 69053 - DNA, 26 bp, Homo sapiens
acaggaactcggtatgtgggtttccg

SEQ ID NO: 69054 - DNA, 26 bp, Homo sapiens
caggaactcggtatgtgggtttccgt

SEQ ID NO: 69055 - DNA, 26 bp, Homo sapiens
aggaactcggtatgtgggtttccgtt

SEQ ID NO: 69056 - DNA, 26 bp, Homo sapiens
ggaactcggtatgtgggtttccgttg

SEQ ID NO: 69057 - DNA, 26 bp, Homo sapiens
gaactcggtatgtgggtttccgttga

SEQ ID NO: 69058 - DNA, 26 bp, Homo sapiens
aactcggtatgtgggtttccgttgaa

SEQ ID NO: 69059 - DNA, 26 bp, Homo sapiens
actcggtatgtgggtttccgttgaac

SEQ ID NO: 69060 - DNA, 26 bp, Homo sapiens
ctcggtatgtgggtttccgttgaact

SEQ ID NO: 69061 - DNA, 26 bp, Homo sapiens
tcggtatgtgggtttccgttgaactg

SEQ ID NO: 69062 - DNA, 26 bp, Homo sapiens
cggtatgtgggtttccgttgaactgg

SEQ ID NO: 69063 - DNA, 26 bp, Homo sapiens
ggtatgtgggtttccgttgaactgga

SEQ ID NO: 69064 - DNA, 26 bp, Homo sapiens
gtatgtgggtttccgttgaactggac

SEQ ID NO: 69065 - DNA, 26 bp, Homo sapiens
tatgtgggtttccgttgaactggacc

SEQ ID NO: 69066 - DNA, 26 bp, Homo sapiens
atgtgggtttccgttgaactggacca

SEQ ID NO: 69067 - DNA, 26 bp, Homo sapiens
tgtgggtttccgttgaactggaccag

SEQ ID NO: 69068 - DNA, 26 bp, Homo sapiens
gtgggtttccgttgaactggaccaga

SEQ ID NO: 69069 - DNA, 26 bp, Homo sapiens
tgggtttccgttgaactggaccagag

SEQ ID NO: 69070 - DNA, 26 bp, Homo sapiens
gggtttccgttgaactggaccagagc

SEQ ID NO: 69071 - DNA, 26 bp, Homo sapiens
ggtttccgttgaactggaccagagca

SEQ ID NO: 69072 - DNA, 26 bp, Homo sapiens
gtttccgttgaactggaccagagcaa

SEQ ID NO: 69073 - DNA, 26 bp, Homo sapiens
tttccgttgaactggaccagagcaaa

SEQ ID NO: 69074 - DNA, 26 bp, Homo sapiens
ttccgttgaactggaccagagcaaaa

SEQ ID NO: 69075 - DNA, 26 bp, Homo sapiens
tccgttgaactggaccagagcaaaat

SEQ ID NO: 69076 - DNA, 26 bp, Homo sapiens
ccgttgaactggaccagagcaaaatg

SEQ ID NO: 69077 - DNA, 26 bp, Homo sapiens
cgttgaactggaccagagcaaaatgg

SEQ ID NO: 69078 - DNA, 26 bp, Homo sapiens
gttgaactggaccagagcaaaatgga

SEQ ID NO: 69079 - DNA, 26 bp, Homo sapiens
ttgaactggaccagagcaaaatggaa

SEQ ID NO: 69080 - DNA, 26 bp, Homo sapiens
tgaactggaccagagcaaaatggaaa

SEQ ID NO: 69081 - DNA, 26 bp, Homo sapiens
gaactggaccagagcaaaatggaaat

SEQ ID NO: 69082 - DNA, 26 bp, Homo sapiens
aactggaccagagcaaaatggaaatc

SEQ ID NO: 69083 - DNA, 26 bp, Homo sapiens
actggaccagagcaaaatggaaatca

SEQ ID NO: 69084 - DNA, 26 bp, Homo sapiens
ctggaccagagcaaaatggaaatcat

SEQ ID NO: 69085 - DNA, 26 bp, Homo sapiens
tggaccagagcaaaatggaaatcatt

SEQ ID NO: 69086 - DNA, 26 bp, Homo sapiens
ggaccagagcaaaatggaaatcattt

SEQ ID NO: 69087 - DNA, 26 bp, Homo sapiens
gaccagagcaaaatggaaatcatttt

SEQ ID NO: 69088 - DNA, 26 bp, Homo sapiens
accagagcaaaatggaaatcattttc

SEQ ID NO: 69089 - DNA, 26 bp, Homo sapiens
ccagagcaaaatggaaatcattttct

SEQ ID NO: 69090 - DNA, 26 bp, Homo sapiens
cagagcaaaatggaaatcattttctc

SEQ ID NO: 69091 - DNA, 26 bp, Homo sapiens
agagcaaaatggaaatcattttctcc

SEQ ID NO: 69092 - DNA, 26 bp, Homo sapiens
gagcaaaatggaaatcattttctccc

SEQ ID NO: 69093 - DNA, 26 bp, Homo sapiens
agcaaaatggaaatcattttctccca

SEQ ID NO: 69094 - DNA, 26 bp, Homo sapiens
gcaaaatggaaatcattttctcccac

SEQ ID NO: 69095 - DNA, 26 bp, Homo sapiens
caaaatggaaatcattttctcccaca

SEQ ID NO: 69096 - DNA, 26 bp, Homo sapiens
aaaatggaaatcattttctcccacag

SEQ ID NO: 69097 - DNA, 26 bp, Homo sapiens
aaatggaaatcattttctcccacagc

SEQ ID NO: 69098 - DNA, 26 bp, Homo sapiens
aatggaaatcattttctcccacagct

SEQ ID NO: 69099 - DNA, 26 bp, Homo sapiens
atggaaatcattttctcccacagcta

SEQ ID NO: 69100 - DNA, 26 bp, Homo sapiens
tggaaatcattttctcccacagctaa

SEQ ID NO: 69101 - DNA, 26 bp, Homo sapiens
ggaaatcattttctcccacagctaag

SEQ ID NO: 69102 - DNA, 26 bp, Homo sapiens
gaaatcattttctcccacagctaagg

SEQ ID NO: 69103 - DNA, 26 bp, Homo sapiens
aaatcattttctcccacagctaagga

SEQ ID NO: 69104 - DNA, 26 bp, Homo sapiens
aatcattttctcccacagctaaggat

SEQ ID NO: 69105 - DNA, 26 bp, Homo sapiens
atcattttctcccacagctaaggatt

SEQ ID NO: 69106 - DNA, 26 bp, Homo sapiens
tcattttctcccacagctaaggattt

SEQ ID NO: 69107 - DNA, 26 bp, Homo sapiens
cattttctcccacagctaaggatttt

SEQ ID NO: 69108 - DNA, 26 bp, Homo sapiens
attttctcccacagctaaggatttta

SEQ ID NO: 69109 - DNA, 26 bp, Homo sapiens
ttttctcccacagctaaggattttac

SEQ ID NO: 69110 - DNA, 26 bp, Homo sapiens
tttctcccacagctaaggattttaca

SEQ ID NO: 69111 - DNA, 26 bp, Homo sapiens
ttctcccacagctaaggattttacaa

SEQ ID NO: 69112 - DNA, 26 bp, Homo sapiens
tctcccacagctaaggattttacaac

SEQ ID NO: 69113 - DNA, 26 bp, Homo sapiens
ctcccacagctaaggattttacaaca

SEQ ID NO: 69114 - DNA, 26 bp, Homo sapiens
tcccacagctaaggattttacaacat

SEQ ID NO: 69115 - DNA, 26 bp, Homo sapiens
cccacagctaaggattttacaacatc

SEQ ID NO: 69116 - DNA, 26 bp, Homo sapiens
ccacagctaaggattttacaacatca

SEQ ID NO: 69117 - DNA, 26 bp, Homo sapiens
cacagctaaggattttacaacatcat

SEQ ID NO: 69118 - DNA, 26 bp, Homo sapiens
acagctaaggattttacaacatcata

SEQ ID NO: 69119 - DNA, 26 bp, Homo sapiens
cagctaaggattttacaacatcatat

SEQ ID NO: 69120 - DNA, 26 bp, Homo sapiens
agctaaggattttacaacatcatata

SEQ ID NO: 69121 - DNA, 26 bp, Homo sapiens
gctaaggattttacaacatcatatag

SEQ ID NO: 69122 - DNA, 26 bp, Homo sapiens
ctaaggattttacaacatcatataga

SEQ ID NO: 69123 - DNA, 26 bp, Homo sapiens
taaggattttacaacatcatatagaa

SEQ ID NO: 69124 - DNA, 26 bp, Homo sapiens
aaggattttacaacatcatatagaaa

SEQ ID NO: 69125 - DNA, 26 bp, Homo sapiens
aggattttacaacatcatatagaaac

SEQ ID NO: 69126 - DNA, 26 bp, Homo sapiens
ggattttacaacatcatatagaaact

SEQ ID NO: 69127 - DNA, 26 bp, Homo sapiens
gattttacaacatcatatagaaactc

SEQ ID NO: 69128 - DNA, 26 bp, Homo sapiens
attttacaacatcatatagaaactct

SEQ ID NO: 69129 - DNA, 26 bp, Homo sapiens
ttttacaacatcatatagaaactctc

SEQ ID NO: 69130 - DNA, 26 bp, Homo sapiens
tttacaacatcatatagaaactctcg

SEQ ID NO: 69131 - DNA, 26 bp, Homo sapiens
ttacaacatcatatagaaactctcga

SEQ ID NO: 69132 - DNA, 26 bp, Homo sapiens
tacaacatcatatagaaactctcgaa

SEQ ID NO: 69133 - DNA, 26 bp, Homo sapiens
acaacatcatatagaaactctcgaac

SEQ ID NO: 69134 - DNA, 26 bp, Homo sapiens
caacatcatatagaaactctcgaaca

SEQ ID NO: 69135 - DNA, 26 bp, Homo sapiens
aacatcatatagaaactctcgaacaa

SEQ ID NO: 69136 - DNA, 26 bp, Homo sapiens
acatcatatagaaactctcgaacaag

SEQ ID NO: 69137 - DNA, 26 bp, Homo sapiens
catcatatagaaactctcgaacaagt

SEQ ID NO: 69138 - DNA, 26 bp, Homo sapiens
atcatatagaaactctcgaacaagtt

SEQ ID NO: 69139 - DNA, 26 bp, Homo sapiens
tcatatagaaactctcgaacaagttg

SEQ ID NO: 69140 - DNA, 26 bp, Homo sapiens
catatagaaactctcgaacaagttgg

SEQ ID NO: 69141 - DNA, 26 bp, Homo sapiens
atatagaaactctcgaacaagttgga

SEQ ID NO: 69142 - DNA, 26 bp, Homo sapiens
tatagaaactctcgaacaagttggaa

SEQ ID NO: 69143 - DNA, 26 bp, Homo sapiens
atagaaactctcgaacaagttggaaa

SEQ ID NO: 69144 - DNA, 26 bp, Homo sapiens
tagaaactctcgaacaagttggaaat

SEQ ID NO: 69145 - DNA, 26 bp, Homo sapiens
agaaactctcgaacaagttggaaatg

SEQ ID NO: 69146 - DNA, 26 bp, Homo sapiens
gaaactctcgaacaagttggaaatgt

SEQ ID NO: 69147 - DNA, 26 bp, Homo sapiens
aaactctcgaacaagttggaaatgtt

SEQ ID NO: 69148 - DNA, 26 bp, Homo sapiens
aactctcgaacaagttggaaatgttc

SEQ ID NO: 69149 - DNA, 26 bp, Homo sapiens
actctcgaacaagttggaaatgttcc

SEQ ID NO: 69150 - DNA, 26 bp, Homo sapiens
ctctcgaacaagttggaaatgttcct

SEQ ID NO: 69151 - DNA, 26 bp, Homo sapiens
tctcgaacaagttggaaatgttcctc

SEQ ID NO: 69152 - DNA, 26 bp, Homo sapiens
ctcgaacaagttggaaatgttcctct

SEQ ID NO: 69153 - DNA, 26 bp, Homo sapiens
tcgaacaagttggaaatgttcctctc

SEQ ID NO: 69154 - DNA, 26 bp, Homo sapiens
cgaacaagttggaaatgttcctctcc

SEQ ID NO: 69155 - DNA, 26 bp, Homo sapiens
gaacaagttggaaatgttcctctcca

SEQ ID NO: 69156 - DNA, 26 bp, Homo sapiens
aacaagttggaaatgttcctctccaa

SEQ ID NO: 69157 - DNA, 26 bp, Homo sapiens
acaagttggaaatgttcctctccaat

SEQ ID NO: 69158 - DNA, 26 bp, Homo sapiens
caagttggaaatgttcctctccaatg

SEQ ID NO: 69159 - DNA, 26 bp, Homo sapiens
aagttggaaatgttcctctccaatgg

SEQ ID NO: 69160 - DNA, 26 bp, Homo sapiens
agttggaaatgttcctctccaatggt

SEQ ID NO: 69161 - DNA, 26 bp, Homo sapiens
gttggaaatgttcctctccaatggtc

SEQ ID NO: 69162 - DNA, 26 bp, Homo sapiens
ttggaaatgttcctctccaatggtcc

SEQ ID NO: 69163 - DNA, 26 bp, Homo sapiens
tggaaatgttcctctccaatggtcca

SEQ ID NO: 69164 - DNA, 26 bp, Homo sapiens
ggaaatgttcctctccaatggtccaa

SEQ ID NO: 69165 - DNA, 26 bp, Homo sapiens
gaaatgttcctctccaatggtccaag

SEQ ID NO: 69166 - DNA, 26 bp, Homo sapiens
aaatgttcctctccaatggtccaaga

SEQ ID NO: 69167 - DNA, 26 bp, Homo sapiens
aatgttcctctccaatggtccaagag

SEQ ID NO: 69168 - DNA, 26 bp, Homo sapiens
atgttcctctccaatggtccaagagg

SEQ ID NO: 69169 - DNA, 26 bp, Homo sapiens
tgttcctctccaatggtccaagagga

SEQ ID NO: 69170 - DNA, 26 bp, Homo sapiens
gttcctctccaatggtccaagaggaa

SEQ ID NO: 69171 - DNA, 26 bp, Homo sapiens
ttcctctccaatggtccaagaggaat

SEQ ID NO: 69172 - DNA, 26 bp, Homo sapiens
tcctctccaatggtccaagaggaatc

SEQ ID NO: 69173 - DNA, 26 bp, Homo sapiens
cctctccaatggtccaagaggaatcc

SEQ ID NO: 69174 - DNA, 26 bp, Homo sapiens
ctctccaatggtccaagaggaatcca

SEQ ID NO: 69175 - DNA, 26 bp, Homo sapiens
tctccaatggtccaagaggaatccac

SEQ ID NO: 69176 - DNA, 26 bp, Homo sapiens
ctccaatggtccaagaggaatccact

SEQ ID NO: 69177 - DNA, 26 bp, Homo sapiens
tccaatggtccaagaggaatccacta

SEQ ID NO: 69178 - DNA, 26 bp, Homo sapiens
ccaatggtccaagaggaatccactag

SEQ ID NO: 69179 - DNA, 26 bp, Homo sapiens
caatggtccaagaggaatccactaga

SEQ ID NO: 69180 - DNA, 26 bp, Homo sapiens
aatggtccaagaggaatccactagaa

SEQ ID NO: 69181 - DNA, 26 bp, Homo sapiens
atggtccaagaggaatccactagaaa

SEQ ID NO: 69182 - DNA, 26 bp, Homo sapiens
tggtccaagaggaatccactagaaat

SEQ ID NO: 69183 - DNA, 26 bp, Homo sapiens
ggtccaagaggaatccactagaaata

SEQ ID NO: 69184 - DNA, 26 bp, Homo sapiens
gtccaagaggaatccactagaaatat

SEQ ID NO: 69185 - DNA, 26 bp, Homo sapiens
tccaagaggaatccactagaaatatt

SEQ ID NO: 69186 - DNA, 26 bp, Homo sapiens
ccaagaggaatccactagaaatatta

SEQ ID NO: 69187 - DNA, 26 bp, Homo sapiens
caagaggaatccactagaaatattat

SEQ ID NO: 69188 - DNA, 26 bp, Homo sapiens
aagaggaatccactagaaatattata

SEQ ID NO: 69189 - DNA, 26 bp, Homo sapiens
agaggaatccactagaaatattatat

SEQ ID NO: 69190 - DNA, 26 bp, Homo sapiens
gaggaatccactagaaatattatatc

SEQ ID NO: 69191 - DNA, 26 bp, Homo sapiens
aggaatccactagaaatattatatca

SEQ ID NO: 69192 - DNA, 26 bp, Homo sapiens
ggaatccactagaaatattatatcag

SEQ ID NO: 69193 - DNA, 26 bp, Homo sapiens
gaatccactagaaatattatatcagc

SEQ ID NO: 69194 - DNA, 26 bp, Homo sapiens
aatccactagaaatattatatcagca

SEQ ID NO: 69195 - DNA, 26 bp, Homo sapiens
atccactagaaatattatatcagcag

SEQ ID NO: 69196 - DNA, 26 bp, Homo sapiens
tccactagaaatattatatcagcagc

SEQ ID NO: 69197 - DNA, 26 bp, Homo sapiens
ccactagaaatattatatcagcagcc

SEQ ID NO: 69198 - DNA, 26 bp, Homo sapiens
cactagaaatattatatcagcagccg

SEQ ID NO: 69199 - DNA, 26 bp, Homo sapiens
actagaaatattatatcagcagccgc

SEQ ID NO: 69200 - DNA, 26 bp, Homo sapiens
ctagaaatattatatcagcagccgca

SEQ ID NO: 69201 - DNA, 26 bp, Homo sapiens
tagaaatattatatcagcagccgcac

SEQ ID NO: 69202 - DNA, 26 bp, Homo sapiens
agaaatattatatcagcagccgcacc

SEQ ID NO: 69203 - DNA, 26 bp, Homo sapiens
gaaatattatatcagcagccgcacca

SEQ ID NO: 69204 - DNA, 26 bp, Homo sapiens
aaatattatatcagcagccgcaccat

SEQ ID NO: 69205 - DNA, 26 bp, Homo sapiens
aatattatatcagcagccgcaccatt

SEQ ID NO: 69206 - DNA, 26 bp, Homo sapiens
atattatatcagcagccgcaccattt

SEQ ID NO: 69207 - DNA, 26 bp, Homo sapiens
tattatatcagcagccgcaccatttt

SEQ ID NO: 69208 - DNA, 26 bp, Homo sapiens
attatatcagcagccgcaccattttt

SEQ ID NO: 69209 - DNA, 26 bp, Homo sapiens
ttatatcagcagccgcaccatttttg

SEQ ID NO: 69210 - DNA, 26 bp, Homo sapiens
tatatcagcagccgcaccatttttga

SEQ ID NO: 69211 - DNA, 26 bp, Homo sapiens
atatcagcagccgcaccatttttgac

SEQ ID NO: 69212 - DNA, 26 bp, Homo sapiens
tatcagcagccgcaccatttttgaca

SEQ ID NO: 69213 - DNA, 26 bp, Homo sapiens
atcagcagccgcaccatttttgacat

SEQ ID NO: 69214 - DNA, 26 bp, Homo sapiens
tcagcagccgcaccatttttgacatc

SEQ ID NO: 69215 - DNA, 26 bp, Homo sapiens
cagcagccgcaccatttttgacatct

SEQ ID NO: 69216 - DNA, 26 bp, Homo sapiens
agcagccgcaccatttttgacatctg

SEQ ID NO: 69217 - DNA, 26 bp, Homo sapiens
gcagccgcaccatttttgacatctgc

SEQ ID NO: 69218 - DNA, 26 bp, Homo sapiens
cagccgcaccatttttgacatctgct

SEQ ID NO: 69219 - DNA, 26 bp, Homo sapiens
agccgcaccatttttgacatctgctt

SEQ ID NO: 69220 - DNA, 26 bp, Homo sapiens
gccgcaccatttttgacatctgcttg

SEQ ID NO: 69221 - DNA, 26 bp, Homo sapiens
ccgcaccatttttgacatctgcttgc

SEQ ID NO: 69222 - DNA, 26 bp, Homo sapiens
cgcaccatttttgacatctgcttgct

SEQ ID NO: 69223 - DNA, 26 bp, Homo sapiens
gcaccatttttgacatctgcttgctg

SEQ ID NO: 69224 - DNA, 26 bp, Homo sapiens
caccatttttgacatctgcttgctgc

SEQ ID NO: 69225 - DNA, 26 bp, Homo sapiens
accatttttgacatctgcttgctgct

SEQ ID NO: 69226 - DNA, 26 bp, Homo sapiens
ccatttttgacatctgcttgctgctg

SEQ ID NO: 69227 - DNA, 26 bp, Homo sapiens
catttttgacatctgcttgctgctgc

SEQ ID NO: 69228 - DNA, 26 bp, Homo sapiens
atttttgacatctgcttgctgctgct

SEQ ID NO: 69229 - DNA, 26 bp, Homo sapiens
tttttgacatctgcttgctgctgctg

SEQ ID NO: 69230 - DNA, 26 bp, Homo sapiens
ttttgacatctgcttgctgctgctgg

SEQ ID NO: 69231 - DNA, 26 bp, Homo sapiens
tttgacatctgcttgctgctgctggg

SEQ ID NO: 69232 - DNA, 26 bp, Homo sapiens
ttgacatctgcttgctgctgctgggc

SEQ ID NO: 69233 - DNA, 26 bp, Homo sapiens
tgacatctgcttgctgctgctgggca

SEQ ID NO: 69234 - DNA, 26 bp, Homo sapiens
gacatctgcttgctgctgctgggcat

SEQ ID NO: 69235 - DNA, 26 bp, Homo sapiens
acatctgcttgctgctgctgggcatg

SEQ ID NO: 69236 - DNA, 26 bp, Homo sapiens
catctgcttgctgctgctgggcatga

SEQ ID NO: 69237 - DNA, 26 bp, Homo sapiens
atctgcttgctgctgctgggcatgag

SEQ ID NO: 69238 - DNA, 26 bp, Homo sapiens
tctgcttgctgctgctgggcatgagt

SEQ ID NO: 69239 - DNA, 26 bp, Homo sapiens
ctgcttgctgctgctgggcatgagtt

SEQ ID NO: 69240 - DNA, 26 bp, Homo sapiens
tgcttgctgctgctgggcatgagttg

SEQ ID NO: 69241 - DNA, 26 bp, Homo sapiens
gcttgctgctgctgggcatgagttgt

SEQ ID NO: 69242 - DNA, 26 bp, Homo sapiens
cttgctgctgctgggcatgagttgta

SEQ ID NO: 69243 - DNA, 26 bp, Homo sapiens
ttgctgctgctgggcatgagttgtag

SEQ ID NO: 69244 - DNA, 26 bp, Homo sapiens
tgctgctgctgggcatgagttgtagg

SEQ ID NO: 69245 - DNA, 26 bp, Homo sapiens
gctgctgctgggcatgagttgtagga

SEQ ID NO: 69246 - DNA, 26 bp, Homo sapiens
ctgctgctgggcatgagttgtaggaa

SEQ ID NO: 69247 - DNA, 26 bp, Homo sapiens
tgctgctgggcatgagttgtaggaaa

SEQ ID NO: 69248 - DNA, 26 bp, Homo sapiens
gctgctgggcatgagttgtaggaaag

SEQ ID NO: 69249 - DNA, 26 bp, Homo sapiens
ctgctgggcatgagttgtaggaaagc

SEQ ID NO: 69250 - DNA, 26 bp, Homo sapiens
tgctgggcatgagttgtaggaaagcc

SEQ ID NO: 69251 - DNA, 26 bp, Homo sapiens
gctgggcatgagttgtaggaaagcct

SEQ ID NO: 69252 - DNA, 26 bp, Homo sapiens
ctgggcatgagttgtaggaaagcctg

SEQ ID NO: 69253 - DNA, 26 bp, Homo sapiens
tgggcatgagttgtaggaaagcctga

SEQ ID NO: 69254 - DNA, 26 bp, Homo sapiens
gggcatgagttgtaggaaagcctgag

SEQ ID NO: 69255 - DNA, 26 bp, Homo sapiens
ggcatgagttgtaggaaagcctgaga

SEQ ID NO: 69256 - DNA, 26 bp, Homo sapiens
gcatgagttgtaggaaagcctgagag

SEQ ID NO: 69257 - DNA, 26 bp, Homo sapiens
catgagttgtaggaaagcctgagaga

SEQ ID NO: 69258 - DNA, 26 bp, Homo sapiens
atgagttgtaggaaagcctgagagaa

SEQ ID NO: 69259 - DNA, 26 bp, Homo sapiens
tgagttgtaggaaagcctgagagaaa

SEQ ID NO: 69260 - DNA, 26 bp, Homo sapiens
gagttgtaggaaagcctgagagaaag

SEQ ID NO: 69261 - DNA, 26 bp, Homo sapiens
agttgtaggaaagcctgagagaaaga

SEQ ID NO: 69262 - DNA, 26 bp, Homo sapiens
gttgtaggaaagcctgagagaaagag

SEQ ID NO: 69263 - DNA, 26 bp, Homo sapiens
ttgtaggaaagcctgagagaaagagg

SEQ ID NO: 69264 - DNA, 26 bp, Homo sapiens
tgtaggaaagcctgagagaaagaggc

SEQ ID NO: 69265 - DNA, 26 bp, Homo sapiens
gtaggaaagcctgagagaaagaggca

SEQ ID NO: 69266 - DNA, 26 bp, Homo sapiens
taggaaagcctgagagaaagaggcaa

SEQ ID NO: 69267 - DNA, 26 bp, Homo sapiens
aggaaagcctgagagaaagaggcaaa

SEQ ID NO: 69268 - DNA, 26 bp, Homo sapiens
ggaaagcctgagagaaagaggcaaaa

SEQ ID NO: 69269 - DNA, 26 bp, Homo sapiens
gaaagcctgagagaaagaggcaaaag

SEQ ID NO: 69270 - DNA, 26 bp, Homo sapiens
aaagcctgagagaaagaggcaaaaga

SEQ ID NO: 69271 - DNA, 26 bp, Homo sapiens
aagcctgagagaaagaggcaaaagac

SEQ ID NO: 69272 - DNA, 26 bp, Homo sapiens
agcctgagagaaagaggcaaaagacg

SEQ ID NO: 69273 - DNA, 26 bp, Homo sapiens
gcctgagagaaagaggcaaaagacgg

SEQ ID NO: 69274 - DNA, 26 bp, Homo sapiens
cctgagagaaagaggcaaaagacggc

SEQ ID NO: 69275 - DNA, 26 bp, Homo sapiens
ctgagagaaagaggcaaaagacggcc

SEQ ID NO: 69276 - DNA, 26 bp, Homo sapiens
tgagagaaagaggcaaaagacggcca

SEQ ID NO: 69277 - DNA, 26 bp, Homo sapiens
gagagaaagaggcaaaagacggccac

SEQ ID NO: 69278 - DNA, 26 bp, Homo sapiens
agagaaagaggcaaaagacggccact

SEQ ID NO: 69279 - DNA, 26 bp, Homo sapiens
gagaaagaggcaaaagacggccacta

SEQ ID NO: 69280 - DNA, 26 bp, Homo sapiens
agaaagaggcaaaagacggccactaa

SEQ ID NO: 69281 - DNA, 26 bp, Homo sapiens
gaaagaggcaaaagacggccactaag

SEQ ID NO: 69282 - DNA, 26 bp, Homo sapiens
aaagaggcaaaagacggccactaagg

SEQ ID NO: 69283 - DNA, 26 bp, Homo sapiens
aagaggcaaaagacggccactaaggg

SEQ ID NO: 69284 - DNA, 26 bp, Homo sapiens
agaggcaaaagacggccactaagggc

SEQ ID NO: 69285 - DNA, 26 bp, Homo sapiens
gaggcaaaagacggccactaagggca

SEQ ID NO: 69286 - DNA, 26 bp, Homo sapiens
aggcaaaagacggccactaagggcaa

SEQ ID NO: 69287 - DNA, 26 bp, Homo sapiens
ggcaaaagacggccactaagggcaag

SEQ ID NO: 69288 - DNA, 26 bp, Homo sapiens
gcaaaagacggccactaagggcaagt

SEQ ID NO: 69289 - DNA, 26 bp, Homo sapiens
caaaagacggccactaagggcaagtg

SEQ ID NO: 69290 - DNA, 26 bp, Homo sapiens
aaaagacggccactaagggcaagtgc

SEQ ID NO: 69291 - DNA, 26 bp, Homo sapiens
aaagacggccactaagggcaagtgcc

SEQ ID NO: 69292 - DNA, 26 bp, Homo sapiens
aagacggccactaagggcaagtgccg

SEQ ID NO: 69293 - DNA, 26 bp, Homo sapiens
agacggccactaagggcaagtgccga

SEQ ID NO: 69294 - DNA, 26 bp, Homo sapiens
gacggccactaagggcaagtgccgat

SEQ ID NO: 69295 - DNA, 26 bp, Homo sapiens
acggccactaagggcaagtgccgatg

SEQ ID NO: 69296 - DNA, 26 bp, Homo sapiens
cggccactaagggcaagtgccgatgt

SEQ ID NO: 69297 - DNA, 26 bp, Homo sapiens
ggccactaagggcaagtgccgatgtt

SEQ ID NO: 69298 - DNA, 26 bp, Homo sapiens
gccactaagggcaagtgccgatgttt

SEQ ID NO: 69299 - DNA, 26 bp, Homo sapiens
ccactaagggcaagtgccgatgtttc

SEQ ID NO: 69300 - DNA, 26 bp, Homo sapiens
cactaagggcaagtgccgatgtttcc

SEQ ID NO: 69301 - DNA, 26 bp, Homo sapiens
actaagggcaagtgccgatgtttcct

SEQ ID NO: 69302 - DNA, 26 bp, Homo sapiens
ctaagggcaagtgccgatgtttcctc

SEQ ID NO: 69303 - DNA, 26 bp, Homo sapiens
taagggcaagtgccgatgtttcctca

SEQ ID NO: 69304 - DNA, 26 bp, Homo sapiens
aagggcaagtgccgatgtttcctcat

SEQ ID NO: 69305 - DNA, 26 bp, Homo sapiens
agggcaagtgccgatgtttcctcatt

SEQ ID NO: 69306 - DNA, 26 bp, Homo sapiens
gggcaagtgccgatgtttcctcattt

SEQ ID NO: 69307 - DNA, 26 bp, Homo sapiens
ggcaagtgccgatgtttcctcatttt

SEQ ID NO: 69308 - DNA, 26 bp, Homo sapiens
gcaagtgccgatgtttcctcattttg

SEQ ID NO: 69309 - DNA, 26 bp, Homo sapiens
caagtgccgatgtttcctcattttga

SEQ ID NO: 69310 - DNA, 26 bp, Homo sapiens
aagtgccgatgtttcctcattttgaa

SEQ ID NO: 69311 - DNA, 26 bp, Homo sapiens
agtgccgatgtttcctcattttgaat

SEQ ID NO: 69312 - DNA, 26 bp, Homo sapiens
gtgccgatgtttcctcattttgaatt

SEQ ID NO: 69313 - DNA, 26 bp, Homo sapiens
tgccgatgtttcctcattttgaattt

SEQ ID NO: 69314 - DNA, 26 bp, Homo sapiens
gccgatgtttcctcattttgaatttg

SEQ ID NO: 69315 - DNA, 26 bp, Homo sapiens
ccgatgtttcctcattttgaatttgt

SEQ ID NO: 69316 - DNA, 26 bp, Homo sapiens
cgatgtttcctcattttgaatttgtc

SEQ ID NO: 69317 - DNA, 26 bp, Homo sapiens
gatgtttcctcattttgaatttgtct

SEQ ID NO: 69318 - DNA, 26 bp, Homo sapiens
atgtttcctcattttgaatttgtcta

SEQ ID NO: 69319 - DNA, 26 bp, Homo sapiens
tgtttcctcattttgaatttgtctaa

SEQ ID NO: 69320 - DNA, 26 bp, Homo sapiens
gtttcctcattttgaatttgtctaag

SEQ ID NO: 69321 - DNA, 26 bp, Homo sapiens
tttcctcattttgaatttgtctaagc

SEQ ID NO: 69322 - DNA, 26 bp, Homo sapiens
ttcctcattttgaatttgtctaagca

SEQ ID NO: 69323 - DNA, 26 bp, Homo sapiens
tcctcattttgaatttgtctaagcac

SEQ ID NO: 69324 - DNA, 26 bp, Homo sapiens
cctcattttgaatttgtctaagcacc

SEQ ID NO: 69325 - DNA, 26 bp, Homo sapiens
ctcattttgaatttgtctaagcacca

SEQ ID NO: 69326 - DNA, 26 bp, Homo sapiens
tcattttgaatttgtctaagcaccaa

SEQ ID NO: 69327 - DNA, 26 bp, Homo sapiens
cattttgaatttgtctaagcaccaaa

SEQ ID NO: 69328 - DNA, 26 bp, Homo sapiens
attttgaatttgtctaagcaccaaat

SEQ ID NO: 69329 - DNA, 26 bp, Homo sapiens
ttttgaatttgtctaagcaccaaata

SEQ ID NO: 69330 - DNA, 26 bp, Homo sapiens
tttgaatttgtctaagcaccaaatat

SEQ ID NO: 69331 - DNA, 26 bp, Homo sapiens
ttgaatttgtctaagcaccaaatatg

SEQ ID NO: 69332 - DNA, 26 bp, Homo sapiens
tgaatttgtctaagcaccaaatatga

SEQ ID NO: 69333 - DNA, 26 bp, Homo sapiens
gaatttgtctaagcaccaaatatgaa

SEQ ID NO: 69334 - DNA, 26 bp, Homo sapiens
aatttgtctaagcaccaaatatgaac

SEQ ID NO: 69335 - DNA, 26 bp, Homo sapiens
atttgtctaagcaccaaatatgaacc

SEQ ID NO: 69336 - DNA, 26 bp, Homo sapiens
tttgtctaagcaccaaatatgaaccc

SEQ ID NO: 69337 - DNA, 26 bp, Homo sapiens
ttgtctaagcaccaaatatgaacccc

SEQ ID NO: 69338 - DNA, 26 bp, Homo sapiens
tgtctaagcaccaaatatgaacccct

SEQ ID NO: 69339 - DNA, 26 bp, Homo sapiens
gtctaagcaccaaatatgaacccctg

SEQ ID NO: 69340 - DNA, 26 bp, Homo sapiens
tctaagcaccaaatatgaacccctga

SEQ ID NO: 69341 - DNA, 26 bp, Homo sapiens
ctaagcaccaaatatgaacccctgag

SEQ ID NO: 69342 - DNA, 26 bp, Homo sapiens
taagcaccaaatatgaacccctgagc

SEQ ID NO: 69343 - DNA, 26 bp, Homo sapiens
aagcaccaaatatgaacccctgagca

SEQ ID NO: 69344 - DNA, 26 bp, Homo sapiens
agcaccaaatatgaacccctgagcaa

SEQ ID NO: 69345 - DNA, 26 bp, Homo sapiens
gcaccaaatatgaacccctgagcaaa

SEQ ID NO: 69346 - DNA, 26 bp, Homo sapiens
caccaaatatgaacccctgagcaaac

SEQ ID NO: 69347 - DNA, 26 bp, Homo sapiens
accaaatatgaacccctgagcaaacc

SEQ ID NO: 69348 - DNA, 26 bp, Homo sapiens
ccaaatatgaacccctgagcaaacct

SEQ ID NO: 69349 - DNA, 26 bp, Homo sapiens
caaatatgaacccctgagcaaacctg

SEQ ID NO: 69350 - DNA, 26 bp, Homo sapiens
aaatatgaacccctgagcaaacctga

SEQ ID NO: 69351 - DNA, 26 bp, Homo sapiens
aatatgaacccctgagcaaacctgaa

SEQ ID NO: 69352 - DNA, 26 bp, Homo sapiens
atatgaacccctgagcaaacctgaag

SEQ ID NO: 69353 - DNA, 26 bp, Homo sapiens
tatgaacccctgagcaaacctgaagg

SEQ ID NO: 69354 - DNA, 26 bp, Homo sapiens
atgaacccctgagcaaacctgaaggc

SEQ ID NO: 69355 - DNA, 26 bp, Homo sapiens
tgaacccctgagcaaacctgaaggcg

SEQ ID NO: 69356 - DNA, 26 bp, Homo sapiens
gaacccctgagcaaacctgaaggcgt

SEQ ID NO: 69357 - DNA, 26 bp, Homo sapiens
aacccctgagcaaacctgaaggcgtg

SEQ ID NO: 69358 - DNA, 26 bp, Homo sapiens
acccctgagcaaacctgaaggcgtgt

SEQ ID NO: 69359 - DNA, 26 bp, Homo sapiens
cccctgagcaaacctgaaggcgtgtg

SEQ ID NO: 69360 - DNA, 26 bp, Homo sapiens
ccctgagcaaacctgaaggcgtgtgt

SEQ ID NO: 69361 - DNA, 26 bp, Homo sapiens
cctgagcaaacctgaaggcgtgtgtc

SEQ ID NO: 69362 - DNA, 26 bp, Homo sapiens
ctgagcaaacctgaaggcgtgtgtcc

SEQ ID NO: 69363 - DNA, 26 bp, Homo sapiens
tgagcaaacctgaaggcgtgtgtccc

SEQ ID NO: 69364 - DNA, 26 bp, Homo sapiens
gagcaaacctgaaggcgtgtgtccct

SEQ ID NO: 69365 - DNA, 26 bp, Homo sapiens
agcaaacctgaaggcgtgtgtccctg

SEQ ID NO: 69366 - DNA, 26 bp, Homo sapiens
gcaaacctgaaggcgtgtgtccctgg

SEQ ID NO: 69367 - DNA, 26 bp, Homo sapiens
caaacctgaaggcgtgtgtccctggg

SEQ ID NO: 69368 - DNA, 26 bp, Homo sapiens
aaacctgaaggcgtgtgtccctgggc

SEQ ID NO: 69369 - DNA, 26 bp, Homo sapiens
aacctgaaggcgtgtgtccctgggct

SEQ ID NO: 69370 - DNA, 26 bp, Homo sapiens
acctgaaggcgtgtgtccctgggctc

SEQ ID NO: 69371 - DNA, 26 bp, Homo sapiens
cctgaaggcgtgtgtccctgggctcc

SEQ ID NO: 69372 - DNA, 26 bp, Homo sapiens
ctgaaggcgtgtgtccctgggctcct

SEQ ID NO: 69373 - DNA, 26 bp, Homo sapiens
tgaaggcgtgtgtccctgggctcctc

SEQ ID NO: 69374 - DNA, 26 bp, Homo sapiens
gaaggcgtgtgtccctgggctcctcg

SEQ ID NO: 69375 - DNA, 26 bp, Homo sapiens
aaggcgtgtgtccctgggctcctcga

SEQ ID NO: 69376 - DNA, 26 bp, Homo sapiens
aggcgtgtgtccctgggctcctcgat

SEQ ID NO: 69377 - DNA, 26 bp, Homo sapiens
ggcgtgtgtccctgggctcctcgatt

SEQ ID NO: 69378 - DNA, 26 bp, Homo sapiens
gcgtgtgtccctgggctcctcgattc

SEQ ID NO: 69379 - DNA, 26 bp, Homo sapiens
cgtgtgtccctgggctcctcgattca

SEQ ID NO: 69380 - DNA, 26 bp, Homo sapiens
gtgtgtccctgggctcctcgattcaa

SEQ ID NO: 69381 - DNA, 26 bp, Homo sapiens
tgtgtccctgggctcctcgattcaat

SEQ ID NO: 69382 - DNA, 26 bp, Homo sapiens
gtgtccctgggctcctcgattcaatt

SEQ ID NO: 69383 - DNA, 26 bp, Homo sapiens
tgtccctgggctcctcgattcaatta

SEQ ID NO: 69384 - DNA, 26 bp, Homo sapiens
gtccctgggctcctcgattcaattag

SEQ ID NO: 69385 - DNA, 26 bp, Homo sapiens
tccctgggctcctcgattcaattagg

SEQ ID NO: 69386 - DNA, 26 bp, Homo sapiens
ccctgggctcctcgattcaattaggt

SEQ ID NO: 69387 - DNA, 26 bp, Homo sapiens
cctgggctcctcgattcaattaggtt

SEQ ID NO: 69388 - DNA, 26 bp, Homo sapiens
ctgggctcctcgattcaattaggttt

SEQ ID NO: 69389 - DNA, 26 bp, Homo sapiens
tgggctcctcgattcaattaggtttg

SEQ ID NO: 69390 - DNA, 26 bp, Homo sapiens
gggctcctcgattcaattaggtttga

SEQ ID NO: 69391 - DNA, 26 bp, Homo sapiens
ggctcctcgattcaattaggtttgaa

SEQ ID NO: 69392 - DNA, 26 bp, Homo sapiens
gctcctcgattcaattaggtttgaat

SEQ ID NO: 69393 - DNA, 26 bp, Homo sapiens
ctcctcgattcaattaggtttgaata

SEQ ID NO: 69394 - DNA, 26 bp, Homo sapiens
tcctcgattcaattaggtttgaatag

SEQ ID NO: 69395 - DNA, 26 bp, Homo sapiens
cctcgattcaattaggtttgaatagg

SEQ ID NO: 69396 - DNA, 26 bp, Homo sapiens
ctcgattcaattaggtttgaatagga

SEQ ID NO: 69397 - DNA, 26 bp, Homo sapiens
tcgattcaattaggtttgaataggat

SEQ ID NO: 69398 - DNA, 26 bp, Homo sapiens
cgattcaattaggtttgaataggatg

SEQ ID NO: 69399 - DNA, 26 bp, Homo sapiens
gattcaattaggtttgaataggatgc

SEQ ID NO: 69400 - DNA, 26 bp, Homo sapiens
attcaattaggtttgaataggatgca

SEQ ID NO: 69401 - DNA, 26 bp, Homo sapiens
ttcaattaggtttgaataggatgcat

SEQ ID NO: 69402 - DNA, 26 bp, Homo sapiens
tcaattaggtttgaataggatgcata

SEQ ID NO: 69403 - DNA, 26 bp, Homo sapiens
caattaggtttgaataggatgcatac

SEQ ID NO: 69404 - DNA, 26 bp, Homo sapiens
aattaggtttgaataggatgcatact

SEQ ID NO: 69405 - DNA, 26 bp, Homo sapiens
attaggtttgaataggatgcatactt

SEQ ID NO: 69406 - DNA, 26 bp, Homo sapiens
ttaggtttgaataggatgcatacttt

SEQ ID NO: 69407 - DNA, 26 bp, Homo sapiens
taggtttgaataggatgcatactttt

SEQ ID NO: 69408 - DNA, 26 bp, Homo sapiens
aggtttgaataggatgcatacttttc

SEQ ID NO: 69409 - DNA, 26 bp, Homo sapiens
ggtttgaataggatgcatacttttcc

SEQ ID NO: 69410 - DNA, 26 bp, Homo sapiens
gtttgaataggatgcatacttttccc

SEQ ID NO: 69411 - DNA, 26 bp, Homo sapiens
tttgaataggatgcatacttttccca

SEQ ID NO: 69412 - DNA, 26 bp, Homo sapiens
ttgaataggatgcatacttttcccac

SEQ ID NO: 69413 - DNA, 26 bp, Homo sapiens
tgaataggatgcatacttttcccact

SEQ ID NO: 69414 - DNA, 26 bp, Homo sapiens
gaataggatgcatacttttcccactc

SEQ ID NO: 69415 - DNA, 26 bp, Homo sapiens
aataggatgcatacttttcccactca

SEQ ID NO: 69416 - DNA, 26 bp, Homo sapiens
ataggatgcatacttttcccactcac

SEQ ID NO: 69417 - DNA, 26 bp, Homo sapiens
taggatgcatacttttcccactcact

SEQ ID NO: 69418 - DNA, 26 bp, Homo sapiens
aggatgcatacttttcccactcactg

SEQ ID NO: 69419 - DNA, 26 bp, Homo sapiens
ggatgcatacttttcccactcactgc

SEQ ID NO: 69420 - DNA, 26 bp, Homo sapiens
gatgcatacttttcccactcactgcg

SEQ ID NO: 69421 - DNA, 26 bp, Homo sapiens
atgcatacttttcccactcactgcgt

SEQ ID NO: 69422 - DNA, 26 bp, Homo sapiens
tgcatacttttcccactcactgcgtc

SEQ ID NO: 69423 - DNA, 26 bp, Homo sapiens
gcatacttttcccactcactgcgtct

SEQ ID NO: 69424 - DNA, 26 bp, Homo sapiens
catacttttcccactcactgcgtctc

SEQ ID NO: 69425 - DNA, 26 bp, Homo sapiens
atacttttcccactcactgcgtctct

SEQ ID NO: 69426 - DNA, 26 bp, Homo sapiens
tacttttcccactcactgcgtctctt

SEQ ID NO: 69427 - DNA, 26 bp, Homo sapiens
acttttcccactcactgcgtctcttt

SEQ ID NO: 69428 - DNA, 26 bp, Homo sapiens
cttttcccactcactgcgtctctttt

SEQ ID NO: 69429 - DNA, 26 bp, Homo sapiens
ttttcccactcactgcgtctcttttt

SEQ ID NO: 69430 - DNA, 26 bp, Homo sapiens
tttcccactcactgcgtctctttttc

SEQ ID NO: 69431 - DNA, 26 bp, Homo sapiens
ttcccactcactgcgtctctttttct

SEQ ID NO: 69432 - DNA, 26 bp, Homo sapiens
tcccactcactgcgtctctttttctt

SEQ ID NO: 69433 - DNA, 26 bp, Homo sapiens
cccactcactgcgtctctttttcttt

SEQ ID NO: 69434 - DNA, 26 bp, Homo sapiens
ccactcactgcgtctctttttctttt

SEQ ID NO: 69435 - DNA, 26 bp, Homo sapiens
cactcactgcgtctctttttcttttt

SEQ ID NO: 69436 - DNA, 26 bp, Homo sapiens
actcactgcgtctctttttctttttg

SEQ ID NO: 69437 - DNA, 26 bp, Homo sapiens
ctcactgcgtctctttttctttttgc

SEQ ID NO: 69438 - DNA, 26 bp, Homo sapiens
tcactgcgtctctttttctttttgca

SEQ ID NO: 69439 - DNA, 26 bp, Homo sapiens
cactgcgtctctttttctttttgcag

SEQ ID NO: 69440 - DNA, 26 bp, Homo sapiens
actgcgtctctttttctttttgcagc

SEQ ID NO: 69441 - DNA, 26 bp, Homo sapiens
ctgcgtctctttttctttttgcagcc

SEQ ID NO: 69442 - DNA, 26 bp, Homo sapiens
tgcgtctctttttctttttgcagcct

SEQ ID NO: 69443 - DNA, 26 bp, Homo sapiens
gcgtctctttttctttttgcagcctt

SEQ ID NO: 69444 - DNA, 26 bp, Homo sapiens
cgtctctttttctttttgcagccttt

SEQ ID NO: 69445 - DNA, 26 bp, Homo sapiens
gtctctttttctttttgcagcctttc

SEQ ID NO: 69446 - DNA, 26 bp, Homo sapiens
tctctttttctttttgcagcctttct

SEQ ID NO: 69447 - DNA, 26 bp, Homo sapiens
ctctttttctttttgcagcctttctc

SEQ ID NO: 69448 - DNA, 26 bp, Homo sapiens
tctttttctttttgcagcctttctcc

SEQ ID NO: 69449 - DNA, 26 bp, Homo sapiens
ctttttctttttgcagcctttctcca

SEQ ID NO: 69450 - DNA, 26 bp, Homo sapiens
tttttctttttgcagcctttctccac

SEQ ID NO: 69451 - DNA, 26 bp, Homo sapiens
ttttctttttgcagcctttctccacc

SEQ ID NO: 69452 - DNA, 26 bp, Homo sapiens
tttctttttgcagcctttctccacca

SEQ ID NO: 69453 - DNA, 26 bp, Homo sapiens
ttctttttgcagcctttctccaccaa

SEQ ID NO: 69454 - DNA, 26 bp, Homo sapiens
tctttttgcagcctttctccaccaaa

SEQ ID NO: 69455 - DNA, 26 bp, Homo sapiens
ctttttgcagcctttctccaccaaaa

SEQ ID NO: 69456 - DNA, 26 bp, Homo sapiens
tttttgcagcctttctccaccaaaaa

SEQ ID NO: 69457 - DNA, 26 bp, Homo sapiens
ttttgcagcctttctccaccaaaaaa

SEQ ID NO: 69458 - DNA, 26 bp, Homo sapiens
tttgcagcctttctccaccaaaaaag

SEQ ID NO: 69459 - DNA, 26 bp, Homo sapiens
ttgcagcctttctccaccaaaaaagt

SEQ ID NO: 69460 - DNA, 26 bp, Homo sapiens
tgcagcctttctccaccaaaaaagtg

SEQ ID NO: 69461 - DNA, 26 bp, Homo sapiens
gcagcctttctccaccaaaaaagtgg

SEQ ID NO: 69462 - DNA, 26 bp, Homo sapiens
cagcctttctccaccaaaaaagtgga

SEQ ID NO: 69463 - DNA, 26 bp, Homo sapiens
agcctttctccaccaaaaaagtggag

SEQ ID NO: 69464 - DNA, 26 bp, Homo sapiens
gcctttctccaccaaaaaagtggaga

SEQ ID NO: 69465 - DNA, 26 bp, Homo sapiens
cctttctccaccaaaaaagtggagac

SEQ ID NO: 69466 - DNA, 26 bp, Homo sapiens
ctttctccaccaaaaaagtggagact

SEQ ID NO: 69467 - DNA, 26 bp, Homo sapiens
tttctccaccaaaaaagtggagactc

SEQ ID NO: 69468 - DNA, 26 bp, Homo sapiens
ttctccaccaaaaaagtggagactca

SEQ ID NO: 69469 - DNA, 26 bp, Homo sapiens
tctccaccaaaaaagtggagactcag

SEQ ID NO: 69470 - DNA, 26 bp, Homo sapiens
ctccaccaaaaaagtggagactcaga

SEQ ID NO: 69471 - DNA, 26 bp, Homo sapiens
tccaccaaaaaagtggagactcagag

SEQ ID NO: 69472 - DNA, 26 bp, Homo sapiens
ccaccaaaaaagtggagactcagagc

SEQ ID NO: 69473 - DNA, 26 bp, Homo sapiens
caccaaaaaagtggagactcagagct

SEQ ID NO: 69474 - DNA, 26 bp, Homo sapiens
accaaaaaagtggagactcagagctg

SEQ ID NO: 69475 - DNA, 26 bp, Homo sapiens
ccaaaaaagtggagactcagagctgc

SEQ ID NO: 69476 - DNA, 26 bp, Homo sapiens
caaaaaagtggagactcagagctgcg

SEQ ID NO: 69477 - DNA, 26 bp, Homo sapiens
aaaaaagtggagactcagagctgcgg

SEQ ID NO: 69478 - DNA, 26 bp, Homo sapiens
aaaaagtggagactcagagctgcgga

SEQ ID NO: 69479 - DNA, 26 bp, Homo sapiens
aaaagtggagactcagagctgcggag

SEQ ID NO: 69480 - DNA, 26 bp, Homo sapiens
aaagtggagactcagagctgcggagg

SEQ ID NO: 69481 - DNA, 26 bp, Homo sapiens
aagtggagactcagagctgcggagga

SEQ ID NO: 69482 - DNA, 26 bp, Homo sapiens
agtggagactcagagctgcggaggaa

SEQ ID NO: 69483 - DNA, 26 bp, Homo sapiens
gtggagactcagagctgcggaggaaa

SEQ ID NO: 69484 - DNA, 26 bp, Homo sapiens
tggagactcagagctgcggaggaaaa

SEQ ID NO: 69485 - DNA, 26 bp, Homo sapiens
ggagactcagagctgcggaggaaaac

SEQ ID NO: 69486 - DNA, 26 bp, Homo sapiens
gagactcagagctgcggaggaaaact

SEQ ID NO: 69487 - DNA, 26 bp, Homo sapiens
agactcagagctgcggaggaaaactc

SEQ ID NO: 69488 - DNA, 26 bp, Homo sapiens
gactcagagctgcggaggaaaactct

SEQ ID NO: 69489 - DNA, 26 bp, Homo sapiens
actcagagctgcggaggaaaactctt

SEQ ID NO: 69490 - DNA, 26 bp, Homo sapiens
ctcagagctgcggaggaaaactcttg

SEQ ID NO: 69491 - DNA, 26 bp, Homo sapiens
tcagagctgcggaggaaaactcttgc

SEQ ID NO: 69492 - DNA, 26 bp, Homo sapiens
cagagctgcggaggaaaactcttgca

SEQ ID NO: 69493 - DNA, 26 bp, Homo sapiens
agagctgcggaggaaaactcttgcag

SEQ ID NO: 69494 - DNA, 26 bp, Homo sapiens
gagctgcggaggaaaactcttgcagt

SEQ ID NO: 69495 - DNA, 26 bp, Homo sapiens
agctgcggaggaaaactcttgcagtc

SEQ ID NO: 69496 - DNA, 26 bp, Homo sapiens
gctgcggaggaaaactcttgcagtcc

SEQ ID NO: 69497 - DNA, 26 bp, Homo sapiens
ctgcggaggaaaactcttgcagtcct

SEQ ID NO: 69498 - DNA, 26 bp, Homo sapiens
tgcggaggaaaactcttgcagtcctt

SEQ ID NO: 69499 - DNA, 26 bp, Homo sapiens
gcggaggaaaactcttgcagtccttg

SEQ ID NO: 69500 - DNA, 26 bp, Homo sapiens
cggaggaaaactcttgcagtccttgc

SEQ ID NO: 69501 - DNA, 26 bp, Homo sapiens
ggaggaaaactcttgcagtccttgca

SEQ ID NO: 69502 - DNA, 26 bp, Homo sapiens
gaggaaaactcttgcagtccttgcag

SEQ ID NO: 69503 - DNA, 26 bp, Homo sapiens
aggaaaactcttgcagtccttgcagg

SEQ ID NO: 69504 - DNA, 26 bp, Homo sapiens
ggaaaactcttgcagtccttgcagga

SEQ ID NO: 69505 - DNA, 26 bp, Homo sapiens
gaaaactcttgcagtccttgcaggag

SEQ ID NO: 69506 - DNA, 26 bp, Homo sapiens
aaaactcttgcagtccttgcaggagg

SEQ ID NO: 69507 - DNA, 26 bp, Homo sapiens
aaactcttgcagtccttgcaggaggc

SEQ ID NO: 69508 - DNA, 26 bp, Homo sapiens
aactcttgcagtccttgcaggaggct

SEQ ID NO: 69509 - DNA, 26 bp, Homo sapiens
actcttgcagtccttgcaggaggctg

SEQ ID NO: 69510 - DNA, 26 bp, Homo sapiens
ctcttgcagtccttgcaggaggctgg

SEQ ID NO: 69511 - DNA, 26 bp, Homo sapiens
tcttgcagtccttgcaggaggctgga

SEQ ID NO: 69512 - DNA, 26 bp, Homo sapiens
cttgcagtccttgcaggaggctggag

SEQ ID NO: 69513 - DNA, 26 bp, Homo sapiens
ttgcagtccttgcaggaggctggagc

SEQ ID NO: 69514 - DNA, 26 bp, Homo sapiens
tgcagtccttgcaggaggctggagcc

SEQ ID NO: 69515 - DNA, 26 bp, Homo sapiens
gcagtccttgcaggaggctggagccc

SEQ ID NO: 69516 - DNA, 26 bp, Homo sapiens
cagtccttgcaggaggctggagccca

SEQ ID NO: 69517 - DNA, 26 bp, Homo sapiens
agtccttgcaggaggctggagcccag

SEQ ID NO: 69518 - DNA, 26 bp, Homo sapiens
gtccttgcaggaggctggagcccagg

SEQ ID NO: 69519 - DNA, 26 bp, Homo sapiens
tccttgcaggaggctggagcccagga

SEQ ID NO: 69520 - DNA, 26 bp, Homo sapiens
ccttgcaggaggctggagcccaggag

SEQ ID NO: 69521 - DNA, 26 bp, Homo sapiens
cttgcaggaggctggagcccaggaga

SEQ ID NO: 69522 - DNA, 26 bp, Homo sapiens
ttgcaggaggctggagcccaggagaa

SEQ ID NO: 69523 - DNA, 26 bp, Homo sapiens
tgcaggaggctggagcccaggagaac

SEQ ID NO: 69524 - DNA, 26 bp, Homo sapiens
gcaggaggctggagcccaggagaact

SEQ ID NO: 69525 - DNA, 26 bp, Homo sapiens
caggaggctggagcccaggagaactg

SEQ ID NO: 69526 - DNA, 26 bp, Homo sapiens
aggaggctggagcccaggagaactga

SEQ ID NO: 69527 - DNA, 26 bp, Homo sapiens
ggaggctggagcccaggagaactgaa

SEQ ID NO: 69528 - DNA, 26 bp, Homo sapiens
gaggctggagcccaggagaactgaac

SEQ ID NO: 69529 - DNA, 26 bp, Homo sapiens
aggctggagcccaggagaactgaacg

SEQ ID NO: 69530 - DNA, 26 bp, Homo sapiens
ggctggagcccaggagaactgaacgg

SEQ ID NO: 69531 - DNA, 26 bp, Homo sapiens
gctggagcccaggagaactgaacggc

SEQ ID NO: 69532 - DNA, 26 bp, Homo sapiens
ctggagcccaggagaactgaacggcc

SEQ ID NO: 69533 - DNA, 26 bp, Homo sapiens
tggagcccaggagaactgaacggcct

SEQ ID NO: 69534 - DNA, 26 bp, Homo sapiens
ggagcccaggagaactgaacggcctt

SEQ ID NO: 69535 - DNA, 26 bp, Homo sapiens
gagcccaggagaactgaacggccttt

SEQ ID NO: 69536 - DNA, 26 bp, Homo sapiens
agcccaggagaactgaacggcctttg

SEQ ID NO: 69537 - DNA, 26 bp, Homo sapiens
gcccaggagaactgaacggcctttgg

SEQ ID NO: 69538 - DNA, 26 bp, Homo sapiens
cccaggagaactgaacggcctttggt

SEQ ID NO: 69539 - DNA, 26 bp, Homo sapiens
ccaggagaactgaacggcctttggtg

SEQ ID NO: 69540 - DNA, 26 bp, Homo sapiens
caggagaactgaacggcctttggtgg

SEQ ID NO: 69541 - DNA, 26 bp, Homo sapiens
aggagaactgaacggcctttggtgga

SEQ ID NO: 69542 - DNA, 26 bp, Homo sapiens
ggagaactgaacggcctttggtggaa

SEQ ID NO: 69543 - DNA, 26 bp, Homo sapiens
gagaactgaacggcctttggtggaag

SEQ ID NO: 69544 - DNA, 26 bp, Homo sapiens
agaactgaacggcctttggtggaaga

SEQ ID NO: 69545 - DNA, 26 bp, Homo sapiens
gaactgaacggcctttggtggaagac

SEQ ID NO: 69546 - DNA, 26 bp, Homo sapiens
aactgaacggcctttggtggaagact

SEQ ID NO: 69547 - DNA, 26 bp, Homo sapiens
actgaacggcctttggtggaagactg

SEQ ID NO: 69548 - DNA, 26 bp, Homo sapiens
ctgaacggcctttggtggaagactga

SEQ ID NO: 69549 - DNA, 26 bp, Homo sapiens
tgaacggcctttggtggaagactgag

SEQ ID NO: 69550 - DNA, 26 bp, Homo sapiens
gaacggcctttggtggaagactgagc

SEQ ID NO: 69551 - DNA, 26 bp, Homo sapiens
aacggcctttggtggaagactgagct

SEQ ID NO: 69552 - DNA, 26 bp, Homo sapiens
acggcctttggtggaagactgagctc

SEQ ID NO: 69553 - DNA, 26 bp, Homo sapiens
cggcctttggtggaagactgagctcc

SEQ ID NO: 69554 - DNA, 26 bp, Homo sapiens
ggcctttggtggaagactgagctcca

SEQ ID NO: 69555 - DNA, 26 bp, Homo sapiens
gcctttggtggaagactgagctccaa

SEQ ID NO: 69556 - DNA, 26 bp, Homo sapiens
cctttggtggaagactgagctccaaa

SEQ ID NO: 69557 - DNA, 26 bp, Homo sapiens
ctttggtggaagactgagctccaaac

SEQ ID NO: 69558 - DNA, 26 bp, Homo sapiens
tttggtggaagactgagctccaaact

SEQ ID NO: 69559 - DNA, 26 bp, Homo sapiens
ttggtggaagactgagctccaaactg

SEQ ID NO: 69560 - DNA, 26 bp, Homo sapiens
tggtggaagactgagctccaaactgg

SEQ ID NO: 69561 - DNA, 26 bp, Homo sapiens
ggtggaagactgagctccaaactgga

SEQ ID NO: 69562 - DNA, 26 bp, Homo sapiens
gtggaagactgagctccaaactggac

SEQ ID NO: 69563 - DNA, 26 bp, Homo sapiens
tggaagactgagctccaaactggact

SEQ ID NO: 69564 - DNA, 26 bp, Homo sapiens
ggaagactgagctccaaactggactg

SEQ ID NO: 69565 - DNA, 26 bp, Homo sapiens
gaagactgagctccaaactggactgg

SEQ ID NO: 69566 - DNA, 26 bp, Homo sapiens
aagactgagctccaaactggactggg

SEQ ID NO: 69567 - DNA, 26 bp, Homo sapiens
agactgagctccaaactggactgggg

SEQ ID NO: 69568 - DNA, 26 bp, Homo sapiens
gactgagctccaaactggactggggc

SEQ ID NO: 69569 - DNA, 26 bp, Homo sapiens
actgagctccaaactggactggggcc

SEQ ID NO: 69570 - DNA, 26 bp, Homo sapiens
ctgagctccaaactggactggggcca

SEQ ID NO: 69571 - DNA, 26 bp, Homo sapiens
tgagctccaaactggactggggccag

SEQ ID NO: 69572 - DNA, 26 bp, Homo sapiens
gagctccaaactggactggggccagg

SEQ ID NO: 69573 - DNA, 26 bp, Homo sapiens
agctccaaactggactggggccaggg

SEQ ID NO: 69574 - DNA, 26 bp, Homo sapiens
gctccaaactggactggggccaggga

SEQ ID NO: 69575 - DNA, 26 bp, Homo sapiens
ctccaaactggactggggccagggat

SEQ ID NO: 69576 - DNA, 26 bp, Homo sapiens
tccaaactggactggggccagggata

SEQ ID NO: 69577 - DNA, 26 bp, Homo sapiens
ccaaactggactggggccagggatac

SEQ ID NO: 69578 - DNA, 26 bp, Homo sapiens
caaactggactggggccagggatacc

SEQ ID NO: 69579 - DNA, 26 bp, Homo sapiens
aaactggactggggccagggatacca

SEQ ID NO: 69580 - DNA, 26 bp, Homo sapiens
aactggactggggccagggataccag

SEQ ID NO: 69581 - DNA, 26 bp, Homo sapiens
actggactggggccagggataccagt

SEQ ID NO: 69582 - DNA, 26 bp, Homo sapiens
ctggactggggccagggataccagtc

SEQ ID NO: 69583 - DNA, 26 bp, Homo sapiens
tggactggggccagggataccagtca

SEQ ID NO: 69584 - DNA, 26 bp, Homo sapiens
ggactggggccagggataccagtcag

SEQ ID NO: 69585 - DNA, 26 bp, Homo sapiens
gactggggccagggataccagtcagg

SEQ ID NO: 69586 - DNA, 26 bp, Homo sapiens
actggggccagggataccagtcaggg

SEQ ID NO: 69587 - DNA, 26 bp, Homo sapiens
ctggggccagggataccagtcagggc

SEQ ID NO: 69588 - DNA, 26 bp, Homo sapiens
tggggccagggataccagtcagggct

SEQ ID NO: 69589 - DNA, 26 bp, Homo sapiens
ggggccagggataccagtcagggctt

SEQ ID NO: 69590 - DNA, 26 bp, Homo sapiens
ttcatgtacaaaacacattttttatt

SEQ ID NO: 69591 - DNA, 26 bp, Homo sapiens
tcatgtacaaaacacattttttattt

SEQ ID NO: 69592 - DNA, 26 bp, Homo sapiens
catgtacaaaacacattttttatttt

SEQ ID NO: 69593 - DNA, 26 bp, Homo sapiens
atgtacaaaacacattttttattttg

SEQ ID NO: 69594 - DNA, 26 bp, Homo sapiens
tgtacaaaacacattttttattttgc

SEQ ID NO: 69595 - DNA, 26 bp, Homo sapiens
gtacaaaacacattttttattttgca

SEQ ID NO: 69596 - DNA, 26 bp, Homo sapiens
tacaaaacacattttttattttgcaa

SEQ ID NO: 69597 - DNA, 26 bp, Homo sapiens
acaaaacacattttttattttgcaaa

SEQ ID NO: 69598 - DNA, 26 bp, Homo sapiens
caaaacacattttttattttgcaaag

SEQ ID NO: 69599 - DNA, 26 bp, Homo sapiens
aaaacacattttttattttgcaaagc

SEQ ID NO: 69600 - DNA, 26 bp, Homo sapiens
aaacacattttttattttgcaaagcc

SEQ ID NO: 69601 - DNA, 26 bp, Homo sapiens
aacacattttttattttgcaaagcca

SEQ ID NO: 69602 - DNA, 26 bp, Homo sapiens
acacattttttattttgcaaagccaa

SEQ ID NO: 69603 - DNA, 26 bp, Homo sapiens
cacattttttattttgcaaagccaaa

SEQ ID NO: 69604 - DNA, 26 bp, Homo sapiens
acattttttattttgcaaagccaaag

SEQ ID NO: 69605 - DNA, 26 bp, Homo sapiens
cattttttattttgcaaagccaaagc

SEQ ID NO: 69606 - DNA, 26 bp, Homo sapiens
attttttattttgcaaagccaaagcc

SEQ ID NO: 69607 - DNA, 26 bp, Homo sapiens
ttttttattttgcaaagccaaagcca

SEQ ID NO: 69608 - DNA, 26 bp, Homo sapiens
tttttattttgcaaagccaaagccat

SEQ ID NO: 69609 - DNA, 26 bp, Homo sapiens
ttttattttgcaaagccaaagccatg

SEQ ID NO: 69610 - DNA, 26 bp, Homo sapiens
tttattttgcaaagccaaagccatgc

SEQ ID NO: 69611 - DNA, 26 bp, Homo sapiens
ttattttgcaaagccaaagccatgct

SEQ ID NO: 69612 - DNA, 26 bp, Homo sapiens
tattttgcaaagccaaagccatgctt

SEQ ID NO: 69613 - DNA, 26 bp, Homo sapiens
attttgcaaagccaaagccatgcttt

SEQ ID NO: 69614 - DNA, 26 bp, Homo sapiens
ttttgcaaagccaaagccatgcttta

SEQ ID NO: 69615 - DNA, 26 bp, Homo sapiens
tttgcaaagccaaagccatgctttaa

SEQ ID NO: 69616 - DNA, 26 bp, Homo sapiens
ttgcaaagccaaagccatgctttaaa

SEQ ID NO: 69617 - DNA, 26 bp, Homo sapiens
tgcaaagccaaagccatgctttaaaa

SEQ ID NO: 69618 - DNA, 26 bp, Homo sapiens
gcaaagccaaagccatgctttaaaaa

SEQ ID NO: 69619 - DNA, 26 bp, Homo sapiens
caaagccaaagccatgctttaaaaat

SEQ ID NO: 69620 - DNA, 26 bp, Homo sapiens
aaagccaaagccatgctttaaaaata

SEQ ID NO: 69621 - DNA, 26 bp, Homo sapiens
aagccaaagccatgctttaaaaatac

SEQ ID NO: 69622 - DNA, 26 bp, Homo sapiens
agccaaagccatgctttaaaaataca

SEQ ID NO: 69623 - DNA, 26 bp, Homo sapiens
gccaaagccatgctttaaaaatacag

SEQ ID NO: 69624 - DNA, 26 bp, Homo sapiens
ccaaagccatgctttaaaaatacaga

SEQ ID NO: 69625 - DNA, 26 bp, Homo sapiens
caaagccatgctttaaaaatacagac

SEQ ID NO: 69626 - DNA, 26 bp, Homo sapiens
aaagccatgctttaaaaatacagact

SEQ ID NO: 69627 - DNA, 26 bp, Homo sapiens
aagccatgctttaaaaatacagactt

SEQ ID NO: 69628 - DNA, 26 bp, Homo sapiens
agccatgctttaaaaatacagacttt

SEQ ID NO: 69629 - DNA, 26 bp, Homo sapiens
gccatgctttaaaaatacagactttg

SEQ ID NO: 69630 - DNA, 26 bp, Homo sapiens
ccatgctttaaaaatacagactttga

SEQ ID NO: 69631 - DNA, 26 bp, Homo sapiens
catgctttaaaaatacagactttgaa

SEQ ID NO: 69632 - DNA, 26 bp, Homo sapiens
atgctttaaaaatacagactttgaat

SEQ ID NO: 69633 - DNA, 26 bp, Homo sapiens
tgctttaaaaatacagactttgaatc

SEQ ID NO: 69634 - DNA, 26 bp, Homo sapiens
gctttaaaaatacagactttgaatct

SEQ ID NO: 69635 - DNA, 26 bp, Homo sapiens
ctttaaaaatacagactttgaatctt

SEQ ID NO: 69636 - DNA, 26 bp, Homo sapiens
tttaaaaatacagactttgaatctta

SEQ ID NO: 69637 - DNA, 26 bp, Homo sapiens
ttaaaaatacagactttgaatcttaa

SEQ ID NO: 69638 - DNA, 26 bp, Homo sapiens
taaaaatacagactttgaatcttaag

SEQ ID NO: 69639 - DNA, 26 bp, Homo sapiens
aaaaatacagactttgaatcttaaga

SEQ ID NO: 69640 - DNA, 26 bp, Homo sapiens
aaaatacagactttgaatcttaagac

SEQ ID NO: 69641 - DNA, 26 bp, Homo sapiens
aaatacagactttgaatcttaagaca

SEQ ID NO: 69642 - DNA, 26 bp, Homo sapiens
aatacagactttgaatcttaagacat

SEQ ID NO: 69643 - DNA, 26 bp, Homo sapiens
atacagactttgaatcttaagacatt

SEQ ID NO: 69644 - DNA, 26 bp, Homo sapiens
tacagactttgaatcttaagacatta

SEQ ID NO: 69645 - DNA, 26 bp, Homo sapiens
acagactttgaatcttaagacattat

SEQ ID NO: 69646 - DNA, 26 bp, Homo sapiens
cagactttgaatcttaagacattatt

SEQ ID NO: 69647 - DNA, 26 bp, Homo sapiens
agactttgaatcttaagacattattt

SEQ ID NO: 69648 - DNA, 26 bp, Homo sapiens
gactttgaatcttaagacattatttt

SEQ ID NO: 69649 - DNA, 26 bp, Homo sapiens
actttgaatcttaagacattattttg

SEQ ID NO: 69650 - DNA, 26 bp, Homo sapiens
ctttgaatcttaagacattattttgc

SEQ ID NO: 69651 - DNA, 26 bp, Homo sapiens
tttgaatcttaagacattattttgca

SEQ ID NO: 69652 - DNA, 26 bp, Homo sapiens
ttgaatcttaagacattattttgcat

SEQ ID NO: 69653 - DNA, 26 bp, Homo sapiens
tgaatcttaagacattattttgcatt

SEQ ID NO: 69654 - DNA, 26 bp, Homo sapiens
gaatcttaagacattattttgcattt

SEQ ID NO: 69655 - DNA, 26 bp, Homo sapiens
aatcttaagacattattttgcatttt

SEQ ID NO: 69656 - DNA, 26 bp, Homo sapiens
atcttaagacattattttgcatttta

SEQ ID NO: 69657 - DNA, 26 bp, Homo sapiens
tcttaagacattattttgcattttaa

SEQ ID NO: 69658 - DNA, 26 bp, Homo sapiens
cttaagacattattttgcattttaaa

SEQ ID NO: 69659 - DNA, 26 bp, Homo sapiens
ttaagacattattttgcattttaaag

SEQ ID NO: 69660 - DNA, 26 bp, Homo sapiens
taagacattattttgcattttaaaga

SEQ ID NO: 69661 - DNA, 26 bp, Homo sapiens
aagacattattttgcattttaaagag

SEQ ID NO: 69662 - DNA, 26 bp, Homo sapiens
agacattattttgcattttaaagaga

SEQ ID NO: 69663 - DNA, 26 bp, Homo sapiens
gacattattttgcattttaaagagag

SEQ ID NO: 69664 - DNA, 26 bp, Homo sapiens
acattattttgcattttaaagagaga

SEQ ID NO: 69665 - DNA, 26 bp, Homo sapiens
cattattttgcattttaaagagagat

SEQ ID NO: 69666 - DNA, 26 bp, Homo sapiens
attattttgcattttaaagagagata

SEQ ID NO: 69667 - DNA, 26 bp, Homo sapiens
ttattttgcattttaaagagagatat

SEQ ID NO: 69668 - DNA, 26 bp, Homo sapiens
tattttgcattttaaagagagatata

SEQ ID NO: 69669 - DNA, 26 bp, Homo sapiens
attttgcattttaaagagagatatag

SEQ ID NO: 69670 - DNA, 26 bp, Homo sapiens
ttttgcattttaaagagagatatagt

SEQ ID NO: 69671 - DNA, 26 bp, Homo sapiens
tttgcattttaaagagagatatagtt

SEQ ID NO: 69672 - DNA, 26 bp, Homo sapiens
ttgcattttaaagagagatatagtta

SEQ ID NO: 69673 - DNA, 26 bp, Homo sapiens
tgcattttaaagagagatatagttaa

SEQ ID NO: 69674 - DNA, 26 bp, Homo sapiens
gcattttaaagagagatatagttaaa

SEQ ID NO: 69675 - DNA, 26 bp, Homo sapiens
cattttaaagagagatatagttaaag

SEQ ID NO: 69676 - DNA, 26 bp, Homo sapiens
attttaaagagagatatagttaaagc

SEQ ID NO: 69677 - DNA, 26 bp, Homo sapiens
ttttaaagagagatatagttaaagct

SEQ ID NO: 69678 - DNA, 26 bp, Homo sapiens
tttaaagagagatatagttaaagctt

SEQ ID NO: 69679 - DNA, 26 bp, Homo sapiens
ttaaagagagatatagttaaagctta

SEQ ID NO: 69680 - DNA, 26 bp, Homo sapiens
taaagagagatatagttaaagcttac

SEQ ID NO: 69681 - DNA, 26 bp, Homo sapiens
aaagagagatatagttaaagcttaca

SEQ ID NO: 69682 - DNA, 26 bp, Homo sapiens
aagagagatatagttaaagcttacaa

SEQ ID NO: 69683 - DNA, 26 bp, Homo sapiens
agagagatatagttaaagcttacaag

SEQ ID NO: 69684 - DNA, 26 bp, Homo sapiens
gagagatatagttaaagcttacaaga

SEQ ID NO: 69685 - DNA, 26 bp, Homo sapiens
agagatatagttaaagcttacaagaa

SEQ ID NO: 69686 - DNA, 26 bp, Homo sapiens
gagatatagttaaagcttacaagaac

SEQ ID NO: 69687 - DNA, 26 bp, Homo sapiens
agatatagttaaagcttacaagaaca

SEQ ID NO: 69688 - DNA, 26 bp, Homo sapiens
gatatagttaaagcttacaagaacaa

SEQ ID NO: 69689 - DNA, 26 bp, Homo sapiens
atatagttaaagcttacaagaacaat

SEQ ID NO: 69690 - DNA, 26 bp, Homo sapiens
tatagttaaagcttacaagaacaata

SEQ ID NO: 69691 - DNA, 26 bp, Homo sapiens
atagttaaagcttacaagaacaatat

SEQ ID NO: 69692 - DNA, 26 bp, Homo sapiens
tagttaaagcttacaagaacaatata

SEQ ID NO: 69693 - DNA, 26 bp, Homo sapiens
agttaaagcttacaagaacaatataa

SEQ ID NO: 69694 - DNA, 26 bp, Homo sapiens
gttaaagcttacaagaacaatataaa

SEQ ID NO: 69695 - DNA, 26 bp, Homo sapiens
ttaaagcttacaagaacaatataaag

SEQ ID NO: 69696 - DNA, 26 bp, Homo sapiens
taaagcttacaagaacaatataaagt

SEQ ID NO: 69697 - DNA, 26 bp, Homo sapiens
aaagcttacaagaacaatataaagtt

SEQ ID NO: 69698 - DNA, 26 bp, Homo sapiens
aagcttacaagaacaatataaagttt

SEQ ID NO: 69699 - DNA, 26 bp, Homo sapiens
agcttacaagaacaatataaagtttc

SEQ ID NO: 69700 - DNA, 26 bp, Homo sapiens
gcttacaagaacaatataaagtttca

SEQ ID NO: 69701 - DNA, 26 bp, Homo sapiens
cttacaagaacaatataaagtttcaa

SEQ ID NO: 69702 - DNA, 26 bp, Homo sapiens
ttacaagaacaatataaagtttcaaa

SEQ ID NO: 69703 - DNA, 26 bp, Homo sapiens
tacaagaacaatataaagtttcaaat

SEQ ID NO: 69704 - DNA, 26 bp, Homo sapiens
acaagaacaatataaagtttcaaata

SEQ ID NO: 69705 - DNA, 26 bp, Homo sapiens
caagaacaatataaagtttcaaataa

SEQ ID NO: 69706 - DNA, 26 bp, Homo sapiens
aagaacaatataaagtttcaaataac

SEQ ID NO: 69707 - DNA, 26 bp, Homo sapiens
agaacaatataaagtttcaaataaca

SEQ ID NO: 69708 - DNA, 26 bp, Homo sapiens
gaacaatataaagtttcaaataacac

SEQ ID NO: 69709 - DNA, 26 bp, Homo sapiens
aacaatataaagtttcaaataacacc

SEQ ID NO: 69710 - DNA, 26 bp, Homo sapiens
acaatataaagtttcaaataacacca

SEQ ID NO: 69711 - DNA, 26 bp, Homo sapiens
caatataaagtttcaaataacaccat

SEQ ID NO: 69712 - DNA, 26 bp, Homo sapiens
aatataaagtttcaaataacaccatt

SEQ ID NO: 69713 - DNA, 26 bp, Homo sapiens
atataaagtttcaaataacaccattg

SEQ ID NO: 69714 - DNA, 26 bp, Homo sapiens
tataaagtttcaaataacaccattgt

SEQ ID NO: 69715 - DNA, 26 bp, Homo sapiens
ataaagtttcaaataacaccattgtc

SEQ ID NO: 69716 - DNA, 26 bp, Homo sapiens
taaagtttcaaataacaccattgtca

SEQ ID NO: 69717 - DNA, 26 bp, Homo sapiens
aaagtttcaaataacaccattgtcag

SEQ ID NO: 69718 - DNA, 26 bp, Homo sapiens
aagtttcaaataacaccattgtcagg

SEQ ID NO: 69719 - DNA, 26 bp, Homo sapiens
agtttcaaataacaccattgtcaggt

SEQ ID NO: 69720 - DNA, 26 bp, Homo sapiens
gtttcaaataacaccattgtcaggtt

SEQ ID NO: 69721 - DNA, 26 bp, Homo sapiens
tttcaaataacaccattgtcaggttt

SEQ ID NO: 69722 - DNA, 26 bp, Homo sapiens
ttcaaataacaccattgtcaggttta

SEQ ID NO: 69723 - DNA, 26 bp, Homo sapiens
tcaaataacaccattgtcaggtttaa

SEQ ID NO: 69724 - DNA, 26 bp, Homo sapiens
caaataacaccattgtcaggtttaaa

SEQ ID NO: 69725 - DNA, 26 bp, Homo sapiens
aaataacaccattgtcaggtttaaac

SEQ ID NO: 69726 - DNA, 26 bp, Homo sapiens
aataacaccattgtcaggtttaaaca

SEQ ID NO: 69727 - DNA, 26 bp, Homo sapiens
ataacaccattgtcaggtttaaacat

SEQ ID NO: 69728 - DNA, 26 bp, Homo sapiens
taacaccattgtcaggtttaaacatg

SEQ ID NO: 69729 - DNA, 26 bp, Homo sapiens
aacaccattgtcaggtttaaacatgt

SEQ ID NO: 69730 - DNA, 26 bp, Homo sapiens
acaccattgtcaggtttaaacatgtt

SEQ ID NO: 69731 - DNA, 26 bp, Homo sapiens
caccattgtcaggtttaaacatgttg

SEQ ID NO: 69732 - DNA, 26 bp, Homo sapiens
accattgtcaggtttaaacatgttgg

SEQ ID NO: 69733 - DNA, 26 bp, Homo sapiens
ccattgtcaggtttaaacatgttggt

SEQ ID NO: 69734 - DNA, 26 bp, Homo sapiens
cattgtcaggtttaaacatgttggta

SEQ ID NO: 69735 - DNA, 26 bp, Homo sapiens
attgtcaggtttaaacatgttggtat

SEQ ID NO: 69736 - DNA, 26 bp, Homo sapiens
ttgtcaggtttaaacatgttggtatg

SEQ ID NO: 69737 - DNA, 26 bp, Homo sapiens
tgtcaggtttaaacatgttggtatgt

SEQ ID NO: 69738 - DNA, 26 bp, Homo sapiens
gtcaggtttaaacatgttggtatgtt

SEQ ID NO: 69739 - DNA, 26 bp, Homo sapiens
tcaggtttaaacatgttggtatgttt

SEQ ID NO: 69740 - DNA, 26 bp, Homo sapiens
caggtttaaacatgttggtatgttta

SEQ ID NO: 69741 - DNA, 26 bp, Homo sapiens
aggtttaaacatgttggtatgtttac

SEQ ID NO: 69742 - DNA, 26 bp, Homo sapiens
ggtttaaacatgttggtatgtttaca

SEQ ID NO: 69743 - DNA, 26 bp, Homo sapiens
gtttaaacatgttggtatgtttacat

SEQ ID NO: 69744 - DNA, 26 bp, Homo sapiens
tttaaacatgttggtatgtttacatg

SEQ ID NO: 69745 - DNA, 26 bp, Homo sapiens
ttaaacatgttggtatgtttacatga

SEQ ID NO: 69746 - DNA, 26 bp, Homo sapiens
taaacatgttggtatgtttacatgac

SEQ ID NO: 69747 - DNA, 26 bp, Homo sapiens
aaacatgttggtatgtttacatgaca

SEQ ID NO: 69748 - DNA, 26 bp, Homo sapiens
aacatgttggtatgtttacatgacag

SEQ ID NO: 69749 - DNA, 26 bp, Homo sapiens
acatgttggtatgtttacatgacagt

SEQ ID NO: 69750 - DNA, 26 bp, Homo sapiens
catgttggtatgtttacatgacagtt

SEQ ID NO: 69751 - DNA, 26 bp, Homo sapiens
atgttggtatgtttacatgacagttc

SEQ ID NO: 69752 - DNA, 26 bp, Homo sapiens
tgttggtatgtttacatgacagttct

SEQ ID NO: 69753 - DNA, 26 bp, Homo sapiens
gttggtatgtttacatgacagttctt

SEQ ID NO: 69754 - DNA, 26 bp, Homo sapiens
ttggtatgtttacatgacagttcttt

SEQ ID NO: 69755 - DNA, 26 bp, Homo sapiens
tggtatgtttacatgacagttctttc

SEQ ID NO: 69756 - DNA, 26 bp, Homo sapiens
ggtatgtttacatgacagttctttcc

SEQ ID NO: 69757 - DNA, 26 bp, Homo sapiens
gtatgtttacatgacagttctttcct

SEQ ID NO: 69758 - DNA, 26 bp, Homo sapiens
tatgtttacatgacagttctttcctt

SEQ ID NO: 69759 - DNA, 26 bp, Homo sapiens
atgtttacatgacagttctttccttt

SEQ ID NO: 69760 - DNA, 26 bp, Homo sapiens
tgtttacatgacagttctttcctttt

SEQ ID NO: 69761 - DNA, 26 bp, Homo sapiens
gtttacatgacagttctttccttttt

SEQ ID NO: 69762 - DNA, 26 bp, Homo sapiens
tttacatgacagttctttcctttttt

SEQ ID NO: 69763 - DNA, 26 bp, Homo sapiens
ttacatgacagttctttccttttttt

SEQ ID NO: 69764 - DNA, 26 bp, Homo sapiens
tacatgacagttctttcctttttttt

SEQ ID NO: 69765 - DNA, 26 bp, Homo sapiens
acatgacagttctttccttttttttt

SEQ ID NO: 69766 - DNA, 26 bp, Homo sapiens
catgacagttctttcctttttttttt

SEQ ID NO: 69767 - DNA, 26 bp, Homo sapiens
atgacagttctttccttttttttttt

SEQ ID NO: 69768 - DNA, 26 bp, Homo sapiens
tgacagttctttcctttttttttttt

SEQ ID NO: 69769 - DNA, 26 bp, Homo sapiens
gacagttctttccttttttttttttt

SEQ ID NO: 69770 - DNA, 26 bp, Homo sapiens
acagttctttcctttttttttttttt

SEQ ID NO: 69771 - DNA, 26 bp, Homo sapiens
cagttctttccttttttttttttttt

SEQ ID NO: 69772 - DNA, 26 bp, Homo sapiens
agttctttcctttttttttttttttt

SEQ ID NO: 69773 - DNA, 26 bp, Homo sapiens
gttctttccttttttttttttttttt

SEQ ID NO: 69774 - DNA, 26 bp, Homo sapiens
ttctttcctttttttttttttttttt

SEQ ID NO: 69775 - DNA, 26 bp, Homo sapiens
tctttccttttttttttttttttttt

SEQ ID NO: 69776 - DNA, 26 bp, Homo sapiens
ctttcctttttttttttttttttttt

SEQ ID NO: 69777 - DNA, 26 bp, Homo sapiens
tttccttttttttttttttttttttt

SEQ ID NO: 69778 - DNA, 26 bp, Homo sapiens
ttcctttttttttttttttttttttg

SEQ ID NO: 69779 - DNA, 26 bp, Homo sapiens
tcctttttttttttttttttttttga

SEQ ID NO: 69780 - DNA, 26 bp, Homo sapiens
cctttttttttttttttttttttgag

SEQ ID NO: 69781 - DNA, 26 bp, Homo sapiens
ctttttttttttttttttttttgaga

SEQ ID NO: 69782 - DNA, 26 bp, Homo sapiens
tttttttttttttttttttttgagat

SEQ ID NO: 69783 - DNA, 26 bp, Homo sapiens
ttttttttttttttttttttgagatg

SEQ ID NO: 69784 - DNA, 26 bp, Homo sapiens
tttttttttttttttttttgagatgg

SEQ ID NO: 69785 - DNA, 26 bp, Homo sapiens
ttttttttttttttttttgagatgga

SEQ ID NO: 69786 - DNA, 26 bp, Homo sapiens
tttttttttttttttttgagatggag

SEQ ID NO: 69787 - DNA, 26 bp, Homo sapiens
ttttttttttttttttgagatggagt

SEQ ID NO: 69788 - DNA, 26 bp, Homo sapiens
tttttttttttttttgagatggagtc

SEQ ID NO: 69789 - DNA, 26 bp, Homo sapiens
ttttttttttttttgagatggagtct

SEQ ID NO: 69790 - DNA, 26 bp, Homo sapiens
tttttttttttttgagatggagtctc

SEQ ID NO: 69791 - DNA, 26 bp, Homo sapiens
ttttttttttttgagatggagtctcg

SEQ ID NO: 69792 - DNA, 26 bp, Homo sapiens
tttttttttttgagatggagtctcgc

SEQ ID NO: 69793 - DNA, 26 bp, Homo sapiens
ttttttttttgagatggagtctcgct

SEQ ID NO: 69794 - DNA, 26 bp, Homo sapiens
tttttttttgagatggagtctcgctt

SEQ ID NO: 69795 - DNA, 26 bp, Homo sapiens
ttttttttgagatggagtctcgcttt

SEQ ID NO: 69796 - DNA, 26 bp, Homo sapiens
tttttttgagatggagtctcgctttg

SEQ ID NO: 69797 - DNA, 26 bp, Homo sapiens
ttttttgagatggagtctcgctttgt

SEQ ID NO: 69798 - DNA, 26 bp, Homo sapiens
tttttgagatggagtctcgctttgtc

SEQ ID NO: 69799 - DNA, 26 bp, Homo sapiens
ttttgagatggagtctcgctttgtca

SEQ ID NO: 69800 - DNA, 26 bp, Homo sapiens
tttgagatggagtctcgctttgtcac

SEQ ID NO: 69801 - DNA, 26 bp, Homo sapiens
ttgagatggagtctcgctttgtcacc

SEQ ID NO: 69802 - DNA, 26 bp, Homo sapiens
tgagatggagtctcgctttgtcaccc

SEQ ID NO: 69803 - DNA, 26 bp, Homo sapiens
gagatggagtctcgctttgtcaccca

SEQ ID NO: 69804 - DNA, 26 bp, Homo sapiens
agatggagtctcgctttgtcacccag

SEQ ID NO: 69805 - DNA, 26 bp, Homo sapiens
gatggagtctcgctttgtcacccagg

SEQ ID NO: 69806 - DNA, 26 bp, Homo sapiens
atggagtctcgctttgtcacccaggc

SEQ ID NO: 69807 - DNA, 26 bp, Homo sapiens
tggagtctcgctttgtcacccaggct

SEQ ID NO: 69808 - DNA, 26 bp, Homo sapiens
ggagtctcgctttgtcacccaggctg

SEQ ID NO: 69809 - DNA, 26 bp, Homo sapiens
gagtctcgctttgtcacccaggctgg

SEQ ID NO: 69810 - DNA, 26 bp, Homo sapiens
agtctcgctttgtcacccaggctgga

SEQ ID NO: 69811 - DNA, 26 bp, Homo sapiens
gtctcgctttgtcacccaggctggag

SEQ ID NO: 69812 - DNA, 26 bp, Homo sapiens
tctcgctttgtcacccaggctggagt

SEQ ID NO: 69813 - DNA, 26 bp, Homo sapiens
ctcgctttgtcacccaggctggagtg

SEQ ID NO: 69814 - DNA, 26 bp, Homo sapiens
tcgctttgtcacccaggctggagtgc

SEQ ID NO: 69815 - DNA, 26 bp, Homo sapiens
cgctttgtcacccaggctggagtgca

SEQ ID NO: 69816 - DNA, 26 bp, Homo sapiens
gctttgtcacccaggctggagtgcaa

SEQ ID NO: 69817 - DNA, 26 bp, Homo sapiens
ctttgtcacccaggctggagtgcaat

SEQ ID NO: 69818 - DNA, 26 bp, Homo sapiens
tttgtcacccaggctggagtgcaatg

SEQ ID NO: 69819 - DNA, 26 bp, Homo sapiens
ttgtcacccaggctggagtgcaatgg

SEQ ID NO: 69820 - DNA, 26 bp, Homo sapiens
tgtcacccaggctggagtgcaatggc

SEQ ID NO: 69821 - DNA, 26 bp, Homo sapiens
gtcacccaggctggagtgcaatggca

SEQ ID NO: 69822 - DNA, 26 bp, Homo sapiens
tcacccaggctggagtgcaatggcac

SEQ ID NO: 69823 - DNA, 26 bp, Homo sapiens
cacccaggctggagtgcaatggcacg

SEQ ID NO: 69824 - DNA, 26 bp, Homo sapiens
acccaggctggagtgcaatggcacga

SEQ ID NO: 69825 - DNA, 26 bp, Homo sapiens
cccaggctggagtgcaatggcacgat

SEQ ID NO: 69826 - DNA, 26 bp, Homo sapiens
ccaggctggagtgcaatggcacgatc

SEQ ID NO: 69827 - DNA, 26 bp, Homo sapiens
caggctggagtgcaatggcacgatct

SEQ ID NO: 69828 - DNA, 26 bp, Homo sapiens
aggctggagtgcaatggcacgatctc

SEQ ID NO: 69829 - DNA, 26 bp, Homo sapiens
ggctggagtgcaatggcacgatctcg

SEQ ID NO: 69830 - DNA, 26 bp, Homo sapiens
gctggagtgcaatggcacgatctcgg

SEQ ID NO: 69831 - DNA, 26 bp, Homo sapiens
ctggagtgcaatggcacgatctcggc

SEQ ID NO: 69832 - DNA, 26 bp, Homo sapiens
tggagtgcaatggcacgatctcggct

SEQ ID NO: 69833 - DNA, 26 bp, Homo sapiens
ggagtgcaatggcacgatctcggctc

SEQ ID NO: 69834 - DNA, 26 bp, Homo sapiens
gagtgcaatggcacgatctcggctca

SEQ ID NO: 69835 - DNA, 26 bp, Homo sapiens
agtgcaatggcacgatctcggctcac

SEQ ID NO: 69836 - DNA, 26 bp, Homo sapiens
gtgcaatggcacgatctcggctcact

SEQ ID NO: 69837 - DNA, 26 bp, Homo sapiens
tgcaatggcacgatctcggctcactg

SEQ ID NO: 69838 - DNA, 26 bp, Homo sapiens
gcaatggcacgatctcggctcactgc

SEQ ID NO: 69839 - DNA, 26 bp, Homo sapiens
caatggcacgatctcggctcactgca

SEQ ID NO: 69840 - DNA, 26 bp, Homo sapiens
aatggcacgatctcggctcactgcaa

SEQ ID NO: 69841 - DNA, 26 bp, Homo sapiens
atggcacgatctcggctcactgcaac

SEQ ID NO: 69842 - DNA, 26 bp, Homo sapiens
tggcacgatctcggctcactgcaacc

SEQ ID NO: 69843 - DNA, 26 bp, Homo sapiens
ggcacgatctcggctcactgcaacct

SEQ ID NO: 69844 - DNA, 26 bp, Homo sapiens
gcacgatctcggctcactgcaacctc

SEQ ID NO: 69845 - DNA, 26 bp, Homo sapiens
cacgatctcggctcactgcaacctct

SEQ ID NO: 69846 - DNA, 26 bp, Homo sapiens
acgatctcggctcactgcaacctctg

SEQ ID NO: 69847 - DNA, 26 bp, Homo sapiens
cgatctcggctcactgcaacctctgc

SEQ ID NO: 69848 - DNA, 26 bp, Homo sapiens
gatctcggctcactgcaacctctgcc

SEQ ID NO: 69849 - DNA, 26 bp, Homo sapiens
atctcggctcactgcaacctctgcct

SEQ ID NO: 69850 - DNA, 26 bp, Homo sapiens
tctcggctcactgcaacctctgcctc

SEQ ID NO: 69851 - DNA, 26 bp, Homo sapiens
ctcggctcactgcaacctctgcctcc

SEQ ID NO: 69852 - DNA, 26 bp, Homo sapiens
tcggctcactgcaacctctgcctcct

SEQ ID NO: 69853 - DNA, 26 bp, Homo sapiens
cggctcactgcaacctctgcctcctg

SEQ ID NO: 69854 - DNA, 26 bp, Homo sapiens
ggctcactgcaacctctgcctcctgg

SEQ ID NO: 69855 - DNA, 26 bp, Homo sapiens
gctcactgcaacctctgcctcctggg

SEQ ID NO: 69856 - DNA, 26 bp, Homo sapiens
ctcactgcaacctctgcctcctgggt

SEQ ID NO: 69857 - DNA, 26 bp, Homo sapiens
tcactgcaacctctgcctcctgggtt

SEQ ID NO: 69858 - DNA, 26 bp, Homo sapiens
cactgcaacctctgcctcctgggttc

SEQ ID NO: 69859 - DNA, 26 bp, Homo sapiens
actgcaacctctgcctcctgggttca

SEQ ID NO: 69860 - DNA, 26 bp, Homo sapiens
ctgcaacctctgcctcctgggttcaa

SEQ ID NO: 69861 - DNA, 26 bp, Homo sapiens
tgcaacctctgcctcctgggttcaag

SEQ ID NO: 69862 - DNA, 26 bp, Homo sapiens
gcaacctctgcctcctgggttcaagc

SEQ ID NO: 69863 - DNA, 26 bp, Homo sapiens
caacctctgcctcctgggttcaagcg

SEQ ID NO: 69864 - DNA, 26 bp, Homo sapiens
aacctctgcctcctgggttcaagcga

SEQ ID NO: 69865 - DNA, 26 bp, Homo sapiens
acctctgcctcctgggttcaagcgat

SEQ ID NO: 69866 - DNA, 26 bp, Homo sapiens
cctctgcctcctgggttcaagcgatt

SEQ ID NO: 69867 - DNA, 26 bp, Homo sapiens
ctctgcctcctgggttcaagcgattc

SEQ ID NO: 69868 - DNA, 26 bp, Homo sapiens
tctgcctcctgggttcaagcgattct

SEQ ID NO: 69869 - DNA, 26 bp, Homo sapiens
ctgcctcctgggttcaagcgattctc

SEQ ID NO: 69870 - DNA, 26 bp, Homo sapiens
tgcctcctgggttcaagcgattctct

SEQ ID NO: 69871 - DNA, 26 bp, Homo sapiens
gcctcctgggttcaagcgattctctt

SEQ ID NO: 69872 - DNA, 26 bp, Homo sapiens
cctcctgggttcaagcgattctcttg

SEQ ID NO: 69873 - DNA, 26 bp, Homo sapiens
ctcctgggttcaagcgattctcttgc

SEQ ID NO: 69874 - DNA, 26 bp, Homo sapiens
tcctgggttcaagcgattctcttgcc

SEQ ID NO: 69875 - DNA, 26 bp, Homo sapiens
cctgggttcaagcgattctcttgcct

SEQ ID NO: 69876 - DNA, 26 bp, Homo sapiens
ctgggttcaagcgattctcttgcctc

SEQ ID NO: 69877 - DNA, 26 bp, Homo sapiens
tgggttcaagcgattctcttgcctca

SEQ ID NO: 69878 - DNA, 26 bp, Homo sapiens
gggttcaagcgattctcttgcctcag

SEQ ID NO: 69879 - DNA, 26 bp, Homo sapiens
ggttcaagcgattctcttgcctcagc

SEQ ID NO: 69880 - DNA, 26 bp, Homo sapiens
gttcaagcgattctcttgcctcagcc

SEQ ID NO: 69881 - DNA, 26 bp, Homo sapiens
ttcaagcgattctcttgcctcagcct

SEQ ID NO: 69882 - DNA, 26 bp, Homo sapiens
tcaagcgattctcttgcctcagcctc

SEQ ID NO: 69883 - DNA, 26 bp, Homo sapiens
caagcgattctcttgcctcagcctcc

SEQ ID NO: 69884 - DNA, 26 bp, Homo sapiens
aagcgattctcttgcctcagcctccc

SEQ ID NO: 69885 - DNA, 26 bp, Homo sapiens
agcgattctcttgcctcagcctccca

SEQ ID NO: 69886 - DNA, 26 bp, Homo sapiens
gcgattctcttgcctcagcctcccaa

SEQ ID NO: 69887 - DNA, 26 bp, Homo sapiens
cgattctcttgcctcagcctcccaag

SEQ ID NO: 69888 - DNA, 26 bp, Homo sapiens
gattctcttgcctcagcctcccaagt

SEQ ID NO: 69889 - DNA, 26 bp, Homo sapiens
attctcttgcctcagcctcccaagta

SEQ ID NO: 69890 - DNA, 26 bp, Homo sapiens
ttctcttgcctcagcctcccaagtag

SEQ ID NO: 69891 - DNA, 26 bp, Homo sapiens
tctcttgcctcagcctcccaagtagc

SEQ ID NO: 69892 - DNA, 26 bp, Homo sapiens
ctcttgcctcagcctcccaagtagct

SEQ ID NO: 69893 - DNA, 26 bp, Homo sapiens
tcttgcctcagcctcccaagtagctg

SEQ ID NO: 69894 - DNA, 26 bp, Homo sapiens
cttgcctcagcctcccaagtagctgg

SEQ ID NO: 69895 - DNA, 26 bp, Homo sapiens
ttgcctcagcctcccaagtagctggg

SEQ ID NO: 69896 - DNA, 26 bp, Homo sapiens
tgcctcagcctcccaagtagctggga

SEQ ID NO: 69897 - DNA, 26 bp, Homo sapiens
gcctcagcctcccaagtagctgggat

SEQ ID NO: 69898 - DNA, 26 bp, Homo sapiens
cctcagcctcccaagtagctgggatt

SEQ ID NO: 69899 - DNA, 26 bp, Homo sapiens
ctcagcctcccaagtagctgggatta

SEQ ID NO: 69900 - DNA, 26 bp, Homo sapiens
tcagcctcccaagtagctgggattac

SEQ ID NO: 69901 - DNA, 26 bp, Homo sapiens
cagcctcccaagtagctgggattaca

SEQ ID NO: 69902 - DNA, 26 bp, Homo sapiens
agcctcccaagtagctgggattacag

SEQ ID NO: 69903 - DNA, 26 bp, Homo sapiens
gcctcccaagtagctgggattacagg

SEQ ID NO: 69904 - DNA, 26 bp, Homo sapiens
cctcccaagtagctgggattacaggc

SEQ ID NO: 69905 - DNA, 26 bp, Homo sapiens
ctcccaagtagctgggattacaggca

SEQ ID NO: 69906 - DNA, 26 bp, Homo sapiens
tcccaagtagctgggattacaggcac

SEQ ID NO: 69907 - DNA, 26 bp, Homo sapiens
cccaagtagctgggattacaggcacc

SEQ ID NO: 69908 - DNA, 26 bp, Homo sapiens
ccaagtagctgggattacaggcaccc

SEQ ID NO: 69909 - DNA, 26 bp, Homo sapiens
caagtagctgggattacaggcacccg

SEQ ID NO: 69910 - DNA, 26 bp, Homo sapiens
aagtagctgggattacaggcacccgc

SEQ ID NO: 69911 - DNA, 26 bp, Homo sapiens
agtagctgggattacaggcacccgcc

SEQ ID NO: 69912 - DNA, 26 bp, Homo sapiens
gtagctgggattacaggcacccgcca

SEQ ID NO: 69913 - DNA, 26 bp, Homo sapiens
tagctgggattacaggcacccgccac

SEQ ID NO: 69914 - DNA, 26 bp, Homo sapiens
agctgggattacaggcacccgccacc

SEQ ID NO: 69915 - DNA, 26 bp, Homo sapiens
gctgggattacaggcacccgccacca

SEQ ID NO: 69916 - DNA, 26 bp, Homo sapiens
ctgggattacaggcacccgccaccac

SEQ ID NO: 69917 - DNA, 26 bp, Homo sapiens
tgggattacaggcacccgccaccacg

SEQ ID NO: 69918 - DNA, 26 bp, Homo sapiens
gggattacaggcacccgccaccacgc

SEQ ID NO: 69919 - DNA, 26 bp, Homo sapiens
ggattacaggcacccgccaccacgcc

SEQ ID NO: 69920 - DNA, 26 bp, Homo sapiens
gattacaggcacccgccaccacgcct

SEQ ID NO: 69921 - DNA, 26 bp, Homo sapiens
attacaggcacccgccaccacgcctg

SEQ ID NO: 69922 - DNA, 26 bp, Homo sapiens
ttacaggcacccgccaccacgcctgg

SEQ ID NO: 69923 - DNA, 26 bp, Homo sapiens
tacaggcacccgccaccacgcctggc

SEQ ID NO: 69924 - DNA, 26 bp, Homo sapiens
acaggcacccgccaccacgcctggca

SEQ ID NO: 69925 - DNA, 26 bp, Homo sapiens
caggcacccgccaccacgcctggcaa

SEQ ID NO: 69926 - DNA, 26 bp, Homo sapiens
aggcacccgccaccacgcctggcaaa

SEQ ID NO: 69927 - DNA, 26 bp, Homo sapiens
ggcacccgccaccacgcctggcaaat

SEQ ID NO: 69928 - DNA, 26 bp, Homo sapiens
gcacccgccaccacgcctggcaaatt

SEQ ID NO: 69929 - DNA, 26 bp, Homo sapiens
cacccgccaccacgcctggcaaattt

SEQ ID NO: 69930 - DNA, 26 bp, Homo sapiens
acccgccaccacgcctggcaaatttt

SEQ ID NO: 69931 - DNA, 26 bp, Homo sapiens
cccgccaccacgcctggcaaattttt

SEQ ID NO: 69932 - DNA, 26 bp, Homo sapiens
ccgccaccacgcctggcaaatttttg

SEQ ID NO: 69933 - DNA, 26 bp, Homo sapiens
cgccaccacgcctggcaaatttttgt

SEQ ID NO: 69934 - DNA, 26 bp, Homo sapiens
gccaccacgcctggcaaatttttgta

SEQ ID NO: 69935 - DNA, 26 bp, Homo sapiens
ccaccacgcctggcaaatttttgtat

SEQ ID NO: 69936 - DNA, 26 bp, Homo sapiens
caccacgcctggcaaatttttgtatt

SEQ ID NO: 69937 - DNA, 26 bp, Homo sapiens
accacgcctggcaaatttttgtattt

SEQ ID NO: 69938 - DNA, 26 bp, Homo sapiens
ccacgcctggcaaatttttgtatttt

SEQ ID NO: 69939 - DNA, 26 bp, Homo sapiens
cacgcctggcaaatttttgtattttt

SEQ ID NO: 69940 - DNA, 26 bp, Homo sapiens
acgcctggcaaatttttgtattttta

SEQ ID NO: 69941 - DNA, 26 bp, Homo sapiens
cgcctggcaaatttttgtatttttag

SEQ ID NO: 69942 - DNA, 26 bp, Homo sapiens
gcctggcaaatttttgtatttttagt

SEQ ID NO: 69943 - DNA, 26 bp, Homo sapiens
cctggcaaatttttgtatttttagta

SEQ ID NO: 69944 - DNA, 26 bp, Homo sapiens
ctggcaaatttttgtatttttagtag

SEQ ID NO: 69945 - DNA, 26 bp, Homo sapiens
tggcaaatttttgtatttttagtaga

SEQ ID NO: 69946 - DNA, 26 bp, Homo sapiens
ggcaaatttttgtatttttagtagag

SEQ ID NO: 69947 - DNA, 26 bp, Homo sapiens
gcaaatttttgtatttttagtagaga

SEQ ID NO: 69948 - DNA, 26 bp, Homo sapiens
caaatttttgtatttttagtagagag

SEQ ID NO: 69949 - DNA, 26 bp, Homo sapiens
aaatttttgtatttttagtagagagg

SEQ ID NO: 69950 - DNA, 26 bp, Homo sapiens
aatttttgtatttttagtagagaggg

SEQ ID NO: 69951 - DNA, 26 bp, Homo sapiens
atttttgtatttttagtagagagggg

SEQ ID NO: 69952 - DNA, 26 bp, Homo sapiens
tttttgtatttttagtagagaggggt

SEQ ID NO: 69953 - DNA, 26 bp, Homo sapiens
ttttgtatttttagtagagaggggtt

SEQ ID NO: 69954 - DNA, 26 bp, Homo sapiens
tttgtatttttagtagagaggggttt

SEQ ID NO: 69955 - DNA, 26 bp, Homo sapiens
ttgtatttttagtagagaggggtttc

SEQ ID NO: 69956 - DNA, 26 bp, Homo sapiens
tgtatttttagtagagaggggtttcg

SEQ ID NO: 69957 - DNA, 26 bp, Homo sapiens
gtatttttagtagagaggggtttcgc

SEQ ID NO: 69958 - DNA, 26 bp, Homo sapiens
tatttttagtagagaggggtttcgcc

SEQ ID NO: 69959 - DNA, 26 bp, Homo sapiens
atttttagtagagaggggtttcgcca

SEQ ID NO: 69960 - DNA, 26 bp, Homo sapiens
tttttagtagagaggggtttcgccat

SEQ ID NO: 69961 - DNA, 26 bp, Homo sapiens
ttttagtagagaggggtttcgccatg

SEQ ID NO: 69962 - DNA, 26 bp, Homo sapiens
tttagtagagaggggtttcgccatgt

SEQ ID NO: 69963 - DNA, 26 bp, Homo sapiens
ttagtagagaggggtttcgccatgtt

SEQ ID NO: 69964 - DNA, 26 bp, Homo sapiens
tagtagagaggggtttcgccatgttg

SEQ ID NO: 69965 - DNA, 26 bp, Homo sapiens
agtagagaggggtttcgccatgttgg

SEQ ID NO: 69966 - DNA, 26 bp, Homo sapiens
gtagagaggggtttcgccatgttggc

SEQ ID NO: 69967 - DNA, 26 bp, Homo sapiens
tagagaggggtttcgccatgttggcc

SEQ ID NO: 69968 - DNA, 26 bp, Homo sapiens
agagaggggtttcgccatgttggcca

SEQ ID NO: 69969 - DNA, 26 bp, Homo sapiens
gagaggggtttcgccatgttggccag

SEQ ID NO: 69970 - DNA, 26 bp, Homo sapiens
agaggggtttcgccatgttggccagg

SEQ ID NO: 69971 - DNA, 26 bp, Homo sapiens
gaggggtttcgccatgttggccaggc

SEQ ID NO: 69972 - DNA, 26 bp, Homo sapiens
aggggtttcgccatgttggccaggct

SEQ ID NO: 69973 - DNA, 26 bp, Homo sapiens
ggggtttcgccatgttggccaggctg

SEQ ID NO: 69974 - DNA, 26 bp, Homo sapiens
gggtttcgccatgttggccaggctgg

SEQ ID NO: 69975 - DNA, 26 bp, Homo sapiens
ggtttcgccatgttggccaggctggt

SEQ ID NO: 69976 - DNA, 26 bp, Homo sapiens
gtttcgccatgttggccaggctggtc

SEQ ID NO: 69977 - DNA, 26 bp, Homo sapiens
tttcgccatgttggccaggctggtct

SEQ ID NO: 69978 - DNA, 26 bp, Homo sapiens
ttcgccatgttggccaggctggtctc

SEQ ID NO: 69979 - DNA, 26 bp, Homo sapiens
tcgccatgttggccaggctggtctca

SEQ ID NO: 69980 - DNA, 26 bp, Homo sapiens
cgccatgttggccaggctggtctcaa

SEQ ID NO: 69981 - DNA, 26 bp, Homo sapiens
gccatgttggccaggctggtctcaaa

SEQ ID NO: 69982 - DNA, 26 bp, Homo sapiens
ccatgttggccaggctggtctcaaac

SEQ ID NO: 69983 - DNA, 26 bp, Homo sapiens
catgttggccaggctggtctcaaact

SEQ ID NO: 69984 - DNA, 26 bp, Homo sapiens
atgttggccaggctggtctcaaactc

SEQ ID NO: 69985 - DNA, 26 bp, Homo sapiens
tgttggccaggctggtctcaaactcc

SEQ ID NO: 69986 - DNA, 26 bp, Homo sapiens
gttggccaggctggtctcaaactcct

SEQ ID NO: 69987 - DNA, 26 bp, Homo sapiens
ttggccaggctggtctcaaactcctg

SEQ ID NO: 69988 - DNA, 26 bp, Homo sapiens
tggccaggctggtctcaaactcctga

SEQ ID NO: 69989 - DNA, 26 bp, Homo sapiens
ggccaggctggtctcaaactcctgac

SEQ ID NO: 69990 - DNA, 26 bp, Homo sapiens
gccaggctggtctcaaactcctgacc

SEQ ID NO: 69991 - DNA, 26 bp, Homo sapiens
ccaggctggtctcaaactcctgacct

SEQ ID NO: 69992 - DNA, 26 bp, Homo sapiens
caggctggtctcaaactcctgacctc

SEQ ID NO: 69993 - DNA, 26 bp, Homo sapiens
aggctggtctcaaactcctgacctca

SEQ ID NO: 69994 - DNA, 26 bp, Homo sapiens
ggctggtctcaaactcctgacctcaa

SEQ ID NO: 69995 - DNA, 26 bp, Homo sapiens
gctggtctcaaactcctgacctcaag

SEQ ID NO: 69996 - DNA, 26 bp, Homo sapiens
ctggtctcaaactcctgacctcaagt

SEQ ID NO: 69997 - DNA, 26 bp, Homo sapiens
tggtctcaaactcctgacctcaagtg

SEQ ID NO: 69998 - DNA, 26 bp, Homo sapiens
ggtctcaaactcctgacctcaagtga

SEQ ID NO: 69999 - DNA, 26 bp, Homo sapiens
gtctcaaactcctgacctcaagtgat

SEQ ID NO: 70000 - DNA, 26 bp, Homo sapiens
tctcaaactcctgacctcaagtgatc

SEQ ID NO: 70001 - DNA, 26 bp, Homo sapiens
ctcaaactcctgacctcaagtgatcc

SEQ ID NO: 70002 - DNA, 26 bp, Homo sapiens
tcaaactcctgacctcaagtgatcca

SEQ ID NO: 70003 - DNA, 26 bp, Homo sapiens
caaactcctgacctcaagtgatccac

SEQ ID NO: 70004 - DNA, 26 bp, Homo sapiens
aaactcctgacctcaagtgatccacc

SEQ ID NO: 70005 - DNA, 26 bp, Homo sapiens
aactcctgacctcaagtgatccaccc

SEQ ID NO: 70006 - DNA, 26 bp, Homo sapiens
actcctgacctcaagtgatccaccca

SEQ ID NO: 70007 - DNA, 26 bp, Homo sapiens
ctcctgacctcaagtgatccacccat

SEQ ID NO: 70008 - DNA, 26 bp, Homo sapiens
tcctgacctcaagtgatccacccatc

SEQ ID NO: 70009 - DNA, 26 bp, Homo sapiens
cctgacctcaagtgatccacccatct

SEQ ID NO: 70010 - DNA, 26 bp, Homo sapiens
ctgacctcaagtgatccacccatctt

SEQ ID NO: 70011 - DNA, 26 bp, Homo sapiens
tgacctcaagtgatccacccatctta

SEQ ID NO: 70012 - DNA, 26 bp, Homo sapiens
gacctcaagtgatccacccatcttag

SEQ ID NO: 70013 - DNA, 26 bp, Homo sapiens
acctcaagtgatccacccatcttagc

SEQ ID NO: 70014 - DNA, 26 bp, Homo sapiens
cctcaagtgatccacccatcttagct

SEQ ID NO: 70015 - DNA, 26 bp, Homo sapiens
ctcaagtgatccacccatcttagctt

SEQ ID NO: 70016 - DNA, 26 bp, Homo sapiens
tcaagtgatccacccatcttagcttc

SEQ ID NO: 70017 - DNA, 26 bp, Homo sapiens
caagtgatccacccatcttagcttcc

SEQ ID NO: 70018 - DNA, 26 bp, Homo sapiens
aagtgatccacccatcttagcttccc

SEQ ID NO: 70019 - DNA, 26 bp, Homo sapiens
agtgatccacccatcttagcttccca

SEQ ID NO: 70020 - DNA, 26 bp, Homo sapiens
gtgatccacccatcttagcttcccaa

SEQ ID NO: 70021 - DNA, 26 bp, Homo sapiens
tgatccacccatcttagcttcccaaa

SEQ ID NO: 70022 - DNA, 26 bp, Homo sapiens
gatccacccatcttagcttcccaaaa

SEQ ID NO: 70023 - DNA, 26 bp, Homo sapiens
atccacccatcttagcttcccaaaat

SEQ ID NO: 70024 - DNA, 26 bp, Homo sapiens
tccacccatcttagcttcccaaaatg

SEQ ID NO: 70025 - DNA, 26 bp, Homo sapiens
ccacccatcttagcttcccaaaatgc

SEQ ID NO: 70026 - DNA, 26 bp, Homo sapiens
cacccatcttagcttcccaaaatgct

SEQ ID NO: 70027 - DNA, 26 bp, Homo sapiens
acccatcttagcttcccaaaatgctg

SEQ ID NO: 70028 - DNA, 26 bp, Homo sapiens
cccatcttagcttcccaaaatgctgg

SEQ ID NO: 70029 - DNA, 26 bp, Homo sapiens
ccatcttagcttcccaaaatgctggg

SEQ ID NO: 70030 - DNA, 26 bp, Homo sapiens
catcttagcttcccaaaatgctggga

SEQ ID NO: 70031 - DNA, 26 bp, Homo sapiens
atcttagcttcccaaaatgctgggat

SEQ ID NO: 70032 - DNA, 26 bp, Homo sapiens
tcttagcttcccaaaatgctgggatt

SEQ ID NO: 70033 - DNA, 26 bp, Homo sapiens
cttagcttcccaaaatgctgggatta

SEQ ID NO: 70034 - DNA, 26 bp, Homo sapiens
ttagcttcccaaaatgctgggattac

SEQ ID NO: 70035 - DNA, 26 bp, Homo sapiens
tagcttcccaaaatgctgggattaca

SEQ ID NO: 70036 - DNA, 26 bp, Homo sapiens
agcttcccaaaatgctgggattacag

SEQ ID NO: 70037 - DNA, 26 bp, Homo sapiens
gcttcccaaaatgctgggattacagg

SEQ ID NO: 70038 - DNA, 26 bp, Homo sapiens
cttcccaaaatgctgggattacaggt

SEQ ID NO: 70039 - DNA, 26 bp, Homo sapiens
ttcccaaaatgctgggattacaggtg

SEQ ID NO: 70040 - DNA, 26 bp, Homo sapiens
tcccaaaatgctgggattacaggtgt

SEQ ID NO: 70041 - DNA, 26 bp, Homo sapiens
cccaaaatgctgggattacaggtgtg

SEQ ID NO: 70042 - DNA, 26 bp, Homo sapiens
ccaaaatgctgggattacaggtgtga

SEQ ID NO: 70043 - DNA, 26 bp, Homo sapiens
caaaatgctgggattacaggtgtgag

SEQ ID NO: 70044 - DNA, 26 bp, Homo sapiens
aaaatgctgggattacaggtgtgagc

SEQ ID NO: 70045 - DNA, 26 bp, Homo sapiens
aaatgctgggattacaggtgtgagcc

SEQ ID NO: 70046 - DNA, 26 bp, Homo sapiens
aatgctgggattacaggtgtgagcca

SEQ ID NO: 70047 - DNA, 26 bp, Homo sapiens
atgctgggattacaggtgtgagccac

SEQ ID NO: 70048 - DNA, 26 bp, Homo sapiens
tgctgggattacaggtgtgagccacc

SEQ ID NO: 70049 - DNA, 26 bp, Homo sapiens
gctgggattacaggtgtgagccacca

SEQ ID NO: 70050 - DNA, 26 bp, Homo sapiens
ctgggattacaggtgtgagccaccat

SEQ ID NO: 70051 - DNA, 26 bp, Homo sapiens
tgggattacaggtgtgagccaccatg

SEQ ID NO: 70052 - DNA, 26 bp, Homo sapiens
gggattacaggtgtgagccaccatgc

SEQ ID NO: 70053 - DNA, 26 bp, Homo sapiens
ggattacaggtgtgagccaccatgcc

SEQ ID NO: 70054 - DNA, 26 bp, Homo sapiens
gattacaggtgtgagccaccatgcct

SEQ ID NO: 70055 - DNA, 26 bp, Homo sapiens
attacaggtgtgagccaccatgccta

SEQ ID NO: 70056 - DNA, 26 bp, Homo sapiens
ttacaggtgtgagccaccatgcctag

SEQ ID NO: 70057 - DNA, 26 bp, Homo sapiens
tacaggtgtgagccaccatgcctagc

SEQ ID NO: 70058 - DNA, 26 bp, Homo sapiens
acaggtgtgagccaccatgcctagcc

SEQ ID NO: 70059 - DNA, 26 bp, Homo sapiens
caggtgtgagccaccatgcctagccc

SEQ ID NO: 70060 - DNA, 26 bp, Homo sapiens
aggtgtgagccaccatgcctagccca

SEQ ID NO: 70061 - DNA, 26 bp, Homo sapiens
ggtgtgagccaccatgcctagcccat

SEQ ID NO: 70062 - DNA, 26 bp, Homo sapiens
gtgtgagccaccatgcctagcccatg

SEQ ID NO: 70063 - DNA, 26 bp, Homo sapiens
tgtgagccaccatgcctagcccatga

SEQ ID NO: 70064 - DNA, 26 bp, Homo sapiens
gtgagccaccatgcctagcccatgac

SEQ ID NO: 70065 - DNA, 26 bp, Homo sapiens
tgagccaccatgcctagcccatgaca

SEQ ID NO: 70066 - DNA, 26 bp, Homo sapiens
gagccaccatgcctagcccatgacag

SEQ ID NO: 70067 - DNA, 26 bp, Homo sapiens
agccaccatgcctagcccatgacagt

SEQ ID NO: 70068 - DNA, 26 bp, Homo sapiens
gccaccatgcctagcccatgacagta

SEQ ID NO: 70069 - DNA, 26 bp, Homo sapiens
ccaccatgcctagcccatgacagtac

SEQ ID NO: 70070 - DNA, 26 bp, Homo sapiens
caccatgcctagcccatgacagtacc

SEQ ID NO: 70071 - DNA, 26 bp, Homo sapiens
accatgcctagcccatgacagtacct

SEQ ID NO: 70072 - DNA, 26 bp, Homo sapiens
ccatgcctagcccatgacagtacctt

SEQ ID NO: 70073 - DNA, 26 bp, Homo sapiens
catgcctagcccatgacagtaccttc

SEQ ID NO: 70074 - DNA, 26 bp, Homo sapiens
atgcctagcccatgacagtaccttcc

SEQ ID NO: 70075 - DNA, 26 bp, Homo sapiens
tgcctagcccatgacagtaccttcct

SEQ ID NO: 70076 - DNA, 26 bp, Homo sapiens
gcctagcccatgacagtaccttccta

SEQ ID NO: 70077 - DNA, 26 bp, Homo sapiens
cctagcccatgacagtaccttcctaa

SEQ ID NO: 70078 - DNA, 26 bp, Homo sapiens
ctagcccatgacagtaccttcctaac

SEQ ID NO: 70079 - DNA, 26 bp, Homo sapiens
tagcccatgacagtaccttcctaaca

SEQ ID NO: 70080 - DNA, 26 bp, Homo sapiens
agcccatgacagtaccttcctaacat

SEQ ID NO: 70081 - DNA, 26 bp, Homo sapiens
gcccatgacagtaccttcctaacatg

SEQ ID NO: 70082 - DNA, 26 bp, Homo sapiens
cccatgacagtaccttcctaacatgt

SEQ ID NO: 70083 - DNA, 26 bp, Homo sapiens
ccatgacagtaccttcctaacatgtg

SEQ ID NO: 70084 - DNA, 26 bp, Homo sapiens
catgacagtaccttcctaacatgtgt

SEQ ID NO: 70085 - DNA, 26 bp, Homo sapiens
atgacagtaccttcctaacatgtgtt

SEQ ID NO: 70086 - DNA, 26 bp, Homo sapiens
tgacagtaccttcctaacatgtgttt

SEQ ID NO: 70087 - DNA, 26 bp, Homo sapiens
gacagtaccttcctaacatgtgtttg

SEQ ID NO: 70088 - DNA, 26 bp, Homo sapiens
acagtaccttcctaacatgtgtttgt

SEQ ID NO: 70089 - DNA, 26 bp, Homo sapiens
cagtaccttcctaacatgtgtttgta

SEQ ID NO: 70090 - DNA, 26 bp, Homo sapiens
agtaccttcctaacatgtgtttgtat

SEQ ID NO: 70091 - DNA, 26 bp, Homo sapiens
gtaccttcctaacatgtgtttgtatt

SEQ ID NO: 70092 - DNA, 26 bp, Homo sapiens
taccttcctaacatgtgtttgtattt

SEQ ID NO: 70093 - DNA, 26 bp, Homo sapiens
accttcctaacatgtgtttgtatttt

SEQ ID NO: 70094 - DNA, 26 bp, Homo sapiens
ccttcctaacatgtgtttgtattttt

SEQ ID NO: 70095 - DNA, 26 bp, Homo sapiens
cttcctaacatgtgtttgtatttttg

SEQ ID NO: 70096 - DNA, 26 bp, Homo sapiens
ttcctaacatgtgtttgtatttttgt

SEQ ID NO: 70097 - DNA, 26 bp, Homo sapiens
tcctaacatgtgtttgtatttttgta

SEQ ID NO: 70098 - DNA, 26 bp, Homo sapiens
cctaacatgtgtttgtatttttgtaa

SEQ ID NO: 70099 - DNA, 26 bp, Homo sapiens
ctaacatgtgtttgtatttttgtaac

SEQ ID NO: 70100 - DNA, 26 bp, Homo sapiens
taacatgtgtttgtatttttgtaaca

SEQ ID NO: 70101 - DNA, 26 bp, Homo sapiens
aacatgtgtttgtatttttgtaacac

SEQ ID NO: 70102 - DNA, 26 bp, Homo sapiens
acatgtgtttgtatttttgtaacaca

SEQ ID NO: 70103 - DNA, 26 bp, Homo sapiens
catgtgtttgtatttttgtaacacaa

SEQ ID NO: 70104 - DNA, 26 bp, Homo sapiens
atgtgtttgtatttttgtaacacaag

SEQ ID NO: 70105 - DNA, 26 bp, Homo sapiens
tgtgtttgtatttttgtaacacaagt

SEQ ID NO: 70106 - DNA, 26 bp, Homo sapiens
gtgtttgtatttttgtaacacaagtt

SEQ ID NO: 70107 - DNA, 26 bp, Homo sapiens
tgtttgtatttttgtaacacaagttg

SEQ ID NO: 70108 - DNA, 26 bp, Homo sapiens
gtttgtatttttgtaacacaagttgc

SEQ ID NO: 70109 - DNA, 26 bp, Homo sapiens
tttgtatttttgtaacacaagttgct

SEQ ID NO: 70110 - DNA, 26 bp, Homo sapiens
ttgtatttttgtaacacaagttgcta

SEQ ID NO: 70111 - DNA, 26 bp, Homo sapiens
tgtatttttgtaacacaagttgctat

SEQ ID NO: 70112 - DNA, 26 bp, Homo sapiens
gtatttttgtaacacaagttgctatt

SEQ ID NO: 70113 - DNA, 26 bp, Homo sapiens
tatttttgtaacacaagttgctattt

SEQ ID NO: 70114 - DNA, 26 bp, Homo sapiens
atttttgtaacacaagttgctatttt

SEQ ID NO: 70115 - DNA, 26 bp, Homo sapiens
tttttgtaacacaagttgctattttt

SEQ ID NO: 70116 - DNA, 26 bp, Homo sapiens
ttttgtaacacaagttgctatttttc

SEQ ID NO: 70117 - DNA, 26 bp, Homo sapiens
tttgtaacacaagttgctatttttct

SEQ ID NO: 70118 - DNA, 26 bp, Homo sapiens
ttgtaacacaagttgctatttttcta

SEQ ID NO: 70119 - DNA, 26 bp, Homo sapiens
tgtaacacaagttgctatttttctaa

SEQ ID NO: 70120 - DNA, 26 bp, Homo sapiens
gtaacacaagttgctatttttctaat

SEQ ID NO: 70121 - DNA, 26 bp, Homo sapiens
taacacaagttgctatttttctaatg

SEQ ID NO: 70122 - DNA, 26 bp, Homo sapiens
aacacaagttgctatttttctaatgt

SEQ ID NO: 70123 - DNA, 26 bp, Homo sapiens
acacaagttgctatttttctaatgtt

SEQ ID NO: 70124 - DNA, 26 bp, Homo sapiens
cacaagttgctatttttctaatgttc

SEQ ID NO: 70125 - DNA, 26 bp, Homo sapiens
acaagttgctatttttctaatgttca

SEQ ID NO: 70126 - DNA, 26 bp, Homo sapiens
caagttgctatttttctaatgttcat

SEQ ID NO: 70127 - DNA, 26 bp, Homo sapiens
aagttgctatttttctaatgttcata

SEQ ID NO: 70128 - DNA, 26 bp, Homo sapiens
agttgctatttttctaatgttcatat

SEQ ID NO: 70129 - DNA, 26 bp, Homo sapiens
gttgctatttttctaatgttcatata

SEQ ID NO: 70130 - DNA, 26 bp, Homo sapiens
ttgctatttttctaatgttcatatat

SEQ ID NO: 70131 - DNA, 26 bp, Homo sapiens
tgctatttttctaatgttcatatatt

SEQ ID NO: 70132 - DNA, 26 bp, Homo sapiens
gctatttttctaatgttcatatattt

SEQ ID NO: 70133 - DNA, 26 bp, Homo sapiens
ctatttttctaatgttcatatattta

SEQ ID NO: 70134 - DNA, 26 bp, Homo sapiens
tatttttctaatgttcatatatttac

SEQ ID NO: 70135 - DNA, 26 bp, Homo sapiens
atttttctaatgttcatatatttaca

SEQ ID NO: 70136 - DNA, 26 bp, Homo sapiens
tttttctaatgttcatatatttacat

SEQ ID NO: 70137 - DNA, 26 bp, Homo sapiens
ttttctaatgttcatatatttacata

SEQ ID NO: 70138 - DNA, 26 bp, Homo sapiens
tttctaatgttcatatatttacatag

SEQ ID NO: 70139 - DNA, 26 bp, Homo sapiens
ttctaatgttcatatatttacatagc

SEQ ID NO: 70140 - DNA, 26 bp, Homo sapiens
tctaatgttcatatatttacatagcc

SEQ ID NO: 70141 - DNA, 26 bp, Homo sapiens
ctaatgttcatatatttacatagccc

SEQ ID NO: 70142 - DNA, 26 bp, Homo sapiens
taatgttcatatatttacatagccct

SEQ ID NO: 70143 - DNA, 26 bp, Homo sapiens
aatgttcatatatttacatagccctt

SEQ ID NO: 70144 - DNA, 26 bp, Homo sapiens
atgttcatatatttacatagcccttt

SEQ ID NO: 70145 - DNA, 26 bp, Homo sapiens
tgttcatatatttacatagcccttta

SEQ ID NO: 70146 - DNA, 26 bp, Homo sapiens
gttcatatatttacatagccctttaa

SEQ ID NO: 70147 - DNA, 26 bp, Homo sapiens
ttcatatatttacatagccctttaaa

SEQ ID NO: 70148 - DNA, 26 bp, Homo sapiens
tcatatatttacatagccctttaaaa

SEQ ID NO: 70149 - DNA, 26 bp, Homo sapiens
catatatttacatagccctttaaaaa

SEQ ID NO: 70150 - DNA, 26 bp, Homo sapiens
atatatttacatagccctttaaaaac

SEQ ID NO: 70151 - DNA, 26 bp, Homo sapiens
tatatttacatagccctttaaaaaca

SEQ ID NO: 70152 - DNA, 26 bp, Homo sapiens
atatttacatagccctttaaaaacat

SEQ ID NO: 70153 - DNA, 26 bp, Homo sapiens
tatttacatagccctttaaaaacatg

SEQ ID NO: 70154 - DNA, 26 bp, Homo sapiens
atttacatagccctttaaaaacatga

SEQ ID NO: 70155 - DNA, 26 bp, Homo sapiens
tttacatagccctttaaaaacatgag

SEQ ID NO: 70156 - DNA, 26 bp, Homo sapiens
ttacatagccctttaaaaacatgagt

SEQ ID NO: 70157 - DNA, 26 bp, Homo sapiens
tacatagccctttaaaaacatgagtt

SEQ ID NO: 70158 - DNA, 26 bp, Homo sapiens
acatagccctttaaaaacatgagttc

SEQ ID NO: 70159 - DNA, 26 bp, Homo sapiens
catagccctttaaaaacatgagttcc

SEQ ID NO: 70160 - DNA, 26 bp, Homo sapiens
atagccctttaaaaacatgagttcca

SEQ ID NO: 70161 - DNA, 26 bp, Homo sapiens
tagccctttaaaaacatgagttccat

SEQ ID NO: 70162 - DNA, 26 bp, Homo sapiens
agccctttaaaaacatgagttccatg

SEQ ID NO: 70163 - DNA, 26 bp, Homo sapiens
gccctttaaaaacatgagttccatga

SEQ ID NO: 70164 - DNA, 26 bp, Homo sapiens
ccctttaaaaacatgagttccatgaa

SEQ ID NO: 70165 - DNA, 26 bp, Homo sapiens
cctttaaaaacatgagttccatgaac

SEQ ID NO: 70166 - DNA, 26 bp, Homo sapiens
ctttaaaaacatgagttccatgaact

SEQ ID NO: 70167 - DNA, 26 bp, Homo sapiens
tttaaaaacatgagttccatgaactt

SEQ ID NO: 70168 - DNA, 26 bp, Homo sapiens
ttaaaaacatgagttccatgaacttt

SEQ ID NO: 70169 - DNA, 26 bp, Homo sapiens
taaaaacatgagttccatgaactttc

SEQ ID NO: 70170 - DNA, 26 bp, Homo sapiens
aaaaacatgagttccatgaactttct

SEQ ID NO: 70171 - DNA, 26 bp, Homo sapiens
aaaacatgagttccatgaactttcta

SEQ ID NO: 70172 - DNA, 26 bp, Homo sapiens
aaacatgagttccatgaactttctat

SEQ ID NO: 70173 - DNA, 26 bp, Homo sapiens
aacatgagttccatgaactttctatg

SEQ ID NO: 70174 - DNA, 26 bp, Homo sapiens
acatgagttccatgaactttctatgt

SEQ ID NO: 70175 - DNA, 26 bp, Homo sapiens
catgagttccatgaactttctatgtc

SEQ ID NO: 70176 - DNA, 26 bp, Homo sapiens
atgagttccatgaactttctatgtca

SEQ ID NO: 70177 - DNA, 26 bp, Homo sapiens
tgagttccatgaactttctatgtcat

SEQ ID NO: 70178 - DNA, 26 bp, Homo sapiens
gagttccatgaactttctatgtcatt

SEQ ID NO: 70179 - DNA, 26 bp, Homo sapiens
agttccatgaactttctatgtcattg

SEQ ID NO: 70180 - DNA, 26 bp, Homo sapiens
gttccatgaactttctatgtcattga

SEQ ID NO: 70181 - DNA, 26 bp, Homo sapiens
ttccatgaactttctatgtcattgaa

SEQ ID NO: 70182 - DNA, 26 bp, Homo sapiens
tccatgaactttctatgtcattgaag

SEQ ID NO: 70183 - DNA, 26 bp, Homo sapiens
ccatgaactttctatgtcattgaaga

SEQ ID NO: 70184 - DNA, 26 bp, Homo sapiens
catgaactttctatgtcattgaagag

SEQ ID NO: 70185 - DNA, 26 bp, Homo sapiens
atgaactttctatgtcattgaagaga

SEQ ID NO: 70186 - DNA, 26 bp, Homo sapiens
tgaactttctatgtcattgaagagag

SEQ ID NO: 70187 - DNA, 26 bp, Homo sapiens
gaactttctatgtcattgaagagagc

SEQ ID NO: 70188 - DNA, 26 bp, Homo sapiens
aactttctatgtcattgaagagagct

SEQ ID NO: 70189 - DNA, 26 bp, Homo sapiens
actttctatgtcattgaagagagctg

SEQ ID NO: 70190 - DNA, 26 bp, Homo sapiens
ctttctatgtcattgaagagagctgt

SEQ ID NO: 70191 - DNA, 26 bp, Homo sapiens
tttctatgtcattgaagagagctgtt

SEQ ID NO: 70192 - DNA, 26 bp, Homo sapiens
ttctatgtcattgaagagagctgtta

SEQ ID NO: 70193 - DNA, 26 bp, Homo sapiens
tctatgtcattgaagagagctgttaa

SEQ ID NO: 70194 - DNA, 26 bp, Homo sapiens
ctatgtcattgaagagagctgttaaa

SEQ ID NO: 70195 - DNA, 26 bp, Homo sapiens
tatgtcattgaagagagctgttaaaa

SEQ ID NO: 70196 - DNA, 26 bp, Homo sapiens
atgtcattgaagagagctgttaaaat

SEQ ID NO: 70197 - DNA, 26 bp, Homo sapiens
tgtcattgaagagagctgttaaaatc

SEQ ID NO: 70198 - DNA, 26 bp, Homo sapiens
gtcattgaagagagctgttaaaatct

SEQ ID NO: 70199 - DNA, 26 bp, Homo sapiens
tcattgaagagagctgttaaaatctg

SEQ ID NO: 70200 - DNA, 26 bp, Homo sapiens
cattgaagagagctgttaaaatctga

SEQ ID NO: 70201 - DNA, 26 bp, Homo sapiens
attgaagagagctgttaaaatctgat

SEQ ID NO: 70202 - DNA, 26 bp, Homo sapiens
ttgaagagagctgttaaaatctgatt

SEQ ID NO: 70203 - DNA, 26 bp, Homo sapiens
tgaagagagctgttaaaatctgattc

SEQ ID NO: 70204 - DNA, 26 bp, Homo sapiens
gaagagagctgttaaaatctgattcc

SEQ ID NO: 70205 - DNA, 26 bp, Homo sapiens
aagagagctgttaaaatctgattcca

SEQ ID NO: 70206 - DNA, 26 bp, Homo sapiens
agagagctgttaaaatctgattccat

SEQ ID NO: 70207 - DNA, 26 bp, Homo sapiens
gagagctgttaaaatctgattccatc

SEQ ID NO: 70208 - DNA, 26 bp, Homo sapiens
agagctgttaaaatctgattccatca

SEQ ID NO: 70209 - DNA, 26 bp, Homo sapiens
gagctgttaaaatctgattccatcac

SEQ ID NO: 70210 - DNA, 26 bp, Homo sapiens
agctgttaaaatctgattccatcaca

SEQ ID NO: 70211 - DNA, 26 bp, Homo sapiens
gctgttaaaatctgattccatcacaa

SEQ ID NO: 70212 - DNA, 26 bp, Homo sapiens
ctgttaaaatctgattccatcacaaa

SEQ ID NO: 70213 - DNA, 26 bp, Homo sapiens
tgttaaaatctgattccatcacaaat

SEQ ID NO: 70214 - DNA, 26 bp, Homo sapiens
gttaaaatctgattccatcacaaatt

SEQ ID NO: 70215 - DNA, 26 bp, Homo sapiens
ttaaaatctgattccatcacaaattt

SEQ ID NO: 70216 - DNA, 26 bp, Homo sapiens
taaaatctgattccatcacaaatttc

SEQ ID NO: 70217 - DNA, 26 bp, Homo sapiens
aaaatctgattccatcacaaatttca

SEQ ID NO: 70218 - DNA, 26 bp, Homo sapiens
aaatctgattccatcacaaatttcag

SEQ ID NO: 70219 - DNA, 26 bp, Homo sapiens
aatctgattccatcacaaatttcaga

SEQ ID NO: 70220 - DNA, 26 bp, Homo sapiens
atctgattccatcacaaatttcagac

SEQ ID NO: 70221 - DNA, 26 bp, Homo sapiens
tctgattccatcacaaatttcagacc

SEQ ID NO: 70222 - DNA, 26 bp, Homo sapiens
ctgattccatcacaaatttcagaccc

SEQ ID NO: 70223 - DNA, 26 bp, Homo sapiens
tgattccatcacaaatttcagacccc

SEQ ID NO: 70224 - DNA, 26 bp, Homo sapiens
gattccatcacaaatttcagacccct

SEQ ID NO: 70225 - DNA, 26 bp, Homo sapiens
attccatcacaaatttcagacccctt

SEQ ID NO: 70226 - DNA, 26 bp, Homo sapiens
ttccatcacaaatttcagaccccttt

SEQ ID NO: 70227 - DNA, 26 bp, Homo sapiens
tccatcacaaatttcagaccccttta

SEQ ID NO: 70228 - DNA, 26 bp, Homo sapiens
ccatcacaaatttcagacccctttaa

SEQ ID NO: 70229 - DNA, 26 bp, Homo sapiens
catcacaaatttcagacccctttaaa

SEQ ID NO: 70230 - DNA, 26 bp, Homo sapiens
atcacaaatttcagacccctttaaaa

SEQ ID NO: 70231 - DNA, 26 bp, Homo sapiens
tcacaaatttcagacccctttaaaat

SEQ ID NO: 70232 - DNA, 26 bp, Homo sapiens
cacaaatttcagacccctttaaaata

SEQ ID NO: 70233 - DNA, 26 bp, Homo sapiens
acaaatttcagacccctttaaaataa

SEQ ID NO: 70234 - DNA, 26 bp, Homo sapiens
caaatttcagacccctttaaaataat

SEQ ID NO: 70235 - DNA, 26 bp, Homo sapiens
aaatttcagacccctttaaaataatt

SEQ ID NO: 70236 - DNA, 26 bp, Homo sapiens
aatttcagacccctttaaaataatta

SEQ ID NO: 70237 - DNA, 26 bp, Homo sapiens
atttcagacccctttaaaataattat

SEQ ID NO: 70238 - DNA, 26 bp, Homo sapiens
tttcagacccctttaaaataattatc

SEQ ID NO: 70239 - DNA, 26 bp, Homo sapiens
ttcagacccctttaaaataattatca

SEQ ID NO: 70240 - DNA, 26 bp, Homo sapiens
tcagacccctttaaaataattatcag

SEQ ID NO: 70241 - DNA, 26 bp, Homo sapiens
cagacccctttaaaataattatcaga

SEQ ID NO: 70242 - DNA, 26 bp, Homo sapiens
agacccctttaaaataattatcagaa

SEQ ID NO: 70243 - DNA, 26 bp, Homo sapiens
gacccctttaaaataattatcagaag

SEQ ID NO: 70244 - DNA, 26 bp, Homo sapiens
acccctttaaaataattatcagaagc

SEQ ID NO: 70245 - DNA, 26 bp, Homo sapiens
cccctttaaaataattatcagaagcc

SEQ ID NO: 70246 - DNA, 26 bp, Homo sapiens
ccctttaaaataattatcagaagcca

SEQ ID NO: 70247 - DNA, 26 bp, Homo sapiens
cctttaaaataattatcagaagccag

SEQ ID NO: 70248 - DNA, 26 bp, Homo sapiens
ctttaaaataattatcagaagccagc

SEQ ID NO: 70249 - DNA, 26 bp, Homo sapiens
tttaaaataattatcagaagccagca

SEQ ID NO: 70250 - DNA, 26 bp, Homo sapiens
ttaaaataattatcagaagccagcat

SEQ ID NO: 70251 - DNA, 26 bp, Homo sapiens
taaaataattatcagaagccagcata

SEQ ID NO: 70252 - DNA, 26 bp, Homo sapiens
aaaataattatcagaagccagcataa

SEQ ID NO: 70253 - DNA, 26 bp, Homo sapiens
aaataattatcagaagccagcataat

SEQ ID NO: 70254 - DNA, 26 bp, Homo sapiens
aataattatcagaagccagcataatt

SEQ ID NO: 70255 - DNA, 26 bp, Homo sapiens
ataattatcagaagccagcataattc

SEQ ID NO: 70256 - DNA, 26 bp, Homo sapiens
taattatcagaagccagcataattcc

SEQ ID NO: 70257 - DNA, 26 bp, Homo sapiens
aattatcagaagccagcataattcca

SEQ ID NO: 70258 - DNA, 26 bp, Homo sapiens
attatcagaagccagcataattccag

SEQ ID NO: 70259 - DNA, 26 bp, Homo sapiens
ttatcagaagccagcataattccagc

SEQ ID NO: 70260 - DNA, 26 bp, Homo sapiens
tatcagaagccagcataattccagct

SEQ ID NO: 70261 - DNA, 26 bp, Homo sapiens
atcagaagccagcataattccagctg

SEQ ID NO: 70262 - DNA, 26 bp, Homo sapiens
tcagaagccagcataattccagctgt

SEQ ID NO: 70263 - DNA, 26 bp, Homo sapiens
cagaagccagcataattccagctgtc

SEQ ID NO: 70264 - DNA, 26 bp, Homo sapiens
agaagccagcataattccagctgtcc

SEQ ID NO: 70265 - DNA, 26 bp, Homo sapiens
gaagccagcataattccagctgtccc

SEQ ID NO: 70266 - DNA, 26 bp, Homo sapiens
aagccagcataattccagctgtcccc

SEQ ID NO: 70267 - DNA, 26 bp, Homo sapiens
agccagcataattccagctgtcccct

SEQ ID NO: 70268 - DNA, 26 bp, Homo sapiens
gccagcataattccagctgtccccta

SEQ ID NO: 70269 - DNA, 26 bp, Homo sapiens
ccagcataattccagctgtcccctag

SEQ ID NO: 70270 - DNA, 26 bp, Homo sapiens
cagcataattccagctgtcccctagc

SEQ ID NO: 70271 - DNA, 26 bp, Homo sapiens
agcataattccagctgtcccctagct

SEQ ID NO: 70272 - DNA, 26 bp, Homo sapiens
gcataattccagctgtcccctagcta

SEQ ID NO: 70273 - DNA, 26 bp, Homo sapiens
cataattccagctgtcccctagctaa

SEQ ID NO: 70274 - DNA, 26 bp, Homo sapiens
ataattccagctgtcccctagctaat

SEQ ID NO: 70275 - DNA, 26 bp, Homo sapiens
taattccagctgtcccctagctaatc

SEQ ID NO: 70276 - DNA, 26 bp, Homo sapiens
aattccagctgtcccctagctaatct

SEQ ID NO: 70277 - DNA, 26 bp, Homo sapiens
attccagctgtcccctagctaatctg

SEQ ID NO: 70278 - DNA, 26 bp, Homo sapiens
ttccagctgtcccctagctaatctgc

SEQ ID NO: 70279 - DNA, 26 bp, Homo sapiens
tccagctgtcccctagctaatctgca

SEQ ID NO: 70280 - DNA, 26 bp, Homo sapiens
ccagctgtcccctagctaatctgcag

SEQ ID NO: 70281 - DNA, 26 bp, Homo sapiens
cagctgtcccctagctaatctgcagc

SEQ ID NO: 70282 - DNA, 26 bp, Homo sapiens
agctgtcccctagctaatctgcagct

SEQ ID NO: 70283 - DNA, 26 bp, Homo sapiens
gctgtcccctagctaatctgcagctc

SEQ ID NO: 70284 - DNA, 26 bp, Homo sapiens
ctgtcccctagctaatctgcagctcc

SEQ ID NO: 70285 - DNA, 26 bp, Homo sapiens
tgtcccctagctaatctgcagctcct

SEQ ID NO: 70286 - DNA, 26 bp, Homo sapiens
gtcccctagctaatctgcagctcctc

SEQ ID NO: 70287 - DNA, 26 bp, Homo sapiens
tcccctagctaatctgcagctcctca

SEQ ID NO: 70288 - DNA, 26 bp, Homo sapiens
cccctagctaatctgcagctcctcat

SEQ ID NO: 70289 - DNA, 26 bp, Homo sapiens
ccctagctaatctgcagctcctcata

SEQ ID NO: 70290 - DNA, 26 bp, Homo sapiens
cctagctaatctgcagctcctcataa

SEQ ID NO: 70291 - DNA, 26 bp, Homo sapiens
ctagctaatctgcagctcctcataac

SEQ ID NO: 70292 - DNA, 26 bp, Homo sapiens
tagctaatctgcagctcctcataaca

SEQ ID NO: 70293 - DNA, 26 bp, Homo sapiens
agctaatctgcagctcctcataacaa

SEQ ID NO: 70294 - DNA, 26 bp, Homo sapiens
gctaatctgcagctcctcataacaaa

SEQ ID NO: 70295 - DNA, 26 bp, Homo sapiens
ctaatctgcagctcctcataacaaaa

SEQ ID NO: 70296 - DNA, 26 bp, Homo sapiens
taatctgcagctcctcataacaaaag

SEQ ID NO: 70297 - DNA, 26 bp, Homo sapiens
aatctgcagctcctcataacaaaagt

SEQ ID NO: 70298 - DNA, 26 bp, Homo sapiens
atctgcagctcctcataacaaaagtc

SEQ ID NO: 70299 - DNA, 26 bp, Homo sapiens
tctgcagctcctcataacaaaagtct

SEQ ID NO: 70300 - DNA, 26 bp, Homo sapiens
ctgcagctcctcataacaaaagtctt

SEQ ID NO: 70301 - DNA, 26 bp, Homo sapiens
tgcagctcctcataacaaaagtcttc

SEQ ID NO: 70302 - DNA, 26 bp, Homo sapiens
gcagctcctcataacaaaagtcttca

SEQ ID NO: 70303 - DNA, 26 bp, Homo sapiens
cagctcctcataacaaaagtcttcag

SEQ ID NO: 70304 - DNA, 26 bp, Homo sapiens
agctcctcataacaaaagtcttcagc

SEQ ID NO: 70305 - DNA, 26 bp, Homo sapiens
gctcctcataacaaaagtcttcagcc

SEQ ID NO: 70306 - DNA, 26 bp, Homo sapiens
ctcctcataacaaaagtcttcagcca

SEQ ID NO: 70307 - DNA, 26 bp, Homo sapiens
tcctcataacaaaagtcttcagccac

SEQ ID NO: 70308 - DNA, 26 bp, Homo sapiens
cctcataacaaaagtcttcagccaca

SEQ ID NO: 70309 - DNA, 26 bp, Homo sapiens
ctcataacaaaagtcttcagccacac

SEQ ID NO: 70310 - DNA, 26 bp, Homo sapiens
tcataacaaaagtcttcagccacaca

SEQ ID NO: 70311 - DNA, 26 bp, Homo sapiens
cataacaaaagtcttcagccacacat

SEQ ID NO: 70312 - DNA, 26 bp, Homo sapiens
ataacaaaagtcttcagccacacatt

SEQ ID NO: 70313 - DNA, 26 bp, Homo sapiens
taacaaaagtcttcagccacacattg

SEQ ID NO: 70314 - DNA, 26 bp, Homo sapiens
aacaaaagtcttcagccacacattgc

SEQ ID NO: 70315 - DNA, 26 bp, Homo sapiens
acaaaagtcttcagccacacattgct

SEQ ID NO: 70316 - DNA, 26 bp, Homo sapiens
caaaagtcttcagccacacattgctc

SEQ ID NO: 70317 - DNA, 26 bp, Homo sapiens
aaaagtcttcagccacacattgctct

SEQ ID NO: 70318 - DNA, 26 bp, Homo sapiens
aaagtcttcagccacacattgctctt

SEQ ID NO: 70319 - DNA, 26 bp, Homo sapiens
aagtcttcagccacacattgctcttc

SEQ ID NO: 70320 - DNA, 26 bp, Homo sapiens
agtcttcagccacacattgctcttca

SEQ ID NO: 70321 - DNA, 26 bp, Homo sapiens
gtcttcagccacacattgctcttcaa

SEQ ID NO: 70322 - DNA, 26 bp, Homo sapiens
tcttcagccacacattgctcttcaac

SEQ ID NO: 70323 - DNA, 26 bp, Homo sapiens
cttcagccacacattgctcttcaacc

SEQ ID NO: 70324 - DNA, 26 bp, Homo sapiens
ttcagccacacattgctcttcaacca

SEQ ID NO: 70325 - DNA, 26 bp, Homo sapiens
tcagccacacattgctcttcaaccac

SEQ ID NO: 70326 - DNA, 26 bp, Homo sapiens
cagccacacattgctcttcaaccaca

SEQ ID NO: 70327 - DNA, 26 bp, Homo sapiens
agccacacattgctcttcaaccacat

SEQ ID NO: 70328 - DNA, 26 bp, Homo sapiens
gccacacattgctcttcaaccacatt

SEQ ID NO: 70329 - DNA, 26 bp, Homo sapiens
ccacacattgctcttcaaccacatta

SEQ ID NO: 70330 - DNA, 26 bp, Homo sapiens
cacacattgctcttcaaccacattaa

SEQ ID NO: 70331 - DNA, 26 bp, Homo sapiens
acacattgctcttcaaccacattaaa

SEQ ID NO: 70332 - DNA, 26 bp, Homo sapiens
cacattgctcttcaaccacattaaag

SEQ ID NO: 70333 - DNA, 26 bp, Homo sapiens
acattgctcttcaaccacattaaaga

SEQ ID NO: 70334 - DNA, 26 bp, Homo sapiens
cattgctcttcaaccacattaaagaa

SEQ ID NO: 70335 - DNA, 26 bp, Homo sapiens
attgctcttcaaccacattaaagaaa

SEQ ID NO: 70336 - DNA, 26 bp, Homo sapiens
ttgctcttcaaccacattaaagaaac

SEQ ID NO: 70337 - DNA, 26 bp, Homo sapiens
tgctcttcaaccacattaaagaaacg

SEQ ID NO: 70338 - DNA, 26 bp, Homo sapiens
gctcttcaaccacattaaagaaacgg

SEQ ID NO: 70339 - DNA, 26 bp, Homo sapiens
ctcttcaaccacattaaagaaacgga

SEQ ID NO: 70340 - DNA, 26 bp, Homo sapiens
tcttcaaccacattaaagaaacggaa

SEQ ID NO: 70341 - DNA, 26 bp, Homo sapiens
cttcaaccacattaaagaaacggaac

SEQ ID NO: 70342 - DNA, 26 bp, Homo sapiens
ttcaaccacattaaagaaacggaaca

SEQ ID NO: 70343 - DNA, 26 bp, Homo sapiens
tcaaccacattaaagaaacggaacaa

SEQ ID NO: 70344 - DNA, 26 bp, Homo sapiens
caaccacattaaagaaacggaacaaa

SEQ ID NO: 70345 - DNA, 26 bp, Homo sapiens
aaccacattaaagaaacggaacaaaa

SEQ ID NO: 70346 - DNA, 26 bp, Homo sapiens
accacattaaagaaacggaacaaaac

SEQ ID NO: 70347 - DNA, 26 bp, Homo sapiens
ccacattaaagaaacggaacaaaact

SEQ ID NO: 70348 - DNA, 26 bp, Homo sapiens
cacattaaagaaacggaacaaaactt

SEQ ID NO: 70349 - DNA, 26 bp, Homo sapiens
acattaaagaaacggaacaaaacttc

SEQ ID NO: 70350 - DNA, 26 bp, Homo sapiens
cattaaagaaacggaacaaaacttct

SEQ ID NO: 70351 - DNA, 26 bp, Homo sapiens
attaaagaaacggaacaaaacttctt

SEQ ID NO: 70352 - DNA, 26 bp, Homo sapiens
ttaaagaaacggaacaaaacttcttt

SEQ ID NO: 70353 - DNA, 26 bp, Homo sapiens
taaagaaacggaacaaaacttctttc

SEQ ID NO: 70354 - DNA, 26 bp, Homo sapiens
aaagaaacggaacaaaacttctttct

SEQ ID NO: 70355 - DNA, 26 bp, Homo sapiens
aagaaacggaacaaaacttctttcta

SEQ ID NO: 70356 - DNA, 26 bp, Homo sapiens
agaaacggaacaaaacttctttctac

SEQ ID NO: 70357 - DNA, 26 bp, Homo sapiens
gaaacggaacaaaacttctttctaca

SEQ ID NO: 70358 - DNA, 26 bp, Homo sapiens
aaacggaacaaaacttctttctacat

SEQ ID NO: 70359 - DNA, 26 bp, Homo sapiens
aacggaacaaaacttctttctacatt

SEQ ID NO: 70360 - DNA, 26 bp, Homo sapiens
acggaacaaaacttctttctacattg

SEQ ID NO: 70361 - DNA, 26 bp, Homo sapiens
cggaacaaaacttctttctacattgt

SEQ ID NO: 70362 - DNA, 26 bp, Homo sapiens
ggaacaaaacttctttctacattgtc

SEQ ID NO: 70363 - DNA, 26 bp, Homo sapiens
gaacaaaacttctttctacattgtct

SEQ ID NO: 70364 - DNA, 26 bp, Homo sapiens
aacaaaacttctttctacattgtctc

SEQ ID NO: 70365 - DNA, 26 bp, Homo sapiens
acaaaacttctttctacattgtctca

SEQ ID NO: 70366 - DNA, 26 bp, Homo sapiens
caaaacttctttctacattgtctcag

SEQ ID NO: 70367 - DNA, 26 bp, Homo sapiens
aaaacttctttctacattgtctcagt

SEQ ID NO: 70368 - DNA, 26 bp, Homo sapiens
aaacttctttctacattgtctcagta

SEQ ID NO: 70369 - DNA, 26 bp, Homo sapiens
aacttctttctacattgtctcagtaa

SEQ ID NO: 70370 - DNA, 26 bp, Homo sapiens
acttctttctacattgtctcagtaaa

SEQ ID NO: 70371 - DNA, 26 bp, Homo sapiens
cttctttctacattgtctcagtaaag

SEQ ID NO: 70372 - DNA, 26 bp, Homo sapiens
ttctttctacattgtctcagtaaagt

SEQ ID NO: 70373 - DNA, 26 bp, Homo sapiens
tctttctacattgtctcagtaaagtt

SEQ ID NO: 70374 - DNA, 26 bp, Homo sapiens
ctttctacattgtctcagtaaagttg

SEQ ID NO: 70375 - DNA, 26 bp, Homo sapiens
tttctacattgtctcagtaaagttgc

SEQ ID NO: 70376 - DNA, 26 bp, Homo sapiens
ttctacattgtctcagtaaagttgct

SEQ ID NO: 70377 - DNA, 26 bp, Homo sapiens
tctacattgtctcagtaaagttgctt

SEQ ID NO: 70378 - DNA, 26 bp, Homo sapiens
ctacattgtctcagtaaagttgcttt

SEQ ID NO: 70379 - DNA, 26 bp, Homo sapiens
tacattgtctcagtaaagttgctttc

SEQ ID NO: 70380 - DNA, 26 bp, Homo sapiens
acattgtctcagtaaagttgctttct

SEQ ID NO: 70381 - DNA, 26 bp, Homo sapiens
cattgtctcagtaaagttgctttctt

SEQ ID NO: 70382 - DNA, 26 bp, Homo sapiens
attgtctcagtaaagttgctttcttt

SEQ ID NO: 70383 - DNA, 26 bp, Homo sapiens
ttgtctcagtaaagttgctttcttta

SEQ ID NO: 70384 - DNA, 26 bp, Homo sapiens
tgtctcagtaaagttgctttctttaa

SEQ ID NO: 70385 - DNA, 26 bp, Homo sapiens
gtctcagtaaagttgctttctttaaa

SEQ ID NO: 70386 - DNA, 26 bp, Homo sapiens
tctcagtaaagttgctttctttaaaa

SEQ ID NO: 70387 - DNA, 26 bp, Homo sapiens
ctcagtaaagttgctttctttaaaaa

SEQ ID NO: 70388 - DNA, 26 bp, Homo sapiens
tcagtaaagttgctttctttaaaaaa

SEQ ID NO: 70389 - DNA, 26 bp, Homo sapiens
cagtaaagttgctttctttaaaaaaa

SEQ ID NO: 70390 - DNA, 26 bp, Homo sapiens
agtaaagttgctttctttaaaaaaaa

SEQ ID NO: 70391 - DNA, 26 bp, Homo sapiens
gtaaagttgctttctttaaaaaaaaa

SEQ ID NO: 70392 - DNA, 26 bp, Homo sapiens
taaagttgctttctttaaaaaaaaaa

SEQ ID NO: 70393 - DNA, 26 bp, Homo sapiens
aaagttgctttctttaaaaaaaaaaa

SEQ ID NO: 70394 - DNA, 26 bp, Homo sapiens
aagttgctttctttaaaaaaaaaaaa

SEQ ID NO: 70395 - DNA, 26 bp, Homo sapiens
agttgctttctttaaaaaaaaaaaaa

SEQ ID NO: 70396 - DNA, 26 bp, Homo sapiens
gttgctttctttaaaaaaaaaaaaaa

SEQ ID NO: 70397 - DNA, 26 bp, Homo sapiens
ttgctttctttaaaaaaaaaaaaaaa

SEQ ID NO: 70398 - DNA, 26 bp, Homo sapiens
tgctttctttaaaaaaaaaaaaaaag

SEQ ID NO: 70399 - DNA, 26 bp, Homo sapiens
gctttctttaaaaaaaaaaaaaaagt

SEQ ID NO: 70400 - DNA, 26 bp, Homo sapiens
ctttctttaaaaaaaaaaaaaaagta

SEQ ID NO: 70401 - DNA, 26 bp, Homo sapiens
tttctttaaaaaaaaaaaaaaagtat

SEQ ID NO: 70402 - DNA, 26 bp, Homo sapiens
ttctttaaaaaaaaaaaaaaagtatt

SEQ ID NO: 70403 - DNA, 26 bp, Homo sapiens
tctttaaaaaaaaaaaaaaagtattc

SEQ ID NO: 70404 - DNA, 26 bp, Homo sapiens
ctttaaaaaaaaaaaaaaagtattcc

SEQ ID NO: 70405 - DNA, 26 bp, Homo sapiens
tttaaaaaaaaaaaaaaagtattcca

SEQ ID NO: 70406 - DNA, 26 bp, Homo sapiens
ttaaaaaaaaaaaaaaagtattccat

SEQ ID NO: 70407 - DNA, 26 bp, Homo sapiens
taaaaaaaaaaaaaaagtattccatt

SEQ ID NO: 70408 - DNA, 26 bp, Homo sapiens
aaaaaaaaaaaaaaagtattccattt

SEQ ID NO: 70409 - DNA, 26 bp, Homo sapiens
aaaaaaaaaaaaaagtattccattta

SEQ ID NO: 70410 - DNA, 26 bp, Homo sapiens
aaaaaaaaaaaaagtattccatttat

SEQ ID NO: 70411 - DNA, 26 bp, Homo sapiens
aaaaaaaaaaaagtattccatttatt

SEQ ID NO: 70412 - DNA, 26 bp, Homo sapiens
aaaaaaaaaaagtattccatttattt

SEQ ID NO: 70413 - DNA, 26 bp, Homo sapiens
aaaaaaaaaagtattccatttattta

SEQ ID NO: 70414 - DNA, 26 bp, Homo sapiens
aaaaaaaaagtattccatttatttaa

SEQ ID NO: 70415 - DNA, 26 bp, Homo sapiens
aaaaaaaagtattccatttatttaaa

SEQ ID NO: 70416 - DNA, 26 bp, Homo sapiens
aaaaaaagtattccatttatttaaaa

SEQ ID NO: 70417 - DNA, 26 bp, Homo sapiens
aaaaaagtattccatttatttaaaaa

SEQ ID NO: 70418 - DNA, 26 bp, Homo sapiens
aaaaagtattccatttatttaaaaaa

SEQ ID NO: 70419 - DNA, 26 bp, Homo sapiens
aaaagtattccatttatttaaaaaat

SEQ ID NO: 70420 - DNA, 26 bp, Homo sapiens
aaagtattccatttatttaaaaaatt

SEQ ID NO: 70421 - DNA, 26 bp, Homo sapiens
aagtattccatttatttaaaaaatta

SEQ ID NO: 70422 - DNA, 26 bp, Homo sapiens
agtattccatttatttaaaaaattaa

SEQ ID NO: 70423 - DNA, 26 bp, Homo sapiens
gtattccatttatttaaaaaattaaa

SEQ ID NO: 70424 - DNA, 26 bp, Homo sapiens
tattccatttatttaaaaaattaaaa

SEQ ID NO: 70425 - DNA, 26 bp, Homo sapiens
attccatttatttaaaaaattaaaaa

SEQ ID NO: 70426 - DNA, 26 bp, Homo sapiens
ttccatttatttaaaaaattaaaaac

SEQ ID NO: 70427 - DNA, 26 bp, Homo sapiens
tccatttatttaaaaaattaaaaaca

SEQ ID NO: 70428 - DNA, 26 bp, Homo sapiens
ccatttatttaaaaaattaaaaacat

SEQ ID NO: 70429 - DNA, 26 bp, Homo sapiens
catttatttaaaaaattaaaaacatc

SEQ ID NO: 70430 - DNA, 26 bp, Homo sapiens
atttatttaaaaaattaaaaacatct

SEQ ID NO: 70431 - DNA, 26 bp, Homo sapiens
tttatttaaaaaattaaaaacatcta

SEQ ID NO: 70432 - DNA, 26 bp, Homo sapiens
ttatttaaaaaattaaaaacatctaa

SEQ ID NO: 70433 - DNA, 26 bp, Homo sapiens
tatttaaaaaattaaaaacatctaac

SEQ ID NO: 70434 - DNA, 26 bp, Homo sapiens
atttaaaaaattaaaaacatctaaca

SEQ ID NO: 70435 - DNA, 26 bp, Homo sapiens
tttaaaaaattaaaaacatctaacat

SEQ ID NO: 70436 - DNA, 26 bp, Homo sapiens
ttaaaaaattaaaaacatctaacatt

SEQ ID NO: 70437 - DNA, 26 bp, Homo sapiens
taaaaaattaaaaacatctaacattt

SEQ ID NO: 70438 - DNA, 26 bp, Homo sapiens
aaaaaattaaaaacatctaacatttt

SEQ ID NO: 70439 - DNA, 26 bp, Homo sapiens
aaaaattaaaaacatctaacatttta

SEQ ID NO: 70440 - DNA, 26 bp, Homo sapiens
aaaattaaaaacatctaacattttaa

SEQ ID NO: 70441 - DNA, 26 bp, Homo sapiens
aaattaaaaacatctaacattttaaa

SEQ ID NO: 70442 - DNA, 26 bp, Homo sapiens
aattaaaaacatctaacattttaaac

SEQ ID NO: 70443 - DNA, 26 bp, Homo sapiens
attaaaaacatctaacattttaaact

SEQ ID NO: 70444 - DNA, 26 bp, Homo sapiens
ttaaaaacatctaacattttaaactg

SEQ ID NO: 70445 - DNA, 26 bp, Homo sapiens
taaaaacatctaacattttaaactgt

SEQ ID NO: 70446 - DNA, 26 bp, Homo sapiens
aaaaacatctaacattttaaactgta

SEQ ID NO: 70447 - DNA, 26 bp, Homo sapiens
aaaacatctaacattttaaactgtac

SEQ ID NO: 70448 - DNA, 26 bp, Homo sapiens
aaacatctaacattttaaactgtaca

SEQ ID NO: 70449 - DNA, 26 bp, Homo sapiens
aacatctaacattttaaactgtacaa

SEQ ID NO: 70450 - DNA, 26 bp, Homo sapiens
acatctaacattttaaactgtacaat

SEQ ID NO: 70451 - DNA, 26 bp, Homo sapiens
catctaacattttaaactgtacaata

SEQ ID NO: 70452 - DNA, 26 bp, Homo sapiens
atctaacattttaaactgtacaataa

SEQ ID NO: 70453 - DNA, 26 bp, Homo sapiens
tctaacattttaaactgtacaataaa

SEQ ID NO: 70454 - DNA, 26 bp, Homo sapiens
ctaacattttaaactgtacaataaac

SEQ ID NO: 70455 - DNA, 26 bp, Homo sapiens
taacattttaaactgtacaataaacc

SEQ ID NO: 70456 - DNA, 26 bp, Homo sapiens
aacattttaaactgtacaataaaccc

SEQ ID NO: 70457 - DNA, 26 bp, Homo sapiens
acattttaaactgtacaataaacccc

SEQ ID NO: 70458 - DNA, 26 bp, Homo sapiens
cattttaaactgtacaataaacccca

SEQ ID NO: 70459 - DNA, 26 bp, Homo sapiens
attttaaactgtacaataaaccccaa

SEQ ID NO: 70460 - DNA, 26 bp, Homo sapiens
ttttaaactgtacaataaaccccaac

SEQ ID NO: 70461 - DNA, 26 bp, Homo sapiens
tttaaactgtacaataaaccccaact

SEQ ID NO: 70462 - DNA, 26 bp, Homo sapiens
ttaaactgtacaataaaccccaactt

SEQ ID NO: 70463 - DNA, 26 bp, Homo sapiens
taaactgtacaataaaccccaacttc

SEQ ID NO: 70464 - DNA, 26 bp, Homo sapiens
aaactgtacaataaaccccaacttca

SEQ ID NO: 70465 - DNA, 26 bp, Homo sapiens
aactgtacaataaaccccaacttcat

SEQ ID NO: 70466 - DNA, 26 bp, Homo sapiens
actgtacaataaaccccaacttcatt

SEQ ID NO: 70467 - DNA, 26 bp, Homo sapiens
ctgtacaataaaccccaacttcatta

SEQ ID NO: 70468 - DNA, 26 bp, Homo sapiens
tgtacaataaaccccaacttcattac

SEQ ID NO: 70469 - DNA, 26 bp, Homo sapiens
gtacaataaaccccaacttcattacg

SEQ ID NO: 70470 - DNA, 26 bp, Homo sapiens
tacaataaaccccaacttcattacga

SEQ ID NO: 70471 - DNA, 26 bp, Homo sapiens
acaataaaccccaacttcattacgat

SEQ ID NO: 70472 - DNA, 26 bp, Homo sapiens
caataaaccccaacttcattacgatt

SEQ ID NO: 70473 - DNA, 26 bp, Homo sapiens
aataaaccccaacttcattacgattc

SEQ ID NO: 70474 - DNA, 26 bp, Homo sapiens
ataaaccccaacttcattacgattca

SEQ ID NO: 70475 - DNA, 26 bp, Homo sapiens
taaaccccaacttcattacgattcat

SEQ ID NO: 70476 - DNA, 26 bp, Homo sapiens
aaaccccaacttcattacgattcatt

SEQ ID NO: 70477 - DNA, 26 bp, Homo sapiens
aaccccaacttcattacgattcatta

SEQ ID NO: 70478 - DNA, 26 bp, Homo sapiens
accccaacttcattacgattcattaa

SEQ ID NO: 70479 - DNA, 26 bp, Homo sapiens
ccccaacttcattacgattcattaat

SEQ ID NO: 70480 - DNA, 26 bp, Homo sapiens
cccaacttcattacgattcattaatc

SEQ ID NO: 70481 - DNA, 26 bp, Homo sapiens
ccaacttcattacgattcattaatca

SEQ ID NO: 70482 - DNA, 26 bp, Homo sapiens
caacttcattacgattcattaatcaa

SEQ ID NO: 70483 - DNA, 26 bp, Homo sapiens
aacttcattacgattcattaatcaaa

SEQ ID NO: 70484 - DNA, 26 bp, Homo sapiens
acttcattacgattcattaatcaaat

SEQ ID NO: 70485 - DNA, 26 bp, Homo sapiens
cttcattacgattcattaatcaaatc

SEQ ID NO: 70486 - DNA, 26 bp, Homo sapiens
ttcattacgattcattaatcaaatct

SEQ ID NO: 70487 - DNA, 26 bp, Homo sapiens
tcattacgattcattaatcaaatctc

SEQ ID NO: 70488 - DNA, 26 bp, Homo sapiens
cattacgattcattaatcaaatctct

SEQ ID NO: 70489 - DNA, 26 bp, Homo sapiens
attacgattcattaatcaaatctctc

SEQ ID NO: 70490 - DNA, 26 bp, Homo sapiens
ttacgattcattaatcaaatctctct

SEQ ID NO: 70491 - DNA, 26 bp, Homo sapiens
tacgattcattaatcaaatctctctt

SEQ ID NO: 70492 - DNA, 26 bp, Homo sapiens
acgattcattaatcaaatctctcttg

SEQ ID NO: 70493 - DNA, 26 bp, Homo sapiens
cgattcattaatcaaatctctcttga

SEQ ID NO: 70494 - DNA, 26 bp, Homo sapiens
gattcattaatcaaatctctcttgag

SEQ ID NO: 70495 - DNA, 26 bp, Homo sapiens
attcattaatcaaatctctcttgagt

SEQ ID NO: 70496 - DNA, 26 bp, Homo sapiens
ttcattaatcaaatctctcttgagtc

SEQ ID NO: 70497 - DNA, 26 bp, Homo sapiens
tcattaatcaaatctctcttgagtcc

SEQ ID NO: 70498 - DNA, 26 bp, Homo sapiens
cattaatcaaatctctcttgagtcca

SEQ ID NO: 70499 - DNA, 26 bp, Homo sapiens
attaatcaaatctctcttgagtccat

SEQ ID NO: 70500 - DNA, 26 bp, Homo sapiens
ttaatcaaatctctcttgagtccatt

SEQ ID NO: 70501 - DNA, 26 bp, Homo sapiens
taatcaaatctctcttgagtccattt

SEQ ID NO: 70502 - DNA, 26 bp, Homo sapiens
aatcaaatctctcttgagtccatttt

SEQ ID NO: 70503 - DNA, 26 bp, Homo sapiens
atcaaatctctcttgagtccattttg

SEQ ID NO: 70504 - DNA, 26 bp, Homo sapiens
tcaaatctctcttgagtccattttgt

SEQ ID NO: 70505 - DNA, 26 bp, Homo sapiens
caaatctctcttgagtccattttgtt

SEQ ID NO: 70506 - DNA, 26 bp, Homo sapiens
aaatctctcttgagtccattttgttt

SEQ ID NO: 70507 - DNA, 26 bp, Homo sapiens
aatctctcttgagtccattttgtttg

SEQ ID NO: 70508 - DNA, 26 bp, Homo sapiens
atctctcttgagtccattttgtttgc

SEQ ID NO: 70509 - DNA, 26 bp, Homo sapiens
tctctcttgagtccattttgtttgct

SEQ ID NO: 70510 - DNA, 26 bp, Homo sapiens
ctctcttgagtccattttgtttgctg

SEQ ID NO: 70511 - DNA, 26 bp, Homo sapiens
tctcttgagtccattttgtttgctgg

SEQ ID NO: 70512 - DNA, 26 bp, Homo sapiens
ctcttgagtccattttgtttgctgga

SEQ ID NO: 70513 - DNA, 26 bp, Homo sapiens
tcttgagtccattttgtttgctggaa

SEQ ID NO: 70514 - DNA, 26 bp, Homo sapiens
cttgagtccattttgtttgctggaac

SEQ ID NO: 70515 - DNA, 26 bp, Homo sapiens
ttgagtccattttgtttgctggaact

SEQ ID NO: 70516 - DNA, 26 bp, Homo sapiens
tgagtccattttgtttgctggaactc

SEQ ID NO: 70517 - DNA, 26 bp, Homo sapiens
gagtccattttgtttgctggaactcc

SEQ ID NO: 70518 - DNA, 26 bp, Homo sapiens
agtccattttgtttgctggaactccg

SEQ ID NO: 70519 - DNA, 26 bp, Homo sapiens
gtccattttgtttgctggaactccgc

SEQ ID NO: 70520 - DNA, 26 bp, Homo sapiens
tccattttgtttgctggaactccgct

SEQ ID NO: 70521 - DNA, 26 bp, Homo sapiens
ccattttgtttgctggaactccgcta

SEQ ID NO: 70522 - DNA, 26 bp, Homo sapiens
cattttgtttgctggaactccgctag

SEQ ID NO: 70523 - DNA, 26 bp, Homo sapiens
attttgtttgctggaactccgctagg

SEQ ID NO: 70524 - DNA, 26 bp, Homo sapiens
ttttgtttgctggaactccgctaggc

SEQ ID NO: 70525 - DNA, 26 bp, Homo sapiens
tttgtttgctggaactccgctaggca

SEQ ID NO: 70526 - DNA, 26 bp, Homo sapiens
ttgtttgctggaactccgctaggcac

SEQ ID NO: 70527 - DNA, 26 bp, Homo sapiens
tgtttgctggaactccgctaggcact

SEQ ID NO: 70528 - DNA, 26 bp, Homo sapiens
gtttgctggaactccgctaggcactc

SEQ ID NO: 70529 - DNA, 26 bp, Homo sapiens
tttgctggaactccgctaggcactca

SEQ ID NO: 70530 - DNA, 26 bp, Homo sapiens
ttgctggaactccgctaggcactcag

SEQ ID NO: 70531 - DNA, 26 bp, Homo sapiens
tgctggaactccgctaggcactcaga

SEQ ID NO: 70532 - DNA, 26 bp, Homo sapiens
gctggaactccgctaggcactcagag

SEQ ID NO: 70533 - DNA, 26 bp, Homo sapiens
ctggaactccgctaggcactcagagc

SEQ ID NO: 70534 - DNA, 26 bp, Homo sapiens
tggaactccgctaggcactcagagca

SEQ ID NO: 70535 - DNA, 26 bp, Homo sapiens
ggaactccgctaggcactcagagcac

SEQ ID NO: 70536 - DNA, 26 bp, Homo sapiens
gaactccgctaggcactcagagcaca

SEQ ID NO: 70537 - DNA, 26 bp, Homo sapiens
aactccgctaggcactcagagcacag

SEQ ID NO: 70538 - DNA, 26 bp, Homo sapiens
actccgctaggcactcagagcacagc

SEQ ID NO: 70539 - DNA, 26 bp, Homo sapiens
ctccgctaggcactcagagcacagct

SEQ ID NO: 70540 - DNA, 26 bp, Homo sapiens
tccgctaggcactcagagcacagctg

SEQ ID NO: 70541 - DNA, 26 bp, Homo sapiens
ccgctaggcactcagagcacagctgt

SEQ ID NO: 70542 - DNA, 26 bp, Homo sapiens
cgctaggcactcagagcacagctgtg

SEQ ID NO: 70543 - DNA, 26 bp, Homo sapiens
gctaggcactcagagcacagctgtga

SEQ ID NO: 70544 - DNA, 26 bp, Homo sapiens
ctaggcactcagagcacagctgtgag

SEQ ID NO: 70545 - DNA, 26 bp, Homo sapiens
taggcactcagagcacagctgtgagc

SEQ ID NO: 70546 - DNA, 26 bp, Homo sapiens
aggcactcagagcacagctgtgagca

SEQ ID NO: 70547 - DNA, 26 bp, Homo sapiens
ggcactcagagcacagctgtgagcaa

SEQ ID NO: 70548 - DNA, 26 bp, Homo sapiens
gcactcagagcacagctgtgagcaag

SEQ ID NO: 70549 - DNA, 26 bp, Homo sapiens
cactcagagcacagctgtgagcaaga

SEQ ID NO: 70550 - DNA, 26 bp, Homo sapiens
actcagagcacagctgtgagcaagat

SEQ ID NO: 70551 - DNA, 26 bp, Homo sapiens
ctcagagcacagctgtgagcaagatt

SEQ ID NO: 70552 - DNA, 26 bp, Homo sapiens
tcagagcacagctgtgagcaagatta

SEQ ID NO: 70553 - DNA, 26 bp, Homo sapiens
cagagcacagctgtgagcaagattat

SEQ ID NO: 70554 - DNA, 26 bp, Homo sapiens
agagcacagctgtgagcaagattatt

SEQ ID NO: 70555 - DNA, 26 bp, Homo sapiens
gagcacagctgtgagcaagattattc

SEQ ID NO: 70556 - DNA, 26 bp, Homo sapiens
agcacagctgtgagcaagattattct

SEQ ID NO: 70557 - DNA, 26 bp, Homo sapiens
gcacagctgtgagcaagattattcta

SEQ ID NO: 70558 - DNA, 26 bp, Homo sapiens
cacagctgtgagcaagattattctag

SEQ ID NO: 70559 - DNA, 26 bp, Homo sapiens
acagctgtgagcaagattattctaga

SEQ ID NO: 70560 - DNA, 26 bp, Homo sapiens
cagctgtgagcaagattattctagat

SEQ ID NO: 70561 - DNA, 26 bp, Homo sapiens
agctgtgagcaagattattctagatc

SEQ ID NO: 70562 - DNA, 26 bp, Homo sapiens
gctgtgagcaagattattctagatcc

SEQ ID NO: 70563 - DNA, 26 bp, Homo sapiens
ctgtgagcaagattattctagatcct

SEQ ID NO: 70564 - DNA, 26 bp, Homo sapiens
tgtgagcaagattattctagatcctg

SEQ ID NO: 70565 - DNA, 26 bp, Homo sapiens
gtgagcaagattattctagatcctgt

SEQ ID NO: 70566 - DNA, 26 bp, Homo sapiens
tgagcaagattattctagatcctgtc

SEQ ID NO: 70567 - DNA, 26 bp, Homo sapiens
gagcaagattattctagatcctgtct

SEQ ID NO: 70568 - DNA, 26 bp, Homo sapiens
agcaagattattctagatcctgtctt

SEQ ID NO: 70569 - DNA, 26 bp, Homo sapiens
gcaagattattctagatcctgtcttc

SEQ ID NO: 70570 - DNA, 26 bp, Homo sapiens
caagattattctagatcctgtcttca

SEQ ID NO: 70571 - DNA, 26 bp, Homo sapiens
aagattattctagatcctgtcttcat

SEQ ID NO: 70572 - DNA, 26 bp, Homo sapiens
agattattctagatcctgtcttcata

SEQ ID NO: 70573 - DNA, 26 bp, Homo sapiens
gattattctagatcctgtcttcatag

SEQ ID NO: 70574 - DNA, 26 bp, Homo sapiens
attattctagatcctgtcttcatagc

SEQ ID NO: 70575 - DNA, 26 bp, Homo sapiens
ttattctagatcctgtcttcatagca

SEQ ID NO: 70576 - DNA, 26 bp, Homo sapiens
tattctagatcctgtcttcatagcac

SEQ ID NO: 70577 - DNA, 26 bp, Homo sapiens
attctagatcctgtcttcatagcact

SEQ ID NO: 70578 - DNA, 26 bp, Homo sapiens
ttctagatcctgtcttcatagcactc

SEQ ID NO: 70579 - DNA, 26 bp, Homo sapiens
tctagatcctgtcttcatagcactct

SEQ ID NO: 70580 - DNA, 26 bp, Homo sapiens
ctagatcctgtcttcatagcactctc

SEQ ID NO: 70581 - DNA, 26 bp, Homo sapiens
tagatcctgtcttcatagcactctca

SEQ ID NO: 70582 - DNA, 26 bp, Homo sapiens
agatcctgtcttcatagcactctcag

SEQ ID NO: 70583 - DNA, 26 bp, Homo sapiens
gatcctgtcttcatagcactctcagc

SEQ ID NO: 70584 - DNA, 26 bp, Homo sapiens
atcctgtcttcatagcactctcagct

SEQ ID NO: 70585 - DNA, 26 bp, Homo sapiens
tcctgtcttcatagcactctcagctt

SEQ ID NO: 70586 - DNA, 26 bp, Homo sapiens
cctgtcttcatagcactctcagctta

SEQ ID NO: 70587 - DNA, 26 bp, Homo sapiens
ctgtcttcatagcactctcagcttaa

SEQ ID NO: 70588 - DNA, 26 bp, Homo sapiens
tgtcttcatagcactctcagcttaat

SEQ ID NO: 70589 - DNA, 26 bp, Homo sapiens
gtcttcatagcactctcagcttaatg

SEQ ID NO: 70590 - DNA, 26 bp, Homo sapiens
tcttcatagcactctcagcttaatgg

SEQ ID NO: 70591 - DNA, 26 bp, Homo sapiens
cttcatagcactctcagcttaatgga

SEQ ID NO: 70592 - DNA, 26 bp, Homo sapiens
ttcatagcactctcagcttaatggac

SEQ ID NO: 70593 - DNA, 26 bp, Homo sapiens
tcatagcactctcagcttaatggacg

SEQ ID NO: 70594 - DNA, 26 bp, Homo sapiens
catagcactctcagcttaatggacgt

SEQ ID NO: 70595 - DNA, 26 bp, Homo sapiens
atagcactctcagcttaatggacgtt

SEQ ID NO: 70596 - DNA, 26 bp, Homo sapiens
tagcactctcagcttaatggacgttt

SEQ ID NO: 70597 - DNA, 26 bp, Homo sapiens
agcactctcagcttaatggacgttta

SEQ ID NO: 70598 - DNA, 26 bp, Homo sapiens
gcactctcagcttaatggacgtttag

SEQ ID NO: 70599 - DNA, 26 bp, Homo sapiens
cactctcagcttaatggacgtttaga

SEQ ID NO: 70600 - DNA, 26 bp, Homo sapiens
actctcagcttaatggacgtttagac

SEQ ID NO: 70601 - DNA, 26 bp, Homo sapiens
ctctcagcttaatggacgtttagaca

SEQ ID NO: 70602 - DNA, 26 bp, Homo sapiens
tctcagcttaatggacgtttagacaa

SEQ ID NO: 70603 - DNA, 26 bp, Homo sapiens
ctcagcttaatggacgtttagacaag

SEQ ID NO: 70604 - DNA, 26 bp, Homo sapiens
tcagcttaatggacgtttagacaaga

SEQ ID NO: 70605 - DNA, 26 bp, Homo sapiens
cagcttaatggacgtttagacaagag

SEQ ID NO: 70606 - DNA, 26 bp, Homo sapiens
agcttaatggacgtttagacaagaga

SEQ ID NO: 70607 - DNA, 26 bp, Homo sapiens
gcttaatggacgtttagacaagagac

SEQ ID NO: 70608 - DNA, 26 bp, Homo sapiens
cttaatggacgtttagacaagagaca

SEQ ID NO: 70609 - DNA, 26 bp, Homo sapiens
ttaatggacgtttagacaagagacac

SEQ ID NO: 70610 - DNA, 26 bp, Homo sapiens
taatggacgtttagacaagagacact

SEQ ID NO: 70611 - DNA, 26 bp, Homo sapiens
aatggacgtttagacaagagacactc

SEQ ID NO: 70612 - DNA, 26 bp, Homo sapiens
atggacgtttagacaagagacactca

SEQ ID NO: 70613 - DNA, 26 bp, Homo sapiens
tggacgtttagacaagagacactcac

SEQ ID NO: 70614 - DNA, 26 bp, Homo sapiens
ggacgtttagacaagagacactcacg

SEQ ID NO: 70615 - DNA, 26 bp, Homo sapiens
gacgtttagacaagagacactcacga

SEQ ID NO: 70616 - DNA, 26 bp, Homo sapiens
acgtttagacaagagacactcacgac

SEQ ID NO: 70617 - DNA, 26 bp, Homo sapiens
cgtttagacaagagacactcacgaca

SEQ ID NO: 70618 - DNA, 26 bp, Homo sapiens
gtttagacaagagacactcacgacag

SEQ ID NO: 70619 - DNA, 26 bp, Homo sapiens
tttagacaagagacactcacgacaga

SEQ ID NO: 70620 - DNA, 26 bp, Homo sapiens
ttagacaagagacactcacgacagag

SEQ ID NO: 70621 - DNA, 26 bp, Homo sapiens
tagacaagagacactcacgacagaga

SEQ ID NO: 70622 - DNA, 26 bp, Homo sapiens
agacaagagacactcacgacagagaa

SEQ ID NO: 70623 - DNA, 26 bp, Homo sapiens
gacaagagacactcacgacagagaac

SEQ ID NO: 70624 - DNA, 26 bp, Homo sapiens
acaagagacactcacgacagagaaca

SEQ ID NO: 70625 - DNA, 26 bp, Homo sapiens
caagagacactcacgacagagaacag

SEQ ID NO: 70626 - DNA, 26 bp, Homo sapiens
aagagacactcacgacagagaacagc

SEQ ID NO: 70627 - DNA, 26 bp, Homo sapiens
agagacactcacgacagagaacagct

SEQ ID NO: 70628 - DNA, 26 bp, Homo sapiens
gagacactcacgacagagaacagctc

SEQ ID NO: 70629 - DNA, 26 bp, Homo sapiens
agacactcacgacagagaacagctcc

SEQ ID NO: 70630 - DNA, 26 bp, Homo sapiens
gacactcacgacagagaacagctccc

SEQ ID NO: 70631 - DNA, 26 bp, Homo sapiens
acactcacgacagagaacagctccca

SEQ ID NO: 70632 - DNA, 26 bp, Homo sapiens
cactcacgacagagaacagctcccag

SEQ ID NO: 70633 - DNA, 26 bp, Homo sapiens
actcacgacagagaacagctcccagg

SEQ ID NO: 70634 - DNA, 26 bp, Homo sapiens
ctcacgacagagaacagctcccaggg

SEQ ID NO: 70635 - DNA, 26 bp, Homo sapiens
tcacgacagagaacagctcccaggga

SEQ ID NO: 70636 - DNA, 26 bp, Homo sapiens
cacgacagagaacagctcccagggaa

SEQ ID NO: 70637 - DNA, 26 bp, Homo sapiens
acgacagagaacagctcccagggaaa

SEQ ID NO: 70638 - DNA, 26 bp, Homo sapiens
cgacagagaacagctcccagggaaat

SEQ ID NO: 70639 - DNA, 26 bp, Homo sapiens
gacagagaacagctcccagggaaatc

SEQ ID NO: 70640 - DNA, 26 bp, Homo sapiens
acagagaacagctcccagggaaatca

SEQ ID NO: 70641 - DNA, 26 bp, Homo sapiens
cagagaacagctcccagggaaatcaa

SEQ ID NO: 70642 - DNA, 26 bp, Homo sapiens
agagaacagctcccagggaaatcaaa

SEQ ID NO: 70643 - DNA, 26 bp, Homo sapiens
gagaacagctcccagggaaatcaaag

SEQ ID NO: 70644 - DNA, 26 bp, Homo sapiens
agaacagctcccagggaaatcaaagc

SEQ ID NO: 70645 - DNA, 26 bp, Homo sapiens
gaacagctcccagggaaatcaaagca

SEQ ID NO: 70646 - DNA, 26 bp, Homo sapiens
aacagctcccagggaaatcaaagcaa

SEQ ID NO: 70647 - DNA, 26 bp, Homo sapiens
acagctcccagggaaatcaaagcaaa

SEQ ID NO: 70648 - DNA, 26 bp, Homo sapiens
cagctcccagggaaatcaaagcaaac

SEQ ID NO: 70649 - DNA, 26 bp, Homo sapiens
agctcccagggaaatcaaagcaaacc

SEQ ID NO: 70650 - DNA, 26 bp, Homo sapiens
gctcccagggaaatcaaagcaaaccg

SEQ ID NO: 70651 - DNA, 26 bp, Homo sapiens
ctcccagggaaatcaaagcaaaccga

SEQ ID NO: 70652 - DNA, 26 bp, Homo sapiens
tcccagggaaatcaaagcaaaccgac

SEQ ID NO: 70653 - DNA, 26 bp, Homo sapiens
cccagggaaatcaaagcaaaccgaca

SEQ ID NO: 70654 - DNA, 26 bp, Homo sapiens
ccagggaaatcaaagcaaaccgacag

SEQ ID NO: 70655 - DNA, 26 bp, Homo sapiens
cagggaaatcaaagcaaaccgacagt

SEQ ID NO: 70656 - DNA, 26 bp, Homo sapiens
agggaaatcaaagcaaaccgacagtt

SEQ ID NO: 70657 - DNA, 26 bp, Homo sapiens
gggaaatcaaagcaaaccgacagttt

SEQ ID NO: 70658 - DNA, 26 bp, Homo sapiens
ggaaatcaaagcaaaccgacagtttc

SEQ ID NO: 70659 - DNA, 26 bp, Homo sapiens
gaaatcaaagcaaaccgacagtttcc

SEQ ID NO: 70660 - DNA, 26 bp, Homo sapiens
aaatcaaagcaaaccgacagtttcct

SEQ ID NO: 70661 - DNA, 26 bp, Homo sapiens
aatcaaagcaaaccgacagtttccta

SEQ ID NO: 70662 - DNA, 26 bp, Homo sapiens
atcaaagcaaaccgacagtttcctaa

SEQ ID NO: 70663 - DNA, 26 bp, Homo sapiens
tcaaagcaaaccgacagtttcctaat

SEQ ID NO: 70664 - DNA, 26 bp, Homo sapiens
caaagcaaaccgacagtttcctaatg

SEQ ID NO: 70665 - DNA, 26 bp, Homo sapiens
aaagcaaaccgacagtttcctaatgg

SEQ ID NO: 70666 - DNA, 26 bp, Homo sapiens
aagcaaaccgacagtttcctaatggc

SEQ ID NO: 70667 - DNA, 26 bp, Homo sapiens
agcaaaccgacagtttcctaatggcc

SEQ ID NO: 70668 - DNA, 26 bp, Homo sapiens
gcaaaccgacagtttcctaatggccc

SEQ ID NO: 70669 - DNA, 26 bp, Homo sapiens
caaaccgacagtttcctaatggccca

SEQ ID NO: 70670 - DNA, 26 bp, Homo sapiens
aaaccgacagtttcctaatggcccac

SEQ ID NO: 70671 - DNA, 26 bp, Homo sapiens
aaccgacagtttcctaatggcccact

SEQ ID NO: 70672 - DNA, 26 bp, Homo sapiens
accgacagtttcctaatggcccacta

SEQ ID NO: 70673 - DNA, 26 bp, Homo sapiens
ccgacagtttcctaatggcccactac

SEQ ID NO: 70674 - DNA, 26 bp, Homo sapiens
cgacagtttcctaatggcccactaca

SEQ ID NO: 70675 - DNA, 26 bp, Homo sapiens
gacagtttcctaatggcccactacaa

SEQ ID NO: 70676 - DNA, 26 bp, Homo sapiens
acagtttcctaatggcccactacaac

SEQ ID NO: 70677 - DNA, 26 bp, Homo sapiens
cagtttcctaatggcccactacaacc

SEQ ID NO: 70678 - DNA, 26 bp, Homo sapiens
agtttcctaatggcccactacaacct

SEQ ID NO: 70679 - DNA, 26 bp, Homo sapiens
gtttcctaatggcccactacaacctg

SEQ ID NO: 70680 - DNA, 26 bp, Homo sapiens
tttcctaatggcccactacaacctga

SEQ ID NO: 70681 - DNA, 26 bp, Homo sapiens
ttcctaatggcccactacaacctgag

SEQ ID NO: 70682 - DNA, 26 bp, Homo sapiens
tcctaatggcccactacaacctgagc

SEQ ID NO: 70683 - DNA, 26 bp, Homo sapiens
cctaatggcccactacaacctgagct

SEQ ID NO: 70684 - DNA, 26 bp, Homo sapiens
ctaatggcccactacaacctgagctg

SEQ ID NO: 70685 - DNA, 26 bp, Homo sapiens
taatggcccactacaacctgagctgc

SEQ ID NO: 70686 - DNA, 26 bp, Homo sapiens
aatggcccactacaacctgagctgct

SEQ ID NO: 70687 - DNA, 26 bp, Homo sapiens
atggcccactacaacctgagctgctt

SEQ ID NO: 70688 - DNA, 26 bp, Homo sapiens
tggcccactacaacctgagctgcttt

SEQ ID NO: 70689 - DNA, 26 bp, Homo sapiens
ggcccactacaacctgagctgcttta

SEQ ID NO: 70690 - DNA, 26 bp, Homo sapiens
gcccactacaacctgagctgctttat

SEQ ID NO: 70691 - DNA, 26 bp, Homo sapiens
cccactacaacctgagctgctttatc

SEQ ID NO: 70692 - DNA, 26 bp, Homo sapiens
ccactacaacctgagctgctttatcc

SEQ ID NO: 70693 - DNA, 26 bp, Homo sapiens
cactacaacctgagctgctttatcca

SEQ ID NO: 70694 - DNA, 26 bp, Homo sapiens
actacaacctgagctgctttatccaa

SEQ ID NO: 70695 - DNA, 26 bp, Homo sapiens
ctacaacctgagctgctttatccaat

SEQ ID NO: 70696 - DNA, 26 bp, Homo sapiens
tacaacctgagctgctttatccaatt

SEQ ID NO: 70697 - DNA, 26 bp, Homo sapiens
acaacctgagctgctttatccaattg

SEQ ID NO: 70698 - DNA, 26 bp, Homo sapiens
caacctgagctgctttatccaattgg

SEQ ID NO: 70699 - DNA, 26 bp, Homo sapiens
aacctgagctgctttatccaattggt

SEQ ID NO: 70700 - DNA, 26 bp, Homo sapiens
acctgagctgctttatccaattggtg

SEQ ID NO: 70701 - DNA, 26 bp, Homo sapiens
cctgagctgctttatccaattggtga

SEQ ID NO: 70702 - DNA, 26 bp, Homo sapiens
ctgagctgctttatccaattggtgac

SEQ ID NO: 70703 - DNA, 26 bp, Homo sapiens
tgagctgctttatccaattggtgaca

SEQ ID NO: 70704 - DNA, 26 bp, Homo sapiens
gagctgctttatccaattggtgacaa

SEQ ID NO: 70705 - DNA, 26 bp, Homo sapiens
agctgctttatccaattggtgacaat

SEQ ID NO: 70706 - DNA, 26 bp, Homo sapiens
gctgctttatccaattggtgacaatt

SEQ ID NO: 70707 - DNA, 26 bp, Homo sapiens
ctgctttatccaattggtgacaattg

SEQ ID NO: 70708 - DNA, 26 bp, Homo sapiens
tgctttatccaattggtgacaattgt

SEQ ID NO: 70709 - DNA, 26 bp, Homo sapiens
gctttatccaattggtgacaattgtc

SEQ ID NO: 70710 - DNA, 26 bp, Homo sapiens
ctttatccaattggtgacaattgtca

SEQ ID NO: 70711 - DNA, 26 bp, Homo sapiens
tttatccaattggtgacaattgtcac

SEQ ID NO: 70712 - DNA, 26 bp, Homo sapiens
ttatccaattggtgacaattgtcacc

SEQ ID NO: 70713 - DNA, 26 bp, Homo sapiens
tatccaattggtgacaattgtcacca

SEQ ID NO: 70714 - DNA, 26 bp, Homo sapiens
atccaattggtgacaattgtcaccaa

SEQ ID NO: 70715 - DNA, 26 bp, Homo sapiens
tccaattggtgacaattgtcaccaac

SEQ ID NO: 70716 - DNA, 26 bp, Homo sapiens
ccaattggtgacaattgtcaccaaca

SEQ ID NO: 70717 - DNA, 26 bp, Homo sapiens
caattggtgacaattgtcaccaacac

SEQ ID NO: 70718 - DNA, 26 bp, Homo sapiens
aattggtgacaattgtcaccaacacc

SEQ ID NO: 70719 - DNA, 26 bp, Homo sapiens
attggtgacaattgtcaccaacacct

SEQ ID NO: 70720 - DNA, 26 bp, Homo sapiens
ttggtgacaattgtcaccaacacctg

SEQ ID NO: 70721 - DNA, 26 bp, Homo sapiens
tggtgacaattgtcaccaacacctgt

SEQ ID NO: 70722 - DNA, 26 bp, Homo sapiens
ggtgacaattgtcaccaacacctgtt

SEQ ID NO: 70723 - DNA, 26 bp, Homo sapiens
gtgacaattgtcaccaacacctgttc

SEQ ID NO: 70724 - DNA, 26 bp, Homo sapiens
tgacaattgtcaccaacacctgttct

SEQ ID NO: 70725 - DNA, 26 bp, Homo sapiens
gacaattgtcaccaacacctgttctg

SEQ ID NO: 70726 - DNA, 26 bp, Homo sapiens
acaattgtcaccaacacctgttctgc

SEQ ID NO: 70727 - DNA, 26 bp, Homo sapiens
caattgtcaccaacacctgttctgcc

SEQ ID NO: 70728 - DNA, 26 bp, Homo sapiens
aattgtcaccaacacctgttctgcca

SEQ ID NO: 70729 - DNA, 26 bp, Homo sapiens
attgtcaccaacacctgttctgccat

SEQ ID NO: 70730 - DNA, 26 bp, Homo sapiens
ttgtcaccaacacctgttctgccatt

SEQ ID NO: 70731 - DNA, 26 bp, Homo sapiens
tgtcaccaacacctgttctgccattg

SEQ ID NO: 70732 - DNA, 26 bp, Homo sapiens
gtcaccaacacctgttctgccattgt

SEQ ID NO: 70733 - DNA, 26 bp, Homo sapiens
tcaccaacacctgttctgccattgtc

SEQ ID NO: 70734 - DNA, 26 bp, Homo sapiens
caccaacacctgttctgccattgtcc

SEQ ID NO: 70735 - DNA, 26 bp, Homo sapiens
accaacacctgttctgccattgtccc

SEQ ID NO: 70736 - DNA, 26 bp, Homo sapiens
ccaacacctgttctgccattgtcccc

SEQ ID NO: 70737 - DNA, 26 bp, Homo sapiens
caacacctgttctgccattgtcccct

SEQ ID NO: 70738 - DNA, 26 bp, Homo sapiens
aacacctgttctgccattgtcccctt

SEQ ID NO: 70739 - DNA, 26 bp, Homo sapiens
acacctgttctgccattgtccccttc

SEQ ID NO: 70740 - DNA, 26 bp, Homo sapiens
cacctgttctgccattgtccccttct

SEQ ID NO: 70741 - DNA, 26 bp, Homo sapiens
acctgttctgccattgtccccttctt

SEQ ID NO: 70742 - DNA, 26 bp, Homo sapiens
cctgttctgccattgtccccttcttc

SEQ ID NO: 70743 - DNA, 26 bp, Homo sapiens
ctgttctgccattgtccccttcttcc

SEQ ID NO: 70744 - DNA, 26 bp, Homo sapiens
tgttctgccattgtccccttcttccc

SEQ ID NO: 70745 - DNA, 26 bp, Homo sapiens
gttctgccattgtccccttcttcccg

SEQ ID NO: 70746 - DNA, 26 bp, Homo sapiens
ttctgccattgtccccttcttcccga

SEQ ID NO: 70747 - DNA, 26 bp, Homo sapiens
tctgccattgtccccttcttcccgaa

SEQ ID NO: 70748 - DNA, 26 bp, Homo sapiens
ctgccattgtccccttcttcccgaag

SEQ ID NO: 70749 - DNA, 26 bp, Homo sapiens
tgccattgtccccttcttcccgaagc

SEQ ID NO: 70750 - DNA, 26 bp, Homo sapiens
gccattgtccccttcttcccgaagca

SEQ ID NO: 70751 - DNA, 26 bp, Homo sapiens
ccattgtccccttcttcccgaagcac

SEQ ID NO: 70752 - DNA, 26 bp, Homo sapiens
cattgtccccttcttcccgaagcact

SEQ ID NO: 70753 - DNA, 26 bp, Homo sapiens
attgtccccttcttcccgaagcactt

SEQ ID NO: 70754 - DNA, 26 bp, Homo sapiens
ttgtccccttcttcccgaagcacttc

SEQ ID NO: 70755 - DNA, 26 bp, Homo sapiens
tgtccccttcttcccgaagcacttcc

SEQ ID NO: 70756 - DNA, 26 bp, Homo sapiens
gtccccttcttcccgaagcacttcca

SEQ ID NO: 70757 - DNA, 26 bp, Homo sapiens
tccccttcttcccgaagcacttccag

SEQ ID NO: 70758 - DNA, 26 bp, Homo sapiens
ccccttcttcccgaagcacttccagg

SEQ ID NO: 70759 - DNA, 26 bp, Homo sapiens
cccttcttcccgaagcacttccaggt

SEQ ID NO: 70760 - DNA, 26 bp, Homo sapiens
ccttcttcccgaagcacttccaggtt

SEQ ID NO: 70761 - DNA, 26 bp, Homo sapiens
cttcttcccgaagcacttccaggttg

SEQ ID NO: 70762 - DNA, 26 bp, Homo sapiens
ttcttcccgaagcacttccaggttgt

SEQ ID NO: 70763 - DNA, 26 bp, Homo sapiens
tcttcccgaagcacttccaggttgtg

SEQ ID NO: 70764 - DNA, 26 bp, Homo sapiens
cttcccgaagcacttccaggttgtga

SEQ ID NO: 70765 - DNA, 26 bp, Homo sapiens
ttcccgaagcacttccaggttgtgaa

SEQ ID NO: 70766 - DNA, 26 bp, Homo sapiens
tcccgaagcacttccaggttgtgaac

SEQ ID NO: 70767 - DNA, 26 bp, Homo sapiens
cccgaagcacttccaggttgtgaaca

SEQ ID NO: 70768 - DNA, 26 bp, Homo sapiens
ccgaagcacttccaggttgtgaacac

SEQ ID NO: 70769 - DNA, 26 bp, Homo sapiens
cgaagcacttccaggttgtgaacact

SEQ ID NO: 70770 - DNA, 26 bp, Homo sapiens
gaagcacttccaggttgtgaacactt

SEQ ID NO: 70771 - DNA, 26 bp, Homo sapiens
aagcacttccaggttgtgaacacttg

SEQ ID NO: 70772 - DNA, 26 bp, Homo sapiens
agcacttccaggttgtgaacacttga

SEQ ID NO: 70773 - DNA, 26 bp, Homo sapiens
gcacttccaggttgtgaacacttgag

SEQ ID NO: 70774 - DNA, 26 bp, Homo sapiens
cacttccaggttgtgaacacttgagc

SEQ ID NO: 70775 - DNA, 26 bp, Homo sapiens
acttccaggttgtgaacacttgagct

SEQ ID NO: 70776 - DNA, 26 bp, Homo sapiens
cttccaggttgtgaacacttgagctt

SEQ ID NO: 70777 - DNA, 26 bp, Homo sapiens
ttccaggttgtgaacacttgagcttg

SEQ ID NO: 70778 - DNA, 26 bp, Homo sapiens
tccaggttgtgaacacttgagcttgt

SEQ ID NO: 70779 - DNA, 26 bp, Homo sapiens
ccaggttgtgaacacttgagcttgtc

SEQ ID NO: 70780 - DNA, 26 bp, Homo sapiens
caggttgtgaacacttgagcttgtct

SEQ ID NO: 70781 - DNA, 26 bp, Homo sapiens
aggttgtgaacacttgagcttgtctt

SEQ ID NO: 70782 - DNA, 26 bp, Homo sapiens
ggttgtgaacacttgagcttgtcttt

SEQ ID NO: 70783 - DNA, 26 bp, Homo sapiens
gttgtgaacacttgagcttgtctttc

SEQ ID NO: 70784 - DNA, 26 bp, Homo sapiens
ttgtgaacacttgagcttgtctttcc

SEQ ID NO: 70785 - DNA, 26 bp, Homo sapiens
tgtgaacacttgagcttgtctttcca

SEQ ID NO: 70786 - DNA, 26 bp, Homo sapiens
gtgaacacttgagcttgtctttccac

SEQ ID NO: 70787 - DNA, 26 bp, Homo sapiens
tgaacacttgagcttgtctttccacc

SEQ ID NO: 70788 - DNA, 26 bp, Homo sapiens
gaacacttgagcttgtctttccacct

SEQ ID NO: 70789 - DNA, 26 bp, Homo sapiens
aacacttgagcttgtctttccacctc

SEQ ID NO: 70790 - DNA, 26 bp, Homo sapiens
acacttgagcttgtctttccacctcc

SEQ ID NO: 70791 - DNA, 26 bp, Homo sapiens
cacttgagcttgtctttccacctcca

SEQ ID NO: 70792 - DNA, 26 bp, Homo sapiens
acttgagcttgtctttccacctccat

SEQ ID NO: 70793 - DNA, 26 bp, Homo sapiens
cttgagcttgtctttccacctccatt

SEQ ID NO: 70794 - DNA, 26 bp, Homo sapiens
ttgagcttgtctttccacctccattt

SEQ ID NO: 70795 - DNA, 26 bp, Homo sapiens
tgagcttgtctttccacctccatttt

SEQ ID NO: 70796 - DNA, 26 bp, Homo sapiens
gagcttgtctttccacctccatttta

SEQ ID NO: 70797 - DNA, 26 bp, Homo sapiens
agcttgtctttccacctccattttac

SEQ ID NO: 70798 - DNA, 26 bp, Homo sapiens
gcttgtctttccacctccattttaca

SEQ ID NO: 70799 - DNA, 26 bp, Homo sapiens
cttgtctttccacctccattttacag

SEQ ID NO: 70800 - DNA, 26 bp, Homo sapiens
ttgtctttccacctccattttacagg

SEQ ID NO: 70801 - DNA, 26 bp, Homo sapiens
tgtctttccacctccattttacaggg

SEQ ID NO: 70802 - DNA, 26 bp, Homo sapiens
gtctttccacctccattttacagggt

SEQ ID NO: 70803 - DNA, 26 bp, Homo sapiens
tctttccacctccattttacagggtc

SEQ ID NO: 70804 - DNA, 26 bp, Homo sapiens
ctttccacctccattttacagggtca

SEQ ID NO: 70805 - DNA, 26 bp, Homo sapiens
tttccacctccattttacagggtcag

SEQ ID NO: 70806 - DNA, 26 bp, Homo sapiens
ttccacctccattttacagggtcagg

SEQ ID NO: 70807 - DNA, 26 bp, Homo sapiens
tccacctccattttacagggtcaggc

SEQ ID NO: 70808 - DNA, 26 bp, Homo sapiens
ccacctccattttacagggtcaggct

SEQ ID NO: 70809 - DNA, 26 bp, Homo sapiens
cacctccattttacagggtcaggctt

SEQ ID NO: 70810 - DNA, 26 bp, Homo sapiens
acctccattttacagggtcaggcttg

SEQ ID NO: 70811 - DNA, 26 bp, Homo sapiens
cctccattttacagggtcaggcttgt

SEQ ID NO: 70812 - DNA, 26 bp, Homo sapiens
ctccattttacagggtcaggcttgtt

SEQ ID NO: 70813 - DNA, 26 bp, Homo sapiens
tccattttacagggtcaggcttgttg

SEQ ID NO: 70814 - DNA, 26 bp, Homo sapiens
ccattttacagggtcaggcttgttga

SEQ ID NO: 70815 - DNA, 26 bp, Homo sapiens
cattttacagggtcaggcttgttgac

SEQ ID NO: 70816 - DNA, 26 bp, Homo sapiens
attttacagggtcaggcttgttgact

SEQ ID NO: 70817 - DNA, 26 bp, Homo sapiens
ttttacagggtcaggcttgttgactg

SEQ ID NO: 70818 - DNA, 26 bp, Homo sapiens
tttacagggtcaggcttgttgactgt

SEQ ID NO: 70819 - DNA, 26 bp, Homo sapiens
ttacagggtcaggcttgttgactgta

SEQ ID NO: 70820 - DNA, 26 bp, Homo sapiens
tacagggtcaggcttgttgactgtat

SEQ ID NO: 70821 - DNA, 26 bp, Homo sapiens
acagggtcaggcttgttgactgtatc

SEQ ID NO: 70822 - DNA, 26 bp, Homo sapiens
cagggtcaggcttgttgactgtatca

SEQ ID NO: 70823 - DNA, 26 bp, Homo sapiens
agggtcaggcttgttgactgtatcaa

SEQ ID NO: 70824 - DNA, 26 bp, Homo sapiens
gggtcaggcttgttgactgtatcaaa

SEQ ID NO: 70825 - DNA, 26 bp, Homo sapiens
ggtcaggcttgttgactgtatcaaag

SEQ ID NO: 70826 - DNA, 26 bp, Homo sapiens
gtcaggcttgttgactgtatcaaagg

SEQ ID NO: 70827 - DNA, 26 bp, Homo sapiens
tcaggcttgttgactgtatcaaaggg

SEQ ID NO: 70828 - DNA, 26 bp, Homo sapiens
caggcttgttgactgtatcaaaggga

SEQ ID NO: 70829 - DNA, 26 bp, Homo sapiens
aggcttgttgactgtatcaaagggaa

SEQ ID NO: 70830 - DNA, 26 bp, Homo sapiens
ggcttgttgactgtatcaaagggaaa

SEQ ID NO: 70831 - DNA, 26 bp, Homo sapiens
gcttgttgactgtatcaaagggaaat

SEQ ID NO: 70832 - DNA, 26 bp, Homo sapiens
cttgttgactgtatcaaagggaaatg

SEQ ID NO: 70833 - DNA, 26 bp, Homo sapiens
ttgttgactgtatcaaagggaaatga

SEQ ID NO: 70834 - DNA, 26 bp, Homo sapiens
tgttgactgtatcaaagggaaatgag

SEQ ID NO: 70835 - DNA, 26 bp, Homo sapiens
gttgactgtatcaaagggaaatgaga

SEQ ID NO: 70836 - DNA, 26 bp, Homo sapiens
ttgactgtatcaaagggaaatgagag

SEQ ID NO: 70837 - DNA, 26 bp, Homo sapiens
tgactgtatcaaagggaaatgagagg

SEQ ID NO: 70838 - DNA, 26 bp, Homo sapiens
gactgtatcaaagggaaatgagagga

SEQ ID NO: 70839 - DNA, 26 bp, Homo sapiens
actgtatcaaagggaaatgagaggaa

SEQ ID NO: 70840 - DNA, 26 bp, Homo sapiens
ctgtatcaaagggaaatgagaggaaa

SEQ ID NO: 70841 - DNA, 26 bp, Homo sapiens
tgtatcaaagggaaatgagaggaaac

SEQ ID NO: 70842 - DNA, 26 bp, Homo sapiens
gtatcaaagggaaatgagaggaaaca

SEQ ID NO: 70843 - DNA, 26 bp, Homo sapiens
tatcaaagggaaatgagaggaaacac

SEQ ID NO: 70844 - DNA, 26 bp, Homo sapiens
atcaaagggaaatgagaggaaacact

SEQ ID NO: 70845 - DNA, 26 bp, Homo sapiens
tcaaagggaaatgagaggaaacacta

SEQ ID NO: 70846 - DNA, 26 bp, Homo sapiens
caaagggaaatgagaggaaacactag

SEQ ID NO: 70847 - DNA, 26 bp, Homo sapiens
aaagggaaatgagaggaaacactagc

SEQ ID NO: 70848 - DNA, 26 bp, Homo sapiens
aagggaaatgagaggaaacactagcc

SEQ ID NO: 70849 - DNA, 26 bp, Homo sapiens
agggaaatgagaggaaacactagccg

SEQ ID NO: 70850 - DNA, 26 bp, Homo sapiens
gggaaatgagaggaaacactagccgg

SEQ ID NO: 70851 - DNA, 26 bp, Homo sapiens
ggaaatgagaggaaacactagccggc

SEQ ID NO: 70852 - DNA, 26 bp, Homo sapiens
gaaatgagaggaaacactagccggcc

SEQ ID NO: 70853 - DNA, 26 bp, Homo sapiens
aaatgagaggaaacactagccggcca

SEQ ID NO: 70854 - DNA, 26 bp, Homo sapiens
aatgagaggaaacactagccggccaa

SEQ ID NO: 70855 - DNA, 26 bp, Homo sapiens
atgagaggaaacactagccggccaat

SEQ ID NO: 70856 - DNA, 26 bp, Homo sapiens
tgagaggaaacactagccggccaatc

SEQ ID NO: 70857 - DNA, 26 bp, Homo sapiens
gagaggaaacactagccggccaatcc

SEQ ID NO: 70858 - DNA, 26 bp, Homo sapiens
agaggaaacactagccggccaatcct

SEQ ID NO: 70859 - DNA, 26 bp, Homo sapiens
gaggaaacactagccggccaatcctg

SEQ ID NO: 70860 - DNA, 26 bp, Homo sapiens
aggaaacactagccggccaatcctgc

SEQ ID NO: 70861 - DNA, 26 bp, Homo sapiens
ggaaacactagccggccaatcctgct

SEQ ID NO: 70862 - DNA, 26 bp, Homo sapiens
gaaacactagccggccaatcctgctg

SEQ ID NO: 70863 - DNA, 26 bp, Homo sapiens
aaacactagccggccaatcctgctgc

SEQ ID NO: 70864 - DNA, 26 bp, Homo sapiens
aacactagccggccaatcctgctgct

SEQ ID NO: 70865 - DNA, 26 bp, Homo sapiens
acactagccggccaatcctgctgctt

SEQ ID NO: 70866 - DNA, 26 bp, Homo sapiens
cactagccggccaatcctgctgctta

SEQ ID NO: 70867 - DNA, 26 bp, Homo sapiens
actagccggccaatcctgctgcttat

SEQ ID NO: 70868 - DNA, 26 bp, Homo sapiens
ctagccggccaatcctgctgcttata

SEQ ID NO: 70869 - DNA, 26 bp, Homo sapiens
tagccggccaatcctgctgcttataa

SEQ ID NO: 70870 - DNA, 26 bp, Homo sapiens
agccggccaatcctgctgcttataac

SEQ ID NO: 70871 - DNA, 26 bp, Homo sapiens
gccggccaatcctgctgcttataacc

SEQ ID NO: 70872 - DNA, 26 bp, Homo sapiens
ccggccaatcctgctgcttataacca

SEQ ID NO: 70873 - DNA, 26 bp, Homo sapiens
cggccaatcctgctgcttataaccag

SEQ ID NO: 70874 - DNA, 26 bp, Homo sapiens
ggccaatcctgctgcttataaccagc

SEQ ID NO: 70875 - DNA, 26 bp, Homo sapiens
gccaatcctgctgcttataaccagca

SEQ ID NO: 70876 - DNA, 26 bp, Homo sapiens
ccaatcctgctgcttataaccagcaa

SEQ ID NO: 70877 - DNA, 26 bp, Homo sapiens
caatcctgctgcttataaccagcaac

SEQ ID NO: 70878 - DNA, 26 bp, Homo sapiens
aatcctgctgcttataaccagcaaca

SEQ ID NO: 70879 - DNA, 26 bp, Homo sapiens
atcctgctgcttataaccagcaacaa

SEQ ID NO: 70880 - DNA, 26 bp, Homo sapiens
tcctgctgcttataaccagcaacaat

SEQ ID NO: 70881 - DNA, 26 bp, Homo sapiens
cctgctgcttataaccagcaacaata

SEQ ID NO: 70882 - DNA, 26 bp, Homo sapiens
ctgctgcttataaccagcaacaataa

SEQ ID NO: 70883 - DNA, 26 bp, Homo sapiens
tgctgcttataaccagcaacaataaa

SEQ ID NO: 70884 - DNA, 26 bp, Homo sapiens
gctgcttataaccagcaacaataaac

SEQ ID NO: 70885 - DNA, 26 bp, Homo sapiens
ctgcttataaccagcaacaataaaca

SEQ ID NO: 70886 - DNA, 26 bp, Homo sapiens
tgcttataaccagcaacaataaacat

SEQ ID NO: 70887 - DNA, 26 bp, Homo sapiens
gcttataaccagcaacaataaacatt

SEQ ID NO: 70888 - DNA, 26 bp, Homo sapiens
cttataaccagcaacaataaacattc

SEQ ID NO: 70889 - DNA, 26 bp, Homo sapiens
ttataaccagcaacaataaacattct

SEQ ID NO: 70890 - DNA, 26 bp, Homo sapiens
tataaccagcaacaataaacattctg

SEQ ID NO: 70891 - DNA, 26 bp, Homo sapiens
ataaccagcaacaataaacattctga

SEQ ID NO: 70892 - DNA, 26 bp, Homo sapiens
taaccagcaacaataaacattctgat

SEQ ID NO: 70893 - DNA, 26 bp, Homo sapiens
aaccagcaacaataaacattctgata

SEQ ID NO: 70894 - DNA, 26 bp, Homo sapiens
accagcaacaataaacattctgatag

SEQ ID NO: 70895 - DNA, 26 bp, Homo sapiens
ccagcaacaataaacattctgataga

SEQ ID NO: 70896 - DNA, 26 bp, Homo sapiens
cagcaacaataaacattctgatagat

SEQ ID NO: 70897 - DNA, 26 bp, Homo sapiens
agcaacaataaacattctgatagata

SEQ ID NO: 70898 - DNA, 26 bp, Homo sapiens
gcaacaataaacattctgatagataa

SEQ ID NO: 70899 - DNA, 26 bp, Homo sapiens
caacaataaacattctgatagataaa

SEQ ID NO: 70900 - DNA, 26 bp, Homo sapiens
aacaataaacattctgatagataaaa

SEQ ID NO: 70901 - DNA, 26 bp, Homo sapiens
acaataaacattctgatagataaaaa

SEQ ID NO: 70902 - DNA, 26 bp, Homo sapiens
caataaacattctgatagataaaaat

SEQ ID NO: 70903 - DNA, 26 bp, Homo sapiens
aataaacattctgatagataaaaatg

SEQ ID NO: 70904 - DNA, 26 bp, Homo sapiens
ataaacattctgatagataaaaatgt

SEQ ID NO: 70905 - DNA, 26 bp, Homo sapiens
taaacattctgatagataaaaatgtt

SEQ ID NO: 70906 - DNA, 26 bp, Homo sapiens
aaacattctgatagataaaaatgttt

SEQ ID NO: 70907 - DNA, 26 bp, Homo sapiens
aacattctgatagataaaaatgttta

SEQ ID NO: 70908 - DNA, 26 bp, Homo sapiens
acattctgatagataaaaatgtttaa

SEQ ID NO: 70909 - DNA, 26 bp, Homo sapiens
cattctgatagataaaaatgtttaaa

SEQ ID NO: 70910 - DNA, 26 bp, Homo sapiens
attctgatagataaaaatgtttaaac

SEQ ID NO: 70911 - DNA, 26 bp, Homo sapiens
ttctgatagataaaaatgtttaaaca

SEQ ID NO: 70912 - DNA, 26 bp, Homo sapiens
tctgatagataaaaatgtttaaacat

SEQ ID NO: 70913 - DNA, 26 bp, Homo sapiens
ctgatagataaaaatgtttaaacatt

SEQ ID NO: 70914 - DNA, 26 bp, Homo sapiens
tgatagataaaaatgtttaaacattt

SEQ ID NO: 70915 - DNA, 26 bp, Homo sapiens
gatagataaaaatgtttaaacatttg

SEQ ID NO: 70916 - DNA, 26 bp, Homo sapiens
atagataaaaatgtttaaacatttgc

SEQ ID NO: 70917 - DNA, 26 bp, Homo sapiens
tagataaaaatgtttaaacatttgcc

SEQ ID NO: 70918 - DNA, 26 bp, Homo sapiens
agataaaaatgtttaaacatttgcct

SEQ ID NO: 70919 - DNA, 26 bp, Homo sapiens
gataaaaatgtttaaacatttgccta

SEQ ID NO: 70920 - DNA, 26 bp, Homo sapiens
ataaaaatgtttaaacatttgcctaa

SEQ ID NO: 70921 - DNA, 26 bp, Homo sapiens
taaaaatgtttaaacatttgcctaaa

SEQ ID NO: 70922 - DNA, 26 bp, Homo sapiens
aaaaatgtttaaacatttgcctaaaa

SEQ ID NO: 70923 - DNA, 26 bp, Homo sapiens
aaaatgtttaaacatttgcctaaaat

SEQ ID NO: 70924 - DNA, 26 bp, Homo sapiens
aaatgtttaaacatttgcctaaaatg

SEQ ID NO: 70925 - DNA, 26 bp, Homo sapiens
aatgtttaaacatttgcctaaaatga

SEQ ID NO: 70926 - DNA, 26 bp, Homo sapiens
atgtttaaacatttgcctaaaatgag

SEQ ID NO: 70927 - DNA, 26 bp, Homo sapiens
tgtttaaacatttgcctaaaatgagt

SEQ ID NO: 70928 - DNA, 26 bp, Homo sapiens
gtttaaacatttgcctaaaatgagtg

SEQ ID NO: 70929 - DNA, 26 bp, Homo sapiens
tttaaacatttgcctaaaatgagtga

SEQ ID NO: 70930 - DNA, 26 bp, Homo sapiens
ttaaacatttgcctaaaatgagtgat

SEQ ID NO: 70931 - DNA, 26 bp, Homo sapiens
taaacatttgcctaaaatgagtgatg

SEQ ID NO: 70932 - DNA, 26 bp, Homo sapiens
aaacatttgcctaaaatgagtgatgt

SEQ ID NO: 70933 - DNA, 26 bp, Homo sapiens
aacatttgcctaaaatgagtgatgtg

SEQ ID NO: 70934 - DNA, 26 bp, Homo sapiens
acatttgcctaaaatgagtgatgtgt

SEQ ID NO: 70935 - DNA, 26 bp, Homo sapiens
catttgcctaaaatgagtgatgtgtt

SEQ ID NO: 70936 - DNA, 26 bp, Homo sapiens
atttgcctaaaatgagtgatgtgttg

SEQ ID NO: 70937 - DNA, 26 bp, Homo sapiens
tttgcctaaaatgagtgatgtgttgg

SEQ ID NO: 70938 - DNA, 26 bp, Homo sapiens
ttgcctaaaatgagtgatgtgttggc

SEQ ID NO: 70939 - DNA, 26 bp, Homo sapiens
tgcctaaaatgagtgatgtgttggct

SEQ ID NO: 70940 - DNA, 26 bp, Homo sapiens
gcctaaaatgagtgatgtgttggctt

SEQ ID NO: 70941 - DNA, 26 bp, Homo sapiens
cctaaaatgagtgatgtgttggcttc

SEQ ID NO: 70942 - DNA, 26 bp, Homo sapiens
ctaaaatgagtgatgtgttggcttcc

SEQ ID NO: 70943 - DNA, 26 bp, Homo sapiens
taaaatgagtgatgtgttggcttcca

SEQ ID NO: 70944 - DNA, 26 bp, Homo sapiens
aaaatgagtgatgtgttggcttccat

SEQ ID NO: 70945 - DNA, 26 bp, Homo sapiens
aaatgagtgatgtgttggcttccatt

SEQ ID NO: 70946 - DNA, 26 bp, Homo sapiens
aatgagtgatgtgttggcttccattt

SEQ ID NO: 70947 - DNA, 26 bp, Homo sapiens
atgagtgatgtgttggcttccatttt

SEQ ID NO: 70948 - DNA, 26 bp, Homo sapiens
tgagtgatgtgttggcttccattttt

SEQ ID NO: 70949 - DNA, 26 bp, Homo sapiens
gagtgatgtgttggcttccatttttt

SEQ ID NO: 70950 - DNA, 26 bp, Homo sapiens
agtgatgtgttggcttccattttttt

SEQ ID NO: 70951 - DNA, 26 bp, Homo sapiens
gtgatgtgttggcttccatttttttt

SEQ ID NO: 70952 - DNA, 26 bp, Homo sapiens
tgatgtgttggcttccattttttttt

SEQ ID NO: 70953 - DNA, 26 bp, Homo sapiens
gatgtgttggcttccatttttttttc

SEQ ID NO: 70954 - DNA, 26 bp, Homo sapiens
atgtgttggcttccatttttttttct

SEQ ID NO: 70955 - DNA, 26 bp, Homo sapiens
tgtgttggcttccatttttttttctg

SEQ ID NO: 70956 - DNA, 26 bp, Homo sapiens
gtgttggcttccatttttttttctgt

SEQ ID NO: 70957 - DNA, 26 bp, Homo sapiens
tgttggcttccatttttttttctgtt

SEQ ID NO: 70958 - DNA, 26 bp, Homo sapiens
gttggcttccatttttttttctgttt

SEQ ID NO: 70959 - DNA, 26 bp, Homo sapiens
ttggcttccatttttttttctgtttt

SEQ ID NO: 70960 - DNA, 26 bp, Homo sapiens
tggcttccatttttttttctgtttta

SEQ ID NO: 70961 - DNA, 26 bp, Homo sapiens
ggcttccatttttttttctgttttag

SEQ ID NO: 70962 - DNA, 26 bp, Homo sapiens
gcttccatttttttttctgttttagt

SEQ ID NO: 70963 - DNA, 26 bp, Homo sapiens
cttccatttttttttctgttttagtt

SEQ ID NO: 70964 - DNA, 26 bp, Homo sapiens
ttccatttttttttctgttttagttt

SEQ ID NO: 70965 - DNA, 26 bp, Homo sapiens
tccatttttttttctgttttagtttt

SEQ ID NO: 70966 - DNA, 26 bp, Homo sapiens
ccatttttttttctgttttagttttt

SEQ ID NO: 70967 - DNA, 26 bp, Homo sapiens
catttttttttctgttttagtttttc

SEQ ID NO: 70968 - DNA, 26 bp, Homo sapiens
atttttttttctgttttagtttttca

SEQ ID NO: 70969 - DNA, 26 bp, Homo sapiens
tttttttttctgttttagtttttcaa

SEQ ID NO: 70970 - DNA, 26 bp, Homo sapiens
ttttttttctgttttagtttttcaaa

SEQ ID NO: 70971 - DNA, 26 bp, Homo sapiens
tttttttctgttttagtttttcaaac

SEQ ID NO: 70972 - DNA, 26 bp, Homo sapiens
ttttttctgttttagtttttcaaacc

SEQ ID NO: 70973 - DNA, 26 bp, Homo sapiens
tttttctgttttagtttttcaaacca

SEQ ID NO: 70974 - DNA, 26 bp, Homo sapiens
ttttctgttttagtttttcaaaccac

SEQ ID NO: 70975 - DNA, 26 bp, Homo sapiens
tttctgttttagtttttcaaaccact

SEQ ID NO: 70976 - DNA, 26 bp, Homo sapiens
ttctgttttagtttttcaaaccactg

SEQ ID NO: 70977 - DNA, 26 bp, Homo sapiens
tctgttttagtttttcaaaccactgc

SEQ ID NO: 70978 - DNA, 26 bp, Homo sapiens
ctgttttagtttttcaaaccactgcc

SEQ ID NO: 70979 - DNA, 26 bp, Homo sapiens
tgttttagtttttcaaaccactgcca

SEQ ID NO: 70980 - DNA, 26 bp, Homo sapiens
gttttagtttttcaaaccactgccat

SEQ ID NO: 70981 - DNA, 26 bp, Homo sapiens
ttttagtttttcaaaccactgccatc

SEQ ID NO: 70982 - DNA, 26 bp, Homo sapiens
tttagtttttcaaaccactgccatca

SEQ ID NO: 70983 - DNA, 26 bp, Homo sapiens
ttagtttttcaaaccactgccatcat

SEQ ID NO: 70984 - DNA, 26 bp, Homo sapiens
tagtttttcaaaccactgccatcatt

SEQ ID NO: 70985 - DNA, 26 bp, Homo sapiens
agtttttcaaaccactgccatcattt

SEQ ID NO: 70986 - DNA, 26 bp, Homo sapiens
gtttttcaaaccactgccatcatttt

SEQ ID NO: 70987 - DNA, 26 bp, Homo sapiens
tttttcaaaccactgccatcattttg

SEQ ID NO: 70988 - DNA, 26 bp, Homo sapiens
ttttcaaaccactgccatcattttgt

SEQ ID NO: 70989 - DNA, 26 bp, Homo sapiens
tttcaaaccactgccatcattttgtg

SEQ ID NO: 70990 - DNA, 26 bp, Homo sapiens
ttcaaaccactgccatcattttgtgc

SEQ ID NO: 70991 - DNA, 26 bp, Homo sapiens
tcaaaccactgccatcattttgtgct

SEQ ID NO: 70992 - DNA, 26 bp, Homo sapiens
caaaccactgccatcattttgtgctg

SEQ ID NO: 70993 - DNA, 26 bp, Homo sapiens
aaaccactgccatcattttgtgctgt

SEQ ID NO: 70994 - DNA, 26 bp, Homo sapiens
aaccactgccatcattttgtgctgta

SEQ ID NO: 70995 - DNA, 26 bp, Homo sapiens
accactgccatcattttgtgctgtaa

SEQ ID NO: 70996 - DNA, 26 bp, Homo sapiens
ccactgccatcattttgtgctgtaac

SEQ ID NO: 70997 - DNA, 26 bp, Homo sapiens
cactgccatcattttgtgctgtaacc

SEQ ID NO: 70998 - DNA, 26 bp, Homo sapiens
actgccatcattttgtgctgtaacca

SEQ ID NO: 70999 - DNA, 26 bp, Homo sapiens
ctgccatcattttgtgctgtaaccaa

SEQ ID NO: 71000 - DNA, 26 bp, Homo sapiens
tgccatcattttgtgctgtaaccaaa

SEQ ID NO: 71001 - DNA, 26 bp, Homo sapiens
gccatcattttgtgctgtaaccaaaa

SEQ ID NO: 71002 - DNA, 26 bp, Homo sapiens
ccatcattttgtgctgtaaccaaaag

SEQ ID NO: 71003 - DNA, 26 bp, Homo sapiens
catcattttgtgctgtaaccaaaaga

SEQ ID NO: 71004 - DNA, 26 bp, Homo sapiens
atcattttgtgctgtaaccaaaagac

SEQ ID NO: 71005 - DNA, 26 bp, Homo sapiens
tcattttgtgctgtaaccaaaagaca

SEQ ID NO: 71006 - DNA, 26 bp, Homo sapiens
cattttgtgctgtaaccaaaagacac

SEQ ID NO: 71007 - DNA, 26 bp, Homo sapiens
attttgtgctgtaaccaaaagacact

SEQ ID NO: 71008 - DNA, 26 bp, Homo sapiens
ttttgtgctgtaaccaaaagacactg

SEQ ID NO: 71009 - DNA, 26 bp, Homo sapiens
tttgtgctgtaaccaaaagacactgt

SEQ ID NO: 71010 - DNA, 26 bp, Homo sapiens
ttgtgctgtaaccaaaagacactgtg

SEQ ID NO: 71011 - DNA, 26 bp, Homo sapiens
tgtgctgtaaccaaaagacactgtga

SEQ ID NO: 71012 - DNA, 26 bp, Homo sapiens
gtgctgtaaccaaaagacactgtgat

SEQ ID NO: 71013 - DNA, 26 bp, Homo sapiens
tgctgtaaccaaaagacactgtgatc

SEQ ID NO: 71014 - DNA, 26 bp, Homo sapiens
gctgtaaccaaaagacactgtgatct

SEQ ID NO: 71015 - DNA, 26 bp, Homo sapiens
ctgtaaccaaaagacactgtgatctg

SEQ ID NO: 71016 - DNA, 26 bp, Homo sapiens
tgtaaccaaaagacactgtgatctgt

SEQ ID NO: 71017 - DNA, 26 bp, Homo sapiens
gtaaccaaaagacactgtgatctgtg

SEQ ID NO: 71018 - DNA, 26 bp, Homo sapiens
taaccaaaagacactgtgatctgtga

SEQ ID NO: 71019 - DNA, 26 bp, Homo sapiens
aaccaaaagacactgtgatctgtgac

SEQ ID NO: 71020 - DNA, 26 bp, Homo sapiens
accaaaagacactgtgatctgtgacc

SEQ ID NO: 71021 - DNA, 26 bp, Homo sapiens
ccaaaagacactgtgatctgtgaccg

SEQ ID NO: 71022 - DNA, 26 bp, Homo sapiens
caaaagacactgtgatctgtgaccgc

SEQ ID NO: 71023 - DNA, 26 bp, Homo sapiens
aaaagacactgtgatctgtgaccgct

SEQ ID NO: 71024 - DNA, 26 bp, Homo sapiens
aaagacactgtgatctgtgaccgctt

SEQ ID NO: 71025 - DNA, 26 bp, Homo sapiens
aagacactgtgatctgtgaccgcttc

SEQ ID NO: 71026 - DNA, 26 bp, Homo sapiens
agacactgtgatctgtgaccgcttca

SEQ ID NO: 71027 - DNA, 26 bp, Homo sapiens
gacactgtgatctgtgaccgcttcat

SEQ ID NO: 71028 - DNA, 26 bp, Homo sapiens
acactgtgatctgtgaccgcttcatg

SEQ ID NO: 71029 - DNA, 26 bp, Homo sapiens
cactgtgatctgtgaccgcttcatga

SEQ ID NO: 71030 - DNA, 26 bp, Homo sapiens
actgtgatctgtgaccgcttcatgaa

SEQ ID NO: 71031 - DNA, 26 bp, Homo sapiens
ctgtgatctgtgaccgcttcatgaat

SEQ ID NO: 71032 - DNA, 26 bp, Homo sapiens
tgtgatctgtgaccgcttcatgaata

SEQ ID NO: 71033 - DNA, 26 bp, Homo sapiens
gtgatctgtgaccgcttcatgaatat

SEQ ID NO: 71034 - DNA, 26 bp, Homo sapiens
tgatctgtgaccgcttcatgaatatt

SEQ ID NO: 71035 - DNA, 26 bp, Homo sapiens
gatctgtgaccgcttcatgaatattt

SEQ ID NO: 71036 - DNA, 26 bp, Homo sapiens
atctgtgaccgcttcatgaatatttc

SEQ ID NO: 71037 - DNA, 26 bp, Homo sapiens
tctgtgaccgcttcatgaatatttct

SEQ ID NO: 71038 - DNA, 26 bp, Homo sapiens
ctgtgaccgcttcatgaatatttctg

SEQ ID NO: 71039 - DNA, 26 bp, Homo sapiens
tgtgaccgcttcatgaatatttctga

SEQ ID NO: 71040 - DNA, 26 bp, Homo sapiens
gtgaccgcttcatgaatatttctgaa

SEQ ID NO: 71041 - DNA, 26 bp, Homo sapiens
tgaccgcttcatgaatatttctgaaa

SEQ ID NO: 71042 - DNA, 26 bp, Homo sapiens
gaccgcttcatgaatatttctgaaaa

SEQ ID NO: 71043 - DNA, 26 bp, Homo sapiens
accgcttcatgaatatttctgaaaat

SEQ ID NO: 71044 - DNA, 26 bp, Homo sapiens
ccgcttcatgaatatttctgaaaatg

SEQ ID NO: 71045 - DNA, 26 bp, Homo sapiens
cgcttcatgaatatttctgaaaatgt

SEQ ID NO: 71046 - DNA, 26 bp, Homo sapiens
gcttcatgaatatttctgaaaatgtt

SEQ ID NO: 71047 - DNA, 26 bp, Homo sapiens
cttcatgaatatttctgaaaatgttt

SEQ ID NO: 71048 - DNA, 26 bp, Homo sapiens
ttcatgaatatttctgaaaatgttta

SEQ ID NO: 71049 - DNA, 26 bp, Homo sapiens
tcatgaatatttctgaaaatgtttac

SEQ ID NO: 71050 - DNA, 26 bp, Homo sapiens
catgaatatttctgaaaatgtttaca

SEQ ID NO: 71051 - DNA, 26 bp, Homo sapiens
atgaatatttctgaaaatgtttacat

SEQ ID NO: 71052 - DNA, 26 bp, Homo sapiens
tgaatatttctgaaaatgtttacatt

SEQ ID NO: 71053 - DNA, 26 bp, Homo sapiens
gaatatttctgaaaatgtttacattt

SEQ ID NO: 71054 - DNA, 26 bp, Homo sapiens
aatatttctgaaaatgtttacatttg

SEQ ID NO: 71055 - DNA, 26 bp, Homo sapiens
atatttctgaaaatgtttacatttgt

SEQ ID NO: 71056 - DNA, 26 bp, Homo sapiens
tatttctgaaaatgtttacatttgtc

SEQ ID NO: 71057 - DNA, 26 bp, Homo sapiens
atttctgaaaatgtttacatttgtca

SEQ ID NO: 71058 - DNA, 26 bp, Homo sapiens
tttctgaaaatgtttacatttgtcaa

SEQ ID NO: 71059 - DNA, 26 bp, Homo sapiens
ttctgaaaatgtttacatttgtcaac

SEQ ID NO: 71060 - DNA, 26 bp, Homo sapiens
tctgaaaatgtttacatttgtcaaca

SEQ ID NO: 71061 - DNA, 26 bp, Homo sapiens
ctgaaaatgtttacatttgtcaacaa

SEQ ID NO: 71062 - DNA, 26 bp, Homo sapiens
tgaaaatgtttacatttgtcaacaat

SEQ ID NO: 71063 - DNA, 26 bp, Homo sapiens
gaaaatgtttacatttgtcaacaatt

SEQ ID NO: 71064 - DNA, 26 bp, Homo sapiens
aaaatgtttacatttgtcaacaattc

SEQ ID NO: 71065 - DNA, 26 bp, Homo sapiens
aaatgtttacatttgtcaacaattca

SEQ ID NO: 71066 - DNA, 26 bp, Homo sapiens
aatgtttacatttgtcaacaattcac

SEQ ID NO: 71067 - DNA, 26 bp, Homo sapiens
atgtttacatttgtcaacaattcact

SEQ ID NO: 71068 - DNA, 26 bp, Homo sapiens
tgtttacatttgtcaacaattcactt

SEQ ID NO: 71069 - DNA, 26 bp, Homo sapiens
gtttacatttgtcaacaattcacttt

SEQ ID NO: 71070 - DNA, 26 bp, Homo sapiens
tttacatttgtcaacaattcacttta

SEQ ID NO: 71071 - DNA, 26 bp, Homo sapiens
ttacatttgtcaacaattcactttaa

SEQ ID NO: 71072 - DNA, 26 bp, Homo sapiens
tacatttgtcaacaattcactttaat

SEQ ID NO: 71073 - DNA, 26 bp, Homo sapiens
acatttgtcaacaattcactttaatt

SEQ ID NO: 71074 - DNA, 26 bp, Homo sapiens
catttgtcaacaattcactttaattc

SEQ ID NO: 71075 - DNA, 26 bp, Homo sapiens
atttgtcaacaattcactttaattca

SEQ ID NO: 71076 - DNA, 26 bp, Homo sapiens
tttgtcaacaattcactttaattcag

SEQ ID NO: 71077 - DNA, 26 bp, Homo sapiens
ttgtcaacaattcactttaattcagc

SEQ ID NO: 71078 - DNA, 26 bp, Homo sapiens
tgtcaacaattcactttaattcagca

SEQ ID NO: 71079 - DNA, 26 bp, Homo sapiens
gtcaacaattcactttaattcagcat

SEQ ID NO: 71080 - DNA, 26 bp, Homo sapiens
tcaacaattcactttaattcagcatt

SEQ ID NO: 71081 - DNA, 26 bp, Homo sapiens
caacaattcactttaattcagcattt

SEQ ID NO: 71082 - DNA, 26 bp, Homo sapiens
aacaattcactttaattcagcatttc

SEQ ID NO: 71083 - DNA, 26 bp, Homo sapiens
acaattcactttaattcagcatttcc

SEQ ID NO: 71084 - DNA, 26 bp, Homo sapiens
caattcactttaattcagcatttccc

SEQ ID NO: 71085 - DNA, 26 bp, Homo sapiens
aattcactttaattcagcatttccca

SEQ ID NO: 71086 - DNA, 26 bp, Homo sapiens
attcactttaattcagcatttcccaa

SEQ ID NO: 71087 - DNA, 26 bp, Homo sapiens
ttcactttaattcagcatttcccaaa

SEQ ID NO: 71088 - DNA, 26 bp, Homo sapiens
tcactttaattcagcatttcccaaag

SEQ ID NO: 71089 - DNA, 26 bp, Homo sapiens
cactttaattcagcatttcccaaagg

SEQ ID NO: 71090 - DNA, 26 bp, Homo sapiens
actttaattcagcatttcccaaaggc

SEQ ID NO: 71091 - DNA, 26 bp, Homo sapiens
ctttaattcagcatttcccaaaggct

SEQ ID NO: 71092 - DNA, 26 bp, Homo sapiens
tttaattcagcatttcccaaaggctg

SEQ ID NO: 71093 - DNA, 26 bp, Homo sapiens
ttaattcagcatttcccaaaggctgt

SEQ ID NO: 71094 - DNA, 26 bp, Homo sapiens
taattcagcatttcccaaaggctgtt

SEQ ID NO: 71095 - DNA, 26 bp, Homo sapiens
aattcagcatttcccaaaggctgttt

SEQ ID NO: 71096 - DNA, 26 bp, Homo sapiens
attcagcatttcccaaaggctgtttt

SEQ ID NO: 71097 - DNA, 26 bp, Homo sapiens
ttcagcatttcccaaaggctgttttg

SEQ ID NO: 71098 - DNA, 26 bp, Homo sapiens
tcagcatttcccaaaggctgttttgt

SEQ ID NO: 71099 - DNA, 26 bp, Homo sapiens
cagcatttcccaaaggctgttttgtg

SEQ ID NO: 71100 - DNA, 26 bp, Homo sapiens
agcatttcccaaaggctgttttgtga

SEQ ID NO: 71101 - DNA, 26 bp, Homo sapiens
gcatttcccaaaggctgttttgtgaa

SEQ ID NO: 71102 - DNA, 26 bp, Homo sapiens
catttcccaaaggctgttttgtgaaa

SEQ ID NO: 71103 - DNA, 26 bp, Homo sapiens
atttcccaaaggctgttttgtgaaat

SEQ ID NO: 71104 - DNA, 26 bp, Homo sapiens
tttcccaaaggctgttttgtgaaatg

SEQ ID NO: 71105 - DNA, 26 bp, Homo sapiens
ttcccaaaggctgttttgtgaaatgc

SEQ ID NO: 71106 - DNA, 26 bp, Homo sapiens
tcccaaaggctgttttgtgaaatgcc

SEQ ID NO: 71107 - DNA, 26 bp, Homo sapiens
cccaaaggctgttttgtgaaatgcca

SEQ ID NO: 71108 - DNA, 26 bp, Homo sapiens
ccaaaggctgttttgtgaaatgccag

SEQ ID NO: 71109 - DNA, 26 bp, Homo sapiens
caaaggctgttttgtgaaatgccagg

SEQ ID NO: 71110 - DNA, 26 bp, Homo sapiens
aaaggctgttttgtgaaatgccaggc

SEQ ID NO: 71111 - DNA, 26 bp, Homo sapiens
aaggctgttttgtgaaatgccaggcg

SEQ ID NO: 71112 - DNA, 26 bp, Homo sapiens
aggctgttttgtgaaatgccaggcgg

SEQ ID NO: 71113 - DNA, 26 bp, Homo sapiens
ggctgttttgtgaaatgccaggcgga

SEQ ID NO: 71114 - DNA, 26 bp, Homo sapiens
gctgttttgtgaaatgccaggcggat

SEQ ID NO: 71115 - DNA, 26 bp, Homo sapiens
ctgttttgtgaaatgccaggcggata

SEQ ID NO: 71116 - DNA, 26 bp, Homo sapiens
tgttttgtgaaatgccaggcggatat

SEQ ID NO: 71117 - DNA, 26 bp, Homo sapiens
gttttgtgaaatgccaggcggatata

SEQ ID NO: 71118 - DNA, 26 bp, Homo sapiens
ttttgtgaaatgccaggcggatatat

SEQ ID NO: 71119 - DNA, 26 bp, Homo sapiens
tttgtgaaatgccaggcggatatata

SEQ ID NO: 71120 - DNA, 26 bp, Homo sapiens
ttgtgaaatgccaggcggatatatac

SEQ ID NO: 71121 - DNA, 26 bp, Homo sapiens
tgtgaaatgccaggcggatatatacc

SEQ ID NO: 71122 - DNA, 26 bp, Homo sapiens
gtgaaatgccaggcggatatataccc

SEQ ID NO: 71123 - DNA, 26 bp, Homo sapiens
tgaaatgccaggcggatatataccct

SEQ ID NO: 71124 - DNA, 26 bp, Homo sapiens
gaaatgccaggcggatatatacccta

SEQ ID NO: 71125 - DNA, 26 bp, Homo sapiens
aaatgccaggcggatatataccctag

SEQ ID NO: 71126 - DNA, 26 bp, Homo sapiens
aatgccaggcggatatataccctaga

SEQ ID NO: 71127 - DNA, 26 bp, Homo sapiens
atgccaggcggatatataccctagag

SEQ ID NO: 71128 - DNA, 26 bp, Homo sapiens
tgccaggcggatatataccctagagc

SEQ ID NO: 71129 - DNA, 26 bp, Homo sapiens
gccaggcggatatataccctagagct

SEQ ID NO: 71130 - DNA, 26 bp, Homo sapiens
ccaggcggatatataccctagagcta

SEQ ID NO: 71131 - DNA, 26 bp, Homo sapiens
caggcggatatataccctagagctac

SEQ ID NO: 71132 - DNA, 26 bp, Homo sapiens
aggcggatatataccctagagctaca

SEQ ID NO: 71133 - DNA, 26 bp, Homo sapiens
ggcggatatataccctagagctacaa

SEQ ID NO: 71134 - DNA, 26 bp, Homo sapiens
gcggatatataccctagagctacaaa

SEQ ID NO: 71135 - DNA, 26 bp, Homo sapiens
cggatatataccctagagctacaaaa

SEQ ID NO: 71136 - DNA, 26 bp, Homo sapiens
ggatatataccctagagctacaaaac

SEQ ID NO: 71137 - DNA, 26 bp, Homo sapiens
gatatataccctagagctacaaaaca

SEQ ID NO: 71138 - DNA, 26 bp, Homo sapiens
atatataccctagagctacaaaacat

SEQ ID NO: 71139 - DNA, 26 bp, Homo sapiens
tatataccctagagctacaaaacatt

SEQ ID NO: 71140 - DNA, 26 bp, Homo sapiens
atataccctagagctacaaaacattc

SEQ ID NO: 71141 - DNA, 26 bp, Homo sapiens
tataccctagagctacaaaacattcc

SEQ ID NO: 71142 - DNA, 26 bp, Homo sapiens
ataccctagagctacaaaacattcct

SEQ ID NO: 71143 - DNA, 26 bp, Homo sapiens
taccctagagctacaaaacattcctt

SEQ ID NO: 71144 - DNA, 26 bp, Homo sapiens
accctagagctacaaaacattccttg

SEQ ID NO: 71145 - DNA, 26 bp, Homo sapiens
ccctagagctacaaaacattccttgc

SEQ ID NO: 71146 - DNA, 26 bp, Homo sapiens
cctagagctacaaaacattccttgca

SEQ ID NO: 71147 - DNA, 26 bp, Homo sapiens
ctagagctacaaaacattccttgcaa

SEQ ID NO: 71148 - DNA, 26 bp, Homo sapiens
tagagctacaaaacattccttgcaaa

SEQ ID NO: 71149 - DNA, 26 bp, Homo sapiens
agagctacaaaacattccttgcaaag

SEQ ID NO: 71150 - DNA, 26 bp, Homo sapiens
gagctacaaaacattccttgcaaagt

SEQ ID NO: 71151 - DNA, 26 bp, Homo sapiens
agctacaaaacattccttgcaaagtg

SEQ ID NO: 71152 - DNA, 26 bp, Homo sapiens
gctacaaaacattccttgcaaagtgc

SEQ ID NO: 71153 - DNA, 26 bp, Homo sapiens
ctacaaaacattccttgcaaagtgct

SEQ ID NO: 71154 - DNA, 26 bp, Homo sapiens
tacaaaacattccttgcaaagtgctg

SEQ ID NO: 71155 - DNA, 26 bp, Homo sapiens
acaaaacattccttgcaaagtgctgg

SEQ ID NO: 71156 - DNA, 26 bp, Homo sapiens
caaaacattccttgcaaagtgctgga

SEQ ID NO: 71157 - DNA, 26 bp, Homo sapiens
aaaacattccttgcaaagtgctggaa

SEQ ID NO: 71158 - DNA, 26 bp, Homo sapiens
aaacattccttgcaaagtgctggaaa

SEQ ID NO: 71159 - DNA, 26 bp, Homo sapiens
aacattccttgcaaagtgctggaaaa

SEQ ID NO: 71160 - DNA, 26 bp, Homo sapiens
acattccttgcaaagtgctggaaaat

SEQ ID NO: 71161 - DNA, 26 bp, Homo sapiens
cattccttgcaaagtgctggaaaatg

SEQ ID NO: 71162 - DNA, 26 bp, Homo sapiens
attccttgcaaagtgctggaaaatgc

SEQ ID NO: 71163 - DNA, 26 bp, Homo sapiens
ttccttgcaaagtgctggaaaatgct

SEQ ID NO: 71164 - DNA, 26 bp, Homo sapiens
tccttgcaaagtgctggaaaatgcta

SEQ ID NO: 71165 - DNA, 26 bp, Homo sapiens
ccttgcaaagtgctggaaaatgctac

SEQ ID NO: 71166 - DNA, 26 bp, Homo sapiens
cttgcaaagtgctggaaaatgctacc

SEQ ID NO: 71167 - DNA, 26 bp, Homo sapiens
ttgcaaagtgctggaaaatgctacct

SEQ ID NO: 71168 - DNA, 26 bp, Homo sapiens
tgcaaagtgctggaaaatgctaccta

SEQ ID NO: 71169 - DNA, 26 bp, Homo sapiens
gcaaagtgctggaaaatgctacctat

SEQ ID NO: 71170 - DNA, 26 bp, Homo sapiens
caaagtgctggaaaatgctacctatc

SEQ ID NO: 71171 - DNA, 26 bp, Homo sapiens
aaagtgctggaaaatgctacctatca

SEQ ID NO: 71172 - DNA, 26 bp, Homo sapiens
aagtgctggaaaatgctacctatcag

SEQ ID NO: 71173 - DNA, 26 bp, Homo sapiens
agtgctggaaaatgctacctatcaga

SEQ ID NO: 71174 - DNA, 26 bp, Homo sapiens
gtgctggaaaatgctacctatcagag

SEQ ID NO: 71175 - DNA, 26 bp, Homo sapiens
tgctggaaaatgctacctatcagaga

SEQ ID NO: 71176 - DNA, 26 bp, Homo sapiens
gctggaaaatgctacctatcagagac

SEQ ID NO: 71177 - DNA, 26 bp, Homo sapiens
ctggaaaatgctacctatcagagacc

SEQ ID NO: 71178 - DNA, 26 bp, Homo sapiens
tggaaaatgctacctatcagagacca

SEQ ID NO: 71179 - DNA, 26 bp, Homo sapiens
ggaaaatgctacctatcagagaccac

SEQ ID NO: 71180 - DNA, 26 bp, Homo sapiens
gaaaatgctacctatcagagaccacc

SEQ ID NO: 71181 - DNA, 26 bp, Homo sapiens
aaaatgctacctatcagagaccaccc

SEQ ID NO: 71182 - DNA, 26 bp, Homo sapiens
aaatgctacctatcagagaccacccc

SEQ ID NO: 71183 - DNA, 26 bp, Homo sapiens
aatgctacctatcagagaccacccca

SEQ ID NO: 71184 - DNA, 26 bp, Homo sapiens
atgctacctatcagagaccaccccac

SEQ ID NO: 71185 - DNA, 26 bp, Homo sapiens
tgctacctatcagagaccaccccacc

SEQ ID NO: 71186 - DNA, 26 bp, Homo sapiens
gctacctatcagagaccaccccaccc

SEQ ID NO: 71187 - DNA, 26 bp, Homo sapiens
ctacctatcagagaccaccccaccct

SEQ ID NO: 71188 - DNA, 26 bp, Homo sapiens
tacctatcagagaccaccccaccctg

SEQ ID NO: 71189 - DNA, 26 bp, Homo sapiens
acctatcagagaccaccccaccctga

SEQ ID NO: 71190 - DNA, 26 bp, Homo sapiens
cctatcagagaccaccccaccctgaa

SEQ ID NO: 71191 - DNA, 26 bp, Homo sapiens
ctatcagagaccaccccaccctgaag

SEQ ID NO: 71192 - DNA, 26 bp, Homo sapiens
tatcagagaccaccccaccctgaaga

SEQ ID NO: 71193 - DNA, 26 bp, Homo sapiens
atcagagaccaccccaccctgaagag

SEQ ID NO: 71194 - DNA, 26 bp, Homo sapiens
tcagagaccaccccaccctgaagaga

SEQ ID NO: 71195 - DNA, 26 bp, Homo sapiens
cagagaccaccccaccctgaagagat

SEQ ID NO: 71196 - DNA, 26 bp, Homo sapiens
agagaccaccccaccctgaagagatc

SEQ ID NO: 71197 - DNA, 26 bp, Homo sapiens
gagaccaccccaccctgaagagatca

SEQ ID NO: 71198 - DNA, 26 bp, Homo sapiens
agaccaccccaccctgaagagatcac

SEQ ID NO: 71199 - DNA, 26 bp, Homo sapiens
gaccaccccaccctgaagagatcaca

SEQ ID NO: 71200 - DNA, 26 bp, Homo sapiens
accaccccaccctgaagagatcacac

SEQ ID NO: 71201 - DNA, 26 bp, Homo sapiens
ccaccccaccctgaagagatcacaca

SEQ ID NO: 71202 - DNA, 26 bp, Homo sapiens
caccccaccctgaagagatcacacag

SEQ ID NO: 71203 - DNA, 26 bp, Homo sapiens
accccaccctgaagagatcacacagc

SEQ ID NO: 71204 - DNA, 26 bp, Homo sapiens
ccccaccctgaagagatcacacagcc

SEQ ID NO: 71205 - DNA, 26 bp, Homo sapiens
cccaccctgaagagatcacacagccc

SEQ ID NO: 71206 - DNA, 26 bp, Homo sapiens
ccaccctgaagagatcacacagccca

SEQ ID NO: 71207 - DNA, 26 bp, Homo sapiens
caccctgaagagatcacacagcccat

SEQ ID NO: 71208 - DNA, 26 bp, Homo sapiens
accctgaagagatcacacagcccatg

SEQ ID NO: 71209 - DNA, 26 bp, Homo sapiens
ccctgaagagatcacacagcccatga

SEQ ID NO: 71210 - DNA, 26 bp, Homo sapiens
cctgaagagatcacacagcccatgag

SEQ ID NO: 71211 - DNA, 26 bp, Homo sapiens
ctgaagagatcacacagcccatgagc

SEQ ID NO: 71212 - DNA, 26 bp, Homo sapiens
tgaagagatcacacagcccatgagca

SEQ ID NO: 71213 - DNA, 26 bp, Homo sapiens
gaagagatcacacagcccatgagcac

SEQ ID NO: 71214 - DNA, 26 bp, Homo sapiens
aagagatcacacagcccatgagcacg

SEQ ID NO: 71215 - DNA, 26 bp, Homo sapiens
agagatcacacagcccatgagcacgt

SEQ ID NO: 71216 - DNA, 26 bp, Homo sapiens
gagatcacacagcccatgagcacgtt

SEQ ID NO: 71217 - DNA, 26 bp, Homo sapiens
agatcacacagcccatgagcacgtta

SEQ ID NO: 71218 - DNA, 26 bp, Homo sapiens
gatcacacagcccatgagcacgttaa

SEQ ID NO: 71219 - DNA, 26 bp, Homo sapiens
atcacacagcccatgagcacgttaag

SEQ ID NO: 71220 - DNA, 26 bp, Homo sapiens
tcacacagcccatgagcacgttaagt

SEQ ID NO: 71221 - DNA, 26 bp, Homo sapiens
cacacagcccatgagcacgttaagtc

SEQ ID NO: 71222 - DNA, 26 bp, Homo sapiens
acacagcccatgagcacgttaagtcc

SEQ ID NO: 71223 - DNA, 26 bp, Homo sapiens
cacagcccatgagcacgttaagtccc

SEQ ID NO: 71224 - DNA, 26 bp, Homo sapiens
acagcccatgagcacgttaagtcccg

SEQ ID NO: 71225 - DNA, 26 bp, Homo sapiens
cagcccatgagcacgttaagtcccgc

SEQ ID NO: 71226 - DNA, 26 bp, Homo sapiens
agcccatgagcacgttaagtcccgca

SEQ ID NO: 71227 - DNA, 26 bp, Homo sapiens
gcccatgagcacgttaagtcccgcag

SEQ ID NO: 71228 - DNA, 26 bp, Homo sapiens
cccatgagcacgttaagtcccgcagg

SEQ ID NO: 71229 - DNA, 26 bp, Homo sapiens
ccatgagcacgttaagtcccgcagga

SEQ ID NO: 71230 - DNA, 26 bp, Homo sapiens
catgagcacgttaagtcccgcaggag

SEQ ID NO: 71231 - DNA, 26 bp, Homo sapiens
atgagcacgttaagtcccgcaggaga

SEQ ID NO: 71232 - DNA, 26 bp, Homo sapiens
tgagcacgttaagtcccgcaggagag

SEQ ID NO: 71233 - DNA, 26 bp, Homo sapiens
gagcacgttaagtcccgcaggagaga

SEQ ID NO: 71234 - DNA, 26 bp, Homo sapiens
agcacgttaagtcccgcaggagagag

SEQ ID NO: 71235 - DNA, 26 bp, Homo sapiens
gcacgttaagtcccgcaggagagagg

SEQ ID NO: 71236 - DNA, 26 bp, Homo sapiens
cacgttaagtcccgcaggagagaggc

SEQ ID NO: 71237 - DNA, 26 bp, Homo sapiens
acgttaagtcccgcaggagagaggct

SEQ ID NO: 71238 - DNA, 26 bp, Homo sapiens
cgttaagtcccgcaggagagaggctt

SEQ ID NO: 71239 - DNA, 26 bp, Homo sapiens
gttaagtcccgcaggagagaggcttg

SEQ ID NO: 71240 - DNA, 26 bp, Homo sapiens
ttaagtcccgcaggagagaggcttgc

SEQ ID NO: 71241 - DNA, 26 bp, Homo sapiens
taagtcccgcaggagagaggcttgct

SEQ ID NO: 71242 - DNA, 26 bp, Homo sapiens
aagtcccgcaggagagaggcttgctt

SEQ ID NO: 71243 - DNA, 26 bp, Homo sapiens
agtcccgcaggagagaggcttgcttg

SEQ ID NO: 71244 - DNA, 26 bp, Homo sapiens
gtcccgcaggagagaggcttgcttga

SEQ ID NO: 71245 - DNA, 26 bp, Homo sapiens
tcccgcaggagagaggcttgcttgat

SEQ ID NO: 71246 - DNA, 26 bp, Homo sapiens
cccgcaggagagaggcttgcttgatt

SEQ ID NO: 71247 - DNA, 26 bp, Homo sapiens
ccgcaggagagaggcttgcttgattt

SEQ ID NO: 71248 - DNA, 26 bp, Homo sapiens
cgcaggagagaggcttgcttgatttt

SEQ ID NO: 71249 - DNA, 26 bp, Homo sapiens
gcaggagagaggcttgcttgattttg

SEQ ID NO: 71250 - DNA, 26 bp, Homo sapiens
caggagagaggcttgcttgattttgc

SEQ ID NO: 71251 - DNA, 26 bp, Homo sapiens
aggagagaggcttgcttgattttgct

SEQ ID NO: 71252 - DNA, 26 bp, Homo sapiens
ggagagaggcttgcttgattttgctt

SEQ ID NO: 71253 - DNA, 26 bp, Homo sapiens
gagagaggcttgcttgattttgctta

SEQ ID NO: 71254 - DNA, 26 bp, Homo sapiens
agagaggcttgcttgattttgcttaa

SEQ ID NO: 71255 - DNA, 26 bp, Homo sapiens
gagaggcttgcttgattttgcttaat

SEQ ID NO: 71256 - DNA, 26 bp, Homo sapiens
agaggcttgcttgattttgcttaatt

SEQ ID NO: 71257 - DNA, 26 bp, Homo sapiens
gaggcttgcttgattttgcttaattc

SEQ ID NO: 71258 - DNA, 26 bp, Homo sapiens
aggcttgcttgattttgcttaattcc

SEQ ID NO: 71259 - DNA, 26 bp, Homo sapiens
ggcttgcttgattttgcttaattccc

SEQ ID NO: 71260 - DNA, 26 bp, Homo sapiens
gcttgcttgattttgcttaattccca

SEQ ID NO: 71261 - DNA, 26 bp, Homo sapiens
cttgcttgattttgcttaattcccac

SEQ ID NO: 71262 - DNA, 26 bp, Homo sapiens
ttgcttgattttgcttaattcccaca

SEQ ID NO: 71263 - DNA, 26 bp, Homo sapiens
tgcttgattttgcttaattcccacat

SEQ ID NO: 71264 - DNA, 26 bp, Homo sapiens
gcttgattttgcttaattcccacatt

SEQ ID NO: 71265 - DNA, 26 bp, Homo sapiens
cttgattttgcttaattcccacattt

SEQ ID NO: 71266 - DNA, 26 bp, Homo sapiens
ttgattttgcttaattcccacatttt

SEQ ID NO: 71267 - DNA, 26 bp, Homo sapiens
tgattttgcttaattcccacattttc

SEQ ID NO: 71268 - DNA, 26 bp, Homo sapiens
gattttgcttaattcccacattttcc

SEQ ID NO: 71269 - DNA, 26 bp, Homo sapiens
attttgcttaattcccacattttcca

SEQ ID NO: 71270 - DNA, 26 bp, Homo sapiens
ttttgcttaattcccacattttccat

SEQ ID NO: 71271 - DNA, 26 bp, Homo sapiens
tttgcttaattcccacattttccatg

SEQ ID NO: 71272 - DNA, 26 bp, Homo sapiens
ttgcttaattcccacattttccatgc

SEQ ID NO: 71273 - DNA, 26 bp, Homo sapiens
tgcttaattcccacattttccatgca

SEQ ID NO: 71274 - DNA, 26 bp, Homo sapiens
gcttaattcccacattttccatgcat

SEQ ID NO: 71275 - DNA, 26 bp, Homo sapiens
cttaattcccacattttccatgcata

SEQ ID NO: 71276 - DNA, 26 bp, Homo sapiens
ttaattcccacattttccatgcatac

SEQ ID NO: 71277 - DNA, 26 bp, Homo sapiens
taattcccacattttccatgcatacc

SEQ ID NO: 71278 - DNA, 26 bp, Homo sapiens
aattcccacattttccatgcatacct

SEQ ID NO: 71279 - DNA, 26 bp, Homo sapiens
attcccacattttccatgcatacctg

SEQ ID NO: 71280 - DNA, 26 bp, Homo sapiens
ttcccacattttccatgcatacctgg

SEQ ID NO: 71281 - DNA, 26 bp, Homo sapiens
tcccacattttccatgcatacctggc

SEQ ID NO: 71282 - DNA, 26 bp, Homo sapiens
cccacattttccatgcatacctggcc

SEQ ID NO: 71283 - DNA, 26 bp, Homo sapiens
ccacattttccatgcatacctggcca

SEQ ID NO: 71284 - DNA, 26 bp, Homo sapiens
cacattttccatgcatacctggccat

SEQ ID NO: 71285 - DNA, 26 bp, Homo sapiens
acattttccatgcatacctggccata

SEQ ID NO: 71286 - DNA, 26 bp, Homo sapiens
cattttccatgcatacctggccatag

SEQ ID NO: 71287 - DNA, 26 bp, Homo sapiens
attttccatgcatacctggccataga

SEQ ID NO: 71288 - DNA, 26 bp, Homo sapiens
ttttccatgcatacctggccatagac

SEQ ID NO: 71289 - DNA, 26 bp, Homo sapiens
tttccatgcatacctggccatagact

SEQ ID NO: 71290 - DNA, 26 bp, Homo sapiens
ttccatgcatacctggccatagactt

SEQ ID NO: 71291 - DNA, 26 bp, Homo sapiens
tccatgcatacctggccatagacttt

SEQ ID NO: 71292 - DNA, 26 bp, Homo sapiens
ccatgcatacctggccatagactttt

SEQ ID NO: 71293 - DNA, 26 bp, Homo sapiens
catgcatacctggccatagacttttt

SEQ ID NO: 71294 - DNA, 26 bp, Homo sapiens
atgcatacctggccatagactttttt

SEQ ID NO: 71295 - DNA, 26 bp, Homo sapiens
tgcatacctggccatagacttttttt

SEQ ID NO: 71296 - DNA, 26 bp, Homo sapiens
gcatacctggccatagactttttttt

SEQ ID NO: 71297 - DNA, 26 bp, Homo sapiens
catacctggccatagacttttttttg

SEQ ID NO: 71298 - DNA, 26 bp, Homo sapiens
atacctggccatagacttttttttgc

SEQ ID NO: 71299 - DNA, 26 bp, Homo sapiens
tacctggccatagacttttttttgca

SEQ ID NO: 71300 - DNA, 26 bp, Homo sapiens
acctggccatagacttttttttgcat

SEQ ID NO: 71301 - DNA, 26 bp, Homo sapiens
cctggccatagacttttttttgcata

SEQ ID NO: 71302 - DNA, 26 bp, Homo sapiens
ctggccatagacttttttttgcataa

SEQ ID NO: 71303 - DNA, 26 bp, Homo sapiens
tggccatagacttttttttgcataac

SEQ ID NO: 71304 - DNA, 26 bp, Homo sapiens
ggccatagacttttttttgcataaca

SEQ ID NO: 71305 - DNA, 26 bp, Homo sapiens
gccatagacttttttttgcataacat

SEQ ID NO: 71306 - DNA, 26 bp, Homo sapiens
ccatagacttttttttgcataacatc

SEQ ID NO: 71307 - DNA, 26 bp, Homo sapiens
catagacttttttttgcataacatct

SEQ ID NO: 71308 - DNA, 26 bp, Homo sapiens
atagacttttttttgcataacatcta

SEQ ID NO: 71309 - DNA, 26 bp, Homo sapiens
tagacttttttttgcataacatctat

SEQ ID NO: 71310 - DNA, 26 bp, Homo sapiens
agacttttttttgcataacatctatg

SEQ ID NO: 71311 - DNA, 26 bp, Homo sapiens
gacttttttttgcataacatctatga

SEQ ID NO: 71312 - DNA, 26 bp, Homo sapiens
acttttttttgcataacatctatgag

SEQ ID NO: 71313 - DNA, 26 bp, Homo sapiens
cttttttttgcataacatctatgagt

SEQ ID NO: 71314 - DNA, 26 bp, Homo sapiens
ttttttttgcataacatctatgagta

SEQ ID NO: 71315 - DNA, 26 bp, Homo sapiens
tttttttgcataacatctatgagtat

SEQ ID NO: 71316 - DNA, 26 bp, Homo sapiens
ttttttgcataacatctatgagtatg

SEQ ID NO: 71317 - DNA, 26 bp, Homo sapiens
tttttgcataacatctatgagtatgt

SEQ ID NO: 71318 - DNA, 26 bp, Homo sapiens
ttttgcataacatctatgagtatgtt

SEQ ID NO: 71319 - DNA, 26 bp, Homo sapiens
tttgcataacatctatgagtatgttt

SEQ ID NO: 71320 - DNA, 26 bp, Homo sapiens
ttgcataacatctatgagtatgtttc

SEQ ID NO: 71321 - DNA, 26 bp, Homo sapiens
tgcataacatctatgagtatgtttca

SEQ ID NO: 71322 - DNA, 26 bp, Homo sapiens
gcataacatctatgagtatgtttcac

SEQ ID NO: 71323 - DNA, 26 bp, Homo sapiens
cataacatctatgagtatgtttcaca

SEQ ID NO: 71324 - DNA, 26 bp, Homo sapiens
ataacatctatgagtatgtttcacac

SEQ ID NO: 71325 - DNA, 26 bp, Homo sapiens
taacatctatgagtatgtttcacaca

SEQ ID NO: 71326 - DNA, 26 bp, Homo sapiens
aacatctatgagtatgtttcacacat

SEQ ID NO: 71327 - DNA, 26 bp, Homo sapiens
acatctatgagtatgtttcacacatg

SEQ ID NO: 71328 - DNA, 26 bp, Homo sapiens
catctatgagtatgtttcacacatgc

SEQ ID NO: 71329 - DNA, 26 bp, Homo sapiens
atctatgagtatgtttcacacatgcc

SEQ ID NO: 71330 - DNA, 26 bp, Homo sapiens
tctatgagtatgtttcacacatgcct

SEQ ID NO: 71331 - DNA, 26 bp, Homo sapiens
ctatgagtatgtttcacacatgcctt

SEQ ID NO: 71332 - DNA, 26 bp, Homo sapiens
tatgagtatgtttcacacatgcctta

SEQ ID NO: 71333 - DNA, 26 bp, Homo sapiens
atgagtatgtttcacacatgccttag

SEQ ID NO: 71334 - DNA, 26 bp, Homo sapiens
tgagtatgtttcacacatgccttagg

SEQ ID NO: 71335 - DNA, 26 bp, Homo sapiens
gagtatgtttcacacatgccttaggg

SEQ ID NO: 71336 - DNA, 26 bp, Homo sapiens
agtatgtttcacacatgccttaggga

SEQ ID NO: 71337 - DNA, 26 bp, Homo sapiens
gtatgtttcacacatgccttagggag

SEQ ID NO: 71338 - DNA, 26 bp, Homo sapiens
tatgtttcacacatgccttagggaga

SEQ ID NO: 71339 - DNA, 26 bp, Homo sapiens
atgtttcacacatgccttagggagac

SEQ ID NO: 71340 - DNA, 26 bp, Homo sapiens
tgtttcacacatgccttagggagact

SEQ ID NO: 71341 - DNA, 26 bp, Homo sapiens
gtttcacacatgccttagggagactc

SEQ ID NO: 71342 - DNA, 26 bp, Homo sapiens
tttcacacatgccttagggagactca

SEQ ID NO: 71343 - DNA, 26 bp, Homo sapiens
ttcacacatgccttagggagactcag

SEQ ID NO: 71344 - DNA, 26 bp, Homo sapiens
tcacacatgccttagggagactcagc

SEQ ID NO: 71345 - DNA, 26 bp, Homo sapiens
cacacatgccttagggagactcagct

SEQ ID NO: 71346 - DNA, 26 bp, Homo sapiens
acacatgccttagggagactcagctt

SEQ ID NO: 71347 - DNA, 26 bp, Homo sapiens
cacatgccttagggagactcagcttt

SEQ ID NO: 71348 - DNA, 26 bp, Homo sapiens
acatgccttagggagactcagctttc

SEQ ID NO: 71349 - DNA, 26 bp, Homo sapiens
catgccttagggagactcagctttct

SEQ ID NO: 71350 - DNA, 26 bp, Homo sapiens
atgccttagggagactcagctttcta

SEQ ID NO: 71351 - DNA, 26 bp, Homo sapiens
tgccttagggagactcagctttctat

SEQ ID NO: 71352 - DNA, 26 bp, Homo sapiens
gccttagggagactcagctttctatc

SEQ ID NO: 71353 - DNA, 26 bp, Homo sapiens
ccttagggagactcagctttctatca

SEQ ID NO: 71354 - DNA, 26 bp, Homo sapiens
cttagggagactcagctttctatcac

SEQ ID NO: 71355 - DNA, 26 bp, Homo sapiens
ttagggagactcagctttctatcaca

SEQ ID NO: 71356 - DNA, 26 bp, Homo sapiens
tagggagactcagctttctatcacat

SEQ ID NO: 71357 - DNA, 26 bp, Homo sapiens
agggagactcagctttctatcacata

SEQ ID NO: 71358 - DNA, 26 bp, Homo sapiens
gggagactcagctttctatcacatag

SEQ ID NO: 71359 - DNA, 26 bp, Homo sapiens
ggagactcagctttctatcacatagt

SEQ ID NO: 71360 - DNA, 26 bp, Homo sapiens
gagactcagctttctatcacatagtg

SEQ ID NO: 71361 - DNA, 26 bp, Homo sapiens
agactcagctttctatcacatagtga

SEQ ID NO: 71362 - DNA, 26 bp, Homo sapiens
gactcagctttctatcacatagtgaa

SEQ ID NO: 71363 - DNA, 26 bp, Homo sapiens
actcagctttctatcacatagtgaag

SEQ ID NO: 71364 - DNA, 26 bp, Homo sapiens
ctcagctttctatcacatagtgaagg

SEQ ID NO: 71365 - DNA, 26 bp, Homo sapiens
tcagctttctatcacatagtgaagga

SEQ ID NO: 71366 - DNA, 26 bp, Homo sapiens
cagctttctatcacatagtgaaggac

SEQ ID NO: 71367 - DNA, 26 bp, Homo sapiens
agctttctatcacatagtgaaggacg

SEQ ID NO: 71368 - DNA, 26 bp, Homo sapiens
gctttctatcacatagtgaaggacga

SEQ ID NO: 71369 - DNA, 26 bp, Homo sapiens
ctttctatcacatagtgaaggacgac

SEQ ID NO: 71370 - DNA, 26 bp, Homo sapiens
tttctatcacatagtgaaggacgacg

SEQ ID NO: 71371 - DNA, 26 bp, Homo sapiens
ttctatcacatagtgaaggacgacgc

SEQ ID NO: 71372 - DNA, 26 bp, Homo sapiens
tctatcacatagtgaaggacgacgca

SEQ ID NO: 71373 - DNA, 26 bp, Homo sapiens
ctatcacatagtgaaggacgacgcat

SEQ ID NO: 71374 - DNA, 26 bp, Homo sapiens
tatcacatagtgaaggacgacgcatt

SEQ ID NO: 71375 - DNA, 26 bp, Homo sapiens
atcacatagtgaaggacgacgcattg

SEQ ID NO: 71376 - DNA, 26 bp, Homo sapiens
tcacatagtgaaggacgacgcattgt

SEQ ID NO: 71377 - DNA, 26 bp, Homo sapiens
cacatagtgaaggacgacgcattgtc

SEQ ID NO: 71378 - DNA, 26 bp, Homo sapiens
acatagtgaaggacgacgcattgtcg

SEQ ID NO: 71379 - DNA, 26 bp, Homo sapiens
catagtgaaggacgacgcattgtcgt

SEQ ID NO: 71380 - DNA, 26 bp, Homo sapiens
atagtgaaggacgacgcattgtcgtt

SEQ ID NO: 71381 - DNA, 26 bp, Homo sapiens
tagtgaaggacgacgcattgtcgtta

SEQ ID NO: 71382 - DNA, 26 bp, Homo sapiens
agtgaaggacgacgcattgtcgttat

SEQ ID NO: 71383 - DNA, 26 bp, Homo sapiens
gtgaaggacgacgcattgtcgttatc

SEQ ID NO: 71384 - DNA, 26 bp, Homo sapiens
tgaaggacgacgcattgtcgttatct

SEQ ID NO: 71385 - DNA, 26 bp, Homo sapiens
gaaggacgacgcattgtcgttatctg

SEQ ID NO: 71386 - DNA, 26 bp, Homo sapiens
aaggacgacgcattgtcgttatctgc

SEQ ID NO: 71387 - DNA, 26 bp, Homo sapiens
aggacgacgcattgtcgttatctgcg

SEQ ID NO: 71388 - DNA, 26 bp, Homo sapiens
ggacgacgcattgtcgttatctgcgg

SEQ ID NO: 71389 - DNA, 26 bp, Homo sapiens
gacgacgcattgtcgttatctgcggt

SEQ ID NO: 71390 - DNA, 26 bp, Homo sapiens
acgacgcattgtcgttatctgcggtc

SEQ ID NO: 71391 - DNA, 26 bp, Homo sapiens
cgacgcattgtcgttatctgcggtct

SEQ ID NO: 71392 - DNA, 26 bp, Homo sapiens
gacgcattgtcgttatctgcggtctc

SEQ ID NO: 71393 - DNA, 26 bp, Homo sapiens
acgcattgtcgttatctgcggtctca

SEQ ID NO: 71394 - DNA, 26 bp, Homo sapiens
cgcattgtcgttatctgcggtctcac

SEQ ID NO: 71395 - DNA, 26 bp, Homo sapiens
gcattgtcgttatctgcggtctcact

SEQ ID NO: 71396 - DNA, 26 bp, Homo sapiens
cattgtcgttatctgcggtctcactg

SEQ ID NO: 71397 - DNA, 26 bp, Homo sapiens
attgtcgttatctgcggtctcactgg

SEQ ID NO: 71398 - DNA, 26 bp, Homo sapiens
ttgtcgttatctgcggtctcactggt

SEQ ID NO: 71399 - DNA, 26 bp, Homo sapiens
tgtcgttatctgcggtctcactggtc

SEQ ID NO: 71400 - DNA, 26 bp, Homo sapiens
gtcgttatctgcggtctcactggtct

SEQ ID NO: 71401 - DNA, 26 bp, Homo sapiens
tcgttatctgcggtctcactggtctg

SEQ ID NO: 71402 - DNA, 26 bp, Homo sapiens
cgttatctgcggtctcactggtctgc

SEQ ID NO: 71403 - DNA, 26 bp, Homo sapiens
gttatctgcggtctcactggtctgcc

SEQ ID NO: 71404 - DNA, 26 bp, Homo sapiens
ttatctgcggtctcactggtctgccg

SEQ ID NO: 71405 - DNA, 26 bp, Homo sapiens
tatctgcggtctcactggtctgccga

SEQ ID NO: 71406 - DNA, 26 bp, Homo sapiens
atctgcggtctcactggtctgccgag

SEQ ID NO: 71407 - DNA, 26 bp, Homo sapiens
tctgcggtctcactggtctgccgaga

SEQ ID NO: 71408 - DNA, 26 bp, Homo sapiens
ctgcggtctcactggtctgccgagaa

SEQ ID NO: 71409 - DNA, 26 bp, Homo sapiens
tgcggtctcactggtctgccgagaaa

SEQ ID NO: 71410 - DNA, 26 bp, Homo sapiens
gcggtctcactggtctgccgagaaat

SEQ ID NO: 71411 - DNA, 26 bp, Homo sapiens
cggtctcactggtctgccgagaaatg

SEQ ID NO: 71412 - DNA, 26 bp, Homo sapiens
ggtctcactggtctgccgagaaatgt

SEQ ID NO: 71413 - DNA, 26 bp, Homo sapiens
gtctcactggtctgccgagaaatgtt

SEQ ID NO: 71414 - DNA, 26 bp, Homo sapiens
tctcactggtctgccgagaaatgttt

SEQ ID NO: 71415 - DNA, 26 bp, Homo sapiens
ctcactggtctgccgagaaatgtttt

SEQ ID NO: 71416 - DNA, 26 bp, Homo sapiens
tcactggtctgccgagaaatgttttc

SEQ ID NO: 71417 - DNA, 26 bp, Homo sapiens
cactggtctgccgagaaatgttttct

SEQ ID NO: 71418 - DNA, 26 bp, Homo sapiens
actggtctgccgagaaatgttttctg

SEQ ID NO: 71419 - DNA, 26 bp, Homo sapiens
ctggtctgccgagaaatgttttctga

SEQ ID NO: 71420 - DNA, 26 bp, Homo sapiens
tggtctgccgagaaatgttttctgag

SEQ ID NO: 71421 - DNA, 26 bp, Homo sapiens
ggtctgccgagaaatgttttctgagt

SEQ ID NO: 71422 - DNA, 26 bp, Homo sapiens
gtctgccgagaaatgttttctgagta

SEQ ID NO: 71423 - DNA, 26 bp, Homo sapiens
tctgccgagaaatgttttctgagtac

SEQ ID NO: 71424 - DNA, 26 bp, Homo sapiens
ctgccgagaaatgttttctgagtacc

SEQ ID NO: 71425 - DNA, 26 bp, Homo sapiens
tgccgagaaatgttttctgagtacct

SEQ ID NO: 71426 - DNA, 26 bp, Homo sapiens
gccgagaaatgttttctgagtacctc

SEQ ID NO: 71427 - DNA, 26 bp, Homo sapiens
ccgagaaatgttttctgagtacctcc

SEQ ID NO: 71428 - DNA, 26 bp, Homo sapiens
cgagaaatgttttctgagtacctccc

SEQ ID NO: 71429 - DNA, 26 bp, Homo sapiens
gagaaatgttttctgagtacctcccg

SEQ ID NO: 71430 - DNA, 26 bp, Homo sapiens
agaaatgttttctgagtacctcccgg

SEQ ID NO: 71431 - DNA, 26 bp, Homo sapiens
gaaatgttttctgagtacctcccggc

SEQ ID NO: 71432 - DNA, 26 bp, Homo sapiens
aaatgttttctgagtacctcccggca

SEQ ID NO: 71433 - DNA, 26 bp, Homo sapiens
aatgttttctgagtacctcccggcac

SEQ ID NO: 71434 - DNA, 26 bp, Homo sapiens
atgttttctgagtacctcccggcaca

SEQ ID NO: 71435 - DNA, 26 bp, Homo sapiens
tgttttctgagtacctcccggcacag

SEQ ID NO: 71436 - DNA, 26 bp, Homo sapiens
gttttctgagtacctcccggcacagg

SEQ ID NO: 71437 - DNA, 26 bp, Homo sapiens
ttttctgagtacctcccggcacagga

SEQ ID NO: 71438 - DNA, 26 bp, Homo sapiens
tttctgagtacctcccggcacaggag

SEQ ID NO: 71439 - DNA, 26 bp, Homo sapiens
ttctgagtacctcccggcacaggaga

SEQ ID NO: 71440 - DNA, 26 bp, Homo sapiens
tctgagtacctcccggcacaggagaa

SEQ ID NO: 71441 - DNA, 26 bp, Homo sapiens
ctgagtacctcccggcacaggagaag

SEQ ID NO: 71442 - DNA, 26 bp, Homo sapiens
tgagtacctcccggcacaggagaagc

SEQ ID NO: 71443 - DNA, 26 bp, Homo sapiens
gagtacctcccggcacaggagaagcc

SEQ ID NO: 71444 - DNA, 26 bp, Homo sapiens
agtacctcccggcacaggagaagcct

SEQ ID NO: 71445 - DNA, 26 bp, Homo sapiens
gtacctcccggcacaggagaagcctg

SEQ ID NO: 71446 - DNA, 26 bp, Homo sapiens
tacctcccggcacaggagaagcctga

SEQ ID NO: 71447 - DNA, 26 bp, Homo sapiens
acctcccggcacaggagaagcctgag

SEQ ID NO: 71448 - DNA, 26 bp, Homo sapiens
cctcccggcacaggagaagcctgagg

SEQ ID NO: 71449 - DNA, 26 bp, Homo sapiens
ctcccggcacaggagaagcctgagga

SEQ ID NO: 71450 - DNA, 26 bp, Homo sapiens
tcccggcacaggagaagcctgaggac

SEQ ID NO: 71451 - DNA, 26 bp, Homo sapiens
cccggcacaggagaagcctgaggact

SEQ ID NO: 71452 - DNA, 26 bp, Homo sapiens
ccggcacaggagaagcctgaggactt

SEQ ID NO: 71453 - DNA, 26 bp, Homo sapiens
cggcacaggagaagcctgaggacttg

SEQ ID NO: 71454 - DNA, 26 bp, Homo sapiens
ggcacaggagaagcctgaggacttgt

SEQ ID NO: 71455 - DNA, 26 bp, Homo sapiens
gcacaggagaagcctgaggacttgta

SEQ ID NO: 71456 - DNA, 26 bp, Homo sapiens
cacaggagaagcctgaggacttgtac

SEQ ID NO: 71457 - DNA, 26 bp, Homo sapiens
acaggagaagcctgaggacttgtact

SEQ ID NO: 71458 - DNA, 26 bp, Homo sapiens
caggagaagcctgaggacttgtactt

SEQ ID NO: 71459 - DNA, 26 bp, Homo sapiens
aggagaagcctgaggacttgtacttc

SEQ ID NO: 71460 - DNA, 26 bp, Homo sapiens
ggagaagcctgaggacttgtacttcc

SEQ ID NO: 71461 - DNA, 26 bp, Homo sapiens
gagaagcctgaggacttgtacttcct

SEQ ID NO: 71462 - DNA, 26 bp, Homo sapiens
agaagcctgaggacttgtacttcctt

SEQ ID NO: 71463 - DNA, 26 bp, Homo sapiens
gaagcctgaggacttgtacttccttc

SEQ ID NO: 71464 - DNA, 26 bp, Homo sapiens
aagcctgaggacttgtacttccttct

SEQ ID NO: 71465 - DNA, 26 bp, Homo sapiens
agcctgaggacttgtacttccttctc

SEQ ID NO: 71466 - DNA, 26 bp, Homo sapiens
gcctgaggacttgtacttccttctca

SEQ ID NO: 71467 - DNA, 26 bp, Homo sapiens
cctgaggacttgtacttccttctcac

SEQ ID NO: 71468 - DNA, 26 bp, Homo sapiens
ctgaggacttgtacttccttctcaca

SEQ ID NO: 71469 - DNA, 26 bp, Homo sapiens
tgaggacttgtacttccttctcacac

SEQ ID NO: 71470 - DNA, 26 bp, Homo sapiens
gaggacttgtacttccttctcacaca

SEQ ID NO: 71471 - DNA, 26 bp, Homo sapiens
aggacttgtacttccttctcacacac

SEQ ID NO: 71472 - DNA, 26 bp, Homo sapiens
ggacttgtacttccttctcacacacc

SEQ ID NO: 71473 - DNA, 26 bp, Homo sapiens
gacttgtacttccttctcacacacca

SEQ ID NO: 71474 - DNA, 26 bp, Homo sapiens
acttgtacttccttctcacacaccac

SEQ ID NO: 71475 - DNA, 26 bp, Homo sapiens
cttgtacttccttctcacacaccaca

SEQ ID NO: 71476 - DNA, 26 bp, Homo sapiens
ttgtacttccttctcacacaccacag

SEQ ID NO: 71477 - DNA, 26 bp, Homo sapiens
tgtacttccttctcacacaccacagg

SEQ ID NO: 71478 - DNA, 26 bp, Homo sapiens
gtacttccttctcacacaccacaggt

SEQ ID NO: 71479 - DNA, 26 bp, Homo sapiens
tacttccttctcacacaccacaggtc

SEQ ID NO: 71480 - DNA, 26 bp, Homo sapiens
acttccttctcacacaccacaggtcc

SEQ ID NO: 71481 - DNA, 26 bp, Homo sapiens
cttccttctcacacaccacaggtcct

SEQ ID NO: 71482 - DNA, 26 bp, Homo sapiens
ttccttctcacacaccacaggtcctt

SEQ ID NO: 71483 - DNA, 26 bp, Homo sapiens
tccttctcacacaccacaggtccttc

SEQ ID NO: 71484 - DNA, 26 bp, Homo sapiens
ccttctcacacaccacaggtccttca

SEQ ID NO: 71485 - DNA, 26 bp, Homo sapiens
cttctcacacaccacaggtccttcaa

SEQ ID NO: 71486 - DNA, 26 bp, Homo sapiens
ttctcacacaccacaggtccttcaag

SEQ ID NO: 71487 - DNA, 26 bp, Homo sapiens
tctcacacaccacaggtccttcaaga

SEQ ID NO: 71488 - DNA, 26 bp, Homo sapiens
ctcacacaccacaggtccttcaagat

SEQ ID NO: 71489 - DNA, 26 bp, Homo sapiens
tcacacaccacaggtccttcaagatc

SEQ ID NO: 71490 - DNA, 26 bp, Homo sapiens
cacacaccacaggtccttcaagatct

SEQ ID NO: 71491 - DNA, 26 bp, Homo sapiens
acacaccacaggtccttcaagatctt

SEQ ID NO: 71492 - DNA, 26 bp, Homo sapiens
cacaccacaggtccttcaagatcttc

SEQ ID NO: 71493 - DNA, 26 bp, Homo sapiens
acaccacaggtccttcaagatcttca

SEQ ID NO: 71494 - DNA, 26 bp, Homo sapiens
caccacaggtccttcaagatcttcag

SEQ ID NO: 71495 - DNA, 26 bp, Homo sapiens
accacaggtccttcaagatcttcaga

SEQ ID NO: 71496 - DNA, 26 bp, Homo sapiens
ccacaggtccttcaagatcttcagaa

SEQ ID NO: 71497 - DNA, 26 bp, Homo sapiens
cacaggtccttcaagatcttcagaaa

SEQ ID NO: 71498 - DNA, 26 bp, Homo sapiens
acaggtccttcaagatcttcagaaag

SEQ ID NO: 71499 - DNA, 26 bp, Homo sapiens
caggtccttcaagatcttcagaaagt

SEQ ID NO: 71500 - DNA, 26 bp, Homo sapiens
aggtccttcaagatcttcagaaagta

SEQ ID NO: 71501 - DNA, 26 bp, Homo sapiens
ggtccttcaagatcttcagaaagtag

SEQ ID NO: 71502 - DNA, 26 bp, Homo sapiens
gtccttcaagatcttcagaaagtagt

SEQ ID NO: 71503 - DNA, 26 bp, Homo sapiens
tccttcaagatcttcagaaagtagtt

SEQ ID NO: 71504 - DNA, 26 bp, Homo sapiens
ccttcaagatcttcagaaagtagttt

SEQ ID NO: 71505 - DNA, 26 bp, Homo sapiens
cttcaagatcttcagaaagtagtttc

SEQ ID NO: 71506 - DNA, 26 bp, Homo sapiens
ttcaagatcttcagaaagtagtttct

SEQ ID NO: 71507 - DNA, 26 bp, Homo sapiens
tcaagatcttcagaaagtagtttctg

SEQ ID NO: 71508 - DNA, 26 bp, Homo sapiens
caagatcttcagaaagtagtttctga

SEQ ID NO: 71509 - DNA, 26 bp, Homo sapiens
aagatcttcagaaagtagtttctgaa

SEQ ID NO: 71510 - DNA, 26 bp, Homo sapiens
agatcttcagaaagtagtttctgaac

SEQ ID NO: 71511 - DNA, 26 bp, Homo sapiens
gatcttcagaaagtagtttctgaact

SEQ ID NO: 71512 - DNA, 26 bp, Homo sapiens
atcttcagaaagtagtttctgaactt

SEQ ID NO: 71513 - DNA, 26 bp, Homo sapiens
tcttcagaaagtagtttctgaacttc

SEQ ID NO: 71514 - DNA, 26 bp, Homo sapiens
cttcagaaagtagtttctgaacttct

SEQ ID NO: 71515 - DNA, 26 bp, Homo sapiens
ttcagaaagtagtttctgaacttctg

SEQ ID NO: 71516 - DNA, 26 bp, Homo sapiens
tcagaaagtagtttctgaacttctgc

SEQ ID NO: 71517 - DNA, 26 bp, Homo sapiens
cagaaagtagtttctgaacttctgcc

SEQ ID NO: 71518 - DNA, 26 bp, Homo sapiens
agaaagtagtttctgaacttctgccc

SEQ ID NO: 71519 - DNA, 26 bp, Homo sapiens
gaaagtagtttctgaacttctgccca

SEQ ID NO: 71520 - DNA, 26 bp, Homo sapiens
aaagtagtttctgaacttctgcccaa

SEQ ID NO: 71521 - DNA, 26 bp, Homo sapiens
aagtagtttctgaacttctgcccaat

SEQ ID NO: 71522 - DNA, 26 bp, Homo sapiens
agtagtttctgaacttctgcccaata

SEQ ID NO: 71523 - DNA, 26 bp, Homo sapiens
gtagtttctgaacttctgcccaataa

SEQ ID NO: 71524 - DNA, 26 bp, Homo sapiens
tagtttctgaacttctgcccaataaa

SEQ ID NO: 71525 - DNA, 26 bp, Homo sapiens
agtttctgaacttctgcccaataaaa

SEQ ID NO: 71526 - DNA, 26 bp, Homo sapiens
gtttctgaacttctgcccaataaaag

SEQ ID NO: 71527 - DNA, 26 bp, Homo sapiens
tttctgaacttctgcccaataaaagc

SEQ ID NO: 71528 - DNA, 26 bp, Homo sapiens
ttctgaacttctgcccaataaaagcg

SEQ ID NO: 71529 - DNA, 26 bp, Homo sapiens
tctgaacttctgcccaataaaagcgt

SEQ ID NO: 71530 - DNA, 26 bp, Homo sapiens
ctgaacttctgcccaataaaagcgta

SEQ ID NO: 71531 - DNA, 26 bp, Homo sapiens
tgaacttctgcccaataaaagcgtag

SEQ ID NO: 71532 - DNA, 26 bp, Homo sapiens
gaacttctgcccaataaaagcgtaga

SEQ ID NO: 71533 - DNA, 26 bp, Homo sapiens
aacttctgcccaataaaagcgtagag

SEQ ID NO: 71534 - DNA, 26 bp, Homo sapiens
acttctgcccaataaaagcgtagagc

SEQ ID NO: 71535 - DNA, 26 bp, Homo sapiens
cttctgcccaataaaagcgtagagca

SEQ ID NO: 71536 - DNA, 26 bp, Homo sapiens
ttctgcccaataaaagcgtagagcac

SEQ ID NO: 71537 - DNA, 26 bp, Homo sapiens
tctgcccaataaaagcgtagagcaca

SEQ ID NO: 71538 - DNA, 26 bp, Homo sapiens
ctgcccaataaaagcgtagagcacag

SEQ ID NO: 71539 - DNA, 26 bp, Homo sapiens
tgcccaataaaagcgtagagcacagg

SEQ ID NO: 71540 - DNA, 26 bp, Homo sapiens
gcccaataaaagcgtagagcacaggg

SEQ ID NO: 71541 - DNA, 26 bp, Homo sapiens
cccaataaaagcgtagagcacagggt

SEQ ID NO: 71542 - DNA, 26 bp, Homo sapiens
ccaataaaagcgtagagcacagggtt

SEQ ID NO: 71543 - DNA, 26 bp, Homo sapiens
caataaaagcgtagagcacagggttc

SEQ ID NO: 71544 - DNA, 26 bp, Homo sapiens
aataaaagcgtagagcacagggttca

SEQ ID NO: 71545 - DNA, 26 bp, Homo sapiens
ataaaagcgtagagcacagggttcag

SEQ ID NO: 71546 - DNA, 26 bp, Homo sapiens
taaaagcgtagagcacagggttcagg

SEQ ID NO: 71547 - DNA, 26 bp, Homo sapiens
aaaagcgtagagcacagggttcaggc

SEQ ID NO: 71548 - DNA, 26 bp, Homo sapiens
aaagcgtagagcacagggttcaggca

SEQ ID NO: 71549 - DNA, 26 bp, Homo sapiens
aagcgtagagcacagggttcaggcag

SEQ ID NO: 71550 - DNA, 26 bp, Homo sapiens
agcgtagagcacagggttcaggcagc

SEQ ID NO: 71551 - DNA, 26 bp, Homo sapiens
gcgtagagcacagggttcaggcagca

SEQ ID NO: 71552 - DNA, 26 bp, Homo sapiens
cgtagagcacagggttcaggcagcag

SEQ ID NO: 71553 - DNA, 26 bp, Homo sapiens
gtagagcacagggttcaggcagcagt

SEQ ID NO: 71554 - DNA, 26 bp, Homo sapiens
tagagcacagggttcaggcagcagtg

SEQ ID NO: 71555 - DNA, 26 bp, Homo sapiens
agagcacagggttcaggcagcagtgc

SEQ ID NO: 71556 - DNA, 26 bp, Homo sapiens
gagcacagggttcaggcagcagtgca

SEQ ID NO: 71557 - DNA, 26 bp, Homo sapiens
agcacagggttcaggcagcagtgcag

SEQ ID NO: 71558 - DNA, 26 bp, Homo sapiens
gcacagggttcaggcagcagtgcagg

SEQ ID NO: 71559 - DNA, 26 bp, Homo sapiens
cacagggttcaggcagcagtgcagga

SEQ ID NO: 71560 - DNA, 26 bp, Homo sapiens
acagggttcaggcagcagtgcaggaa

SEQ ID NO: 71561 - DNA, 26 bp, Homo sapiens
cagggttcaggcagcagtgcaggaaa

SEQ ID NO: 71562 - DNA, 26 bp, Homo sapiens
agggttcaggcagcagtgcaggaaag

SEQ ID NO: 71563 - DNA, 26 bp, Homo sapiens
gggttcaggcagcagtgcaggaaagc

SEQ ID NO: 71564 - DNA, 26 bp, Homo sapiens
ggttcaggcagcagtgcaggaaagcc

SEQ ID NO: 71565 - DNA, 26 bp, Homo sapiens
gttcaggcagcagtgcaggaaagcca

SEQ ID NO: 71566 - DNA, 26 bp, Homo sapiens
ttcaggcagcagtgcaggaaagccag

SEQ ID NO: 71567 - DNA, 26 bp, Homo sapiens
tcaggcagcagtgcaggaaagccagg

SEQ ID NO: 71568 - DNA, 26 bp, Homo sapiens
caggcagcagtgcaggaaagccagga

SEQ ID NO: 71569 - DNA, 26 bp, Homo sapiens
aggcagcagtgcaggaaagccaggac

SEQ ID NO: 71570 - DNA, 26 bp, Homo sapiens
ggcagcagtgcaggaaagccaggact

SEQ ID NO: 71571 - DNA, 26 bp, Homo sapiens
gcagcagtgcaggaaagccaggactt

SEQ ID NO: 71572 - DNA, 26 bp, Homo sapiens
cagcagtgcaggaaagccaggacttc

SEQ ID NO: 71573 - DNA, 26 bp, Homo sapiens
agcagtgcaggaaagccaggacttct

SEQ ID NO: 71574 - DNA, 26 bp, Homo sapiens
gcagtgcaggaaagccaggacttctg

SEQ ID NO: 71575 - DNA, 26 bp, Homo sapiens
cagtgcaggaaagccaggacttctgt

SEQ ID NO: 71576 - DNA, 26 bp, Homo sapiens
agtgcaggaaagccaggacttctgtg

SEQ ID NO: 71577 - DNA, 26 bp, Homo sapiens
gtgcaggaaagccaggacttctgtga

SEQ ID NO: 71578 - DNA, 26 bp, Homo sapiens
tgcaggaaagccaggacttctgtgac

SEQ ID NO: 71579 - DNA, 26 bp, Homo sapiens
gcaggaaagccaggacttctgtgaca

SEQ ID NO: 71580 - DNA, 26 bp, Homo sapiens
caggaaagccaggacttctgtgacag

SEQ ID NO: 71581 - DNA, 26 bp, Homo sapiens
aggaaagccaggacttctgtgacagt

SEQ ID NO: 71582 - DNA, 26 bp, Homo sapiens
ggaaagccaggacttctgtgacagtt

SEQ ID NO: 71583 - DNA, 26 bp, Homo sapiens
gaaagccaggacttctgtgacagttt

SEQ ID NO: 71584 - DNA, 26 bp, Homo sapiens
aaagccaggacttctgtgacagtttt

SEQ ID NO: 71585 - DNA, 26 bp, Homo sapiens
aagccaggacttctgtgacagttttc

SEQ ID NO: 71586 - DNA, 26 bp, Homo sapiens
agccaggacttctgtgacagttttcg

SEQ ID NO: 71587 - DNA, 26 bp, Homo sapiens
gccaggacttctgtgacagttttcgt

SEQ ID NO: 71588 - DNA, 26 bp, Homo sapiens
ccaggacttctgtgacagttttcgta

SEQ ID NO: 71589 - DNA, 26 bp, Homo sapiens
caggacttctgtgacagttttcgtat

SEQ ID NO: 71590 - DNA, 26 bp, Homo sapiens
aggacttctgtgacagttttcgtata

SEQ ID NO: 71591 - DNA, 26 bp, Homo sapiens
ggacttctgtgacagttttcgtatag

SEQ ID NO: 71592 - DNA, 26 bp, Homo sapiens
gacttctgtgacagttttcgtatagc

SEQ ID NO: 71593 - DNA, 26 bp, Homo sapiens
acttctgtgacagttttcgtatagcc

SEQ ID NO: 71594 - DNA, 26 bp, Homo sapiens
cttctgtgacagttttcgtatagcca

SEQ ID NO: 71595 - DNA, 26 bp, Homo sapiens
ttctgtgacagttttcgtatagccaa

SEQ ID NO: 71596 - DNA, 26 bp, Homo sapiens
tctgtgacagttttcgtatagccaat

SEQ ID NO: 71597 - DNA, 26 bp, Homo sapiens
ctgtgacagttttcgtatagccaatt

SEQ ID NO: 71598 - DNA, 26 bp, Homo sapiens
tgtgacagttttcgtatagccaatta

SEQ ID NO: 71599 - DNA, 26 bp, Homo sapiens
gtgacagttttcgtatagccaattag

SEQ ID NO: 71600 - DNA, 26 bp, Homo sapiens
tgacagttttcgtatagccaattagc

SEQ ID NO: 71601 - DNA, 26 bp, Homo sapiens
gacagttttcgtatagccaattagct

SEQ ID NO: 71602 - DNA, 26 bp, Homo sapiens
acagttttcgtatagccaattagctt

SEQ ID NO: 71603 - DNA, 26 bp, Homo sapiens
cagttttcgtatagccaattagcttt

SEQ ID NO: 71604 - DNA, 26 bp, Homo sapiens
agttttcgtatagccaattagctttt

SEQ ID NO: 71605 - DNA, 26 bp, Homo sapiens
gttttcgtatagccaattagcttttc

SEQ ID NO: 71606 - DNA, 26 bp, Homo sapiens
ttttcgtatagccaattagcttttcg

SEQ ID NO: 71607 - DNA, 26 bp, Homo sapiens
tttcgtatagccaattagcttttcgc

SEQ ID NO: 71608 - DNA, 26 bp, Homo sapiens
ttcgtatagccaattagcttttcgct

SEQ ID NO: 71609 - DNA, 26 bp, Homo sapiens
tcgtatagccaattagcttttcgctc

SEQ ID NO: 71610 - DNA, 26 bp, Homo sapiens
cgtatagccaattagcttttcgctct

SEQ ID NO: 71611 - DNA, 26 bp, Homo sapiens
gtatagccaattagcttttcgctctg

SEQ ID NO: 71612 - DNA, 26 bp, Homo sapiens
tatagccaattagcttttcgctctgg

SEQ ID NO: 71613 - DNA, 26 bp, Homo sapiens
atagccaattagcttttcgctctggc

SEQ ID NO: 71614 - DNA, 26 bp, Homo sapiens
tagccaattagcttttcgctctggca

SEQ ID NO: 71615 - DNA, 26 bp, Homo sapiens
agccaattagcttttcgctctggcag

SEQ ID NO: 71616 - DNA, 26 bp, Homo sapiens
gccaattagcttttcgctctggcagg

SEQ ID NO: 71617 - DNA, 26 bp, Homo sapiens
ccaattagcttttcgctctggcagga

SEQ ID NO: 71618 - DNA, 26 bp, Homo sapiens
caattagcttttcgctctggcaggat

SEQ ID NO: 71619 - DNA, 26 bp, Homo sapiens
aattagcttttcgctctggcaggatc

SEQ ID NO: 71620 - DNA, 26 bp, Homo sapiens
attagcttttcgctctggcaggatcg

SEQ ID NO: 71621 - DNA, 26 bp, Homo sapiens
ttagcttttcgctctggcaggatcgg

SEQ ID NO: 71622 - DNA, 26 bp, Homo sapiens
tagcttttcgctctggcaggatcggt

SEQ ID NO: 71623 - DNA, 26 bp, Homo sapiens
agcttttcgctctggcaggatcggtt

SEQ ID NO: 71624 - DNA, 26 bp, Homo sapiens
gcttttcgctctggcaggatcggttc

SEQ ID NO: 71625 - DNA, 26 bp, Homo sapiens
cttttcgctctggcaggatcggttca

SEQ ID NO: 71626 - DNA, 26 bp, Homo sapiens
ttttcgctctggcaggatcggttcat

SEQ ID NO: 71627 - DNA, 26 bp, Homo sapiens
tttcgctctggcaggatcggttcatt

SEQ ID NO: 71628 - DNA, 26 bp, Homo sapiens
ttcgctctggcaggatcggttcattt

SEQ ID NO: 71629 - DNA, 26 bp, Homo sapiens
tcgctctggcaggatcggttcatttt

SEQ ID NO: 71630 - DNA, 26 bp, Homo sapiens
cgctctggcaggatcggttcatttta

SEQ ID NO: 71631 - DNA, 26 bp, Homo sapiens
gctctggcaggatcggttcattttac

SEQ ID NO: 71632 - DNA, 26 bp, Homo sapiens
ctctggcaggatcggttcattttacc

SEQ ID NO: 71633 - DNA, 26 bp, Homo sapiens
tctggcaggatcggttcattttaccc

SEQ ID NO: 71634 - DNA, 26 bp, Homo sapiens
ctggcaggatcggttcattttaccca

SEQ ID NO: 71635 - DNA, 26 bp, Homo sapiens
tggcaggatcggttcattttacccaa

SEQ ID NO: 71636 - DNA, 26 bp, Homo sapiens
ggcaggatcggttcattttacccaaa

SEQ ID NO: 71637 - DNA, 26 bp, Homo sapiens
gcaggatcggttcattttacccaaat

SEQ ID NO: 71638 - DNA, 26 bp, Homo sapiens
caggatcggttcattttacccaaatt

SEQ ID NO: 71639 - DNA, 26 bp, Homo sapiens
aggatcggttcattttacccaaattt

SEQ ID NO: 71640 - DNA, 26 bp, Homo sapiens
ggatcggttcattttacccaaatttg

SEQ ID NO: 71641 - DNA, 26 bp, Homo sapiens
gatcggttcattttacccaaatttgc

SEQ ID NO: 71642 - DNA, 26 bp, Homo sapiens
atcggttcattttacccaaatttgca

SEQ ID NO: 71643 - DNA, 26 bp, Homo sapiens
tcggttcattttacccaaatttgcag

SEQ ID NO: 71644 - DNA, 26 bp, Homo sapiens
cggttcattttacccaaatttgcagc

SEQ ID NO: 71645 - DNA, 26 bp, Homo sapiens
ggttcattttacccaaatttgcagcc

SEQ ID NO: 71646 - DNA, 26 bp, Homo sapiens
gttcattttacccaaatttgcagccg

SEQ ID NO: 71647 - DNA, 26 bp, Homo sapiens
ttcattttacccaaatttgcagccgt

SEQ ID NO: 71648 - DNA, 26 bp, Homo sapiens
tcattttacccaaatttgcagccgtc

SEQ ID NO: 71649 - DNA, 26 bp, Homo sapiens
cattttacccaaatttgcagccgtca

SEQ ID NO: 71650 - DNA, 26 bp, Homo sapiens
attttacccaaatttgcagccgtcac

SEQ ID NO: 71651 - DNA, 26 bp, Homo sapiens
ttttacccaaatttgcagccgtcaca

SEQ ID NO: 71652 - DNA, 26 bp, Homo sapiens
tttacccaaatttgcagccgtcacaa

SEQ ID NO: 71653 - DNA, 26 bp, Homo sapiens
ttacccaaatttgcagccgtcacaag

SEQ ID NO: 71654 - DNA, 26 bp, Homo sapiens
tacccaaatttgcagccgtcacaagc

SEQ ID NO: 71655 - DNA, 26 bp, Homo sapiens
acccaaatttgcagccgtcacaagca

SEQ ID NO: 71656 - DNA, 26 bp, Homo sapiens
cccaaatttgcagccgtcacaagcag

SEQ ID NO: 71657 - DNA, 26 bp, Homo sapiens
ccaaatttgcagccgtcacaagcagg

SEQ ID NO: 71658 - DNA, 26 bp, Homo sapiens
caaatttgcagccgtcacaagcagga

SEQ ID NO: 71659 - DNA, 26 bp, Homo sapiens
aaatttgcagccgtcacaagcaggac

SEQ ID NO: 71660 - DNA, 26 bp, Homo sapiens
aatttgcagccgtcacaagcaggacc

SEQ ID NO: 71661 - DNA, 26 bp, Homo sapiens
atttgcagccgtcacaagcaggacca

SEQ ID NO: 71662 - DNA, 26 bp, Homo sapiens
tttgcagccgtcacaagcaggaccat

SEQ ID NO: 71663 - DNA, 26 bp, Homo sapiens
ttgcagccgtcacaagcaggaccatg

SEQ ID NO: 71664 - DNA, 26 bp, Homo sapiens
tgcagccgtcacaagcaggaccatgt

SEQ ID NO: 71665 - DNA, 26 bp, Homo sapiens
gcagccgtcacaagcaggaccatgtt

SEQ ID NO: 71666 - DNA, 26 bp, Homo sapiens
cagccgtcacaagcaggaccatgtta

SEQ ID NO: 71667 - DNA, 26 bp, Homo sapiens
agccgtcacaagcaggaccatgttat

SEQ ID NO: 71668 - DNA, 26 bp, Homo sapiens
gccgtcacaagcaggaccatgttatg

SEQ ID NO: 71669 - DNA, 26 bp, Homo sapiens
ccgtcacaagcaggaccatgttatga

SEQ ID NO: 71670 - DNA, 26 bp, Homo sapiens
cgtcacaagcaggaccatgttatgag

SEQ ID NO: 71671 - DNA, 26 bp, Homo sapiens
gtcacaagcaggaccatgttatgagg

SEQ ID NO: 71672 - DNA, 26 bp, Homo sapiens
tcacaagcaggaccatgttatgagga

SEQ ID NO: 71673 - DNA, 26 bp, Homo sapiens
cacaagcaggaccatgttatgaggaa

SEQ ID NO: 71674 - DNA, 26 bp, Homo sapiens
acaagcaggaccatgttatgaggaat

SEQ ID NO: 71675 - DNA, 26 bp, Homo sapiens
caagcaggaccatgttatgaggaatc

SEQ ID NO: 71676 - DNA, 26 bp, Homo sapiens
aagcaggaccatgttatgaggaatct

SEQ ID NO: 71677 - DNA, 26 bp, Homo sapiens
agcaggaccatgttatgaggaatctg

SEQ ID NO: 71678 - DNA, 26 bp, Homo sapiens
gcaggaccatgttatgaggaatctga

SEQ ID NO: 71679 - DNA, 26 bp, Homo sapiens
caggaccatgttatgaggaatctgac

SEQ ID NO: 71680 - DNA, 26 bp, Homo sapiens
aggaccatgttatgaggaatctgaca

SEQ ID NO: 71681 - DNA, 26 bp, Homo sapiens
ggaccatgttatgaggaatctgacaa

SEQ ID NO: 71682 - DNA, 26 bp, Homo sapiens
gaccatgttatgaggaatctgacaag

SEQ ID NO: 71683 - DNA, 26 bp, Homo sapiens
accatgttatgaggaatctgacaagc

SEQ ID NO: 71684 - DNA, 26 bp, Homo sapiens
ccatgttatgaggaatctgacaagcc

SEQ ID NO: 71685 - DNA, 26 bp, Homo sapiens
catgttatgaggaatctgacaagcca

SEQ ID NO: 71686 - DNA, 26 bp, Homo sapiens
atgttatgaggaatctgacaagccag

SEQ ID NO: 71687 - DNA, 26 bp, Homo sapiens
tgttatgaggaatctgacaagccaga

SEQ ID NO: 71688 - DNA, 26 bp, Homo sapiens
gttatgaggaatctgacaagccagaa

SEQ ID NO: 71689 - DNA, 26 bp, Homo sapiens
ttatgaggaatctgacaagccagaaa

SEQ ID NO: 71690 - DNA, 26 bp, Homo sapiens
tatgaggaatctgacaagccagaaac

SEQ ID NO: 71691 - DNA, 26 bp, Homo sapiens
atgaggaatctgacaagccagaaaca

SEQ ID NO: 71692 - DNA, 26 bp, Homo sapiens
tgaggaatctgacaagccagaaacac

SEQ ID NO: 71693 - DNA, 26 bp, Homo sapiens
gaggaatctgacaagccagaaacaca

SEQ ID NO: 71694 - DNA, 26 bp, Homo sapiens
aggaatctgacaagccagaaacacaa

SEQ ID NO: 71695 - DNA, 26 bp, Homo sapiens
ggaatctgacaagccagaaacacaag

SEQ ID NO: 71696 - DNA, 26 bp, Homo sapiens
gaatctgacaagccagaaacacaagc

SEQ ID NO: 71697 - DNA, 26 bp, Homo sapiens
aatctgacaagccagaaacacaagca

SEQ ID NO: 71698 - DNA, 26 bp, Homo sapiens
atctgacaagccagaaacacaagcac

SEQ ID NO: 71699 - DNA, 26 bp, Homo sapiens
tctgacaagccagaaacacaagcacc

SEQ ID NO: 71700 - DNA, 26 bp, Homo sapiens
ctgacaagccagaaacacaagcacca

SEQ ID NO: 71701 - DNA, 26 bp, Homo sapiens
tgacaagccagaaacacaagcaccac

SEQ ID NO: 71702 - DNA, 26 bp, Homo sapiens
gacaagccagaaacacaagcaccaca

SEQ ID NO: 71703 - DNA, 26 bp, Homo sapiens
acaagccagaaacacaagcaccacag

SEQ ID NO: 71704 - DNA, 26 bp, Homo sapiens
caagccagaaacacaagcaccacagc

SEQ ID NO: 71705 - DNA, 26 bp, Homo sapiens
aagccagaaacacaagcaccacagct

SEQ ID NO: 71706 - DNA, 26 bp, Homo sapiens
agccagaaacacaagcaccacagcta

SEQ ID NO: 71707 - DNA, 26 bp, Homo sapiens
gccagaaacacaagcaccacagctat

SEQ ID NO: 71708 - DNA, 26 bp, Homo sapiens
ccagaaacacaagcaccacagctatg

SEQ ID NO: 71709 - DNA, 26 bp, Homo sapiens
cagaaacacaagcaccacagctatga

SEQ ID NO: 71710 - DNA, 26 bp, Homo sapiens
agaaacacaagcaccacagctatgat

SEQ ID NO: 71711 - DNA, 26 bp, Homo sapiens
gaaacacaagcaccacagctatgatt

SEQ ID NO: 71712 - DNA, 26 bp, Homo sapiens
aaacacaagcaccacagctatgatta

SEQ ID NO: 71713 - DNA, 26 bp, Homo sapiens
aacacaagcaccacagctatgattac

SEQ ID NO: 71714 - DNA, 26 bp, Homo sapiens
acacaagcaccacagctatgattaca

SEQ ID NO: 71715 - DNA, 26 bp, Homo sapiens
cacaagcaccacagctatgattacac

SEQ ID NO: 71716 - DNA, 26 bp, Homo sapiens
acaagcaccacagctatgattacacg

SEQ ID NO: 71717 - DNA, 26 bp, Homo sapiens
caagcaccacagctatgattacacgg

SEQ ID NO: 71718 - DNA, 26 bp, Homo sapiens
aagcaccacagctatgattacacgga

SEQ ID NO: 71719 - DNA, 26 bp, Homo sapiens
agcaccacagctatgattacacggat

SEQ ID NO: 71720 - DNA, 26 bp, Homo sapiens
gcaccacagctatgattacacggatg

SEQ ID NO: 71721 - DNA, 26 bp, Homo sapiens
caccacagctatgattacacggatgg

SEQ ID NO: 71722 - DNA, 26 bp, Homo sapiens
accacagctatgattacacggatggc

SEQ ID NO: 71723 - DNA, 26 bp, Homo sapiens
ccacagctatgattacacggatggct

SEQ ID NO: 71724 - DNA, 26 bp, Homo sapiens
cacagctatgattacacggatggctt

SEQ ID NO: 71725 - DNA, 26 bp, Homo sapiens
acagctatgattacacggatggcttt

SEQ ID NO: 71726 - DNA, 26 bp, Homo sapiens
cagctatgattacacggatggctttg

SEQ ID NO: 71727 - DNA, 26 bp, Homo sapiens
agctatgattacacggatggctttgt

SEQ ID NO: 71728 - DNA, 26 bp, Homo sapiens
gctatgattacacggatggctttgtg

SEQ ID NO: 71729 - DNA, 26 bp, Homo sapiens
ctatgattacacggatggctttgtgc

SEQ ID NO: 71730 - DNA, 26 bp, Homo sapiens
tatgattacacggatggctttgtgcc

SEQ ID NO: 71731 - DNA, 26 bp, Homo sapiens
atgattacacggatggctttgtgcct

SEQ ID NO: 71732 - DNA, 26 bp, Homo sapiens
tgattacacggatggctttgtgcctt

SEQ ID NO: 71733 - DNA, 26 bp, Homo sapiens
gattacacggatggctttgtgccttt

SEQ ID NO: 71734 - DNA, 26 bp, Homo sapiens
attacacggatggctttgtgcctttt

SEQ ID NO: 71735 - DNA, 26 bp, Homo sapiens
ttacacggatggctttgtgcctttta

SEQ ID NO: 71736 - DNA, 26 bp, Homo sapiens
tacacggatggctttgtgccttttag

SEQ ID NO: 71737 - DNA, 26 bp, Homo sapiens
acacggatggctttgtgccttttaga

SEQ ID NO: 71738 - DNA, 26 bp, Homo sapiens
cacggatggctttgtgccttttagaa

SEQ ID NO: 71739 - DNA, 26 bp, Homo sapiens
acggatggctttgtgccttttagaat

SEQ ID NO: 71740 - DNA, 26 bp, Homo sapiens
cggatggctttgtgccttttagaatt

SEQ ID NO: 71741 - DNA, 26 bp, Homo sapiens
ggatggctttgtgccttttagaattc

SEQ ID NO: 71742 - DNA, 26 bp, Homo sapiens
gatggctttgtgccttttagaattct

SEQ ID NO: 71743 - DNA, 26 bp, Homo sapiens
atggctttgtgccttttagaattctg

SEQ ID NO: 71744 - DNA, 26 bp, Homo sapiens
tggctttgtgccttttagaattctga

SEQ ID NO: 71745 - DNA, 26 bp, Homo sapiens
ggctttgtgccttttagaattctgag

SEQ ID NO: 71746 - DNA, 26 bp, Homo sapiens
gctttgtgccttttagaattctgagc

SEQ ID NO: 71747 - DNA, 26 bp, Homo sapiens
ctttgtgccttttagaattctgagct

SEQ ID NO: 71748 - DNA, 26 bp, Homo sapiens
tttgtgccttttagaattctgagctt

SEQ ID NO: 71749 - DNA, 26 bp, Homo sapiens
ttgtgccttttagaattctgagcttg

SEQ ID NO: 71750 - DNA, 26 bp, Homo sapiens
tgtgccttttagaattctgagcttgc

SEQ ID NO: 71751 - DNA, 26 bp, Homo sapiens
gtgccttttagaattctgagcttgca

SEQ ID NO: 71752 - DNA, 26 bp, Homo sapiens
tgccttttagaattctgagcttgcac

SEQ ID NO: 71753 - DNA, 26 bp, Homo sapiens
gccttttagaattctgagcttgcacc

SEQ ID NO: 71754 - DNA, 26 bp, Homo sapiens
ccttttagaattctgagcttgcacca

SEQ ID NO: 71755 - DNA, 26 bp, Homo sapiens
cttttagaattctgagcttgcaccaa

SEQ ID NO: 71756 - DNA, 26 bp, Homo sapiens
ttttagaattctgagcttgcaccaag

SEQ ID NO: 71757 - DNA, 26 bp, Homo sapiens
tttagaattctgagcttgcaccaagg

SEQ ID NO: 71758 - DNA, 26 bp, Homo sapiens
ttagaattctgagcttgcaccaaggt

SEQ ID NO: 71759 - DNA, 26 bp, Homo sapiens
tagaattctgagcttgcaccaaggtt

SEQ ID NO: 71760 - DNA, 26 bp, Homo sapiens
agaattctgagcttgcaccaaggttt

SEQ ID NO: 71761 - DNA, 26 bp, Homo sapiens
gaattctgagcttgcaccaaggtttt

SEQ ID NO: 71762 - DNA, 26 bp, Homo sapiens
aattctgagcttgcaccaaggttttg

SEQ ID NO: 71763 - DNA, 26 bp, Homo sapiens
attctgagcttgcaccaaggttttga

SEQ ID NO: 71764 - DNA, 26 bp, Homo sapiens
ttctgagcttgcaccaaggttttgac

SEQ ID NO: 71765 - DNA, 26 bp, Homo sapiens
tctgagcttgcaccaaggttttgaca

SEQ ID NO: 71766 - DNA, 26 bp, Homo sapiens
ctgagcttgcaccaaggttttgacaa

SEQ ID NO: 71767 - DNA, 26 bp, Homo sapiens
tgagcttgcaccaaggttttgacaat

SEQ ID NO: 71768 - DNA, 26 bp, Homo sapiens
gagcttgcaccaaggttttgacaatg

SEQ ID NO: 71769 - DNA, 26 bp, Homo sapiens
agcttgcaccaaggttttgacaatga

SEQ ID NO: 71770 - DNA, 26 bp, Homo sapiens
gcttgcaccaaggttttgacaatgaa

SEQ ID NO: 71771 - DNA, 26 bp, Homo sapiens
cttgcaccaaggttttgacaatgaac

SEQ ID NO: 71772 - DNA, 26 bp, Homo sapiens
ttgcaccaaggttttgacaatgaacg

SEQ ID NO: 71773 - DNA, 26 bp, Homo sapiens
tgcaccaaggttttgacaatgaacgt

SEQ ID NO: 71774 - DNA, 26 bp, Homo sapiens
gcaccaaggttttgacaatgaacgtg

SEQ ID NO: 71775 - DNA, 26 bp, Homo sapiens
caccaaggttttgacaatgaacgtgt

SEQ ID NO: 71776 - DNA, 26 bp, Homo sapiens
accaaggttttgacaatgaacgtgta

SEQ ID NO: 71777 - DNA, 26 bp, Homo sapiens
ccaaggttttgacaatgaacgtgtaa

SEQ ID NO: 71778 - DNA, 26 bp, Homo sapiens
caaggttttgacaatgaacgtgtaac

SEQ ID NO: 71779 - DNA, 26 bp, Homo sapiens
aaggttttgacaatgaacgtgtaaca

SEQ ID NO: 71780 - DNA, 26 bp, Homo sapiens
aggttttgacaatgaacgtgtaacaa

SEQ ID NO: 71781 - DNA, 26 bp, Homo sapiens
ggttttgacaatgaacgtgtaacaaa

SEQ ID NO: 71782 - DNA, 26 bp, Homo sapiens
gttttgacaatgaacgtgtaacaaaa

SEQ ID NO: 71783 - DNA, 26 bp, Homo sapiens
ttttgacaatgaacgtgtaacaaaat

SEQ ID NO: 71784 - DNA, 26 bp, Homo sapiens
tttgacaatgaacgtgtaacaaaata

SEQ ID NO: 71785 - DNA, 26 bp, Homo sapiens
ttgacaatgaacgtgtaacaaaatat

SEQ ID NO: 71786 - DNA, 26 bp, Homo sapiens
tgacaatgaacgtgtaacaaaatatc

SEQ ID NO: 71787 - DNA, 26 bp, Homo sapiens
gacaatgaacgtgtaacaaaatatca

SEQ ID NO: 71788 - DNA, 26 bp, Homo sapiens
acaatgaacgtgtaacaaaatatcat

SEQ ID NO: 71789 - DNA, 26 bp, Homo sapiens
caatgaacgtgtaacaaaatatcatg

SEQ ID NO: 71790 - DNA, 26 bp, Homo sapiens
aatgaacgtgtaacaaaatatcatga

SEQ ID NO: 71791 - DNA, 26 bp, Homo sapiens
atgaacgtgtaacaaaatatcatgaa

SEQ ID NO: 71792 - DNA, 26 bp, Homo sapiens
tgaacgtgtaacaaaatatcatgaac

SEQ ID NO: 71793 - DNA, 26 bp, Homo sapiens
gaacgtgtaacaaaatatcatgaaca

SEQ ID NO: 71794 - DNA, 26 bp, Homo sapiens
aacgtgtaacaaaatatcatgaacat

SEQ ID NO: 71795 - DNA, 26 bp, Homo sapiens
acgtgtaacaaaatatcatgaacatc

SEQ ID NO: 71796 - DNA, 26 bp, Homo sapiens
cgtgtaacaaaatatcatgaacatca

SEQ ID NO: 71797 - DNA, 26 bp, Homo sapiens
gtgtaacaaaatatcatgaacatcaa

SEQ ID NO: 71798 - DNA, 26 bp, Homo sapiens
tgtaacaaaatatcatgaacatcaaa

SEQ ID NO: 71799 - DNA, 26 bp, Homo sapiens
gtaacaaaatatcatgaacatcaaag

SEQ ID NO: 71800 - DNA, 26 bp, Homo sapiens
taacaaaatatcatgaacatcaaagg

SEQ ID NO: 71801 - DNA, 26 bp, Homo sapiens
aacaaaatatcatgaacatcaaaggg

SEQ ID NO: 71802 - DNA, 26 bp, Homo sapiens
acaaaatatcatgaacatcaaaggga

SEQ ID NO: 71803 - DNA, 26 bp, Homo sapiens
caaaatatcatgaacatcaaagggat

SEQ ID NO: 71804 - DNA, 26 bp, Homo sapiens
aaaatatcatgaacatcaaagggata

SEQ ID NO: 71805 - DNA, 26 bp, Homo sapiens
aaatatcatgaacatcaaagggataa

SEQ ID NO: 71806 - DNA, 26 bp, Homo sapiens
aatatcatgaacatcaaagggataaa

SEQ ID NO: 71807 - DNA, 26 bp, Homo sapiens
atatcatgaacatcaaagggataaag

SEQ ID NO: 71808 - DNA, 26 bp, Homo sapiens
tatcatgaacatcaaagggataaaga

SEQ ID NO: 71809 - DNA, 26 bp, Homo sapiens
atcatgaacatcaaagggataaagaa

SEQ ID NO: 71810 - DNA, 26 bp, Homo sapiens
tcatgaacatcaaagggataaagaaa

SEQ ID NO: 71811 - DNA, 26 bp, Homo sapiens
catgaacatcaaagggataaagaaac

SEQ ID NO: 71812 - DNA, 26 bp, Homo sapiens
atgaacatcaaagggataaagaaacc

SEQ ID NO: 71813 - DNA, 26 bp, Homo sapiens
tgaacatcaaagggataaagaaacca

SEQ ID NO: 71814 - DNA, 26 bp, Homo sapiens
gaacatcaaagggataaagaaaccaa

SEQ ID NO: 71815 - DNA, 26 bp, Homo sapiens
aacatcaaagggataaagaaaccaaa

SEQ ID NO: 71816 - DNA, 26 bp, Homo sapiens
acatcaaagggataaagaaaccaaag

SEQ ID NO: 71817 - DNA, 26 bp, Homo sapiens
catcaaagggataaagaaaccaaaga

SEQ ID NO: 71818 - DNA, 26 bp, Homo sapiens
atcaaagggataaagaaaccaaagag

SEQ ID NO: 71819 - DNA, 26 bp, Homo sapiens
tcaaagggataaagaaaccaaagagt

SEQ ID NO: 71820 - DNA, 26 bp, Homo sapiens
caaagggataaagaaaccaaagagta

SEQ ID NO: 71821 - DNA, 26 bp, Homo sapiens
aaagggataaagaaaccaaagagtag

SEQ ID NO: 71822 - DNA, 26 bp, Homo sapiens
aagggataaagaaaccaaagagtagc

SEQ ID NO: 71823 - DNA, 26 bp, Homo sapiens
agggataaagaaaccaaagagtagct

SEQ ID NO: 71824 - DNA, 26 bp, Homo sapiens
gggataaagaaaccaaagagtagctc

SEQ ID NO: 71825 - DNA, 26 bp, Homo sapiens
ggataaagaaaccaaagagtagctca

SEQ ID NO: 71826 - DNA, 26 bp, Homo sapiens
gataaagaaaccaaagagtagctcaa

SEQ ID NO: 71827 - DNA, 26 bp, Homo sapiens
ataaagaaaccaaagagtagctcaag

SEQ ID NO: 71828 - DNA, 26 bp, Homo sapiens
taaagaaaccaaagagtagctcaagc

SEQ ID NO: 71829 - DNA, 26 bp, Homo sapiens
aaagaaaccaaagagtagctcaagcc

SEQ ID NO: 71830 - DNA, 26 bp, Homo sapiens
aagaaaccaaagagtagctcaagccc

SEQ ID NO: 71831 - DNA, 26 bp, Homo sapiens
agaaaccaaagagtagctcaagcccc

SEQ ID NO: 71832 - DNA, 26 bp, Homo sapiens
gaaaccaaagagtagctcaagcccca

SEQ ID NO: 71833 - DNA, 26 bp, Homo sapiens
aaaccaaagagtagctcaagccccaa

SEQ ID NO: 71834 - DNA, 26 bp, Homo sapiens
aaccaaagagtagctcaagccccaac

SEQ ID NO: 71835 - DNA, 26 bp, Homo sapiens
accaaagagtagctcaagccccaaca

SEQ ID NO: 71836 - DNA, 26 bp, Homo sapiens
ccaaagagtagctcaagccccaacat

SEQ ID NO: 71837 - DNA, 26 bp, Homo sapiens
caaagagtagctcaagccccaacatc

SEQ ID NO: 71838 - DNA, 26 bp, Homo sapiens
aaagagtagctcaagccccaacatca

SEQ ID NO: 71839 - DNA, 26 bp, Homo sapiens
aagagtagctcaagccccaacatcag

SEQ ID NO: 71840 - DNA, 26 bp, Homo sapiens
agagtagctcaagccccaacatcagc

SEQ ID NO: 71841 - DNA, 26 bp, Homo sapiens
gagtagctcaagccccaacatcagca

SEQ ID NO: 71842 - DNA, 26 bp, Homo sapiens
agtagctcaagccccaacatcagcag

SEQ ID NO: 71843 - DNA, 26 bp, Homo sapiens
gtagctcaagccccaacatcagcagc

SEQ ID NO: 71844 - DNA, 26 bp, Homo sapiens
tagctcaagccccaacatcagcagct

SEQ ID NO: 71845 - DNA, 26 bp, Homo sapiens
agctcaagccccaacatcagcagctt

SEQ ID NO: 71846 - DNA, 26 bp, Homo sapiens
gctcaagccccaacatcagcagcttc

SEQ ID NO: 71847 - DNA, 26 bp, Homo sapiens
ctcaagccccaacatcagcagcttcc

SEQ ID NO: 71848 - DNA, 26 bp, Homo sapiens
tcaagccccaacatcagcagcttcca

SEQ ID NO: 71849 - DNA, 26 bp, Homo sapiens
caagccccaacatcagcagcttccac

SEQ ID NO: 71850 - DNA, 26 bp, Homo sapiens
aagccccaacatcagcagcttccacc

SEQ ID NO: 71851 - DNA, 26 bp, Homo sapiens
agccccaacatcagcagcttccacct

SEQ ID NO: 71852 - DNA, 26 bp, Homo sapiens
gccccaacatcagcagcttccacctg

SEQ ID NO: 71853 - DNA, 26 bp, Homo sapiens
ccccaacatcagcagcttccacctga

SEQ ID NO: 71854 - DNA, 26 bp, Homo sapiens
cccaacatcagcagcttccacctgat

SEQ ID NO: 71855 - DNA, 26 bp, Homo sapiens
ccaacatcagcagcttccacctgatg

SEQ ID NO: 71856 - DNA, 26 bp, Homo sapiens
caacatcagcagcttccacctgatgg

SEQ ID NO: 71857 - DNA, 26 bp, Homo sapiens
aacatcagcagcttccacctgatggg

SEQ ID NO: 71858 - DNA, 26 bp, Homo sapiens
acatcagcagcttccacctgatgggc

SEQ ID NO: 71859 - DNA, 26 bp, Homo sapiens
catcagcagcttccacctgatgggct

SEQ ID NO: 71860 - DNA, 26 bp, Homo sapiens
atcagcagcttccacctgatgggctc

SEQ ID NO: 71861 - DNA, 26 bp, Homo sapiens
tcagcagcttccacctgatgggctcc

SEQ ID NO: 71862 - DNA, 26 bp, Homo sapiens
cagcagcttccacctgatgggctccg

SEQ ID NO: 71863 - DNA, 26 bp, Homo sapiens
agcagcttccacctgatgggctccga

SEQ ID NO: 71864 - DNA, 26 bp, Homo sapiens
gcagcttccacctgatgggctccgag

SEQ ID NO: 71865 - DNA, 26 bp, Homo sapiens
cagcttccacctgatgggctccgaga

SEQ ID NO: 71866 - DNA, 26 bp, Homo sapiens
agcttccacctgatgggctccgagac

SEQ ID NO: 71867 - DNA, 26 bp, Homo sapiens
gcttccacctgatgggctccgagaca

SEQ ID NO: 71868 - DNA, 26 bp, Homo sapiens
cttccacctgatgggctccgagacag

SEQ ID NO: 71869 - DNA, 26 bp, Homo sapiens
ttccacctgatgggctccgagacagt

SEQ ID NO: 71870 - DNA, 26 bp, Homo sapiens
tccacctgatgggctccgagacagtc

SEQ ID NO: 71871 - DNA, 26 bp, Homo sapiens
ccacctgatgggctccgagacagtct

SEQ ID NO: 71872 - DNA, 26 bp, Homo sapiens
cacctgatgggctccgagacagtctg

SEQ ID NO: 71873 - DNA, 26 bp, Homo sapiens
acctgatgggctccgagacagtctgg

SEQ ID NO: 71874 - DNA, 26 bp, Homo sapiens
cctgatgggctccgagacagtctggt

SEQ ID NO: 71875 - DNA, 26 bp, Homo sapiens
ctgatgggctccgagacagtctggta

SEQ ID NO: 71876 - DNA, 26 bp, Homo sapiens
tgatgggctccgagacagtctggtac

SEQ ID NO: 71877 - DNA, 26 bp, Homo sapiens
gatgggctccgagacagtctggtact

SEQ ID NO: 71878 - DNA, 26 bp, Homo sapiens
atgggctccgagacagtctggtactt

SEQ ID NO: 71879 - DNA, 26 bp, Homo sapiens
tgggctccgagacagtctggtacttg

SEQ ID NO: 71880 - DNA, 26 bp, Homo sapiens
gggctccgagacagtctggtacttgg

SEQ ID NO: 71881 - DNA, 26 bp, Homo sapiens
ggctccgagacagtctggtacttggg

SEQ ID NO: 71882 - DNA, 26 bp, Homo sapiens
gctccgagacagtctggtacttgggt

SEQ ID NO: 71883 - DNA, 26 bp, Homo sapiens
ctccgagacagtctggtacttgggtt

SEQ ID NO: 71884 - DNA, 26 bp, Homo sapiens
tccgagacagtctggtacttgggttc

SEQ ID NO: 71885 - DNA, 26 bp, Homo sapiens
ccgagacagtctggtacttgggttca

SEQ ID NO: 71886 - DNA, 26 bp, Homo sapiens
cgagacagtctggtacttgggttcac

SEQ ID NO: 71887 - DNA, 26 bp, Homo sapiens
gagacagtctggtacttgggttcaca

SEQ ID NO: 71888 - DNA, 26 bp, Homo sapiens
agacagtctggtacttgggttcacag

SEQ ID NO: 71889 - DNA, 26 bp, Homo sapiens
gacagtctggtacttgggttcacaga

SEQ ID NO: 71890 - DNA, 26 bp, Homo sapiens
acagtctggtacttgggttcacagac

SEQ ID NO: 71891 - DNA, 26 bp, Homo sapiens
cagtctggtacttgggttcacagaca

SEQ ID NO: 71892 - DNA, 26 bp, Homo sapiens
agtctggtacttgggttcacagacat

SEQ ID NO: 71893 - DNA, 26 bp, Homo sapiens
gtctggtacttgggttcacagacatc

SEQ ID NO: 71894 - DNA, 26 bp, Homo sapiens
tctggtacttgggttcacagacatcg

SEQ ID NO: 71895 - DNA, 26 bp, Homo sapiens
ctggtacttgggttcacagacatcgc

SEQ ID NO: 71896 - DNA, 26 bp, Homo sapiens
tggtacttgggttcacagacatcgct

SEQ ID NO: 71897 - DNA, 26 bp, Homo sapiens
ggtacttgggttcacagacatcgctg

SEQ ID NO: 71898 - DNA, 26 bp, Homo sapiens
gtacttgggttcacagacatcgctgc

SEQ ID NO: 71899 - DNA, 26 bp, Homo sapiens
tacttgggttcacagacatcgctgcc

SEQ ID NO: 71900 - DNA, 26 bp, Homo sapiens
acttgggttcacagacatcgctgcct

SEQ ID NO: 71901 - DNA, 26 bp, Homo sapiens
cttgggttcacagacatcgctgcctt

SEQ ID NO: 71902 - DNA, 26 bp, Homo sapiens
ttgggttcacagacatcgctgccttg

SEQ ID NO: 71903 - DNA, 26 bp, Homo sapiens
tgggttcacagacatcgctgccttgg

SEQ ID NO: 71904 - DNA, 26 bp, Homo sapiens
gggttcacagacatcgctgccttggg

SEQ ID NO: 71905 - DNA, 26 bp, Homo sapiens
ggttcacagacatcgctgccttgggt

SEQ ID NO: 71906 - DNA, 26 bp, Homo sapiens
gttcacagacatcgctgccttgggtg

SEQ ID NO: 71907 - DNA, 26 bp, Homo sapiens
ttcacagacatcgctgccttgggtgt

SEQ ID NO: 71908 - DNA, 26 bp, Homo sapiens
tcacagacatcgctgccttgggtgtt

SEQ ID NO: 71909 - DNA, 26 bp, Homo sapiens
cacagacatcgctgccttgggtgttg

SEQ ID NO: 71910 - DNA, 26 bp, Homo sapiens
acagacatcgctgccttgggtgttgt

SEQ ID NO: 71911 - DNA, 26 bp, Homo sapiens
cagacatcgctgccttgggtgttgta

SEQ ID NO: 71912 - DNA, 26 bp, Homo sapiens
agacatcgctgccttgggtgttgtat

SEQ ID NO: 71913 - DNA, 26 bp, Homo sapiens
gacatcgctgccttgggtgttgtatt

SEQ ID NO: 71914 - DNA, 26 bp, Homo sapiens
acatcgctgccttgggtgttgtattt

SEQ ID NO: 71915 - DNA, 26 bp, Homo sapiens
catcgctgccttgggtgttgtatttt

SEQ ID NO: 71916 - DNA, 26 bp, Homo sapiens
atcgctgccttgggtgttgtattttt

SEQ ID NO: 71917 - DNA, 26 bp, Homo sapiens
tcgctgccttgggtgttgtatttttg

SEQ ID NO: 71918 - DNA, 26 bp, Homo sapiens
cgctgccttgggtgttgtatttttgg

SEQ ID NO: 71919 - DNA, 26 bp, Homo sapiens
gctgccttgggtgttgtatttttggt

SEQ ID NO: 71920 - DNA, 26 bp, Homo sapiens
ctgccttgggtgttgtatttttggtt

SEQ ID NO: 71921 - DNA, 26 bp, Homo sapiens
tgccttgggtgttgtatttttggttg

SEQ ID NO: 71922 - DNA, 26 bp, Homo sapiens
gccttgggtgttgtatttttggttga

SEQ ID NO: 71923 - DNA, 26 bp, Homo sapiens
ccttgggtgttgtatttttggttgaa

SEQ ID NO: 71924 - DNA, 26 bp, Homo sapiens
cttgggtgttgtatttttggttgaag

SEQ ID NO: 71925 - DNA, 26 bp, Homo sapiens
ttgggtgttgtatttttggttgaaga

SEQ ID NO: 71926 - DNA, 26 bp, Homo sapiens
tgggtgttgtatttttggttgaagac

SEQ ID NO: 71927 - DNA, 26 bp, Homo sapiens
gggtgttgtatttttggttgaagaca

SEQ ID NO: 71928 - DNA, 26 bp, Homo sapiens
ggtgttgtatttttggttgaagacaa

SEQ ID NO: 71929 - DNA, 26 bp, Homo sapiens
gtgttgtatttttggttgaagacaaa

SEQ ID NO: 71930 - DNA, 26 bp, Homo sapiens
tgttgtatttttggttgaagacaaaa

SEQ ID NO: 71931 - DNA, 26 bp, Homo sapiens
gttgtatttttggttgaagacaaaag

SEQ ID NO: 71932 - DNA, 26 bp, Homo sapiens
ttgtatttttggttgaagacaaaagt

SEQ ID NO: 71933 - DNA, 26 bp, Homo sapiens
tgtatttttggttgaagacaaaagtt

SEQ ID NO: 71934 - DNA, 26 bp, Homo sapiens
gtatttttggttgaagacaaaagttg

SEQ ID NO: 71935 - DNA, 26 bp, Homo sapiens
tatttttggttgaagacaaaagttga

SEQ ID NO: 71936 - DNA, 26 bp, Homo sapiens
atttttggttgaagacaaaagttgag

SEQ ID NO: 71937 - DNA, 26 bp, Homo sapiens
tttttggttgaagacaaaagttgagc

SEQ ID NO: 71938 - DNA, 26 bp, Homo sapiens
ttttggttgaagacaaaagttgagct

SEQ ID NO: 71939 - DNA, 26 bp, Homo sapiens
tttggttgaagacaaaagttgagctg

SEQ ID NO: 71940 - DNA, 26 bp, Homo sapiens
ttggttgaagacaaaagttgagctgg

SEQ ID NO: 71941 - DNA, 26 bp, Homo sapiens
tggttgaagacaaaagttgagctgga

SEQ ID NO: 71942 - DNA, 26 bp, Homo sapiens
ggttgaagacaaaagttgagctggag

SEQ ID NO: 71943 - DNA, 26 bp, Homo sapiens
gttgaagacaaaagttgagctggaga

SEQ ID NO: 71944 - DNA, 26 bp, Homo sapiens
ttgaagacaaaagttgagctggagat

SEQ ID NO: 71945 - DNA, 26 bp, Homo sapiens
tgaagacaaaagttgagctggagatg

SEQ ID NO: 71946 - DNA, 26 bp, Homo sapiens
gaagacaaaagttgagctggagatga

SEQ ID NO: 71947 - DNA, 26 bp, Homo sapiens
aagacaaaagttgagctggagatgat

SEQ ID NO: 71948 - DNA, 26 bp, Homo sapiens
agacaaaagttgagctggagatgatg

SEQ ID NO: 71949 - DNA, 26 bp, Homo sapiens
gacaaaagttgagctggagatgatga

SEQ ID NO: 71950 - DNA, 26 bp, Homo sapiens
acaaaagttgagctggagatgatgac

SEQ ID NO: 71951 - DNA, 26 bp, Homo sapiens
caaaagttgagctggagatgatgact

SEQ ID NO: 71952 - DNA, 26 bp, Homo sapiens
aaaagttgagctggagatgatgactg

SEQ ID NO: 71953 - DNA, 26 bp, Homo sapiens
aaagttgagctggagatgatgactga

SEQ ID NO: 71954 - DNA, 26 bp, Homo sapiens
aagttgagctggagatgatgactgac

SEQ ID NO: 71955 - DNA, 26 bp, Homo sapiens
agttgagctggagatgatgactgaca

SEQ ID NO: 71956 - DNA, 26 bp, Homo sapiens
gttgagctggagatgatgactgacag

SEQ ID NO: 71957 - DNA, 26 bp, Homo sapiens
ttgagctggagatgatgactgacagc

SEQ ID NO: 71958 - DNA, 26 bp, Homo sapiens
tgagctggagatgatgactgacagcc

SEQ ID NO: 71959 - DNA, 26 bp, Homo sapiens
gagctggagatgatgactgacagccc

SEQ ID NO: 71960 - DNA, 26 bp, Homo sapiens
agctggagatgatgactgacagcccc

SEQ ID NO: 71961 - DNA, 26 bp, Homo sapiens
gctggagatgatgactgacagccccc

SEQ ID NO: 71962 - DNA, 26 bp, Homo sapiens
ctggagatgatgactgacagccccca

SEQ ID NO: 71963 - DNA, 26 bp, Homo sapiens
tggagatgatgactgacagcccccac

SEQ ID NO: 71964 - DNA, 26 bp, Homo sapiens
ggagatgatgactgacagcccccaca

SEQ ID NO: 71965 - DNA, 26 bp, Homo sapiens
gagatgatgactgacagcccccacac

SEQ ID NO: 71966 - DNA, 26 bp, Homo sapiens
agatgatgactgacagcccccacaca

SEQ ID NO: 71967 - DNA, 26 bp, Homo sapiens
gatgatgactgacagcccccacacaa

SEQ ID NO: 71968 - DNA, 26 bp, Homo sapiens
atgatgactgacagcccccacacaac

SEQ ID NO: 71969 - DNA, 26 bp, Homo sapiens
tgatgactgacagcccccacacaaca

SEQ ID NO: 71970 - DNA, 26 bp, Homo sapiens
gatgactgacagcccccacacaacaa

SEQ ID NO: 71971 - DNA, 26 bp, Homo sapiens
atgactgacagcccccacacaacaag

SEQ ID NO: 71972 - DNA, 26 bp, Homo sapiens
tgactgacagcccccacacaacaagg

SEQ ID NO: 71973 - DNA, 26 bp, Homo sapiens
gactgacagcccccacacaacaaggc

SEQ ID NO: 71974 - DNA, 26 bp, Homo sapiens
actgacagcccccacacaacaaggca

SEQ ID NO: 71975 - DNA, 26 bp, Homo sapiens
ctgacagcccccacacaacaaggcag

SEQ ID NO: 71976 - DNA, 26 bp, Homo sapiens
tgacagcccccacacaacaaggcaga

SEQ ID NO: 71977 - DNA, 26 bp, Homo sapiens
gacagcccccacacaacaaggcagat

SEQ ID NO: 71978 - DNA, 26 bp, Homo sapiens
acagcccccacacaacaaggcagatg

SEQ ID NO: 71979 - DNA, 26 bp, Homo sapiens
cagcccccacacaacaaggcagatga

SEQ ID NO: 71980 - DNA, 26 bp, Homo sapiens
agcccccacacaacaaggcagatgat

SEQ ID NO: 71981 - DNA, 26 bp, Homo sapiens
gcccccacacaacaaggcagatgatt

SEQ ID NO: 71982 - DNA, 26 bp, Homo sapiens
cccccacacaacaaggcagatgattt

SEQ ID NO: 71983 - DNA, 26 bp, Homo sapiens
ccccacacaacaaggcagatgatttt

SEQ ID NO: 71984 - DNA, 26 bp, Homo sapiens
cccacacaacaaggcagatgattttg

SEQ ID NO: 71985 - DNA, 26 bp, Homo sapiens
ccacacaacaaggcagatgattttgc

SEQ ID NO: 71986 - DNA, 26 bp, Homo sapiens
cacacaacaaggcagatgattttgct

SEQ ID NO: 71987 - DNA, 26 bp, Homo sapiens
acacaacaaggcagatgattttgctg

SEQ ID NO: 71988 - DNA, 26 bp, Homo sapiens
cacaacaaggcagatgattttgctgc

SEQ ID NO: 71989 - DNA, 26 bp, Homo sapiens
acaacaaggcagatgattttgctgcg

SEQ ID NO: 71990 - DNA, 26 bp, Homo sapiens
caacaaggcagatgattttgctgcgc

SEQ ID NO: 71991 - DNA, 26 bp, Homo sapiens
aacaaggcagatgattttgctgcgcg

SEQ ID NO: 71992 - DNA, 26 bp, Homo sapiens
acaaggcagatgattttgctgcgcgg

SEQ ID NO: 71993 - DNA, 26 bp, Homo sapiens
caaggcagatgattttgctgcgcggt

SEQ ID NO: 71994 - DNA, 26 bp, Homo sapiens
aaggcagatgattttgctgcgcggta

SEQ ID NO: 71995 - DNA, 26 bp, Homo sapiens
aggcagatgattttgctgcgcggtag

SEQ ID NO: 71996 - DNA, 26 bp, Homo sapiens
ggcagatgattttgctgcgcggtagt

SEQ ID NO: 71997 - DNA, 26 bp, Homo sapiens
gcagatgattttgctgcgcggtagtg

SEQ ID NO: 71998 - DNA, 26 bp, Homo sapiens
cagatgattttgctgcgcggtagtgt

SEQ ID NO: 71999 - DNA, 26 bp, Homo sapiens
agatgattttgctgcgcggtagtgtt

SEQ ID NO: 72000 - DNA, 26 bp, Homo sapiens
gatgattttgctgcgcggtagtgttc

SEQ ID NO: 72001 - DNA, 26 bp, Homo sapiens
atgattttgctgcgcggtagtgttct

SEQ ID NO: 72002 - DNA, 26 bp, Homo sapiens
tgattttgctgcgcggtagtgttctg

SEQ ID NO: 72003 - DNA, 26 bp, Homo sapiens
gattttgctgcgcggtagtgttctgg

SEQ ID NO: 72004 - DNA, 26 bp, Homo sapiens
attttgctgcgcggtagtgttctgga

SEQ ID NO: 72005 - DNA, 26 bp, Homo sapiens
ttttgctgcgcggtagtgttctggat

SEQ ID NO: 72006 - DNA, 26 bp, Homo sapiens
tttgctgcgcggtagtgttctggatc

SEQ ID NO: 72007 - DNA, 26 bp, Homo sapiens
ttgctgcgcggtagtgttctggatcg

SEQ ID NO: 72008 - DNA, 26 bp, Homo sapiens
tgctgcgcggtagtgttctggatcgg

SEQ ID NO: 72009 - DNA, 26 bp, Homo sapiens
gctgcgcggtagtgttctggatcgga

SEQ ID NO: 72010 - DNA, 26 bp, Homo sapiens
ctgcgcggtagtgttctggatcggag

SEQ ID NO: 72011 - DNA, 26 bp, Homo sapiens
tgcgcggtagtgttctggatcggagc

SEQ ID NO: 72012 - DNA, 26 bp, Homo sapiens
gcgcggtagtgttctggatcggagcc

SEQ ID NO: 72013 - DNA, 26 bp, Homo sapiens
cgcggtagtgttctggatcggagccg

SEQ ID NO: 72014 - DNA, 26 bp, Homo sapiens
gcggtagtgttctggatcggagccgg

SEQ ID NO: 72015 - DNA, 26 bp, Homo sapiens
cggtagtgttctggatcggagccgga

SEQ ID NO: 72016 - DNA, 26 bp, Homo sapiens
ggtagtgttctggatcggagccggaa

SEQ ID NO: 72017 - DNA, 26 bp, Homo sapiens
gtagtgttctggatcggagccggaat

SEQ ID NO: 72018 - DNA, 26 bp, Homo sapiens
tagtgttctggatcggagccggaatg

SEQ ID NO: 72019 - DNA, 26 bp, Homo sapiens
agtgttctggatcggagccggaatga

SEQ ID NO: 72020 - DNA, 26 bp, Homo sapiens
gtgttctggatcggagccggaatgac

SEQ ID NO: 72021 - DNA, 26 bp, Homo sapiens
tgttctggatcggagccggaatgact

SEQ ID NO: 72022 - DNA, 26 bp, Homo sapiens
gttctggatcggagccggaatgactt

SEQ ID NO: 72023 - DNA, 26 bp, Homo sapiens
ttctggatcggagccggaatgactta

SEQ ID NO: 72024 - DNA, 26 bp, Homo sapiens
tctggatcggagccggaatgacttag

SEQ ID NO: 72025 - DNA, 26 bp, Homo sapiens
ctggatcggagccggaatgacttagt

SEQ ID NO: 72026 - DNA, 26 bp, Homo sapiens
tggatcggagccggaatgacttagtc

SEQ ID NO: 72027 - DNA, 26 bp, Homo sapiens
ggatcggagccggaatgacttagtcg

SEQ ID NO: 72028 - DNA, 26 bp, Homo sapiens
gatcggagccggaatgacttagtcgc

SEQ ID NO: 72029 - DNA, 26 bp, Homo sapiens
atcggagccggaatgacttagtcgcc

SEQ ID NO: 72030 - DNA, 26 bp, Homo sapiens
tcggagccggaatgacttagtcgcct

SEQ ID NO: 72031 - DNA, 26 bp, Homo sapiens
cggagccggaatgacttagtcgcctg

SEQ ID NO: 72032 - DNA, 26 bp, Homo sapiens
ggagccggaatgacttagtcgcctgt

SEQ ID NO: 72033 - DNA, 26 bp, Homo sapiens
gagccggaatgacttagtcgcctgta

SEQ ID NO: 72034 - DNA, 26 bp, Homo sapiens
agccggaatgacttagtcgcctgtac

SEQ ID NO: 72035 - DNA, 26 bp, Homo sapiens
gccggaatgacttagtcgcctgtaca

SEQ ID NO: 72036 - DNA, 26 bp, Homo sapiens
ccggaatgacttagtcgcctgtacaa

SEQ ID NO: 72037 - DNA, 26 bp, Homo sapiens
cggaatgacttagtcgcctgtacaat

SEQ ID NO: 72038 - DNA, 26 bp, Homo sapiens
ggaatgacttagtcgcctgtacaatg

SEQ ID NO: 72039 - DNA, 26 bp, Homo sapiens
gaatgacttagtcgcctgtacaatgg

SEQ ID NO: 72040 - DNA, 26 bp, Homo sapiens
aatgacttagtcgcctgtacaatggc

SEQ ID NO: 72041 - DNA, 26 bp, Homo sapiens
atgacttagtcgcctgtacaatggcg

SEQ ID NO: 72042 - DNA, 26 bp, Homo sapiens
tgacttagtcgcctgtacaatggcga

SEQ ID NO: 72043 - DNA, 26 bp, Homo sapiens
gacttagtcgcctgtacaatggcgat

SEQ ID NO: 72044 - DNA, 26 bp, Homo sapiens
acttagtcgcctgtacaatggcgatg

SEQ ID NO: 72045 - DNA, 26 bp, Homo sapiens
cttagtcgcctgtacaatggcgatgt

SEQ ID NO: 72046 - DNA, 26 bp, Homo sapiens
ttagtcgcctgtacaatggcgatgta

SEQ ID NO: 72047 - DNA, 26 bp, Homo sapiens
tagtcgcctgtacaatggcgatgtac

SEQ ID NO: 72048 - DNA, 26 bp, Homo sapiens
agtcgcctgtacaatggcgatgtacc

SEQ ID NO: 72049 - DNA, 26 bp, Homo sapiens
gtcgcctgtacaatggcgatgtaccg

SEQ ID NO: 72050 - DNA, 26 bp, Homo sapiens
tcgcctgtacaatggcgatgtaccgg

SEQ ID NO: 72051 - DNA, 26 bp, Homo sapiens
cgcctgtacaatggcgatgtaccggt

SEQ ID NO: 72052 - DNA, 26 bp, Homo sapiens
gcctgtacaatggcgatgtaccggtc

SEQ ID NO: 72053 - DNA, 26 bp, Homo sapiens
cctgtacaatggcgatgtaccggtcc

SEQ ID NO: 72054 - DNA, 26 bp, Homo sapiens
ctgtacaatggcgatgtaccggtcca

SEQ ID NO: 72055 - DNA, 26 bp, Homo sapiens
tgtacaatggcgatgtaccggtccat

SEQ ID NO: 72056 - DNA, 26 bp, Homo sapiens
gtacaatggcgatgtaccggtccatg

SEQ ID NO: 72057 - DNA, 26 bp, Homo sapiens
tacaatggcgatgtaccggtccatgc

SEQ ID NO: 72058 - DNA, 26 bp, Homo sapiens
acaatggcgatgtaccggtccatgct

SEQ ID NO: 72059 - DNA, 26 bp, Homo sapiens
caatggcgatgtaccggtccatgcta

SEQ ID NO: 72060 - DNA, 26 bp, Homo sapiens
aatggcgatgtaccggtccatgctaa

SEQ ID NO: 72061 - DNA, 26 bp, Homo sapiens
atggcgatgtaccggtccatgctaat

SEQ ID NO: 72062 - DNA, 26 bp, Homo sapiens
tggcgatgtaccggtccatgctaatg

SEQ ID NO: 72063 - DNA, 26 bp, Homo sapiens
ggcgatgtaccggtccatgctaatgc

SEQ ID NO: 72064 - DNA, 26 bp, Homo sapiens
gcgatgtaccggtccatgctaatgca

SEQ ID NO: 72065 - DNA, 26 bp, Homo sapiens
cgatgtaccggtccatgctaatgcaa

SEQ ID NO: 72066 - DNA, 26 bp, Homo sapiens
gatgtaccggtccatgctaatgcaag

SEQ ID NO: 72067 - DNA, 26 bp, Homo sapiens
atgtaccggtccatgctaatgcaagt

SEQ ID NO: 72068 - DNA, 26 bp, Homo sapiens
tgtaccggtccatgctaatgcaagtc

SEQ ID NO: 72069 - DNA, 26 bp, Homo sapiens
gtaccggtccatgctaatgcaagtca

SEQ ID NO: 72070 - DNA, 26 bp, Homo sapiens
taccggtccatgctaatgcaagtcag

SEQ ID NO: 72071 - DNA, 26 bp, Homo sapiens
accggtccatgctaatgcaagtcagg

SEQ ID NO: 72072 - DNA, 26 bp, Homo sapiens
ccggtccatgctaatgcaagtcagga

SEQ ID NO: 72073 - DNA, 26 bp, Homo sapiens
cggtccatgctaatgcaagtcaggag

SEQ ID NO: 72074 - DNA, 26 bp, Homo sapiens
ggtccatgctaatgcaagtcaggagc

SEQ ID NO: 72075 - DNA, 26 bp, Homo sapiens
gtccatgctaatgcaagtcaggagca

SEQ ID NO: 72076 - DNA, 26 bp, Homo sapiens
tccatgctaatgcaagtcaggagcag

SEQ ID NO: 72077 - DNA, 26 bp, Homo sapiens
ccatgctaatgcaagtcaggagcagc

SEQ ID NO: 72078 - DNA, 26 bp, Homo sapiens
catgctaatgcaagtcaggagcagca

SEQ ID NO: 72079 - DNA, 26 bp, Homo sapiens
atgctaatgcaagtcaggagcagcat

SEQ ID NO: 72080 - DNA, 26 bp, Homo sapiens
tgctaatgcaagtcaggagcagcatc

SEQ ID NO: 72081 - DNA, 26 bp, Homo sapiens
gctaatgcaagtcaggagcagcatcc

SEQ ID NO: 72082 - DNA, 26 bp, Homo sapiens
ctaatgcaagtcaggagcagcatccc

SEQ ID NO: 72083 - DNA, 26 bp, Homo sapiens
taatgcaagtcaggagcagcatcccg

SEQ ID NO: 72084 - DNA, 26 bp, Homo sapiens
aatgcaagtcaggagcagcatcccgc

SEQ ID NO: 72085 - DNA, 26 bp, Homo sapiens
atgcaagtcaggagcagcatcccgca

SEQ ID NO: 72086 - DNA, 26 bp, Homo sapiens
tgcaagtcaggagcagcatcccgcag

SEQ ID NO: 72087 - DNA, 26 bp, Homo sapiens
gcaagtcaggagcagcatcccgcagt

SEQ ID NO: 72088 - DNA, 26 bp, Homo sapiens
caagtcaggagcagcatcccgcagtt

SEQ ID NO: 72089 - DNA, 26 bp, Homo sapiens
aagtcaggagcagcatcccgcagtta

SEQ ID NO: 72090 - DNA, 26 bp, Homo sapiens
agtcaggagcagcatcccgcagttaa

SEQ ID NO: 72091 - DNA, 26 bp, Homo sapiens
gtcaggagcagcatcccgcagttaaa

SEQ ID NO: 72092 - DNA, 26 bp, Homo sapiens
tcaggagcagcatcccgcagttaaag

SEQ ID NO: 72093 - DNA, 26 bp, Homo sapiens
caggagcagcatcccgcagttaaagt

SEQ ID NO: 72094 - DNA, 26 bp, Homo sapiens
aggagcagcatcccgcagttaaagtt

SEQ ID NO: 72095 - DNA, 26 bp, Homo sapiens
ggagcagcatcccgcagttaaagttg

SEQ ID NO: 72096 - DNA, 26 bp, Homo sapiens
gagcagcatcccgcagttaaagttga

SEQ ID NO: 72097 - DNA, 26 bp, Homo sapiens
agcagcatcccgcagttaaagttgat

SEQ ID NO: 72098 - DNA, 26 bp, Homo sapiens
gcagcatcccgcagttaaagttgatg

SEQ ID NO: 72099 - DNA, 26 bp, Homo sapiens
cagcatcccgcagttaaagttgatgg

SEQ ID NO: 72100 - DNA, 26 bp, Homo sapiens
agcatcccgcagttaaagttgatggc

SEQ ID NO: 72101 - DNA, 26 bp, Homo sapiens
gcatcccgcagttaaagttgatggca

SEQ ID NO: 72102 - DNA, 26 bp, Homo sapiens
catcccgcagttaaagttgatggcat

SEQ ID NO: 72103 - DNA, 26 bp, Homo sapiens
atcccgcagttaaagttgatggcata

SEQ ID NO: 72104 - DNA, 26 bp, Homo sapiens
tcccgcagttaaagttgatggcatag

SEQ ID NO: 72105 - DNA, 26 bp, Homo sapiens
cccgcagttaaagttgatggcataga

SEQ ID NO: 72106 - DNA, 26 bp, Homo sapiens
ccgcagttaaagttgatggcatagat

SEQ ID NO: 72107 - DNA, 26 bp, Homo sapiens
cgcagttaaagttgatggcatagatg

SEQ ID NO: 72108 - DNA, 26 bp, Homo sapiens
gcagttaaagttgatggcatagatgc
